United States Patent Application Publication US 2011/0191912 A1 - sequence listing, part 7

SEQ ID NO: 7493 - DNA, 3000 bp, Unknown
  misc_feature (1)..( 3000): cDNA_ID_3410254_gDNA_ID_1621148_Annot_ID_173150 3000 nt of promoter + ATG
ctcgagtcttgtttgttgttcttctacattggatggtcgttatacacgtgtgaaaattcaaaaatgttgttcctatcttgcacttttctgccgccaacataaaagtgttatataagagactaattcaactagaggtggcattttctctgagttatgcagtgagttcccaaaaaattccaaggaagtctaaatagcctacaacaaatattaagcctaaaagagatttgaaaagtaattgaaaagtaatgagcagtgacttgcttgggatttcagtttcaaaatagtttgtcatatgttttgttttttccccatgaattgttggatttagtttgtctctcgctgaatcaataaggtttgctaggaaaatcgaaatcaaacactaatttcagcacggacacaacaaacatttgttttctaatcgagataaattttaacatcaattccgttatcaataagggactggacaacagctctgattttcccttcaaacttgtcttggtcccttggcgtataagaagccgtgtacacatcagcttcttttgcacgctcagacaagatcctccctatggacatacatgccgggatatcacatcttgacctcagaacagcttttacgtctttagagtttgttcccgcaacagcaacttgcctacatgtaacacggtgcgtgagagatgccgaaacaaagcgctttgagatgaagacatctagagtgaacggctccatgtatgcaactgttcgttgcttgaacgacacatgcttgtctggattcttcgactttttctctttttggtatgtgtatggccggcttgtgtcgtcatccacgtagtcttctacaccaaagaagcttcttggtgcaaaaacagtctgtcaagaatggtaaagccaagtcaaaatagaaacagatacaaaaagaccaagaaacgatagctgaaaagactcaatacttagaacagagctgaacttaatgattgcaaagtaggctcagtaaatcttataaaatccagctattgcatactgactcatctaaatggccagactaaaagtattggcactatcaaacaccaacaaaccattgagaggtggaacaatccagtcaattactttaatgagctacaatttatctaactcaccgtttaactaatttgggttctgctcatacaattcatctaacctctttctagcaaacagcaactaaagctaaagggagtggtctaacgtcggataaatcacattcaacatcgtttccaagcagatctagttatgagatttcaatcaaacaggagtcacaaggaactgcacaagacctgattcaaaagaatacgcttcctctactaattctactaaaaatcaaactattcagtcaagtaaacaaagtggaagaacggtggagtgtacccgtccattgtggaatcgacaactggtttggcacatgaaaggtctaagcttttctctgttacttccataaatcgccgctttacctatagaatacttggcaaccacttgcttcaacattatatctgcaaccacctacagaaaaattcagtcactaggaataatagtgctcataaagacgttctatgttctatgatatagctaactgctaaaactaaattaaaccggaggtcactagtcaataaggatagtagctttgtcacaaaagtatgctttcttttagtgtccattccattactgcatcccaacatattgaagacttcttattgcccagaaaacgaaaccatttgtaataagcaatagagaggcaaacaagttgacttctctcaataacaatccaaaagatagagagcagctaaaagcttgtgccaagaatttataatttctaattgccaacatgatatcaaattagcagctcgtaagctatggaaatgaaaagtattgaaaagattaacgaatatgatgaccttaaatcatttgaagaacacaccccacgatgtgatcataacaaaattcacttcttttatagaaaatttgactcgtcttcaattcaaatgccatggattctgtatctggaagctcaatttgaaataaaaatacactaacgcacctggaaatcgatggctagagcacgacgggttgatattgcagaggatactacactcaaagaaagctgaaaacccacccacggagatagaagaaactaaaattaagattcagtaaacgaaataggttaggtgcttcgcaatggctgccaaggttgaaacgggcaattgttcttcggagctccaaacattgaagatgaagattttctaaaaccctacaaacgcaaaatttggtcttccgtcctcggaaagttactcgtttttcattttctccccataaaaagctaattcaactattaacacccaagggtcaccggttttattatggttttcacaccgggttaaggacattaatttggaatcttgaccgacttagctggttgaaccggaccgtttccggtttaagaagaataaagacgcgggcggggttgaattaaattgattttcagaggaaccgaaccttcacctcacgactctctcactgcctcactcaccgtcaccgtcgccgtcgccgtcgccattgctttctacttcgccgtgcctggttagttttcggaatctgattttcatttccatttcgttccttctgaattctcaactttgtctgcgattttcagaggtagcgaagttcgtttatggaagcttctgctgagtctaggtttgtggaagctccattaattttggaatttactggaatttccggggattcttcgtcaactactttcaggacttgttgttgattctcacagcgtgatcctgagaaaggtattttacttttatgctttgttcttttgaatttcagattaagatatataagaatccgttatacaaaattacaatgaagattatatgaagtttcgaagtttcaaggcaaagttaatatgcacgaagtttatcagctccatcaaaatttcagggtgccaagtattagccattggaa

SEQ ID NO: 7494 - DNA, 3000 bp, Unknown
  misc_feature (1)..( 3000): cDNA_ID_4262586_gDNA_ID_1621148_Annot_ID_173147 3000 nt of promoter + ATG
aaatacccaagacaatatattcaaaaatcgtgagatgaaatgcgatacaaaatcaaacaagatatgacatgccaatgatttttttttttttttttttttttaaatcatggtttaccggctgtgtcgaaaatacgagcagcataagcacttatcgccgaactcccacaaaattgttgcaagagcattaggcccaatccaatctaatcgttttcaacgaattaataaacaaacaaaaacaaattaatctttatttatttcactaaacaagttaaaacatttttttccgttaggacttgggagtatttcattcatacgtataggcagaatgttagatctacatacgcataaatacatgtctatctgtttattaagttgatcatcaataggtcacaaaactagataagaactcgatctcttctaaattatttgtataaatgataggtatttgatgagacttacgattaacggatgtgcgtttttcatattgaacaaatcttttagtccacttcgagattctcttctagaggtttccactgtttcctgtttcacattttaaaccgaattaatagttaaccaaaatacgtatatgttagccaaagtagtagtagtattttcggaacaaacaataatactctgatttcagctgcttcttcgagaatatcaccattttctcctcttagcctcttcaaagtaacctcaagctctcgttctctaccatacatagcctaagatgaacattaatatgtagactgtaccttttaaatataatattaccaattaaacaaataaaaaacaaactttaagtgtgtgaattaccagccatctaggtgattcaggaataaaaaataaacatatcatttggataccacatgggattgcacctagtcatagattgaaaatcaagaataagttaaataatgtgaattaagtacacacattataattttttatgatttgagatatagttcatttagagaaaaaatatagttacttaaaagagctaatgttctccaatgaaaaaagtttccggtgaagaacatgagcgatatcccaaaactttgtagaagctgcaagttcaaacgcaagataacaataataaattaaatattctgaaattataagctgtttgatataatttgtttcattcttacttgattggaaaaagagaatcctccacgaaatgctttgggcgtaatttctgctatatatacaggaacctatttgttttgatcaaatcaaatggtgtaaaacgaaattactatatcaacactttataaaagtaacaaataatttgttttcaaaacagatgataaagttaattaccacataactaatgagaccaaccccaaaccccaagaagcctcgaccaatatttaacagcattttatccttgaaaataaaccacagcaaatgaaatgttaactttattaaaaaatactaaacttgtgaaaaataaatttaaaagatggagatttggagaaacaaacatgtgcaaaggctacagcgagccaaccaaagatgcagaaaacatccgcgatccacattgtctgcgatcaaagagatgaacaaatcataacgtgtatattacgtcatcttagaaggtcctacaatatcaaaaacaaaaaaaaaaaaacagtggcataataacatttgaatacgaaacaaaatttaattacctgtcgacgaccaataactgcagcaatttttccactaaacgcggccgtaatcattcctcccaatgtcattaccgatgtgaaaaacgaatactggccaaaatataaatagaccattattttagtaaattaggagtaataattgattatcgatgtaaaaaataaaattagttattgatttggtcacacacatggatgacttacatctgcaacggaaagtcccagttcttccatgattttggactgagcaggcgatgaatatgacatcttcaaattatgatagtgcacaaaattaggccacaagttgacatcaactcaaaatcacataatattcaaataacaattttgagacaaaacagctattgaacaattaccaaattcaaaacagattttgattaaaaaaataaaaattccaatctgaggcatgttagttgagatccatgaggaacactagaaaaccaaatgaaagaaaaggaaagagtgatgatgaaatctcacagcgcagccataaacgaaagagccagtgacagcgacggaggtactaagaagaagaccacaagtgatggaagaagagcttcttgcttcttcttgattattcaccagaggtgttttcatacttccagattccatcttcttttgttccttctcctaattgcttttccctgtatttctctgttctttaatagtcttcactcttgaagcttgtatttggcagtgactcattggtcgtgtcccatgtgaacaactgttatagatatttgttgactatatatagtaagataatagaaatctctttatgtcggctatcgtataaattattgatttattcttgttgcttgatcaataaaggttacatcatagaactaaaatcatatgaaaccgaatcgatcaaccctggccatcttttaaataaccatcaatacattgggatgatcaatccacaataaatgtattgatgtaaattaaaaatatgaacttgtaacagatcaagattcagggtctaaaattatagaaagcttaataatggaggactatttcactaaaatcacttttcgtttgtacattattttcaaaaagtaaaaggagatgtacgaaccatagatcacataataattgaaagggtagatgatctgccacgttggcaatccgtgtgatctaaagtctaacaaatcacaatcaatcttagtagcctatacatatagagaagagcaaaaccctaaagcccactcatcttctcaattcccagatcatctacaatagtcatttctcttcgatttcttcaaactctcatcaaatcgtttatctgttctaaatttcgaagaagacg

SEQ ID NO: 7495 - DNA, 3000 bp, Unknown
  misc_feature (1)..( 3000): cDNA_ID_3050566_gDNA_ID_1621148_Annot_ID_173146 3000 nt of promoter + ATG
aatcatggtagcttatgcgagtgctcttcgcaatgtttctctagcaggaccaactctatttagcaatgtggtcgacaaggctgctcatactgcttcacagtcactctcacaaaacagtcccaagtactttgttctgctcatcattacggtaagagactgaacattcagatacgtaatgactttggcccagttcagatcgaatgtgcatctgttactagtaaatctatagcttcaatgacaaaaaaaatggatgtgtgaacaggatggagtccttacagacatggcgggtacagtagatgcattagtgagagcttctgatctcccgttgtcagttcttatcgtcggtgtgggaaacacagacttcaaacaaatggaggtacaagttttgttttgtcaagttaggttttatatctgtctctttgcaaatagtaaacatgcagtgacttgaccttgtaaatatttcagatgcttgatgctgataatggtcggcggttagagagttctactggtcgaatagctacacgggacatcgttcaatttgtccctatgaaagacatccatagtgagttttaaattccttatgtacaacggatagtgtaaagtgtttagatgcgttttggattggtagtaaatgtttaatttggtggggttgcaggtggactagtgtcggtggtgcaggcacttctagaagaacttcccggccagtttctgacctatgtccgttcgagaaagattaatccgatcggagctccagcaatttgagttcagcagcatagtctagtctctgttttttcttgcatagaattattttggtgtcaccttattaccatagttatcatcatgttctcaatttacttaggttggatttaaaccgtaaggtttgttagaaagaaagaaacaaaaaacagaacagaatttgcgaaatgtatatatattttagcttgtttgcatcacaataacatgatataaaccactgacggtctgacgcatcaaagtagatacgttggtaatatatgaaaatgttaaattatttgccgtctttcagatagacgctgttgagctttgcattattaacgaaggaaaacaaaaaaaaacatgggattctcaattgacacatgatttcaaaattaggcaattaatatttttggaaaaattagattggagatgcgggggatcgaaccccgtgcctctcgcatgcaaagcgagcgctctaccatttgagctacatccccattttgttaagtgttctgcgcttatctttattataacaattttcaagaactcgattcttggtaagcaaaaaaaactgcagatgaaggtaatttagcgagctaattcaggtgcgaaccaacagatgagggtaacttagtgaagttaattcaggattaccatgactgaggcagttaggcccaaaacctaatgagttttactccctgggtgaattaaaaaatgagtctggttaaattgaaacatgatcaaagcaatgtttagtattaggctccatgagttgcatgtatctgcaataaagaatcaagtatgcatagtttgtgtttcaaaatgtttctgggttgatatatcgattaattcagttccattgatacatgattcgttccgaaatatcatatcattcactaattaaacatacttaggcaaaagccaaatatacttagctttaaaacctaatttgatccccaaaaaacaccatcagggtctattttacaagttccgaatccaaacaagagaactgaactaagaagtctaagaacctcagaactcctgagaagcagatccaatatctcctttgttcttgccaaccttggatggcaaaagagtctgatgaatatttggcaaaactcctccattcgcaatcgtcacacttcccagaagtttgcttaactcttcatcgttcctcactgcaagctgaatgtgtcttggtactatacgtgtcttcttgttatcccttgctgcgtttcccgccagctccaacacctatcaacccaaaccaaatcaaaatcaaatcagtacaagatccaattcagatgtgaccaaatcgaaattgaaaaccaaattggaagacaagaaaaataaattacctcggcggcgaggtactcgagaacagcggagagatagaccggagctccggcaccgacacgctcggcgtatttaccggatttgaggaatctagcgattcttccgacggggaattgaagaccggctttagatgatcgagagacggatttggtggcctttggctttcctctgccacctttggttgttccgcttcctgcgcctgtactcatcgtcttcttcgaaatttagaacagataaacgatttgatgagagtttgaagaaatcgaagagaaatgactattgtagatgatctgggaattgagaagatgagtgggctttagggttttgctcttctctatatgtataggctactaagattgattgtgatttgttagactttagatcacacggattgccaacgtggcagatcatctaccctttcaattattatgtgatctatggttcgtacatctccttttactttttgaaaataatgtacaaacgaaaagtgattttagtgaaatagtcctccattattaagctttctataattttagaccctgaatcttgatctgttacaagttcatatttttaatttacatcaatacatttattgtggattgatcatcccaatgtattgatggttatttaaaagatggccagggttgatcgattcggtttcatatgattttagttctatgatgtaacctttattgatcaagcaacaagaataaatcaataatttatacgatagccgacataaagagatttctattatcttactatatatagtcaacaaatatctataacagttgttcacatgggacacgaccaatgagtcactgccaaatacaagcttcaagagtgaagactattaaagaacagagaaatacagggaaaagcaattaggagaaggaacaaaagaagatg

SEQ ID NO: 7496 - DNA, 3000 bp, Unknown
  misc_feature (1)..( 3000): cDNA_ID_2044472_gDNA_ID_1621148_Annot_ID_173144 3000 nt of promoter + ATG
tgttaaaaagttaacatgttatttactgtgattatgtgtaggatattataatgcttaatactggacgactcttcttggggtttggggttggtctcattagttatgtggtaattaactttctctccccttttcatttagacaaaatttctagtcctttattagagtgttaatgtcgtattactccattttatttataaaataaataggttcctgtgtatatagcagaaattacacccaaaacatttcgtggaggattttcttattccaatcaggtaaataacaaatagagacacaatatcaaataacttatagtaatatctttcaataaattcataagcaaaatatttattgtcatcttgcgtttgaacttgcagcttctacaatgtcttgggatttcactcatgttcttcaccggaaactttttccattggcgaacattagctcttttaagtaaccatatttttctcatctgaactatcttaataataagatttgtacttgagtcatattcctagactaattcttgatattcaatctacgatcgactaggtgcaatcccaagtgctttccaagtgatatgtttattttttattcctgaatctcctagatggctggtatgtttaacactttcagttgttttattactattttataattaatttactggtatagtactataagcacgatttacatattaatgttcctctcttaattaggcgatgtatggtcaagatcaagagcttgaagtttcgttgaaaaaactaaggggagaaaatagtgatattctaaaggaagctgctgaaatcagagtaagtagtattcttctttgtctaagaaaacatgttatatgaaaacaatttaacagtttaatagtatgaaaaaaagaattaacaccaaaatatatatgaaacaggaaacagtggaaatatccagaaaagagtctcaaagtggaataagagacttgttccatatcggaaacgcacattcgttaatcgtaagactcatctaacatcattacaccaatcatcttttatataaagtaaatatttgtgcaactatatatatgttatttttttgtttattagtttcgttgaaaatggttagattggattgggtttaatgctcttgcaacaattttgtgggagtgcggcgataagtgcttatgctgctcgaattttcgacaaagccggtaaaccaaacaaatcaagcgcatgtcacagctggtttaatatgtttgtagtcaacagccaataccatctcatgatttttaattatactgttttgtgtaattaggttttccaagcgacataggaacaaccatcctcgcagtgattctggtacattattctctttgttactctttatcatctatttgtctttgaatatttcatctttatgatttaatcacaacttttttcttttgtaaagataccgcaatctatagttgtcatgttaaccgttgaccgatggggacgccgaccacttcttatggttatcatttcactataaaattcattactgatttccttagctaaataatatttttcagatttgattatcattattgttttttattttgcagatttcttctatcggaatgtgcatatgctcattttttattggcctttcatactaccttcaggtttagcaaaacttaactacttaatcgtagtaactaaattgcttcctttagaaaaataaaagagtattatttaattatgttttcctcggtgagcagaagaatggtgaatttcagaagttatgttccgttatgttaatcgtcggtttagtggtacgtaaatgccaaacttactttcagtctattaataaattcaaccaatggaccaaccggtttataaaaaccagagcactaatcaaccaagtcatatatgttaaccagggttatgtctcatcctttggcattggcctaggtggattaccatgggttataatgtctgaggtatttgtttacttatcttttaaactaaacttaacaaataaattaagttttttgatatgaaatttcataattgattttcaaaatttggcagatatttccggtgaatgtgaaaatcaccgccggtagccttgtaacgatgtcaaattggttttttaattggattatcatctatagttttaatttcatgatacagtggagcgcttccggtaagattccacacatcaaatataactgctcaactatttagtaaacataagcgaataatttatatagttaattttggtttgttggatttataggaacatatttcatattttctggagtttctctggtgacgatcgtattcatatggacattggtgcctgagacgaaaggccgaacactcgaagagattcaaacatcattagtccgactttcgtaaaatctaagtatggattatacgtaatgttaagtctcttgaatagtctttttaaccgctgtcaaaaagaaaagaaaagaatagtctttttaaccgtatattaatgtttggttaaataagcgttttctctcactttgattaaatagtaataatggctatgattttacctataggatttaatatttgaaaactgtgatttgtgagctctaatcttgattagagtgacacatattaaagtgtaaacgttaaagtaagggagatgagccgtcgcaggcaggctaatgtagagagattaacgttctgttatgattaattaaaattatgaattgtccaatcataaatgcctttaacttgtccaatcataaatgcctttaacttgtccaatcataaatgcctacaacaaaaacgagtgggagaaaaagaatcaaaaagactacagtagaaagtagaaggggacttagtaaaaactatcagaatctgaaggaccgagttgtaaaataaagaaacaagtaaactgccaagtataaaaggcgacaagctactctcaagcggctgtgtttgtcgtgggtcggtttataatcattatctcccccggaaaacttctcggagaaggagaagaatg

SEQ ID NO: 7497 - DNA, 3000 bp, Unknown
  misc_feature (1)..( 3000): cDNA_ID_3050574_gDNA_ID_1621148_Annot_ID_173142 3000 nt of promoter + ATG
ctctgagcatgtgttgattcgattatcaatcggattaaagatttgaatatacaaatcagattaaatcaggagcttgataaggagctagttcaaatataataatcaaaattatggtaaacctgaacccattttctaacagcgaagaggggcactggttcggaaaccaagcaaggtggatgcggtgacgggaagggaacaataaaatgaacatatgaaaaccatttagtagggtttaaaaatgtttattatttttggtagaagaaggttaagacttgagaccatatagacagctgatatattcatatacatgggcggttcttggaaggatctaggggagcaaatgtcccatgttatcggctgatgtattagattacatgcataagcgttattgttacgatcatgtgaagcaaaaacacggcgttcgaggatcaacagacccaccacacgtaagcgtctctcaaaaatcaaaattggtctgctacaaacctactttcccgccagctaaaccaagattattcattttatttttattttttctgctacacaaaaacaaaaaactcatctaagttggtatttattgtttatataatctttgtttaaatgtttgataaagagctcactaactttataagtaattagctagtatattttgtttagcaaaaaaaaaaatagctagtatagaaaaacaagccaaataatttatttattttttggtcaaggaacaagcctaataattatggttgatatttttgatgtaattgacatcgtaagtatgtaatacgtcgtcctccagtaaaagtgttgaatggtgaacgacaattgtagagcgataacctcattttttttaggtaaatttgttttttaatccatcatatcaattctttcaaagaaaaaatgaaccaaccatttgtataacgtgcgttcaacctgttacctctacatgcagcataaaatttgtgatagtgacgaataacgttgattactctttgtacttccttgattttagtgaatgtaatgttgctctatcgaggtggagcctcgtaacattggtaaggctacaaaaatgaacatcgctctctctcttctttaagcattcctaaatcgtgtttttgtttttctttttggcagcatcttttattttgtttaaacgcctaaaactgcctttgatcttttttcctttttattgatagaatgagataggacaacaaataccttttttgccgggaaaattcaaaggttgttgatgattccttgtgtccgcaactagaaagagaaaagtctgtcgtatcaaattagatattgacaaaaatgtcaaaatatatgaagaagtgtgaggggaaaccgttgattgaacgtaagacatttgaaaaatggatatgtagtagtttctagatttgcttacaaggaatgttgagttgtatcattttctctaacgcaatagctaacgtgcacgacttttttttttttatgtaaacttcaaacaaaccacgatcaacgcgtttactatttattgcatggaaactatagcaagtgtgacaactcatatcaatttgtgatgaattgattaactacgtaggtagtataatatttgtaagttggttattcacgtaagaaatattgtattttactcttatccagattatttaagaactcgtttttcaatataatgtttgacattttatactcgagttaataaacaaattagctttacattgacaaaattctgttgtatattatttataattaatcttgactatgggtaattaaataatatttttttggaaaaaaatacattggattttctcaaatgatcacacttctattaaaaccaaaatagtacgtatacgctctagacgattctaaatagatgattaatttggctcgattcattaattcaaaaaataataatatttagtgttttaaattagaattaaaatattaaataattatcggatatttcagtgttttaaattattgaggatgatttttgtttagtaatgacgtcagattgtctaaggaatagtttgggaaaaaaatctgaatcaaatatgactaacaaatggttattggttattgaactggaccataacaaaaagacacacacacaaaaaaaaaaactttttttatctggtttgctccatggataagaatatagtagctaggatatcctgatctttagataacggtagaacatgtggcatgtgtttattgtttatttttattttattttgagaacaaaatagttacattgtttggttatatataaaaaaaaaacagaccaaaaagacaaaaccaaagcttaaacaaaaaaagaaaagaaaaacttaattagaccggttaacactaaactggtttatgtaaaacggattcataaatgtatctagacattcacttacataaaattcatcacaaaatttcacccaattacggttttgattcggtatagggaccaccttcaaaattacccaataaataaagagtggataacaactagcataaaataatcaaagcatccactaagacacaaaacacaatttcataaagatgatgatgaatcacataactttaaataaatattctttcaaaaaggcaaaacttttaaataaatatcattcgcctgtcggccaagaaaaaaaaaaagtaaacaaaaataaatatcatacgtattgacaacaaaaaattcatacgccagtccaattacaaattacacaatatttaaaaatttaaataaggaaaacagaagaagatacaatttcaaattaaaaaacaaaatacgtgtatataaaattgaataaaaccccaacagaaacgtgacacaaaagaaaagattggggaagctgacctctgcctttcctcctccattaatcaaggaatataaatcagctttaaactcagtcctcttatggaagacaaaaaagcaaatatttattcgtaaatataacttcagaaccctttcaacaaaactctctctgttctttctccgtggagaagttaaagatg

SEQ ID NO: 7498 - DNA, 3000 bp, Unknown
  misc_feature (1)..( 3000): cDNA_ID_3050578_gDNA_ID_1621148_Annot_ID_173141 3000 nt of promoter + ATG
cattgtatatttaacattttttttttttacttttactagttgctaatgctattaatcaatctaccagttctctgaaacctgtagacccacagtttctactttcggacttatttgttctgtatgtgttccacatttccggcctcattcctaaaagttgaattgatttgtgagatatttccttttcaaaaatcattgttcttttttatattttctcgatagcatagggttttcagatacggatagtgatagggcaacaaataaaactaggttaattcttatcctctctaaaagttagtaaagaataaagacaatttatttccttttaaggttccgaaaatgaggttttctaattctctccctagacgtaattaagctatcgctgtgccaaccagatttgtggtaggttacgtgcatctgttgatctatttgcatacatcataaagatcaatcctttaattgtttaaccacctttctgatatttcaattatcttgactttttttttctttgttcgttaaaactattgaatttttagtcatttagtaaatatattgcaagtgctatccataaagatgttctttaaatctgattgcgaactaaaatatcttagttgacaacttgcacgtatcagacatgatttgtggaatcactttagtatttttcattaatcagaaaggaacaaagagatcatgtggaaatgctctcatgatttacgttttctcttttttttttttttttttttccttactttcgtcgatttacttctattttaaaattggaaagtgattctagaaatcgctaatcgactacacaatgtcggacggtcctaatcgttgattggtctatgcttcttttcatatgtaaatatttcgtggatgataaaaataagggattaagtaaaaaccttaactccattattttatttttcttacattccactatgttacttacgttccatttttaggagaagtttgaagaataacccaagttaaatgcgatttcatacgaactaacaaaactagttcattgagataaaattcaattgatgatgaaaatcaaactaaaaaaaacgaagctaagactgaagcataaaagagggtttttcaatgtaaatataattatttttgtttgtaattgtctacaatatgaactatacaaattttaattagagtaagtgaaaaataaataaattagagtaagtgatacatcaaggatattaagttattaacacgatgacaaaaaaaaaaaaaaaaaagttatttacacaaaccattgattaggtattcaatgatgggcctataaatgttggggctgggaagtccaaatctttttagacgttggtaagaaaatgaggcaaacccgaactttgattttgggatatgaaattgttttatattcttgcagagttgtgacagaaaggtccaaaacaaactttgttcaatgacttgatttctattgggccggcaatgttttcaatactcaagagccttttaatattcttaaaatagtttttttttttttttttctattttgcaaacggcagatgacattttgtaattttcgtatttgtttctcaaaattttgtatggacctagttaaatcttgaaaaataatataacataatcaaagttattatttttcacatacaagatacatgtaaagtataaccactaaaagcaataggttttgacttcatataaatgagtgaaatagctagaaggaaccgcatgtaaacggactgagtctgtacaaaccatgcttcagatttcatccagtaattaaatccttacatcaggaaatcaatcagaagaaacatttaggtatctcatgatttgcttaactttcttagattaatgtttctgcccttagtagcaataaagtaatctaggacaaaaaggtgtgggtctcatttttctcttttacagacaagtgatgaaaaagacatgtataatctttcatgccgctataccatgaaccttccgttcgacttcttcactctactgtttattgcatttctgaccagtagaacagataatccatgtatagaacagttttgcaaatataaattactggttagatatatatacgtatagtcaaatatggcgggatattaatcactttaatattcatttagatactaataaatggatcaacttcataggtgtggatccttggatgcacatgcatggagaatagtcaaattcaaatatatcaattcagaaaaacgaagggtggtcgaccaagagcgacttttcaaaccatcaaataattgataaggacgataaattttatttctttcaagttaatataatacatatataaataaacatatcaatttatatttggctcgaaaatagtcatatttaattttaaataaaataattgaagataacaactatacacacatatattcgtaaacgtaaaagcaaagatgattactatctaatttatctatgataaaaaatcagatccataatcaagttgactgtgcatgggtgactggatctaaatttctaaacaagacaaacctaagattaaaataaagacgttttgattattgagccgttttatcatatatatatacgcgggacgacctattctaaatctctaataatatttaataaaatgctacttgtgtttctacacaaaataataagcgaacacagtttgatttgcccaagcgtccaagaccacgaccaagtccactgaatattaaaaattgagcgaaaaacaagatttagaaaagtttttatgattttgttcaaaaaaacaaaaaaaatatgacgtgtaaattataaaatatcaaagtgtccagagaccagttgacaaaaacatccaatcctcaagttgcataagttcgagctgctcagaaacttcgaagttcctcacaactcttctttacccacttttcttatatctgctttccaaaacagagaaaccccaagaaaagaaaaagaaaaaagaaaagagaagaaagaagcaggaggagactttttggaatg

SEQ ID NO: 7499 - DNA, 3000 bp, Unknown; identical to SEQ ID NO: 7491
  misc_feature (1)..( 3000): cDNA_ID_1817900_gDNA_ID_1621148_Annot_ID_173140 3000 nt of promoter + ATG

SEQ ID NO: 7500 - DNA, 3000 bp, Unknown
  misc_feature (1)..( 3000): cDNA_ID_2044488_gDNA_ID_1621148_Annot_ID_173137 3000 nt of promoter + ATG
cttaactgcttggctgcgcttggaaccctccttaaactgcctccggcgctccttggcctaaccgttcttgcttggggaaactcggttggtgacctagttgctgacgtggcagttgcaaaggcaggtagaccagcaatggctatggccggttgttttgcaggtccaatgtttaacatgcttgttggacttggatcggccttggtgatgcaaacagctaatgtatatccagacgcttacaaacttggattccatgtaggtattgtgatagctttcgtcttcttgttgcttagtctaatgggatctctgttggtaataacctggtctagattccgagttccgagattctgggggatctgtcttgttggactgtatgttgctttcacatttgttagtttgatcatcgccagcgtttcaacctgatcatatgcgtgaagtctgcacattgaataatctagggtcaaccagggttcattgtttaggaatttttgttgtctagaagggaattgccaaaattttgagctcagctgatggccaccgccagaccagtaatcttcgaatcccacaaaaagttcttgtgatcgtccgagccagattagtaaagtttggtagataggtgatggtaaaatatatgtgctttgggagaagattttgactcccccatctggtttacttttccattgattgtactggtcttgtttttttgggtctgttatatatgtataaaccacacatttgtattcttttgatattaatgagaaatacttcattgatcctagaatgtgtattagagcagaacaaaatgttgattctggttcttttttatgtgatttgattctctgtgaatgccaaatatgttgtgatacaacaaaactacttgtgaaatttgaacctccaaagaagataattaaaggttgccaattaaatcctaagaagataataaaaatgaattaattaatgtaagagataaaacaaatcatgatctgacaagagcagaagaatcttgacataagcccaatggttgacacgacacccagcttttaaagctctttccacttacttccccttgtctttctaaattcctcctcattgttaaagtcgaaaaaagggtaaagcagcaaaaccctaataaaatcacaacaaattaacacaaaaaaaccagatcttaaaactctctctacccaccaagaggatcaaccagtctcttccccttcagattctcctttccacaggtcactctcgtttgcagattctttttttcaatttgacttgttcttacttatatattgtggaattcacatgataaaataatatgcttggtgttgtaggaacaattctagttgttctgtgttagcagattctttgttctgtctattttgaaggaaattaaaggcaatccctttcgatattttcctgttttccttatcaaatttatgggttggaataagtaggttgatgtattgtcttttaattcgaagctcaattttcatacttattgctgtttagatcttcaaggttaatctagaattacagattagaccatatataaagtaaattcagcagattcttatttatgtaaattgtttgttagcaaccttatctccttcacatttctttaaaattctggtcagatgtttcttaagagcttagaatgaatcccaaagttctgtttttttattctggtagtgaatggatcaacaagaccatggacagtctggagctatgaactatggcacaaacccataccaaaccaacccgatgagcaccactgctgctactgtagcaggaggtgcggcacaaccaggccagctggcgttccaccagatccatcagcagcagcagcagcaacagctggcacagcagcttcaagcattttgggagaaccaattcaaagagattgagaagactaccgatttcaagaaccacagccttccccttgcgagaatcaagaaaatcatgaaagcggatgaagatgtccgtatgatctcggctgaggcgcctgtcgtgtttgcaagggcctgtgagatgttcatcctggagctgacactcaggtcgtggaaccacactgaggagaataagaggcggacgttgcagaagaacgatattgctgctgctgtgactagaaccgatatttttgatttccttgtggatattgttccccgggaggatctccgagatgaagtcttgggaagtattccgaggggcactgtcccggaagctgctgctgctggttacccgtatggatacttgcctgcaggaactgctccaataggaaatccgggaatggttatgggtaatcccggtggtgcgtatccacctaatccttatatgggtcaaccaatgtggcaacaacaggcacctgaccaacctgaccaggaaaattagcaagaaactgtgagtcttccagcttcttttaggcctaccttgtagtcttggggttttgtttctgttttcgaataatggtaacctttgtataacttatttcagtatcgtctcagtttggtactatgtcagttttggtattcttatcttattgaagtaaaaatgtgatagtgtattcgcttttctccctgcagcgttctagtctcgtccaggtgaaaggagggagaccttagacaagaaaatgaaaagaacatatcagaattgtcaaattgggtgttgtagaagaatctaaagtgtttatgtctatcgatccttttctaaacgagaaatttagggatgaaccagaaagaagaatgtataaactgtaagaaacaagtgtgcttttgacaaaagtttttttatttgaatgttaatttctgtgtctttatcacacatattaagttattatccacaaaatgtatctcattggatatttaaaacaaaaggacaataatattaaggaaaagacaaaatagaaaatgacttggccactgtagccgcgttaataatgtgatagcttttatctacaagaagcgttacttggtcgtcatctaccttctcagaaagggagctgcatcaatg

SEQ ID NO: 7501 - DNA, 3000 bp, Unknown
  misc_feature (1)..( 3000): cDNA_ID_3050586_gDNA_ID_1621148_Annot_ID_173133 3000 nt of promoter + ATG
gcgaatattttaaggtaacaaccagtacaacccacatctgatgtacccattgcgaaggacaaagagaaagatgaagaggacaggtccatgtgaaatataatagcttattatgttgattttacttacaaccattaaggttgcagcatggaccaagaaatataatagctttatgatgattttaggcaagttgctgaacttgattcctatgaaaaatgagatgcacgcatgtcaaaagttcttcaagtgaaagaaaagtgctatttgataccatcttagttttctctcttcagttattaactatttgtagtagtggactattcgggaacaactcatttctaatgaaattttaaagcttggcattatgtaagaacacatatatatttcagattaggttttcgtttgactgacgagaaacaaaataaagaatgtgcaagaaaaattggtatacaaattatttaactatttttacaaaactgtgtaatcttccaaacctaatttcaatgatattatacttctggtgacgtgaacgttctcgtaaaacaaaaaacaaaaatcatcgaaattatacttacggacaaagagttatggactatctattttggaaggagaaaaagagaaccatcagaaattgcctacaagagaaccatcaatgataaactcagattttgacttttgtacccgaaagagaaagaaccatcaatgaaactgcttgcgcgttagtctcccaatatttttcccagctttgatgtttccttaaattcctttttgggcaaggttacaaagaactaggctatgctatattgtataatctaagcttttcactttgattgatttcatatcaaaaaaaaaaagaaagaaagaaggagcatatgtgatgtaattggagagttgtttagactaagagaaaaatgtattcagtggaggctaaagaaattcttctcgaaatctgatgcaaaacccataactgaaagaaaagaagaagaaagaactctttgaattagttcccgagccaaagatcatatacataaccagaattacgacgaaggagttacggatgtttaggacgagagccaaagatgttctaacaatatgtaaccaaatgaagactttccaaatattaaaaagagcccttatgagataaaaaaaaaaaactttgttggcctgtttttcaatgcccaaatatagcgatcaagattttgagatgaaagttatgaccattaaaggagtatatatatccaattgtccatactagccagcgaccgtgaatgctgcccaataaccaacaagccaaaatgaccattgtttacaaatgtctttctcatttgctgttttccgacagatagagtaagtgtatatatagaatagtactgaaagagagggccgggggacttatatacgttttgaggaaaaagataaacaacattagagtaagagcgagatatatacacttatataaagtcatgtctataagaaagttcaaatccaacttaaaaatatatactcacaacaaataaaagttacatcacttcgattatttagagtttataaaactaattagaaaccgaactctttttttcttcaaggtcgtgttttggttttaggcttttagccctaatttacaggtctttctaaggctaaatctactataaaatgtaattgcatgcctagggttcaaacatgaagtctcctctccctcaaataatgtcaacttggaagacaacacgattgtctccctgtattacatgtctaccgagaatagatgtacaatgtaatttcatggattatgtttaacccgataataaattggtgtgggatgtaatgatttattttctttaatttaagaaattataagagttgacacaataaaaattagagaaaaaaaaaacatggcttttctttttactttatttatttaccctgcttcaaaacacaagagaataagagaaaagtgtattttgaaacgtttttgaatgttagtttggttttgtttgatttatagtactgtttaacatcagaaaagacaaatgagtttaaaaaaataataccaaaaaaagaatttactagatacaattttaaagtggaaatatttttaataacttggatcctcgtctaatttattcataacatttatgtgatatattatatatataggaaatgatttattagatagttgactaaaactatatattagatgctattatttgcataattcatatagttatttattatgaaaaaagagaagaataatcagttatgtaaaagtagaattttttttttttttttaaatgttatcggaaaaactgtatacagtaataaaaaagagaaaaaaaaaaaaaaccatatctttgtcgatggattaaaaacaacattttcattacgcagcgcttcttcgccctcagattcttcttcaccttgaaagaccattaacatcattccttgcccagatccaaacaatgccatctccactctctctatttagggttctctccaacttttcaaatccctaattcttgctccctcccttcaatcaattccgatcatcatcgaggtctctctactccccgaatttaaagatcagagccgcgacttcctctgccttcttttcctcggaatttttcagctacgttttccaggtggtgtgtattgtcaatcagttgacctttgcttttgtagccagatcgttcgtgctttgagtttagggctcttttacaaggtttcgtgttggtggaatttctctacctaggtttgggggaagagttcagtaatttcgttgtagatcgtgatttgggcttttagggtttcggtttactggttgctggaatttatggtagcgttattgaattcggactctctgcatgtgtaagcgttgaagtttgaagtttcaccgggttttgtttcttctgctgaagagtcgagattattttacgcattaagaatcgattcagaaggtttttaggaattagtttctgtggattgtaactatataactactgggagggg

SEQ ID NO: 7502 - DNA, 3000 bp, Unknown; identical to SEQ ID NO: 7487
  misc_feature (1)..( 3000): cDNA_ID_1817928_gDNA_ID_1621148_Annot_ID_173127 3000 nt of promoter + ATG

SEQ ID NO: 7503 - DNA, 973 bp, Unknown; identical to SEQ ID NO: 7483
  misc_feature (1)..( 973): cDNA_ID_4262282_gDNA_ID_1621148_Annot_ID_173120 3000 nt of promoter + ATG

SEQ ID NO: 7504 - DNA, 3000 bp, Unknown
  misc_feature (1)..( 3000): cDNA_ID_1817892_gDNA_ID_1621148_Annot_ID_56814 3000 nt of promoter + ATG
gcatgtgttgattcgattatcaatcggattaaagatttgaatatacaaatcagattaaatcaggagcttgataaggagctagttcaaatataataatcaaaattatggtaaacctgaacccattttctaacagcgaagaggggcactggttcggaaaccaagcaaggtggatgcggtgacgggaagggaacaataaaatgaacatatgaaaaccatttagtagggtttaaaaatgtttattatttttggtagaagaaggttaagacttgagaccatatagacagctgatatattcatatacatgggcggttcttggaaggatctaggggagcaaatgtcccatgttatcggctgatgtattagattacatgcataagcgttattgttacgatcatgtgaagcaaaaacacggcgttcgaggatcaacagacccaccacacgtaagcgtctctcaaaaatcaaaattggtctgctacaaacctactttcccgccagctaaaccaagattattcattttatttttattttttctgctacacaaaaacaaaaaactcatctaagttggtatttattgtttatataatctttgtttaaatgtttgataaagagctcactaactttataagtaattagctagtatattttgtttagcaaaaaaaaaaatagctagtatagaaaaacaagccaaataatttatttattttttggtcaaggaacaagcctaataattatggttgatatttttgatgtaattgacatcgtaagtatgtaatacgtcgtcctccagtaaaagtgttgaatggtgaacgacaattgtagagcgataacctcattttttttaggtaaatttgttttttaatccatcatatcaattctttcaaagaaaaaatgaaccaaccatttgtataacgtgcgttcaacctgttacctctacatgcagcataaaatttgtgatagtgacgaataacgttgattactctttgtacttccttgattttagtgaatgtaatgttgctctatcgaggtggagcctcgtaacattggtaaggctacaaaaatgaacatcgctctctctcttctttaagcattcctaaatcgtgtttttgtttttctttttggcagcatcttttattttgtttaaacgcctaaaactgcctttgatcttttttcctttttattgatagaatgagataggacaacaaataccttttttgccgggaaaattcaaaggttgttgatgattccttgtgtccgcaactagaaagagaaaagtctgtcgtatcaaattagatattgacaaaaatgtcaaaatatatgaagaagtgtgaggggaaaccgttgattgaacgtaagacatttgaaaaatggatatgtagtagtttctagatttgcttacaaggaatgttgagttgtatcattttctctaacgcaatagctaacgtgcacgacttttttttttttatgtaaacttcaaacaaaccacgatcaacgcgtttactatttattgcatggaaactatagcaagtgtgacaactcatatcaatttgtgatgaattgattaactacgtaggtagtataatatttgtaagttggttattcacgtaagaaatattgtattttactcttatccagattatttaagaactcgtttttcaatataatgtttgacattttatactcgagttaataaacaaattagctttacattgacaaaattctgttgtatattatttataattaatcttgactatgggtaattaaataatatttttttggaaaaaaatacattggattttctcaaatgatcacacttctattaaaaccaaaatagtacgtatacgctctagacgattctaaatagatgattaatttggctcgattcattaattcaaaaaataataatatttagtgttttaaattagaattaaaatattaaataattatcggatatttcagtgttttaaattattgaggatgatttttgtttagtaatgacgtcagattgtctaaggaatagtttgggaaaaaaatctgaatcaaatatgactaacaaatggttattggttattgaactggaccataacaaaaagacacacacacaaaaaaaaaaactttttttatctggtttgctccatggataagaatatagtagctaggatatcctgatctttagataacggtagaacatgtggcatgtgtttattgtttatttttattttattttgagaacaaaatagttacattgtttggttatatataaaaaaaaaacagaccaaaaagacaaaaccaaagcttaaacaaaaaaagaaaagaaaaacttaattagaccggttaacactaaactggtttatgtaaaacggattcataaatgtatctagacattcacttacataaaattcatcacaaaatttcacccaattacggttttgattcggtatagggaccaccttcaaaattacccaataaataaagagtggataacaactagcataaaataatcaaagcatccactaagacacaaaacacaatttcataaagatgatgatgaatcacataactttaaataaatattctttcaaaaaggcaaaacttttaaataaatatcattcgcctgtcggccaagaaaaaaaaaaagtaaacaaaaataaatatcatacgtattgacaacaaaaaattcatacgccagtccaattacaaattacacaatatttaaaaatttaaataaggaaaacagaagaagatacaatttcaaattaaaaaacaaaatacgtgtatataaaattgaataaaaccccaacagaaacgtgacacaaaagaaaagattggggaagctgacctctgcctttcctcctccattaatcaaggaatataaatcagctttaaactcagtcctcttatggaagacaaaaaagcaaatatttattcgtaaatataacttcagaaccctttcaacaaaactctctctgttctttctccgtggagaagttaaagatgacgatg

SEQ ID NO: 7505 - DNA, 3000 bp, Unknown
  misc_feature (1)..( 3000): cDNA_ID_1817888_gDNA_ID_1621148_Annot_ID_56815 3000 nt of promoter + ATG
ctagatggctggtatgtttaacactttcagttgttttattactattttataattaatttactggtatagtactataagcacgatttacatattaatgttcctctcttaattaggcgatgtatggtcaagatcaagagcttgaagtttcgttgaaaaaactaaggggagaaaatagtgatattctaaaggaagctgctgaaatcagagtaagtagtattcttctttgtctaagaaaacatgttatatgaaaacaatttaacagtttaatagtatgaaaaaaagaattaacaccaaaatatatatgaaacaggaaacagtggaaatatccagaaaagagtctcaaagtggaataagagacttgttccatatcggaaacgcacattcgttaatcgtaagactcatctaacatcattacaccaatcatcttttatataaagtaaatatttgtgcaactatatatatgttatttttttgtttattagtttcgttgaaaatggttagattggattgggtttaatgctcttgcaacaattttgtgggagtgcggcgataagtgcttatgctgctcgaattttcgacaaagccggtaaaccaaacaaatcaagcgcatgtcacagctggtttaatatgtttgtagtcaacagccaataccatctcatgatttttaattatactgttttgtgtaattaggttttccaagcgacataggaacaaccatcctcgcagtgattctggtacattattctctttgttactctttatcatctatttgtctttgaatatttcatctttatgatttaatcacaacttttttcttttgtaaagataccgcaatctatagttgtcatgttaaccgttgaccgatggggacgccgaccacttcttatggttatcatttcactataaaattcattactgatttccttagctaaataatatttttcagatttgattatcattattgttttttattttgcagatttcttctatcggaatgtgcatatgctcattttttattggcctttcatactaccttcaggtttagcaaaacttaactacttaatcgtagtaactaaattgcttcctttagaaaaataaaagagtattatttaattatgttttcctcggtgagcagaagaatggtgaatttcagaagttatgttccgttatgttaatcgtcggtttagtggtacgtaaatgccaaacttactttcagtctattaataaattcaaccaatggaccaaccggtttataaaaaccagagcactaatcaaccaagtcatatatgttaaccagggttatgtctcatcctttggcattggcctaggtggattaccatgggttataatgtctgaggtatttgtttacttatcttttaaactaaacttaacaaataaattaagttttttgatatgaaatttcataattgattttcaaaatttggcagatatttccggtgaatgtgaaaatcaccgccggtagccttgtaacgatgtcaaattggttttttaattggattatcatctatagttttaatttcatgatacagtggagcgcttccggtaagattccacacatcaaatataactgctcaactatttagtaaacataagcgaataatttatatagttaattttggtttgttggatttataggaacatatttcatattttctggagtttctctggtgacgatcgtattcatatggacattggtgcctgagacgaaaggccgaacactcgaagagattcaaacatcattagtccgactttcgtaaaatctaagtatggattatacgtaatgttaagtctcttgaatagtctttttaaccgctgtcaaaaagaaaagaaaagaatagtctttttaaccgtatattaatgtttggttaaataagcgttttctctcactttgattaaatagtaataatggctatgattttacctataggatttaatatttgaaaactgtgatttgtgagctctaatcttgattagagtgacacatattaaagtgtaaacgttaaagtaagggagatgagccgtcgcaggcaggctaatgtagagagattaacgttctgttatgattaattaaaattatgaattgtccaatcataaatgcctttaacttgtccaatcataaatgcctttaacttgtccaatcataaatgcctacaacaaaaacgagtgggagaaaaagaatcaaaaagactacagtagaaagtagaaggggacttagtaaaaactatcagaatctgaaggaccgagttgtaaaataaagaaacaagtaaactgccaagtataaaaggcgacaagctactctcaagcggctgtgtttgtcgtgggtcggtttataatcattatctcccccggaaaacttctcggagaaggagaagaatggttattccggcgacttctaggtctttttttcttctcatttgcataaatatcaagcaagctgtctctatcatttgactattgattttcttacttagtttttaagtaatatcaaattaattgtttaatacagttatagtttctatataaaaatgggttcaactaaacattcttcttctaattacgtctgctaggtttgggtttcgtgctgaattcaacaccaaggagtttcaagcttcctgcatctctctcgctaagtaaaaaatctctcttttaagtttccgttgaattcatctttgttttaacctaaaaaaattctttatttctgggtttcttcgagcttcactgaaaactttactcctggatttggtgaatgcagtgaaatcgatgcggctattgggagaaatgaagttccagggaatattcaagagctcgctttaatcctcaataatgtttgtttatatttttttgtcttgtaaaagtttcgatttttcaaggtgcttttagtttaatcttagtgctcttgtttatgtgtgttacttggtgtaggtgtgccgacgtaaatgtgatgattatcaaaccagggcggtggtaatggcgctgatg

SEQ ID NO: 7506 - DNA, 3000 bp, Unknown; identical to SEQ ID NO: 7495
  misc_feature (1)..( 3000): cDNA_ID_1817880_gDNA_ID_1621148_Annot_ID_56817 3000 nt of promoter + ATG

SEQ ID NO: 7507 - DNA, 3000 bp, Unknown; identical to SEQ ID NO: 7494
  misc_feature (1)..( 3000): cDNA_ID_4262586_gDNA_ID_1621148_Annot_ID_56818 3000 nt of promoter + ATG

SEQ ID NO: 7508 - DNA, 3000 bp, Unknown; identical to SEQ ID NO: 7493
  misc_feature (1)..( 3000): cDNA_ID_1817872_gDNA_ID_1621148_Annot_ID_56820 3000 nt of promoter + ATG

SEQ ID NO: 7509 - DNA, 1470 bp, Unknown
  misc_feature (1)..( 1470): cDNA_ID_1818017_gDNA_ID_1621149_Annot_ID_56821 3000 nt of promoter + ATG
gaattcgtgttattgttgccaaaacgatgtgataataatggaactatgttcattgtattggcgttgcccgctggtttacaacgatctatttcatcgatgaattttggtaattaacgatataaaattttcaatactaaaagacacacctttttcaacatttctttttataacttatgatgttcccattccattatattatagctcaacttacaaactaacttgtcacatgtaaattactcattgactcgtgacaactattgacggcaatattatcaaactcgtggttggaaatattttaagtccacaaaggaggagaaaataaaattcttgaatattgaaaattcttatacctctatgatataaaagaaaataaaatcaaagagaagtaccacaaaaacaaatttttagtatttaaaaatgccattactttggaaaaggtcccaaaatatcacaaaatctaggcttaggaagggtctctaaacgtttattaagaattactaagcccaaaacttgaaaactcctaaaactctttcttcaaatttagactaatcatttttaattctctccaaaatattagtaacccttgtaaagcctaaacattttagtaaattttatgatttttggtggtaattttggaaaataaagcataaaatgtggtattccgaggactgaccaaatttcaaaaattcaaataaatgattaatatcctaaatcaatcattattttttataattgtttttgagaaacttatattaatactattttcaggcattttcttataaattaccctatggttttagtaggcaacaaaaagatgaacgtctcagatttttttgaattcaatttaatcttaacaaaagcgataaatatcaagaagataattgggtacgtgtattgtgtactatttcaaaattgatatttgcttccataacgtaacgtaacgtaagacccaaagattaacacttggtttcttcatggtcgtagattattaaaagtttataactaatgacgacaaagtttaaacgaaaaacaatattttctcaattttcactagttttttttttttattccagaaaattattagtatacaaccaactatttttacgattataaacttttatttgatgatattcataatttagaaaaaccttaaacggatcttaatgtcaatatcatcagctcatgcaccgcctctcggatatgttgacaaaattaccccatacaatataaaccaccaaaccataaccacaaagggtatattcgtatattataaaaatatctgaatagtcgaacttgtcgttacactcaaaaacgaaatctttccctcctctgttctcaatctttctataaattctcttcttcttcttcttccattttcccaacaacacaaagtctctctctctctgataaaatcttaaaacccacctcgagatcatagtcttcatcaattagccataaaaaagcacaatg

SEQ ID NO: 7510 - DNA, 3000 bp, Unknown
  misc_feature (1)..( 3000): cDNA_ID_1818013_gDNA_ID_1621149_Annot_ID_56822 3000 nt of promoter + ATG
cattttgtgggctagggatctacaatccaatgactgcaaaatatttacggcatgcaaaacttcttatgacaagtgtgtttgacacacgtctctaaaatttcaattatgtggatgtgcttatttgtatcaatgcatttcatgcttgcttggcttcgtatggaaaaagtatgagccatcataaaaatttgttaaaaaagattcgagtcatttacattgttttaggagccttttttgatcggttagggtgctagagaacccattacatactagtcatctgggggtattagtattttgtaagctgttttaaacgattccgaattttgtttctatattttgtggtcagatctgatggcctgaaaatcatccccaataatcaaatcttaatgcgcgtttaatattttactaaattatgatcatattattttttgcgatctagtcagtagtcactgtagtgaagttggtgagacgacacccacccaaaaggagtacgtaaagcaattccggcttccaattattttatgctaatcttgtcggcagatgagatggatacatttatacatatcatatataataggttgggaaattgttagtttcgttgataaaataattaaggttttgacttttgactgattctggatttgatttcaggaaatgtaaaattttccagattctgtatgtactttttgataagaaatttcaagttgctgcatgtcaaaaatttcaactaatctcttttgtagtgtataaatttatttactgtccaatagacaattgccaccgatcctaaggagcaacgtacaataccaaaagtttgcatgcataataaaagttcatttaaacataacgtataataattttcagagtgattattgtaactttcaaattttcacataaattttagagtattaaatcaaatagcctttgtaatttttgagtaaactaaatgacggtctttttttactcaaaatcaattacaaccctttaaaatatcctaaaagctttgttttaaaaaagaagataaattatcacaacaagaatataatctaactcactacaaaatgtaaggccaaagaagagatacgttcactgattggacgtgatggagagagctcacatctcgtctggccttatcatcatcgtaatctattgaagatatatatatggtaagacaaattaactttactcacggattctattctttttacccattctcggttttgtaacgaacgacgaaccaccaactagacaacgaaacgtcccacttgtttccattagttaaatttgggtaacaccaaaatcgcattaacttaataaaacactgttccaatatcaaccactgccatattttctcccttatttttttttgacatcaaaactgattttggagaggctttgaaaccccgactataaatttgatttaggtgttattctgatttatgagtgaatagttacacagtcggagtttgaactgaaagttataggattacatttttggtaaaaaattgttgagtcgtatttttggtagaaaacagtaaaattatgttttttgacagaaaattggaggatagtaattttggaggaaatcatatatatgaaaattgaccaactctctccatatgattgacacataatcactttagcatttgacatgtgtctattaaataattaatgtaagctcttcaacttctaatttataggttaaagatatatttattatttaattttacatcttattttattttacgtatttaattatactattactatatttattttaatattacatgatttttcaataaaaccattttaatagttttcttatactctgaagttttttttttttttttgtaatccaaactcaaagtatgagtgtataatagtcgtggattacttaataatttgagtaagttattctcttaaatgaatatttatattttcttaaattgatatttatataataaatcactaagggtgaaaaatgcgtaaggagttccatcatcaaattcttaggtttctagaatccaacactaacctctgttaaattggtttaaaacaaacgttgtttatgaattatgtatatgatgcattgttgagaacgttgctagaaaaaaatatttttaatactaaaagtaattgtttattgcatgattgaatgattagataaatataaattatatttaaattaaacactacaaaagaatccgaaaaaaccgcgacgtagcgcggataattacctagtagtgttaaaacaaaattggaggaaattttggagatcacatttttaacataaaattagtagaaatatatattttaattattaaataaaaaattaaagtaagcgctaaatgtcattaagaaaattttgtgaaaggcggaaacaaaaattttaaaagaaaaagaaaggactaatcacatcatcgccattcaatgatatagtttgacaatgatatgattcattaactaccattcaataaatcggtttatgaaatctaacggttaaatattagttggtaaagcatgattaattaagataatcactcaacaatcaattcaggaccaacgtcacctagctaccaccacgaaggaaaatgctaatacaagaaccaaatcgtcttattaaccagttatctttttctcatggaccacatttaaatcgtcacggcaattaagctagattttaagaaagaataaatgggatactcaactaattgccacaaattttattacttttaaaactcggctgctcggcccaaacttatccggtacggatggatagacctatcttttatcgtgtaaagaaactcttgggctccactcttgacgttgctcattttatctacttttgttggtttcttagtgacctttgacgtttatttacatagagttgacagatttgaattgacgttttctcaataatgcagaccaaaattttcacgtttcttacatgtacatatatatagtaaaacaaatctctgaagacacacaagagaatcaagaaca

SEQ ID NO: 7511 - DNA, 3000 bp, Unknown
  misc_feature (1)..( 3000): cDNA_ID_3050623_gDNA_ID_1621149_Annot_ID_173175 3000 nt of promoter + ATG
gattctcagatctccaccatcgttacggattatccacaattgcttgtagctgatgctgagaaatcacttgctcccaagcttcagtttttgcagtctagaggagcttcaagctctgagctcactgagattgtttctacagttcctaaaatcttgggaaagagaggccacaaaactatcagcgtattctatgatttcatcaaagaaactttacttgataagagttccaagtccgaaaagtcatgtcaaccttttccacagggtaatctggagaacaagatcagaaatttatctgttttgagagaattggggatgcctcacaagttgttattccccttgctcatctcttgtgacgtacctgtcttcggtaaagaaaaatttgaagaatccctcaagaaagttgttgagatgggttttgatccatccacctcaaagtttgtggaagctttgtgcgttgttcaaagattgagcgacaaaaacatagaagataaagtcaatgcgtataaaaggttaggctttgatgtggaatatgtatggacagtgttcaagaggtggccaaactttctgacacactcggagaagaagatattgaacaccattgaaacatttctaggcctagggttcagcagagatgagtttagcgtgttaattaagcgctttcctcagggcattggattatccgcggagatggttaaaaagaagactgagtttttggtaaagaagatgaattggccactaaaggctcttgtttcaaaccctgcggtgcttggatacagcctagagaagaggactgtcccaaggggtaacgtagttcaagctctcatctccaagggattgatcggaagtgaactcccttcgatatcgcgtgtcttcgtatgtaccgatcaggtgttcttaaacaggtatgtgaagaggcatgaggacaagcagctggagactgagttgatggctatctatcgtgcttcatagatcacaaggctgatcaaggattttggtttctatctttaaatatctgaaatcctcaatttagactttagttctcaatttcatatcgatccaaactgtttgtctctctctatagatgcttgaaattgtaagttttgaatccattttctgctatattactgaagttaaattccaaattctttgtgaccttgttcggatatagatttgaatgatgcaatgcagctcctgcattcttgaattggtcatgtaagccttttctatttctcagttagtgtttactttcacattattctttaaattttgggattggagtactgaaattacagctactgataccaaaatcctcttatggtacaataaagtctttgctttatatattctttgctcctgagatcctggagtcctcatgtaagctctgtctttgctttatatattctttgatcatatgattcatctgatttgtggaatgtttgtatttcagatttgtgatcttggtttttactcgtacacgttttttgtgagctttatattacattgtcttgaatatattgtcaggggcactggaaacctatcctacatcattaggacacatcaatcagataatcatccagtccaaggtggtaaaatctttatatctagcttctagctgaagaagcttgggacgttgaacgttgttttgagcttttgctatggctaacgacctctggagtgaatactcaagttttctctctttgactcgcaaggtaatatgcttattagcgttattataggtacattgagatagtataatgtgttggttgtttattaatgtgctcattcaatgcatttgctcgatatctctaggctatctatcagaactatcttttcctttacttgatcttattgagttttagacgtatgagatatggttcccttgaaagaatgcaatctacaagtttacaatggtacgtcaaaactgtgttaagtttctttcatcattgaagaattcagaatcttgtttcaacttggactcagcaaacacttttggcaattgaatctcttatttattctaggaaaattacattatcaactatttgttcgttcttgataggaacttgagggtgaatctcttggcgcagaaaaaatgtttcagagaactttttcttatagtttgtgattctcatatctttttttttcagtgatgaatccagaaactattgaagagagctattcatacagactatagagcagtcaccattgttacatcagagcagtcactaatgttgcatcagagcagtcaccaatgttgcatgttaattttgtaggatcacatttggttgacagtaaccagattacaaatgtactctggtatacatacagttggttcgtgatcaacaattgaatagtatctaaaccagaccaaaatgaatccggttctgcttggttaataataccaagtcttttaaattgatgcagaacgtgagatcctagtgaaccaaactgaaacaatatctgaagatgacaggaggcgtaatgaggctagagtatgcaatttgaggtcattcctaaatagataaagcaaatgacatttggtgaatgaagaagctctacaaccatatgttcgcaatttaaaacaaaccgatatcgtttgagatctcagaaatagtgtgatcaccttttttctcctccaatttttgaagatctcaaactttgttttgggcttgaaacataatgtccatatccgcctgccgtgatactatatgggccgagtcaggcctgtcaggcacctgactcttttgagaaaaaaaaagaatcataattgaaattcttcaaggtttactatcggtggagcaacacataaaccctaaattttgggatttagggtttcgcgatttggaagcggattcatggtgagtttcttgttattgttcgtaattccagagaaattttggtatctatgattcatgactgcgcgattcatcttctcgaattgaaacagagagtagttgggtcggaatagctttcaacactgtagcatttgtagcattgtcttttgta

SEQ ID NO: 7512 - DNA, 3000 bp, Unknown
  misc_feature (1)..( 3000): cDNA_ID_3050633_gDNA_ID_1621149_Annot_ID_173172 3000 nt of promoter + ATG
gttttatatttttaaatttcaactttagccagaaaatagagatttctacaggtgaaaatacttgaattaagaaagaacaaaacgctctagaggtacttttgtagcaataatggaataacattaggtccatcaattcactattacattgtatacttgcatagttaagaaatgatatagtacatttttatagtcagatattttagtgtttgatatgattcttcataataacaatttacacgttcattgacttgatgctttatagttatcgattctcgaagaactatagttactttttaattttcaatggcttaaaaaatcagagaatatatatttgtttatctacttaatctgcatcttgtaggaaaaatttattctaaacatatactatacatccgacttaaacaataatgaaacattattctctagaatatctttacgaagagccaatggtggtcataatctaatatttgtcacctaaagtttcaacagagcttacgctacatattctatttcatttttttcaatattatttgtagaaaactttttaatattttttttcaacaaagttaatttattaaatgttgcaggtttggttgccatgacaaggcaaatatcaaagatattggtgttaagatgcgaagaacagaaatgagtttgtgcaagaatggattttacgagttcgggatttgtacctatgtctcgccggaattatatctaggaaactcaagatcaattgctctatacttgagcttttcttccggtttcagtggctaagaaaacagaagtagataacaaagttgtttataacaacgactcaaaaaacacttgcaccaactaggacaaataagacaatcaaattggaatcctcaaacatcatccaagagttcactaaatcaaaatccaagtccaactttaagactgaatgatcatagtagaagcacctacaagtgctaggtcagcaacatagacaatttgacatgtgctagttagccacgggcaatgcgagtaaatcttcttctcgagtgtaaccgcggagaacgaatttcttgaggattgcagagttttttgcaaagtacaatgcaagtttcaattcatacgatggtgtatgctttttatctctacaaactcgagcaatgacagcaaacactgaggtgcgaacgagaggaatccattcagcctcatactgctaccaagtacagtctgtaaaatacacaacacaaagatgattgaagttcagataccgttaaacacatttcacaagttttctaactaaactgaagagtttgtgcaagtttccgactttcgcaaactggaaaatgtcgttttcattctcaggttcgttctcaggagagctactagctgaaatttttttccggaagacacaatgtctctccacccattgaagtcgagacaccagctctgttcttccaatctaggcactttgctcttaagaacaagcactccttccttttgaccagaaggagacctgaatgacacgaaattatcgagttctgtctgagttgtagctgttcctccaggttttactgctgatgcagagatggcatccatgacgcaatgcgtcctctaaggccccgttattctggtttgacacaacaatgatcacaattagcaaaagccacaaaaagcaaaccatcttttactctctgtaactgtaaggaacgagataaatatcacctaaaaaccgaagaccaagattttgactttaagaatctcacgtgagatatgggctacaggatagtttccagattgacttattaggctcacttggttcagactgacaaaatatttttgcttcacctccaaggtatagatagaaagtttgattgctacggtttctcttaacatagcattgaacaagtgatcctcctggaccaggctataagaaatatcagagcaaagattattagtctgaagaagcacacaagtcagttataaagtaaaacatagaatgtgacctgtttcaaggagattggaaaagtgaatttgctagaaacctcaggaacgttaacgatctctttgaatatttgtcgccagttcttacacacacctacacaagaaacaacattcttcctagaaggccaagtgtcttcggatcgctctatcctcatcagaacatctctcagaagctcaggaggcatattagcccaacagctcagttcttaaaccattccttgagacttcccccatttttcccacaatacccaaatctcacatcgaatctctttcgagacgacatagctctaccacacttcaagcaatgctgacttttcaagaaccctaacaaggaaacaatagtaactatgagatctcaactgatccctacaacttatgaatattggaaatatggaaatgtgttcctcttctcaaggaacaagaccgattcttcggccttttaatagaaatatttggaccaaatttctccttcatattcatcctttggatttggttctatctagcatttaaggagctaattaaagacagccacttgaagttttatacaaacatatatttcgttaacctaagctcaaaaaaaaatcatgacattttttcttctgtaaatgtgtagttgtatataggattaaatataaatgaagatggagatattttttgttacttttatcaatcagccatttttttctatctatgaattcactacttataacatgcctgccacttaaagagccaatcacattgatatagttttgtataaactctttagtttcttgggtgtccatggaaaatttcaaagataccacacgaaaatttcaatttttaatatagagaaatataaaacaagaataaaatgttgctagttgttgaaatttatatttattcttggtgttatctcatatttgacttggaacatatttcactaacgtgcttaggtgtccttatgaaatccaataaatacattaaacacaccaaatctcttaactcttctaaggctatgtcctaagatttccttgttcagtacaaaaa

SEQ ID NO: 7513 - DNA, 3000 bp, Unknown
  misc_feature (1)..( 3000): cDNA_ID_1817989_gDNA_ID_1621149_Annot_ID_173166 3000 nt of promoter + ATG
ttttttcttagatacatacatatgacgtcacacactcacacaacacccagcaaattaacatggattaatttatccatcaatgtggcctccatactttgtctttgtgtttatcagtttccattttcaaaacgtatggagagtacattgattgataaatgtattaatcctattcaaaacatctaatttgtattttggcaaaaacataaaagagtactttccaatatttgttgtgaaccaccgccaaatacgtctcgggtttgcgttggacccttatgtttgtgatatctgttcgaattctttgttgattcagcttaaaattgtgtgattaaccaaaacctcagcttgtaacaacttttgtatgtgcttttatatttgcttagattgactcaactcttaacataaataacttaaatgacacgtttggtttcaaaaactgtagtaacccatatctttgataaaaagacgaaataaccttaatgattaattgtaatcaaattaaaacaaaaaataaaaaaataaaacaaattttttatattttaaagcacaagtcactctaccaataaaattttgacaaatcagcaaaatcaaattatttttcaacagaattataaaaccaaaaaagaaatcgtggataaaaaagaaaaccaaaacctatattacataattaaaacaaaaacaaaaatccacgttaacaaacttttaaaaaaataataattttgaacaaaatttagataaagaagaatctgcttcacatatttcgtttttgattttaaaaatagtaaagaaatgttttttaattttgatattgcatattataaaatgacttgttttagcttaccaataatattttgacatgtatcaattcacaaataattgatttgatggtaggaatagaagaagaaaaaaaacggttatgaaaacccttggagaatttatcatgactcacaattggatatttaatacattaaaattcaaatatgacaatattatgtaaaaatttgccgatattaataaaagtctgttgtaacattttcaaaaaaaaaaaaaaaatcgagtcaaaccagatttaacatacaatcaaaccggaaataatttaattgagggctagctaataaatctcatataacaaaaaattttgaaattttaaaaacaaatctgccaaaaaaagtctgttagtactaaaaaggttattgtagtcataaacaaatcagccataacattgacatgagtaaatctgttatgctttgacactgaaaaacaaaactgtcatcactaaaaacaaatctgttatcattatgtgactgtctagtaattttatttttaaacaaaaaactgttgtaaaacaccagatttgttaacaagttaattaaatctctgattacacaaaacaactctgtcatgcctatataacatttttcgaggttaacaaatctgttataacacaacagatttttgggtacaaatagaaaatctgttgccaccataaagaaaaatatgcggtatggaaaacaaatcagtgacatatttggtttcaacattcttacttttgaaatttaaataaaatctgtggaaactatatgaaacaaatcagtcacggttgaaaaatctgcggaaaaaaaaaatctggcgtaatataacacagtaaagtctgtggtacaaaacaagtctgttgtaaaaagtctgtggttgaccaacaaatctgtgatcgataacaaatccgtcgcaacaagagccacagatttaccaaaaacgacgatggcattttcgtaaataaatgtggttttattgccatgctggaattaaatagtagtgacatttctgtaatattgtttttttctgcaaaggaaaataatgatatttttggtataattattattcaaataactcatatttttagcatttcttttgggtcattatgtataaaatatggattactctagtaattttcccttttatatatatataaaaaaccatttgtgtgtgctcgattttatctatttctatttttttttgaaaattagattaaaaaaattcaccaaaacttaacattacaagtttatatataacataatattcttatgaagtaagaacaatgatctgatcacatattgtgactttgaatatgttgatgaaaaattactgtgatattatacaatttttaattttaatttaatccctaaaacttatgaaacttataccaactgagtaatcatcaaaaattctattttttcatttaaaaaattcaacttccattttcaaaccgttatgaaactatgaaaaggatcggggttatattggttctttgattttcataaagttattgtcaacttgattagttttggaagtttgttaattagatttatgatttcaattgatttgttttttttgaaaattttcaattgatttgttattcaatttgtagatttgaacatttattaaaatttagtgttatttaactaaaaaagtcaaaatacacttaacatatttaacacatcttcacatactgtatatctcaactaaatatccaaataaacaaaatttagcatactttttaatattcagaaacttactttttaaaaatatttatatatatacacacttttcttatatactttttcttaaatttggaaatagtaacaaaactccaatggctgtttttaaaaaaaacaaatttaggttggacacatcttatgtgtgatatagcctcataatagtacgagaaagaaaaaaaaaaaaacaaataatacaaaagggcaaaacaggtaaaacagcctttcctcgttacttcatttccatattattaaaaaatatattattaattccgtcagctatacacggcaaaaactcacattatataaactctgccaaagctgcagagacaacaacacagaactagaaaagagaaacactattagatcatcacttctcagatttcgatattcccaataaataataaatactctcagttcttctcttctccaagaacaaaaaaaaaaaatg

SEQ ID NO: 7514 - DNA, 3000 bp, Unknown
  misc_feature (1)..( 3000): cDNA_ID_2139034_gDNA_ID_1621149_Annot_ID_173163 3000 nt of promoter + ATG
tcattttatctacttaacatttttgaagtgcataattgctctttttttaatttataaaatttttgacccgggtctttctttatacttcatacatattagtctaatttaataaaatcaaatcctttactaatttagatttttgagatctttgggttttctttttctaattaatgtaaaattaacaaaccatttaccaagaaacatttgttggttcaaaagttttaggaaacaatgagatgattatgtcaaatcatcattatttataaacttaaatatatttgtttcctaaataataagaaaaaatattaattctatatttaatcccacaaaatgaattaggaatatgtattaactaaaagattttttatccttattttctatagcatctacataacatatctttaaattataaaaaaatcacataaatattttcgggattcagatttcaataattaggatgtgaacaggttttctaaaaatatcgttcgaatatattgaagataaaaaaaatacaaataggaaatataataatttaaaagatacaaaatatttataaagaaattttgttttaaaaaaaacaaatttcaatgaattcaatataaaatcttcaatacgaatccgatattgattcttaaataaaaatattaatataatatacaatttttcttattagactgaaattttaaattgactcgaagtatcttaaataataatattattaaaaatagaaaataaataatttgatttttagttatcacgggacggattatacggtggaacgggtttagatgagacatgacaaaatattatcccgtggtgtggtctatcaccagtcaaattctataagataaaataatatatattaaacttactaatatcataattacgactcactaaaaaccgtacacaaccttatcgagaattattaatcaacacaaacaacaacaaattctttatcttataaaaaaaaaaatatatatatttaacccgcggtataccgcgggtcatatcttagtacgttataaactttatactacgggtgaaatcctagattgatattaatacaaattatatactatgggagaaattaacaatcaaatacaattataaaatcttaaacactaaataaaataaacaatattatttaaacaaatataaaattaaaatttcaaatttttagtttaaaaaatatagttttgtgatgtaccatacatttaaattaaacaaaataaaaacatatatttattgatcaacttaaaaataaatatttaattttttaataaaattataggcatgcagtataccgcggattaatatctagtttaaaaacttaaaaatattataaattaaaatttaataatcatattgaaacgaatgacgacgttttgtaactcccataagattatcgagttaccaaaactcaggcgagagagagagatcagaaacggaagagaagaataattcagtgaagaatgagactactctctcctctgatcatcactcattgatcagatttgcatttttgagtctccatttctgaatcatccaatccgatcgacgttctccggtattgatttcgttgatcgggtttttgttaagtttttaatatcgatagctccgattccttaaccaaaccagtacgtaccatacacgagagagactagcacatcactagctcagctcacattacaccatacgagagagactagcacatcactagctcagctctcaagtctctcatgcgagactcgcacaattcaacaacaacaacataaagcataatccctctaaattgatctctttccttatttatactagaacggagtttgttagagatatttttatatcttcttcaagcaagcttccttctcacgtgcctcttcacttgcacatgtcttcttttgctttgtctcccattcacatgatacaccaatcgtatcagttttcagtcatacaatcctttgtcagcaaacacactttgttagccgatccaaaataaccaattcggtttgaagttcaccgattttcgttccacctctacacggttttttgtagtgaaaaatcgtcgagaaaattatgaaaattgagagcatcgtctcgtgggagagttcaactagatctttatatttacttatgctctttttattgtaaaaaataattgattatatacttcttcattatatacatattttgatttacactgtttcactaattgtagtttccatggtatgaaatcacttttagaaatttgaattatttctatgttttttttttttggggtaggagatgggatcgaacccccacttttattaataactaaaaaaacaatcacacccgaacattcagagagcccgcatacccatttacatactcaagaacaatcgacataacactatccaaagtagaattaaacaaatgaaaatctaagggtaaagtgtaaatatatagctaactcattcgcaagacgattagcctttctatacgcatatgaaatccgtactacccattcctttgaaaaaaagttatttatctatgtccaaagaaaaccaaccaccatctctaagccaatctccagctcgaagtgtatgataccgcgatccagctatatgtgagccataatatgctccccatagttccatggtatcacttttagaaatttcatttatttctgtcatacatattttcccagatgtaatgcatatttttttttttctttttggatattcgaattattcacctttcaagcgaacgacgacgtttggtagcgtcacattgattattatcaagtattcaagttactccaaaacttccaggcgagagagatcagaaaacggaagaaaaggtgatgagagagttagtctcttctgatcatcacttcttcatcttcaaccattgatcggatcacattttgtttatcgaattcaatcgaagattaccgattttgattcgaaattctcctgttttgatttcaccctccagcggtgatcggagaatttcgcc

SEQ ID NO: 7515 - DNA, 3000 bp, Unknown
  misc_feature (1)..( 3000): cDNA_ID_2139022_gDNA_ID_1621149_Annot_ID_173159 3000 nt of promoter + ATG
cctcgccatacgggaactgtagccaggggaattcagaaaccgaacctttcatagccgcacataacatgatccttgcacacgcaaaagcggttaacatatacaagaccaaatatcaggtaataaaactcatacatcaaattaagacctggtttcgtgagttatcgatataaatataatgtttttgcagaaagaacaaaagggaagcattggcattgtggtacaaacatcatggtttgaacccattagtgattccaatgcggataaagaagctgctgagagagctcaatcattttactctaattggtatgttatattactatatatgttgagatcatatttgtagatatgaagtatagtacttcacccacatatggaatatatattgttttatctatttgtattctaacatgtactaggattctagatcccgttatatatgggaaatatccaaaagaaatggtagatattcttggaccagccttgccacaattttcgagcaatgaagtgaagaacttagagaagtcgagggcagatttcgttggtattaatcactatacaagttacttcattcaagattgtttgacctctgcttgtaatactggacatggagcttttaaggccgaaggatatgctctcaagttagaccggaaaggcaatgttactataggagaacttgtaagtacattcattcagtttcttatattcaatattttacgactatattcaaatgttttagtaaattttattgtttattgaccatgtttctattgttagaccgatgtaaattggcagcatattgatcccacaggattccacaagatgctgaattatttaaaagataggtacccaaacatgccaatgttcataactgaaaacggtacaagacctcaaatttgatcaatgatcgagtcatcaaccatatttgaaattatcatgaaaaattattattaatggcttgaaggttttggagacttgcaaaaacctgaaacaacggataaagaacttctaaatgatacaaaaaggatccaatacatgagtggatacttagaagctttacaagcagcaatgaggtaaataatttatgtaaatttatgcagaaatccaattcttaaaatcatgcattcaaatagtctttaaaccaatttttatctaatgaaaatttactaattctatataagttgtgaattgttttggtagggatggagcaaatgtgaagggttattttgtgtggtcactattagacaattttgagtggttgttcggatacaaggttcggtttggtctattccatgtggatctaacaactcttaaaaggtcaccgaaacaatcagcttcatggtacaaaaattatatcgaagaacacgtgaatcgaagagatatcgtagataattattaaacacatttatttttaattcgtattcactgccaaagaaagtcaaaaattacaaaagcatttaaaattgatacttatcattgttgttgattgttgaatgattaaatttgtcttttcctcctaaaagtgaatgtttaatgtgttacatgattatttgtctaatcttgcacaataattctattagcttaagatgttgaagaacacgtgagaagagaatttaggttttttttttggtcaaaggaagaatagtaattcgtattcctaagtaaagaaagtcaaactaggaaagaatttatgtaacttcgttaaatgaatgattaatggttttctttaccttaaagtgaatgtttaatcagtgttacgcgccatacggaagtaattgtctaatcttgcacaatcattcaacacgttttcaaagaaaactttttttgttctctatgatgataatagtgttaaatcaaaagtagtacaaaagtaaactaaacttattttagattaaaaatcaccgaaaaaactaaacacgcgttagaaagcatttgacatcacctccaaatttaatttcacgcaagcaagcgtttctaagatatggattctaaacgctatatcactgttttttgtaagataaattcttcttaattttttcaataaaaaaatttaaaattaaaaataaaatcataaactaactgataatgaccaaaggaaccataaacacctagaaaattatatttctgtgttttctatctgcggtttaacgtcagtaacatctaggaaagttattttacgaaagtgaacttggtttttgtttgattgaaatatgtttcagactttcagaagaaaaaaaaagatacttatttaaaatatgttaagattttagttcacttcaaattatgtaaacatgctgatttttttttttttttttttttttttttttgcaatcatccttcaatattgtctgcgaaacagtcaagtttcaagtacgattcacaacatttttcaaaaaatttattcattcatttcactcccaaaactttttaatttacaaaactacccgtacacgtatattggttgaatagaaattttttgaatatttattatattttgagttacatatagactatgatttaatcaaatacacaatgagtcgttaaacaatctaaagaaaaagacacacgaacaaactgataacatagataacatataagcaaaataggtcggaatcaacaattacatatataaatggttgcgtggttaatgatttcatttggtattttcacgacaagatcgtttctaggtacatagaagtcaacttcgttgccatataaactgtataacacttagtcatacaatctggtttatttatcaagttcaaaaatttaatttaatcaaaatatttgtttgcgaaattttcaatcgagaattaaaaaattaaaaaaagttgcgtggttgagttaatcgtttggtctccatcgctgatatcttcaatttctctgaattaatcttcacatagctgtataaagacctagaaaagaaaacagatatactagtaaccaaacttagaatcaagaaagaaaaaaacagctatagagttgaataagaagaagaagaag

SEQ ID NO: 7516 - DNA, 3000 bp, Unknown; identical to SEQ ID NO: 7510
  misc_feature (1)..( 3000): cDNA_ID_1818013_gDNA_ID_1621149_Annot_ID_173158 3000 nt of promoter + ATG

SEQ ID NO: 7517 - DNA, 1470 bp, Unknown; identical to SEQ ID NO: 7509
  misc_feature (1)..( 1470): cDNA_ID_2139018_gDNA_ID_1621149_Annot_ID_173157 3000 nt of promoter + ATG

SEQ ID NO: 7518 - DNA, 3000 bp, Unknown
  misc_feature (1)..( 3000): cDNA_ID_1818009_gDNA_ID_1621149_Annot_ID_56823 3000 nt of promoter + ATG
aatataatgtttttgcagaaagaacaaaagggaagcattggcattgtggtacaaacatcatggtttgaacccattagtgattccaatgcggataaagaagctgctgagagagctcaatcattttactctaattggtatgttatattactatatatgttgagatcatatttgtagatatgaagtatagtacttcacccacatatggaatatatattgttttatctatttgtattctaacatgtactaggattctagatcccgttatatatgggaaatatccaaaagaaatggtagatattcttggaccagccttgccacaattttcgagcaatgaagtgaagaacttagagaagtcgagggcagatttcgttggtattaatcactatacaagttacttcattcaagattgtttgacctctgcttgtaatactggacatggagcttttaaggccgaaggatatgctctcaagttagaccggaaaggcaatgttactataggagaacttgtaagtacattcattcagtttcttatattcaatattttacgactatattcaaatgttttagtaaattttattgtttattgaccatgtttctattgttagaccgatgtaaattggcagcatattgatcccacaggattccacaagatgctgaattatttaaaagataggtacccaaacatgccaatgttcataactgaaaacggtacaagacctcaaatttgatcaatgatcgagtcatcaaccatatttgaaattatcatgaaaaattattattaatggcttgaaggttttggagacttgcaaaaacctgaaacaacggataaagaacttctaaatgatacaaaaaggatccaatacatgagtggatacttagaagctttacaagcagcaatgaggtaaataatttatgtaaatttatgcagaaatccaattcttaaaatcatgcattcaaatagtctttaaaccaatttttatctaatgaaaatttactaattctatataagttgtgaattgttttggtagggatggagcaaatgtgaagggttattttgtgtggtcactattagacaattttgagtggttgttcggatacaaggttcggtttggtctattccatgtggatctaacaactcttaaaaggtcaccgaaacaatcagcttcatggtacaaaaattatatcgaagaacacgtgaatcgaagagatatcgtagataattattaaacacatttatttttaattcgtattcactgccaaagaaagtcaaaaattacaaaagcatttaaaattgatacttatcattgttgttgattgttgaatgattaaatttgtcttttcctcctaaaagtgaatgtttaatgtgttacatgattatttgtctaatcttgcacaataattctattagcttaagatgttgaagaacacgtgagaagagaatttaggttttttttttggtcaaaggaagaatagtaattcgtattcctaagtaaagaaagtcaaactaggaaagaatttatgtaacttcgttaaatgaatgattaatggttttctttaccttaaagtgaatgtttaatcagtgttacgcgccatacggaagtaattgtctaatcttgcacaatcattcaacacgttttcaaagaaaactttttttgttctctatgatgataatagtgttaaatcaaaagtagtacaaaagtaaactaaacttattttagattaaaaatcaccgaaaaaactaaacacgcgttagaaagcatttgacatcacctccaaatttaatttcacgcaagcaagcgtttctaagatatggattctaaacgctatatcactgttttttgtaagataaattcttcttaattttttcaataaaaaaatttaaaattaaaaataaaatcataaactaactgataatgaccaaaggaaccataaacacctagaaaattatatttctgtgttttctatctgcggtttaacgtcagtaacatctaggaaagttattttacgaaagtgaacttggtttttgtttgattgaaatatgtttcagactttcagaagaaaaaaaaagatacttatttaaaatatgttaagattttagttcacttcaaattatgtaaacatgctgatttttttttttttttttttttttttttttgcaatcatccttcaatattgtctgcgaaacagtcaagtttcaagtacgattcacaacatttttcaaaaaatttattcattcatttcactcccaaaactttttaatttacaaaactacccgtacacgtatattggttgaatagaaattttttgaatatttattatattttgagttacatatagactatgatttaatcaaatacacaatgagtcgttaaacaatctaaagaaaaagacacacgaacaaactgataacatagataacatataagcaaaataggtcggaatcaacaattacatatataaatggttgcgtggttaatgatttcatttggtattttcacgacaagatcgtttctaggtacatagaagtcaacttcgttgccatataaactgtataacacttagtcatacaatctggtttatttatcaagttcaaaaatttaatttaatcaaaatatttgtttgcgaaattttcaatcgagaattaaaaaattaaaaaaagttgcgtggttgagttaatcgtttggtctccatcgctgatatcttcaatttctctgaattaatcttcacatagctgtataaagacctagaaaagaaaacagatatactagtaaccaaacttagaatcaagaaagaaaaaaacagctatagagttgaataagaagaagaagaagatgacattttttaaaccaattagaatcatcaattttttattcctatttttcatatttcttgtggtatacgcaaccgtgttctgcaaattttgttcagacactggaaacttcaaaagaagtaagttgaggtacgaaacttccgatgatagttatgaagctaggagtagcc

SEQ ID NO: 7519 - DNA, 3000 bp, Unknown
  misc_feature (1)..( 3000): cDNA_ID_1817997_gDNA_ID_1621149_Annot_ID_56826 3000 nt of promoter + ATG
atttagatttttgagatctttgggttttctttttctaattaatgtaaaattaacaaaccatttaccaagaaacatttgttggttcaaaagttttaggaaacaatgagatgattatgtcaaatcatcattatttataaacttaaatatatttgtttcctaaataataagaaaaaatattaattctatatttaatcccacaaaatgaattaggaatatgtattaactaaaagattttttatccttattttctatagcatctacataacatatctttaaattataaaaaaatcacataaatattttcgggattcagatttcaataattaggatgtgaacaggttttctaaaaatatcgttcgaatatattgaagataaaaaaaatacaaataggaaatataataatttaaaagatacaaaatatttataaagaaattttgttttaaaaaaaacaaatttcaatgaattcaatataaaatcttcaatacgaatccgatattgattcttaaataaaaatattaatataatatacaatttttcttattagactgaaattttaaattgactcgaagtatcttaaataataatattattaaaaatagaaaataaataatttgatttttagttatcacgggacggattatacggtggaacgggtttagatgagacatgacaaaatattatcccgtggtgtggtctatcaccagtcaaattctataagataaaataatatatattaaacttactaatatcataattacgactcactaaaaaccgtacacaaccttatcgagaattattaatcaacacaaacaacaacaaattctttatcttataaaaaaaaaaatatatatatttaacccgcggtataccgcgggtcatatcttagtacgttataaactttatactacgggtgaaatcctagattgatattaatacaaattatatactatgggagaaattaacaatcaaatacaattataaaatcttaaacactaaataaaataaacaatattatttaaacaaatataaaattaaaatttcaaatttttagtttaaaaaatatagttttgtgatgtaccatacatttaaattaaacaaaataaaaacatatatttattgatcaacttaaaaataaatatttaattttttaataaaattataggcatgcagtataccgcggattaatatctagtttaaaaacttaaaaatattataaattaaaatttaataatcatattgaaacgaatgacgacgttttgtaactcccataagattatcgagttaccaaaactcaggcgagagagagagatcagaaacggaagagaagaataattcagtgaagaatgagactactctctcctctgatcatcactcattgatcagatttgcatttttgagtctccatttctgaatcatccaatccgatcgacgttctccggtattgatttcgttgatcgggtttttgttaagtttttaatatcgatagctccgattccttaaccaaaccagtacgtaccatacacgagagagactagcacatcactagctcagctcacattacaccatacgagagagactagcacatcactagctcagctctcaagtctctcatgcgagactcgcacaattcaacaacaacaacataaagcataatccctctaaattgatctctttccttatttatactagaacggagtttgttagagatatttttatatcttcttcaagcaagcttccttctcacgtgcctcttcacttgcacatgtcttcttttgctttgtctcccattcacatgatacaccaatcgtatcagttttcagtcatacaatcctttgtcagcaaacacactttgttagccgatccaaaataaccaattcggtttgaagttcaccgattttcgttccacctctacacggttttttgtagtgaaaaatcgtcgagaaaattatgaaaattgagagcatcgtctcgtgggagagttcaactagatctttatatttacttatgctctttttattgtaaaaaataattgattatatacttcttcattatatacatattttgatttacactgtttcactaattgtagtttccatggtatgaaatcacttttagaaatttgaattatttctatgttttttttttttggggtaggagatgggatcgaacccccacttttattaataactaaaaaaacaatcacacccgaacattcagagagcccgcatacccatttacatactcaagaacaatcgacataacactatccaaagtagaattaaacaaatgaaaatctaagggtaaagtgtaaatatatagctaactcattcgcaagacgattagcctttctatacgcatatgaaatccgtactacccattcctttgaaaaaaagttatttatctatgtccaaagaaaaccaaccaccatctctaagccaatctccagctcgaagtgtatgataccgcgatccagctatatgtgagccataatatgctccccatagttccatggtatcacttttagaaatttcatttatttctgtcatacatattttcccagatgtaatgcatatttttttttttctttttggatattcgaattattcacctttcaagcgaacgacgacgtttggtagcgtcacattgattattatcaagtattcaagttactccaaaacttccaggcgagagagatcagaaaacggaagaaaaggtgatgagagagttagtctcttctgatcatcacttcttcatcttcaaccattgatcggatcacattttgtttatcgaattcaatcgaagattaccgattttgattcgaaattctcctgttttgatttcaccctccagcggtgatcggagaatttcgccatgtcgtggggattaggatggaagagatcatcggagagtttccgtttaagtctcagctacggcgccgatgatctgaacgacgatccgattcaatcaccgtcggcgtctccattcggatctccaacgtcg

SEQ ID NO: 7520 - DNA, 3000 bp, Unknown; identical to SEQ ID NO: 7513
  misc_feature (1)..( 3000): cDNA_ID_1817989_gDNA_ID_1621149_Annot_ID_56829 3000 nt of promoter + ATG

SEQ ID NO: 7521 - DNA, 3000 bp, Unknown
  misc_feature (1)..( 3000): cDNA_ID_1808995_gDNA_ID_1621149_Annot_ID_56830 3000 nt of promoter + ATG
gtaaaacaaacaaatgtgtggattacatattacatgtatgcatgagaaacatacaaaataaataatagagatgaataatttgatttcctgataaagactaaagtgttaagtggactactccacgaattaataaaaagacatctttagagaagaaaagtagacatccaacaaagttggaacccgtgagactgatcggtgatttgctattttcttcgtctcaaattgacaacatacatccctagtttaaagtttaaacctgccccaaggatactcaggtcaatgatccatcacatttactagcatgtccattacttaactggtcgtttttaattgaatctgaaaaagttggaccttttatcggattatttaggtttgggccctttggggccgggtttttctctgccaaccatcagcccaataaatttttgttttatatttgtcaagaaaagatctataaaaaaaaaacagtttcgcaaatccaaaccacaaaaacgaatactagcagtacaattgttcaaaatttatttgacaactgtgggatttgaacccacgccctttcggaccagagcctaaatctggcgccttagaccactcggccaaattgtcaattgttaagagcatcataaactatttatataaagcaatccacattttaatgttattattaaagatcatccaatttttttttatgtgaaagcatgaaatattcagcgttacgttgatagttcaaatggtgtactagacttttattttttatcttactgaagaaaactttaaaaatcatgaattcggatactggctgcaatgaagaaaccagtttaacatgttatgtcctccagtgtgaggaataataagttttcaagtttcactatagaacatcttgatcatcttaaagcgtaagattatattcgatttttaaattctttattatgaaagtaaattgtttctcttgggtctttttataaaatttattcaaatatctcatgaaatatgaagatgaaacgaaaacatatgtcactgttaaagttaatctttataagccagaaaaagaatgacaagatcttcggtcactcacaagtcacaacctaggggataatgaatttgggtgatctcaaaactcaaaaaggaaaattaaggtggtgtgacaatataaggaaagaaaattggttgattttaatattagaacgtgggcctgtaaaggcccattaatagtccagcattatgatctggatccctctttaatcttatctccaaaagcagtaagcacggttccgctcacgtgaccataccctacgccttaagcatagtcacgtgccattagtgttccatttcttcagcacgacgaacctatcagaaagtaaaaaatcaataaataatatgaaagttaattattttgtattttcttgtttcacctatgaaagttaattatttgatttacagtttatgttttttttggtggtgaactgtaatttacctattattttagggggtctcttatttttatccgtaaaacgacatattgtagaaatttttctagttaaaaagttgacttagaataatcgtgtatgacttttgcccataactaataatatatacacgtatcctaaagagtctgaaattaatacgaacacaattcattcactaattcactttgtactttgtagaatgattgatttattatacttgttacatgctttaagattatggacaaaaaatataaaattatggacaaagaattgaaaattatgggcaagaaagtaaaaactttctaatgtaacaacatatttggttgaattaaatacgaccacaataatagccttacttattatatcacatatctttcatgtccccaagtcgcgaagttataaatgcgatccaatattctcaattttggaccggcttaaaccaacaggcgttataacagctccaacggtttggttctgttaatttatttcgcggtacgatgaacattcaatttagctgatgtactagctactagctttttttttggtcattgaggttaattttcaatgaagttatttttttttgtcaatttatagtcttgttttagagaatttactttcaagtacaatcgatttcacgataataaatttattataggctaaacaacgatcattagaataactccaaacttgtaatccaaaaataacatttacactaaaaaaaattcaacttattatacaaaactaaaaaatttggtatcacttcaaaagtttaacttcggataaaattgagacattctcatttttatataaaaatttattcgagatattcttttttttcatctccaactaaaataacaacaaaaccgattataaacaaaacaagcaaagtagcaaaaaaactattaaacatcattaagatttttaaaactaaataattacctaataatactaaattatatgatcctcaacaatcattcggttaatttggataaatcagaacccggtttaaatttgatatgatatgaaatccggttaagttccggtaccggtccgggttttggttttgtttaatttccactatggaaagagtgagagagagatagagaaaaaggtggggggaatttaatggaggagtaataaatgctctcaagcgctctctcttcccttctcttctcccacaacagactgtgttcattactcgtggggtcggtctctctcctctctatctctctctttctctgtgaagacgaagacagctgtttctgagtttcccttttgtttttgtgtctatcttctcaaccaagttttttggtgtccaaaattcgcaaagaaacgcctttctcttcttctccttagatttctcggactttctttcaatagtgggaaaaagacacagaatctcaaaaaagtcctctcttgtccaaagtccaaagcttttgaaagagaccataaaaacagagcttaatctctctctgtctctgtctctctctcttttggaggcttgaggatgacgagaagagctgaatttgagatg

SEQ ID NO: 7522 - DNA, 3000 bp, Unknown
  misc_feature (1)..( 3000): cDNA_ID_1817967_gDNA_ID_1621149_Annot_ID_56841 3000 nt of promoter + ATG
cggtgaagaagaagactgagtttttggtcaaggagatgaattggccagtaaaggctgtggcttcaatccctcaggtacttggatacagcctagagaagaggactgtcccaaggtgtaatgttatcaaagttctcatgtcaaaaggattgcttgaaagtgaactccctccaatgtcttctgttttgacaagtactagtgagtcgtttttaaatttgtatgttagcaaacatgatgacaagcagcttgtggctgagctgatggcaatcttcaccggaaatcgtgtttcactcaccgatcagaaggcacgcctagaacaatgagcaacgttaaggattgttttttgttttctgttaggtttagattcattagtgagtcttgttgcttgacttttggaagtagataatagattttgtgtatgagtgtctaagcctttgaccctgaaggatgatgaatcagtcttgtatgaaaaaaatctttacaattatctttctttgtcttgttgatatgaattatggttaagatctttgtgatgtgctttgttctgttttggaaattaaacagagcatatgatatatttcattttactagtttcgtggcagaaatctttcctgtttcgcaggatttggtagacaactctgaggagtaagatccactcgcaaacgatggaacggtttattcaaattcctagtttgctttttctacttgagtccttaagtttgtattagagtcttcagtatacttcataccttcttgttcaacccaattccaactcttcagtctctgctacatcttcaaactccatcaagcctcaaactaataatctttcaagtgagattataaatcttcaagcttcttggattggatatatcaatagactataaaagctagtagaaaagagtagaaaagctagttgaggatttataataaggtaaataagtagaaaagacttttatagtctattgatatatccaatccatttacttgatccatctctgtatgcaatctgactgacaaattgtaattgttaaactcttttttactagctttttttaactcttcaacattaaaagtctagaaacagaagacaactatttactacatgatatttttggttatttgttaacaagaagcactgtggtaaagcagccgaggatgaataattttagtgtttgtttgatgagtgttaatcttcatggaatccataaccacaaagatttggttgatccatctatataaagcaaataggtgtagttaatcaattcaaggtcttttagtgttatcccttgccaaggagggcaacactagagtctagagtttcgttttccacttgagtccttctgttggagacagtgtcttcattacacttcctaaccgattccaaagcttcaaatttcatcaaacctgcaacataatgatgacttcacaatggtgtcgagtgagctccattaaaacatgtataggcctaggattcagcataatgatgatcaagcgctatcttgagtgcattgtaatttgatgaaagaagttgacttgaccagtggcaactagaggctggagaagaggattgtcccaagttataacctaatcaaagctggtacgtctcgaagcatgatgataagctggtattggagattactgtttttgctccaaggaatgtcatatcaagaaactgtgcattgttcttgtacctcgctagcatcttcctttgttggttacatggtttgctattccaaccaagctctggtactataaggcaaaaggaaaggagaaggagaccattaactagtctatattacaacaatacattatatgtttcgtggatatctctttttcttatcttctctgctgttttcctttcttttgtaaagattgttctttgaacatgaatcaatacactttagaatctattaagatagcaaataagttgatgcaaagagcaagtgtgagatggataattgaacgggagtgaatgaacctgtcactagatctctaatggttgttgttacctcctggctcctcctcagctgcctaaactgcgtttagctcggccgcctatcactttttttttgtgtgtaggtttgattggtctctctcattcagaatcatatgatcaatttgttttcaagttttgcaatgtttttgaaaacattacatttacgctaattggatttttaaactcgataaccgtgattacaaatagagacgtaatattttttagattatttctcatgtttttttgtgatttgttcatcttatgcataatttatttttcacttatgttcaacaatagtatacaaaaatttagaaatgctcatcatatataaaatcacttttgacgttctgaggctccaatctattaaaaataaacgatatagatgataatatatacgtcttttaatcaagtgaatgaatatttagtttttttttttttaataggcttcactttgtttcttactcagtttaatttttatttggtttttataaaattacaacttagttttaatcaaaggttctaaattaaatttgaccaaaaacataaaaaaataattacgtaagagcttttttggcagaaaataatttagagtaattatttattccttcgacgttaaaaaagaataggaaaaaatatgtttaaattgcatcattcgaccaataagattagaactcatcctttttttttttaaggatatatagaattcatcactgaatacatgtttttatcccaaattaacgcaaaagagagaactcgagatctgggcatagcgactcactcagatctatacaccttcttcttcttcttcttcttcctcttcctcttcgcttcgttcgtaaactcatctgatctgtggtaaccaccattgttcctctccttacgatttcgaatttctgttttgatctcactaccattgttgcaatttagatctatttctaattgttcgtgattcgcttttttttttctgtgatctggtttttgtagagtgccattatcgttgagagatt

SEQ ID NO: 7523 - DNA, 3000 bp, Unknown
  misc_feature (1)..( 3000): cDNA_ID_2686130_gDNA_ID_1621150_Annot_ID_56845 3000 nt of promoter + ATG
tgattttcagtgatagcaggaggccttgctgcttataaatcataaattcttgtaagttgaaaatcaccaaatgctattctagttggtcacacttgaaaaatattaaaactcacattccacaaccaccttctccagttcccttatggctttctcgaggattgaggttttagacttcacattagaaccatcttttttctgagtagagacaggttattgcagaattataaagcaagactgatgtaaactttgtggtaagaaaaatgcatggaagcaaagattgaccagaaaaatatcacagaaccgagatgaaaactggagaaacaaaactacgaccttagaatgcaaccaacttactgagtgtattttatgtaattgtagacacagttggaatgtacttacagacgcttgactagattgtctgcttcccgttacatttgccagctgatgcataccattgttttctttctgacggactactgttacctctgcaaagacattggggggagattttcctagcagggacgtagattgttggtgtaagcttttgttgctgtatttctgatgaagggcactagaggatccagtttcccttgacttgtgacttgtatcattcctagactgatgatttgctctatcagaatgcttcacatcatccagaggtactgaagtatttgcatcttgcgctccagaaggcaaaggtgactcctgtgttttccaggacccaggagcagttgattgatcctggacttccccattcgtataatcagttatcagactcaaactccgacataaattagtatgatttgcaataaaagatgttacctttttcctagctgttatagacaacttggtgtgtttatcggatacgtcaactgcatcacgacagggttttgctgaatcttttcgtcgccgttttttgggttgctggttagatgttgttgaaggttccctattgtgaaaatgaatcagggattagataacttgtaaatgaaatatagcatgattaggcaaaatgagaaaaactctatcctatcgaaagtgcaaaacctacatctatatgaacgttttttaaccagaaaagttgaaaaatggactttacccataccaaacaccctacagacattagttaaggcagtagtagcaagactgccaaccatattttaccatttggagagactacacatatccaaataggaagaaaaactgaaaagcaaggtgatttcatatgtttatttcaaaaacttacgacatgcctattctaaacatgatctgagtgattgaaaagtgacaaagccaccaaagagttaagagacatcagataatgaaaagaggaagataactcacatccgctccaacttgcctctatttacataaaatccatcatgtttaactgttgaattatcaacttcgaaatactcatcctgcaaggagtagagtaaaacagagatatgatttctcagctatcaaaaatatttgaaagatatcaacaccaaccagttcagcatcatctataaatgaatcttcagtgtcatactcatcatcatcaggagcaccgtctaactcttccccatcactgctatcgttcccctgagatttattctctgaagtaagcatacacttttcagagatgtgtgaatgcaacagtgctattgcatggtatgcaaaaatgttgtgaatgtgaaaaatcaaacatataacaacctaccaagaaaagtgttttaacaaagagtagcataccttatagagcctctctatcttctcaataacagcgttgaaacggttagaatgaggttgttcattcgtttcaatctctactggatgcccctacattatatacgaaaatacagctgttgaaaatgattttaaccacccatattgtatgcataagaagaatatattgtgaggaagctgcaagcatattataccatcttaaatgaagatccactattatatgcttcattctcttgcactaatagatattaataaaactttctctatattcttcactattacagctatagtttccattgcaactatgtgaaccaaattcctttccagatcaagtataattgatggcatattcacattgataacgatgaagttagcctaatgtagctagcaattagaaatgaagccaaagatcatatatcaggttgtagactttctccgtttaaggagtttgcttattgaactctagtcacagacgtcagagagcaataacaacagaattcctcctataccatatcgatttcaagcattttccccaacaaataaatctgaaaatctgcgaatttagtaaagctcctttataaaccctaacaaagattacaactccccgaaacaagacaaatgcttactccaataacagcaaacgaaacccacaaatgcctacaagtatatatatccgattaccaattcctacaacatcaaactcaccggtgcaattcgaaactcaaggttagggttagcattaggaggcgggtcgggaaccgaagccgataaaccattgaccttaccagcatccctcataagcttcttccacgaaacatacgtcgtatcccctggccgaagctccaccttgagtaatttccgatcaccggccgttaaaaccttcggcgacgctctcaacaattcgccgccaatagaaccaccactcatctcattaacttccgacattaataattcgggtcgggtcgggtcggatcagtttgatccactatatactaacccctgggttcgagacggattgatctaaacagcaatcaagagagtggaatcgatgaatcgatgtagagaaactgaaactgagaagaaaaagttgcgcgggataccaaaaatgacgctcttaattatttcctaatttatttttgttgttttattcactaaaaaggattattattatattatatagtttttcttttttttttaattgtatttttcctcgaaatatctaatccacagatagatagaacactctgtgagctttatccgcttccaatg

SEQ ID NO: 7524 - DNA, 3000 bp, Unknown
  misc_feature (1)..( 3000): cDNA_ID_1818099_gDNA_ID_1621150_Annot_ID_56846 3000 nt of promoter + ATG
cacgccggctacaagttctaactagtccactcaacaacagtcaacaccatcccaatttctcaaatacaaacactttgttccaatcttgaatatgaaaatatctcatcacaagaataatacaagccatcataatcatcaattgaaaacttgaattaaacacctcaaaacttgcaaataagctagcttctctagtcattgaatgttagtccatcaaactattgcatctacacacttttttctagaggcccatattcatctaataacacatccatctctgctgctagtgcagtacctgaggtcaccaaaattgtataccctccaccatatcatcgatttagatcatctgctctcgttttccatctcaggaagaaagttatgctgacttgtcgtttggtgtctctcgagttcttctagaaccaatttgagacactgaagtctcgtagcttcctgagatgtttctccatgtcttctctagtcttggtccactcttctctttctattaccgttgttgggtcatctctttcaccctgaaagaatggaaatatatagacatagagtgaagatgagtaaagctagatgaaggaatacaaatgactgccagatgaaatggatttggtcatttggaaatggaaaggtaccacgtgtatgatcttaaaggaggttccattatctcgtatcacaagcaagtcatccttcctatccctttttcttcctcccggaactgtcacctgaaacaatctaaaaccttaacatcggaaagaagattgtcttcatagctttgagctatgcacagtatttaaagaactcataactcaagatatctgattcagaactagaggcataaatagcactaatataaaccagcatttcattagtgttatagcatgaaaaatattctataagaatatgtcaaaaaacccaattggctatggtctacggttgaggtttgtgctcagactcggaatgagaactttgttaataatgcttaaataacttggaagataagaattagtcataccagaactctggctctggtgattgactttgtcttggaatcaataacatatatctcttcaagatctagcacaaattctggatcgtttgtccttctgttccggtaatgttttgtcaagaaaacctgcataaaaaataaacacgatgaagacaatttgtatcagaaactgtaactactaaactaagtagtttcgtgttgatctcatccttaatgcttaaaaaacatatttcctggtgtggtttccaaaaatgttgtcaaatcaaaactaagtacatccttgttaatacatgttgctcaagactccctgcatcaaagacctaatggatttaacatcaatgtacatggtccaatatgtaccttggatatctccctctcagatttgtacagtggatctctgggggcatcaataggtggttcagtgacattgtaacatccatagtcactcattgcacatcgaatatactgtacttgtaacatcattaaacaagcccttgttagcaccactcactcattgtaacaacttgcttataaataaaccttacaatgtaaaacatacgcaatcatgaagcagcaaagagtacaaaactggccacagaatgaaaggaaagtgactaaacaaacacccagctgctacattctgactctctaatcatactaaatgctgaccatttacggcactttttgagattatatgttcaaaattccagtctatcagtgtgagtagaagttccaaacaataccaaacgtgtacagctctgtgtagataagatttcttaagttatacaattactaggtagagtgaaggtatatgggttatacaattactaggtagagctctgtgcagataagatttcttaagtgatacaattactaggtagagtggaggtatatgggttcaattagcaattaagcacaatatgaaaagcaattatcttgctgaacaaaaggaagtctcagaacaacgcataggcattacaaaaacagcaaccgataaggataaatgactgaccttttgaggcatcggtgcaagaactctcggaattgagtaaatatctgtatccggaggagtaacatacatctgcagccacccacacaaaacaatttacaattgaagaatgagcacagactctagagaaatcgaagaaatgagcaattagagtcactgggaattcacacacctctctgaaatcataaacatcattatctggatcaggaggttttctgataaagaaatcacagtccattaagctgagtttatgaaactcatcttcgtttatccgataatcaaccaccatatccgaatcccatccttgtgtcgatataaaactcttactctgaacaaaagcgatatctccatcaccaccaccgcctgcagcggctatcgcggcggccaaggggtcatactcgacatcatagtccttcttgttgtcaacttcctctacctcctcatcatccatatcatactcgtccgctccacctccatcagcatcgacgtcatctactttaacgactataccacggccgcgtcgggatttcagtgttaaaggcgcgaaaagaccgtccgttctgaatgacgcaaatagccgctgagagccggagggataaggtggcttcgaggtgaatgagagtagagataaggaaggagaagcggcggaagacgccattggaagcggataaagctcacagagtgttctatctatctgtggattagatatttcgaggaaaaatacaattaaaaaaaaaagaaaaactatataatataataataatcctttttagtgaataaaacaacaaaaataaattaggaaataattaagagcgtcatttttggtatcccgcgcaactttttcttctcagtttcagtttctctacatcgattcatcgattccactctcttgattgctgtttagatcaatccgtctcgaacccaggggttagtatatagtggatcaaactgatccgacccgacccgacccgaattatta

SEQ ID NO: 7525 - DNA, 3000 bp, Unknown
  misc_feature (1)..( 3000): cDNA_ID_1818091_gDNA_ID_1621150_Annot_ID_56848 3000 nt of promoter + ATG
aatctcaagctcttgcaatcctacagaggaaacaagagtggtcaagagaaagaacgaggctgtaatggctgagaaacaagtcgttcttgccctgaagaagcccgaacatccacagacacgtgtaatcccagctcctcagaatctgaacatcccacgaacaaccccggacctgaacttgccaagttgacatcacgattgacaaaggagctcttagaaacgccggagacaataacctctggcctcttccttccttgtattttgaggtggcacggcattagtcctggcgatgccgatgcttggtttttttagctacaaagcatggtttataaagttgtctgtattccagtttggctcttattaagttagttactctatttacgtgtcctttttcaaaactctaatgtataaagttatgattttacgggcaactctttacttttgagtaaaaaaaacagagcaggttttagtactgaattttgggtaacgtagttgaaaatttgatttcggacgataatgtaaaattgatgaaatacatcaaaatgactacattaatccttttgacacaatatgaataatcaattttaattaatattattattacttgtaaaacagtataaatatggctcattatttcacagattctcaacactctctcattctccacaatttacgatggcacaccagctccgttttgccgccgcaagagaacccatctcagaagagtatccggcggttgctcttcctcatccacgttgcatctccgtcgcgtttcctcctccgagattcacaccatctccgtcgcctttaactaattactcattcttggccgcattaactcctcaagaactggagatgcgtttgcaaattgcaatggatgtccgtaatgactaataacgaagatcatgttgcggctccgtttgaagagatgatctcgaagttagaccaaagaaagcttcaaacgatggcgtcattgctgacatcagatcccgattacttcttgatgatcgcaagaaacatgaacggctccaaacgcattcagaaacttctcggaaaaacagatgacgtggacgctttattcgccgccgctatcttgcgccgcttcctccacatcatcaccgacaagtacgcgtcgtacgtggtgagacgggggatgacagttttcgataagaagaagaaaaaagcaatgtacgagcacattctccactacgcgagccacatagcgcgtgataaacacggtaacctcgcgctcaacgacatcataaccgacgcggtacagaaacaagctctttgacgtaatcgcgcacaaagctcttgtactaagcaacgatgcttatgggaactttgtgatacaacgcgtgcttaaactgaatgacttgcgtagcaagaacaacatcgtcgttagtctacgtggccactttgttgatctctcgtttcagaaatatggaagctacgttgtggatgtacttttggagacgaaggagtcaatggttgtggtggtggaggagcttatggaatgtgaaggagatatgttgatgaggttggcgaggaatgagtatgggaatttcttggtgtgcaaggcactgagagtcacgcagaaggagatggttaggactgatctgttttggggtttggtgcataagctcaagccttttcacaatctcttgcgttggtctcgtggaaagaacattgcatccatcttaaactcgattcgttagttcgtctcaaaactagttaacattgttcagttattaaaatctctgctgaaagttctcgatttgatgttgttagctaactcttttaaggaggtttaccataacttgtcaaaaacacaaagaaagggagaagagggattgatatacagtatatagaattctctctttcgtgttattacttattagaacaagtttgaaagctgaagcactcacagtaatttctgtaattaaggacgttttgccttatgatcaaattctacaatagatcacctgaaattttaatacaaatcctaaatccatcaaggtatgtatcaaattgagatttctgtaactactagagtttgaccaaacagttttagttaacctgaatgtgtatgcctaattgcctattgcctcataatgcatcaagcaataccatctactaagcgaaaatggctcaagaaacaaacgtagagaaatcaaacattaggcattaagatttgggatagatgtgctagaattttctttgattgttacgataaagaaacacaaccctccaaaacatttttatatgattgctttttttaggtcgggtttttatatgattgttatttccaaggaaaactaaacacaaaaaataattatgaaacgtttttcggattgttattattagtaatagattaaatctgtatttctaaattttaaattttattaccaacaaataaaatgatatgatttcatatatcaaattgtaagttttgtgagcaaattttcaaaaagaaactgtgggtattcatcaatgataatctatatttggattattatcatgacaaaaaaaggttacagaaaaattaaacaattgtagatattgtttttattttagatgaaaccttctgtccgtattataatttgcatctcgaggttcttatacgatttgtactgaataaaacatattttttttgtttttaatcataactttcccaaaaaccatctcttccatcgctagctgtaccggtttcaatctcaaatcctgggaattgaaatttgtttctctgtcggagaatcatcatcgacttctctgctacttctctccgcgctctccttcgtcgtcgtcgatctcttcagcttcaccgatctcatttccaatcctgaaaaatcgatgtggtactgatctacgattgtgctccgttggtagccttatgaattagggtttttcttacgcatcttcgtatgtggagattggatcgtgttcggaaaacttctggacactgtcttcgctgctagatttttggatcatccttttgcgaaa

SEQ ID NO: 7526 - DNA, 3000 bp, Unknown
  misc_feature (1)..( 3000): cDNA_ID_1818046_gDNA_ID_1621150_Annot_ID_173214 3000 nt of promoter + ATG
gtggatgtttttttttcttaaagcattttggtgatagttaaagatgatataataatatgattcttaagtttcttcaaatacaaaattaaaatactatatgtaggtaaaagcgattaaaaaaacaatttacaaaataactcgaactagagatattttaaaatatctaaaaggtgaaattaaaatctttgatagtacaaaattattggcgtaacacaaaaaaaatacagataaagcctcctatgtgaaagtgaaactatactgatctaatcatttactaatagaaaaccaccatttttcccaccagatcgtatgttatcattcgttaattatcaccacatcttaccgtttttgtatgtaactcttgagatgctatattttttaatcaccatgttttactcaatgaaaatcatgttatttttaaaatgaaacaaagatcagagaattcttttacatatatttatgttcaaaactaaatagtaattaatggttgtatacacacttgatcatgatgaggtgagtagggggttacatgcatatataaagacatggtaattaaacagagcaataattatgaacataactctattgttgcttttttcttttctttttgccttttttctgataacctactgttgcttttctttgcatatctatttgcttagatgttgattattatgtcgatctttgcatgccaaatttatcggtggccaatttgttaggttcggtttttaagagtcaattaagatagtcctaattaaatacactaactagtttaaatacacgtatagtgtattaacgtgactacacgtgtttatgtattttttttgagaaaatgcatcaaggatttcaatgaaatatttgacaaaacaaaaaaaaggatttcaacgaaatatcaactcaacaagttacagaaactaaaactgtataaatcatcttgtaattttgtaaacggtgattactagttaattttagtaaatctaatatgttatctacagtctaataacatggaactccatgaccaatgataaagcggttctagtagtttctcttacaacaatcttttacacattgaaaacatataaatttagggaatatatatatatgtatgtatattgtatcctgatattccatacaaaagagtttcgaagtgtttttttgtattttattaggaaaaagtgcaaaaattcaaaatttgaaacttaataatatttgagtgaagaaactagaaaggtccgaattgacaaaacataaaattctgtcataggggccataattttttggagccgtgcaacaacaagggtacaactttaacaaaaagataaaaataacaagggttaaaggggcaattcttagtgacaatgttaatgtagatcaactatatgaaattttatgatggtagaaaaatacacactagctagacggtagaaataagcacatcaaagcaccacaaagccactacactaaattgcaataagttgaatagttaaaacatttgtgtgatttgggacgagaaggtgcatgcgaaccggatttgacaaagcacgtgagaaccggatttggtagcacgtgagtggcacactttcctagtggcatgtctcagctttttcttatagctctctctctctcagcttcgtaacatgttcatgtttcctgcatgcaattgtttattacccctactggctactactactactactagtatttcgagcatcgaagctctcccactccacaattttatactgaaaactttaatctttacatttccaagtctccataatgtctatctgtaaagtgtaatctaaaaaaactgtactgtagtttatttctttcagtaacaatatacacagttactggtggatacgaataaacatttctatatgaaaatgaagtgacccaaatccatccgagtaacgtcgattccaacatcaactatactctgtttctgtttacgttttatagatttttcaagtcatgggactttataaagaaaacataatcaataaatataaccataattttataatgtttgcctcattactttccaattgtttttttttaaaattacagattccgtttactgttatactaaaaagaaacaaaaaaacctgtcaattcataacatttctacctaccaaactagcaacactttttactgttttcttcttaataattatagagtcacatagcttaaacctttttcttttcttcttgaaactcgttataaagagtaaaaagataaaagtaaaagtacagggcaaaagggtaaaaagtggaaagtaataaggcccaaaaaaaacaaaattaagacacggtcttatcccaaatctcctttcgtcgtcgacgttgtttctcttctacaatttcccggaaaaatttattgttgaattctcacaaacaaaaaccaaattcgcctttgttttttttacctctgtttctcgtctctcacactttcttcttccccattttccaatttgcatttaagttttgcccaaatccctagctttcttacacacatccctatccgttaaatttcgtagagatcgaaatcgaaattaattgcaacaagacgaatccttttttctctttttagcttatttacaaaaaaaaactaaaaccccattaaattttcttttatttaactagttgctatcagtctctctcttctgattcctgtctgctacggtcacgtttaaagaaagaaaaaatcagcaaaccccatggattcttctgtctctcctcctctctctgtcactctctcgcatgcacgagacctctcttcctcctttcctcttttgtttgtttcctctcattctcactctctcataacgacaactaattaatcatccctactctgtttttccgatttgaaaaaacaaaacccagatttcgaatttggggaaagcaatggtctttccattaaccaaagcatgagacttgaaacagcattttgtagttgtgtggcgacaacgacgacgatattaaagttagggtttttctcac

SEQ ID NO: 7527 - DNA, 3000 bp, Unknown
  misc_feature (1)..( 3000): cDNA_ID_1842620_gDNA_ID_1621150_Annot_ID_173210 3000 nt of promoter + ATG
aaccagctctctcagccgccacaacagccattacagacgcgtgtggccggatcacaacacgcttaaccactgccgggaaatcagagatgcgcgaaccagaatcttcaactacctcgccaataccaagtcccggatcgggagttgcgccgccgttttgctgaagctcatcggcattttcaacgtcatccatttcttcgttgttgttgttgttattctcttcgtcttcttcctccatatcttcctcctcttgtttcggtttcctcgccgccgataacccccctctcttcttccttttccatttccctcttctatctgcgacagaattgtaaaaagtgtaattcaattcacacgaattctcgaaatacccatcactacgatctatgtgggtaagtcaaatcccaatttaaatttggattttgagagagataaagatgtgaaacagcaatttaccttcagaagctggcatttttgtggatgaagatagagaaatagaggttttgggttctgtggaatcgaagcaagacccttagtaaaaagaattgctttctttgtcttctctcctccgagtcgttctgatttccagctctcgagctaaacaccaaacctttttctcgcaatttctttcaccatttccttcattaatctctatatattaattcattctccacgacgacctaaccttctcgacaaacaagagggttctgatttcgaaattcaagcttcgttgaccaatccaaattttggtttaacttcggttaaagtcaactttacttcggttttatttttcaattttgaatgagaaaaaccgaatcaattatttagttcggttcttaaagttcaaattggttaaaccggtttaaattgatacattagtcgaccgtcgcgcattaatactggtgtggtggttccgttaacgagcaacggcgatgaagagacctcgacctacatctcagccgtcgatctcttccaccgtcaaaccaccactgtctccgccggtcacaccgattctcaaacagaagctacacagaacaggaacacctaaatggttcccgttaaaactaacccacacggagctgacgttgccgttaacttttccgacgggtcaaacattccggtggaagaaaactggagcgattcagtatagcggaacgattgggcctcacttagtctctcttagacaacgtccaggagacgacgcagtttcctactgcgtccattgtagcacaagccctaaatccgcggagcttgcgttgctcgattttctcaatgctgagatctcgttagctgagctatggtctgatttctcgaaaaaagatcctcgtttcggagagctagcgagacatctccgtggcgctcgtgtgttgaggcaggatccgctcgagtgcttgatacagtttttgtgctcatcgaacaataacattgcgaggattacgaagatggtggattttgtttcgtctttagggttacatttgggtgacattgatggatttgagtttcatcagttcccatcattggatcgattatctagggtttctgaggaagagtttagaaaggctggttttggttacaggtgatttcatcactctctaatggttgcattatgttgaattagacatttaggctaaaactttgcttgaagcttatacttttatttactctgtggctatacattcatagaattgaagctaatgtttggtctaagctagataatcattgtgtggccgtttctctgattggttctgatctcatttgaaaactctcattctggtttatcttgtggtgagcagagccaaatacataacaggtacagtgaatgctttgcaagcaaagccaggtggtggtaatgaatggcttctttctctgcgcaaagtcgaactccaagaggcagttgctgcgctgtgtacattacctggtgttggtccgaaggtagcagcttgcatagctctgttttctcttgatcagcatagtgctattccggttgacacacatgtctggcaggtaacaaagtccatcggtttctatgtattgtacttacttaattgagatccaattacataatggtgatgatgacttcgggcaactttttttttgttctgttttggataatggatcagatcgcaacaaattatctactgccagaccttgctggtgcaaaactgacacctaaactccatggccgagttgcagaagcctttgtgagtaaatatggtgaatatgctggttgggctcaaacattgcttttcattgccgagttacctgcacaaaaaactctcttgcaatcgttttcccagcccattaacaaactggatgagtctgcagaagttaatgaaactagctgtgatacgttgaagccatgactatgtgtctacctaagctacgaggaatcgttttcacaacccattcttgatgcgtcaagtccagaaacttgaccttggaagagctaagaaaattctgaagctgatgcagtatttggctccctggcaaatgagcgtagttatttgttatgatcattgtttactaaggaaccaatcttgatatgtacttgtaactttacattcaaacttccaaattaaattctaattgtttgttccctttgcaattctcttgatttgaaatgagaattttttccttttatctatttcttttgtcaaaaaacaaaactaaatttcgtcgaaattaaatttctataagaagcccaataaagcgaggcctaaattaggcccaaaatactattggaggcgaaaaagaaagtccggctggattttcctccaagccaccgtcgactttacttagtactccctctctctcccctcctccttcccagatttcgtctccgttctgaaaaaaactccaaattctactctgaaaccctaagtttccgatgtcggtaagtttgataattcccagttaattttaatttcggagacctcagctctattagtcttacgcatcaatggtttaatagtgactgaacgataaaattgattgatatttgtggcg

SEQ ID NO: 7528 - DNA, 3000 bp, Unknown
  misc_feature (1)..( 3000): cDNA_ID_1818061_gDNA_ID_1621150_Annot_ID_173208 3000 nt of promoter + ATG
tcgcaaatcaacaggtaactaatacagctacataagtaaacaacacaagcacactgacctcttctcgtaaaggatggctgagacaagactagcgaaagtttcaggcttcatgtctctctcttccctaagctggtaaagcttatgacgaaacaccaagcgctggtatcttcaaacatcaaaagacaaaacaaagaggaaaaaaaatcttctcagttcacttcaaaatgtaaaaacaaacaaatatgaaaaatttagaagcttgcacgatagtttacagtgtttgaacatcggtggcgagaccagaaagaccgatgaagacacgatcgtggatcttggagattctctggaaatcagtggcgattgtctgtagctgaacaccgagtctccgatcactggcgatggcgaaacaattcttacctaccatagcaacaacagcacttccattgtactcgaagatctgcatcgccacaaatatcaatcaattttatcgttcagtcactattaaaccattgatgcgtaagactaatagagctgaggtctccgaaattaaaattaactgggaattatcaaacttaccgacatcggaaacttagggtttcagagtagaatttggagtttttttcagaacggagacgaaatctgggaaggaggaggggagagagagggagtactaagtaaagtcgacggtggcttggaggaaaatccagccggactttctttttcgcctccaatagtattttgggcctaatttaggcctcgctttattgggcttcttatagaaatttaatttcgacgaaatttagttttgttttttgacaaaagaaatagataaaaggaaaaaattctcatttcaaatcaagagaattgcaaagggaacaaacaattagaatttaatttggaagtttgaatgtaaagttacaagtacatatcaagattggttccttagtaaacaatgatcataacaaataactacgctcatttgccagggagccaaatactgcatcagcttcagaattttcttagctcttccaaggtcaagtttctggacttgacgcatcaagaatgggttgtgaaaacgattcctcgtagcttaggtagacacatagtcatggcttcaacgtatcacagctagtttcattaacttctgcagactcatccagtttgttaatgggctgggaaaacgattgcaagagagttttttgtgcaggtaactcggcaatgaaaagcaatgtttgagcccaaccagcatattcaccatatttactcacaaaggcttctgcaactcggccatggagtttaggtgtcagttttgcaccagcaaggtctggcagtagataatttgttgcgatctgatccattatccaaaacagaacaaaaaaaaagttgcccgaagtcatcatcaccattatgtaattggatctcaattaagtaagtacaatacatagaaaccgatggactttgttacctgccagacatgtgtgtcaaccggaatagcactatgctgatcaagagaaaacagagctatgcaagctgctaccttcggaccaacaccaggtaatgtacacagcgcagcaactgcctcttggagttcgactttgcgcagagaaagaagccattcattaccaccacctggctttgcttgcaaagcattcactgtacctgttatgtatttggctctgctcaccacaagataaaccagaatgagagttttcaaatgagatcagaaccaatcagagaaacggccacacaatgattatctagcttagaccaaacattagcttcaattctatgaatgtatagccacagagtaaataaaagtataagcttcaagcaaagttttagcctaaatgtctaattcaacataatgcaaccattagagagtgatgaaatcacctgtaaccaaaaccagcctttctaaactcttcctcagaaaccctagataatcgatccaatgatgggaactgatgaaactcaaatccatcaatgtcacccaaatgtaaccctaaagacgaaacaaaatccaccatcttcgtaatcctcgcaatgttattgttcgatgagcacaaaaactgtatcaagcactcgagcggatcctgcctcaacacacgagcgccacggagatgtctcgctagctctccgaaacgaggatcttttttcgagaaatcagaccatagctcagctaacgagatctcagcattgagaaaatcgagcaacgcaagctccgcggatttagggcttgtgctacaatggacgcagtaggaaactgcgtcgtctcctggacgttgtctaagagagactaagtgaggcccaatcgttccgctatactgaatcgctccagttttcttccaccggaatgtttgacccgtcggaaaagttaacggcaacgtcagctccgtgtgggttagttttaacgggaaccatttaggtgttcctgttctgtgtagcttctgtttgagaatcggtgtgaccggcggagacagtggtggtttgacggtggaagagatcgacggctgagatgtaggtcgaggtctcttcatcgccgttgctcgttaacggaaccaccacaccagtattaatgcgcgacggtcgactaatgtatcaatttaaaccggtttaaccaatttgaactttaagaaccgaactaaataattgattcggtttttctcattcaaaattgaaaaataaaaccgaagtaaagttgactttaaccgaagttaaaccaaaatttggattggtcaacgaagcttgaatttcgaaatcagaaccctcttgtttgtcgagaaggttaggtcgtcgtggagaatgaattaatatatagagattaatgaaggaaatggtgaaagaaattgcgagaaaaaggtttggtgtttagctcgagagctggaaatcagaacgactcggaggagagaagacaaagaaagcaattctttttactaagggtcttgcttcgattccacagaacccaaaacctctatttctctatcttcatccacaaaaatg

SEQ ID NO: 7529 - DNA, 3000 bp, Unknown
  misc_feature (1)..( 3000): cDNA_ID_3050703_gDNA_ID_1621150_Annot_ID_173205 3000 nt of promoter + ATG
attccttatttgcctcaaatcattactttcggattctactgtcttgaactgtgttcatgtgtgtattccctcatcaatcaccttcaattcatattttcctatttccaaaaataaaaagatacagtatctatgtatttaattatatatcatatcaattatatcataataatcataagatcctttttatcgaaataaaaaaggaaacaaatccaatcatagcaagctttttcttttatttaataaacaaaaataaaaagcttcccgaaatggttaaaatccagaaccactaaagtcaaccaaatttgtcaaattcatccacgtcatcagttccatctataaaacgctcacgccattcgtcaagtcccaaaacaagagtccaccatgaaactcacaaacgctctcttcttcttcttccttatctgtctcctctctttatcgtcagcttcatcgaacaagcctcagctttcaaatggctcgaccatcttattcacgacgatagggagacccactttcgaattcgacatctttactctccccacgagccaccgtccaccgtcacccgccgatgagcaccgtctcaccgatggcaaatctattaacttcaacggctatttcgcttctccttctacggcgttaatctcacttctacccaaaagaactcagattcaaccacaagacgtgcatctcatctacgtcactgagagagccggaactcctagcttaaactacgacgtcgttcacagcgataacgttggatctagaattcaggttccgttattttccggcgaggaacaacagagtggtatgaatgtaaattccatgaaagacacgcctgttttaacaaacggctatcttgtccacgtgtcgacacatgagaatccgggtaagcccatggcgagttgggccgctgtttactcgactgagttacgaactaagtcgactcggcggcttacaccactgggtatcgctgacttttctccggctgtgtctccgtctgggaagtggactgccgtggcttcgtttggagagaaaggctggacttggagcatggtagagaaagagattagttcagacgtctacgttttcctgactcaggatggaactcagcgagtcaaggtggtcgagcaaggcgggtggccgagatgggtcgatgactcgactctgtatttccaccggaaaagcgacgacggttggatcagcgtgtaccgagcgattttacccaaaaccggaccggttaccaccaaatcggttacgattcaaagagtcacaccaccgggtcttcacgctttcacacccgccacgtcaccaaacaataacaacttcatcgcggtggctacaaggaggcctggatcagaaatccgccacgtggagcttttcgatttaaagaagaacgagttcgtcgagttgactcgtttagtctcgccgaagagtcatcactttaacccgtttctttcccctgactcgtcccgagtcggataccatagctgcagaggtgacgcaactggacgtaaaactcctcggaatctcctccaaagcctcaaaacaacttcaaacgacctctctctcttcagattcgacggtgcgttcccgtctatctcgccggaaggtgacagattcgcgttcgtctctttcacaggcgttttcgtggtgaacccagatggttcaggtctacgtcaattgcttccacaaatgggatttggaacagtttgggatcctattcgacatggaatcgtctacacaagctcaggtccagctttagctccaggaaagtctcaaatcgatattctcgccataaacgtcgatgcacctagtccagcaaccgccgttaaaaaactaacgactaccggtgaaaacaacgcttttccgtggccatcacctgacggtaaacggatcgtgttccgttctgcgcggtccggtactaaaaacctttacataatggacgcagagaaaggtgaatccggtggtttgttccggttaacgaacggaaactggaacgatacgatagctacttggtcacctgatggtaattggattgtgtttgcatccaaccgggaatttcccggtacgttgttgatgaatatatatgtggttcatccggatgggaccggtttaaggaagctggcgcaaaacttgaccggtttggtatcgatgcatccgatgtttagtcccgacagtaagagaatcgtgtttactaccatttatgctggaatctcggcggagcagatcggtaatccgcattttaacgtcccgagtagtgagatttttaccgtgaacttggacggctctggtttgacgaggctaacgcataactcggtggaagatggaccacccatgtggttccctaagatcaaagctactggtgatgtggcttggcctaagaggtttggccctagttgctctatccaagatttcaagacgcaaaatactaccgtgaaaatgaaaatgaataagcccgcaacaatgtcatcaatgtgtgttgttccttcacaatgatttgttatgtaacttattcttctaataaaaaactccgctagttcatatcttgttaagtatttggttagcctaagaaattatatagcttgaggtttcacattttcaatattttttaaaaataatttgggtcaatattgatgttggaaatgaaatcaacggttgaattattgtcgtgtgctgcttgcaccatggtccatgctagatggaccgaccactatttttccaaacagtgcctatcctatcaagtagatattttctgaatacgtagataattgtagaatacaagaaaagaaatatcctctgtggaataaatgaataatatacttttgtcagaaacgttacaagttaaaattccacgactgattgccacgtgtaagcttatctcaaaagggccctacagtaccatgatgacgtcatctcttacaccactctctgaaaaattcctccgccttataaaaaaactcgattatcgtcttcacttagtagccaaccaccgaccaatccgcc

SEQ ID NO: 7530 - DNA, 3000 bp, Unknown
  misc_feature (1)..( 3000): cDNA_ID_2990159_gDNA_ID_1621150_Annot_ID_173203 3000 nt of promoter + ATG
ccttggagttcagattccaaacttagtttctccgtaatacctgtgtatagcaccaagatatcctcaataccctcttcacagccttttccatccacacaattcacactttcaataaactcctcggtacaccgttttccaagacgaagcttgaggagaagaaaacacactggccaaacatcagagttatgtgaaacaaaagattttgagctggtattttttattaacatattctgttctttcaaaaattcaaacaacacctctgagctaataaaaatccccttctgttgtaacccaacaaaaatcaaacccatttccgaagcaccaactggttttctcaaagagctagtttcttcagcgataattcgatacacattccttccagtttcaatcaactcaatcaaatcaacataagcattctcatattcgtcaaacttcacacaagaaacactcaaacagcctgtgatcaacccttccttatgcaaattaagtagtgcctcacatatttgcataccaattattcctaaacgtaaagtctcatcttcgaggctatcaaactcctccaacgaaaatccaatgagcttttcacccactaaatacaaaacaccattcttcaaatcaccccacaagccaaaaactttagaaacacctctctgtttaacagagatgatcgcatcaagctcatctctttcctcctctcgcataccccacagacaactcatcatcctctggacataactatacttgaggacagaatcacaatcaccatgctcgaacgaagcaacccgtaaaagactcaccttcgaatcatccctcagacttccacataaacgcgaagatgaatcaaaatcactactttcactctccctaatttccacggaaacggcgtcgtgcactagaatccgatccttccaagtggcgtaaaagtcgtcggaccatgatcgagtgacaaattcaacgactttttcaaaattccggccaggttccagcttaagcttcgaaatcgaagggaacaatctgagaagatcaatgtttttggggagagctgatggtccttgaggtggaaacttgacgagaacggtgcaagcaggacatcggattgtgtccggaaacttcttgggtagatttgttaagcattcttcgcacgccgtgtgtccgcaggcgagtacgcgcgggacagtagactcgccgtcgtaagactgtagacacaccggacactccggttcctccatcacctccgatgattcgatgcgacgaacaactgagttaatccgacgacgttttagactttaactaaaacaacatttagtcccgagggtagttctgtatacctagtgtgtatatacatgaaaactatttgtgttataagtcatcaattttctaaaatgtctctttagtctggtggtaaagtcttccagatgagctcataatttatgggccggctctgattctgatgaagtgaagtgcatttgcaaaggtatattgtcatcttacctctgccaatatcttgcggatcctaagacatatgaagtattttcatagtacaagctagacccgtaaaagctaaagatcaaatgtatatagaattcgtcgaagtcttggaaaagaatgatgttacaaatccaagactttatcaatgccctagcaacatgcattaataaagtcttgcattaggaagattctctcttgtccatctatgatatccacaagccctggctcactagaatagggtggatgtgtgcgataacttaaagtatatgctcacttaaaaaatttacatgagaaaaaagcttttatttttttggtaaaaaaaaaagtccaaatataattgataacaatcctaaatttcttttaaagatatattagaataacccagttcttttatatacaaaaatgccatatttttaaaaatgttaaaacactatttttttatttttttttaacactcaaaatttacttcaaaaaagttctaaaaattgccttttttttttttcaaataacaaaaggtccaaacaaaaacaaattcccgtaatacacaaatttatgttgggtcggggctggacactcagtgtcagttgaaagtttaagcatatttataacttaatactgaagttccataagtttattgatgaatgtgataagtttgtctcaatgtaacagctcgagatccactcaatgtagcagctatgttctccagattcattcgtgtttgtaaaaaatgaaaactagaggtggcttgattgttcgacgagtattgttccaggaagcagccgtcttacttcttttcaataacacatgttaaataaatcgatattgtttgttcaatcatagagagaacttcttttcttcttttattattattgtagtagtaatcatgttcattccaattgagcaattatttgctttccatctacgcccaaaaaccaacttctcaatgcatcgacatgtaagaaaatttgcttttatgttataaagttgtgtaacatttctcttggaactattgattgtctcaacgttgcaaataaagtaataaaatcctacaagatactaataatatccaaactgggcttataatcctaaaaatgacttccataattaaaacgaatttagtttattaattagtgtaatggaatattttgtcaataaaataaataatcacgaaggattatataaaggaagaaaaaaaaaggaaggtgggaattttaaaagggaaagacacctgtctctctgacccacccacccattcatttctgtggctactctatcgtcgtcgtctccacaccgtcggtgccctcacggatcaatttctagagagagagagagcgagagagacgattcgtttttctagattctcgtcaaaaaaattttccctccttcgatctctcctttttccttattcagcatttccccattttttcacgcaagatccgtgattttccagggattgatctgattgggggatcgtgaaattcgtttgtgttttctgctcgattaaccggagaa

SEQ ID NO: 7531 - DNA, 3000 bp, Unknown
  misc_feature (1)..( 3000): cDNA_ID_3050707_gDNA_ID_1621150_Annot_ID_173202 3000 nt of promoter + ATG
aaggtcatctacaccaaactgtttattcttcgttgcagcatcttcagcttctctatatttactagcagtgtcagaagcggaggcactacgtcgcatagtacccatggcaaagtcttcaagttcgtctattgaagacattcctacactcttacctgtggaaataatcgcatgactagttagagcacaatgaaaacagtaaacaaaagctctaatccgacacactttcaggtcatcaaagaaattaacctctgttcactttttgtgttggtttaggcggaggcttgagttttgtagaagtatgtgaagtatttgatggttttatcccctgagagctgactgtagcagcaaattcttcaagaggatccacgaacagaccagtagaagtggttgattctaggaccacaaaaggatcagtagcatcaaagttcgacggtgtagtcttgctgaaaaacataacaaaaacaaaatatctcaacaacaaaaaaattcaaaaccataacagtaaaacattttcctgtacaaaggttatctgagatttcaaataccatccacgagacagtaacatattccatacatgacaaacattagcatctcatacaatataacagaaattggcaacaaatgtttcataaaccgatcacaaacctgctagtcgtctgagtacttccaccaaaaccaggtatcaatccatcataaccagcttcattcttccccaaacccaacaaatcatcaaccgcagcagcatattgcttctccgatgaagagaatgacccaaacaaatcatcattcttaacactatcagagcttttagacccaggaataacaccaccaaacaagtcatcagctgaagaaggagttgtcttccccggattcccaaaattggagaagaacaaatcatcgttcaatgaagacttgctattatcaccggaagatgaagatttgttcaacccagcaaaaacatcaaaatcattcgaaaccttcctattagtagagttagccggaaagaaaatatcgtcaccatcaaacaaagacccattagtagaatccttattccaagagctattggaagaaaaagacgtcgactttgcatttaaaccagaggagcctgtaccgaaattccagctctgaccattgttgttagggttacgcttagaagcagccatcggagcagatttaccttgtggcttaatcccataacgctccgttagaacaccaaactcgtccatttctccggttaatcgagcagaaaacacaaacgaatttcacgatcccccaatcagatcaatccctggaaaatcacggatcttgcgtgaaaaaatggggaaatgctgaataaggaaaaaggagagatcgaaggagggaaaatttttttgacgagaatctagaaaaacgaatcgtctctctcgctctctctctctctagaaattgatccgtgagggcaccgacggtgtggagacgacgacgatagagtagccacagaaatgaatgggtgggtgggtcagagagacaggtgtctttcccttttaaaattcccaccttcctttttttttcttcctttatataatccttcgtgattatttattttattgacaaaatattccattacactaattaataaactaaattcgttttaattatggaagtcatttttaggattataagcccagtttggatattattagtatcttgtaggattttattactttatttgcaacgttgagacaatcaatagttccaagagaaatgttacacaactttataacataaaagcaaattttcttacatgtcgatgcattgagaagttggtttttgggcgtagatggaaagcaaataattgctcaattggaatgaacatgattactactacaataataataaaagaagaaaagaagttctctctatgattgaacaaacaatatcgatttatttaacatgtgttattgaaaagaagtaagacggctgcttcctggaacaatactcgtcgaacaatcaagccacctctagttttcattttttacaaacacgaatgaatctggagaacatagctgctacattgagtggatctcgagctgttacattgagacaaacttatcacattcatcaataaacttatggaacttcagtattaagttataaatatgcttaaactttcaactgacactgagtgtccagccccgacccaacataaatttgtgtattacgggaatttgtttttgtttggaccttttgttatttgaaaaaaaaaaaaggcaatttttagaacttttttgaagtaaattttgagtgttaaaaaaaaataaaaaaatagtgttttaacatttttaaaaatatggcatttttgtatataaaagaactgggttattctaatatatctttaaaagaaatttaggattgttatcaattatatttggacttttttttttaccaaaaaaataaaagcttttttctcatgtaaattttttaagtgagcatatactttaagttatcgcacacatccaccctattctagtgagccagggcttgtggatatcatagatggacaagagagaatcttcctaatgcaagactttattaatgcatgttgctagggcattgataaagtcttggatttgtaacatcattcttttccaagacttcgacgaattctatatacatttgatctttagcttttacgggtctagcttgtactatgaaaatacttcatatgtcttaggatccgcaagatattggcagaggtaagatgacaatatacctttgcaaatgcacttcacttcatcagaatcagagccggcccataaattatgagctcatctggaagactttaccaccagactaaagagacattttagaaaattgatgacttataacacaaatagttttcatgtatatacacactaggtatacagaactaccctcgggactaaatgttgttttagttaaagtctaaaacgtcgtcggattaactcagttgttcgtcgcatcgaatcatcggaggtgatg

SEQ ID NO: 7532 - DNA, 3000 bp, Unknown
  misc_feature (1)..( 3000): cDNA_ID_2173290_gDNA_ID_1621150_Annot_ID_173198 3000 nt of promoter + ATG
ttaaaattttgataaaacgttgatgctcatttactagaggaaactcagtattgtatttttggctagttggcaaaagaacttctacatgtacaactgtatatatgtattcctttgtttatattcataaaatttcctctgttttacaggttggcagcctggaatccaggaaggtgctgctgattgggatgaagattgggataagctagaggacgaaggtatacttgctgtttagattttgattttgttgtcagatgagattattgtggaagcatggctgtagatataatatcgatatcttgtgtctttataatttttttttgggtgacctatcttccaaatttggctatggaatatgcagttgaacacttgaaattgacatcttattttctcttcacttccagggtttaccttcgtcaaggagcttacacttgatattcaaaatgtcatagccccaccaaaggaaaaatcatcagcgtggagaaaagaagttgatgtctcttcaaaagaaggtgaagatgtttcattctcagatgctgactctaaaacggggaaaaagcaaagcagtggtgaagaagattctgagcagtcagagggtaaaacatccgatgttgatgccagagataaaaacggatctctggatgactctaaagttagaaagggcattgaagctgatagttcacctcgaacgaaagatacgaggaggtatgttttttgtgctagacctaatgtgttttggattgcatccttcttagctgttttgaattcatgtgtttccgtgaaaagtactgcaaatagaggaaaaacaggttcttttctccagagaagaatatatctcggttatttacattgtctatgttaattttccagtgaaaatggccatgatgatggtgaatctactgcttctgctggcaaaactgtaaattatgactctcacgacgagacagattcagtttcaagcgtcaaccctgacaacggcaaggtaaaccattttgaacaccccgaagttttgggtttgttgcgtttgataatatatatatatttctttaacctttgtatttcgacatgaaagaatcgttaatttttacgtaactattttttgttatgtttttaccaggacaaggatcatgggaagtatgacagtggttttggatttggatttgggtttgatgacttcagtattaagcctataaaaactggttcgaccatttcaaatgacttcctccctcctaagttatctatatttgctgattccgtcccaagcccaccggcaaatgcaagcgacgtttcccctacaaaaccttctttgtttgctgattcagttccgagcactccagcgacgaacaatgcctcttacccaggccagaaatcattttttgatgactcggtcccgagcactcctgcttatccaggcaacttgtttgctgagaagaaatccttctttgacgactctgtcccgagcacccctgcttatccaggcaacttgtttgccgagaagaaatcctatttcgatgactctgtcccgagcactcctgcttatagcacgtctgattttggtgggaagccatttgcatcagagactcctcgttcagacaacctgttcccaggaagaagcccctttatgttcgactctgtcccaagtacacccgccgcacacgatgacttctctaacaacagcttctcccgcttcgattcattcaacagcaacaacaacgatgctttctctctatcccgcacagactcgatgcgcagcacaagcgagcctgacccattcgcatcaaggtttgattctttcaactatcaaagatatgattccttcaatgcacaaagctatgattcctctagcaacaacaatgcatcggagacgcctaaagcctcattgacaagattcgactcaattggaagcaccagggactctgattacagtcatgggtttgggttcgacgaccatgacccgttcggttctacaggaccattcaaaacaacgacaactacagcagagacacctcggagttctgataattggaatgctttctagccagaagcccacgtgcgatatgaatatgatcacatatcatatactttgctgcttttatagtttgaatttaccagtcgaagagttatatgtatcttcatttctttggtttcacctgcttgcttcattttttattgttaatatataatagtcttttttgccattttttcttttaaggatttttcgaagagtgtcctttgttggtctctgcgtagtgtttctttttatttgtgtctttgtttgttaacttgaataatgaattattatttgtccctgtgaaaacttctattgtatctttgtaatcgtatggatacatttcagatgttgttatattagattgattggtaattttgggaataatccgtatccattttttgatttatactttctattttgtaaactgaaaggtaagtagatatactattagcatttctcaaaatctaatcaagtgttataatatcatacttttgttgatagtaattatgccagaatcatatgcaataattttcttaagagcatatatgtgttggaatttacgaattcaatctgatgccgttcaaatttgtttgataaaattagtgatttactgtatataaataattttccacagtaatatagtaaaaacgaagaaatggatgaacaaatgaaatacgagaaattgaaagaaagaaaaaaaatcattttccttatctttttatggtcataagaagaagagatggaaagtgaaaggcgcgtggagtgcacgcgcagctcaagtgtcaatccagtcacaatcaaatggaagaagcacaagttttaattcaacctcttcggcaatgaagaagaggacgaatccacgaggtccaccaaattcctgcaaacttccaaaacaccatctcaaatatccacattctccgccattaccctgaaccgtttctcgagttgtttctctcatgttcctatgcttttgcccttgccacgtacctatc

SEQ ID NO: 7533 - DNA, 3000 bp, Unknown
  misc_feature (1)..( 3000): cDNA_ID_3050718_gDNA_ID_1621150_Annot_ID_173197 3000 nt of promoter + ATG
gatgtgaagcattctgatagagcaaatcatcagtctaggaatgatacaagtcacaagtcaagggaaactggatcctctagtgcccttcatcagaaatacagcaacaaaagcttacaccaacaatctacgtccctgctaggaaaatctccccccaatgtctttgcagaggtaacagtagtccgtcagaaagaaaacaatggtatgcatcagctggcaaatgtaacgggaagcagacaatctagtcaagcgtctgtaagtacattccaactgtgtctacaattacataaaatacactcagtaagttggttgcattctaaggtcgtagttttgtttctccagttttcatctcggttctgtgatatttttctggtcaatctttgcttccatgcatttttcttaccacaaagtttacatcagtcttgctttataattctgcaataacctgtctctactcagaaaaaagatggttctaatgtgaagtctaaaacctcaatcctcgagaaagccataagggaactggagaaggtggttgtggaatgtgagttttaatatttttcaagtgtgaccaactagaatagcatttggtgattttcaacttacaagaatttatgatttataagcagcaaggcctcctgctatcactgaaaatcaagaagctgatacctcatcccaggcagtgaagagaagattgcccagggatgttaaattgaaacttgctaaagttgctaggattgcggtactagagcttttccatttgttcttctcatttttttgaaacttgaaacggtatgagaaaaaactaatatgccttttgtggcagcaggcaagccagggaaaacattcaacagagttaatcaaccgtcttatgagcattgttggtcacctaatccagcttaggtctcttaaggtaaaattttctgtctcctgtatcctagtctttctgttactaaagcagacttgttaggactttcgtcaaggtgtttaaatagttagtcttcttcaggacattcatgttccagtgaaaaactcttctgtttcaggtacaagcaaacaaaatatggtttcttactctttgtaatgcttattttgcagaggaacttgaaaatcatgattgatatgggagattctgcaacccgagaaaaggatactaggttcaagcaaatcaacaatgaagttcttgatatgataaaggccaaagtttctttgatggaatcacaggttctctctctctctctctgttctaatcttaagttgcttgataggcatttctttcatccatggcttttctatcttattacattcttggaagtgtcattaacttttatgaaatctggagttctctctgataatggttttccgtagatcaagctcttcattcttttgttttcgatgttccctgtgggtcaatctgcctttgtagcgtattttcctcctattaatatgttgaggcacctgtgacatttatgatatttcttgcactatcattttatgttccataggcaatcaaaccagaaggtgcaacatcagacgattttcaggactcagtagaaaagccatctttgaagaagtttgtcatggatgcggcattggaggataaattgtgtgacctatatgacatatttatcgacgtaattatcatttacctttataatctgccatgccaattctagacatagaattagagtcaaaacggttttgttcctgttttttggtatattagggattggatgaagatcaaggtccacaaacaaaaaagctatatgtcaatgtaagcccttctccattcccgattatttttggtattctggttttttttgttccaagcttatctcatgtcttaaatcaccaattagacctagccaaaagctcaaggtggtttgttagagcttgatgaatattgttttggaattattcatgctccagttggctgaactctggccaaatagattgatggattatcgtgggatcaaacatgcaattttccgggcaaaggagagacgaaaagcattgtatggaaaccttgcgaaagagatggtagttaaagaattttctcagccctttacctctttgcattaaaattttcgcaatttgctttgcttgattagattctgctttgttaaaggatcaaacaaagatgaagaagagtatgaagcagttggtaccaagaacagactgtactgctcagcccaacaccgaattagtggttcagagacaacacagtggggaaaaaaaattgattgttgatccaaatgcaaccagcacttccgtggtcactagtcaaactatggttgacagatcaaatcagcagcagcctgagaagctaaagggaatctcaagctcttgcaatcctacagaggaaacaagagtggtcaagagaaagaacgaggctgtaatggctgagaaacaagtcgttcttgccctgaagaagcccgaacatccacagacacgtgtaatcccagctcctcagaatctgaacatcccacgaacaaccccggacctgaacttgccaagttgacatcacgattgacaaaggagctcttagaaacgccggagacaataacctctggcctcttccttccttgtattttgaggtggcacggcattagtcctggcgatgccgatgcttggtttttttagctacaaagcatggtttataaagttgtctgtattccagtttggctcttattaagttagttactctatttacgtgtcctttttcaaaactctaatgtataaagttatgattttacgggcaactctttacttttgagtaaaaaaaacagagcaggttttagtactgaattttgggtaacgtagttgaaaatttgatttcggacgataatgtaaaattgatgaaatacatcaaaatgactacattaatccttttgacacaatatgaataatcaattttaattaatattattattacttgtaaaacagtataaatatggctcattatttcacagattctcaacactctctcattctccacaatttacg

SEQ ID NO: 7534 - DNA, 3000 bp, Unknown; identical to SEQ ID NO: 7524
  misc_feature (1)..( 3000): cDNA_ID_3050722_gDNA_ID_1621150_Annot_ID_173196 3000 nt of promoter + ATG

SEQ ID NO: 7535 - DNA, 3000 bp, Unknown; identical to SEQ ID NO: 7523
  misc_feature (1)..( 3000): cDNA_ID_3050726_gDNA_ID_1621150_Annot_ID_173195 3000 nt of promoter + ATG

SEQ ID NO: 7536 - DNA, 3000 bp, Unknown
  misc_feature (1)..( 3000): cDNA_ID_2173290_gDNA_ID_1621150_Annot_ID_56849 3000 nt of promoter + ATG
agatgctgactctaaaacggggaaaaagcaaagcagtggtgaagaagattctgagcagtcagagggtaaaacatccgatgttgatgccagagataaaaacggatctctggatgactctaaagttagaaagggcattgaagctgatagttcacctcgaacgaaagatacgaggaggtatgttttttgtgctagacctaatgtgttttggattgcatccttcttagctgttttgaattcatgtgtttccgtgaaaagtactgcaaatagaggaaaaacaggttcttttctccagagaagaatatatctcggttatttacattgtctatgttaattttccagtgaaaatggccatgatgatggtgaatctactgcttctgctggcaaaactgtaaattatgactctcacgacgagacagattcagtttcaagcgtcaaccctgacaacggcaaggtaaaccattttgaacaccccgaagttttgggtttgttgcgtttgataatatatatatatttctttaacctttgtatttcgacatgaaagaatcgttaatttttacgtaactattttttgttatgtttttaccaggacaaggatcatgggaagtatgacagtggttttggatttggatttgggtttgatgacttcagtattaagcctataaaaactggttcgaccatttcaaatgacttcctccctcctaagttatctatatttgctgattccgtcccaagcccaccggcaaatgcaagcgacgtttcccctacaaaaccttctttgtttgctgattcagttccgagcactccagcgacgaacaatgcctcttacccaggccagaaatcattttttgatgactcggtcccgagcactcctgcttatccaggcaacttgtttgctgagaagaaatccttctttgacgactctgtcccgagcacccctgcttatccaggcaacttgtttgccgagaagaaatcctatttcgatgactctgtcccgagcactcctgcttatagcacgtctgattttggtgggaagccatttgcatcagagactcctcgttcagacaacctgttcccaggaagaagcccctttatgttcgactctgtcccaagtacacccgccgcacacgatgacttctctaacaacagcttctcccgcttcgattcattcaacagcaacaacaacgatgctttctctctatcccgcacagactcgatgcgcagcacaagcgagcctgacccattcgcatcaaggtttgattctttcaactatcaaagatatgattccttcaatgcacaaagctatgattcctctagcaacaacaatgcatcggagacgcctaaagcctcattgacaagattcgactcaattggaagcaccagggactctgattacagtcatgggtttgggttcgacgaccatgacccgttcggttctacaggaccattcaaaacaacgacaactacagcagagacacctcggagttctgataattggaatgctttctagccagaagcccacgtgcgatatgaatatgatcacatatcatatactttgctgcttttatagtttgaatttaccagtcgaagagttatatgtatcttcatttctttggtttcacctgcttgcttcattttttattgttaatatataatagtcttttttgccattttttcttttaaggatttttcgaagagtgtcctttgttggtctctgcgtagtgtttctttttatttgtgtctttgtttgttaacttgaataatgaattattatttgtccctgtgaaaacttctattgtatctttgtaatcgtatggatacatttcagatgttgttatattagattgattggtaattttgggaataatccgtatccattttttgatttatactttctattttgtaaactgaaaggtaagtagatatactattagcatttctcaaaatctaatcaagtgttataatatcatacttttgttgatagtaattatgccagaatcatatgcaataattttcttaagagcatatatgtgttggaatttacgaattcaatctgatgccgttcaaatttgtttgataaaattagtgatttactgtatataaataattttccacagtaatatagtaaaaacgaagaaatggatgaacaaatgaaatacgagaaattgaaagaaagaaaaaaaatcattttccttatctttttatggtcataagaagaagagatggaaagtgaaaggcgcgtggagtgcacgcgcagctcaagtgtcaatccagtcacaatcaaatggaagaagcacaagttttaattcaacctcttcggcaatgaagaagaggacgaatccacgaggtccaccaaattcctgcaaacttccaaaacaccatctcaaatatccacattctccgccattaccctgaaccgtttctcgagttgtttctctcatgttcctatgcttttgcccttgccacgtacctatcatgagtcgcctttctccggccaccggaatctcttcccgcctccgcttctccattggtttgagttccgatggacgattaattcccttcggattccggtttcggagaaacgatgtcccgtttaaacgccgcttgagatttgtgatcagagcgcagctctctgaagctttttctcccgatttaggtttggattctcaggttacttacttacttctctcgacttccttgcttgttttcattcactttgttcgatcaatctaaacttagagagacagagtttgcgaagctgaatttaattgttcttaggatctttagattatcgaatcgtttcatgatttttaagcgaaacttttgctgatcagagttgcttatttagtatttcgactgacttcatacactttgatattgaaggctgtgaaatcccgcgatacatcaaacttgccttggattggtccagttccaggggacattgctgaggttgaggcgtattgtagaatttttagatcagctgagcgactacatggagcgttg

SEQ ID NO: 7537 - DNA, 3000 bp, Unknown
  misc_feature (1)..( 3000): cDNA_ID_1818083_gDNA_ID_1621150_Annot_ID_56850 3000 nt of promoter + ATG
tctctgttaaacagagaggtgtttctaaagtttttggcttgtggggtgatttgaagaatggtgttttgtatttagtgggtgaaaagctcattggattttcgttggaggagtttgatagcctcgaagatgagactttacgtttaggaataattggtatgcaaatatgtgaggcactacttaatttgcataaggaagggttgatcacaggctgtttgagtgtttcttgtgtgaagtttgacgaatatgagaatgcttatgttgatttgattgagttgattgaaactggaaggaatgtgtatcgaattatcgctgaagaaactagctctttgagaaaaccagttggtgcttcggaaatgggtttgatttttgttgggttacaacagaaggggatttttattagctcagaggtgttgtttgaatttttgaaagaacagaatatgttaataaaaaataccagctcaaaatcttttgtttcacataactctgatgtttggccagtgtgttttcttctcctcaagcttcgtcttggaaaacggtgtaccgaggagtttattgaaagtgtgaattgtgtggatggaaaaggctgtgaagagggtattgaggatatcttggtgctatacacaggtattacggagaaactaagtttggaatctgaactccaagggaagtttaaatcgatggttgaaattcttcgtcaatgttgctgtcttgatcctcaggcacgtcccgttttgactgatctatggaaatgcatcagggagctggtcatgaaacctaggttcaattctatgagtagattgcataagacgatttatgggaaaaggaaacagttctgtttggctcaaagtgaattatgtcgcctggtagaagtggaatccaaagaagtggacaaagagttgcctggaatgaaaattggcgatgaagcagaggagggtaaggttgacatagattttccggggagagtctcagaaggaaaggtgagatctaaagacatgcggggacaccaagactctgtcacaggtttagccgttggaggtacaccttcttcttatattttgtactttcttataaactgtacaaatcttataacaatgtatgttgaatagatgatcaatgaggtactcaatattccttttctctgtataggtgggtttctcttcagctcttcatatgatagaactatccttatatggtctctgaaggtacatatgcgtataaagttagtgataggtcctttatagatttttgtttatgttcttctcagcagctctctgatagtaaggtccttaattcgagctatataaatcgtcatgcaaaacacgctatatgcaggacttctcccatgtgcatacatttaaaggtcatcaggataaagtaatggccttgatacacatcgagggaacagaaccagtatgtgttagtggcgatggtggaggaggtatctttgtatggagcactacttttcctctggaagaacagccgctaagaaagtggtatgagccaaaagactggcgatatactggcattcatgcattggcatactcagaatatgggcatgtgtacactggcagtggagataacactatcaaagcttggtcactgcaagtaagttaatttccctgtacacctgtaattctgataagattttttcttcttcatattatctgatgatgattattttcccaggatggaagcctgctttgcactatgagtggtcataaatctgtagtctcaacgcttgttgtggtaaatggagtactatacagtggaagttgggatggaaccgttcgtttgtggagtctaagtgacaacagtttgttgacagtgttgggggaagagactccaggtattgtaagatctattctgtctctagctgcagacgatcaaactctagttgcagcttatcaaaacggagatatacaggtctatatgtttccttaaaaacaatttacttgatgtgcttcatttcaatcgtattgccagtctctaaacctgaacccttctgattccttttccagatatggagggatgatacattgatgaagtcaatgaaaatacagaatggcgcaatcctcagcattgccgtgaatggtaaatggctattcactggaggttgggacaaaaccatcaatgtacaggtaatccactagtttcttgacaaagctagtgacgaataatctttatcggaagtgtaaaaagaaaatcaatactttatccattacttgatgacggattttcctcctaataatctgttaccgaacaccggtttgtaggaattgtcaggagatgagatatcagtaaactgtgctcacgttggttcaatcccaggttcatcagtaatcacatctttgttatattgggaaggcaagctctttgcagggtttgcagataaaaccattaaggtgataatagtccaaattgtctgtctttttctttgcattcatgatttacctctgttgttaaatttggcatgtaacaagagaagttttgtctccatttcttacaggtatactattttggacgctaacaaaaactattgtgctctccagttttgctcatcttgtttttgaagattctttcttccataagttcctccgtagatgccactctcgccaaaacatgttgtgtgaatatctaaatgtaaatatatgtgaatatgaatccttcgtaccaatctgttgatgatatatacgtgattcgcatttttcttatttctcttagaacatctttatgcgttgagatcaaatcaatacaagaagagataaattcttaagttgtagtgacatactgcgaaagtctaaaatgtcgagggacttaaaagtgaaatattcataaaaagatgatccttcaaattgagtaatttagcgccaccgaacggtatagggaggcaaaacaatttgagtgaaaaatacgacagagagcttctcagttctcatccatggatacttgacctcaacaacgagaaagtcactataacgaagcaattttttttgtaaaatg

SEQ ID NO: 7538 - DNA, 3000 bp, Unknown; identical to SEQ ID NO: 7531
  misc_feature (1)..( 3000): cDNA_ID_1818079_gDNA_ID_1621150_Annot_ID_56851 3000 nt of promoter + ATG

SEQ ID NO: 7539 - DNA, 3000 bp, Unknown; identical to SEQ ID NO: 7530
  misc_feature (1)..( 3000): cDNA_ID_2990159_gDNA_ID_1621150_Annot_ID_56852 3000 nt of promoter + ATG

SEQ ID NO: 7540 - DNA, 3000 bp, Unknown; identical to SEQ ID NO: 7528
  misc_feature (1)..( 3000): cDNA_ID_1818061_gDNA_ID_1621150_Annot_ID_56857 3000 nt of promoter + ATG

SEQ ID NO: 7541 - DNA, 3000 bp, Unknown; identical to SEQ ID NO: 7527
  misc_feature (1)..( 3000): cDNA_ID_1842620_gDNA_ID_1621150_Annot_ID_56859 3000 nt of promoter + ATG

SEQ ID NO: 7542 - DNA, 3000 bp, Unknown
  misc_feature (1)..( 3000): cDNA_ID_1818050_gDNA_ID_1621150_Annot_ID_56861 3000 nt of promoter + ATG
ttattttattttgttgatataacagggaacatctaataatagttgttctcttcgaaatgcagagagttagctaaagattttgttgtatctggaactgcttcagaatcactctatggagcttgtgaggcaatgtacaagccagatatggtttgcccgctaacaacctcatcatctcttgttatatttctaaatcccgacaatgaaaatgcttaaattaccacatctaggcgttgcagtttggtaggttcaaggtttagtgttactatgtagaaaagttgaatcttgaattggtgtgaacattaaggtgcataatgcccgtaggaatcacgatagccattagttttctctttgatatcttcaattatccctctctggcatgaggtgtttaatagtctgagcttgttagccatactccattgtactactctagacttatgtatcgagactctggcttaacacatgaggattttcaggaagctgaggaattgttcgagacaatatcgcaagcacttctctcatctgttgaccgtgattgtctgagtggttggggagggcatgtttacattgtgtaagttctcatttcttctcttcttttccacacatttgttatccaaaattagttcttaaaacaaacttccatggtgatgtgttgtacagaacaccaacagagattaaggagaggatcctaaagggaaggatggattgatctgcttcttctattcaagttgttttccgctgtaatccggttttaagtagtgtaaccttcacatcccggtttaattatatgatcattccttggctgaaattatgggttatgtatgaagtttgattttcctcttggataatggattatatgattttaattcgtagagttatcgaagaataacacttttaactcaattgtttccaactaaataagaaaaaacaggggaaactaaaatatcacagtaaccgccagatcttagagcagttacagcgactaactcctcaaaggcctctctaatttcctgtcctaattcgatcggcttgttatgtctgttaatccgcataataactaatctagaataatccaaaatcggaagttggtcgtgatgggtaacgtaatggactcattcttcaccggattctctcattctatcggaaacttctttggttctccacttgactttttatctggaaaatcttgcaggtaattatacacaaaaccatcacttatattacaataatcttcaaagtttattggtttgcttaacggaaacttaaaactaatcttacttggaacagttcggtttgtccatcaccgtgggatttcatatgctacgttgagaatttctgcgtggctaatcttgcgaaaaccgccttaatcctaatcttatcctacttctttctattcttcatctacatgctatacaaagttggtttttggcattgtatcatccacggtttcttcaaactcctatgggttttggtctcttgttggttctacatgcttggctattgttgtagtttcttctgctatgatctgctacactctaaacgtagaagaagacgcagacacaacagatatatagaggaagattatgatgataatagtgatgacgatgatgatgttgatgatgatgggtcgttcacgtaccatagatcgaagcgagaatgcagaaaagaagaacgtcttagaaagtctctgagaccgaggaaccatcgtgttagagttggtgtgaggaaagaccatcgttctgactcgggtttgagccaacatgctgatggtggtagtccgatacatggtgttagagtgagtagagagtctaagttcgcacggaaggtttcaaaacgcagaaatcgagttcaccatggtgatagaatgaaccatgtcagtcttcttaattaatacatcacaatggaggaattacctgcaactgtcaatgatctcctctaagctttataattcctcttcttgaaagttgaccagctgcatgggtcaatttttataaaccaatctctctgtgtttttggaccttttcattatgtttaattcttgcttcttcggtttaataagtattgtaatcaacataataccaaatatttagttttgttatgacttatgagggcaaaaccaaaacatgaatgagaatctttagagtgctcgcaaaatcttgaatcaagaatcatatttatggtaatgggctcctcaatattgcttcagggacaacagctagaatgtgtgatgtacctaaaggaccacaaaaaaagaacacaagtttcagcaatttgttttcattggtcaacacatcaattgttcacaaaactacaaaacaatctaactgaggttttactaacatgaatcatgtaaatatgataggttgctcgatttgtgcaaacacaaacaataagaaaactataagacttaaggaatttcatcacacacaaaaatacaatttatttttctataatctataatgttttgctttcattccgattatacccttgataatgatgattaggtgagggtaatttcgttatttacaattaaactcacataattacaaaataatgttgccttgccctgagataaacatcaccaaaaaatgttttttttttctttcttagagcaaacaatttgttttcaaaaaattattatttttggcagctcagcaaaattatttaattctttctgtcagttcatcaaataatttaaatattttgtccatgtgataataatatgtagcgcagagagtaaaaataaataaattcatttacagaattgttttgtaaccaattagatagcagtactttaatatctgaggctattttcgtcattttcaaattatggtgtgtttttttggagggagtgggaaaaaaaaaatcgatacatgaatgacgtgacctccattgatttcggcgaacgagcttcttcttcttccctctctctctctctttggctccatctcttacagtaactgtctcttggaaccatttcctcttcactagtatcttctaaca

SEQ ID NO: 7543 - DNA, 3000 bp, Unknown; identical to SEQ ID NO: 7526
  misc_feature (1)..( 3000): cDNA_ID_1818046_gDNA_ID_1621150_Annot_ID_56862 3000 nt of promoter + ATG

SEQ ID NO: 7544 - DNA, 3000 bp, Unknown
  misc_feature (1)..( 3000): cDNA_ID_1985662_gDNA_ID_1621150_Annot_ID_56863 3000 nt of promoter + ATG
aagggcagtgcctgtggtagaaagggctacggagagctcttttggttcaaagactgtgtcgtcgttttcgagcagtgaagaagagtcggagtttcatcatgttaatgatggagaagggaagagtagcagtaatgatttaggtgggcatgagacggttgctactaagagtgttggagaagtagaagaagaatatgtgaggaagaaaggagttagctttgagttggatgaaaatgtaactacttcttttgatgttgaatcttccaagattagtagtctatctgcattgtcggttcatgccactagagatcttagagaagttgtgaaggagatcaagagtgagtttgaggttgcttcttcacatgggaaggaagtggctgtgttgcttgaggttagcaagttgccttatcagcagaaaagttcggggctcaaaggtaatgtttttacatgttctgtttgtatctgtgattgcttccttaattgcataaatagctgcattttgaaataacttatacatcagaaaccattttttggagatcaatcttgttacttgtggagatgataatgcattactgcaaatcatttgcagttagattagagctatagctttaaattagcagtaatttggagctcttcatgcaggagaaatatatgtatactctgatagtaatattagtagactttcgtgaattttcttcattttaccttggatctgttcaaattaggaactacatttcgatgtaatgggaagtaatgttgagctcttgttgctttcgattgaactgttatgggctttttcttctctgatggagcttctagattatgaaccatagatttgatttgcgtcacttgagtcttaccttggtgctttttttctaatgatatttacttcattttttctctagtcatcttctcccggatcatgtatctggttgcaccatccacagtttcatcgcgctctcagcctcaaccgtcaatacgtttaacatctaggatattgaaaattgcaaaatcatacaatggtcaggatgttagagaaggcttaactgggaacctctcagcaaccttggagcaactctatgcttgggaaaagaaactgtacaaagaagtcaaggtatgtatgtgtttcttgattttgaatggattaatctccttagattggagcatcttttgacagatgtagttgtttgttgatggcaggatgaagagaagcttcgtgttgtctatgaagaaaagtgcagaacactgaaaaaactggatagtcttggtgcggaatctagcaagattgatactactcgagcagccattagaaagctgctaaccaaactcgacgtctgtataagatctgttgattccatttccagcaggatacataaactgagagacgaagaattacagcctcaactaacacaattgattcacgggtataaattgatctcaattcttttactattcctacatttatatattttcgtttgtgtgatccgatacttgggatttgaaggttgataagaatgtggagatcaatgctcaagtgccaccagaagcagttccaggcaatcatggagagcaaggttcgatctctcagggcaaacaccggcttacaaagagactccggtttgaaagctattcttgatttggagatggagctacgagaatggtgcattagcttcaacgactgggtcaatactcagaaatcatacgtggagtctctaaatggatggctctcaagatgtcttcactatgaacctgaatcaacggaggacggaattgcccctttctctcctagccgtgttggagctccacaggttttcgttatatgcaaagattggcaagaagcaatggcgagaatctctggagagaacgtttcaaacgcaatgcaaggctttgcctcgagtctgcatgaactatgggagagacaagatgaggagcaaaggcagagagtgaaagcagagtatgtgtcacacgatttcgagaaacggttgaatgatcttcggatggagagggcgagagtgagaatgagaaacgatcagctacaagacggtgcatcagagaaaagcgtggtcttgtccgagagcgggatctcggcgttggatgatttgaaagtggacttggattcaatgaggaagaagctagaagaagaaagagcaagacacaaggaaacaattaaacttgtgaacaatgcagcttcaagcagcttacaagctggtttagtaccaatctttgaggctttggggaatttcacttcacaagttgtgaaagctcatgaagatgttaggtttcaacaacaacaacagcctgagtctgaagattgattttgcacgaattaaaaagttttggtaatgaaattagattcggatttaggaaacaaattgttgtacatattttagcatttatatattcattgattggttggctacttgcttgtagattcttaatctttttctattttaaggttctcagatctttaaattaaattacttctgaaatctgaaccttataataatcattaatctatgagaaaattgataataatcgcaagaaaccaaacataattggtcagatttaagatctatgaccatttacttgcacgaagtcacggacctgagatctcacaacaagatcaacgaaagagaagaagccacgtcattgtcgatatcgtgacgcttgtacattggtgcggaacagtgtgtcttcggtttagacaatttttctcttcttaaaattactttttactgctggtaaaatggagtaaataactaaataaattttataacggcctaggtcaaaattatcaagacactgtataaacattaaaattcttgccaaatccctataaactatgacgacgtaatacccaattagagatagccacgtggatgtatgaccaatttaggagcattcagttttcgtgttttgcagtgataaatatctctgagagctaaccccggagagcttacagaattcaagctaaacattgttagagagaaagagagagcgata

SEQ ID NO: 7545 - DNA, 3000 bp, Unknown
  misc_feature (1)..( 3000): cDNA_ID_1818137_gDNA_ID_1621151_Annot_ID_56878 3000 nt of promoter + ATG
taagcacgataacatattgcaccaattggctaaatctgataattaaaactgacttcaagcaaactccaaaaccaatgaccagaaaagtctctcctcaatctgaatgagcttaaactccttcctttatgtcaaacctaccaccccattaaagtttaactcctcctccaaatatcctccttaaactcaactagatggttttgactcgctattttgagccagggttatacagtcatcaatctgatgagcatccatcatccaggaagggaattactatgtttgaaacacgggtttgaaacacaagtatacaaacccgtgtttccttccatagacacaccctatgataagcagcttagaagcttctcctagtagcagaaataatcgaagaccataaaaagagcccatgttaacaaacagatcagagaattatctgtagcaatctagaccttgattgattcgtattagtcatccttccaccattataaggtctaccacgcggagtagcagaagcggctttacgagcaacggttgttgttacaggaaactggtttccttggaaattagacctcttcttagcaaaagcaccctgaaaatatgatataaatcacaacaccacaaaagaaaaaatcttctaagtgacaggaaaatgaagcttagacaacaaattcaccgagaacacaacaacactaacctgtctaacatcagaccgagagtccatataacgctgtgctttcaccgcactattcttcgcagcaccactaaatttctcctttttattctgctcaaacacaatatgccaaatgttcaataaagaatcaaagagagacataaaaatgtaagctttaacaaaccaagttactaaccaatactctctgtttcttgcccttattcacattggtattgctcttttccatcttgataatctcatctatacccacatacaaatgatcatgaagctataaactaaacaaaggatacatctttatatgagtaaataaattaaacataaacacacctaaagacatgtccattttcttctcagtgagagcaacagtctccgtagtaatcggtttctcagtcgccatctacatagaagtggacacaatttaaaccaaagatttcacaaaatcaaatacataaaccctaaaaatcattagttaaggttcaacgaattttgagtttattgaacttatgagaagcaaggagatacaaaagagataaagcaaaccctagtttttgaagattgatctgattcaagaatcgatcaaacaaaaccctcaattaaattgactcgtgtgaagaatggaggagaagctttaagagatgaaatcgtttaccgattttagaaagtcgattgtctcactgagacaaaaaaagagaggctttttatttttaatccgataacgagttaaaccaaagtgaactgagtcaaaacgtttccgatcatgtatacgtggcacattttcattggaagagatgattggttgttttgcatttttttttttcttgttctctcccttgaagttgaagagtttaacttcgctaagaggaacagagatggacttgagtttaatatgttctctgtttctaacaaatgtttttttttttgagttttcacatacaataaaaaatattaaaagttaattataatttataaatgcattattatttgtaatttacgatttaccattttctataaccttaattaatatagtatacaattatttttcttgaaatttataattcatcaataataactaataactattgcattggaaccaatttttttcctaaatatattatttaggaatagaggagtagttgtttttggcaaaatggtagattattataaatctaaagtggtagcagttaaatttgaaaaagatggatggcatagtaactaaaaattatttaccacaataccttaaaaaactatgaagaattgattaattaactaacagactaattaaaacccatatttgtcctttgaaattataattttaaataattttacgaaacctatttaagattacataatattttttttataaacaataacaccttttaaaattattaaaacttattcactatccagtttcctagtttttatatattttgaagcaataatgttgtgcttaaaatatatgacatcatagtgacaaaagagtttatttgtgaaatctcaatcactcattttgaaatgccattaatccgtttagtttccatattattaccaaagcctttcatgtaattggaaacttttgtgtttaagacttaatcttgtgttgcaggagccaaaagaaaaagaaaaaaacaaaaacaaagaaattgtaaagaagtgtaactagaaaaatcgatcactcatcttcaaatgtcattatccatcaagttgtcatattattgctagacagaagtggtcgtctagacttagttgacctgaaaaaagaatagtcaaagtcttttatatgtggacctgaaattagactttgtagtttgtacgtaagtttgtgttgctagagcctatatgagaaaaaaaaaacagtggatattggtgattggtttaatctggttaactccggttatctagatactggtttaatatcatttatcttgtgtatatataaactaaactttagtttattttgttgatgaacgttgtaacaaacacttaattctgttaataaagattcagtttaatctccgatcttttctcttcttttccgttttaccggaacttcgccggtgttaatatggtatcagagcatatcatttgagcttccgcatatcatcggagatgagtctttcattgaatcatctttctcttatgagagtttttcgattcctacaatcgtttgttgcaatttgcaatttcttcgtcagctatctaattttggttctgattcttcttctttccttcgattgaccttttgtggtgacgaatctcactttcttttcatttcgtctcactttctttgatttttctttaacaatttgttaagaatg

SEQ ID NO: 7546 - DNA, 3000 bp, Unknown
  misc_feature (1)..( 3000): cDNA_ID_1821821_gDNA_ID_1621151_Annot_ID_56883 3000 nt of promoter + ATG
ggaactcaaacatagtcttctgagagtgatatatagagttttctgatcatcttcaagtgtgaaagtaacttgtcaagagtcttgttgaatcttagttgtgtgtgtattgtggtgtggacaggttttaatgagacgacagatgcgtgttgtgggctagggaggtacaaaggatggcttccatgcatctcgccggagatggcttgctctgacgcctccggtcacctctggtgggaccagtttcatcctacagacgccgttaacgccattctagccgacaatgtatggaatggtcgccacgtggacatgtgttaccctactaacctagaaactatgcttcattcttaaatcagctgagaggataaaaatgtacataaaaaacatagtaaattgtaaatgaactttgcaattttgatgtttggtccatggtacataaaggaaaactataggtcttttatgctaaagaaagaaagtacggggttagagaagaaaaaggataaatgttttacaaagttgggctcaatgtatttacgtaaatggcccacatgaaacagaaagttaagagattcgacccataaaaagcacgtgtggtttataaatggaaaatttcatcttcagggagacgaagacataatttcaattcttttctcatcaaagtttctaaaacaaaaatcttggcctaaagaggtgacgtcatctccaccctctcgtaatttttccaattttgcccttggaagctgcttcgccttttttttcaatttcatcaagggttctgagatttttttctctcagcttcttcgtaggtttttgatccgaggtaggtaggctttgggtttacaaaaatttcgcctcgattttttgttctcacgcgtcgttcttgttacaggaaatcgatttcatctctgatcatctttgtgacgaaggaaatggagctcgattttgacgctagtaacttggttgaagatgaagctgttgaagttgaacataatgttagtgtaaaattgtactttctgggctatttttcttttggttgaactaatcatgggtttacctttttcatttcgagcctggagctttaaaacttgtaatttccggtgaaaatggttgtttatgtagctttatagttagaatcatgaacataagttgctatgtcaaccatttcatttagtttgtgtcacgtttcctggaacatatgtggtttttaatctcaaggatgagattttaataaactgtgtttgtgcattattgcttctcagtgttgattttaatttctttgaacagggtatgactgaaattgaaggggaaagatgtggaatttgcatggatataattattgatagaggcgttcttgattgctgtcagcactggtaaaagcttgttttcgcttttcattgtctttaaatattgcaaagttgctatgggtgtttgttaaggagcagtctggtaatttgtgtctatgtctgttaaatttcaggttctgctttgaatgcattgataattggtctacgattatgaacctctgccctctatgtcagagagagtttcagttgattacatgtgtccctgtaagatgtctcatatttgttttttgttttgttttatctgaacatttgtcatgatttttgtaagtagaacttttgagtttaggaataatgagtttttgttttgattatgaaggtgtttgattcaggtgaaagcagcaaggtcgatgaggatttggtatcagggtactatttttttccttgtgtttgttgttgtgataaagtttgcttgcctgaactatctgagcggtctctttgtcctcaattatttgtggcctataatgataaatttatattaagtggcatagtataatcaagtgatttaaaatgtgatagatgtcatgtgtaccatatgtttctgtatttgctaaaaactgttgtgatctgctgacgttaaactaagcaatacatgcagagatgaagattgctgcattgaggaggagactgatgtcgtctcttctccgtcacactatattgacgatacacactatattgatgaaaatgtaagtatatcatatatgggttttcctagttactacaaagtacattaagctttcctaatcattttgtaggcagttgtctgtttagatggagatctttgcaagattcgtaacactttcagttacattgaaggggattcaaaccttgatacatcaattgcttgtgattcgtgtgatatgtggtaactattattacctgttgactttatctatggtttttttttttgtacattgtcgtgattgttgtttttacctcttttttctatcactaattcattgctggtgaacttctggagcttgccttgttgttacagtgccataatgtttgtgtctaccatgcttttagatggattttgtgtctaaagcttagttgtgctaccggtttctaaatgctatcactatcagtctatcacatgaaggaattttgtaatatgaaatgtaaatggcaaagatactagccttttcaatcttttatatgtacttgcttttgtgtacttcgtattgttttagattgttcatcattacagcattctttcaaattagcttctgactgttgctttcaactgtgctaacaggtatcatgctatttgtgtgggttttgacgtggaaaatgcatctgaggatacatgggtatgtccgaggtaggtttcgttggcgtattgactacctatgattgcttaatccatggtttgatcaacttcagcaccgttgtttcattatattgtttctttaattattagcctattaggcaaaaatatttttatattagagtttccataaaattattttaatctttatctagtaaagacactttgtaccaattctaagtgaaacctaatgcctatacatattattcttcctttctctatcttatttagccatcttgtcatagtttccctccttggttttgtgtccacagatgtctctctaatgaaaaaccacatgaacccgatacctcgcca

SEQ ID NO: 7547 - DNA, 3000 bp, Unknown
  misc_feature (1)..( 3000): cDNA_ID_1027071_gDNA_ID_1621151_Annot_ID_173248 3000 nt of promoter + ATG
tatgttatattatattattcacaaatatcaatttaatatatattttaaaaataatgtacttatagaaaaacttgtacttatagccaaaatagttaaaaattatattttttaggctgtgagaaaaaataagaaaagtacaacatgattgtagttttttagtgtctttataaatttcctacaccccaaccaatcaatcatactcggtgtcttgaagaaaacataaaaaatatttataggaagacatgtaactgaagatgcgtgttttaagtcataatttttttttttttgaaagacacccaacaattcactaatggaggttgtctaaaaagaataaccaagaaaatggtctctgaacccatctctaaaactattttataatgtgtatatgtaacagtaagaagtgaaaaaaaaaatccatatatcaattaaggtgttaaaaaaaaaagtccatatatcaatcacttttctaacatcgtcgatcattgtgacgaaaatcgcttacgtctgtaccgtattaacgtaatgccatcaaacgaaaaagtttgctcactcactccggtttagatctttgttaacataagcaaacttttcagagagtgaactaatagattcacgaaacgacaccgtaattagtatcgaaaacttgactgacatcagcctaagaaaaatatcgcaaattgttataaaatattaaacttaagaagaaaaatgaaaatataatagagtttacttaaaaaaaaataatgggttagctgattttatacccataaactaattgcattctcagctttttcccccacactttttggctcttaaatttctaccataaactttgataattctttaaattacaacatgtactttcggattcatccttaaacatacatttccaattgaaccggtcattaaaccaggattaaccacaaatccgcgtttactgtaccacgatgcgatttacccgattaatcacctctatccgttaagaaaagggttggctgattttatagccataaactaattgcattctctgctttccccctcacactttttgctcctgaaatttccaccataaacttcgataattcttaaaattgcaacatatactttcagattcatccttaaaaatatgtttccaattgatttagattgtcattggaacaatcttcaacctcttttgtctattttggatgatgtattttcggaagttgattctctttaagatgatattatttaggttgactaattgatttggagtcttatctatccttatgattaggagttttatctagttcgatttgtcattttccttaccaattaacacaacacataacatatatagatagattcacattataaaacaaagagaaaacgatgtcgttttcttaacgggtgtgggattagtcgggtaaatcacaatagcggtacactaaacgcggatttatggttaatctcggtttaacaatctaaatcaattggaaacatatttttaaggatgaatctgaaagtacatgttgcaattttaagaattatcgaagtttatggtggaaatttcaggagcaaaaagtatgggtgaaaagcagagaatgcaattagtttatggctataaaatcagccaacctttttcttaacggatataggtgattaatcgggtaaatcgcaatcgtggtacagtaaacgcggatttgtggttaattccggtttaaagaccggttcaattggaaatgtatgtttaaggatgaatccgaaagtacatgttgtaatttaaagaattatcaaagtttatggtgaaaaattaagagccaaaaagtgtggggaaaaagctgagaatgcaattagtttatgggtataaaatcagccaacccaaaaataatagaattaacaagaaagtaagagacttaaggaaagagtaatagataaaaataagcattatccatattttatagatagaaatgagcgatggattaccaccacgcttatacgattgcgataattacatctatacttatccagttttacagaaaaaataatagataaaaataagcattatccatattttatagatagaaatgagcgatggattaccagcacgcgtatacgattgcgataatcacatccatacttatcgagttttaaggaaaaagtaatagataaaaataagcattatccatattttatagatagaaatgagcgatggattaccaccacgcttatacgattgcgataatcacatccatacttatctagttttaaggaaaaaataatagataaagataagcattatccatatttaatagatagaaatgagcgatggattaccaccacgcttatacgattgcgataatcacatccatacttatctagttataaggaaaaaataatagataaagataagcattatccatattcaatagatagaaatgagcgatgaattaccaccacgtttatacgattgcgataatcacatccatatttatctagttttaaggaaaaaataatagataaagataaacattatccatattttatagatagaaatgagcgatggattaccaccacgcttatacgattgcgataattacatctatacttatccagttttacagaaaatataatagataaaaataagcattatccatattttatagatagaaatgagcgatgaattaccaccacgtttatacgattgcgataatcacatccatacttatcgaattttaaggagaaaataatagataaaaataaacattatccatattttatagataaaaatgagcgatggattaccaccacgcttatacgattgcgataattacatccatatttattcaattttaaagaaaatataatagataaacataagcattatccatttttataaatagaaatgagcgatggattaccaccacgcttatacgattgcgataatttcatctatacttatcgggtttataacaccgataatccgatttggtcaaaatccggcggagaaaaaccctaaaa

SEQ ID NO: 7548 - DNA, 3000 bp, Unknown
  misc_feature (1)..( 3000): cDNA_ID_1394339_gDNA_ID_1621151_Annot_ID_173258 3000 nt of promoter + ATG
aggaaaggaatagcagattgcatacagttctcattacaaaaatcaagaacaatcattaggtgcaaacttgatcctctcttgctctctctagagttcaagagaactctcctaacgttatatcctttttggtcacttggtttgagttgtttcagtattagcctattaggtgttcgcaagtttggaaatatgttttcccttgcttgctttcgatgctattgtgcttatttaatggaagtttagttattttttaaataaacgttatgagtaaaaattatcatatataagaaatcatccacatatatattcaatattttattttattgttattgttatattttttatctgatctattttctgtatcataaatctgaggtttatgaattaatttcatgtatagtgtttgtatttgagtttggtgaaatactgccaagatggtgtgatgcttgtttgagtctgagaatttctttaattcaatgacctttttttatacatgttataaaatattatggatacttgcaagtcttctcctatttacttgtacaaatttgatttttgattcagctactatgtgacttgtatgacaaatacagtcgaaacttaatatgatattcggtacccaaatgacaaaaacccacgtacatcaaaagcagagaggctttataagaaatctatgactatcaattttattttttcccataaattatatgcatggtagaaatattatgaaatgagtttccttaactatggttggcaactaaaaatgtctttagtgacaaaaatatgcaacttttctacaaactgcaaatattagtttagattaaatcaaacaaatcatgccttcaaaaatctgtaaaacaaatctttttatttttaacgccggtggcaccatagacgaaatcgacaattttgaaggttggagttggatttgtctgaattttttttttattggaatttggaaagcagctgaaagatgactaaatgcgcagcaaaactcttcattcaggcttggcgtaacttgaatttgttttctttcttctatttttttagtttcattctagtttccgatcaagtcttatggttaaaatactcaattatatactcatcatttaggcatcgaaaacggtcctaacaaaacaccaaacatatattcctaggctttcacgtgtttaattcttacccgcatgatacatttccctcaaatggattgacataatgctattgttgttaactttttgtttgacacaaaatctatctagcaaattttttatagttatagatttaatatacgcaatgttagcttgattttgtttctaacttaaggaaaagttgaaggatgttttaatttgcaaggttctctttcaaaaagatttcgtgtaaattcgacaacggcctcaaacctactctaatcctgactctaaataatattataggttgaaagctttgtaattattgtttactaaaataagagaagaaaacattattacttactctcctttagaaatatatgtttgcattatgctgtatatatagatgaataaatgccataaacgtttaaatgtgtgttggtagatgtcattttacttcattcttagaggtctcttctatcaaatttagttacgtatataaatatagatgtcttgtgctttcttgcaaggaaataaacagagataatatactatttcatacacatccacacacatatagatgtctttttgtttgttgcatggatgtagacatacatccattcacatttccaagtatatacactaacctaatgacctaatgttcttgagagagacttctttcacaacctcttctagaatgtgagtttcttatatttttgttggtataaagtatttgaacatctttatcaaaagttaaaatgtttgaccatattcttggtaattcaaccggtaagtaaatgttattcttctatgacagaacccttaattttgcctgttgtatactagaggtttggttgggtgaaaagtgggcatgataaaaagaacaacatttagttttcctccttgatttttctaaattagagtttcgtatcaaaatacctaaaaaagcttgttttgtggtgcttccaatttcgaaatcggctaaactttttccacatgatttcttcttttacgatagtaagatttagaagaaaataaaaactgaataacgtcagattttccttaataaaagaagaagaaaaatctcacaacattttaagttcctttatttttttgatatgtgccctaataaatgcagtgaaataagctcacaacaaaagatgcacaacgagataaagccaaatgaaatttagtactggtatacaaattttaatgacacgttaatactctttttcgttttggttttataatcgtacttaatattcataactagcttcgaatctggtatttgtatacttaaaaagcttacatcagccaatctactatcattgaaattgtagtgagaaaatctaatataattctttagtgactgtttgtcaaaaaaaaaaaaaactcatgtctaaagtacataacaaattcaaattttgatacaaaattagttatttgtatttgttgtgaccatttctattctacattttgtttgattattagttgaattattcttagttaaatagagcaaacaaattaaattaaatgatttcttaatctataattactgtaaatacttcaaacatcttttaaatagaaacaaataaaataattactaagacatttgtccttatataagtctaataaatgtgtgttttaattcaatacctccaaaaataatttcaaaaaactagagttactgaattggtgctttcacacggtgcatgcattgtattcacacctatatgcatgtcatatattcatggtctctatgatctcgctctatataaacaccacccaatcgaccaaccttcttctctgattattttctcaaattatttaattaatttcttcttcttcatcaccaccaattacactcaaaattatg

SEQ ID NO: 7549 - DNA, 3000 bp, Unknown
  misc_feature (1)..( 3000): cDNA_ID_2144115_gDNA_ID_1621151_Annot_ID_173257 3000 nt of promoter + ATG
tttttttccagcacatcaataaaaattaagccaatcaaaacaaaacaaataatacacctcattttctttttttctttttttttttcgtttttaatacacctattttcaattcgttcatattattgtatgttactagatatttgtcgacgtcttgttaaatttcgtcaattttctacctaagtaacgaaattttttcacttttttaataatgtgatatattatcttcttcaaaaattatatgatccattttaagctgaaagcttttaattttcacatcatttaaatcatttgcggcaaaagcaaacaacttgaaatcattttatcccaacttaacatgacgagcaacaaaatttaaaaatattaagaaaaagaataaaaaatgaggaagcacacaatattgtaaagtatggttattggaatacacaaatctttgagtctagcaaattctccatctttctttatatgaaacgttaaatttattaactaaaataaagatgattatgtacgagtgattaagaatattgtaaaatgaacagtagtcatcgagttcttcatgctagaaaccattttcggagaaactttcttaacttggagaaatcttgatactgaaaaaaatctattcgttgacgaatcacacaagtacggagttgtttctagaaatagatgaaaaataaattgtaaatgacaattttaggattactcgaacatggattagacccatgtttttgtttgtttctctcctgccatataaaataaattgttgtttaaaaaactaaacgaagtaaaatttgatcatgtgtatatgattggatatgacaactttttttttgtgtgaatataactaatttacggtatcatataaattagtttaaatggttaagaaagaggatcttgagatagtaataccatagaaaaaacaggtaaaagaaattagaattgagttgttataattaccaaataaataagctttctagagatgattaaattttaccaaatagatgttaaaattatttcggcaaaatataatatagaatgcatagactaattaaatttactagaatattttttggttaataattcataaatataatataaaataatgttaaaataatcaaacaatagtaattttttagtatttgtggaaaactcaaaacgttaacaaataagtatataagaaaaaattagtttggccttttcgagagagaagcgttagggttgttagacttccggatgaagtattattgacatagacttttggaaggaactattattaacatagactttgtggagaaaataatattaacatagactttgtggaggaagtattattttatgactaaaaatcattctgttggatagttctttgactaattattctcttaataatttgaatcttaaccgtaggatgtaattgcattttacacgctaagtgtctaaagtcttttggacaaaggcgatatcccaaatgtgagaaatctatttaagaagaagaagacttccttcattatttctcacatcaaacaaaatctttgaaacatttcaatcttatatatatggctccattgttgcatcaggtttctaattatggttatggtaagtgtgtaaccgtacgcttctgtgatggcaagacgtatgatgccaaggatggagagtctagggcaattaatagagatcttaatgttggtgctgttaagatttatagagactctaaagatgaagatcaagcgtatgtgctgaattacttcccttataatctcgagcttaatgataatcgtggtaagaataaaggtcttcaaggttatcgtgttcttatatggaagcagtacggcactattaatctagatgtattttacgatgaaatgaagatttggtgcaaaactaatgatttagggatatatacttccgatggagaactgaaatattataagtctgttattgcacgtcatcgtgaggaaggaggtatcagcgttataggttttgaaacagccgaaggagcgactactgcagctgctaaaaaggaagaagatgaaaatgaagaagcatcggcgaaggtgaaagaagcaaatgaagaagaatcgactaatgcataagacggcccaacccaaaataccatcaagactaagtcacatttgactaagtatctcgtttttccttttaataaagctttgcaaataacattgtggatttgtgtttttctctttgaggacagaaaccatgtttcctttctattgctttgtgcttccaagtttgtaggagttgatactccaatattatacattgtgaacaaaacaaaaaaaatgaataagtatgtgtttgctttttgaaagcgttgttcttgtgttcgtattgcatcacttttggttttaatccaaaatttattattaaattacgtacatttgattctttgtttttttttgtctcaatatatagttttgatacgtgttaccaaataaattgcttatctcaaaacatttcttcttcaacccgatccaacaaaccctatttgcgaagtattcatacatagctagaatacactagcgtgaattgtcattgtgagttgatttttaaatctatgcctcttgagttttgaatctgtcatgaggcccactggtagggccggtcggggtgttacaagttgttaatagagagaagacatgaggcccactggtagggccagtcggggtgttacaagtggtatcagagccaaacccaaatgagtgtggagtcaagaaggttcgcaccattgggggttacggtcttggtgtgcaacgaggacgttgcgatctgttagtggaggtgaattgtaacaccccgatttcaggaatatggtggtgcatgcagagaggtttaaaagaaatgatttgaccacctacgtgtgcacttatcttttcggtcaaacgtcctaagagaactccacagttaaacatgcttgggctggagtagtttcaggatggatgatattcccagaagtcattgtcggaaccatgcgagtgacaaagc

SEQ ID NO: 7550 - DNA, 3000 bp, Unknown
  misc_feature (1)..( 3000): cDNA_ID_3071787_gDNA_ID_1621151_Annot_ID_173247 3000 nt of promoter + ATG
gttcccaagaaatgataatctcaagcctcttttggcaccgaaagaaatgggaaactcacaaaacaatggaaaacccacagaagccagcaagaccttaccaaaaattagtgctgccaaggggagcagtgtaaaagctgctggatcaaaactgaactcaggaaacaaacagtcggatgggcaacccaatcttacatcaagtaactctaaggaaatggttgaaaatcctgacgatctcaagaaagacaaaaggaaatgggcattgcaggttcttgcaagaaagaaagctttagctggcaacaactcaacccaagacaaagaaggctctcccgagcttaaagggaattatccattgttggtgtgtaattctcatcacttactttgtttcttttaaaaattctggttttttgagatgtcattcgtttgtttctaccatttctatcaggctcaacttccagctgatatgagaccaagccttgcaactagtcgccataataaagttcctgtggcagttaggcaggtacgtggatagctgataatcaagagaaagactattacgtagaattaactcctttaggtagaaatccccaagccgtgcttttattacatttacatacgttaaactgataatacagaaaattgaggctaatctgttattgattttcctgcaaaaacattattaacatcacaacttgtgcaatagctttacttgtttttgttcctaagcaaattgctgtttctgcagacacaattatatcgcctgacagaacatttattaaagaaagaaaaccttctgactattcgaagaagtgcagcgacagaactagccgttgctgatgctataaatatcgagaaggcgattgctgacaaatcaagtagcaaagttgtgtatctgaatctatgctcacaagaaatactgcatcattcagagagcaaaacgatggataatgctgtagaaccaaattcgtcatcaccaatggctgatagtgagtcagaacgtataagtagtaaagattcagataatccagccgtccttgaagcgctcagagcagcaggtcttgctgattcaccaccaaacagcccgacccgttcagtagaagttcttccagagaaaggagacagttccttggacaagaccagggagacaggcccatataatgtatttgacatggattctgttcctgatacagacatctttggggattttgaatatgaattggatgaagaagactatttcggtgctacaatggctaaaaaagcttcagtaatgcagccggatgaaagcttgactaaggtgaaggtagttttatccactgttcaacctggaaagtctttgaatccatccgaagtcgtagaggatgaagagacaacaactgaaaacctgaacgagaccacaaatggaaaagaagatggaaagagctttgttcctatggagcttgtacctgaggctgagggagaaggagaaggagaaggagaaggagaaggagaaggagaagggggaggtgagatcctttctgtagctgaatgtgaagaactatacggacctggtacagagaaactagttgaaagacctctcatcgaaggatttgctgagaatggtgttaaagctaaagcccctgattcagagtgcgagagcaacacacagagagagttcatcgcttcaaactttgaaatcacttgcattcaagagaaaaaacttcccagaagcattcaaaagtgcaaaccaagcgaaaagccgtctaaagaggaaaaaggcaaagctgatggctttggtaactccatcaccaagaaggtactaaaaactgtaaaagtctctgtcatgtcaaaattctcattccctttgtcttcactcttcaatggttttattgttttcgtcaggtggaagcatacatcaaagaacatattagaccactgtgcaagagcggagtgataaacgtggaacaatacagatgggcagtgactaaaaccacagaaaaagtgatgaagtatcatagcaaagccaagagtgctaacttcttgatcaaagaaggagacaagatcaagaaacttgccgagcaatacgtcgaaaccgcttcctctggagctcaccacaaggataagtgcaagtgagaaaatcagatggcgtaaataagaagatgaagtaacaagtagttcagtacaaaaacgtaaatagattttaactagtatctctcttttgtcttctccacgggttttggaaactgagtcttcttctcttagggcgagagaagcaattcttgttgtaccccgaaccagatagacctaaactgtgtctgaaactgagatttacttggtcgctgacaggtttttgaaaaaatatttagagatgaaaatgatatatttattattagttacatactttttcgtcactgtgattattaaactgaactagtaaacttaaaagctaaatgtaaaagaagatgatgatagtttgtttgggtcaaaggctcaaagcaatgaaattcttaaaatgcctattgggcctaacctgacgcatttctttatatttttgaaaattgttaaacgacgacggatctgttttctatagtgactctgacgcacttggataaacatacatgtgcaatgactataatacccttgaaacttgaggctatttcctacagtgacacattttgataaacatttgcgatggtcagttacggagttggagacaaaagagcttctgaatctctctctcttctgcgtctcgccaaatttatttcccgattcaatttgtagggtttctgcagaagaaggaaaccaccattaaaccctaagtacgtcacctttcaagctccttcttctgtaggttttttctgttcttctgattcatgtttacaaagttttttttatgtctcttctaacttcttctccttctcgccgcgtaatcagtccttattgttcttcataatcgcagtaccaatcgcaatcgttttcttcctctctcgatctgttcctcggacgagaaaactggacaacaaacct

SEQ ID NO: 7551 - DNA, 3000 bp, Unknown; identical to SEQ ID NO: 7547
  misc_feature (1)..( 3000): cDNA_ID_1027071_gDNA_ID_1621151_Annot_ID_56884 3000 nt of promoter + ATG

SEQ ID NO: 7552 - DNA, 3000 bp, Unknown
  misc_feature (1)..( 3000): cDNA_ID_1818111_gDNA_ID_1621151_Annot_ID_56892 3000 nt of promoter + ATG
tcgcaagaaggaaaacgaaggccttcgtcggtgacttaatgcaaaatttttgtaaggtttttttttttggcaagccaagccttattagctagttaagtaaattacgacccttcttcatttcttaatatcacattcatataaaaaaaaaaacaagagacatggagaaaccattgggaagcatttctttgttggcaaatagatcacataggcaaataacataaaataacaaaaggcagaaagaagcaaattaagacgggagaaaccatcgagcatcctttagctttaagtgcgagagacttgggaagcgtgtgattttctttgtttcaagattgaacacacagatgtgtcggacccgacatgaaaaatccttttcacagttatagacacggtcgtaacgggtgaaatagatggttcgataccaaggggatggtcagcaggcacaatgatacctaaatccaaacgaaaggcctcatcgcctaaagaatatacctcaacagacacatacggtgtgtataaaagctcatccggatttggattaggaaccttcttatagaggcggaagccgattctagactcacaaacgatgctctcgactaacaaaacctctcctgatgttgtaacaacaatatttctatggctagaatacatcttatcatcactactcgaatgagaagctaggtaacgtggtggtaatagatcagtgttggctacaaattcattgtatgcctcgtaactctctgtgaattacatcgatatatgttggaatggtatggtaatgatcttccccgttcttgcaataggttatatagttggcacctgtatcgaaaaaccacacaacagtgtattcttctttattctcctcatctacccacaaaagacctctcaaattaaccacattctggtttctgtaaccaaagctaggtctagtaaatttctcttcgaaatccttatctcctattcgcttaagagtaaaaaggccttccactgagtctaaaggtgggagattgattctcttctcgctaaacaaatctatgatatagagattggattcaacatctaccgtgaggaacaagttacctgagtttgctaggaaacgagtctttgaaaagtctctctttgtattgtaaactctattatcttcttctggattgtatagcacacaaccatcttctggaaaaagcatcagccacgcagatttccttttcttgtgcgacgtttgtttcgagctcaagtaccaattcgtacacacgatcttagcgcggtggaaatcaacaaaaaatcaaacgttggaacacagatttcaagatattaagagggaggtccgaccatcggctagaattaggagtctccatggaattgatgaagaagtttaggaggagcagagcaagggttgtagcttcctctagtctctctctaattgaaatccctacttattgaaaaagaagaaagaaaaacaatgggccaaattacaagcccaagtagtatgaaaaaagagaataatgggccgaaatgttaactcacacccaacagttgggcctatttatgacgaaggtgaaacgcagatattttttttttgttttttttttttttttggtatttatgttattgtattgaagataaatttgatatttttatttttaatatgtagtatatggcataaattctcctctagtagacgaatcttttaccttatctctttgaatatatcttaacaaataattaaataaaatttaagaatattaattagagtgagatataggaaagtttgctcctaattttggtgacatggaaagagtatcttatcacatgatctatggattgacacaacacaaccgagctggtgtttggttctcttttctattatctcctaattattttacgtttaaagtcttaatttatttgttggtccatcattaccaaaataccaagttgacatttgtttttaaagttatttctctattagctggcacgagcctatcttctctgtcatttccacttggcagtatcataatgggtgaaacaatttgtgagaaacgtcgaactttgtttttgacggtgattacctaccactgcaactactactgtgtgagtacaacgaaggatgatgatgaagcatgtctcgaccaaactaatatccaataggaaaatgctcttattctctttatctgtcttcattaagtcatttgtaagtctttttccaaaatattataattctttgtaatgtattcgtatttttatggatcaatatattcatatttattacttctatgttttacaaattatatcatttaagttttttttccttacaatagtatcgttttatactttcattgcagtttaaaaaaaagaaaaatttatttttatctttataattttattttattaattataagaattttttttaattaagtgtatttataaaagttatagtaaaaatttacatagtatttttttttttgaaatatgtgaaaataatacttttcatgaaacaaagagagtatgtaacactgaatttactaaaactgaataaaaacactaaataacatattatattagttaaaatttaagaagtaataaaatattgaattactaaattgattatggtatcgtggtattacaaaaaaaaaaaaaattcccgggtttaatccatgtttagtgtgtaagactattttttaaacctacattctaacggcaagtttaatctactttatcacatagatgtctctctcgaaaggcgattctctgggcgattttcgccgttctagttttctccatcggagatcttttccgaccaggatagatcacggttttgatgtcaagatcttcactggcggttttaatctgtcaaaaatcaatgatagttactctcttccctcattttcgggaagtaaccaccaactaaaaccgccatggcctctcctatataaccaccgtgttcatccgattatgttctctctttctttgttctatcaattcgagtttaaactactatcaatcatg

SEQ ID NO: 7553 - DNA, 3000 bp, Unknown
  misc_feature (1)..( 3000): cDNA_ID_1818208_gDNA_ID_1621152_Annot_ID_56897 3000 nt of promoter + ATG
ttatataagttttactgtacactatatacttcctgtttttctaaatatttgtagtttaaggttttacacacaaattaagaaaacatacaaatctcatttaatttatttctttcctataaaaacatcattaattacaactaatccaatcaataaaaaaatatgatgtaaaatataattggttaaaatctattaaataaatttaatttttgtatagaaacgtgaaaaacaacacttatattaaaagaagtaaaaaaacctttaaattacatataattagaaacgtatacagtagctactagtgtgactaatgattagtcgaacaattagtaaaacaaaaaaaatgggtaggttacatggaaatagacagttaatgataaccagtgatatgtgtttagtaagatctttagagcacctccaatgtagagagtcccttcaagggctctctcccctttttaatgattaaattttaaaaaagaagaagtagagagctttgtgttttttttatagttttttatactccaatggtaggttctctaacatgagttctctaaaaaaaatattaaaataaaactattttattttatataacttaataattattacaaagcataaactattaaacatacattattctgaaatattttgaaatagatgtggaaaaaaatggaataacgatcagttgttctgttgattgttgcaaaaaatttcccttatatgttctaccaaatcacctttcaattgcaaatgcatcttttgatcacgaacttgatatcgaatgcccataaaatctctgagacttgtaggcatacatgtacaataagataaatcgacttgtgaagttcagtttgctttatattttgttgttttagcaaattcccaaatcttatagatattttgttaaagtaaaggtcaaaatcaatgtaagtggaattgtattgattttcatggctgaaccattttcaaagttgaactaaattctcaagtacaattgtatgttagcatattaacaagattacgaagcacactcgcaattaagataaaacaaaacaaaacagagtggtctctttttttcttatttgttcttcttccacctacaacacacttcttcttgttctcttcttcttttgcttacgagttacgattgttcttatctcaccatcttctcacatctttctcttccaatctctgttgcatattgttaacaaagatgagattccaacagtctctcttattgagagataaaaaatggaacctatctcatcaacacaaatccggcgtctgccaattaaataaatccggcgtctcagatccacgattacacacatcatcgccgtcgactaattgcaaatcataccaccggatttttgttttgtagagagagagatgaaaccgtcgggttcttttttggcggaggaaacaaagcactagtgctttatttttttggttttgttacaaataaaacccaatcacattcggccacgtcgtcgcctctctcactctcaataatctctcttcgtagagccagctctctcaattttaatgacttctgtagcatactagcatcgctgtctcaacgacaatatttattacatgctctgaaaatttaaagagtttgtgagactgatcgtcacagtgtcgctgtaagactactttcggcgaacaatagaagaattaattgaatcagctaacttaattaattttcaatattttggtaacaacttttatatttccgtgaagacaaaaattcagtcaccggaaatatatatcttagtgatgttgctctgaaatcaacgacgttggtgccattctttgaccatcgatcgtttcctttgctttcgtcggcttctacatttctgccgttgaaggtcgtcgtcaacgatacggtgctacacatgccctacgtatactgactatatagagcgtaaatgtctaaataacaaaagaaacattatgacggtggtataattaacaatttggagttgaacaataatagtatataatgactttagtatttgtttagggagtgacagtaattacaagttacaaccaaaacgtgccaccaaatccaaaatgagtggtccaacaccaatgaacccacggctcaacgtgctttcaagctaatataaataatatggctgcagaaccgatactagagtcattttgtttcttcattttttggttgtactttcgtagaaactatattttcttaagaaggcccaactattctccccataaataaattcagccgttttaagagcccaacttgtagataaaagaagatgcgacccaactaaggacatccacttgtgtagcttacaccaacttatagtaaaatttagtcatcaatttgactcccaaaacgagtcacttctccataatcatctctcccaactcaaccaattacacatcgatctctttcgagtagccaatcatcgtcaacattacatccatatacaccaaatcaacaaaaaagatagatattttgagagttgtgcacttgtggctctgtccactcctctccatctcccttttgtttccaccaaccaatatttaaagacaaaatttgacttttacccaaaaaaatatcctaaccagaatgaaaaaacgtgggtttgggctaagacttatgctatgttggaccatttctgtctctattaggtaagaataataataacaaaaaggtgtcttgattcaatgtatcacaaactaaaaacaagaaagaaagaaaaaagatgcgttagattagagttaggaagagagtaggatctgctttaaatgccgaaatgtacggtaaaaaatgtataaacctcaaaaagccgtctagattcaaatcattaactcccacacatctcgggattctatttttacacccaaaatcttttttcactctgtatatattaatacaattctctcccacttctttcaaaaatatcacattctttcttcttctcattttctctaaagattgttgtttgtgtgtgaggctaaggatcaaagatg

SEQ ID NO: 7554 - DNA, 3000 bp, Unknown
  misc_feature (1)..( 3000): cDNA_ID_1818200_gDNA_ID_1621152_Annot_ID_56899 3000 nt of promoter + ATG
agccttttaggcagagatgggtactaaggtgcagatgagcacggcttatcatccacagagagatgggcaatctgagaggactattcagacgcttgaggatatgttgcggatgtgtgtcttggattggggaggtcgttgggcggatcactttagtctggtagagtttgcttataacaatagctatcagatgagtattgggatgactccttttgagacgttgtacgggaggccatgcaggacaccgttatgctggacccaagtgggggagaggagcatatatggtgcagattatgttcaagagaccttagagaggatccgggttcttaagctgaacatgaaggaagctcaggatcgaaagcggagttatgctgacaagaggaggagagagcttgagtttgaggttggggacagagtgtatcttaagatggccatgttgcgaggtccgaacagatctatctcagagactaagttgagtcctaggtacatgggtccgttcaggattgttgagagggtgggaccagtggcatacaggttagagttgcttgatgttatgcgtgcgtttcacaaggtctttcatttgtcgatgctgaggaagtgtcttcacaaggatgatgaggtgttggctaagattccagaggatcttcagcccaacatgactttggagacgagaccagtgagggttctcgagaggaggatcaaggaacttcggcggaagaagattcctttgatcaaagtcctgtgggactgcgatggtgtgacagaggagacttgggagccagaggcgaggatgaaggcaaggttcaagacgtggttcgagaagcaggttgctgcatgagtttgcctttccttggtttccagtttcagtgttgttgagtttttgagcttttgagttgttgttcttatttctcttttatttgtattttcgtttggagttgtaacgatcataacagttgatgattaataagatgagtattttttcttggatttgacttgagttgtcttatttaagattgtgttgtgcggtttccaaaaatgaaaagtttcctagaaaggacttgtctatttttggaaagtttgagtaaacaacctaagagatccgtgtgtttacgagatggccgggagttggtcataaggatattctcgagggatatgatggatggtgagacatagaggtgtcttacgcgaatccatgagagagtctggagatatgctcggaagcgtttaatattgttgctcgagggacatgaaggtcccaacgactcgtgaggagcggggtatgctcctgaggtaccggtaactcgagggacatggtgtatttagagaacgaggggtacggtggcttcgggtgacgatccgagagcacgctttagggtgacgacccgagagcgagttttgtggtattattttcgccaagtgtcgtaactcgatgactttgtggctgagagtgagccgacacaactcagggtttgactttgagtggggaagataatatgtgtgatacccgagataccgtaggccgaggcctgagagtgacggtttatgctcgaagattgcagtctgagagtggagagtgagttgtgagcaacaatgactagtaaatcgtgagtatattgactggatagagagacctagagggggtctggttgaagggagtgcagactgtagtgatggttgcacggagttcctcggagtggaagggtgaagctagattcgaggacgaatctatgttagtgggggagaattgtaacgcccgtgaactggaaaatcggttagggtttgtttttaaatcatccggtttaattggttatgttaattggaaaccctagagtgtgcctataaaagaaggaaactcgaaattagggctttagttagccacttttcgttttataaaggagaaaaagagagttatttccaagtcctttatagttattctccagtttacagaattggatttggattaaaattggttgagttattcgcagtttcgtgagacacgttttctcagacgcgaattaggaccagcggagattgaaactgagatcgtggtctcgtcttttttccgatcggcacgagattttgtgggcatctttgtgacgtctgcagataggattttaccggagcgattgaatagttaacggttagcttatattttagggtttcgtttttgagactgcttgtttctggtttttcctgtccagtttgcttcaaggttgcttttggttgtggacttgttgtaggacgtttctgaactgtttcagacgcaaggagagtctctcctgggtttaattggtattagaatcaatttgttaaggtgagtgcgtgaccatgaatttatctgagcgattgagttgtgtgatgatatataggtgtggtgaatatgttttgggtgaattgttcaatgactggtttgtttgtattgtattcgtgattatatttttttatttgcttttgtgtatagctcgtagatgggagaatcgcctcactaagtatttatgataatacttaagcatcttattgtgttgttgatgcagtaaaaataaagtgtgattgtggaatcatggcaaggaagagaggatgatgtaggaactcgtttgttttatgttttgtgtttttggttattggaacccggttaggattgtctgttatttttggttttgttgatcgaattatttatttatttataaaatagtatttctgatttgcggtttaattattatgttattggttgatttaattaaatatttaattatatatatatatatatatttttttttttaaatgggtctggttgtttcacaaagatatctgagtcatatttggggaatgctgacattaatactttcgataacaaaaagaaaatacactcattaaacagaacaaacctcagaaacagaatttaattaaaaacccacaaaatgaatctaagatagtttgctttacaattcaaaaacccgtctctgtgattcaaaatccctaaatccagagatcgaactctcgatc

SEQ ID NO: 7555 - DNA, 3000 bp, Unknown; identical to SEQ ID NO: 7553
  misc_feature (1)..( 3000): cDNA_ID_2139660_gDNA_ID_1621152_Annot_ID_173288 3000 nt of promoter + ATG

SEQ ID NO: 7556 - DNA, 3000 bp, Unknown; identical to SEQ ID NO: 5422
  misc_feature (1)..( 3000): cDNA_ID_1842707_gDNA_ID_1621152_Annot_ID_56901 3000 nt of promoter + ATG

SEQ ID NO: 7557 - DNA, 3000 bp, Unknown
  misc_feature (1)..( 3000): cDNA_ID_1818193_gDNA_ID_1621152_Annot_ID_56902 3000 nt of promoter + ATG
catcgaaatattgttaaataatagactcattctaagtcgaaacaaaaataatatcgtttcccccacctttttaatatattgtaatatctcgtgtacaacgttttgcctaataatataatcatatttcgaaaacttgccacccactacctcgaggtctctcccacaaatctataaaaatattgtttaataatagaaatgggaacttgcaaaaagcattaaaataacaataacatccaaagtcaaacaaaaacaagaaaaaatgatttgtgtaaaaacatatacatatacatatacatatacatatctctcgcttttctgttcatcacttcagctgagtttctcattcaacatgtaacttttttttgaaatatgttgcaaaaacaaattccaacatatttataaaactagtaacattattatttataatttgcaaaataggtcatgaatcccttttttaatcttttttttttttcatttcccctcatgtttaattattaaactacttaatagtataatatttttcaaattttctatttatatacaaaagcctatgtttttttttctataatttgatatgtagtgtctaataaattcaaaaacatttttattcatacatctcattaattgttaagatgtatacaaattgatacatttttattcgtacaacttatttagtatacattagctatgaatatatgaataaaatatgtatattatgtacatttgtatactaaatgtgttgtatgactcttagtatacaaaacaacacaaaaaactttatcaaaaaaaaaaaaaaagctcccagacccgactcccgaggaaacctaagcttcttcttgctatggccttcgtggccgccggcgaggaccctcccttgccagaaccccctgacccgcctgatcctccctccatcttcgcccaaaccttcatacccgatccaccttctacttcttctctctttccaccttcatcgagtctagatctagatctatgttctaccgtttcttcctatggtgttactcctttcgtttttttgcgattctttactgctgtgtgcagtcccttctatcagatctgtacccgttccgtgtctttgcggttctttactgctctatgcagtccatggaaactagcctattcccagatcttgggatatcctctcgtttcaagtggatatgtttcacaggccataacctttgatgtccacgctgcccctcctacctcaactcagagagcctctcctactcgttccatggcccagacacgacaacggtttgttacttctgtaagatggtgtatgtctttgtttctggttttacccctcattcaaaatttcgtagtggtgcgatttaatgctgcagtatgcagtctctttgaactcaatctggccttttgtgctgtttgttttgtttctctttcttggtggcagtttgaaaagaaactaattaatacacctcgcctgatgaatctggttttatcgggtatttggtaccctagtagcttcttatcggagctagttatcttcccaaagttccctcctcagtggagtggtttggatgtccaagagtcgtcggtattgcaaggatcttcctcccgattgatgttcttctctgcatttgatgcagttcttgtaacctcttgtgttacgttggatacagtcttccaagaatctagccagatcgttcttattgttcgttttgccttatgttattcttatgacttctgttgcatatctatctatcctttaaccattgttatatggtctgttttggcttctgttgttgtgttttatgtagttttcttcatgttggttgtaattcctctttctgaggctcctaaaatttagtgaaaacaactattggtttgaaaaaaaaaaaaaaaaaagaatcttagtatacaaaacaaagagtaaaattgtctattttgcaaattgtaaatagtagtgttactagttacataattatgtttccaaaagtaactatatttccaacaaacccttttttaatgtatttttttgatagatatattagtagattttttttaacaatggaaaacgaacaaggttataagggcagatgagcagagtacaactgttcttaaagtctcatggcaaatcttggcacacttgtgttatctgaaatagccagtctttagattttcttgtactttttattttgttgattggagtttgaagagtgttgagagaggagcgacgaggacaataacaaatttctcagtgattaaaggtagcagagaaccctatacaattatgggttccgcattatcctttcgtaacctagattttttttttatatatagttaaactcctagcctaaaactaaaacacagttgatgactaattggtggagaaccattaaaaaaaaaaaaaaaagacagagtagactaacgaaaccacacctttacatttttctatttatctcaccttcctaaataaaaaatatttattttaaacaaaaacacattttctgtacagacgtgggtttcgtaatgtccataagtccatccatagtctaccatataatttaacatctacttctctccagtggacgcaaaagcttcgaattgaatgtgggcgttgcttctctcgtgtctaatataaaatttggataatcatgaattcttcgatgatagtgatataccgttgacactgagtagttcattgcaataagtaagatcttgtttttgctaaaaagattcaatcatattttgaacacttgccacccaccacttccaaaacttccacaaattcatagatatagtaatacacaggttacttgacaaaaggaataaaagtacaatatgatgctttacacattctcagtcaaacaaaaacgataaaatgaatgtgtaagataatattgtttaaaaaagaaaaaaagaacaaaaaaaagataatattgttttcccgacgactaatccactttcagtattttataaaataactgaactcaagttgctcgatcaaacaagtacccttaa

SEQ ID NO: 7558 - DNA, 3000 bp, Unknown
  misc_feature (1)..( 3000): cDNA_ID_1818189_gDNA_ID_1621152_Annot_ID_56903 3000 nt of promoter + ATG
tacaataaatataccaagattcgtacgacaaaaaaaaatatataccaagattcgttttgagttcctctgccctctgggacctagagaaatatatatcttttttatcttaagaaaaaactattacaaaagtattcaaaagtttttcttgagatatttttttctttttaacatttcaattttttttaattttgttttttgaaaaaaacaaacaattaaaattccttaatttagagacaatgttaaaaactgaataagaaacaataaagaaattctaaagtgagtgacagattaattggttgataacagttaatctgtttcagcttctttcttattttcattcaattttattttagggtacgacagcgtcttttggcacattgttaaaaactacttttagtaaaaagctaatcgattgaaaatgtgattaagaaaaaaaaaaatgaataatagaaagacctgtttaatagagacacgagttatctattaaacgagtttagttactactatataatactgaaagtggattcacggtggaaaaattatgaatatttatgcacattcattattataacttttatttgacttggaatgtgtcaactatcagattagacgtgagcagcgtaatattcaaaatgtgatttaaatgttaagcaaaacgtcttaggtagtatctggtgttgttacatttgatgcgacctaattccggttgattgctcgagtaattattatcttatagacttaactgtaaaatagtacatacagagtagatcacataaatcaatgatattctaaagatttgcgagagtcgtttttacctaaacggacaaattaaatgtttgttagtttttatgcttaaaattaaaattatgaaagaaactaaacgattaaaattatatgataaaacacattaaaccacaaaataattcaaagattgatgattaacgaaactatgaaataaaaaattcaacaaccaaacaccgctttcgaacatgaacacaatattagattactcctctttcaagaaattagtcattaaaattgactacttaattactaaactttcatttgtaatattagtcaaattcgcattatcaaacaaatttgttaaactaacaatatgtgttctaatattaaatttcattggctaaaaatatattgctcaattcagttcgtgaattcctaaaaatagttaatttttaataataatcaaatcatcaaaccaatttagaactctaaaactcaattgaagagactactcccactaaaaaaaaacattatgtacgactatatggggaccaatattattttttcaacacacaaaacactttttccactatcatcctagtctgtaacgggttgatatctagtgtttttgggtgttttaaaacctctttttctcttagtttttgttgctttgcattcatattttggcatatagtattgcatttgcatttggttttcttaggtacatgagtggagtttaaagttttggaagtaaaatggagcaaatggagcaaacaaatgagctacaagaatgcaaagtggccaaagaggagaagctagtaggacaatctaccaaactggtcgattggtcaggagcagagctacggaggaatacgaatctaccaaactggtcgattgggtggtcgattggtccggaccagagctacggaagaatatgaatctaccaaagtggtcgattgcgtggtctactggtcaaggattaatgttgcggacgatattgaatctaccaagtgatctattgcttggtcgattgccttccttaacagggtcaaaacccggtttgttccgggttgatccggtttattttctcattactagaaatactcttaacctagttttagagaaaaagagcttttgtttagggatcaaaacttctcttgaaggttctttatcttaggtttttgtatgaatgttgagttcttaagtttctatatcaagtatttcttttaaatttctcatctattctctaatgattatggctttacaaagatcaaaccaattcctttgtatgatcatgatcatgagtgagtagtctcctagagttctttggttagggtagattaggatggtttagatgttgggttatggattttagggctagattacttaagattcttacttattggttgcttttaaggctagatcaaccttgatcatgttgatttgatgcccggaagatgttcgatgaaattcccgaaccaaaatctttaagtgcttttcatactttacctttggaaattgttgattagggtgattagtggctagatagacttgttatttatgcttattgatcatttgattgcctttggaaattgttgatgattgattgattagtaaaaggattaatatcatggaaatgtattagtcttgtttagtgttccatggcctaaggatcattgcttgttagaagttgtttgttgctccataatccatctctttatcatttctaatcgattaccttaacctgagaattcgtctttagttatcactaagtaatttgttaatttcccgctttgtttactttcgaaacttgttagtcttttgtttcttgctttcttttatcttgttttgcattgtttgcttgataatgcattgttactaagattaggaacactcaaagtcaccttattagcttagattaagcaattgtgtgtattcttggtgagttgattaattgcaaattgtggttcgataattaattgatagaaatgctacatcaatttggcgccgttgccggtttgcaatagttattagccattaggatttcatatttgcttgagactaagccttttactttagttactaatcctttatacttgatctttgctcttgtcttaaaggtgtatgaacctacgaagttacggccgagcaaacttagtagaagagattaacgacattcgccggtttgaaagagaaaacgctagagcaagaagaaaaagagaacgacttgaacaccttgctcggttaggcgtcatg

SEQ ID NO: 7559 - DNA, 3000 bp, Unknown
  misc_feature (1)..( 3000): cDNA_ID_1818185_gDNA_ID_1621152_Annot_ID_56904 3000 nt of promoter + ATG
tcttaaaaattcaaaaccaaaaccaactatcatctctcccaattatcatctttttaatatatcaaaaatatctttgaaaactttcctttacccatgttttaaacctttctcatctatatatatacatttttacaaataaatcctcaagttgaaacttatttacaagaaataccatttggcattaattattattaataaattaatattcctaactactagcattttcttatctgatatatatctccatcaattcttaatacgtcaaaaaaaatcttaggacactattaatattatactttattaaaagataaataatgtagttatttaaagtttattaaaaaaaattagaatatttcacagaaaaaacgttatagtatatttataatatgtaaatctataaaaattaaataaccattgaaagaaaacttttaaattaatttaaattataaatcttttaataaaagtattattaaaacaaaaattaaaaataatatttaattttatgaaatgggattagatggtaggacggatttagaatatcataatatatgaactttataacaattaaataaccatttgaaagaaaacttttaaattgtgttgaattatatatcttttaaattaaaatattatttaaacaaaaataacaaaaataatgtttaatttcactaaacggagttagatgatataaggggtttgggtcgatagtattatgagatggtataccacaagtgaaatacattagatatgtttaatttcactaaacaggattagatggtaggacagatttggatcaatagtaatacgagacggtatacgacggatgaaatcctagatatatcattaaaaataaaattatattatctaaatactaaaacaaacaaacaatattaacaaaacaaatataattagaacttaaatatttagttataatttagattttaacttattgttcctatatttttaaacagtaaaaattaaacatagtaattatacactaaaaaatatatagatataagagttgtacgtttagaaaatacaaaacattaaatcatatttatttttaatctacaaaacaaattaatttttatttttaaaaaatataattatgcggtacaccgcgggttaaaatctagtatatattcaaaagccttcaaattgaacacgagctttgttcttgtatctagggctggaaaaatagtctgactcgaagatccaaactaaacccggctcaaaatattcgatattaattcgatttcgtatattaaaactatctgaatgggatctagaaacttgaaattctgagtgtccaatataattctgattcgaatttacccaaaaaaatcctaacatgttcaatctttagtattttaaattgttttgatagttttattaccgatatttttggttaattatgatacttttaaacaaattttaaatatttttaccggatttttcgagtaatcggataaatagtttcaattatttaggtagttttaaccaaactcaaaacatgattataaatctaaaatattaaaatctttaaaatatctaaaataactaaaatatctgaactatttagttatattttatcaatccactactgcgataatatctcgtgtacttcgagaactctcactaatccacagaaatattgttttatataacagtagtcattagtcaatagctagacatgcatggtttggtacacgtacttggaaaaagcataaaataaacaattataaccaaatcgaaatctgatatacattcaattttaaacaaaaaaaaaaatggaaatctgatactgtaaaattgaatatgtgtgtattattattggttccacgacgagtctactttcagtattttattaccaaagcaaaccaaaacggatctcaaaaaatggatactgaaaaatggagtcaaggtattaagtgatcctttgtccaaaaaaaaaaaaaaaaaaaaggtattaagtgatccacttttgttcttagtggttctgtccctgccttttgctcttgtatctagagctgaaataaaattcggacctgaacatcctaaccgaattcagattaatttttttgattagaattctaatccgaattttaaaagtattcgaacggattttagaaccggaacttcgaatatccaaaaagcccggatttaaaacagattccgaatatatactcgaaaaaatctgaatattcctaagatattaactctttttacctggttttatggatactattgattaattaaaatacttttaatagtataacttttaaccgggattttcgagtaattcgaattattttacatagtttaaataattatacgtagttttaaccgaatcttaactataattataaatctatatcaattattttttaatcaaaataattaaaataccaatcaatataactaaaacacttaaaataaacaattttaaaaaacaatttttattatatctatcaaattatattaaaaaattcaagcaaataatttttttagattatccaaacttcgaatacaaaaatctgaatagaaccagaatttgatctgatatattttgagttatggtagaaatcttaatcagaaaactaaaaaatccttacaatacctaaacgctcagacctataaattttgatttatctacatttcggtgttggtgatatactgacaccgagtcgttaacagcaataatattttgtgtactttgagatcgctcacaaatccacagaaatattgttttataatagacgtacttggaagatgcataaaatagacaatacaaccaaatcaaatttgatactttacacattcaaagtcaaacaaaaacagtgaaattgaatgtgtacatgtattattattgcttccacgaggagtccacgttcggtattttatatttgttactaaactcgatcaataagtaatcaaaagtgtctctgtttatataaatggaaagcgttaccaaaacaaaacaaaaccagatctcaaaaa

SEQ ID NO: 7560 - DNA, 3000 bp, Unknown
  misc_feature (1)..( 3000): cDNA_ID_4257471_gDNA_ID_1621152_Annot_ID_56905 3000 nt of promoter + ATG
tcacgaatggtacgtacacttattttctttctttagattttattggttaaaacttaaaactgtgataaccattttcttgaactctttttattgataggagtgacaagagtgtggagggatgaccgaccatcggataagattctttcgataaccagcttctcaataattaggacgagacctgaaccctatgaatcctctgtttttgaggctgttggttacaaatggtaaagatcttagtatatcttacactctatcccattttttttttgttaattatatcttttgagctaattatgatgcaaataaataaatcaggagattggttttgtacgtgaatggtaatgaaaaggacggtggaaaagatcatgtttcactttacgcgaagatcgtagagacagaatctcttccagtaggatgggaagtgaatgttgatctcaaactctttgtctacaatggaaagctaaacaaatatttgattgttacaggtactttaaactgtgaatggatttttattagatccatatatatattctagcggaaaacggtctatttctccacgataagtatgacatcataacagatagagcccaggctttaacctcgtgctagatatgatgtcatattctagctctatatgttatgatgtcatattctagccattgctattttaagaaagtagacttcaaatactagtctcattagtaaatgaaccgatagttgattgtgatttgccttttttttttttgcataattgtggattgtagatggtacagtgaaacgatacaacaatgcgacaaaagagttgggttacggacaacttattcctcaatcaacattctacgacgggaacgatgggtaccgtgagcaggacactggtacatttggtgctgagatctacatcgttaaaccagcccaacaaaaagagaaagtcacattcatatcaaaccctccagacaatgttttcacttggaagatacttcatttctctaccttggaagataaagtctatcagtctaacgagtttcttgttggagaccgatactggttagtcattttcgtaaccggatattttagaccaaagtccaaattaatcttaaaagcttgttactgttatgtgactttcacagtattattgtataatcaggaaattaggattaaacccgaaaggaggcttagtcccaatcttcctatatgctcaaggctttaaggcaaacgcagttgttacaaccacttatgcagcgactaatctgcggttaaagaatcaacgaagcagcaaccacgtaacaacatatagtaagaaaactaacctaagaataaaagtttatctccaggagaaaaaaacaacaatgaatgaaactaggaatagctaaagtaaatttgtttatgctgctctgttttttctttgcagctgcatattggtacctgattccaagcggattaggtttgggagtgaacactataccgttatcagatgtaaaagatgcatcgaaaggatatgtggtgaatgattccattatcattgaagttgaaatgcttacggtctcggtgacgaacattgtatccgcttaaagatctctacttctttaccatagttcaaacaaccttatgaagaaagagatgtttgtaataagacaacgttaatgtttgtgatgtagtcgttacttcggtttttccgagttttctcttttctgttttgttatcaatgaaaataaaactctccgggttttaaattttataaaaaatgttgaggacgtgaagtgttaaaaatcgacttatctggagtcagaaataaacttataatttactttacataatttgttttgtagccaaattcaaacataacccaaaagaaaaaagtattgaatgtttttttttgtagccacattctatttatgcgaccgttgcccgttggagtaagggtcatgccctgatctacaattttcaatgtacaacgttttgaacgctttaatttgaccactataattcattactctcattaagttaaccatatttatctcgaaagttcatcaaccaatatatgtttcattccacttctaacatttcttatttctaccacttttaccacctctattttaagcatttcgcattagtaccggttgatattatatatgtatcaagtttaacaagattctaactcaaaaataagtggcaacaaacaagtgaggaaatgcatatttactatatatttgtgttgaattacctttacttttaagattggttatatacccatttgtgtttattagattttaaaatcaattaccaaataagttattatgagttcatttgaaaagttatgagctgccaactcaagactatgtgaatggattgtcatataagtatgttatgggcttgattggtataactaattaattatagtagagttgtagcaattacgagcaaagcaagtaagttgatgaagttgtaatctgttatatattaggttgatgatatatatataaataagttgttgctgaaattgaccaagttttgatcaggtggtcatgaacgatggtgaatgaagatgaatgatggtcaatgagagataattgagtgatgatagctcaaacctctggatattggaatgcaaggtttatccgtctacgtacgtggatatgaacattgattttgactactcggtcatgatccacagttatcgattggtagattcggccttccgcgatgatcggtatgtctatggtcattaattagaggtaagggtggtgtgatgtgagtccttacttcatagcttcatatgattggattgttaagcttaacaatccaatcatatttaatattttgaacattatgctacccacatcgaatctgatacttgacacattccaagtcaaatacaaaaataataataagtgaatgtgcatatatatatattctaccatgaatccactttcagtattatatagtagtaacttaacttgttcaataagtaactttgtctatatatatgtaaaagtcttacca

SEQ ID NO: 7561 - DNA, 3000 bp, Unknown
  misc_feature (1)..( 3000): cDNA_ID_1818173_gDNA_ID_1621152_Annot_ID_56907 3000 nt of promoter + ATG
tggttcgtcactgtctggcctacccaaaagcggatggaatcttggtgaatacatgggaagagatggagcccaaatcattaaagtcccttcaagacccgaaacttttgggccgggtcgctcgtgtaccggtttatccggttggtccgttatgcagaccgatacaatcatccacgaccgatcacccggtttttgattggttaaacaaacaaccaaacgagtcggttctctacatttccttcgggagtggtggttctctaacggctcaacagttaaccgaattggcgtgggggctcgaggagagccagcaacggtttatatgggtggttcgaccgcccgttgacggctcgtcttgcagtgattatttctcggctaaaggcggtgtaaccaaagacaacacgccagagtatctaccagaagggttcgtgactcgtacttgcgatagaggtttcatgatcccatcatgggcaccgcaagctgaaatcctagcccatcaggccgttggtgggtttttaacacattgtggttggagctcgacgttggaaagcgtcctttgcggcgttccaatgatagcgtggccgcttttcgccgagcagaatatgaacgcggcgttgcttagcgatgaactgggaatctctgttagagtggatgatccaaaggaggcgatttctaggtcgaagattgaggcgatggtgaggaaggttatggctgaggacgaaggtgaagagatgagaaggaaagtgaagaagttgagagacacggcggagatgtcacttagtattcacggtggtggttcggcgcatgagtcgctttgcagagtcacgaaggagtgtcaacggtttttggaatgtgtcggggacttgggacgtggtgcttagtaatggttactgttttctagctctttagtggttgaatttacttgtcgtttcttaatgtgtatttttcattgtaatagaataatcgatgttttgtaatatattaatgtatttgatatttctcaactaatttccattgtaatattgaataatcggtgtgttgtagagagacaaattattctcctggttatattaaataataagaataaaacgacgtttagatgattcattacttttaatataatcttcacaatttaacactcaagtcgacaacgatattatcatcagactaatcatatgtttaagtcacatctacctgaacctgaccttctagatgaaatcataaaccagtaataaaattaccaaaaaaaacggtgctttgtcactaattgctttttattgaagcacaaaaccatgaagaaacagaaaaaagtacatcgtctcgatgtgacatttcctctacctcgctgatttttctgttacactgaaagcatattttaggaatcaaatcaattaaatagataatttaatacgatgacaggttccaaacatttcataaataaaaaggaacatataccaaattcacttgaattattatgcactgtccacgatatatatagacaaatttaggagttttatatcagatgccaattgcataatttgcagcatatatattttttaactaaattaaagatttaatccgtattgaaacgatatcgtatccctttaaagatcctttcttatttattatagatccaacaactttatgaataaaaaaatacgtgttttatgagtgtttaatgtttgtgatatatcgttatttatgttcttctgcatttatgatccaacaactttatgaataaaactttgcatttttattatttattatttttgaaaaatgttaggaaattagagtgttaaatttctatggactaagtcgacattgttagagacatgttaggaaattagagtgttaattttcttatggattaagtcagcatagttagaaacatagagtcagaaataaacatataatttcatttacaaaatttcggctacaaaatttcagttttgtagcagacttgacatgttgtaataaaaaagagtcatatttttcacaataatgtttttctaataatgcttcacgtctctttatcacaatttttatttttataaattttgatatgttgttaaaaaaatatttttggaaagttgtctttatttatttttattttttgtttgatatttatttttttaaagattttataaatatttttcccagcgattttgcggatgatcagaagcgtaatatatgaaaattagaatgaataacaaatttatttgatatatatttttgaaatcttcttcaatgtaggtagagtttttaatgttatgtgaatataatctacaaaagattaattaaataaataatgatatatatatatatatacaacgtatatatatatttaagttgttgaaattgaccaagcgttgatcatgtggtcatgaatgatggttaatgaagataaatgatggtttatgagagatggtcaatgagagataatcggaaggtactccctatcttggaatacaatgttaattagtttagtatgtggatatgatcattaatttgactaaacgatcatgatccaaaattatcaattggtacgttcatgttatagaggcaaggatggtgtggtgtgagtcctcccatcatccttaatcaactagctactcaacgaactgcttaatagcatcccttgagcttctttcgaagcttcgcgtcgttagttgatgcgggacaagaggcacaatatagtccttcagattgtcgactttacgtgtattgtaaccacacctgataccaccctttacataatgtaagaggtttgacttaaacattttaacaatattttgaacattatgctgctcacgtctaatctgatacttgacacattccaagtcgaccaaaagtaataataatgaatgtgtagaaatatacatatttttccaccatatggatccactttcagtattatatagtagtaacgaaactcattaaataagtaactctgtttctatatatatgtaatgcatttcccaaaaaattgaaaaaccatatgagaaa

SEQ ID NO: 7562 - DNA, 3000 bp, Unknown
  misc_feature (1)..( 3000): cDNA_ID_1818169_gDNA_ID_1621152_Annot_ID_56909 3000 nt of promoter + ATG
atcccactatctctatcctcgcctatagctcttactgattcaaagctttcgtgtgcaagcttgtaccaaacttttttcacgggagcagatactccattctctgctgggaaatcggcgaagatagaccacgtcatcagatctggatcaatgagcatatccctcttctcaaatcctccaatgtaggcaaacgactcatcgcgaattgagacatctcctccatactttatatgcagcttcaaacaatcgaaaccactgcaaaaacaacaaagaataaggggattaagttcaaatgacacaaacctagaactctaaaaacccagaaatcaaacccgacaaaacccttaacctagaaatcgaacccgacaaacatagaaactgttactctaaactcagaaatctaacccgacaaatccagtaatcgatccagaaatcttcccattctcaatcccgacaacccagaaatcgatcccgacgaacaaagaaatcgatttcccccaattctaaccctaagaatcgattcgattacatacctcatcgtgacttagcagactcgttgaaatcaattaccgaccacaacgcaaccagttaaacgacgacacacatcgaaatcgatttggggtttcgaaatcaaagagagaattttagggtttcgaaatcaaagagagaattttagggtttggaatcgaaatcgatttgggggagaatgccaaaagggtaacagtgtctttgattagatcgaaataaacacgtggggttaagtattaacctcggttagacactccgttaacgaagttaacagtcgttaacccgagaagctggtttttccaaacaaaaactaaacgaaagattttaaagcgaaaagaaataaacctaggtattgttcgggcaaattaaataaccgaggtattaaacgggcaaattaaaaatatatggggtgtttttagggttttttccccattttatatttatcagctaatattcacttatggcttgctcagttcagaaaattatggaaatcgttgtaacccaaacctgtgatagtaaaaactgtaggcgatacctgaatcgggaaaagtttactttataatacttcggtttatttctaccgaaactgatcaaatcagccgaatgagtacaataaaaagaaagtaaaaaattatgaaaatcgccgtactatttaaaattttcaccacaattagaagcaaaaatctttagtattttaccaacatatatatatatatatatataaaatctacgaaaataatactggaatgctgaaataatgggatgtagtttcgtttcttggagcaacgtacttacagagctatatttttattttagtttttgttaacaggataataacaataactttatagatatttattgtttatatattttattattgttattgctctcgttgaaaacagaataataataaaacaagcctttttcttgttaacgacttgacgtattttttttctcttttcctattaattatcgtcacgttttattacgtttctctcattgatatttgtggaatctgaatcgtattagtcgactccaactcttaacaggataatgatgtttgaaaagtaaaatacacacttttttggtccaagcaggaatattttgttacgtaattaattttacatgtatgtcaagtggatatagtttacttacaagtctaaacacattatatccgtggtacaatatttcaacaattaatattcaatttttaatttgcatgtgttgtcctactttaatattgatatatcagtgtataggaaaaacttcaattaccaaaaccacaaaagaatgaaaaatcatacatcaaaaatcaaaaacctaaatatattggaaagtcaattatattaaaggtagatatttacttgttgttgttgttgcattgcaacttttcaacgcgtaaacaataactgagtagcagtgagcatatttggttattagtcttatcagaaccaaaaacatatatggttattgtcttttaaagatatggacccatgaactatacaaaagtgactatttggtagatatacacaaataacgtgacaccaactgagaaaaccatatgacaaaacaacacatataaatttaaaaaattggcttcgactagttgtagatattttgttccataatcgtattagaacgagagtaaacaataattgaatcgagtggtgagcaaatatggttatatattataacgattttaaagatttggatccatattcttaattagggaggttggtgggttcgattggtgtcggtctagtactcacaataattgtttcatctcaatatgattctgaaataaaatgttgaatattgcttacggtgttaaaagtatatgggactagatatggcatataacgtaacacttatacataacatcaataaatttagacaatacaaaggacagaattagtaagataaaattcacaagtaacatgacgttggctattttgtatgaacacacggcccaaatcgttcatattctaaaaggtataatacatttcgagatattttgcttcggttgcaagattttcacaacacattgagtcattgacagcgatatgagaaaatgtaacaatctctctaataagaaaggagaatcttataatttaacataaaaataaatataatattcgaggataatactataacaagaaagagaagacttatatgatgatgggcaaattgtatattcaactataaggacttaaggagacgccacataaagcagaaagagtttagaagaaaacgtttgttgaccaatgacttgatgactcagtagcatgtgaacataaaaagagacgtgcaagaatctcattggctgcagataacatctatttttgcttcactacctcaacttctctatataatgaagtaaacacccccaatggtctctttaacttaagtgtttctgtttaactccttgagagaaaataacttttaaactttagcttctaagagatattcaggatg

SEQ ID NO: 7563 - DNA, 3000 bp, Unknown
  misc_feature (1)..( 3000): cDNA_ID_3050774_gDNA_ID_1621152_Annot_ID_173311 3000 nt of promoter + ATG
aacgaggacccaatgttgtacgaatgatatcagcaacagcctgtaccacaaaaacaacgatgatctgaaaccagaggagagaagcaacaagcatcacagagaaaaagagccatagaaaaggattaatttaccttggaagcttggatattaccatgatgaaccttacttccagattcacgcttcaacgaatcgcctaaaccattttcacaaaaggagttaatctcgttaccaaaaaactaatatcgatttagaggaaatgagatctggaggaagatggagatactcactcagaacgagtaccggtgcgtgcatatttgcgatctgaggttttcacagtgaagaagaagcttagagagacacggcgagtgattttcaaagagcggcaagtggaagatcctactgccttctccgatttctttcatcctctctcgtgcttttcattttaggttgagaagcccatccctaaggcccattaactaatatttcacacattgggcctttttgtaagatcaaaacaaagtaatagtatttttatatccggaagattaggtaaagatgcgtgagaacgggagaattgttaacctaatttgttaagagggaaaaaatacaaaaaatacttcatttatttttaatttgtccgtttaatacatgcgttatttaatttacctgtttaatatttaagttaatttttatgtttattgaaaaccttttttttttttttaattttagcaaaatcagacatccgagttaacgggcgttaacagtggtaacgaaatcgctaactgtagttaaaacttaaccatataatgtttactatttatatacaatttgttttctaataattatgaacatattattttagtcgagtggttatgagagagattaccatcatcatcgattcaaaatcgattatcatctccaaaattttttttgattttttttcttttttttttaacaaaaaggcaaaatcgaagtcagccatctctttcacttcaacaggctttgcacttgtgtgttgcttcacttctttctccaaaggatattgcaccaaaatcaatcaccaaccaaaagtcccaaatgttagaccaattaatacaacatagatttgtgataatcgatcttatttgttatcaacagatgcaattaatggtaacataatctttctataagctatcaacgttactaacaatgaaaaacaaagtctggatttttcaacgcaaaatatcagcaaaaactgggaatatgcaatctttgctgacttattcatatcaatcgatctagaaattgaaaaccttaatatgaattgaagagatgaaggaatctaatttagctcgttctcaaaatcgaattgaagcagatctaacaaacgtggtgctaaacaaaagaaagtctcagaatcaaattcaaaatcgtaactcggattactgagattttgccttttgttaaaaaaaaaaatcaaaaaatttgttggagatgagaatcgatctcgaactgatgaggatgataatctctctcaaaaccactgggactaagataatatgatcataactattagaaaacaaattgtatataaatagtaaacattatatggttaagttttaactgcggttagcgattccgttaccattgttaacgcccgttaactcgcatgtctgattttgccaaaatttaaaaaaatgaaggtttttaatgaacataaaaattaacttaggtattaaacggccaaattaaataacgcaggtatgaacaaattaaaaataaatggagttttttttggtttttttcctctgttaatagtataatctccctcgacctaatccatctcccgtcagaaagttgttccaaactcttcagtgttatcatcttttccttttaagattatttttgtcaagtctacttcttataacaagagtaagtgctttccctcctgttttaggtttttgtaatttggttcgctaatttatttgatttctcatttgtgtttgtttcgtttccctgaatttttcttcctttgatttttcagattacagactttgagactcttagtttttactaagacacagtgtgatcaaagaaataggcccatctttgttttatagaattctttgtaatcaggttgtgttgaaccttgttatgtaggctatagtttttgctttgaaagccatgtatgactctgaactattactcaattttttaaagtaatgtgggattttttctacttattttttttcttcatcgattgagtagtatatgtgtgtttttaaaattttgaattacctcatatgcagaaaaaactaatatatttttaactatatgtattatatatatcaaataaaaataaattagatataagaacaaataaaaatgaaagaaaaatcatatatttattattaatgtagatatatagattttaggaaattagcaattaattgaatgtaatttaataaatataaaaattaattaaagatttaaatttaaaataaaatatttttagataaattttgtagggactaaaaaagaaataaagaaaatagttaattcaagtatttaatgcaaattaacgatttgtaaatttttaagaatataacattttggttgagatagaatttataaaaactcatatgttattagtaaatattagagagatttttgatcaaaaagtgcatcaaaaatatatatataaatacttttattttaatttcaaaagaaaaacattacctaatacgtatcttattcctaggacatttatgattgatctatctttacgtattttttacgaaaagaatggtttaagattgaagaagagttaaatatttttatttattctttcaaaaatattaaataatcaataaaaatcatatttagaagatattttatggacatgtgattttggcaatttccccataggaaaaagcgaaactctctataattgattgttactggctttgatactttgaagactgaacacaaacaaaaaaatctcttatcacaccacctcca

SEQ ID NO: 7564 - DNA, 3000 bp, Unknown
  misc_feature (1)..( 3000): cDNA_ID_2139718_gDNA_ID_1621152_Annot_ID_173310 3000 nt of promoter + ATG
gacccatctttcttcttccgttgttcctcactagggtcaaatcaaaattcgatttttataaacttactcatacaatttcaataacatgatcaaaagagaccaaatttaagaagatgaaggagtcatttacatggtggaagaagaagtagcagtgcaagtgagacgagaattggagtttctgagtcggtgagattggtggctgagattaactctgtgagtgatgttaacgagtctaggaagtgatgatgatgagtttctagtgatgaaggtgaaaggagagctgcaacaatggctgccaatgctctccattggaggtggtgtgataagagatttttttgtttgtgttcagtcttcaaagtatcaaagccagtaacaatcaattatagagagtttcgctttttcctatggggaaattgccaaaatcacatgtccataaaatatcttctaaatatgatttttattgattatttaatatttttgaaagaataaataaaaatatttaactcttcttcaatcttaaaccattcttttcgtaaaaaatacgtaaagatagatcaatcataaatgtcctaggaataagatacgtattaggtaatgtttttcttttgaaattaaaataaaagtatttatatatatatttttgatgcactttttgatcaaaaatctctctaatatttactaataacatatgagtttttataaattctatctcaaccaaaatgttatattcttaaaaatttacaaatcgttaatttgcattaaatacttgaattaactattttctttatttcttttttagtccctacaaaatttatctaaaaatattttattttaaatttaaatctttaattaatttttatatttattaaattacattcaattaattgctaatttcctaaaatctatatatctacattaataataaatatatgatttttctttcatttttatttgttcttatatctaatttatttttatttgatatatataatacatatagttaaaaatatattagttttttctgcatatgaggtaattcaaaattttaaaaacacacatatactactcaatcgatgaagaaaaaaaataagtagaaaaaatcccacattactttaaaaaattgagtaatagttcagagtcatacatggctttcaaagcaaaaactatagcctacataacaaggttcaacacaacctgattacaaagaattctataaaacaaagatgggcctatttctttgatcacactgtgtcttagtaaaaactaagagtctcaaagtctgtaatctgaaaaatcaaaggaagaaaaattcagggaaacgaaacaaacacaaatgagaaatcaaataaattagcgaaccaaattacaaaaacctaaaacaggagggaaagcacttactcttgttataagaagtagacttgacaaaaataatcttaaaaggaaaagatgataacactgaagagtttggaacaactttctgacgggagatggattaggtcgagggagattatactattaacagaggaaaaaaaccaaaaaaaactccatttatttttaatttgttcatacctgcgttatttaatttggccgtttaatacctaagttaatttttatgttcattaaaaaccttcatttttttaaattttggcaaaatcagacatgcgagttaacgggcgttaacaatggtaacggaatcgctaaccgcagttaaaacttaaccatataatgtttactatttatatacaatttgttttctaatagttatgatcatattatcttagtcccagtggttttgagagagattatcatcctcatcagttcgagatcgattctcatctccaacaaattttttgatttttttttttaacaaaaggcaaaatctcagtaatccgagttacgattttgaatttgattctgagactttcttttgtttagcaccacgtttgttagatctgcttcaattcgattttgagaacgagctaaattagattccttcatctcttcaattcatattaaggttttcaatttctagatcgattgatatgaataagtcagcaaagattgcatattcccagtttttgctgatattttgcgttgaaaaatccagactttgtttttcattgttagtaacgttgatagcttatagaaagattatgttaccattaattgcatctgttgataacaaataagatcgattatcacaaatctatgttgtattaattggtctaacatttgggacttttggttggtgattgattttggtgcaatatcctttggagaaagaagtgaagcaacacacaagtgcaaagcctgttgaagtgaaagagatggctgacttcgattttgcctttttgttaaaaaaaaaagaaaaaaaatcaaaaaaaattttggagatgataatcgattttgaatcgatgatgatggtaatctctctcataaccactcgactaaaataatatgttcataattattagaaaacaaattgtatataaatagtaaacattatatggttaagttttaactacagttagcgatttcgttaccactgttaacgcccgttaactcggatgtctgattttgctaaaattaaaaaaaaaaaaaaggttttcaataaacataaaaattaacttaaatattaaacaggtaaattaaataacgcatgtattaaacggacaaattaaaaataaatgaagtattttttgtattttttccctcttaacaaattaggttaacaattctcccgttctcacgcatctttacctaatcttccggatataaaaatactattactttgttttgatcttacaaaaaggcccaatgtgtgaaatattagttaatgggccttagggatgggcttctcaacctaaaatgaaaagcacgagagaggatgaaagaaatcggagaaggcagtaggatcttccacttgccgctctttgaaaatcactcgccgtgtctctctaagcttcttcttcactgtgaaaacctcagatcgcaaatatg

SEQ ID NO: 7565 - DNA, 3000 bp, Unknown; identical to SEQ ID NO: 7562
  misc_feature (1)..( 3000): cDNA_ID_2139712_gDNA_ID_1621152_Annot_ID_173307 3000 nt of promoter + ATG

SEQ ID NO: 7566 - DNA, 3000 bp, Unknown
  misc_feature (1)..( 3000): cDNA_ID_3050782_gDNA_ID_1621152_Annot_ID_173303 3000 nt of promoter + ATG
attttctttctttagattttattggttaaaacttaaaactgtgataaccattttcttgaactctttttattgataggagtgacaagagtgtggagggatgaccgaccatcggataagattctttcgataaccagcttctcaataattaggacgagacctgaaccctatgaatcctctgtttttgaggctgttggttacaaatggtaaagatcttagtatatcttacactctatcccattttttttttgttaattatatcttttgagctaattatgatgcaaataaataaatcaggagattggttttgtacgtgaatggtaatgaaaaggacggtggaaaagatcatgtttcactttacgcgaagatcgtagagacagaatctcttccagtaggatgggaagtgaatgttgatctcaaactctttgtctacaatggaaagctaaacaaatatttgattgttacaggtactttaaactgtgaatggatttttattagatccatatatatattctagcggaaaacggtctatttctccacgataagtatgacatcataacagatagagcccaggctttaacctcgtgctagatatgatgtcatattctagctctatatgttatgatgtcatattctagccattgctattttaagaaagtagacttcaaatactagtctcattagtaaatgaaccgatagttgattgtgatttgccttttttttttttgcataattgtggattgtagatggtacagtgaaacgatacaacaatgcgacaaaagagttgggttacggacaacttattcctcaatcaacattctacgacgggaacgatgggtaccgtgagcaggacactggtacatttggtgctgagatctacatcgttaaaccagcccaacaaaaagagaaagtcacattcatatcaaaccctccagacaatgttttcacttggaagatacttcatttctctaccttggaagataaagtctatcagtctaacgagtttcttgttggagaccgatactggttagtcattttcgtaaccggatattttagaccaaagtccaaattaatcttaaaagcttgttactgttatgtgactttcacagtattattgtataatcaggaaattaggattaaacccgaaaggaggcttagtcccaatcttcctatatgctcaaggctttaaggcaaacgcagttgttacaaccacttatgcagcgactaatctgcggttaaagaatcaacgaagcagcaaccacgtaacaacatatagtaagaaaactaacctaagaataaaagtttatctccaggagaaaaaaacaacaatgaatgaaactaggaatagctaaagtaaatttgtttatgctgctctgttttttctttgcagctgcatattggtacctgattccaagcggattaggtttgggagtgaacactataccgttatcagatgtaaaagatgcatcgaaaggatatgtggtgaatgattccattatcattgaagttgaaatgcttacggtctcggtgacgaacattgtatccgcttaaagatctctacttctttaccatagttcaaacaaccttatgaagaaagagatgtttgtaataagacaacgttaatgtttgtgatgtagtcgttacttcggtttttccgagttttctcttttctgttttgttatcaatgaaaataaaactctccgggttttaaattttataaaaaatgttgaggacgtgaagtgttaaaaatcgacttatctggagtcagaaataaacttataatttactttacataatttgttttgtagccaaattcaaacataacccaaaagaaaaaagtattgaatgtttttttttgtagccacattctatttatgcgaccgttgcccgttggagtaagggtcatgccctgatctacaattttcaatgtacaacgttttgaacgctttaatttgaccactataattcattactctcattaagttaaccatatttatctcgaaagttcatcaaccaatatatgtttcattccacttctaacatttcttatttctaccacttttaccacctctattttaagcatttcgcattagtaccggttgatattatatatgtatcaagtttaacaagattctaactcaaaaataagtggcaacaaacaagtgaggaaatgcatatttactatatatttgtgttgaattacctttacttttaagattggttatatacccatttgtgtttattagattttaaaatcaattaccaaataagttattatgagttcatttgaaaagttatgagctgccaactcaagactatgtgaatggattgtcatataagtatgttatgggcttgattggtataactaattaattatagtagagttgtagcaattacgagcaaagcaagtaagttgatgaagttgtaatctgttatatattaggttgatgatatatatataaataagttgttgctgaaattgaccaagttttgatcaggtggtcatgaacgatggtgaatgaagatgaatgatggtcaatgagagataattgagtgatgatagctcaaacctctggatattggaatgcaaggtttatccgtctacgtacgtggatatgaacattgattttgactactcggtcatgatccacagttatcgattggtagattcggccttccgcgatgatcggtatgtctatggtcattaattagaggtaagggtggtgtgatgtgagtccttacttcatagcttcatatgattggattgttaagcttaacaatccaatcatatttaatattttgaacattatgctacccacatcgaatctgatacttgacacattccaagtcaaatacaaaaataataataagtgaatgtgcatatatatatattctaccatgaatccactttcagtattatatagtagtaacttaacttgttcaataagtaactttgtctatatatatgtaaaagtcttaccaatgtctagctcatctaagaaa

SEQ ID NO: 7567 - DNA, 3000 bp, Unknown; identical to SEQ ID NO: 7559
  misc_feature (1)..( 3000): cDNA_ID_4257528_gDNA_ID_1621152_Annot_ID_173302 3000 nt of promoter + ATG

SEQ ID NO: 7568 - DNA, 3000 bp, Unknown
  misc_feature (1)..( 3000): cDNA_ID_3050787_gDNA_ID_1621152_Annot_ID_173298 3000 nt of promoter + ATG
ttcccccacctttttaatatattgtaatatctcgtgtacaacgttttgcctaataatataatcatatttcgaaaacttgccacccactacctcgaggtctctcccacaaatctataaaaatattgtttaataatagaaatgggaacttgcaaaaagcattaaaataacaataacatccaaagtcaaacaaaaacaagaaaaaatgatttgtgtaaaaacatatacatatacatatacatatacatatctctcgcttttctgttcatcacttcagctgagtttctcattcaacatgtaacttttttttgaaatatgttgcaaaaacaaattccaacatatttataaaactagtaacattattatttataatttgcaaaataggtcatgaatcccttttttaatcttttttttttttcatttcccctcatgtttaattattaaactacttaatagtataatatttttcaaattttctatttatatacaaaagcctatgtttttttttctataatttgatatgtagtgtctaataaattcaaaaacatttttattcatacatctcattaattgttaagatgtatacaaattgatacatttttattcgtacaacttatttagtatacattagctatgaatatatgaataaaatatgtatattatgtacatttgtatactaaatgtgttgtatgactcttagtatacaaaacaacacaaaaaactttatcaaaaaaaaaaaaaaagctcccagacccgactcccgaggaaacctaagcttcttcttgctatggccttcgtggccgccggcgaggaccctcccttgccagaaccccctgacccgcctgatcctccctccatcttcgcccaaaccttcatacccgatccaccttctacttcttctctctttccaccttcatcgagtctagatctagatctatgttctaccgtttcttcctatggtgttactcctttcgtttttttgcgattctttactgctgtgtgcagtcccttctatcagatctgtacccgttccgtgtctttgcggttctttactgctctatgcagtccatggaaactagcctattcccagatcttgggatatcctctcgtttcaagtggatatgtttcacaggccataacctttgatgtccacgctgcccctcctacctcaactcagagagcctctcctactcgttccatggcccagacacgacaacggtttgttacttctgtaagatggtgtatgtctttgtttctggttttacccctcattcaaaatttcgtagtggtgcgatttaatgctgcagtatgcagtctctttgaactcaatctggccttttgtgctgtttgttttgtttctctttcttggtggcagtttgaaaagaaactaattaatacacctcgcctgatgaatctggttttatcgggtatttggtaccctagtagcttcttatcggagctagttatcttcccaaagttccctcctcagtggagtggtttggatgtccaagagtcgtcggtattgcaaggatcttcctcccgattgatgttcttctctgcatttgatgcagttcttgtaacctcttgtgttacgttggatacagtcttccaagaatctagccagatcgttcttattgttcgttttgccttatgttattcttatgacttctgttgcatatctatctatcctttaaccattgttatatggtctgttttggcttctgttgttgtgttttatgtagttttcttcatgttggttgtaattcctctttctgaggctcctaaaatttagtgaaaacaactattggtttgaaaaaaaaaaaaaaaaaagaatcttagtatacaaaacaaagagtaaaattgtctattttgcaaattgtaaatagtagtgttactagttacataattatgtttccaaaagtaactatatttccaacaaacccttttttaatgtatttttttgatagatatattagtagattttttttaacaatggaaaacgaacaaggttataagggcagatgagcagagtacaactgttcttaaagtctcatggcaaatcttggcacacttgtgttatctgaaatagccagtctttagattttcttgtactttttattttgttgattggagtttgaagagtgttgagagaggagcgacgaggacaataacaaatttctcagtgattaaaggtagcagagaaccctatacaattatgggttccgcattatcctttcgtaacctagattttttttttatatatagttaaactcctagcctaaaactaaaacacagttgatgactaattggtggagaaccattaaaaaaaaaaaaaaaagacagagtagactaacgaaaccacacctttacatttttctatttatctcaccttcctaaataaaaaatatttattttaaacaaaaacacattttctgtacagacgtgggtttcgtaatgtccataagtccatccatagtctaccatataatttaacatctacttctctccagtggacgcaaaagcttcgaattgaatgtgggcgttgcttctctcgtgtctaatataaaatttggataatcatgaattcttcgatgatagtgatataccgttgacactgagtagttcattgcaataagtaagatcttgtttttgctaaaaagattcaatcatattttgaacacttgccacccaccacttccaaaacttccacaaattcatagatatagtaatacacaggttacttgacaaaaggaataaaagtacaatatgatgctttacacattctcagtcaaacaaaaacgataaaatgaatgtgtaagataatattgtttaaaaaagaaaaaaagaacaaaaaaaagataatattgttttcccgacgactaatccactttcagtattttataaaataactgaactcaagttgctcgatcaaacaagtacccttaaatgtctctctgtctatataaatgtacactcttcccaaacaaaaccatatctcaaaat

SEQ ID NO: 7569 - DNA, 3000 bp, Unknown; identical to SEQ ID NO: 5424
  misc_feature (1)..( 3000): cDNA_ID_3076949_gDNA_ID_1621152_Annot_ID_173297 3000 nt of promoter + ATG

SEQ ID NO: 7570 - DNA, 3000 bp, Unknown; identical to SEQ ID NO: 5422
  misc_feature (1)..( 3000): cDNA_ID_1842707_gDNA_ID_1621152_Annot_ID_173295 3000 nt of promoter + ATG

SEQ ID NO: 7571 - DNA, 3000 bp, Unknown; identical to SEQ ID NO: 7554
  misc_feature (1)..( 3000): cDNA_ID_2139674_gDNA_ID_1621152_Annot_ID_173293 3000 nt of promoter + ATG

SEQ ID NO: 7572 - DNA, 3000 bp, Unknown
  misc_feature (1)..( 3000): cDNA_ID_1818161_gDNA_ID_1621152_Annot_ID_56911 3000 nt of promoter + ATG
tgatgttaacgagtctaggaagtgatgatgatgagtttctagtgatgaaggtgaaaggagagctgcaacaatggctgccaatgctctccattggaggtggtgtgataagagatttttttgtttgtgttcagtcttcaaagtatcaaagccagtaacaatcaattatagagagtttcgctttttcctatggggaaattgccaaaatcacatgtccataaaatatcttctaaatatgatttttattgattatttaatatttttgaaagaataaataaaaatatttaactcttcttcaatcttaaaccattcttttcgtaaaaaatacgtaaagatagatcaatcataaatgtcctaggaataagatacgtattaggtaatgtttttcttttgaaattaaaataaaagtatttatatatatatttttgatgcactttttgatcaaaaatctctctaatatttactaataacatatgagtttttataaattctatctcaaccaaaatgttatattcttaaaaatttacaaatcgttaatttgcattaaatacttgaattaactattttctttatttcttttttagtccctacaaaatttatctaaaaatattttattttaaatttaaatctttaattaatttttatatttattaaattacattcaattaattgctaatttcctaaaatctatatatctacattaataataaatatatgatttttctttcatttttatttgttcttatatctaatttatttttatttgatatatataatacatatagttaaaaatatattagttttttctgcatatgaggtaattcaaaattttaaaaacacacatatactactcaatcgatgaagaaaaaaaataagtagaaaaaatcccacattactttaaaaaattgagtaatagttcagagtcatacatggctttcaaagcaaaaactatagcctacataacaaggttcaacacaacctgattacaaagaattctataaaacaaagatgggcctatttctttgatcacactgtgtcttagtaaaaactaagagtctcaaagtctgtaatctgaaaaatcaaaggaagaaaaattcagggaaacgaaacaaacacaaatgagaaatcaaataaattagcgaaccaaattacaaaaacctaaaacaggagggaaagcacttactcttgttataagaagtagacttgacaaaaataatcttaaaaggaaaagatgataacactgaagagtttggaacaactttctgacgggagatggattaggtcgagggagattatactattaacagaggaaaaaaaccaaaaaaaactccatttatttttaatttgttcatacctgcgttatttaatttggccgtttaatacctaagttaatttttatgttcattaaaaaccttcatttttttaaattttggcaaaatcagacatgcgagttaacgggcgttaacaatggtaacggaatcgctaaccgcagttaaaacttaaccatataatgtttactatttatatacaatttgttttctaatagttatgatcatattatcttagtcccagtggttttgagagagattatcatcctcatcagttcgagatcgattctcatctccaacaaattttttgatttttttttttaacaaaaggcaaaatctcagtaatccgagttacgattttgaatttgattctgagactttcttttgtttagcaccacgtttgttagatctgcttcaattcgattttgagaacgagctaaattagattccttcatctcttcaattcatattaaggttttcaatttctagatcgattgatatgaataagtcagcaaagattgcatattcccagtttttgctgatattttgcgttgaaaaatccagactttgtttttcattgttagtaacgttgatagcttatagaaagattatgttaccattaattgcatctgttgataacaaataagatcgattatcacaaatctatgttgtattaattggtctaacatttgggacttttggttggtgattgattttggtgcaatatcctttggagaaagaagtgaagcaacacacaagtgcaaagcctgttgaagtgaaagagatggctgacttcgattttgcctttttgttaaaaaaaaaagaaaaaaaatcaaaaaaaattttggagatgataatcgattttgaatcgatgatgatggtaatctctctcataaccactcgactaaaataatatgttcataattattagaaaacaaattgtatataaatagtaaacattatatggttaagttttaactacagttagcgatttcgttaccactgttaacgcccgttaactcggatgtctgattttgctaaaattaaaaaaaaaaaaaaggttttcaataaacataaaaattaacttaaatattaaacaggtaaattaaataacgcatgtattaaacggacaaattaaaaataaatgaagtattttttgtattttttccctcttaacaaattaggttaacaattctcccgttctcacgcatctttacctaatcttccggatataaaaatactattactttgttttgatcttacaaaaaggcccaatgtgtgaaatattagttaatgggccttagggatgggcttctcaacctaaaatgaaaagcacgagagaggatgaaagaaatcggagaaggcagtaggatcttccacttgccgctctttgaaaatcactcgccgtgtctctctaagcttcttcttcactgtgaaaacctcagatcgcaaatatgcacgcaccggtactcgttctgagtgagtatctccatcttcctccagatctcatttcctctaaatcgatattagttttttggtaacgagattaactccttttgtgaaaatggtttaggcgattcgttgaagcgtgaatctggaagtaaggttcatcatggtaatatccaagcttccaaggtaaattaatccttttctatggctctttttctctgtgatg

SEQ ID NO: 7573 - DNA, 3000 bp, Unknown
  misc_feature (1)..( 3000): cDNA_ID_1818153_gDNA_ID_1621152_Annot_ID_56913 3000 nt of promoter + ATG
aaaagaatggtttaagattgaagaagagttaaatatttttatttattctttcaaaaatattaaataatcaataaaaatcatatttagaagatattttatggacatgtgattttggcaatttccccataggaaaaagcgaaactctctataattgattgttactggctttgatactttgaagactgaacacaaacaaaaaaatctcttatcacaccacctccaatggagagcattggcagccattgttgcagctctcctttcaccttcatcactagaaactcatcatcatcacttcctagactcgttaacatcactcacagagttaatctcagccaccaatctcaccgactcagaaactccaattctcgtctcacttgcactgctacttcttcttccaccatgtaaatgactccttcatcttcttaaatttggtctcttttgatcatgttattgaaattgtatgagtaagtttataaaaatcgaattttgatttgaccctagtgaggaacaacggaagaagaaagatgggtcaggaacgaaagtgaggttgaatgtgaggttagatcatcaagttaattttggtgaccatgtggctatgtttggatcagctaaagagattggttcatggaaaaagaaatcgcctttgaattggagtgagaatggatgggtttgtgagttggaacttgacggtggtcaggttttggagtataagtttgtcattgttaagaatgatggttcactttcatgggaatctggtgataatcgtgtccttaaggttccaaattctgggaatttttctgttgtttgtcattgggatgctactagagaaacccttgatttgcctcaggaggttggtaatgatgatgatgttggtgatggtgggcatgagagggataatcatgatgttggtgatgatagagtagtgggaagtgaaaatggtgcgcagcttcagaagagtacattgggtgggcaatggcaaggtaaagatgcgtcctttatgcgttctaatgatcatggtaacagagaagttggtagaaattgggatactagtggtcttgaaggcacagctcttaagatggttgagggtgatcgcaactctaagaactggtggagaaaggtatcacttttggactgttattttagtttcctcttacttgttttcctttgaagctggggaataatgaaacattacctcaattttgaaatgtgtttatgtgttcaagcttgaaatggtacgcgaggttatagttgggagtgttgagagggaggaacgattgaaggcgctcatatactctgcaatttatttgaaggtttctcttgtctttctatagcctaacctaagttatcttttctcatatatctgggattcaccttgcttactctttttgtttgtttgtctggcttcttatgcagtggataaacacaggtcagattccttgttttgaagatggagggcatcaccgtccaaacaggcatgccgagatttccagacttatattccgtgagttggagcacatttgcagtaagaaagatgctactccagaggtgacacattttttcgctttcaagatctcgactttcaagtctctcttctcaaatatttgtagttggtgtgttcatagtatcatcttctttaagttggatatgattttatttcgtaggaagtgcttgttgctcggaaaatccatccgtgtttaccttctttcaaagcagagtttactgcagctgtccctctaactcggattagggacatagcccatcgcaatgatattcctcatgatctcaaggtaataactcttttctcctgttttgtcattagatcagtttttttaatggtatccatataacatatctatgttccagcaagaaatcaagcatacgatacaaaataagcttcaccggaatgctggtccagaagatctaattgcaacagaagcaatgcttcaacgaattaccgagaccccaggaaaatatagtggagactttgtggagcagtttaaaatattccataatgagcttaaagatttctttaatgctggaaggtatttctgaaaccacctatcatttcgtctgattaacttgctaaatgatggtcccatggactgtagaattcaatagctcttgtatcttgttgcagtctcactgaacagcttgattctatgaaaatttctatggatgatagaggtctttctgcgctcaatttgttttttgaatgtaaaaaggtaagctctcacttttcttttacatgtgattcagtgcttttctgttggaagtatgcaatatttattgggttttcttgcatgatcttctgaagtggtatttccctagacacagcaatgctagggtagccaccgtaaagatgcagattaaattaataacaacccatccttggttgcattctctattccaataaaaggaaagaaaatcaaaaccaaagggggatgtactcttagaaacgccacaaaaggagaaatgttgatatgtgtccatataatcacatcatttgataaattgtgcatgttatacacaatcaatgagaattttgttattgtagtctcttcataagactgactgcgaaattcatatttccagcgccttgacacatcaggagaatcaagcaatgttttggagttgattaaaaccatgcattctctagcttctttaagagaaacaattataaaggaacttaatagcggcttgcgaaatgatgctcctgatactgccattgcaatgcgccagaaggtgagctattttaaacaatccagcattatcatgtaccaatttatttactaatatagtttcctcgtttcattagtggcgcctttgtgagatcggcctcgaggactacttttttgttctactaagcaggtgtgcataagattttgattgcttttaagagctaaatttcttttggaagttattaaaactcctgctacctttctccgtctcgtcttatgtctcgtcaatgatttgtgtagattcctcaatgctcttgaaact

SEQ ID NO: 7574 - DNA, 3000 bp, Unknown
  misc_feature (1)..( 3000): cDNA_ID_2993732_gDNA_ID_1621153_Annot_ID_56916 3000 nt of promoter + ATG
caaggatgtcacgtttgggaatcacagaatcaagaaagtaagaaacaaaaagaacaaagatcaaataccaaatcagcaataacagcaggatttcgaggatcatcctcgggaattccctgctcaactttcccaacgagatctgccccaacatcagctcccttagtatatattccaccacccaactgagcaaataaggcaacaaacgaagcaccaaaaccatatccgacaagaagaagaggtactgtaagagaaacagaaaattcaatcaataaatcttacaagtttaatagctccactatcgcccatgcaaatgcaaattctggtcaataaatcaagagaattacatatagggttcactgaaaatcttagaactgtattggtaccccacctcaatcaagattaatacaagtcatgacatatttaagaaaatactgctcatgtctgaaaatgatcctttgaaaagataacaataactttttgaaactcagtacaatgattatagaatatacacacaagacgaaaatgaatatttttcataaaaaaaaaagagcagaagacttacggtcagtaacattcattgagcctggtgaacccacgcccaaccacacataaaatgtagaatagaggatggcgataccaatcacagccataccaacaacaaccagggctgaaaacccaccagcacgaacggctatctgcattatatctgccacttagtatttggaaacgtgtacatgacatgttaccaaaatagctaaactaaagaagaacctgcaatgcttctctcgcagatcgtctggcagcactggagacccgcacattagcacgaactgacacccacattccaacatatccagcaatacctgagcatagagcccccaaaagaaatgcagcaacagtaatataagcagacatcgccctgcagcaaaatagtaatatggctaagcttcattcacaacaattcaaaagataaaataaatcttgtgaatgtaatcatgtatcagcaccttcctaaaccagcagcctcttgctggggagttaagctacggaatagatatatgcaaagaatcacaaaagctagcaaaatggccatcttggatatagtgctatactgcgttctgaaaaaaccttcagctccatcacgtatagcatctgatatctataagtaagagaattacctcacaaattagaattacaaatttttgatgagaacaaagaaggaaaaatgtcaacatcatgactaacaccacataatctgagtgagcttacctcaaccatctctggaggtccttcatctttcgctaaaacccacttggttagatatattgacaaaaggaagctgatgatgcatactgtgaagacgaacacgatgatgggagaagtacttgcccccatgtaaaagattgctccgaagcagaaaagcagaattatcgaaaggacacggacatttaatttcctaataatccggaatatctgccaaaaaacaactaaactttatacaatttcaaagaaaatgaaaacgagatgctcaagaaactaagatgctaaacgaaatagaaggaaactagttataatacgcatctcagtgatctgatgcaagcaaaaagaaaagcactcaagaaagagaggaataaaagttgtaccagtggactataggttttactacgcatgttgggaaaagccctaggcctgtcattgaaagacatcaaactggcctgctcaacatcttcatccatcatcatgttttgagctgaattagcccttcggactatgtgtagaggcgtaaagtcaatgctatggggcaactccgccccagaactcggacgctgaattttaatacactacaactttttcctccaaacgttaacaacagcacatcacaaaacgagcacaagttagtatgaaccctcttaactctagctatatctttgattccagcttcttcaaactttctcagtagagttgccacaacaagtttccaccacaatcaaaatttctgaaaaaaatagaaaagtatgaaaagttgtgatgtttctctttaccaaccaaatagcatttttaaatgaaatataatcagagtaaggttctacagtaaagtttagctataactttcatcatttcccatgagcgtaattgcttctacgatcaattccccagaaaagtgcgattaacaaacagacctcaagatctaatcgactaagatttcagtgaataaaacgcaagggactttgcattccgagtttaatgaatcaagcaccgttactttaatttagatctgagttctgttctaagagaaattcacatgatctctagacaggaaatggatacgtttccagaaacgaatccaacgaaaaaaaaaaagcatacgaagagtttatccggaaacaaaccctaaaaatcggtaaaacagagaagatgacggctccggtgagagtgatcagaaggaaaccgccattagcgaaagcttgttgtagccgaagaagcgctctatcctctcgctgtctccgttctaaatccgaagacttttcacagaactttccgaatatttttttcctaaattaatttttctacctttaattttattttcactcctcagtggttcaatactaattttatgacacatcctatccaatgagtcgttgacacttaatcactattctcacttaaaaagttaaaaacttaaaatcatcctcgtttgttaaattatatagatcgagttaaattatcaaaaatacccatcaattttggaatattaacatttgaatattatatgggcctagcccaaaattatgttttgccattcggcccatataatagacaatctgcaaagtgaagaagaagaagaaccactaacgttatcttaccggcccgatcacggagctcacctttcatcgtcaatctccggcggacgaatttctcttcgtagccgttacttctcattatttctttgaaactttcttagaaaattctctgttttggttaggacaatacaaacagagg

SEQ ID NO: 7575 - DNA, 3000 bp, Unknown
  misc_feature (1)..( 3000): cDNA_ID_3000132_gDNA_ID_1621153_Annot_ID_56918 3000 nt of promoter + ATG
ggtgtaaagcctcaatcagttgagacggagatgacttcaaatactgcatatcactccgaggacgaggaataaaccccaaaactcgtcagggtaagctataagatggtcgcaacagtcgtatataactttctattgatttcacgagctgaaagcagggaaatttgaagagcaaatgaacttaagaaaaaactctgctagagtgttgggcagtaaagccttctttagctagcataagataatatggactaaaagtatctaaaatttgccttggctatagacacttcaagattttctttgacctctaatgaaacaaatttcaaaactttgcaggctcttgctcttcaagatttgtagatttatgaacacgaatcaacgaagattcgaatcaccaagagcagctgcaaagacatggtttagacttttagataaggtagagtaaagcaaaccttttacagactgatcagatcctatccagtcttagtgaaattaaataaggaaaaggtgctgttgctttaccctctgttttcttgtaatctcccttataacagtttgttgaatcgtgtgtatatatatttccgcataagctcgcagattcggttctcataccacatttgcagactgttttgtatgatgatgccttgagtccaaaattaacgtgaaaagagaatacaattatagatataggatcggcaagtacatggtgtggaggttaaacaatatcattacatttttcacaaggtagtatgcaacaaatccaatgtacataaggggaaactactctgaagactgaagctatgagcatgtaagcatgagaaaagacgaaaagtataaacaaaagctagacatattatgtatcagaatgtgcttcttgttctaaaatctggccatttcctcgctttagtacacagtttccaagagattgagaagtctgacagagcatggagagacagaacaagcatagtcctgtttcagggagaagaactagtcagagatcattggtttgcaatatttgacacaggcaagacgaagggtttcccaaatggccaacttttgttaaatgctaagaaatccgacatattggtatgtaatgctactcataaggtaacagctcactcttccacattaaaatgaaactttgtataagtttgagacaaaatgtgaatgctttataattccatgaaatgctacttataaggtaagagcacactcttccacattagaatgaactttgtataagtttgagacaaaatgtgaatgctttaaaattcaatgaaatactacactcttccacattaaaatgaaactctgtataaatttgagatgaaatgtgaatgctttacctgcataagcaacggttacacctgatatgagtcgcccaagcgctgataagaagtaaaggcaaattacgacctaaaggaaaaagcaaaaaacaaacatattcagtatagagcacaattactgagttaacaattagcaatgcatttatatggtaactgggtaaagacactagggttctaagagaatctctgtggtgatatattgatgctaatgcattttgatacactcatgatccaagaatagtaacggtatcttgtacatagtaagttggtaacaaaggacacacttaccttgacaaaaagtctcttgtcatgtccagttgctgcaaccctcagaacaccctctgctgctccaacggtattagctaagcgtgcaacgatgttacttgctgtgtcctgtgatatttgccactctagtggatccactggtaccctttagaaaagttataggattgtaaatcatgtggtatgataaagcaagggtcttgaagagttatacacacaatgagcagaagataatgatatcattgaacattctaggattatgactatgcattgatcacagagaacggaagatgatagtaatcaaataagatcgatgcatcattgattcacccagaaatacaatgagaactagtttcagttcatgccttcagagaatacatgaaatcaatttcataatcaagttaacataactgattgcacaaccacattacaaagtacaacccaattaaacaattatatcgagcaagtattcaaacttgtcacaaatcaaaggagccaacaaatttcgtatctactcggtcaccaaacagcaaatgactaaatcagagaccaaagaacaaaatccaataccgtaaccagagagatttaggcgaaaaatgtgagggaacttacgagacattgagttggcgaaaaaggagaccgagaatggcgagagagcataagagaacaatgaaaacatcggagaagagagagagaagagtcgcgttacgatatgcacaatggtaatacacaagcgtcccgctaatcagcaatcccatcgccttccccatttctcccatctctctccccacttcaaaaaaaacttgctttccctttcttcactttcagaaaatttccccgagaaaacaaaactgatcacttttgtgaattttccggcttgatcagagagagagagagattctcaagccgcatgtctttgttgactaaacggacccacttattgggccgtaagtatatattataaagcccaataaataaactgtcacgtggctattaacgacaaagtccagatctacgcgcgtatcgtgtgtagtcatgtaccggatcactccacgatttcgtcaatcagatcaaaacttctccaactctttcaatatctatctacgtgcatccacctctctcttcttcttcttgtgaccactcttcctgtctgttcactggttaggagatctctatccctctctctctgatcctttttgtttctttctgatttattgtatcgctctctttgaaaaaccttaagagttgtctgattttggcgatttctgatttgttgttgttgttgtttgatcggatctcggcattttctaggaggtgaattttgatttttttggccgatcggatttgagtttttgaatctctgattgctgagaaaatg

SEQ ID NO: 7576 - DNA, 3000 bp, Unknown
  misc_feature (1)..( 3000): cDNA_ID_1818275_gDNA_ID_1621153_Annot_ID_56920 3000 nt of promoter + ATG
ctacaaatcttgaagagcaagagcctgcaaagttttgaaatttgtttcattagaggtcaaagaaaatcttgaagtgtctatagccaaggcaaattttagatacttttagtccatattatcttatgctagctaaagaaggctttactgcccaacactctagcagagttttttcttaagttcatttgctcttcaaatttccctgctttcagctcgtgaaatcaatagaaagttatatacgactgttgcgaccatcttatagcttaccctgacgagttttggggtttattcctcgtcctcggagtgatatgcagtatttgaagtcatctccgtctcaactgattgaggctttacacctataatcaaaaacagaccaagtgttaagaaacgctcaaaagaccaaacgttaaagaaacactgtacctaacaaaaaaacatattttgacgctgcaacatttgccactgaagaatgcaaacaccacaatctattataaaacagagtgattattattcgacaagaagcaaaagcaacaagattaataaacactacaatcttttcaaccctataaaggaaagactctctatgttattactgatgatggtcacccatttccataactgacatctgaacctgtaaagaattttcaacaactatataacgataagccaagaattgcctaagtgcatctaagaatgtagcaatacctatgcagattatagatactgcaaatgtaaaaaccaaagctttttcaaaaccgaaacacatacgatcagacaattagagttaatcatataaaaaccacctttgatgaagtaatcagagcaaggccatcctcgaaccgatgagattgaaatagattcttcatcagagatcggattggccagcttctcaacgagcttagcgatcccatgagactgggatctaggaggtggaacccaaaaggaagcaccggggacaaaagggagccaatcaggtgcggatcggcgtaccataatccggtggacagcatcttccaacttattgacaagaggatccgcagcgatatcaatctcgtagattactccgagatggttagagttagaccgacgattggaggattgagatcggatgaaaatggtttgagatgaagggagaagaagagaagctgcggcgaaacggtatcgagagagagaaagtgaaggagataaagatcgagccattgtagagatttaggagaaagatggttccttttttttttggtttggtttggttgttccctttttctagtctttttaacggataaggagaaaaagagcattaatcttgtttatcggaatttccttttttaatcctttttctgccctatctgaaaatttactttctccgataagaactgtcttttttcaaaacaggtacatcatgcaaatattttctgagtataaaacaacatgagacacaatcatacaaagcatatactgatgtccaaaaatccaatctgtgtagtttttaagccatactggtgtttaaaagaaaaagaaaaaaattatacactactctagtgatgaagattgaagaatcaaagaactcaaaaacaagagcctattcgtctagtgggccaccagtccactcaaggccggccttttagtcacctgaagttggacccaacccataagtggggccggaaaacaccatataatccaataggcaataaccaatttcactagtttattaaataaaaatatattaatattattaggtgagatatcataattgataagaaaatgctccaacttagtaataattacaatatacacccttagtttaacacattgtaacaaaactctctcaaactttttaccaattaaatttggacagagacaaaaaaaagaaagtgtgttcttcactttttctttcctcagttggttgtccaaacaaaaaaaatctccaccgctctgagagaaaaaagttggaagaggagagagagagagagcgacaacgcaccaactgttgcggctcaaagagatctcgatcgggatccacaagacggagatagatagagagagagtgagagctaacggaaatgggatctcagctacttgagtgttgcttccgtttcgtcttctactgtcactcccacagctccaactgttttccttgattgtttttcttttatctcggcgttttactcggaagcttacaacacactctctcaggtgcgaatcgacgccgtcttctttttgttttctcagattgggtttttgtcttcctgtgatcatttttacttcattttgggggtttaggtattgttttagcttcgcgttttggtacttgcttcaagctctttttcttagtttctgtgatttggggattttgttagacatggcgatctgtgttcgatttctgctcaatcgcatttgaaattgaaattgcttctaaatcccagagatctcactgggtttcaagagatcagacatagaaattgtgattagggttttgtttttttcatgggttctctgatattatttggtttttctgtagcttttttgggggaagtagttgcaagaaactatgtagatctcaagtgatattagtatattacaagttccctgaattagatgtttacgaatagtcttaagtctcagtggtgctggctctgtcagagaaatggtaaaggcttttggcaaggggaagtgacttaatctcaaatgataactagtcccatcaaaacagctctgctagtgtttggtttctgagtctcattttcttagcatttagggatctatcttgcagcatactgtcctggtcgttcttggtactattttcttttgtgggcataggatgttgaaagctttttattccgtgttggtgtttgccaatgtttcgcttgtcacagttctctatatgcccatttctcatgggttattgttttgttctttcagggatttgaaatcctcacgtttcagcacattctttgtggttcccatctattctctagccagttcggagttgcctgaagaaatcaa

SEQ ID NO: 7577 - DNA, 3000 bp, Unknown
  misc_feature (1)..( 3000): cDNA_ID_1818263_gDNA_ID_1621153_Annot_ID_56924 3000 nt of promoter + ATG
ttttcttttttgaatttcacaccggattcaatcggtaaagtattatagaagttcttactgaaacaacattaatttttttgtaaaatataaatctaagaagaaaaaattactagggaaattaatagcaaactgtaacggttgactggttttgctaatcgtgcacggtttagcattgagattaagataagctctttctaaaatattcgaaacatatcctttaaaaaaaaaaaaaaaaatcaaacaaaaccagcaaaagtaatagattatagcgaaacaaagaccaaaaagtcgttcaaaatactctttaaaatattataaaaccaacaaaaaaacaaagacttccttggctcctcctataaatagaagctttctctctttaccagaaacacaccaaaatccattaacacacacaaaaacaaaatgaaattttcaatcacattagctctatgcttcactctctccatcttcttgatcggatcacaagccaaagttccagtcgacgaccaattccgagtggtcaacgaaggtggctacaccgattacagtcccatcgaatacaaccccgacgtacgtggcttcgtacccttcagtgacaacttccgtctctgtttctacaacacaaccccaaacgcatacactctcgctctcagaatcggaaacagagtccaagaatccactctcagatgggtctgggaagcaaacagaggctcaccggtcaaagaaaacgcgacgttgacttttggcgaagacggaaacctcgtactcgctgaagccgatggacgcttggtatggcaaacgaacacagctaacaaaggcgccgtggggatcaaaatcttggagaatggcaatatggtaatatacgattccagtggaaaatttgtatggcagagctttgattctcccaccgacacacttctcgttggacagtctttgaaactcaacggtcggaccaaactcgtaagcagactgtctccatctgtcaacacaaacggaccgtacagtctcgtgatggaagccaagaagctagtcttgtactacacgacaaacaaaactccgaaaccaatcgcttattttgaatacgaattcttcaccaagataacacaattccagtcaatgacgttccaagctgtggaagattccgacacaacgtggggtctagtcatggaaggtgtcgattctggttctaaattcaacgtttcaacgttcctctcacggccgaaacacaacgcgacgttgagttttattcggttagaatcagacggaaacatcagagtttggagttacagtacgttggcgacttccacggcttgggacgtgacatacacggcgtttaccaacgccgacactgacggtaacgacgagtgtaggatccctgagcattgtttggggtttggtttgtgtaagaaaggccagtgtaacgcttgtcctagcgacaaagggcttcttggttgggacgagacatgtaaatctccaagtctcgcaagttgcgatcccaagacatttcactacttcaagatcgaaggagctgatagtttcatgacaaaatataacggtggatcatcgacgacggagagtgcgtgtggggacaagtgtacgagagattgcaaatgtttagggtttttctacaatagaaagagttcgaggtgttggttgggctacgagctcaagacattgactagaaccggagattcttccctggttgcttatgtcaaagctcctaatgcaaacaaaaagtcaactctttgaggtctgaaagtcatatatatatatgaaattattgtgttgtgtgtttaataaggttcgtttgtgtacctttttaaaaataaatggtgtactgattctcaagataaatcctaatacaaagtgaagtgaaaggaatcaatttctgatatatcttaccatccccaatggttaagaagtaattggttcttaaccaaacatcttaacaattatttatactaaaattttaaaacatgacatgtaactgtttttttcactcatgaaaacttcttagctaagaagcaaatcttagtttttaaatttattttgatttaatttttatagtttaattttaagatattattctaagatacacctaagatacaccattggaggtgctattactcccacaatttctttatataagattttttgactaaaaacagattaataaactattattttgtgcatcatgaaaactagttcaaccaatgaaaataaatactgcataattcttgttctaatgacagattttaaacatttctgtattcccaataaatacagatttaatttagaaacttgaaacaaacaaaattgtttaaacatcttacaaataaaaaaaaagggagtgagtaattcataaaatactatgctttgtcagtaacgcagaagacccaagtgcacgtaatacatcagaggaattaattattgattgtaaagattattgtattgaatagttttgttacgtagctaaatatttcaaaattaaagatgggatcgcgaatttgcaattgcatcatggtcgatagaataagatgcgtgatacgatgcttcagcgccgcgtcaccttttcggctagttttttttttttttttttcatttacaaagtcggcttgcaagctgccgtataacagaagtacatgttaggattttcatacatgtattaataaatcatattttcagttaattgggcctgtaggacacgttttagcccattaatatattcctcttacgtttcaaccgctttcccaaaaccaaaaaaaacttgaaagcgtcgccaccgtcgtcaattatccgacgatctctcatcgcttcgcttttacatcgtcattatctgtgatcggatcgcgccgctgcaggtcagttctctcgttgttcttcttagtctctctactatgaatttacttaacttgatctgtgcttttctgcttaatttttcagcattacatcattgctgaggtctctaaacaaaagcgtcacgattacaaaagacgaaatcac

SEQ ID NO: 7578 - DNA, 3000 bp, Unknown
  misc_feature (1)..( 3000): cDNA_ID_1807363_gDNA_ID_1621153_Annot_ID_56928 3000 nt of promoter + ATG
tgcacaaagaaaacgctcttatacgtaaatatattggtatttctactagatcatactttatactttatgtgttatttctccattccagtattattgtttttcttttgttacgcatcataatagggcggcaatattcgttgacaatgattgctaagctgaatggaaacataattacaattttaatagcaacaaatatatttaaataaagtaaatagtaaacaatacttaaatgctaatcgtacaaattaaaggaagggaaaataatttgataggtctactgattgaaaaagaaagaactaaagcactcttgctggccccatcccctgtctccctcatctatcacttaacttgataatccaaaaaatatcatatacttaatttgcatttacttaattagtttaattttatatacatctacgttttaagtttgtttggttcgaaataattctgaacagcaatcactttactttcaactaaaaacgaacttggttttaaaaaatgatttatatattcgaggttgattaattatagaacactagattttgctgaaaatgaaaataaagtaatagaacactagctttcagtttttttgtagcccttatagatttgatgctacgtgtgtgtatatatattattcccatcaaataatttacgcgagaatataataagatttaattttctaattagtgtataaaattttctaaagttttcccccaccatcattgacatagtttctctatattcccctcttcttctcctttcaagaccaaaagaaaaaaaaaaactttttcttttctgatgaatcgtatctattagctatgagcctgaggtgatgatcatgtcaacataaccatcaacgttctaccatggctagtcatagcaacaaaggcaaaggcatagcagaaggatcgtctcaaccgcaatcgcaaccgcaaccacaaccacaccaaccgcaatcacctcctaacccgccagcgttaagccggtacgagtcacagaaacgacgagactggaacacgttttgtcaatacctgcgtaaccaacagccaccggttcacatctcgcagtgtggatcaaaccacatcctcgatttcctccaatatctcgaccagtttgggaagacaaaggttcatatccatggatgcgttttcttcggacaggttgagccagcgggacagtgtaactgtcctttaaaacaagcgtgggggagtttagatgctttgatcggacggctaagagcggctttcgaggagaacggaggattgccggagagaaacccttttgccggcggcggaattagggtttttctgagggaagtgagagattcacaggcgaaggcaagaggagttccgtacaagaaaagaaaaaagaggaagaagaggaatcctatgaagagtcatgatggtgaagatggtactacgggaactagtagtagctccaacttggcttcttagcggaagcaaacaaaaaatctataataaaacaaagtggaattagttaatggtaagcatttaatactctccataatctctattaattttcagtactttaatcctattttgtgatctatttacaattttacatatagagtgaaaagaaacaattctacattcgtttcttgatagtcagctcttaatgcatagttgaattttatacgtatcatacccaaactataagattaatcttgatcttagatcatatacatatatcatcatggtgtgtaccctaagtttcataatcatttttcttaactatttatgtggatattattactgtactagataatattttatacagcttaaattaatatgttcattaattttacctcgctgtaaaccctagctagagagtatacaatatacatatacacacaaatggtataaaaccctagttttggctcagatgtaagtgtgtgtatacaatcatgcatcgtgatatatgcatctatacatgaatgcataggcgtatacatttaattcattaatgtgaatatgaagggaattacatcgatcagatgttttaggggtttagtttctgcggtggggcttcctgtttaattaagctccggggatattgtgctccttaattaagtgtttacgaatgctacaattttttttgaaatggttataaatttttattaatctatacatgtataaatgtataaaaaagatcaatgctagctaaaaagtttcactgactaacttttgtttcatattttaactgcattattccaattattgtttgcataatagtctactagtttgcaaactaggcctattgcttaacacagcgttgtaagttgtaacgttataaatcgtgtaaaaaaaaaattgcatgtgcactagactatgatatatcacgatgcatgatttacgcttttgttccacaaatgttgattagtgcgactatattaatcttacacataagtgtcataagacacatacacagactatggacagaccaaactaagggtagaaattaaaaaagtttaactcgaaggagagacgacacatcgaagaagtgtggacgtattgccggagaagaggcaaacgattgaagaagtggggctaaagagtttagaaaatttgagaacatgtaatgtagtaaattttacaatattgtggcttacctcttataatgttttttttccccataaagtttcgattgatcttccatgtcaattcgtatctaaaatgttcttcagagaattagaggggggaggggggggggattatgcacagtaaaagttcagggatcagcttgttaaaaacagagattttggggtaaaagttttaaaacgttagaagttttgggtctaacttgtaagaaatcagaggattaggtgaaaaacataataaagtgaaagtttaggcgttaaaatgcagtaaatggtaaattgttaagagaaaagagatctaaaataatataaaaagtgaactctaatgacaaaaacggaaagcttgaagttcttcttcctcatcggaaaacaaacaaagaatg

SEQ ID NO: 7579 - DNA, 3000 bp, Unknown
  misc_feature (1)..( 3000): cDNA_ID_1818249_gDNA_ID_1621153_Annot_ID_56931 3000 nt of promoter + ATG
ctaggatgaacattttggtattgttccattagaagcaatggctgcatacaaacccgtgatagcctgcaacagtggtggccccgtggagacggtaaagaatggagtaacaggctatctttgtgaaccaactccagaagatttcagttcggcgatggctagattcatcgagaatcctgagttggcgaatagaatgggagctgaagccaggaaccatgtcgttgaatcattctctgtgaagacgtttggacagaagttgaatcagtatctcgttgatgtcgtatcaagtcctaaagaagattgagattcctctgtttagtaatcatagatcgttcgtgaaacagcatactttaggcttagttctgaaactacaggagctttattctcggatcactcatcttgaccgtgaagattggttaaatctaggtgaacagttttttgtttgaggataaatttgacgaaataaaatcgaatcagtggtcggatatgggccaagtcaatgaaatttcggtctataagatttgagctttgggcttgtacattgatacaattacatgagatggtgctatatgggccaggcctgattgttctaaaatataggttactatttactaaacggttacaatggcaaaaataagagtgtgtataaggtccggcccacttgtcgcgtgtattttaaatatgcaaataattgaagactacccccatgcgcatgaagagcgcgtttcatcaattcgggttggttatagaccacgaaaatcgcaggattttaaattatttgggaaaatgagctaactaaggcgcgtctgagagatcaaaccaaacaacatgacaattgaagactacccccacgcgcatgaacagcgcgtatagcgcgtttcatcaattcgggtaggttatagaccacgaaaatcgcaggattttaaatcatttgaggaaatgagctaaatgaagcgcgtctgagagatcaaaccaaacaacatgacaattgacaacgtggcattctatgggctgagtcttaatgggttgggcttattatttcaccaaattttacttttatacgttgtcgtttaattcttgtctctttttccttcttcaatcttcgtcttccaaattacacagttctcttccctccaatccttcatcggagctcgttgtcgccgcctcactgtatatcgttgccgtcgttgtatcaacatctcaaggtatatatagcttgtgatctttcaattgtagaatagtttttgtgattttgtatgtaatggctgtgattttccatgattctagttttcctttttcaaaatagtttctgagtttttagcggtctccgttttttttttttttcaccaggaagcttcgttagatgcggaaaacgtcatggacgcgaacaataccttcgattctgtaatctcttctcacgtcttccttttctacttcgccgttttatcgtctcaattccacgattctaacattcttcttaccttcgattttcatggaattaggatctgattcacgccatttttaagcacatttgggcccgaagatttcgcggtacacatccatgttttctcagagtaacttattcgctttatgttgatcttatctgcgagcttttttattcgattgcgatgcagaaagggagaggagcgatgccattgatgctacggaagctgaggtattctattgaaagtaaaaccgcaagaataaattggaattatcatttggtatcgtaactccttcactagatactggtgtatgactgtaacagctatgatcttctgatttcaaagattcaaaatgttcaaaaaagggaggaagattactatttctgatgctaaattatgcatttgcaatatgtgcaggttgctctgggaacaaccaagaagaacagacttgcttctggttcgtttatacactgttgcttagtttgtcatgttaattggtagatgagacatgaatatttatggtttattggttcttgtagcaaacgcaaatgctttaaaactcagctgtgaacttctcaagagttttgtctcaggtcaagttttgcattttagaaactacttagttttctctttaagtcatgttgtatctataagctatcttaaggattttatcggcattggcagaggctgtgcagcgcgctgctataatcgctgaagctgagggaatggaaaagattgaagctactcatttagagaggattcttccccagcttcttctggacttttaaggtatgattgaaaatagcacatgcttgtccctgcatctttctttttatccttatgaactaatgaaagtgaaatctcttttcttttgcttctctgtctaaaaatacataaacgcttagatcatggtatgtgttcttgtagtgatatgttatttgatcttttcttttgtagacatatgtgaagattataacagggattattccacacaagttattctgaagatcatactactggtttgtttattataggctaggctaatgtggtaatatatggttcatacttcatatagaacgaaatagatatatttgactttattctggatatatgctctgtgtgcttcagtaacacaccaaaatactctgaaatgtaagaataaatcttagccatcatcgatcttctgctcttagagattttcccttccttgatcgtagaacgttgacctaaagcagaaaagcgagatgtaggaatcttcttacggtatgaaacagcaatttctttagcctgaagatctgcagaaacagcaagcagaatataagagctagtctaaactgaggaaaagataatatttcctcagtttaaactagattctcccgccaggaaaaaacttcttcaaaccgtgagtgatgatgactcttcgaatgatgactcttctaatctttacgacaaaatcgtgacatctgtcttttgtaaaaaacgttacaatggtggttactatatatgtagtagaggttctgtcttcttatctttataatctctaggcaaactcacaaaa

SEQ ID NO: 7580 - DNA, 3000 bp, Unknown
  misc_feature (1)..( 3000): cDNA_ID_2995898_gDNA_ID_1621153_Annot_ID_173320 3000 nt of promoter + ATG
ctacctgattattagtttaagttgttccttgttactattggaagcctacagatgaatggctaaatgccgatgaagaagatatttaatagtatgcacaacatgcgcatgttatcactcacctccagagcagcttgatcctgaggcgtgccattgagagttgtttcaaactctttgagcctttgctgcaaaatgaaaaaaaatcgagatgtttactacgtatcttactttattcagattatcaaagttcatgaacgaaatcttcatgatcagcccctaatattacctgaagcgtggctttctcttcttctgaaatttgatttttaactactgttgtgttcttagttggactatcactgaaaagtggtaaaaacattgttagaactgacaccggctaaattacatgacaacatgacttggtatgacaaaaatgtgaaattacggaaaccaacccagctgatcctaagaacatatgatgtcatcagaatctttacacaaacaattacaaactggaataaaaagaaggaaaatgacaaacagtaacatggtgtaaatgacacagttatgacttggacttcacttaacgcaccttcccgtgggaagaaagtcaccaagagcaaaaaccaaaccaaatacaacaacagctatgccaactccaacctgtcatggcatgggcccaagttttgtcatgttatgtatgagtagcttataggcctcaagtggttttagaacaaaataaaaaataaacacttgcaagatgttatgtatgcgtaccttagtaccaagaccaattgttttctggtcagacttgactggtgcatcatagtcaattggaccaaattctttaactacttctgtctttttctgctcaagagctgacctgattcatcaaaagagcagaggtcacagaaataacattccgatcagtgggaggacaatgatcttgactatgtctagggggtgagggaagtggaaagcaagacaagtgatgaacaaatcaagaaaaaaaaagaatcaaactttcataggaagatcatgtcgttgtgggtataatgagaaagtcaagtgtgattgtcagaggaataatcctattgtaacctatatatctctaaagccaatcttcatgctagaatcataaaacataggtaccttctgatgttttccagccgttcatcgaagtctatatcaaaagatcgaccagattttccttcaaactgagtattcagaccaggtgcctctgcaaacaaatgcaggagtttcttgagcaaacctttcaattgaaaccaactttttgagataaactgaagaatgcaaaaatgaagttatgttcgagacaccatgaaggagagcagcaacatctgttacgtacaatatgctttaaaatcaaattatacttacttctgggtacagaaacagactgtttagaagatgatttcctgcagcaaagaagtccatatgaaaatataacaacagcaatttaaaattctaaatgctttaaacaaacacaaaaactatttatacctttgctgcaatgccgggtctttctcttcctgtgatgcgatttcacatttttgtctcagtactttgaatcaacaaaattaagttgaacaaagaagaatttggaatcaaaccttttttgagccgaagccacgcttagggttagaatccgagcaacgtattcgaaataggagaagcttcgagttaaatgaaacggaggtcgtcgccgctagtgtcatcaacatcctctgtttgtattgtcctaaccaaaacagagaattttctaagaaagtttcaaagaaataatgagaagtaacggctacgaagagaaattcgtccgccggagattgacgatgaaaggtgagctccgtgatcgggccggtaagataacgttagtggttcttcttcttcttcactttgcagattgtctattatatgggccgaatggcaaaacataattttgggctaggcccatataatattcaaatgttaatattccaaaattgatgggtatttttgataatttaactcgatctatataatttaacaaacgaggatgattttaagtttttaactttttaagtgagaatagtgattaagtgtcaacgactcattggataggatgtgtcataaaattagtattgaaccactgaggagtgaaaataaaattaaaggtagaaaaattaatttaggaaaaaaatattcggaaagttctgtgaaaagtcttcggatttagaacggagacagcgagaggatagagcgcttcttcggctacaacaagctttcgctaatggcggtttccttctgatcactctcaccggagccgtcatcttctctgttttaccgatttttagggtttgtttccggataaactcttcgtatgctttttttttttcgttggattcgtttctggaaacgtatccatttcctgtctagagatcatgtgaatttctcttagaacagaactcagatctaaattaaagtaacggtgcttgattcattaaactcggaatgcaaagtcccttgcgttttattcactgaaatcttagtcgattagatcttgaggtctgtttgttaatcgcacttttctggggaattgatcgtagaagcaattacgctcatgggaaatgatgaaagttatagctaaactttactgtagaaccttactctgattatatttcatttaaaaatgctatttggttggtaaagagaaacatcacaacttttcatacttttctatttttttcagaaattttgattgtggtggaaacttgttgtggcaactctactgagaaagtttgaagaagctggaatcaaagatatagctagagttaagagggttcatactaacttgtgctcgttttgtgatgtgctgttgttaacgtttggaggaaaaagttgtagtgtattaaaattcagcgtccgagttctggggcggagttgccccatagcattgactttacgcctctacacatagtccgaagggctaattcagctcaaaacatg

SEQ ID NO: 7581 - DNA, 3000 bp, Unknown
  misc_feature (1)..( 3000): cDNA_ID_1818245_gDNA_ID_1621153_Annot_ID_56932 3000 nt of promoter + ATG
ttgaaacccataaagctgtcgacaaaacgcaagaatgtgttgtggtcatacgagaatgtgttgcggacatggaaatcacaataactcaagttgaatccaggtacatacttccagagatttctccatctactagataacacgctactcttaactacatctttcgtgggaagatagaagagtacctgacatagcaatgtttctggcaagttgcttatccagtcaacttcacgcgagcctttggcacgaacacgtttctcaccggctccatccatgaactatcaaatggaaaagaaatccgtaaaagcttgtaatagaggaagtatcgatcgacagttcctatattttgtctaccagttccacattcttcggcggccgttcagacttcagagtttcactctgttccttatccggttcggatcaattcggtttactgatccgattagtctttggtatcatgattagttaatacgacagcatttgtaattttaacttgtaagtcaagtgattgggcttgtaataatgggctaatggggttagaccaaaccgtttggtcgtttttgtgccttgacaatcaaggtctcatataaaatcttcaaatttacaagttccttcccactttctttcagaacataacttataaataataaaatggacagaacatagtcattacaaccaacaaacacatgattgtcttccaagatacgaaacatgaaaatcatcacaaacgatgaagaaaacatatacttaacatcaaccaagtacccaacaactacgaggttcaaaaacaacaactttgcatgaggtagagagtcttggaattgtaaggagttctttgagaatgacagattctgatttctctctggaactattcaagcacagattcagtttcttgaggattggtgaattctccaaaatgtaactaactactttcattccccttgcctctcctgtgattggcctctctatcttaacatactcgagagttgtgaagaaacaccgaggtatggataaaactctatctccgtcctcttttgaggaatccttaaattcctgcaggtataaaccaaataggaaaaacacaagttaagcatatgatagttcaccattagcattatataaaagagattaaagtttcttgtttaattaaagtaaaataatcctaaccacgacaagagatttaacatttgggcagctctggagaaaggtggacaacattttcaaggtgtggtcttcgaagtctatgtgcaaggaggataggttacgaaataagggtagttcacaccccaaatcatgtataacctgcaaagaaaagttgggtgattatgtttcttaagcaccaaaacaacgaattcagcaaaccaaaaaaacttaagcgcaaatacaaaggttacctcaagagtatgcgaagagatgaacaattttttgacactagagatctcggcgagaaaatcttgaatcatttttctctttggccgatcatttggatgcggtagctcttccatattaaatataatattgatcttcgcctccacaagagaacccgaattcttcattttgaattttgcagttgaatgatcactgatgttcagatactcaagcttaggagcatcaattgcaacttctaattcatcccaaccgtcagaacagttgccaatatgtttgaagctcagtagagaccgagaactaacacgtaaaacatttatatcatcaacggaactcctgcttataatcaagctttcaagagctgaacagcttgagatgatcttttccaaaaccaaagcattggaaaacttaactatatcaagctcaataactttgaccaaaggcaaagatataaccttaggattaggcaagatcacattacagagctttaaagacaccaagctctcgcatgtgtaaacggatggaggtatctggacttcctcattcccccaagtgtagtccaaaacgtcgagaactttaagtttttggtcgacgacaatgttgatccaccgcttgacattagaaatagtgcgctcttcttcatcacaatcgtaccttaacctaaaactttggaagcaagactctctgtctaaagccagaaacctatcaacaaaactcacgaaagcattatagtctagaaattgattgtactccacgttcaaaccaggtacatatctccagagatttctccatcttttggataagacactactcttaaccacatccttcgtggggatattcaacattatctgacatattaaggattctggtaagttgctcagcctatcctcttcgcttcttcttgcacgtttctcatctcctcctgtatccatgttaatctgcatcacagatgtcaaatcagatagaaatactcaacatttgatagaaaaatttcgctagaatcatacaaaatatctattgaattacacaaggaacctaaggaaataaatctgtacctgcgatgtcgcgaagcagcatgaagaaatcaaatatgaaggctcctgaagaagtatgatatatagagagacgaatcctcgtggaattcaccggcccaagggttttcgtaacgcttgttttttctaactgttccactccactagtggctaataaccagagtggcgcacaatagaataaccgacttgtgtcattagtcaaagaagcgcataatagaacaattaactcgtgcctctgtgggtcccatattttaattataggcgcgtcccttaacttttttgtactatgtcaatgggctgaaagcccacaacttaatttaggctgcggcaattgttactgcgtaaaaggctatacataatgggcctaagcccatatgtatagaaggtgggataaaataattacactcccgccgaggctcttcccttgtcccgcctctctcgctcaaacacttttgactagagaaatcggaagaacaaaaatttcccgataatcttccccaactttttttgttacgatctttgcttagatttcgtctggaataattcgataggcgaggaaattatg

SEQ ID NO: 7582 - DNA, 3000 bp, Unknown
  misc_feature (1)..( 3000): cDNA_ID_1818242_gDNA_ID_1621153_Annot_ID_56933 3000 nt of promoter + ATG
aacgccctacaagaccatgtatgagtatttataccacagagcatcaagtaatcatgaaatttgtctcaaacacaaaactttgaaacattttcacatgatcaacgagatcaagtacaaaaaacatattcagccaaagaaacaagctctcaacgttgattcatggtcttgaaaagctgaaccataaaacaggttaactatcctagctaggattgggataaaacataagaattatatcccaattgacatgctcacccacatgccatatagcttgagaaaataaatttaatactcacttcgaagggtagtctttaaccaaattgcacgccattagatagagctcatttgaattaccaagttccatggcagcggccaaatgtaccagcgtacacttcagatgaaaaggatctttctcaaggagtctgtcaaataagaccaaaagagaccacactgctagaatcattcaagtttcatattgctcagaatttagaatcagcagtaatatacacagcattctcaagtttcttacgccgcggttagttcaaaacacttctgatattcacagcattgatggtagtactcagctttacaggccaacagatcagtgttattagccaatgtgatcatagatgagccagagacactaccactagtctcattctcaagcttcttaaacttgagttctactgtgctctctttgtcatactggacacgaagaactagtaagtaccaagaagaaaagaaaagatgcttacaaaaggaaatcgacagaacagagaatcagcaagcaaattcgaaatataagtgccacataactattgacacattggatcagacactttactcaatagataatgtttaccttcttaatcaagcatgaatagaaagaagagagccatccgtcttctggactaaattgtagtgaagaaagcagactcgattctgaattttatataattgaagtctcagtaaccttctagtcatgtaaacgactggaccatgaaacaaataagacgaaaaataaaaagcaacaagaatgcataaactataactcaccttcttcagatgtaagcatatggctctcaataaggcattccaaagcctgaaaggatagattatagaaatcacgtccatgtcagttttctgatatctacagaggtacatcaggttttcactactatacaataaattaaaagaattttatcttcccacattagctctgcaacttcccatagtaagtaaaaaataacatgcacaaattgactagggcgctagaagtacctcatagcacagaggatcagccttgatagcagctttgtacctgcaaacaaaccgaaatgatgagttaaatagctatgaagttcaagattcccacacaacactcaatcctaatagatggatcagccaacatacacacaagttcacaatatttcctactagcacttgagtaaatcttatacacatgctaagttcatgtaacaccactaaatcaataagatcactctctcacaatcatcaaaatgcagatgaacaaatgatccctgaacaagaaagataggtgaaagaaggctcactaaccattgtcgagcctgagaccggttttgtaaggctccgtatgcttttcctcttagaaagcatatcgccgatgatatctgcaaaagtaaatcaccatatatcagttcagctactatcctaaccaagtagtagtcaaccagttaatgtaattccaacagtttcgctaacaaaccttccagaatcgagaagataatactacctagatctctattatacatttaaaagtcgtgaaaaaacttacattaatctctcggtcctctccatctttatcaaaatctatcacgttcccgtctttagcatcatacacaattccatcatcatcaaccttcgcatcaccaagcatcaatagacactgatcccattccttcaattcctcctgagaacacatagaaattaattaccgataaaccctaaaaccctcaaatcaagagaaacaatctgagattcctaaaccagtcccaatcaaaacaagtgaaatagatagtggaattcggaattacgaggcactttgcggcgaggtaacggaatcgaagatctcggaggacaatcttagaagcgttaagaaggtgaaaagcgcgacggtaatggcggccgaggaaaagagcttgagcttgcatatatatgtcagatgggtcattggtaagagctgctactttgtcggcgaagaagatggccgacgagtacaaatgcttactgacgcagtctcgaaccacgcctcggatcttctcaatttcttcttccctcataatttcctcgcctatcgaattattccagacgaaatctaagcaaagatcgtaacaaaaaaagttggggaagattatcgggaaatttttgttcttccgatttctctagtcaaaagtgtttgagcgagagaggcgggacaagggaagagcctcggcgggagtgtaattattttatcccaccttctatacatatgggcttaggcccattatgtatagccttttacgcagtaacaattgccgcagcctaaattaagttgtgggctttcagcccattgacatagtacaaaaaagttaagggacgcgcctataattaaaatatgggacccacagaggcacgagttaattgttctattatgcgcttctttgactaatgacacaagtcggttattctattgtgcgccactctggttattagccactagtggagtggaacagttagaaaaaacaagcgttacgaaaacccttgggccggtgaattccacgaggattcgtctctctatatatcatacttcttcaggagccttcatatttgatttcttcatgctgcttcgcgacatcgcaggtacagatttatttccttaggttccttgtgtaattcaatagatattttgtatgattctagcgaaatttttctatcaaatgttgagtatttctatctgatttgacatctgtgatgcagattaac

SEQ ID NO: 7583 - DNA, 3000 bp, Unknown
  misc_feature (1)..( 3000): cDNA_ID_2146892_gDNA_ID_1621153_Annot_ID_56934 3000 nt of promoter + ATG
gtgaaatagatagtggaattcggaattacgaggcactttgcggcgaggtaacggaatcgaagatctcggaggacaatcttagaagcgttaagaaggtgaaaagcgcgacggtaatggcggccgaggaaaagagcttgagcttgcatatatatgtcagatgggtcattggtaagagctgctactttgtcggcgaagaagatggccgacgagtacaaatgcttactgacgcagtctcgaaccacgcctcggatcttctcaatttcttcttccctcataatttcctcgcctatcgaattattccagacgaaatctaagcaaagatcgtaacaaaaaaagttggggaagattatcgggaaatttttgttcttccgatttctctagtcaaaagtgtttgagcgagagaggcgggacaagggaagagcctcggcgggagtgtaattattttatcccaccttctatacatatgggcttaggcccattatgtatagccttttacgcagtaacaattgccgcagcctaaattaagttgtgggctttcagcccattgacatagtacaaaaaagttaagggacgcgcctataattaaaatatgggacccacagaggcacgagttaattgttctattatgcgcttctttgactaatgacacaagtcggttattctattgtgcgccactctggttattagccactagtggagtggaacagttagaaaaaacaagcgttacgaaaacccttgggccggtgaattccacgaggattcgtctctctatatatcatacttcttcaggagccttcatatttgatttcttcatgctgcttcgcgacatcgcaggtacagatttatttccttaggttccttgtgtaattcaatagatattttgtatgattctagcgaaatttttctatcaaatgttgagtatttctatctgatttgacatctgtgatgcagattaacatggatacaggaggagatgagaaacgtgcaagaagaagcgaagaggataggctgagcaacttaccagaatccttaatatgtcagataatgttgaatatccccacgaaggatgtggttaagagtagtgtcttatccaaaagatggagaaatctctggagatatgtacctggtttgaacgtggagtacaatcaatttctagactataatgctttcgtgagttttgttgataggtttctggctttagacagagagtcttgcttccaaagttttaggttaaggtacgattgtgatgaagaagagcgcactatttctaatgtcaagcggtggatcaacattgtcgtcgaccaaaaacttaaagttctcgacgttttggactacacttgggggaatgaggaagtccagatacctccatccgtttacacatgcgagagcttggtgtctttaaagctctgtaatgtgatcttgcctaatcctaaggttatatctttgcctttggtcaaagttattgagcttgatatagttaagttttccaatgctttggttttggaaaagatcatctcaagctgttcagctcttgaaagcttgattataagcaggagttccgttgatgatataaatgttttacgtgttagttctcggtctctactgagcttcaaacatattggcaactgttctgacggttgggatgaattagaagttgcaattgatgctcctaagcttgagtatctgaacatcagtgatcattcaactgcaaaattcaaaatgaagaattcgggttctcttgtggaggcgaagatcaatattatatttaatatggaagagctaccgcatccaaatgatcggccaaagagaaaaatgattcaagattttctcgccgagatctctagtgtcaaaaaattgttcatctcttcgcatactcttgaggtaacctttgtatttgcgcttaagtttttttggtttgctgaattcgttgttttggtgcttaagaaacataatcacccaacttttctttgcaggttatacatgatttggggtgtgaactacccttatttcgtaacctatcctccttgcacatagacttcgaagaccacaccttgaaaatgttgtccacctttctccagagctgcccaaatgttaaatctcttgtcgtggttaggattattttactttaattaaacaagaaactttaatctcttttatataatgctaatggtgaactatcatatgcttaacttgtgtttttcctatttggtttatacctgcaggaatttaaggattcctcaaaagaggacggagatagagttttatccatacctcggtgtttcttcacaactctcgagtatgttaagatagagaggccaatcacaggagaggcaaggggaatgaaagtagttagttacattttggagaattcaccaatcctcaagaaactgaatctgtgcttgaatagttccagagagaaatcagaatctgtcattctcaaagaactccttacaattccaagactctctacctcatgcaaagttgttgtttttgaacctcgtagttgttgggtacttggttgatgttaagtatatgttttcttcatcgtttgtgatgattttcatgtttcgtatcttggaagacaatcatgtgtttgttggttgtaatgactatgttctgtccattttattatttataagttatgttctgaaagaaagtgggaaggaacttgtaaatttgaagattttatatgagaccttgattgtcaaggcacaaaaacgaccaaacggtttggtctaaccccattagcccattattacaagcccaatcacttgacttacaagttaaaattacaaatgctgtcgtattaactaatcatgataccaaagactaatcggatcagtaaaccgaattgatccgaaccggataaggaacagagtgaaactctgaagtctgaacggccgccgaagaatgtggaactggtagacaaaatataggaactgtcgatcgatacttcctctattacaagcttttacggatttcttttccatttgatagttc

SEQ ID NO: 7584 - DNA, 3000 bp, Unknown
  misc_feature (1)..( 3000): cDNA_ID_1818231_gDNA_ID_1621153_Annot_ID_56936 3000 nt of promoter + ATG
attggataagcgatttgccagaagcattgctatgtatagagctgtcaaatggtccgtccaaagaccattgggcgtgtacgtacggacagttttttttatgggccaagttggacggtccataatggacaatggtccgaaaatgtccatgcccaataaagaccatgtccatatgggcaagtccatggtcagcccattttattattgttattattgataaatcaaaaatcatgattttaaagaaaaatttaaaaattttatttttccaaaaaaattgtaaaaatcggagacttgcatttttccgacaaaacagtaaaattgtgtttttcttaccaatacaataaaatcacgattttggcggaaaaattatggaattgcgttttcccgccaaaaccgtaaaattagagaattgcgtttttccgtgaaaaccgtaaaattagagaattgcgtttttccgtcaaaattataaaatcggagaattgtatttttcccgtcaaaaccgtaaaatcgaaaatttgcgtattccaaaaaattgtggaatactattttctttcaaaaccgtaaataatttaataagaaataatttattaaaatttaaaattttcataaaaatagaaacttataatgtaaaatatataatttgaaaattatttagttgtaattgtaattaaaattataaaaatatgattaaaatgaagacatatctattgactcaattcatgtccatgagcaacccattgtccatacggtcaagcccatattgtctatggacaaaactgataatatgcccaattagaccatttttttttgtctggaatatagttcgcccatatgcatttggactgggcaagcccatgggcgtcctgcccaattgacagctctagctatgtaaggtacttctgaatcttcccactaaggatgtggttaggactagtgttttttctaagagatggaaaaatctctggaaacggtacctggattagacttaagtggcgaggatatcgaaatgtactaccaatacgtgagatttgtggatagatttctgagatttaataggaactatcagatagaatattttaagttaagctaccctggtgatgggagttctgagcgtgaagttgatctgctcaagcggtggatcgatactgtcattcagctgaaggttaaagatttagatttttttgactattcatgggaatgggggtttgataactttcagctaccttcaaccatttacatttgtgagagcttggtatccttaaagctatctactgttaccctgcctagtgtcaagtctgtttctttaccttttctcagagttctcaagctaggtgcagttaagttcgccgaccatttggatttagaaacactcatctcaggctgcactgctctcgaaaccttagctataagattctttgatcgcgtccaagttttacaagtgtcttctcagtctctactgagcttcactcatgttgcgcccaagcttgtctttactcatgctgtgcgaaagcctttggctgaaaaagatctatcaattgtaattgatgctcccaggcttgagtatctgaaactcagtgatcatcagacttcaagtttcataataaaaaatcctggttcccttgttgcggtggatattgatattaacttgtcttccggcttcgattcgaggaatatgattcgtgattttcttgttgggatctctagcgtcaaaaatatgaccatctcttccattattcttaaggtaacctatgttgaattggatatttgaatgcttaactttatcttataagttttttcctcatatttctttttattcttgcagatcatctatgattacttaagatgtgaaccactacctccccattccgtaatctatatttcttgcatgttgagttctacgactacaggtttaaaatgttgccaacctttcttgagatctgcccaaatctaaaatcgcttatattggtaaggatttttcattgacccttgttataatgcaaatcgtgaaaatatcataaacgcaacttgttttggttcacttgattgtacttgcagaaatctactgaagaactggggatcaaagaaagtagtatgttttccggacctcaagatttcttaccatctctcgagtatgttgagatgaaaatgccattgaagaaagggttgctgctggagatcaggatgctagtgggttactttcttgagaaagcaacaatccttaagaaactaaccctatgcttggatgattacagaaagagaaaagaatctctcattcccagaatccttgccattccaagaatttctacctcttgcgaagttgtggttctctgatccttgtagtcgttgatgccgccgattaactaacacaaaagtttgatttttttgataactttatttatttgaactctgtttctttcttctttcattatcgttttcatgattatcgtagcttaattctttttagagaagtttatcaatgtaaacacgcgattctcttaggtggtactttgccaaatatatatgttattgctttcctcctcatttgtcgtgttgctttatttttataaatattgtacagtacagaggcttggaaaaataatagcaggttcagaggctaaagaaattgtaaatttggggatcataatgaaaaaatattatagttgacgaaacttgcacgaccaaaacccaacaggcccattgtgagcccaattatgtgaggcctataaaatattacatctataaggacgcctgctaatcaaccactacagtgacactgtcacggccacggccagacgagtagagactagagagacaattagacgaagcagatactttggccggaaaattagacggcgatttttctcacactgttctcattcttcaggtactcgctctctctttctttctatctatttgattcatcgttccaagttgattcttcatccgaaaatagttttacaggaatttttttccgatttgatgtttgtttactaggtagagtag

SEQ ID NO: 7585 - DNA, 3000 bp, Unknown
  misc_feature (1)..( 3000): cDNA_ID_1818223_gDNA_ID_1621153_Annot_ID_56938 3000 nt of promoter + ATG
cgaagattcaggaactctttcttaggttgaattagcttgagtttagcttcgaattttatctttgatctagctaaagaaacagagagttttcagaggaagaagaaacagagagttttcagaggaagaagaaacagagagtagtgatgacatcagggacgagaatgccgacatggagggaaagagagaacaacaagagaagagaaagacgacggagagcaatcgcagctaagatcttcaccggattaagaatgtacggtaattacgagcttccgaagcattgcgacaacaacgaagtgcttaaagcactctgtaacgaagctggttggatcgtcgaacctgatggaactacttaccgcaaggtttgtctctcgaatccggatcttagttttgttctctacgcttcaagtacatgaaagttttgaattttggatacaaaatcattcagtttttgttaaattactgattgcatctaacatgcgccggagccgatcggtcgcgtgaatgctaacgtgttcctgatatacctctccgcgtaggttagctagccttagcttagaggagcgttagtcaaatgttagattctttatgtgtgactttttattatgcgtttctctaaaaaaagattctttctctctctgtttcatggtgtgtgtgtgtgactaattcacttgttgtccaggtcgagtctattctcagatgatactcaccacaaaaaaagaaagtagcatagatctcaataaaaactgataaaaataatgtcctcttgcacagaattcaaagtgtacgttttgatctgtagattttttgggaaagcaagttggcacttttgcttttatgtctcaagtctttttactcaaacttcgagaatcgagtccaatgatagataatctgtcggttcaagaatccttgacctgatcactgtctctttcacttgttttcacaatgatagaatcaaaactagttctacttgtaacttccttgtcattattaacagagtaatttcttggtaattcatgtaattagaaggattacgtcacattgatcatgtttgtttgatatgttttcagggatgtagtagacctgtagagcgtatggagataggtggtggttcagcaaccgctagtccttgctcttcctatcagccaagtccctgtgcttcttataatcctagtccaggctcctccaacttcatgagtcctgcttcatcctcatttgctaatcttacctctggtgatggccaatctctcatcccatggctaaaacacctctcaacaacatcatcctcatcagcttcttcatcatcaagactccctaattacctctatatccctggaggctccataagcgctcctgtaactcctcctttaagctctccaacagctcgtaccccgagaatgaacactgattggcagcaactcaacaactccttctttgtctcctcaacaccgccaagtcccacgcgtcagatcatccctgactctgaatggttctcagggattcaactagcacaaagtgttccagcttcaccaacgtttagcctcgtctcacaaaacccatttggattcaaagaagaagcagcctctgctgctggaggcggaggagggtcaaggatgtggacaccaggtcaaagcggaacctgctcccctgctattcctcctggtgctgaccagacagcagatgttccaatgtctgaagccgtggctcctccagagtttgcttttgggagtaatacaaacgggctagtgaaagcatgggaaggagagaggatacacgaggagagtggttcagatgatcttgaactcactcttggaaactcaagcaccaggtaattccaaagccacatgtacattttcaaacccggttgaaccaaaaccgttcttgatatgttgctccaaattttatttaaattgttctcttcccatgtaatgctcaaagttaaaacacagcttataatattcgtttatctgtccccgaccgtaatcttttcttcctaatattgtacccttagcttgtgattgaattctatcactgcctatgtttcactgtctcgtttcgtaaccttcccggtttaacagctaacgtaaaaccccggtttgagtggttataattagacggtttatgttaacacttatagtcaacgaaggaaattatgttattgttttatagcattatcatggttattagtcaacaaaaaacgcttcaacacgacgaaataaggaaggtttttgcagtgacagaggagtctctgtttataacggctagagattccatattctgacatgggctcgattttgttcgtctttggtccttacgactttttttttgtaattcacaaaggaaggtggatgacgaaagtgtatccatattcgctataatcatcacatggaagacaacacaaagcttaggtcgtggtcaatgcacgtacgtataactgagagatggtcacatgctatccattagcattctgccacgtgtaatttataaataaattattgagtttatccctaccagtttattgatcaccagtaaaaaaaaacttttattcagtaaaccatttccatttgagaacaaaattcaaaatgtaaacattcagtaaaactgttcacaaaaaaaaaaaaaaaaaaaacattcagtaaaaatattttaattcagtaaatattatgttgtcatattgttacgcaagaggtcaccaccaattggaagactctgaatcgagtgaaattaaacgtaagaatgtatatatcctgcgtctaaattaataagttttacgaaaagagaaagaaatttttttctagtccaattaaccaaaagagaaagagatctttttcttgactattgactattctcaacaaaaggtctttattaatttcccaaattatagatatttagcaatttacgtaaattttacactcatgcgaatacgtgtattaattctataaatgcaaaacttagtccttaatatatatcacattacatcgtctcttctaattacaaaaaatg

SEQ ID NO: 7586 - DNA, 3000 bp, Unknown
  misc_feature (1)..( 3000): cDNA_ID_1818219_gDNA_ID_1621153_Annot_ID_56939 3000 nt of promoter + ATG
aggaaacgaagtctagctatgaaaccgttgcatcgaattttgtcatagatatgataatttccggttcgcacatcagaaccggccctgtatgcaagtagcttgaggttctgttataatttgttgaagggagagaactttgaagctaatggggaagataatggaatgggcagcaagatctgatcatttgggaggaattccaaggaatactgtgataatggctgttagtgcatttgcaaaagcagtagcaaatctttgcaataaaagctcagttcacaatgcagatactcttatgaatcttgtccagtcaagaccacctggtgttcctctcatcactgttagtaatcacatgtcgacgttagttaatattaaaaccttaatagtatgatcctttcttcatgtcatctctttccactcatttgtgtttttgatgttgatttatcttctttgttgtgtaatcagtttggatgatccagtaatgtggggggcatttaagggtctcctttccttagatccagaattggctcggtgggttcttgctgcagaggatatatgtttcaggaaccctatattctcctacattttccgcactggtatgtcactttttttctttgttgcttcttctcttgggaaagactgtaatcagtgatttgttcttgttttgtatggatttggacttgtatcacaactttttttagtagatttggtggattgccttcttaacaaaataggattttctcatgatgcatgttagtgatttcttttgagcaggaaaatgtatacctataactagaggtggtggaatctaccaagaaaacatgaatgaagctctccagcgattaaaagatggatcttgggtatgttatcttgcacctttaaactaattgtacttagatcttttcagacctctgacctttggatttaaccatgactagtagctgcataccttcccagagggaaaggtgtttcaagatgatgttcctataagacgacttaaatggggaactgcaagcctcatcgcccgttccccagttaccccaatcgttttgccaataattcaccgtggttttgaggaggtaactcgtccagttcccttctaagtctgcttaactcaataatcgtttaaacttcgatagctaaatgtctgcgggaaagagaaaaagccatgaattatgtatccattttccaaacttcgaatttctgcttgatagtattattatgtcttcattcgaaggtcacttacccacattgttgtaacggcttagatgatgccggagaactacaataatggacgaagaccactggtaccgttgccgaacaaacaccttaaagttgtggttggtgaaccaattgagtttgatgttccaatgatggttgagactgctgtcttggactcccgccatgtaacccctcctcttcaagaagtgaaatggcctgtcctcacttctgctggccaagtgctagacgaaactgctcagagacacctctacatagctctgtccgagaagattcaatcctccttggaaacattgagactcttagccaagcggttgtgacttccgccgggaaacttcatatcaaaatccggttcacaacttttaaagttccggtttagattcgccatggtaatcaaatattatctttattcaatttcctgaagctgagaaaaaattatataactatgaaaatttaataactcgcattttaaattattttatcgactaggatatatagcaacccgcaataatgtatgttgttgaaatgttatatcttatcaatatcttatgattatagcaagatttcagtgaaaaaccttaacaaaaaaaagatttcagtgaaaacttttttttttttttcagtgaaaacttaaaaagcgacaataatcgaatataagcatcaacaaaatataatacaagaccgttatttgtgtgatgtctgtaacgctgatgatctggccagttctgtctttctgctgatgatgttggacagaaacagcattaaacgaccagtttgaacagagagagaaggttctttctgataagagagacaacgtgggtggcaaacagacgcggcggccacgtgagcctattgagccaccggtgcggcgagtggtgcttacgcgaatgcaaaaaaatcagttaatgggccctacagggtcacgccggggacgcactatcacgtgaaaaggaaacttcccaaggtcagccaaaacggtttcgtggcattttggtaaatcagatcacgttttaggggtaaacgctagctcttgcacgtggtaatggtgctcgatgtatggcaaattggtaaattatggctgaatcgcggggtaatggtgtatgctcccacgtgctaggtccggaggacatgcgtgacctcatgtagtggcaatttcgtaaatatagggtcaaatctcgggtataaaggtagtttcaataatttgttttattttggcttctttcactatgaaagtaataactcctcttctctggcacgagagagttcatgattagcttaagctccttcatcttcttctccaattcccgggttttttcttcttcctccgataaccggaaaattcacctctatcgaatttcccaagcatcttgatccaccaagttcatcttaaaatttcttctctttttctcaattgaagaaggtgaagcagccaacaagttactgcaactgtttccacgatttttgcttttttcaagattctcgccgtcgggagttttctcggtgagatcatttcgctccgacggaaaattcaagttgcatatctgatcggagattgaaaagtgttggttcacgcagtatcgattcgtttgtttttgatgccagatctgatatattacttcaccgaagattcaggaactctttcttaggttgaattagcttgagtttagcttcgaattttatctttgatctagctaaagaaacagagagttttcagaggaagaagaaacagagagttttcagaggaagaagaaacagagagtagtgatg

SEQ ID NO: 7587 - DNA, 3000 bp, Unknown
  misc_feature (1)..( 3000): cDNA_ID_1818215_gDNA_ID_1621153_Annot_ID_56940 3000 nt of promoter + ATG
gcgacgattctcctccctagtcaaaccggatttgatatttctcggagtccggtatgctctgctccggatccgaacctaaattacagaccggttattggtattctgagccatcctggcgacggtgcgtcaggtcgtttgagcaatgctacagacgcgtcctccattgcggcttcgtatgtgaaattagctgagtctggtggagcacgtgtgatcccactcatctttaacgagcctgaagaaattctctttcaggttactctcattttgctcagccgattctgtaatctgttctagcttaagaatttgattgcttccaaaattgatttacatttggaactgcagaagctagaattggtcaacggtgtgatactaactggtggttgggctaaagaaggattgtattttgaaatcgtcaagaaaatcttcaatgtaagctcaactttttttcctggttgatttatataattcctatacaatgcttttttttgttgatatctctatgatatcctctcagaaagttttggaaagaaatgatgctggagagcattttcctatatacgctatttgcctcggatttgagctcttgacaatgatcataagccaggtgaccctttcttcttgcttatcatatgtgtttgctaagctgtaaagttaagccataccagatgttgtgtagtttaacaccatttgaaaatttctaatatgtggccttgtaaacagaacagagacatttttgaaaaaatggatgcaagaaattctgcatcaagtcttcagttcgttgaaaatgttaatatccaaggaaccatattccaaaggtaatccagcttttcatgaggatgtgtatatacagataccaaaaatattagtcaaatatttcatatgtaatttgtaatgtctcatagtgcagatttcctccagagctgttgaaaaaactcggtacagattgtctggttatgcagaatcatcgggttagtagtattagtaaccagtactttgtctttacagttaatactatggaatatagttttcaccatttttgttgctaaacatacttatacattcaattcaatactcatagttttgttgacctctgcagttaagcaacttttcttgccacttctttgatttcttgttcttgaatggttattatcatcggttctctctgctttctgatatgaattgtccttatttccagtttggtatctcaccacaaagctttgaaggaaatattgctctgtctaatttctttaaaattgtcacaacatgcgttgatgacaacggcaaggtatttttatgtccccaagaatacctaaaaagattcaatagcctgtgaccttatagaccaaatctattaaaacatatatccaggtttatgtttcaacagttcaatcaacaaaatatccagtgaccggcttccagtggcatcctgaggtatatatacagtcacaagttaactttacgtctctcatttagtctttcacgcctaggcattgtcattgtggtccactgcggtatcctatcatctattaaagaaaatctctgtactatactctgcagaaaaatgcattcgagtggggatcatctaaaattccacactctgaggacgcgatccaggtgactcagcacgccgcaaatcatctagtcaggttagttctctatccatttttttgaaataattgataagagagtgcaccaactctgattgctacattagaatcagtataactgagagttggttagatcatgaagtactcatggatcgtgtttgaatgtgatgcagtgaagctaggaagtcactgaacagaccagagtctaagaaagtgctgagcaatctcatttacaactataagcctacttactgtggatacgcagggtaaagccactctgacaatctttacataattctctcttcttcgtcttcttcttttttcttctaagttttaacgattcttaggatcgaataaaatggtggattttgcaggattggttacgacgaggtttacatcttcacacaacaacgatcccttctctaataactataacctctcctgtgtatcctctcgtgtgtatagtgaaatatgtaccttcgactctgttattatctgtgaacttgttgtaactttgaacgtcagcctatggcttgtgtttgacattaaactagataatgtacgcttttctatctttagtctaattcataaaacaaaacaaaaagcttatatatgtttactcactattaataagataatgaatctatgttttgttacataaaactttgtcatttaatataaaatatgtgatctgtctgtttcatgacattttataagattcgagttctgtttttcattcaattggtaacctgttcttctagaatttacagtttctttacatgttatagttgttacataaaatgatcattacaagaatatatttgttgggcttagttaaatatttaatatatgggcccataatatatctatatgttgggctccacaaaatccctatggcctgataacaaattgaatggtcttcattgccaaccgacagacagagtctgactagcaaaacttcccggtttattattccttaaaccgaaatataccagccaaattcgactgttcttcatcgatttgcactgtgttgtttctctctcgatgaattcctcccaagcaagcttcttcgacttccctctaacaccaatcgtctggtctcgtttctaattgtaagtcttcttccttctctaagttttgtttcagtgtcaatgtagatcttcttaggtggaatcaagtaaaagagattgataaaccctaattgttccgttctatcgttaaaactttcctagattagtcggggttaggaaacgaagtctagctatgaaaccgttgcatcgaattttgtcatagatatgataatttccggttcgcacatcagaaccggccctgtatgcaagtagcttgaggttctgttataatttgttgaagggagagaactttgaagctaatg

SEQ ID NO: 7588 - DNA, 3000 bp, Unknown
  misc_feature (1)..( 3000): cDNA_ID_1841684_gDNA_ID_1621153_Annot_ID_173353 3000 nt of promoter + ATG
aatcttgcaggaggggttacgacgaggtttacatttttacacaaccaagatcccgtttctaagaactttactcgtcgtcttgtgtgtttgtttggaactcttatttacatttagggagccggattgtcttgcatgatttcccttgttgattttatctctttggaattacatttcaaaagatacaaactgtgtttgattcgtctttctagcaaataacatttgacttttgagattgattaccaaaacagcaaaaccttaactttgtaaatgagtaatattaacgaagctttactgcattgaaatttaacaatcacttagcttatttgaaaaaaaatattttatagaatgaaaacattagttaaaataaaataaaatcataaacaaaaacatattaaaaaatatgatccaaagataattaaaacaataagtttacatactaaaaatatttgtaacaaaaaccataaaaattaatctaaagattaaatttacttgcgtgaaaagcgattaaactaataacacctcttatggacttgtaggatggagggatgcttagataaaaataagtttacataattaaattatttgtaacataaaccattagaaaaaatttaagagctaaatttactttcatgaaaaacggttaaactaataatacctcttacagacgggatgcttaggtcttttgttttcaacacttaaattttttaattaaaagtattttatataataaaaactttagttaaaatataagtttacttaatagaattatttgtaacaaaaagcataaaaattagtcaaaaggttaaatttacttgcgttaaaagtggttgaactaataacacctcttacggacccgtaggatgggacgggatgcttagtccggtttgttttcaatgcattgaaatttaattcttagattttttgaaaacgaaaatattttatataagaaaaaactagttaaaaaaataagtttctataataaaaatatttataacaaaaatcataaaaaataatctaagagttaaatttacttgcgtgaaaagcgcttgaactaataacacctcttacggacccgtatgattggacgggatgcttagtccggatgttttcaatgcattgaaattcaacacttagatttttttttgaaaacgaaaataatttatataagaaaaactctagttaaaaaataagtttacataataaaaatatttgtaacaaaaaccataaaaaataatctaaaagttaaatttacttgcgtgaaaagtggttgaactataacacctcttacggacctgtaggatgggacgggatgcttagtccggtttattttcaatgcattgaaattcaacacttaggatttttgaaaaccaaaatattttatataagaaaaactctagttaaaaaaataagtttacataataaaattatttataacaaaaaccataaaaaataatctaagagttaaatctacttgcgtgaaaagcggttgaactaataacacctcttacgaacccgtaggatgggacgggatgctcaatccggttgttttcaatgcattgaaatttaacacttttaaaaccaaaatatatctataataaaacgtttaattaaaataaaaaaaacttttgctatcgtaaaaagagaaaaataaaaattttgaggtaaaactaaataaaaaatcaagaggctgaatccctaaattccaaattgatgaacaaaaataacattcacctaaatccctaaattcccaaattccaaatccctattagtagagaagaggctaaagccctaaattccaaaattccaaaattctaaaattccaaatcctaaattccaaacaagaggctaaattcctaaattccaaattgatgaacaataacattcgtcgaaaagacataccagtgaacgaaacattagatcggagcattcacgtgttatcaaacagacagaagaaagctataccaatttctgatcgagatcggagcattcacgtgttgtcaaacagtcaaaagaactctatacatgaagaacaaagaagatactaagtcccagcaaatcaaaatccaattttaaaatcaatttaaagtaacaaaaatctattaccattcgtccttacttgcttaaacccgagaagaatcactccatacaagtctgtgacacgcaaaaatcagaaaaacagagtcacacaacaatgaaaagagaatcgatgaaccctagaagaccctaatgtatggaattacaaatcatcgatgacagaatgaaacagaaatagatacaattgaaagagagagaacgactataactaagtaacctgatcgtagatagatggctctctcaggttgagattggtgatcctttagtcgatcggaatcatacgtgtgatgaaagaatgaagacgaaaaacaacaagggtaagagattgtagtttgcaaacaatcttaatatgggggagaaactctcgtctccgtatatgtaaataacaggagcgtggataaaaaaaatggaaatcactaacggctacttacgaaaaaatggaaattaagtagttgttaatcttaataaactacttaagaaaaatgggaaaataataattgtaaccgactttaattaatttacaatgacgcttttgcccttccatcgttgacgtcattgttacttcttcttctctcctccatttaaaaaacgcaagcttgaaaatggaaattgttttacgacgccaacgggcataggtgatggcacggacccgttttaatgacaaatgttggactgggctcagtcaaagcccaatataaagttaaaccactctgagaggcgcgagtgggctcagttaatgacaaacgttttttttttctgttttatataatttttaaatgatggtggacgttggggatgatgtcacttgacaagacagatcctgcagaatgattgatatgaaaacaaaaaagctaaaatcgtgaacaatccaccattggagacgtgccatcttcatcctctgagatg

SEQ ID NO: 7589 - DNA, 3000 bp, Unknown; identical to SEQ ID NO: 7585
  misc_feature (1)..( 3000): cDNA_ID_1818223_gDNA_ID_1621153_Annot_ID_173349 3000 nt of promoter + ATG

SEQ ID NO: 7590 - DNA, 3000 bp, Unknown; identical to SEQ ID NO: 7582
  misc_feature (1)..( 3000): cDNA_ID_2146892_gDNA_ID_1621153_Annot_ID_173343 3000 nt of promoter + ATG

SEQ ID NO: 7591 - DNA, 3000 bp, Unknown; identical to SEQ ID NO: 7581
  misc_feature (1)..( 3000): cDNA_ID_3050839_gDNA_ID_1621153_Annot_ID_173342 3000 nt of promoter + ATG

SEQ ID NO: 7592 - DNA, 3000 bp, Unknown
  misc_feature (1)..( 3000): cDNA_ID_1027414_gDNA_ID_1621153_Annot_ID_173328 3000 nt of promoter + ATG
ctcgtcactttagcaggtgtatattaatttatcaatgctattcggtgtaaagtgaagtgaaacaaacttgtataataatttgaaacaacttgtatgataatctatcgattcttaacaggtataaagtgataattttcattttagtcaatattaattatacttgttttgtacaaagtaacatgtttcttgtataaagcgagtcaatattaattatacttgttttgtcagttttcaactatagttttttatttatttctgtagcaccacagcaacattagttggaattggaattttgaaagggtacgtgagcactttgatataatgtggaccaatttttaattacgagccaccggaattatgctattggtcgtcccgttggatttttgttttaattgtttattcgacgcatgtgatgtgagcatagagatagcctatttgatataatattttaagtacattatttcatataccgtttcattgatttttttgaaattactctgaaccaatctgtttgccttatatcaatccattttcggaaaatcgccactccttccaaactgaggaccatacaacgttataccaacggatccgataagctgcgttatctacacttggttattttaaaattaattaacgttttaatgagtttgcgaaatatggatgcgaaacagatcctcattttcattttcttcagttgctatgttccaatttttagttttctgagtttgatcaccaatttttttgagaagttgttaaagtatttgtttccttttatgattaatctcaatccaccttttttttgtctttgatatattagatcactgttaaaggtgtgcgacctgcaacagagtggtcttttcccgatcaagttaacatttaataacaacgtacaaaatgtatgacataaaaaagtgttttgactaacgactaacagcgatacgactaacagtggttcaacttgtgcttggcttcgactaacagacgcttcgacgaaatgtgaagtaaaaacaataattgttcaagtaatattcatacttcgcctaaaacggtttttatataagctttttttaaataaagtgtgatttttgcacttgcctttaaatgcggaattgcggaagtgttttcaagtgttacgaataactatgttttgactaaaatgttaggagtaatttgcctgactagtttaggagtacgtgttcgtgatttaatattgtgttcaacagtataactaatgtacttcactaagtatgctttgtttagaagtatgcttggaaatatatgtttcgacttttaagtaaattgatctagtgttttacgtgtgttcggatttagatataagttttttgagtaagtgcttcgactaaattttggctaaagggattttgttgaattaattaagtgttaatgtaattttaaagacgtaagaaaatacacatttattagtcgtgtgtgtatcttgttaaatgtgtttttttttggttgaatggttcagtgctacgactttgactattttttgttgaaaataatttggtgtttactaagtatgtttcaactattttaattttttagttgtgagttttaattaaaagttccgcatcatatctttttttaagaaaatattttttagttactgagtgttttactactaaatgatatagtgtttatgagtgtgttattaaagtagaattaaaaagtttacactagaaagtgtttcgagtgatgagtatttcgactaaaaagtgcttcaattattattgatagtagttgatttttggaaaggattgaaaactaacctggcggaaattgcaattcatgtttatgctttagctctctaagtagtggatattgttgttcgcttgttgaagctttgtcctcctcatcagaattaatgatccctcgcaaaaaatattatatcttgattaaaaacattattaggactattatcaaataaataataacgaaaataaaagattcatggtttaaattaaggcattgcaccgtattcatttgtcaacatataagttttaaacgaagtatcaacaatacgaataacatagaaatcaaaatccaacatgggtcaaaacaaagtactaagagccaagaagagtaattccgactaaaaacacccaaacaatacaacaagaaagaaactggaaattaaagtacatagagacagaaaggtaatgtacaaaggttttacatagacacagttttcgcttttcaccgtaaagtaaagtacaaagtaactcaccgatgattggctgagttttgccgccgaagatgaagagagaatcagacaacaagagacaaaaagagaataggtttctatctacatgtcttggtttggattagataatttaggagtaacgaggactgtgttgtgtgtattactatatatagacaagttttctttaccgttgggtaaaatcactaacggatagttttcgaattctcagcttttgacgtcatagttaccgttctgacatcctcaacggctaactcacagtgaacctactacctagttcgctactttaaagtcgtattattcttgatgggctttcgagatcggcccaacccaatgaaatgtttaaagttttacaagtccaatataaaatgacaagcttaatggataaactggatttggttaaggtccattataataaatatgggcctcacatataaatggctttgatggaccaataagcccggaaatctgagaaaatctatgtaatattcgaaaactgttgggaaaaatcaataaataagtagaactttagggagggttagcaataaacaaaggttgcgggaaaatacgtaaaataaaagctaatatattatttgattcgtccagagttgaattttaaagatagagaaaggaaatcgaattaaaatcttcgtcagattcgagagacgacgacgacgaacttgttgttctcgattatcatcagcagctcccttcaaaaaccctaactctctgagctcgatcgacaagtgataatg

SEQ ID NO: 7593 - DNA, 3000 bp, Unknown; identical to SEQ ID NO: 7576
  misc_feature (1)..( 3000): cDNA_ID_1818275_gDNA_ID_1621153_Annot_ID_173327 3000 nt of promoter + ATG

SEQ ID NO: 7594 - DNA, 3000 bp, Unknown
  misc_feature (1)..( 3000): cDNA_ID_3434836_gDNA_ID_1621153_Annot_ID_173324 3000 nt of promoter + ATG
tattcagcgattgtgattcctggaattcacattaaaaaaaaaaaaaaaaaatgagcataggcaatgggattcatcaataactattaaatctgtgtgcctgaacattacctgtgtaaattgaggcttcacgagcagccacaggcatgttagaggtgttagcaacaagtgtggtacgtttcatgacagattcctcacggccatcaggcaacgtcattgtcaattgtgggaagtccataagaacctaatttatgagaaacaatcagatcaaatgtccgatttgtatgaacaatatgcaaatttagaatgagaagagatatacctcagccatttcatttcctctctctccacaaccaacatacacaacagcatcagagttggagtactatgtaaataagaaaaagttagctttggaaattcaatctatccagtaattaaatggaacaaaaccagagagtgtcacaaggtaccttggaaagtgcctgactgataacagttttcccacagccaaaagcaccaggaatggcacaggttccaccaagaacagaagggaaaagggcatcaagaacacgctgacaacaggaaaagaaagcaatcagcaacacatgtattcaaatgactatcaccactgtaagaagaattaatcgagtaatcacctgccccgtaagtagaggagtatcggcagcaagctttgatgcaactggcctaggcgtacgtacaggccagctctgacatatatcaaccaaaccaatttaacagagtgaaccaaatagcttaaaatttacgtttgcaagtaggaagattaaagatacatgcaaacctgaagcatggtgtaagatttcttgatcccctggaattcaagctctatcacggtatcctgagaaatgaaaatcaccgacaaacaattattagcaacaagccaaacatgatctacaacaggaagtgattaccaattgatcaagttagccatatattaactcaaacgttgaattcaaagaaatcaaggaagaaaaagtttgaaacgtatttattcataactgtttgagggaaacttaaagtcaaaccttaagcgaatattgaccagctggagcaatgtaagtgatcttccccatggcatccggaggaagggcaacgaggtgattcatcaaagtgttctcaaagacagtctgcattccaaagtttaatttgactttcagaaaaaactattcccagtgtaaacaagggaaacaccacggtaactgtgtaaatagattcccttgtcaaaagcagattaaagaggagaccaataaacttacagcatacaagtcaccaccagttattgtgtctccctcgactgcaaacaaaacgaattcaattgaccatcaagattaaaaccaaatgaacacttccatagacaggcatatggagtaaaccacattaccaaatttattgggctggaactcccaaagacaatctttgtcaagagctggaacagacacaccccgaggaatgtacacatcaccggatattcttgcaatagtcttcaaaggcctctgtgacatttaaagaaatgaaaccaaagaatcgtaagaagccacataaaacgaatcataaaagtaaaaaaaatcatgtctagcaagattataaatccaactgaacctgaattccatcaaagatatttcccaatattcctggcccgagctccacagaaagtggctgtagtaaattcaggacaaattatatgttagctgcagatgaacaacactagaaaaaaccaagataaataactcgcgaaccttgtgtgttcgaagaacgggatcattaactgtcaatccagctgtttcctcgtaaactgatcaaaaggaagttgccaaatatcagttaagatatcttacttcgacagaggtcacataagatgccgtaaagtaaattacactaggaagcacaatagaagaaacaaaccttggatggtggcagaatctccttcaagacggatgatttcaccaatcaaattatcatgaccaacacgcactaactcatacatagcagcaccggccataccatcggcaacaacaacaggacctgaaacctgcatcccataaaagaaaatgtcaaatcactgagaactatcagatcagatcagaaattcaaagacgaggttactgaaccaacgcggaatcaaccgattcaatcactgataactatcagatcaaatctagctatcccaccaatcttacctggtaagcagatcaactatttcatctatccatcaccaaaaactaacatcgcaaaacagaaaaaaaaacaaattgaaaccagatcgaacgaaacaggataataccttacgaacgtaaccatactcgctctccttctcatcgtcctcgaaggtcgtaagctttcctccgtaaaacgccggcattttctcagcaatcagagattcaaaaactcaaatccgatcggccaaaaaaatcaaaattcacctcctagaaaatgccgagatccgatcaaacaacaacaacaacaaatcagaaatcgccaaaatcagacaactcttaaggtttttcaaagagagcgatacaataaatcagaaagaaacaaaaaggatcagagagagagggatagagatctcctaaccagtgaacagacaggaagagtggtcacaagaagaagaagagagaggtggatgcacgtagatagatattgaaagagttggagaagttttgatctgattgacgaaatcgtggagtgatccggtacatgactacacacgatacgcgcgtagatctggactttgtcgttaatagccacgtgacagtttatttattgggctttataatatatacttacggcccaataagtgggtccgtttagtcaacaaagacatgcggcttgagaatctctctctctctctgatcaagccggaaaattcacaaaagtgatcagttttgttttctcggggaaattttctgaaagtgaagaaagggaaagcaagttttttttgaagtggggagagagatgggagaa

SEQ ID NO: 7595 - DNA, 3000 bp, Unknown; identical to SEQ ID NO: 7575
  misc_feature (1)..( 3000): cDNA_ID_3050853_gDNA_ID_1621153_Annot_ID_173323 3000 nt of promoter + ATG

SEQ ID NO: 7596 - DNA, 3000 bp, Unknown
  misc_feature (1)..( 3000): cDNA_ID_2993732_gDNA_ID_1621153_Annot_ID_173321 3000 nt of promoter + ATG
attgtaaaaagaatgaaaggaacaagacaatcaatggttatgtgtgacaacattaccgcgccaaatgttataacagctaatataattgtcagagaatatcctttctgaagtacagccattggatcctctaccggagatttcacactagcatcacgtgttcccttgattgatagaataccaattgaggatataatcaagtcaaaagaatgaacaactagaggaaaaaggataaagcctgatggatctgcataatagagaaagatttgagtaagtatcaagcatgaacaagaggtttaataggatgtttatcagcgcatatctaacaaccactgctagaaatgggtaatgttattgaaattttttgactgcagccaagtgtagcttgctgtcatgaaaagtagtcttccttcaattttcacacaatgcatagcaggttcgtacaaggtgcttcaaacaataactctatacaacttatgtcgactttttaaatcctaacaagtaataatgtaccctcaaatcctcaaggagtgaccaaaacatgcaataaagcgtagattattctgtatacagaatgtaatttacgagcttgaactctctatgcaactcttcctaagtttgcatttcagattataaaatcctagcagttcatttaattttctcggtatgagtcaggaactcacaccataagttatatatttgcatataccagaagtaactttaaagagagatggtgcaccttcaattttgcacttcttagccattgttccacctagtatcattgcactgatgatttctgcagctatactttcaaataaatcagcacctctagcagcacagtcccccacattgtctccaacctacaagaagatgaaaatggctttaaatgcctaaatgacgaaaacacaagcaaacccttgtagagtgatatatgccccaaacaaggatgtcacgtttgggaatcacagaatcaagaaagtaagaaacaaaaagaacaaagatcaaataccaaatcagcaataacagcaggatttcgaggatcatcctcgggaattccctgctcaactttcccaacgagatctgccccaacatcagctcccttagtatatattccaccacccaactgagcaaataaggcaacaaacgaagcaccaaaaccatatccgacaagaagaagaggtactgtaagagaaacagaaaattcaatcaataaatcttacaagtttaatagctccactatcgcccatgcaaatgcaaattctggtcaataaatcaagagaattacatatagggttcactgaaaatcttagaactgtattggtaccccacctcaatcaagattaatacaagtcatgacatatttaagaaaatactgctcatgtctgaaaatgatcctttgaaaagataacaataactttttgaaactcagtacaatgattatagaatatacacacaagacgaaaatgaatatttttcataaaaaaaaaagagcagaagacttacggtcagtaacattcattgagcctggtgaacccacgcccaaccacacataaaatgtagaatagaggatggcgataccaatcacagccataccaacaacaaccagggctgaaaacccaccagcacgaacggctatctgcattatatctgccacttagtatttggaaacgtgtacatgacatgttaccaaaatagctaaactaaagaagaacctgcaatgcttctctcgcagatcgtctggcagcactggagacccgcacattagcacgaactgacacccacattccaacatatccagcaatacctgagcatagagcccccaaaagaaatgcagcaacagtaatataagcagacatcgccctgcagcaaaatagtaatatggctaagcttcattcacaacaattcaaaagataaaataaatcttgtgaatgtaatcatgtatcagcaccttcctaaaccagcagcctcttgctggggagttaagctacggaatagatatatgcaaagaatcacaaaagctagcaaaatggccatcttggatatagtgctatactgcgttctgaaaaaaccttcagctccatcacgtatagcatctgatatctataagtaagagaattacctcacaaattagaattacaaatttttgatgagaacaaagaaggaaaaatgtcaacatcatgactaacaccacataatctgagtgagcttacctcaaccatctctggaggtccttcatctttcgctaaaacccacttggttagatatattgacaaaaggaagctgatgatgcatactgtgaagacgaacacgatgatgggagaagtacttgcccccatgtaaaagattgctccgaagcagaaaagcagaattatcgaaaggacacggacatttaatttcctaataatccggaatatctgccaaaaaacaactaaactttatacaatttcaaagaaaatgaaaacgagatgctcaagaaactaagatgctaaacgaaatagaaggaaactagttataatacgcatctcagtgatctgatgcaagcaaaaagaaaagcactcaagaaagagaggaataaaagttgtaccagtggactataggttttactacgcatgttgggaaaagccctaggcctgtcattgaaagacatcaaactggcctgctcaacatcttcatccatcatcatgttttgagctgaattagcccttcggactatgtgtagaggcgtaaagtcaatgctatggggcaactccgccccagaactcggacgctgaattttaatacactacaactttttcctccaaacgttaacaacagcacatcacaaaacgagcacaagttagtatgaaccctcttaactctagctatatctttgattccagcttcttcaaactttctcagtagagttgccacaacaagtttccaccacaatcaaaatttctgaaaaaaatagaaaagtatgaaaagttgtgatgtttctctttaccaaccaaatagcatttttaa

SEQ ID NO: 7597 - DNA, 3000 bp, Unknown; identical to SEQ ID NO: 7588
  misc_feature (1)..( 3000): cDNA_ID_1841684_gDNA_ID_1621153_Annot_ID_56942 3000 nt of promoter + ATG

SEQ ID NO: 7598 - DNA, 3000 bp, Unknown
  misc_feature (1)..( 3000): cDNA_ID_1818376_gDNA_ID_1621154_Annot_ID_56944 3000 nt of promoter + ATG
tgtaatttagtgattttatatgtggtgtcacaatccggtattatgtgtatatatataattaatactttagtcgttaaacaaaaagctggaatagctcagatggctagagcgtgtggctgttaaccacaaggtcggaggttcaagccctccttctagcgattccttttcttttctctttatagggctctatttttagcgaatgggcttccaaccaatattgggccttgtgattaagccaatacatatcaatgcgacaatgcctaagattgatagataacgagtacaaagacttcacttagcggttctgaagcatacgggtggtgtcccgcgtgttgcttcttgatatttccatggacgtctcttctccatcaacgtacgctctctagctctgtttgcctcacgcttagatgattcattcctgctgaatcttggacatcatttcttgagtctgccagcatctggaagtaggcatgaggtccccaacctgaaagcaaacaatccatatagagatcagtgttccttaatatctatgaaacaaagtgactttatcttgaagacaagaggttcctcagtcacacaccgtctggatcgtatggaggagggaaaaattgcagataacaaaatgtggccacagtcaatcctggacattgcaagaaagatgtgtgtctgtcatcagctttgtttctcacgtaattttgaattcatgagttaaaaaagacaaaaacaaacaaacctatgatagctcctccaaaaacatcttgccagtgatgccaatagtcatcaactctggatacaccaaccaatgctgcaaccagtagaggtaaaatcacaatgcagagctttgcaacatgccctctctggtcaaacaccctgattttcccagacaagtataacgatagaaatcctagaccagcaaacgaccctgcaggttacatgactaaagtctgacggtctgcaactgtattactctaatagcacaacaggcccaaatataaacactcacaagatgtgtggccgctggggaagctcttgtgtccctctttgaccacatccttagctccagtacatagaacattcttcgtgacattgtgaaagatctagaatttcagaaattcaaccagtcagagtttatccaaggttttataagagtaagcaaggagatgtgtgctgcttacccctataccgtcagggaaacaacgccaaaagaaatcaggacgaggtcgaccaacagcgtcctttatagcatcggttatgacaccggttataagtacagagaacaaaagccctgaagaagacccaagagaacacacctcaaaatcaagagctacagagaattcgaaacatgaaacacaattggaagaagaaagaggtacctagtattgcatgatgcaggtcataaacatcatttctaatgaagtagtaaacacaaatgacagcaaaaggtagcacaacagctatcaactgtcataaaaaaaaaaacacttgtaaagaccacgtccaagatttacatgttgcataaaagaaatcaggaaaatccaaaatgtattaccgggacagcccagaaaggaattgtgttgtcctgcagagggtatctgagatcagtgagcatatcttctccaacaaaacgatgaaagggttcgatgacattaagaacaatttcaatgactattagcagcagaagaatgagccagtcatgcatgtggaacctcgcgactgttactccatgggatcttattgtatgagcacccaaatgaatttcaggcatgattaatctagaatttcacaagagaagctgttaatggacgaaaataaagttcaaaactggggtttttgctgaaagctgccaaattagaaaacaaagggaacttggtcgagctcaaaaagagcttttcaagttacaagcttggcctataacaattccagatgcacaatggccacaaacaagaatcactaaattccactataacctgtgtctcaatactcatcagtgatcaataggagagaagacgatgagagtgtacctttaccgttaaagatgtggagatgatgagctgaaagtccgacgtcggaaacgctcgtgaaagcgtctctacactctatgtgtcgcgcgaattggggcactgtattaaagcgggaaacggaaaatctctatagtttttctccgggagatttcaaaggaaggaaagataaagttttttgttcgtccaataaagaaaaagcaacctcctctctctttagctttatgtttttgtctgtcagaaataacagagactactctgtttaatattttaatctgttaaaaatcagttgttcaaaaatatcaggaaagaaatcaactatataaaattgtaaaagaaaacatcaaaactaaccacaaaaaatattatatttaattgaaagtttttatttttggtttcttttttaaattcaattttagatcaatatttcctaaatttagtgagataagaaaagtactaaatgtacaaataatatgatgattagatcaaatctgactttatatttctcactaactcgcttagtatattagtaaatttaatttaaataattaagatgatagcttattatattaacatttttagctatttagttagatacattataaatttagtttcattatcagtgatatataatctggttttgttgatatttttttgagataacacatcttaaattccaaatcaagatgattggacaaaatttgctttacactaataccttccttgtcttcaacgcacaaccaaaggccagagaaacaaaaaaaaaaactctcactgtaaatttgggcttttgcaatatcactggcccaaaatatttgcggtcaaaataagaaagtcacgtcttcgtcaatcatcaacatcactggtcgtctctccacgtgtaccggaaaatgaatgaagatccttaaaaacacgccggagtgaaaccgagccaccattgtttttttccaaatctgccagagtccgtaccatgtccaccatg

SEQ ID NO: 7599 - DNA, 3000 bp, Unknown
  misc_feature (1)..( 3000): cDNA_ID_1818372_gDNA_ID_1621154_Annot_ID_56947 3000 nt of promoter + ATG
tagttggtggttaatgtagcattttgaaaatactgtttgcaagttatattccttggatttgcaagttaagaacatactgttttgactctttctttgagagagattgtaaaacatttgatatcaattctgatatttttgagctttgactaagaaaacataagtatctttaattatcttaataaagaacaaaaaatgtgtccaagctctaggggttggttgtattagcaacaaggagcatgtggtggatcagtcatatagaaaccataattaaagtcgtccggacggatcagaaacaagaatggaccactcttccttacttgtcttcatatgctaacacttatacttgagactgactattttgaggttgtcctcctcatattatttctagatgtagaccacacccctctctctcctcctcttaatttacctaagtttgcttgtggtgaaacagttaattgataggcttattggttacaatcgtcataagtatatgttgaaagtccttaggagttgtatgaactttactacgaaagcattatcacactattattggtgtcaactatcgatacgatattaatgtagtggtaatgctgtaatgctttttattctgccaatcattactacttgaatgatttcgaatatcatcgaatcgaaattcttaatcacgctctctatctcatcattatctttgaccctaatcattattagtagtatctctctatttatcacacacgcttattcttctgtttaatttacctgtgttttactctcacttttaatccaagaaaactatccacttttcactgttggtttcagaatcccattgcttattatttagttattattactaatgaaaaggttaaggaggaggggtaagtaatgttgtgacaagtgacaagtggtgtctccatctgcatggtcttcttgtaggaatgagctgtttatctttgtttgtattccagtttcaaactttataatactatttcgttagtgctttttaattgtattcgcagttatgtgaattttaatcaagagctagctgacctgaccgtatgcttattatagttagggtccattctctacaactacaactgtacatttataataagcatgctagtagatttattgtgacgatttcaagcacatagaagagtctatatcatcacttcacttgttaggcctctctttaatttcatattatatgacacttttttcattcaatgaaaagaataaaataaaattaattgtttgatactcctaattagggatgttattctctgcttctcctttgtacttttgggaatatctgtcaaatcaattacttaaatgagaatattaataaatttggcatttgatgtgctttatttggctgcaattaaacaacaatcatatgagttattgagtatcattccaaccccataaatgttagcctttttaaatggagtatatattactaccgtttttttgttcgtaacgcatattacaaccgctttaatcagagaaattatttaaagacgaatctggtgaaacatgaattaattttgtcaaatagaatatgtgaatagtatttctgtttatgttaaattaggcaataacattacatatatacttaatcctttatctgaaaacactagatttatgataaatacgaaaggtaacactggttagcgtatggaaccatcaaattttgactaaatgttttctaacactatgagtgaccaaaacatttccttttacaaattaaaatttgtattagtcatcctgcatacatttctttttccccaaacattttcaattttggaatttttttatatatatgtaaattacatttgaacaggtctaatttgaatggttaatacgcggttcaaataaagttggcaagtaattaacaaacgaatccacatcaaatttcaattactgtatgtaccaaaaccacatttataccaaaccgcatcataaaataaaataaaaattcttaaggcctgttttgtagattttgtaagagtttttggtttttgttttttaaaaacttattttcataccaatcaagattttaaaattttggtttccctacaatttagtaaaactattttattgtaattttccattcatgattttagttttttagtttttgtaaaatttaggaaatctagtttttgttcaatcaacgttatttttctcaaaaaccaaaaaccattttttggagattttttgaacaaaaaatataataacaaaaatctaaaactaaaatctaaaattcagaaactaaaatctaaactcaaaaactaaattaaaaatcagggcctaaattttgacataatatggatagatgatgatagtgagaccaaaccacataatattgcatattttgatgtcaccatttgatagcctataaaaaggagaagaagcaaagggtagttctggaaaaaaagggaatcgtgggggaaagaaagcagagtcgttttcagatcgtgaatagaagcagcagcagaagccgtatctatccctctctctctctctctctctctctctctctctctctctctactttgaccgttcctcttctttttattcatcaacatcatcgagctttctactacttggattcctacttcttcttcttcttcctctgattctctcccattccaatcaatctctagggttcttcttcaggtatctcaaatctcctctcttttctttttattgctaaccattttcatttactttggcttatttttaagtttaatcttcttctgatattgcgtctgcttttttacctctgcaaagacagaacctttctctgtctctctctgcttgtaccttgtaccttttctctctgtatacactccattgtctgccttttctcgtctctcttctcttacagtttttattcattaatttctctcgaggatgctcctcaggcccctctttatctcatctcccagctaaagtttctctttttgtttttaatcagcaatacttcagaagctggttttggcc

SEQ ID NO: 7600 - DNA, 3000 bp, Unknown
  misc_feature (1)..( 3000): cDNA_ID_1818369_gDNA_ID_1621154_Annot_ID_56948 3000 nt of promoter + ATG
ttttacttagttgggctagtggagctcttgatcctgacagcactacatctgatgatcttgtcacttctgtcaaaaggttctctttttccttctgcccacatcatgtttttttttcttttttcatttgattccatcaattaacactagtctactatgtttatgttccttttctaggggagtgtgggctatgatcgctgtctttcttgcttactctttgctccaggccccttcaacgtttgtttaccatctcagctgttttattaatttgctttctcttttataatgtagattgtggttgttggtgatacttgtgatgtgtctttaatcaagtaatttgctttatgcagggttctaatcaggccccatcctgcaatctggcgcttagttcatggaatggccgtcatttacttagttgcacttacttttttgctctttcaggttcacttttttttcctccctagatccttcttacttgcctatgcctgtgatttatatatggattcttgttttaagtgagcaaactctaatagttacattattcatgctcccagagacgtgatgatgcacggcagttcatgaagtttctccaccctgaccttggaataggtaagagtttcggagaggaatgctgtttattcgaggagctaccacatcaatgattgaccatcttattgagtttgctcatgttgcagaacttcctgagaaatcatacggtgctgattgccgtatatatgtgcctgatcacccaacaaacaggtttaagaatctttatgtagggtatcttctcaacaactcccctttaccttaaccaaccttcatatcacctaaaggcttatgctttgattaaaatttatcaggacacagtatttgatgagtttttcttggctcacatctttggttggtgggggaaagcaattctgatccggaaccagccgcttctttgggtgctttcaattggttttgagttattggaggttggtctttgtcttcgttttcttatattacaggttccaatttgatatatacaaaaatatcgcttcgcctgtgtcaccgaaaagttatatttatgttctccaggttacttttcggcatatgttaccaaatttcaacgagtgctggtgggacagtattgttcttgatatcttgatatgcaactggtttggtatgattcttaagctaccttgctattctatatgtagtgcttttaaacatgttatggataacagcttttcttgttttaatcatggtaggtatctgggcaggaatgtatacagttcgatattttgatggaaaaacatatgagtgggttggcattagccgccagcctaacattattggcaaagtaggtttgttcaaccttgagagtgcatacacatggtcctagccgttgtacatccaatgagaattttgtatattttttcaggtgaaaaggacactggggcagttcacaccagctcactgggacaaagacgagtggcatccgctgcagggaccttggcgttttattcaagtactcactctttgcatcatattcttgacagtggagctgaacacattctttctcaagtttagcctgtggatcccccctcgaaacccagtgattctctataggctgatcttgtggtggctcatagcgataccaacaacacgggagtacaattcatatcttcaagacaggtaaagctatagccactgcgatattggttggagttagtttggaaagagttttgtatataacttgtgtagttttggttgttcacagaaaacctgtgaaaaaggtgggagcattctgttggctgtcactggggatatgcatagtagaacttctcatctgcatcaagtttggaagtggtaggtggttccttacacatgctctgccttagttatttatggttacagttacatagtgtggagagtgtaaacttggttgtatggttatgatacgaacaggattgtacccaacagaaatgccattgtgggtagtgacactatggggaagtgtgggacttggacttgtggccttcttgctgtcttggacatggaagatccagaagatcctcgcgcaaaagagacgttaagcgcatcattattgttgcagcagagacgagagagaaatagaggtgagacagtgaaatgccattgtggtttttttttgtaaatagggagaagaaggaacgatgtaaatgcaattttctttagggatagtgtgtgatattcaacatttacgaagattccatcaattctttcatgcatcaaaagttctttcatctttgttctgccccctcaatctgacaaaacatgttggtttgaatgtcaattttttgttaccattcacacattcaagttttcaacagttcaaaaaaagaagaagaagttattgagccattgtttcttctggtttttgagatgattgttttgtgctgccaactcttacatgacattaacaacattattgtgcttttactgccattaactccattaccaccattcaatttttctgtctttaattattggttccagttttgttattctggtctattattttgtattatcatcattctatcaaacagattatttgttttgttgaaggaaatgaaaaaaagaagaagaaagaatcaaatatgataaattgaggataatattaagattgtgtgacctgccgtgccgcccaacaacatgtcacatggtatcttaggtttgcaaattcgtaatttgacatcttcgacgacaattttgactatctatctaatcttaacatcactcttccatcatcacttcctattttattccaactttcttaaagaagccaaaaaaaggatgatgtcagaagttaaggaatattctgacaaggataggatgcccttaagggaatctagagtcttgaatgggcttttagaattccaagaagctagggaatctcgagtctttaatgggcttttaaagtttcaagaatcaaaggcccaaattgcatatttgtagcccgtcggaaacgcaatgaaa

SEQ ID NO: 7601 - DNA, 3000 bp, Unknown
  misc_feature (1)..( 3000): cDNA_ID_1818367_gDNA_ID_1621154_Annot_ID_56949 3000 nt of promoter + ATG
ggctgtcactggggatatgcatagtagaacttctcatctgcatcaagtttggaagtggtaggtggttccttacacatgctctgccttagttatttatggttacagttacatagtgtggagagtgtaaacttggttgtatggttatgatacgaacaggattgtacccaacagaaatgccattgtgggtagtgacactatggggaagtgtgggacttggacttgtggccttcttgctgtcttggacatggaagatccagaagatcctcgcgcaaaagagacgttaagcgcatcattattgttgcagcagagacgagagagaaatagaggtgagacagtgaaatgccattgtggtttttttttgtaaatagggagaagaaggaacgatgtaaatgcaattttctttagggatagtgtgtgatattcaacatttacgaagattccatcaattctttcatgcatcaaaagttctttcatctttgttctgccccctcaatctgacaaaacatgttggtttgaatgtcaattttttgttaccattcacacattcaagttttcaacagttcaaaaaaagaagaagaagttattgagccattgtttcttctggtttttgagatgattgttttgtgctgccaactcttacatgacattaacaacattattgtgcttttactgccattaactccattaccaccattcaatttttctgtctttaattattggttccagttttgttattctggtctattattttgtattatcatcattctatcaaacagattatttgttttgttgaaggaaatgaaaaaaagaagaagaaagaatcaaatatgataaattgaggataatattaagattgtgtgacctgccgtgccgcccaacaacatgtcacatggtatcttaggtttgcaaattcgtaatttgacatcttcgacgacaattttgactatctatctaatcttaacatcactcttccatcatcacttcctattttattccaactttcttaaagaagccaaaaaaaggatgatgtcagaagttaaggaatattctgacaaggataggatgcccttaagggaatctagagtcttgaatgggcttttagaattccaagaagctagggaatctcgagtctttaatgggcttttaaagtttcaagaatcaaaggcccaaattgcatatttgtagcccgtcggaaacgcaatgaaaatgatgaatctgaagactgactcaaacaacatctctgtagggttcttcttccttgcttcttcgagtctcgatctcctctctcaatctcaggtaacgccaaaatcctctttttattcatgggatcttttataccaaattcgatttcttcattttgagatctgtgaatatcatcgtcccacgaaccaatcgaatctgttgttgtctgacattaattttcatttctatctcttgcagtcttcagcttccaattgactttcaacatgtaagcttattccttaaactcgataccttcttaccaatctccaatctccaatcatgttgtgtagatggatctctaacatatgtagaccctttagtattcgtgtctgaatctctagactggaatcattttttttttttattgtggctctatagttgtgtaggggtcggtctatgattagatccgattctattcatttttctggcttatgttttcgcatcatataatcagagctttatcttgtaaggaagagtgataaaactagataattatgttctttctagttttgctcgtaaagacgattcttgtatgtcatcattcacacgggagtagtttatatatctagccattgatgttgcatcctcgatgcctgtggtttttctgaatatttcagggcagatgatgaagttgttgatccaaagaagtaccttgaggaatcttgcaaaccaaaatgtgtgaagccacttctcgaatatcaggtgaaactggttgatgttgtgactaattatgaattgtgttataagttttgacacagtgccatgttttgtgaagatcattgtttgactgatacaaggcttgtttgtggttctcaggcatgtgtcaagagaatccaaggtgatgattctggccacaagcattgcactggccagtattttgactactggcaatgcattgacaaatgtgtaagttacttgaattatgttattttgctgtttcatcatatgatatcttctaaagtttgatactgagatgaaattggattttggatcttcaggttgcaccaaagctgtttgcgaaactaaaatgaaaagaggtgaagctggagactctattgtcttgagtttgctacatgtggtttaaaattgatgtataaaatgcagtggatgttgaacttttttttactgcaaaccagattgccaaatggctctgcttcttggttttgtttccatcgcaagtttgcgcttactacatttttttgctacttgagtaattgcatggcctaataacaagatatgttgtgcctttctttggtccaattgtcgtagacaatgcgtcaaacaaatcattaggcttgaagtttcaataaagagagattttcaagcctctgctattaggtggcctggtactatggccattgattaggatttcttagagcttgccaaagtttatgatcggactaactctgaagcttattggtcttaaaaagataactatctaatgatggcggctacaagaagatattttcttttaaaaaattttgaaggtgaaagaaggttgaatagtcttatggtgaaatcacatgtgactggaatgaagtgaagaactgtttagtggagtgtgtgatgcatgcagcagccacttttgaaggacagcttggactttagagtgagagtgagatgtatggcccgcggcggctgcattagactgaatcttatccttgacactctacagcaattatgtagattctcccatttgaccctctatttaagggttagcaagtgtaataccagtccatacaataccattacatagcc

SEQ ID NO: 7602 - DNA, 3000 bp, Unknown
  misc_feature (1)..( 3000): cDNA_ID_1818363_gDNA_ID_1621154_Annot_ID_56950 3000 nt of promoter + ATG
ccattgagattatctgtatcatgaactgaatgataaccacggcagccataggagccgcaaagcagataagcctcttgagttctgcggtgaaagatccgtcttgcagatctctccatgtcactttctcaattctgtctaccggatcattggtggttctctccgcgtcttgcatggcttgtgagagagagtttgaaagttgaaacggaaagtggtgagtgataatcgtgaagtactactgtctgctttttggtgcttggttatgtgtaattccttaccaagggaatctatagtgtagtgccacttggcaaaattccaaaaccatgaatgaaatatatacgttaaatttggctcaacggtagggagtgttcattgataatgtactcttacgttttttaatatgcatattgcttgtcacttttcttccacaattctgtcttttaattacatgatttggtgttttttctttgaaagacgagctagcaaaattaaatgaagagggaatgcaattttcgaagtatcacaacaagtggtcggaaagtagatagaatgatattttgatcatccacgtggcaaaacattgtaacggaaggaaattaggtgcatagcaaaaaaaaataacacaatcgtgccaccgaaccaatcgggccgcccttttctaccgccggctaaatttgacggtcacatatagagccccaaaaactctccaccatgtccactcttcctttcgcgccttctgtcacccatgcgcactttagccactccctctcccccatgtttatcctgcgccatctccctcttacacgccatctccgtttatcccgaaataaccgcgtcgcttccgttgtatccgccgccgccgttcgccaggacgcttccctctggactccagctcctctctctctaatcgaatcagctgcagaatcgcttttccacatctcaatcgacatttcaaacgctccggatctcgtagcttcgtacacgagacccggtcagtatctccagatccgtgttcctgatgttgagaagccttcttttatggcaatcgcttctcctccttccttggcgtcttctcgtggtgctttcgaattcttggtcaagagcatcgctggttctaccgcggagattctctgcgggttgaagaaaggagagaccgttgagcttagctctgtgatgggtaatggtttcaatatcgatctgattgatcctcctgaggaatatcccaccgttttgattttcgccactggatctggaattaggtgagagctttttccattttctctcctaccttgttggattgctgaagttgtcttttttacttcatgtattcaatgatccaagtgtggtctagtttaaaggtttcagtgcagagcattagctagatacaaagctttcaaactcaagtatcttgaatctagtttagttactcattttgcggtgaatcctctgtgatgccgggttcaattgcttttttgtggaccttttttgtgaactccagtatgatttcaatctatccaaaggtgccatggaccaattttgtggctatttttttactgtgatgatgttgtaatactgaaatagagtttcatgtatgaaaggtcaatgtttttatgactttggtgatcgatcagatctgttgtttatgccaagtaaaggtgtttctttcaatcatctattgttctaggcctggtcaatcaaaaatgtttagtgatggtgatgtgaattaagtaactgtcttcaatttggaatgtaatctcacatgttcttatctctgcagccccatccgctcactaatcgaatcaggatttggcgctgatagaagatctgacgtaagactctattacggggctaggaacctgaataggatggcttaccaggtttggttctttctctcagttgttttgcaattcatgatgtcagtagatataaatgtgtgtgcttgaattataaaaatcttttgatgataagcgtaaagcctatctctcgctctcattttgatctacagaagaatcatcttggaaacgctcttgattttgtaggaaaagtttaaagagtgggaatcagcgggtgtcaaagttgtgccggtattatcacagccagatgatgggtggaaaggggaaactggatatgtgcaggtgagattgagaaacgtgctccttagtcaagtctgctgtaactcaatgtggatcaaactaatatatacataatgtgttgtataggctgcttttgcaagggctaaacagctatcagctcccaaggccacgggagcggtgctgtgcggacagaaacaaatggctgaggtatgcactgtttttgtttatgagaacctaaatgctttagaagatgtgtatctttatcattgtttcgatttgtattgttgcaggagataacttcaatgcttgtagctgatggagtctcaaatgacaagctgctcaaaaacttttgacagatatagttcttgtattatcgtataattttactgtttcttcacatcattattcttttgatacgaaagtcctcttcaaggcctctctaattcataaacacacagaattttgtagtcccttaaaaattaatactactgtgttgattgtcaccacaacattcttttttgattagtgatcatgttaatgtccatgctctatatactttgcatatttcttctactttcaatagaaaatttctacatataccaagaagatttataccaaaaaatattgtgaattagacatgtttctaattaggaaaagttccacaaaataaatcaccatcgttgccacatttaattaacgcggaaaaaagcttaaaagccattgatcgactgtattaaccactaaattagactgcacgccgttttcatagaagatcacaggacttggtgtcgttctcacgatccttcacgatcatcttctcttagtcaataaggatccatcaaggaaaccaaaaatcgaagaaaattagaaaaatcggaagagcgatcgaagaggattttgaaccgccatg

SEQ ID NO: 7603 - DNA, 3000 bp, Unknown
  misc_feature (1)..( 3000): cDNA_ID_1818359_gDNA_ID_1621154_Annot_ID_56951 3000 nt of promoter + ATG
acgttgttggtggttatatttttctagtgatagtaatatatgtgtgatcctgtcattattacttgtggagacacttgtgaaggtctgtgtcgagaaacattttcagtgattgaaaactctagctccaagactcagaagcagctcccacatctatttcctgactcgcaactactgtgttacaggtataagcgagctggtatcagcagaattggatcactacatcattttctgtccaaggtatttctgaactaccagaataatgcttcatcgaaataacgattgctgagggctgctaatattacaaaagaaaagaccaattattcacggcaaccactagtccagcagtaacatataacgatttggctgctacaaaaatggtaaaataggaggaacatctgtgtccctgtaatcttagatgggaagttctgactctgtaagttctgattcatgggccacagccattcgctccctcgcttcacgggcctagagttcaaaatgcatccaattgaacatcgatatgtttattccaaaatagaaacatgtcatgaaagacaaaaagcaaaggaaaggacctgggttttccagtttgtgcagcctgtgacaagagccagcagaagagtctgcagaactgcaccggctagtattccaatccaaaggccaacacctttcagatgaacccagaaggctaaagatgctgcaatgggtatcccccagagatagaaagctccgaagtttatgtaagcccctatatgctgccacccgcatccgcttgcaacaccttccaaccatcaaacgagggttagaagaatggcagaaaagagtacaacatgaacaggcatgacaacttggagctgtatattcgacactagcttatgtttgagaaacgaaatgggaaaaaatctcgaacctgagagaaccccttgtaaactgtccagtatgatagaaatagagaccaacggagccatctttgcaacatattcgatggttttcttgtcactgctgaaaacatggccgaaaacatgcctgccggctaatagagacatactcaccatcaatgcatccattactgcaagagacattgccgcatagaccacaatatgtgctgctcgagagtttccagctcctaactcatttgagattcttgtgctgcacaatgtacttgcttatgaacatgaaaccataacagaaagtatacttcagcatttatgtactggatagtggtgacaaaagctctaaccttgctgcagccgcgatcgctagtggtattgaataagttattgaaagtgtttcgaaactgtccgtagtatgaataacattatgattttgcaaattcaagattgtgacaggaaatggaaagatgcaaggatgagtaccagatagagagcacagaagtctccagctgtgggttgggtaacagaccagaaagtaatattatgagttcatatgaccaccactccaggctgcaacccatatataaaagagtttctaacaaaaaatgtggaggcaatgagaagtgaaaaaggaacagagaaaagtgatgtaccaaagcatagccgcagaaggaagagcatatttgataaactctctaacgccctcgaatatctccatggtaagcggcgcgcgtgtctcagaacaggcagaggagtagtacatgaaagatccaaggaaaatggcatagagccagtatgacaagctgagagccaaggctcctccaatatgaccaagccctgacttataaaccaaaagccagcagagaggaacgtggatacaaaacacaacagaagaggtgacgaggagaggtgtgatcaagctctggtttttgaagtagcgaatgagcggctgaagaacggcgtaagcgaacagtcctgggatgagccaagcggcatatctaccagcttcgtgagcaatagcagggtcttggccaaggatcacaataagctttcccatgttgaaccataggagagagagagggagacacactaaagtaagacagaacatagctgtgtaagcctgaacacctagtttccgatatagcttagctccataagcttgaccactcaaagtatctaaggcacatgacaatcctatctatcatcaaaaagtaacaagaaagtgaggagaggatgcaatttccatggttctggtagctagtaacagagataagtgcgtcaatttagaggaaagaaggaaaaggaaaacaaacaatgaagctgaagccagtgacgttacagaaggagactgcgaaggaagcgctagcgagggagagtctaccgaggtgacccaccatcaccattgagattatctgtatcatgaactgaatgataaccacggcagccataggagccgcaaagcagataagcctcttgagttctgcggtgaaagatccgtcttgcagatctctccatgtcactttctcaattctgtctaccggatcattggtggttctctccgcgtcttgcatggcttgtgagagagagtttgaaagttgaaacggaaagtggtgagtgataatcgtgaagtactactgtctgctttttggtgcttggttatgtgtaattccttaccaagggaatctatagtgtagtgccacttggcaaaattccaaaaccatgaatgaaatatatacgttaaatttggctcaacggtagggagtgttcattgataatgtactcttacgttttttaatatgcatattgcttgtcacttttcttccacaattctgtcttttaattacatgatttggtgttttttctttgaaagacgagctagcaaaattaaatgaagagggaatgcaattttcgaagtatcacaacaagtggtcggaaagtagatagaatgatattttgatcatccacgtggcaaaacattgtaacggaaggaaattaggtgcatagcaaaaaaaaataacacaatcgtgccaccgaaccaatcgggccgcccttttctaccgccggctaaatttgacggtcacatatagagccccaaaaactctccaccatg

SEQ ID NO: 7604 - DNA, 3000 bp, Unknown
  misc_feature (1)..( 3000): cDNA_ID_1818355_gDNA_ID_1621154_Annot_ID_56952 3000 nt of promoter + ATG
gttctatatcggatcggagctgcttcaaggtctcgagatcgtcgtctataagctgagcctcgcgctcagagtaggtgaaagtaacgtagttgcggagaggacggtagagatcaacggagctcgtcttcttctcatgaatggcgagcatcagattagagagcgaagaagaagccatggcggttcaaaatcctcttcgatcgctcttccgatttttctaattttcttcgatttttggtttccttgatggatccttattgactaagagaagatgatcgtgaaggatcgtgagaacgacaccaagtcctgtgatcttctatgaaaacggcgtgcagtctaatttagtggttaatacagtcgatcaatggcttttaagcttttttccgcgttaattaaatgtggcaacgatggtgatttattttgtggaacttttcctaattagaaacatgtctaattcacaatattttttggtataaatcttcttggtatatgtagaaattttctattgaaagtagaagaaatatgcaaagtatatagagcatggacattaacatgatcactaatcaaaaaagaatgttgtggtgacaatcaacacagtagtattaatttttaagggactacaaaattctgtgtgtttatgaattagagaggccttgaagaggactttcgtatcaaaagaataatgatgtgaagaaacagtaaaattatacgataatacaagaactatatctgtcaaaagtttttgagcagcttgtcatttgagactccatcagctacaagcattgaagttatctcctgcaacaatacaaatcgaaacaatgataaagatacacatcttctaaagcatttaggttctcataaacaaaaacagtgcatacctcagccatttgtttctgtccgcacagcaccgctcccgtggccttgggagctgatagctgtttagcccttgcaaaagcagcctatacaacacattatgtatatattagtttgatccacattgagttacagcagacttgactaaggagcacgtttctcaatctcacctgcacatatccagtttcccctttccacccatcatctggctgtgataataccggcacaactttgacacccgctgattcccactctttaaacttttcctacaaaatcaagagcgtttccaagatgattcttctgtagatcaaaatgagagcgagagataggctttacgcttatcatcaaaagatttttataattcaagcacacacatttatatctactgacatcatgaattgcaaaacaactgagagaaagaaccaaacctggtaagccatcctattcaggttcctagccccgtaatagagtcttacgtcagatcttctatcagcgccaaatcctgattcgattagtgagcggatggggctgcagagataagaacatgtgagattacattccaaattgaagacagttacttaattcacatcaccatcactaaacatttttgattgaccaggcctagaacaatagatgattgaaagaaacacctttacttggcataaacaacagatctgatcgatcaccaaagtcataaaaacattgacctttcatacatgaaactctatttcagtattacaacatcatcacagtaaaaaaatagccacaaaattggtccatggcacctttggatagattgaaatcatactggagttcacaaaaaaggtccacaaaaaagcaattgaacccggcatcacagaggattcaccgcaaaatgagtaactaaactagattcaagatacttgagtttgaaagctttgtatctagctaatgctctgcactgaaacctttaaactagaccacacttggatcattgaatacatgaagtaaaaaagacaacttcagcaatccaacaaggtaggagagaaaatggaaaaagctctcacctaattccagatccagtggcgaaaatcaaaacggtgggatattcctcaggaggatcaatcagatcgatattgaaaccattacccatcacagagctaagctcaacggtctctcctttcttcaacccgcagagaatctccgcggtagaaccagcgatgctcttgaccaagaattcgaaagcaccacgagaagacgccaaggaaggaggagaagcgattgccataaaagaaggcttctcaacatcaggaacacggatctggagatactgaccgggtctcgtgtacgaagctacgagatccggagcgtttgaaatgtcgattgagatgtggaaaagcgattctgcagctgattcgattagagagagaggagctggagtccagagggaagcgtcctggcgaacggcggcggcggatacaacggaagcgacgcggttatttcgggataaacggagatggcgtgtaagagggagatggcgcaggataaacatgggggagagggagtggctaaagtgcgcatgggtgacagaaggcgcgaaaggaagagtggacatggtggagagtttttggggctctatatgtgaccgtcaaatttagccggcggtagaaaagggcggcccgattggttcggtggcacgattgtgttatttttttttgctatgcacctaatttccttccgttacaatgttttgccacgtggatgatcaaaatatcattctatctactttccgaccacttgttgtgatacttcgaaaattgcattccctcttcatttaattttgctagctcgtctttcaaagaaaaaacaccaaatcatgtaattaaaagacagaattgtggaagaaaagtgacaagcaatatgcatattaaaaaacgtaagagtacattatcaatgaacactccctaccgttgagccaaatttaacgtatatatttcattcatggttttggaattttgccaagtggcactacactatagattcccttggtaaggaattacacataaccaagcaccaaaaagcagacagtagtacttcacgattatcactcaccactttccgtttcaactttcaaactctctctcacaagcc

SEQ ID NO: 7605 - DNA, 3000 bp, Unknown; identical to SEQ ID NO: 7599
  misc_feature (1)..( 3000): cDNA_ID_3050972_gDNA_ID_1621154_Annot_ID_173373 3000 nt of promoter + ATG

SEQ ID NO: 7606 - DNA, 3000 bp, Unknown
  misc_feature (1)..( 3000): cDNA_ID_1818343_gDNA_ID_1621154_Annot_ID_56955 3000 nt of promoter + ATG
tctatgccattttccttggatctttcatgtactactcctctgcctgttctgagacacgtgcgccgctctccatggagatattcgatggcattggagagttcttcaaatatgctcttccttctgcggctatgatttggtacttcacttttctctgtgccttttcacttctcaaagcctccacactaaaaattatgttgtgtgttgcagcctagagtggtggtcttatgaacttataatattactctctggtctcttacccaacccacaactggagacttctgtgctctctgtctggtactcctccttgcatcgatcaatttcttcttgttacaattttgaatttgcaagaacataatgttattcacactgtggcagtcttcagacaatttcaacaatgtattcgataccactagcaatcgcggctgcagcaaggttagagctttagtcacactatgcagtacataaatactgaagcatattttctgctcatgacaaggaatcatatggtttcatattcataagcggatgtttatttcttgtgcagcacaagaatctcaaatgaattaggtgctggaaactctcgagcagcacatatcgtggtctatgcggcaatgtctcttgcagttattgatgcattgatagttagtatgtctctactaatcggcaggaatcttttcgggcacattttcagcagtgacaaggaaactatcgactatgttgcaaagatggctccattggtctctatttctctcatgcttgacgctttacaaggggtcctctcaggtctgagacttgttcttctttctttactcacacacaagttcttgtcggatattgtttactcttttcctccacatagtgcaaagacacttcatgttctgtgttttgtcctgtgtcaaaagctatcccaaaaatatactcttttctaccacgcctaattgtcttttgatggtttgcaggtattgcaaggggatgcggatggcaacatataggagcttacataaacttaggagctttctatctctgggggatacccattgctgcatctttagccttctggattcatctgaaaggtgttggcctttggattggaatccaagccggtgccgttctgcaaacgcttctgcttgctcttgtcacgggctgtacaaactgggaaagccaggtcctacttctttttcgttcttttcttcttcatgactagtttctcttgtgaaataaacatacagatcttgaattggatgcatgtttgaactgtaggccgataaagcgaggaatcgaatggctttggcctatggaacataaggcgctgcagaacagcacttacagaatcagatctccgcgtctgaagatatagggacctgatgatccttcggttttaccattttgttagtagtcaaattgctgtactgtatgttacttttggactagtggtagccgcaagtaatattgcatggttttccaaaaaggagccttttctctgttctcaacaacaaagaataatgaacagattcactggactgtgagcttgaccatacaagcagagaccaagaagtggtggtattgatggagctgctacaaccaccacatatctccaaattgacagcatctgatttcctgtcactagtcccacttctcacaagagtaactgaattactcgaacctgttaaagttatcaaaccaattttaatgatcaatcttggggcaaggctttaaaaggcaccctcagtgtcaattagaaacataacatagagtttctactgagtcttggggcaagagctgtccatcagtgatacattcctcaatacagacatgttcataagtctgtccagaagcaaaaaatgattacctactctccatgggcttatatagttaatagaactaaactttgatagttgacaccaaatgcatgaacacgatcttcattagaaccttgaccagtgagggaacatggtgttggacactaagagtcatatatcatccaaaattccacttcagaatagaatggagtattttctcatgaggtatgacaaataattgattccttccggttgtcttctcccacacgtgccttgtgaatgagttctttaaagcacgttgctgtcactgcaagttgtcaaatttcgtcaactgttgcaaccgtgcaatcatccgatcaccaacttccttctctgatatggatcaagcaacaatgtccaaatctgaacaaatcacatatcaaaattagaattgcaacaaggaactaccagagaccaatttataaattcagaagcaaatatacacgagggcataattaatcaaactggctgcaagagacttataaaccctgaacagttgctaatatcgcatggaggacattgttgctagctcaactgggtctcagatgatgtctgtttcagtaaaaagtaacacataactgcattttatcaatggccataacacacaactttaacaaagcatagagaacaagaccataaaaacataaattacatcaaagaacaagaacagaaatctaaaaacaaagcaagaaggagcgatcacacttcaaataaaccaatgaggtagtggacaaagccctcacctaattccagatcaaaccggcggagatgacgggtgaggggaagtcagcgcaggataaacatgggagggagagagatagtggctaaattccacatgggtgacagagggcgccaaagtatgacttacttggagtgatttggatagaaaatggtgacacgtggacactcaagatatcatttttatctttttcccaaccacttgtgagctgtgtaggagagaagtaatgaacatataagcaaaaacaaatgttgttacaaaaacaagtccccaccacatttactactactagtttgacaaacataaacacatttcccttattaacatttcttgttaaccacacaaagttaataagtaacccaagtttatacagttttaaaacattctctctatctccctccggctaggctgtagctgttcgcc

SEQ ID NO: 7607 - DNA, 3000 bp, Unknown
  misc_feature (1)..( 3000): cDNA_ID_1818335_gDNA_ID_1621154_Annot_ID_56958 3000 nt of promoter + ATG
aaacatgaccatcacagtagagtgcttgatcctctctttcctgctcattaaccaccccaactttcatttttaagttcaaatttcttttgttaaatgttccatccttcataattagatcaaagtcagccttacttggaaacatagaagcaggtctccaacgttcactctcccacactctgatggttctacaggaatagaccgctcacgcactgatgttttgacgtttacccactcatcgtgtcggttgtcgaacccagaaaaccgtacacgcacttcctgttgcagacactcttagttgcaaacaaatcatccattaaacaaaagagaaaaagcttaccagttcaccagtgcgaagaactctataagtaaggaacgaagacacgtcatacctgaaagaccagaattccagcaaataagcacagatataaaacacaaacgtatattacaagtccaaaaattaggctttatatgaataacgttctttcttaagttcacactgaataggtaagggcattcctcgttgagttaacaatcaacagagagttcacatttcaggttcttacttaggccacttaacaaagtcatatgctagcagtagtccaagagttaaagcaaaaatagaaacatgatattcaatgcaaggaaacgttcttaccacgcgtagtcccgcgctgatttagcctcaaaagccagatcagctaaatcagaggccttgcctgtgtatgaaaatgttcataggcgttataaggcgttaactaaaagaatcaaatatggcacacaagaaaaggaaaaccttttcgtgtttgaacaaaggtagaattcccaacaaaggtagcatttgaggcatttgaagcataagaactgggattagataagtcatgaatctgcaaagggggagatggcaaagttttggattttggttggctttgatgcttcagcttctcctggaaccaaatctgtacctgaaaacattttgattcaaaaaaaaaagttatttctactctatttgcattttttaccagttagctctatgaagaaaaaagagacgcacctgtttccaggttatagaggatttgccattccgattcacagaacaactataagagaaaatggaagaagacataaagattttttagatactgtgcatgaaaatcaataatcctactattcctataaatccacaaaatgcttgtgtctcgattctctaacaaacacattcacatgatcaaattctcgtaaaattcagaataaagtacctaaaagtagaggcaacagtttgacagaaatctttgtggagagattggtcaccgagctccttatacagattctccatgtctacaatcttcgaataagaagagcaataagatcacaaagcatgaatctctaatctaagaaaacgaatgatagaaagcatagataacctcagacaaggtaaactcggtgaaatagtgagaggaatcatcggaagcagccattatcgagcgcacaaggaagaagaagaagaagtgaaaaggatcttgagctaatttgctactacactgatgccttcagagttcagtgagctttagtgggttaatgggcctaaaatggataataataatataaatgggcttaaactcactaatttattacccatatgcttgttttttggaccgtctattattttattttaaccacactcatataactgtactattatttaatatttataaatgactttgaaacaatcgagacaggatgagggaacccgtccgcggggaatcttccaagtcatatgagctggtggtgcgtggtggagtgtttattaatattcatgattactgacattattaatcaaatactatcatagcatgtataagtatataatttaatcacagctaatcctcactaaggctctaccttcttttgttggcgacaacccaggcccttatttctccaatacaagattcgttactaaacatatcaaatatacattattgtaattagttagttaattacacgtgctttaaagcattttaaacgcacaaatttgaaaatgatggcaaaggccctgattgattttgaccgagacacaaacacgcaaacatagaaaatttaatcagggatttgtactcggttacatagctgtcattctgtgttacgtattaattacggtatttaactaatcacgcacgcagtagatatactataactttacttgattaacaaagctaatagcatccataaattggggtcaagatgtttgaactcataacgagttactttgacatttgtagattgtgtgtagttggtacgaggtctactagtaagtcataaccaaatataactaatcgtagtagactaattcaatttcttacataagtcccaaattttctatacctgttctgcactaatcactcctctcattcttatcaccattggtccattgccatctcttgaatccgtcaatcttttattaatttaaaaaggccacctgctctattgttgacaatagaaggtgaggaaaaacaaaaccaatcaagccaaaaaaagacaacctgtctacatcattaagcaccaaccttatacaaacgtataaatcgaatttttaactcgtgtatgattgactaggcatccttcattttccacatgggccatcctgttaaaagatgtttcattattgcatggattactataataatcacaagaatttaaaaggcacaatcaagtggtgcttttctttatagttttcattggagattgtgataaaataacagagagcaccagagggggagcttgcactcgtcattgtcccttactcttttctctctcaatgctgcagaggcactgacaaacacaccatctttgcttatctctttctctgttttcttcaacgaaatttacatatcatccgtttcttctactcacatatggatcctatcagtctaatagtctaaaagaaagaagaagaagcacttaacttaatagaaacaggatcaagattcataagatctaaagatg

SEQ ID NO: 7608 - DNA, 3000 bp, Unknown
  misc_feature (1)..( 3000): cDNA_ID_1818332_gDNA_ID_1621154_Annot_ID_56959 3000 nt of promoter + ATG
aaagaactctagaatatggtctctaggtccctggtacacaatctgtccctccgacaataagattatatcatcgaatagatcaaacgtctcaggagcaggctggagaagagatataagaactgtggcttctgtgaggtgaacaatctgttgcaagcatttcacgatttggaaagtcgtggagctgtcaagtccggtggatatctcatccatgaacagagtcttagtaggtccaacgatcatctcaccagttgtcacacgcttcttctgacctcctgaaatacctctcatcatgtcatctccaactatagtgtccttgcaaatgtcaagccctagaatctgtttcatagaacaataacatctatctcaacatatgaacactatataatcgtttaatcaagacaattatgtatttaaggttgagagggactcactttgagagtataatcagtgataagactactcttgacgccttgagcagcagaggccttcatgaacaaatcaacatcagcttctggaaaaatcccagcgtccttttctcttcttgccaactcatttaaaagatctgcatcaataacaagtaagattactcaatcgaccaacaaaaacaaaatcgatagttagtttgacaaaaagtctaagattataccgtaacgggtaccaactccttgacacctagcagagaaatcaagagtctccttaacagtcatgataccaacatgaagatcgttctgactaatgtaagcagatgttttaatgggaacaaactcattgaggcgataaccattataggttacctccccagagacgtcaagagacttgtcgagtttaccggcaagagccaacaaaagcgtggtcttcccggaagacggaggacccaacaaaagtgtcatccttgaaggtttgacgataccagaaacatctttgagaatagtaagttgtgctttcttggcaagcctaattccgatcatgcctagagcagcttctcccatgtttctcaccgcgttaagaagcgaaggaagagatctatcaccggtgtaacagtcagctttcacagtcaagtggtcgtacctcacttctactgtcggaagttggatcccaactctgtcgattctgtttcttagctttgtcaagatccgttcgttgtcctgctctgcgactttgaagaccatgtcgatgaacttctgacgttcttcgccgtcaagcttcgtgacgtcaactgctttgttgaggatttggttaccgtagacgtcgtcttcgcctaattcaggcatgagacttgtgcggagacggttgtaggtagggagtttctcgatggaagcccatttgagagcttcttcgtcttcgttgacagatttggttcgtctagagcttgtattgaatatgtcttccatgtttctgcttgctttgcttacactacgacttatggtttgccgcatactcccacctctgctcatagcatgagctggatcgtaatccatctttagatcttatgaatcttgatcctgtttctattaagttaagtgcttcttcttctttcttttagactattagactgataggatccatatgtgagtagaagaaacggatgatatgtaaatttcgttgaagaaaacagagaaagagataagcaaagatggtgtgtttgtcagtgcctctgcagcattgagagagaaaagagtaagggacaatgacgagtgcaagctccccctctggtgctctctgttattttatcacaatctccaatgaaaactataaagaaaagcaccacttgattgtgccttttaaattcttgtgattattatagtaatccatgcaataatgaaacatcttttaacaggatggcccatgtggaaaatgaaggatgcctagtcaatcatacacgagttaaaaattcgatttatacgtttgtataaggttggtgcttaatgatgtagacaggttgtctttttttggcttgattggttttgtttttcctcaccttctattgtcaacaatagagcaggtggcctttttaaattaataaaagattgacggattcaagagatggcaatggaccaatggtgataagaatgagaggagtgattagtgcagaacaggtatagaaaatttgggacttatgtaagaaattgaattagtctactacgattagttatatttggttatgacttactagtagacctcgtaccaactacacacaatctacaaatgtcaaagtaactcgttatgagttcaaacatcttgaccccaatttatggatgctattagctttgttaatcaagtaaagttatagtatatctactgcgtgcgtgattagttaaataccgtaattaatacgtaacacagaatgacagctatgtaaccgagtacaaatccctgattaaattttctatgtttgcgtgtttgtgtctcggtcaaaatcaatcagggcctttgccatcattttcaaatttgtgcgtttaaaatgctttaaagcacgtgtaattaactaactaattacaataatgtatatttgatatgtttagtaacgaatcttgtattggagaaataagggcctgggttgtcgccaacaaaagaaggtagagccttagtgaggattagctgtgattaaattatatacttatacatgctatgatagtatttgattaataatgtcagtaatcatgaatattaataaacactccaccacgcaccaccagctcatatgacttggaagattccccgcggacgggttccctcatcctgtctcgattgtttcaaagtcatttataaatattaaataatagtacagttatatgagtgtggttaaaataaaataatagacggtccaaaaaacaagcatatgggtaataaattagtgagtttaagcccatttatattattattatccattttaggcccattaacccactaaagctcactgaactctgaaggcatcagtgtagtagcaaattagctcaagatccttttcacttcttcttcttcttccttgtgcgctcgata

SEQ ID NO: 7609 - DNA, 3000 bp, Unknown
  misc_feature (1)..( 3000): cDNA_ID_1818328_gDNA_ID_1621154_Annot_ID_56962 3000 nt of promoter + ATG
cataaagcactgtctccccaaattcatcctccagcttactgtagatctctttgtcagtttttccagctcctatctcattacggatcagctacaaaactcaggtgtattagaagagtagacagcaaaactatcttcaacttaatctttggaagaaaaaacggagtaaaggacacacctgtctaaggagaatagcgatatctgcctgcgagtcttcaatggactgacttccacactcagtgcagcgaacattgtggctaatgtttctggcccgagcgtccagcatctgagccttcttcctctcttcgtctgttttctccattgcgctgacaatttcatgatatgagtattgtgagttttcacacaggcatttcgtcgaacactttgtgggcaacagaggctcagagacccaaaacgtaaggaacgtaaattaagttatgaagggagaacctgggtggagaggaagcaagagaactccgagaaaccgcttagttcgttcaacgtggagctcaaaaatgaaacctttcgcttgggaaattactccgtttactagtaaaaagtaaacacccaatcgtcctccagcaataatagcgccgatccttctcgacagagccgtttagagaagatgccggtggatcttcggcgggtgaacaaatcggatccgaatgtgaaatcgaaaaggcgcgtgaaagagcgtgcgactgagagtgtgtccgaagacgtttcgcgcgtatacagtgctcgtgggcataataaacatgggcccttcaaatatataatttgtttgaaattgtaataaacatgggccttgtaactgatagaactatattctatcagtaactgcataaaactcactaagagaagaccaacactctttggagtccaaatgaccaaaacaaattgagaagagaaatatgagatgaaccaaaacaatgaaacatagaatagcgtcaggaaggaacaatgttacagaaacaattaaaagaaaaaaacacattctacaataggagaaagtgagggtgaaacaaaagcaccacactgaatactcatactattagctgaattagtgttggtgatgggtctgctcttcttcttcatcacccgtttattttacttggggtctggagtcatgggtgaataaaggctagagggggcagagccccatggtgccgatcattgatgactcactgtctttctaaatcattttgctatgaaggcagcctcaattctgatattatggaactaggcaagtgggcattatctgtgatgaccaataaagcatgacataataaagcatgacatgttagacaagaagaattgcagtgtaatatttagttatttacattcatccagacatatcataacttctaaattgcacaatctttgcctttctgctaaagagcaaactcaacaacagagagaagccaatctttctcttttcagtgttctgtatatgaattacacaaaagctactaacaccaaatgtttaatctgtatatgaattcgtttgacagaaggagagctgagcagtcactaacaagtaacaacaaactatacaattcaatttgggatttgattctgcaagacctaatagagacatggctactacttgccaacgatagcatttcgccctgctttcttcttgcatttgaaactgaatagcaaaaagagaatcaacggttcgtgaaataggcgcagaaaaagcaaatcgcaagagagaagctactttattggcccaaatcctatttcatccagttttgtgtcttacaggcgatacataagctttgccaccattgccaatggagacaaagttcagacatttaagcaccgcacaatcaacagaagcaacgcaaacggatttgtaagctgtaaaagtctaatactttttatttatatacacgagggaagaacacttctgacaatgtgaggactctcagacaaatccttcaaccaagatcggtttcatctcctcttcttcatcttcatcactctgatccttcttctcactgcttctctcaataccttcaacatctagatccttcaaaccatcaacgcagctcttcccttcttctccttcgccagccaccaccaaatctccggcctgtttcgattcagccaacttctcaatgccttttccagctaaacacggcccagtatccctttcattgtctcctccaacgataatcttgtctgcagtttccggaataggatccgctaaacaaccgtcttcctcctcgtggtcgaatatcgacgctgcgcgagacttcacggcgttagcggctttgcgaaatgcttcctgaatagattccggcggcagagcacaatcctcgagaccggcgtctgcaagtgccggcgggaggatcgtatcgagcaagccaactctttctttcgtagcctccatagatgcagagagattcagagctctcttccctgaaatgtgaatgaaccctaaattggataattaaatcctttttccgaggaaaaggcggtgataagggtattccagtcattatacttcattgttggatctaaattacaaaatagcccagtgttttagtgagcccaaggttcgacacctagcgagatcatatggacttgattgattgcccagtgttttgttaataaaaataaaccattaatgaaatgctaacaacaacgaagagagagaattaaaagatcctcctaccgtattcccgggaacattcgccggagaaacgtacggaatcaacaaccttccccgggaaagaatccattaccgccgattctatcaattcgtataccgtatttgactacccagccattgattctctctccctctcttcccttttcattgtttctaaaccagctcatctttcctgatccggacgtttttcgaagatcgggtcctaattccccgggaatgggtccttaagttctggaagaaatccgtccgctctgtctggtaatttcattgaaggacggattaagcaagcgtgtgtgagatcagaaaagacggattcaact

SEQ ID NO: 7610 - DNA, 3000 bp, Unknown
  misc_feature (1)..( 3000): cDNA_ID_3439461_gDNA_ID_1621154_Annot_ID_56964 3000 nt of promoter + ATG
cagtaggtagacccgcacaaaggtgattaaagggacaacatataaaaacacaaataagacggaaattcagcaaccaatacgcacgatatctaattcttaattctttgaaatgcttacaaccaagaacttctgaaaactagcatccacaaagttcatcgagaaggggaaggagctagcttaccatgtcatctccggatttctaacaccatcttcagactggacatatcctggataagccattccaaaagtcggaaccccaccatgctgaccaccaaattgcataactgcatttcaatttgaatttaattagaaagtaatgcaataatctccccaagctggtacaacaggactccgaaaatagtatatatgaacaaccaggcctaggtggctcggcgtcaatagctttcaatttcaccaccatgcatgatttgaaactgaaaattctttcaactcatccattttacaaagaaaagcgtcatccaaaaaacttaccaggcagaaaagtagggaaattagaattgtcagcagatgtcaaactttctggccgccccatcatttgggatccactatacataaaagagctgcttccaccaggcctgagagtcccttttcctttagcaatcaatgcagctgtttccgatgaagattctatttcatcaggaggataccgatttcttgataagctagttttctggggagaggaagacaatgatctaacaacagcagagtgctgatcaaaaccctggccggaaggtctttggccagtgccttttgaatctccattgagttgcattggtgatgaaaatctgtcaccttgactatgagattgcgggtaaaacgtgttcccagcagcaggtgcacctctaccttgactagtggactgaagagtcttggcagtccaaactggtgaataaccggattttgtattcctatacttcttcccagaaggcgtgacactttcatttgtgtggagtctttccatactaacttgtataccatgtaccacattactggacggcgctgaaggataaaatggaggagaagcggaactcaaacttgacacagctacattctttttggcatgggcaccttgattctcagttttagcaggggcagttggtgaacgccgtgaatcgaggtgtggcattttctcacgagagttttgagacccattagaatttcgtaacctacaaattcagtacacaagtacattataatagagaaaacccttcactcaactaggggattttttttttaagaactcactgtttgctttgctcagaatgtgcttgattttcattcctcaggggagtgtcggatttcctgggtcctctccctcgtgagacagctttaggaacataaatttgctgtccactactggttaatgtgttagaactgctccctctagcgtatccacgcccttgtcccctaccccgaccatgacctctgaatcggcctctagacatcctctgctgtgtatcaaatgcagtttaagaaagaaaggaaaaagataagagacggaaagtgcataaatacaacaaagctaacatatgtcacatgtacatgttatagcaattaagagataagaggaatctaaaattattctaaaaaccatagacagaagctttacatcagaatgtttttccccagtattcatctcttcaaatttgtcatgtccccattttctttcctctccagagccccactgtcttctcccaccacgcattcgcctacgaaagcaagataaagaactatatcaatcgacagatagaaggtagagaggaagagctatattcagaaaaaatcatatttcccaatagtatgaactaagcaatccccaatgcagctactcaaacccctcatgcttgataaaattgcaagataataagaggtcaataactccaccttagagtcaattatctctcctctaaatacaatttcatcctaagttaatacctactttgaaaaatccaacccttgcataataaggttgagttgatacttgatagcttatagtgacagattttgaagcagaattgattgagaaagctgtgaaaaacaaacacagtaaagagagtaaacctgtttccgccagcagacatttcctgaaacctatcatcatgcatataaaaagctccaccagtgggaacagcagcttgtaacttctccttttcattttcttcctctccattcatatcaccagcctccttcaccacaccactcttatcattatcgattcctccaccactttcctcctcatcatcctcataactatcctccccatcttcgtcattatcatacttcacagtaccaacttcttcatcagataggtcagaatcaaccacagccctctgatttttcacatctctaacagcatcatcatcatcactatcgtcatcactcgcttctctcctcctcgtcgccaaggagcggttcagctcctcgggatcactctcatattccgcttcagatgtcgccatgaaattctctctagaaacctgaaaaaaaggagagtggtactcgtaaatccaaaacctagatgaagaagaaattcaattgagaaatcgaaagagtcgctcaagcgctccgtactaatcgactatgtagaagaaagctcgcgcatacctataaaccctatctgagctcgagaggcgttcttcagcgattttgggggtttccaatgaaatcgaatggagccagaccttttgttaactgttaattaatcgattttattttgttatttcgcgcattaaatataacgactgtgacctaggttgacccaaataaaggtatttaacgggcccaaaaagaaatttgtaggccttttaatgggccatacactttcagagcccatttaataggttgcgttgttactacgaactcattataaatatgaaccgtagccccaatcagagagattcgataccgtctgcaactctcagctactttttccccaattttgagctcaacatcgaaccctagctcaacgaaccaatcatg

SEQ ID NO: 7611 - DNA, 3000 bp, Unknown
  misc_feature (1)..( 3000): cDNA_ID_1818324_gDNA_ID_1621154_Annot_ID_56965 3000 nt of promoter + ATG
ctggttctgatattacctcgagtcaactggcatacagtatatataatatgagtagtgagtggtggtggcaatgataagtaggggaccaattttgaacactgcttatcaatgtgatgacgattgcttacctataaaagtggacaacacaatcaacaagatgacaccttcttaaagtctgacactatcagcttgcttcttcaactactacatgccactaaatcaatgttaggtttccttttgagatccctagtgacataaatatggttatcttctcaaaaaaatgagcagcaagaaagatgatgaaacctacatcaaaatcaattcagagagttggtcgtttcttaaagaagactcttgggagcatcaagtccactatctgctctagtgattacaaaaacttacctaacgacactcctctcttgagcccttactcctgcagccgccgctgtccagaagattcccaaacccaaaccaaagaaagctacaccgttatctgttgtgacacggctgtggcagatacaacacaccagaagagtctcaacaaccaacataaaaagaaaccgaagaaagtcgctgagccattcgaggatgcaaagaaaagaggtgacgcgttggcgcaaaagatgaaagatctcaatatggtggatctgagagacgtggatcacgcattggatgtaagggaagcgcttcgatgctattcaagcatcagaagtcctgtgtatcttgacattgttgacaatttcttcacagacatgtattacgagttctctgatcctcgtacctctgctaagatcaacggttcaaggagaaaggcaggctccttcaggctttaaagttcctctggatcagctttgctttcacgggctatctgtagttctttcatctatagagtatgcacttcttaagaacagtgttaaccattacacacaccgctttggtaaaatcacctgtcaccaccctcagtttctacctcatcttgtagagtcaagttacgctcctattctcaactactatcaatgcaacatattttccacttcaagttatgacaacttacagtttataatactatatctgaagatagagatgtgacaccctactactcgattcttgacaaaatgattttagggtagataccacttttctttttcatgaaaaaatggagaaagcaaacatatgtatggagaagcgaagttactcttctcgaattatgataaaaagttacatcaacacaggattatctgtttttttcacttgataaatttgcattttaaaacacacttcatggataaaacggatcatttcttgccactcttcttaagtccagaacctccaaaggatcccttctgcgatgccttggctctaagctctttaagggcctgttttatcattttcattcaaaacaaaacaggtcaggctttcggtaacaaatgatcactgtacttctcatgcgaaagaaaggctaatgagtctttcacacaattgggtggaaaaaaagtagactaaacatcctaacatgggcaaatggtcactatttcatcaaagtaagaagaaactagtccatatcatctcaaaagaatctgtaatgaatacccctaaactaacaaataattaatagaaatgacccatctagttgtagtcaccagctataaagtcataattagagtcagcttgattagtagaccaaactgacaaagtggaacatattaatgcacaacctttacaaaacctttacaaacctatgtatctaaacagaagctctcttgtgaagatacaatctttgattcgtattttatagctttccattgaaagaggagcccaaacatataagtttaactagatgcatttttccaatcacaaaacttcatatgaacaaaaagagaaaacaagtcagagcatcaaagtgggaactcaccttttcctcatctttcttcttctgaatgttagctaagtcagtctgcattgataccaaatcaacatttcagcaattagagaatgtctaagagtcattaatacacaaatagtatgcaaacaaaatcaagtgaagaagtcaagactgtgcccttaaaaacactggatcaaaattcgaacttgcgtataaatcattgaatccgagcaaaattaatgatttatgagtcactgaatgttaacaaattttaagaattcaagttagttggacaatcaaaaccagatccagagcaaaagcatcgtttgattcgaggtctaaagctaacaatataagccgatttagctgaaggcaaatcaacagaaaatccaactcttaaaagaaaaaagaaacagtagagtcacctcgtcgtattccttcttatcagctttaggctgcttcaaaggtttcgcctttcctcctgtttaaaaccaaaataagatgagcagatcgtaaacgatgtctctaatcactttattcggtgaacgaatcaccaactcaaatctctgtataacagcaacgtaccttgcttggaagacatgattggttcgttgagctagggttcgatgttgagctcaaaattggggaaaaagtagctgagagttgcagacggtatcgaatctctctgattggggctacggttcatatttataatgagttcgtagtaacaacgcaacctattaaatgggctctgaaagtgtatggcccattaaaaggcctacaaatttctttttgggcccgttaaatacctttatttgggtcaacctaggtcacagtcgttatatttaatgcgcgaaataacaaaataaaatcgattaattaacagttaacaaaaggtctggctccattcgatttcattggaaacccccaaaatcgctgaagaacgcctctcgagctcagatagggtttataggtatgcgcgagctttcttctacatagtcgattagtacggagcgcttgagcgactctttcgatttctcaattgaatttcttcttcatctaggttttggatttacgagtaccactctcctttttttcaggtttctagagagaatttc

SEQ ID NO: 7612 - DNA, 3000 bp, Unknown
  misc_feature (1)..( 3000): cDNA_ID_1818320_gDNA_ID_1621154_Annot_ID_56966 3000 nt of promoter + ATG
cttcagtgtctctagcttcgacaccattcatgctgattgtctcgctatgtttctatcccaaaagcagaaaattttggacattattggagagattcctgggggagttaatcttacagtagacttgtggtcatcaaagcaatcagtggcttacgcttttgtggcaggacactttgttgataaagactggaatttgactcaccgccttctaaatgttgttgttgtggcttctcctgattctgattttgcgttaaaccagcctataacagcttgcttatccgactggaacttggagggaaagatttcgagcatcgctgtcagccaatcattagtaaataaaacctccatcgacaatctcagaggtttcttgtctttcaggaaccagcatgtgttgaatggtcagttgttgatggggagatgctatgctcgcatcttaagcagtatggcgcaagatgcactcacagctgagcggcttcaagaacccataaagaaagtccgagatagcatcaagtatatccaaaccaacgaggcttgcggagacagatttgatgaactgaagagacggtttccatccccttcgctttacaaagatcttcttattgacaaccaaacgagatgggacacaagttacaatatgttgttggctgcctgtgaacacagacaagtgttttctagtttggaaacctgccatcctgactacaaaatatcattatctcctgaggaatggaaaaagattgagagtctttgctcatgcttgaaggtacttgtcgaagcgggtaatgcattgactgggccaaacctgttgacagcaaacgatttgtaccatgagatgacaaagcttcagctagatctgagccacgctgccccgggtgaagacccggatgtcagaaacctagcaaaatcattgagggaaaaattcgaccagtactggagaggatgcttccttgtgttggcagttgcagtggtcatggatcctcggttcaaaatgcagctcattaagtttacgttcaataagtcgtatggtgaagatgcagagaaatggaccaagtctgtcgaagatgcagtccatgatctgtaccttaactacagtgaacagaacctgttggatgcttatgtggatcatggcttttcggaaatagaggtggctcaggaatctcacttccatcaagacatggctgaagctgccaatacagggaatggacaatcatatgatgagacaagtccacaagtagaggaaaccacaaacatggttgaagctgccaatacagggaatggacaatcatatgatgagacaagtccacaagtagaggaaaccacatacatggctgaagctgccaatacagggaatggacaatcaggtgatgagacaagtccacaagtagagaaaaccacagacatggctgaagctaccaatacagggaatggacaatcaggtgatgagacaagtccacaagtagaggaaaccacagagtcacatcaacatgagagacagcttaaggcagagaagcagaatgtggtagggatttgggagggagtgagtgaagagagtcagctaacagaagaggaccaacaacgtggtgatgattctcaagcacacgcaatggtagaggaagaccacacaacatttccggtagacgtgcttctcgaggaagggtctaccctcatcacaataggagagtcattgtcagacttcgagatgtacatgacagatatgaatacggagctggatcaatacttggaagaaaatttgattccgaggtcagaagactttaacgttctgagctggtggagggtcaacaacaccaactacccaactctctcaaagatggctgtggatcttctctcggtccccttcagcaccgtctctcctgattccgtattcgacacagaggtgaagcagatggacaattacaggacatctcttcctggtgaaaccttggaggctctcttgtgcaccaaggactggttaaaaaatggaactttatgaaaaattgaaaaggttccaattctttctggtttttttttagcttagtgtaatcatcattaaacagtattgaaattagttaataaaaaactttcacattactaagaaggcttgtttgtgtctcctaatctctcaaatctcaattttgtcccacgcacgcttggtactctctacaaagggaatacttgagggaggaattaaagtgtaaaatgaaagcttggggatctaattataatatcattgttcctacactcatttagatggattctgaatcaataataggtgaacaggtgggtataatatctgtggtgttgacatcattttacaattgatcaatttcaaaaatttggtgtacaactttttaaaggtttaacgttgtaagtatcgtaagaaggagaaagggagtgttataactcgtgctcatcatgtgtatagagacattaagtaggtgtggtttgttaaaaaaaagacaattgacttcgagtgggtgaccactaaaagcacactgcagtgagcagacgattcgaaccgttgattgttattaaaagaagcgtaaacaaacaaaacggagtcggacaaagaggtcagtgtccccaccaccactctcatagttgccacgtgggcgaatctgaaccatcacctcgtctcggtcgaattgcatgagactgtgattggagtattgttattaaaactttaatgtgaacatcaaaatcacatgtaacgttctaataagagatagagatagaaaaaagagatttggcgttagcgacaaggagaggccaggattggttataaatctcaaaaccaaagtgttaaccccatccaaaacccttatcctttttttctttttgttatatatcttctcttcacctttctttctcaaggctcaagattcttgattgctctgctgctccaaggtacctacctacctctgtctggattgactcactttttattactctttagatagtgatctcttattgtatatgtgtgtgtaattggatgaagggggatcaatg

SEQ ID NO: 7613 - DNA, 3000 bp, Unknown
  misc_feature (1)..( 3000): cDNA_ID_1818288_gDNA_ID_1621154_Annot_ID_173419 3000 nt of promoter + ATG
tatctctcacgtagcacactgagcaaaaacccagagagcaaggggatataggaaggaggagatagagagacgataaggtgactcgctctgggtagagaggagaagagagttgtttattagacagtgggagtgatataatatctgcaatgggaggattttggcattgaggacaaaaaaccctaacagggcggctcttaccgtctaattatgttcgaagctgataatccttgtaattaataaaattgaattggtctgaatattctgaagatttttgtaatgacgttcacatatttcgtcaaaatggacttaatgattagtattaaaaaaagattagaattcgtgcattgggtactttgatatattatgcaacttgagtaaactttcctcattataaatgtatttttgttgagaattaaggcatgtattattcctctaaagacaacgattttatatgaataaaaatctctactggcgtgcatcattctcttcctctactttatttactagaattattgagacaaaagaaaatatattaatatatgagaacttttgtgtttagtagacttaaaccagcatatttgatttgcagaaatgtatgttgaccccaaaaaacaagaaaatcatgagcatatatatgtattactaactttaaatcagtttgatttcaatcatacttagcaaatatggcaagaagatgtctagtcattttcgaaatcctagtaattaattagtatgagtatatctaaaatccaccggtaacgtatcaaaatttgattttctattataaattgatggggtattagtttagcatagtgattactgaattttaatttgattttcaatcttgccatgcatttatttcttttaaaaaaaagaagaagaagattagtcctaagtaaactcagctcaggaaacaaagagagatctacaaagcaaatgaatcgataagttgttgatgaaaacgagggagggctttgataaacgtgttaccaacttgggaaatggctccaatggagtgttgttgggggactgtgaagatccccttcatcttttccctcaatcagaaaaactccaaaacaacaacaaaatagtggggctcattcattttgatgaattgcgtcttataaagctccacgtcgcattaaaatcagcgatatgtcagattcagaagaatacagaggtctagtagtaataactcacgtgaagcccagcctccttcataaattttaacatattgggctttctattataaacccaatacgaagcccataacgttttccttcgcggcccatacttttatttaatggacttatataatttataaatagggttccaaaacttcagattcttccaaaaactatgttggcgaaatcatccattttcaaacaaattgttggcgaaatgatacaatatacattcaattaccagaaagtttttgctttggcttgttgttgggtccctctaaaaacggaacagtttagataattagataaagagatttgaaaattgggtgtgattttgatatccgtaatatgtattaattttctaacgatggtcgtgtaaacatgtcatcatacgactttattatggctttttgggaccatgtggttattaatagataaaatttttgttgtgcccttactatgtttctttattccccgaatttcctttgttaactacaactacaaaatacaaatcaacagtattagtaaagttacttatcttgcaccaaaatttaccgttttcacattaaaaatatttacggttggaaatgaaaatgagatggcattaggtcctaaatggaaatattaattattaccgtcttttccgtcgacttatatatacatgtcttatattaggaaattaggtaatatattcggatatttgcggtattattttctatactcgctttattaccagcttaactaaagtggacaatgaatgtttttttttttttttttttggcatcacgatgaacaatggtcaatgaatggatctatctatcatacaatgtggagaataaaaagtgaggtcaaagtttcgttaattacaaataactaatttcttaatgctgtatttcatgctcaattagtcaatttgaataaagtgcgaaaactctttcggcctcgaatatataatgtttaatacacttaaaacaaggggtagaattgtccaaagaaaagattttgacagcagaccgagcagagacggctcagagtcagaccaagttgtcaagtttttctatattacgttttgttgttgtgtaatgtgtactactaatttcttttctttatgaattcgtaaacaagagaaattaaaatacagtaatcactaatcactgtctattacgagactgaacaaattaaatgcatgtttaattgagtaaattatatttagtcaactaatatagtaattcttaaaacactgaggagtagtacttacttccttatatgtttttttaaaacataaagttaaaataaaataacacgacgtgcaatattaatgtaattaaaaaagaatggttgaagaaagcaaacaaacaaaaaaaagaacagaagaaaacggaagtttttgtttctggagagaaaaccaaaaagttcattttgtttttctctatttcgtctttcctgcgattctgaatatcactcttcttcaatctctttgtcagaatcgtagcattggcttgtgagctttgatccttctttctttttttcttcccgtttgtgaaaaaagagagactagtatttatcatcgttgtcaccgccgatctgtcgtcggcagatggcaaaaccattacttttacctccaattaataacccggattcgttggattgttggacgtctctgtttcttctatctagtgtttcaactccggcatagaaaggatctgatttggttaatctcagagccctttttgtagacacattgtaaaatttgaattggtgaggaggagttagagccgtccgattggggtttgacccgattgaagcggagaggatg

SEQ ID NO: 7614 - DNA, 3000 bp, Unknown
  misc_feature (1)..( 3000): cDNA_ID_1818292_gDNA_ID_1621154_Annot_ID_173418 3000 nt of promoter + ATG
caaactacatgtatatatttagtcaatcttgaaatttaaaaaaatgcctttgctaagaataaaaattatggttaggtgaagttctcacgtaaaactattcaatcctcacgcgattgaggagtgactgaccaaagtttatttctataggggcaatttaataactattgtaaactttcaacgtaaaaattaattactttgaagttatggggcaatatcatcaatagtaataaatataagcccttactcgtaaaatacaaaaggtttatttgttttctgaattgagagcgtgtaactactaccatcgtcgtctccgcgagttcttctctgcgtttaagccatagataacaaaccaaactaaaaaaaaaaagtttctccttttatcattccttctcttcccttgtataggtgtgatcctcttcaaggggatttctctggcgggtcatacattcgcaccgatcaaagtcggattggtctttcttaacgcaatcttgacccgattcaaaaaatttctggtatcctttttaagaaatgaaattaattgattccttgtcttccaaacgagtaaatcgactaattgattagattttgttcattagggtttgttagtgaatagataagaagataaatgggagctccgttagtgtgccacgggcattctcgtcccgtcgtcgatgtggcttatagtccggtgactccagatgggttctttctcattagcgccagcaaaggtatgatcttcgatcgatttgtatttgactatctatgatctttacttggaactgtgcctattttggattatgatttgcatagcgaatgtgctttgacgaatttgattttgctgccttttattatatatcgtctgaagtttgatttgtggctgatctaatggagaaattaggatgataagttgcatacattgttgaactctagctgaggtttctttgacttttgatatttcagattcgaatccgatgttgaggaatggagagactggtgactggattgggacttttgaaggacataagggagcagtttggagttgcagccttgataaaaatgctattcgtgctgcctcagcttctgctgatttcactgcgtatgttcttcttctttcttgttgcgttttcaagtcttttactttaccatttagtcttgcaatttcagtatcctccggtgatgggttgtttgcttaaagttataagttatggggaaactatgttcctagagaaaaatggttaagtgagaatagattaatgggatttaacactatttctttgttttcatgacacatttcaggaaaatatggaatgcattgacaggagatgaattgcactcctttgaacacaagcacattgttcgtgcatgtgccttttctgaggtaaactgtagtttcttcccaagcaaagagtgatttgatcctgttgccaagttttctggtttaaggatataatggtgggattcactaagattacttgtagcatttgagggtctataatcgttggtgtcatttgtgttactattgtggtcttaatgcataactatttatattctaggacactcaccgtttactcactggtggaatggagaaaatacttcggatattcgatttgaatcggccagacgcacctccaaaagaagtcgggaattcccctggttcaattagaactgtcgaatggcttcatagtgataatacaatcttaagctcttgcacagataccggtgacattaggtatgccaccacgtcgttccttgggtttagactcagtcctttagtattcctggtttcattgttcttttgtgtatgtcctctgtaggttatgggacataagaagtgacaagattgttcatacattagaaacaaagtccccagttactagtgctgaagtaagtcaggatgggcgatacatcactactgctgatggatctagtgttaagttttgggacgctaaaaagtaagttaaaaatatagaaatgcatcctcagttacagttttatcgtttttctttgatggttgagctttttctcctgctctcctagttttggattgctgaagagctatgacatgccttgcaatgttgaatcggcatcgttggaaccgaaacacggtaacactttcattgctggaggagaagatatgtgggtgcacaggtttgatttccagactggagaagagattggtaagtttcttttaaaaaagaatgaagttttcattttaggaacctgtgtgtatcctttaaagccaatgtggtgaatgtagggtgtaacaagggtcatcacgggccagtgcactgcgtgaggtatgcgccaggaggggagtcatacacctcaggctcagaagacggaacggtcagaatatgggtggtgggttcggtaaaccatcctgaggagagcaatctaagcggccacgtgaagcttgtggcagaggaggttgtgcgtaaagctgaaagtctccgtatcagtgagaaagccgcagaagctaaatgaaacaccatcgttagcttatgatatcacatagattcatagttgtttttgcatcattataagatgtgacaaaggggttttgccttttaaaagtctctcagaccgaataaaacgaaataatcttcaactatacttgagtgaatagtgaatctaatccaaattttgacaagaaactttacaacggtatcaaaaatatctttaaacaactgtatgtcataaatagttgcaagttttgaaagcccagttgaaactagaggggcccagaaattaagcaaacatcaaatagtcaaatacaaagaaagtgtgaaagttaaaaccctaaacccttaatttgagctctctgctctcctggttttagttttcctctatttcgtgctcaattcgcttgttctccagttccactctgtaaggatctgttacttttctgtaatcctctcaaaattcaatgcttttgcttactgggtctgatctttgcaagtgaaatgcatgacatttcgtccaaaatcagaccttgcaaaa

SEQ ID NO: 7615 - DNA, 3000 bp, Unknown
  misc_feature (1)..( 3000): cDNA_ID_1441174_gDNA_ID_1621154_Annot_ID_173417 3000 nt of promoter + ATG
tcaaaatatcaaaactttgttctatgtttgtgtcagatagtgattatgtaagagtgaaaccagtatttaagtacccgaaaccagaacggagaccagcgacccagtcttccttgtaacacaaggctcttcctctaagatctgctactatacctctgaatagcctcttcgagctatccactctttcttcctccatatccagaatccctcaaagactccagaactcgtcgcctctggtctactctttatatgacctaaaccacaaaaacaggaagctatatattatgtatgacatctagcaatgactttaaatctagcattttgctgactacatttaatacaaaataatcttcatattatatttttctaaatttgtgacgattccagtctttttccacctctcaatagaaaaagaagcttatagctgttttatcttttgttacttactagtaatgtcaattttctatgcttttatatgaataagaaaacgcaatgtgcccaactcaaatagagaaacatcacaaagcacataaaacaaagcaaaacgtaatgcaaaatttcttcttatgacaaagatctaagtctcctcgtctcctctctcataaagtgaaatttgaaattgcatatgcacccaaaaaaaaaaaaaaaaaaaaagaatccaactttttcaataaaatccattaattaatatccgtcgtatattgaatctacacctttttcatagttttgacaacgaaattagcagtaacaaatcctttcacatctcacaaaaacataatcagacaaaagaaaggattaaacaaaatcagacaaaggagttaacatgcaataactcggaaatttgaggcgtaaggaggagcaaactaccggcgacgaaagagaaaaggagaatagccggagccgagaagtaactgtgtagcgatttatagggtttaggaagatttataggccaaagacgaggcaacgttagcaaatggagagacagggcccatttatacacgtattatgttgggcctacatccacatgtcagtaatcgagtgggtgattctgacatctgtgatcttgacgctttaacactctgtctgttcttttcgtataagaaagtgacatatatatagagaggaacaattcatctaaattaaataatttattattgaaaattttaacttaatatagtttttttgtataatgttgtttcctttagtcttcattttttcttaagttatttccattttaaaaaacataccaatatgttatattctttgcttaaattgctttaacctgtatctagaaaatgtaatcttccatattgttaatttcataaataaaataaatttttttgcaagttattggaaaacgaagttaaaaattaatgctgcaccaagtttgtgaaattttaaaattacttgtagttggagtgggtgtagatgtttatgtgtagaaataggcatgcacacacaatttaatatagtcctagttacttatacaaaaaattcactgctgacgtgatcagtaatgcactcatatatgcatatatcactccacgtcaatggcacttgcccgtgcaaatgcctttattgtgccagaatcttcgaccggtcaaattgcgtgtgtgtgtatatatcgaaatatatgttatcaaaagagtttgaactttgaacccatatctaatacctgagtaaagttttagcattctattcaaagataacatgtagtacatactaaacaaactatatgtatcggttgttatcaggaataataagaattgtataatgcaatatataattaagtggtacttatgattaatacatacacatggatggtagatcgggatttgaaaaaccaattaaaatctagctttgaaaaggactcgagattctaaacgccgtaccaagaaagttcagattattatttcatgatgaatcattgagtcaaacacttaagcatcatatttttaatttcatagtttatacgttatccacatatataatattaattccgtcgacgacagtatttatatcagaattaggacaaactacatgtatatatttagtcaatcttgaaatttaaaaaaatgcctttgctaagaataaaaattatggttaggtgaagttctcacgtaaaactattcaatcctcacgcgattgaggagtgactgaccaaagtttatttctataggggcaatttaataactattgtaaactttcaacgtaaaaattaattactttgaagttatggggcaatatcatcaatagtaataaatataagcccttactcgtaaaatacaaaaggtttatttgttttctgaattgagagcgtgtaactactaccatcgtcgtctccgcgagttcttctctgcgtttaagccatagataacaaaccaaactaaaaaaaaaaagtttctccttttatcattccttctcttcccttgtataggtgtgatcctcttcaaggggatttctctggcgggtcatacattcgcaccgatcaaagtcggattggtctttcttaacgcaatcttgacccgattcaaaaaatttctggtatcctttttaagaaatgaaattaattgattccttgtcttccaaacgagtaaatcgactaattgattagattttgttcattagggtttgttagtgaatagataagaagataaatgggagctccgttagtgtgccacgggcattctcgtcccgtcgtcgatgtggcttatagtccggtgactccagatgggttctttctcattagcgccagcaaaggtatgatcttcgatcgatttgtatttgactatctatgatctttacttggaactgtgcctattttggattatgatttgcatagcgaatgtgctttgacgaatttgattttgctgccttttattatatatcgtctgaagtttgatttgtggctgatctaatggagaaattaggatgataagttgcatacattgttgaactctagctgaggtttctttgacttttgatatttcagattcgaatccg

SEQ ID NO: 7616 - DNA, 3000 bp, Unknown
  misc_feature (1)..( 3000): cDNA_ID_1818304_gDNA_ID_1621154_Annot_ID_173412 3000 nt of promoter + ATG
aactacagaactctattgcctgcactgagatcgttgcagaaggcgatcaccagagcccatcaggatctggcagatatgtgttcttccaatgagtacacgcttcgctacttgtgttctgttccaaacaatcattgattatgttttctgcattatgtatcaccggaaattttcatcttcctttttcggttaaacaaattttgagattttgatatatgagtttctaacatctgaatacaaaatggagcaaagaaattaaacagtttgcaggcaaccataaaaagtacgaagaatgtgaataatttgatttaagcagagatttttgaataggcaaaagatgatcctagctatgaagacttcactaacagaagctaacatacaaacaatattaaatttatgcctagaacaagaactgatgtcgctacaagaacattacattatgataaaaatcaagagacatcaaaacttttggaagaattcctcatagactctggcactcagaatcttcatggcgtccatctgggatacatgggggcatggaactccagacggggtatgtgagccgggtaattgtcggtgcttgcacggctctccatggacgcaccaagaaacagattatgcaccaacgcatcaaagttgagatcaatcatgggatgacgatatggaagctgatggagagaagtcgccaacaatctctgttctgcatcccatctctgacgagcgttgagcatttcaatgtactccgcctctctctccaactgctcccacatgtgttgctcccaagggtctaactttggcggtgtaaaaccaggatgctcagttttcaagtgatttttcagctgcgcataggtccctgagaaatcgcacttgtcaacagtacaacacctcggtctagcattcatgaatctccgagcacaagtcgacttcatagtcccctgaacctctcctctgcagtagggacaatgtagagtcttgccactacaacggcttgagctgttgcttctgcggtactgcttgaaacaattggagtgacgagcgcttgtatcacacatgtaagcacgacatcctttggagaaagaagagcattgcaagaggacagcattgtgaggaggctccatacaaatcacacacctcacatcctcccattcactaacactctctaactcaacaggtgacgacgacgcctcgacttctttttgtttcttgttcctgcaagagcgaagcgggtatggcgatactctatttctgttgctagaaaccggcattttccctctttccttgtgcatcccacacactgaaatcaatagaaacgagtgttaattcacacaacaaaataacacagatgaatatgaaagccaaagaatccataatccattacatccgaatagatacaacccaaatgttaaacaaagatcaaggaaacagaacaaggacgagctcaaatcagtctatattgtacggtattcgagcatgaacataatcccactgaaaactacattctcagcagatgataatcaaacaagaaagagacaatttttttttaatttattgataaaataaattgaaactattaacttatcggaaacagttctaggggttctcaatcatcggatcaacgcataaacattcgattcatcaggagatttcaaacgacgaaacagatcaattcgattgcaattcgataattatcgccaaagaaaagaaaaacaaattcaaacgcgaccagaaatttctgatcacgaccacaaaaaccgcaaaacgacagaacatcatcggagggatcgagagagacccaaggagtaaatcaaatcacagccataagaagagaaaaagaaaacggaagctattaaatacctctggccggagaaaattaaaagaggcttttctttctttctttgagagagagagaaaagtaaagagagactcctcgtaaagagtttcgtatgaaacggtgaagatggatgcgcgtgcgtgaatgtgagattgtccgggtggtcatggttgggtttttataggcgtcgagagcacaagatatgtcttttcaaacatgaccattataccccttcttacatcttttttgtaataagtccacccctctctctactttcctttcccaatttaaaccacatttgtctttttgactttcttttgctctttcctttatttgtttttccttttaaacggcttccaaagttttttttgccaacacttatacgtgtccttggcagaaaaatacaaataactggatatcattctttttttttccttcaatagagatgattactcatattttgtttctctgtaaaaaccaaataaattgtaatgttaacttttggctttttcaggtttatattctttctaaatttttaacaaaattttcaattttcttatgcccaaagatatgcttctctaatctctgtattctaagaaaataaaagtttatcttccttaataagtggactgaaagaaagaaaatatgtattttttttttagctgtcatatctatgtatatacatattgtatttttcttctttttgatgcatgtatatacatattatctattccatttacgtgcaattacttttctagcaaataaaagaggtaaaaacacataccacaatcctaatcccaaatcttgccagttgccactattatgcagtcaagtccaaggtattagaggccgtgtcaatatcaacgacagccttccaactataatatttcaatctttttcttagtaaaacaagtataattattgaggaaataaaatatgaagaagatattggaacagattacacgagcccaactattgggttaagtcggcccaacaaataaaaaaaagcgtttcggttcacccaatttagacccgacccgtcgtagcttttagttgttgtgtgaactgtcaagttgttgcggctagaagtagaagaagaagaaccctaactaaacccaacgccggcctctctttctctctctccccgcttctctcgtcgatcgctgaccatg

SEQ ID NO: 7617 - DNA, 3000 bp, Unknown
  misc_feature (1)..( 3000): cDNA_ID_3050909_gDNA_ID_1621154_Annot_ID_173410 3000 nt of promoter + ATG
aatattataacttgaagacagaagatattagtacaattaaagacagctattctacaaatggtaatgtgatgttatgcttactccggacaagacacggtgtcgtagccgtttaatgcggcggtgaaacggccctccccctcggcgggtccagtaagtatataatttgagatacgaatattaatattaaatcaaaacatcacatcagagccgtctaattccaatcaaagcagattgatttatcttttcttggtcacgatccgccgccttctctgccagattcgaaaccctagaggattagtcagtgagccatcggaagggacttgaacgttgtttgatttttctcaaaatgttttatactgaaatcacttaatcagataattcgccaagaaggaagaagaatcaccaaatcggaaagtttgattttgtacagaaatgggaaattgtccgaaaacaaagaaagacagataatttacaaataaccagagtctgttgatcaaatcgaaaaatcaaatttaaagttttttataacaaagaacacacacatacaaaaaagaagaagaagaaagatgaaagacagtgtatactattttttcctcatgaatattattaatcctgacgcctacctcgatctacgtttcggcggccttttcctcggattaactttcttccccggcggattctttccaaacgcagagcaacaaccgcatgacgaaattctcggagacggcgggtccactgccggagaaactcttccggttgttctatgatgtcgttgagctcctccaccgttagatcgactcctctctattcctcctggtgctcctccaccggttttaatcggtctaagcttgtctttctcatcgattggtttgacctgttcagagctttccgacataggcttaggttgttcgtcgcgttgactttcgtctttctgctcgttgtttcccgatttgttgagttcggcgatgagacgatcgtcaaacactataccggaagatccctgacggcggaaagagattgttgatctttgaagaccctccatggatctatctctctctctgttgatgagctaaaagaagggcaaaactaggaaaagtgagtttaggccttataagtgattaatcaatcattgtgtttcagacttggtttccttttatttctgtcctcattattttttcatggggtcggtccactatttattgtttatttttatgatgatgcttccagtttctatttatttctttgtaacaacaatcatcggaaattaatgtaagcggattaacgatatcattcaaccggattattcaaacattaattgtaataaaaaaaaaaaagtaaaaaccattactgttattgatgattaaggcagagaattacatgttaattttttgtttgttttcacatctttaatcggattctcaacaccacataggcacataagtcctcttatatccatatttgttattttattccaaacttttggtttctttaaactcaaaaggggtaagactttttgtaattactattgttttatcagcaaattgcaaggattagataatagattagaaatgaacaggagaattgacttataggacacactaatttaatatttccttcttccccatttcggtaaaccaaatagactatttccttcttccccatttcggtaaaccaaatctattaggtgaggatgttattaaaatgccaaatctctctttataaaaacttgaaaggaaaaacaatacaaagtggtgaaagtgagtcaaagtaattcggttaccaatttgtattcaaagtcaacatcattgtactataatatggtataacttttgttcaataattcaccttcttatatcgtctgtttcttctcaggatcaccactaactaaaacatacgcatgtggtgggtttagcaaaactgtattctttggattaaagtaatgtgcataacacaaattaataaccccgtctgagttggcacaactcaccaatgttgaagattgagataaagaatttgggcccaatcgccgaatagaagtctatattcattactctcaggcccatccataaatacaattgtcaaaaagaaaataaaaaattggtggtccagctgggaacgagccagcaggccatggtgaatctgagtggcgtcgagctgtgatccgtccactgctgagagcgggaggtgatcgctgctctgtgaaaccagcctcacgcattgccctccactgcaagaaccgcctgagccaagccttcgcttaacacacacggatcactctcagcttggactgggcagcccggaacaatgccacaacagatccgacccgtgggccgagccagtgttccaccaacttattgtccccacacgggtcacaagcccacgttactgagctcgacgtacaagtattgatttaatttcatatataaagtaaaacattttgaggtatgtaaccgatgtgggacaaaatacaagtttgggcttcccagatcccacatttggtggaacacatatataaagagtctcttcgttgattagcttcccagatcccacatttcaggtaaaaacatcgtctgggctctttgccattttagcgaatgtggaaaggtgtggtttttttttgctctgctatggattttttttttcaaatcagggtttctctgttgaagtcatatcaggagcttgacatttgtttgtttgggaattagaagctagatacgtatattatatagcatcgtacatatcaaattttggtgtgtgttctaattgaatctgtacttgtttgtgtgttagtgggaggagctcttctcagaccttaagactattgctttagtggaatgcttctcgtaaatgtataagtgaggaaagaaactccattcgtatctatctactaccctaagccgtttatgcattttctgtccatcagaagatcaacacctgtttctggaggattccattgatttaagggattagatggatgatggaccatgtgggattcagtag

SEQ ID NO: 7618 - DNA, 3000 bp, Unknown
  misc_feature (1)..( 3000): cDNA_ID_1010722_gDNA_ID_1621154_Annot_ID_173406 3000 nt of promoter + ATG
tgaaaccaaactaacagcatttttggggtatataagtaacagagaggttgttgtgcaggtcggtttatatcgtgtacacaatgctaggggatgttagcatcttccttgttggcaaagacgagtatgatgaacttgcttgtaagcctaacctactatttctaaaataactgatctctgtttcattcagagtttgattctttgttgtgttttttctcgtggtgcagtggcagaaaccatctatatcataacagcggctgtgaaagacgtatgtggaaagccgcctacagagcgagtgtttttggataaatatggaaggatttgcttgtgccttgatgaaatcgtttggaacggacttctggagaacaccgacaaagacaggatcaagcgactcatcagattgaaacctccttctgaagtttgatatgctccaaccaaccacacattcttcttctactcattttaagagctttctcattctccaccgattgttgtttgttgaatcacttctctatatcacatattcaactatcaactactgctgttgttcgatcagtccatcttgtagtgttgttttttaaatcttcagtttttagtgttacataacaaagaacaaatttctatccaaaggcttttccctgcggtctaactttggtgagttgttcaaagacctcaaaaattgattcgtgttcttatggcagtatgccagtatatcaactcaatatccagagactttccttttaccgtggaaaagaagaccaggtaatcccgccatggttgcttgctggtagagattaagatgaagatgaaggttgaactctctcgaacaaatagttatacaatagaagatagaatgtgtcttgaaattttgaagtggaacctcctgcatagcttgtgtgtctacaaaataagcactttccatttgtttgttaaacgcactggagctgtctgcgtctggactatgttaatgttagttgaaacaaaactatttaaatcaaatttgcaaatgagggaaagaaggttaaaaagctttatcaaatcttgagtttgatcatcggcccttcgacaggagaaaaggctagctatagatacaaaagtaatactaagcataaactaaagagtaaatttaaaacgtgctggtgggtgtatagtcgaagtaagtgaccaatctacactcactgaaaattttaatatcaaaatttaaagctaattcagcatattataaaattatggagtgcgaaactataaaatgaaatcataaaagatcatgcgagattaggtggaacttagcaatcatcctaaattacaaaaactcgatcaatgtgagttgatgtatactgtcatacgactaatagattataaaaagaaaaaagacctaaagcatttttattggaagtctcgtaacaatgtaaaaaaataatcatacaactaatttattagaattccataaaagagtttttagtttgagatatccataaaaaaaattatcttcttaattaaaacactgatatatatatgtactctttttaagtgttttctatttattatttttacaaattataaagtaaaatgatatgaatatcagttaaagagtttatatgtttttttttttggtttcattttaaatcataatataaattatctatttattaacctccattatgcataactctaaagatatattagaattattttaattagtattaattaaggtaactacaaaatatttgatatgtttagaacaaattaatacaatgaatatttttaagatgtaatttgatgaaaattaataaaatattaatataatattaatgaaaattttaagattaaataatattaaaatagtagtatcttaattaaggagatactatggatatcacaccaataggcatgctctaacatatttttttccttttcggaggattctttttatatatatatataaacaaataattaaatagcatcccaatatatacataaacaaagtttaaatcgttttagctatgcctgatttttttataactttttaagaattagataaataataaagcaacatgtctaaatactattctaaaaatatatcaattgttaattgggacagcccaatttgcactggacacggcaacaaatgaccaaattctatacacaaaaacaacaaacgagtaacgtttaaaaatgctgacgtgtcccaatatgatcttacctttgatatcgtttttaaggaaaagttgtgattgtctgagtcagcttgtatgagttcctacgtgttgaactaatcctgacactacctgagggaggtaatcacaacatttttcatatataaccgccccaatttcactgatttcaccttttccttttaccaatcacatcatcccaattatttacgtacttagcttgactagttgtcgttcattacaaccatcttaggtttcttataatcattcctgttacgtagtaaagaactattttacgtaatagataagattagatatcagttgaaattattgactatatagacatcctaattttatttccattgttaaatttgttaatatatctaactatcaaaacctaaatcgacgtgtcacactcaaacttataaagactaaacctattacaagaaataagatcttataggccgaatttgtttggtacgttgatgatccaaatataaataatagtttttctttttctttttaattatgaaaggttaaaaattcataaaaaaaattacccatatttgcttaagacgctagcttttctataaatacagcatagccatgtgtaattgatcatcagataagttccgtggttatcccattaaccttctttctacacaacacaaaactatatataaagatcatacatgtaataacgtcctgcaactattacaatcattctcgcttgaattaacgtggacgtcattgtttttggattgttaatcaaaggcggcgttacttttttttaatataattgtttctttaggatctttgtctctggaaa

SEQ ID NO: 7619 - DNA, 3000 bp, Unknown
  misc_feature (1)..( 3000): cDNA_ID_2108547_gDNA_ID_1621154_Annot_ID_173404 3000 nt of promoter + ATG
gactctgaagtcttgtttcttcattattctttacctcttccacttcagatgttttctcttttgcatcctcaggtttgactaccagagaaggggaatatctcaagaactcacccgacatcaaaacttcatcaggttttaaattactgtgacgagacccttgagcgtttgactttctatagccatcaattttcagactaaacaaagactcatttgatatttcgctccaatccacatccccattcttactaaacaccgatgcagggattctcccgggatcgtaattcgctataccattattcatcaagtgaactggtcgtaacctagaaggcggagatggagctggttgcatcctgagatgagtcaaaccagatatttcagagccttgagaagaagaagaaggctgcatcctgacatgagtcacacctgatatgtcagagcctttagaagaagaagcatttgaaagttcccaattctgctgactcgtatcctcagaagatgctttggactcttttgtacttctctctacggcatcatcccatgaaacagaggaagacattgaagaaaaagacagagatgatgatgttaggaagatttccctcgcaggtcttgtaatcattctgttaccactcatactcacatataaagctcttatcagttcacttttccggttgttaatctttcaaaacatttcgcagtgattcacggattcgattccatggctgataaactatgaaagcaattaatttttcttacatgaacagatgatgttctagtcccaccgatactacaacttcggtgaaagctggatccttgaagccattagcacaagcaatatccactcttttgcatccaagcacagtgccaagataatttggacaagactaatcaaagatgaatccaatattgcataattcttggtgtcttgtgaattcgacctattggagacggaaacatgtcattttcattcggttcttaaggaactagaaaatgaaaaacaaaacaatttatggagaagttttgaaagtgaacacaaaacaaacatctttgaatttagtaaatttgaacgaatggccgttgatcagagttgaatacagaagaaggaaacggtttcttgtggagaaatttaaggtggcatttgctggcatttgatcacttctatttcggggttgactgttcttcgcgccgttgctgtaaaacctaacttctttacattcattgtggacatcagtatggcccaataaaggcccattttgaaataatcgggctatttggtccacacatgaggacacgtgcatacgtaagagagtaccagaaaaggagattcataaacccgttaaattcgcggttaggaaacttttgccttttggttgaaacatcgttggcctcttgcaagttaattttcttattctatcgactatttcggacattcaatcacgtgattttcgtgtttgaaaagatcaacaattttttttttcgttaaaatatctggcatttaaataaacactatacgtaaattttagcagtatgaaattaactaggctgatggattcgaaaaataatacaataaaaccaaaaagaaaagaaaaacatgtattccaaattacaggagtactatcatcaatcattcaatctttaagtagctacaaaagtctacaacaaaaataaagagaaacaaaataataatttaaaggctagataattgaaaggaatagtgatatgcaagttccaaacacaagtatgaacaagagttaatggaagagactataattatgaaatatcggtcatggactcagggaagtggggaccctatgataacaagccaccaccaaattagcacctcaaaaacaaaaatgtataaaccatattatattgtatattaaatataagcatacattaggttaaagatgtttgctcaaaaattaaaagcaaatagatatgagattgacacctaaacagccttaatctggacccaatctgacagttagggcttaggctatgggtacgacaatcaactagatatgtggacaaaacattctactaattacacaatatacatgtacatggaccaccttttaatttttattttttttgtccttttactttttaacttgtacatgcatgttgtcaatgtctaattatataatcacttttcccctctatgtatgttgttttatacattgcatgtgttatatttgatcgcgagtgaacaaccacttttctcagcgcttattacgtgttttctttttgcggcaaatcattttacgattgattaatcctattcaaattcactacttaaacttactcccactgaacaaagtcccaactaaagcttataaattgtataatgtttacattaagtcttggggattggattgacaatgatgattttggccgatggttagtgctggttgttaaccaacatgatagtataatataaaatgaaacattaatatggactgatgttcggtcttaattaccactccactcttagatataaaattttgcagttaatggtgaacgcaaatttgcttatacgtacgtacgaagctgtatacaaatataagtaagcatcaaattaaacagagagagagaggcgtagtacttacgtagctatatgatgtggacgattgattaggatgtacgtatgctaaaaacaatatacacggccatgtgatacttgtaccacttgcgcatctctacatatatacgatccaacctttggaatttatattgtttacctttataataaccatccttcacattagcaatcaatctacaccaacaactacaactaaattctatctctctctctataataaactagcgagcgaggacgtcaaatgtaataagagtaagaacaagtacaccttttcatccaccaaaatttaacctatgtatataaatatacaacattaccatttaccaaacatccatcttacatatattactcatcatcaagttcctactttctctctgacaaacatcacagagtaagtaaga

SEQ ID NO: 7620 - DNA, 3000 bp, Unknown
  misc_feature (1)..( 3000): cDNA_ID_3050916_gDNA_ID_1621154_Annot_ID_173403 3000 nt of promoter + ATG
cattgtggacgaagctgaaatatcggttttgccctcggaagtttctccggtgttgttgttgttgaggggaaagttggttttggcgttgcggccgctcattaaaacggcggcctcgtcgtatgctcttgctgcctcctctgcggtctcgaacgtccctagccaaatcctccgtttcctttttattttgaaagatcatcacgcatgtcaaaattaataattaagcatggtgaatatatatatatatatatatatagtagaatttttaagcaataacttattgatatttacgtatctagatgttaaaatgattttatgtgttagctaagaagaggaaaacaacaaaggaagataaaccagaaatgagttagctacgatcatgtatatatatgtatgtgtggttgtgtactttaatggatcagagagaggaaataaatgaacaacgcagagaaaaaggaaagaaagaagaaaggtacaagagaggatgacgaatctcagcgacccaagaaccccaatggcgttgcctgacacctctgaacttcttcgtctgtaccattcttacttactctgtgatgtttgtcagagagaaagtaggaacttgatgatgagtaatatatgtaagatggatgtttggtaaatggtaatgttgtatatttatatacataggttaaattttggtggatgaaaaggtgtacttgttcttactcttattacatttgacgtcctcgctcgctagtttattatagagagagagatagaatttagttgtagttgttggtgtagattgattgctaatgtgaaggatggttattataaaggtaaacaatataaattccaaaggttggatcgtatatatgtagagatgcgcaagtggtacaagtatcacatggccgtgtatattgtttttagcatacgtacatcctaatcaatcgtccacatcatatagctacgtaagtactacgcctctctctctctgtttaatttgatgcttacttatatttgtatacagcttcgtacgtacgtataagcaaatttgcgttcaccattaactgcaaaattttatatctaagagtggagtggtaattaagaccgaacatcagtccatattaatgtttcattttatattatactatcatgttggttaacaaccagcactaaccatcggccaaaatcatcattgtcaatccaatccccaagacttaatgtaaacattatacaatttataagctttagttgggactttgttcagtgggagtaagtttaagtagtgaatttgaataggattaatcaatcgtaaaatgatttgccgcaaaaagaaaacacgtaataagcgctgagaaaagtggttgttcactcgcgatcaaatataacacatgcaatgtataaaacaacatacatagaggggaaaagtgattatataattagacattgacaacatgcatgtacaagttaaaaagtaaaaggacaaaaaaaataaaaattaaaaggtggtccatgtacatgtatattgtgtaattagtagaatgttttgtccacatatctagttgattgtcgtacccatagcctaagccctaactgtcagattgggtccagattaaggctgtttaggtgtcaatctcatatctatttgcttttaatttttgagcaaacatctttaacctaatgtatgcttatatttaatatacaatataatatggtttatacatttttgtttttgaggtgctaatttggtggtggcttgttatcatagggtccccacttccctgagtccatgaccgatatttcataattatagtctcttccattaactcttgttcatacttgtgtttggaacttgcatatcactattcctttcaattatctagcctttaaattattattttgtttctctttatttttgttgtagacttttgtagctacttaaagattgaatgattgatgatagtactcctgtaatttggaatacatgtttttcttttctttttggttttattgtattatttttcgaatccatcagcctagttaatttcatactgctaaaatttacgtatagtgtttatttaaatgccagatattttaacgaaaaaaaaaattgttgatcttttcaaacacgaaaatcacgtgattgaatgtccgaaatagtcgatagaataagaaaattaacttgcaagaggccaacgatgtttcaaccaaaaggcaaaagtttcctaaccgcgaatttaacgggtttatgaatctccttttctggtactctcttacgtatgcacgtgtcctcatgtgtggaccaaatagcccgattatttcaaaatgggcctttattgggccatactgatgtccacaatgaatgtaaagaagttaggttttacagcaacggcgcgaagaacagtcaaccccgaaatagaagtgatcaaatgccagcaaatgccaccttaaatttctccacaagaaaccgtttccttcttctgtattcaactctgatcaacggccattcgttcaaatttactaaattcaaagatgtttgttttgtgttcactttcaaaacttctccataaattgttttgtttttcattttctagttccttaagaaccgaatgaaaatgacatgtttccgtctccaataggtcgaattcacaagacaccaagaattatgcaatattggattcatctttgattagtcttgtccaaattatcttggcactgtgcttggatgcaaaagagtggatattgcttgtgctaatggcttcaaggatccagctttcaccgaagttgtagtatcggtgggactagaacatcatctgttcatgtaagaaaaattaattgctttcatagtttatcagccatggaatcgaatccgtgaatcactgcgaaatgttttgaaagattaacaaccggaaaagtgaactgataagagctttatatgtgagtatgagtggtaacagaatgattacaagacctgcgagggaaatcttcctaacatcatcatctctgtctttttcttcaatg

SEQ ID NO: 7621 - DNA, 3000 bp, Unknown
  misc_feature (1)..( 3000): cDNA_ID_1714522_gDNA_ID_1621154_Annot_ID_173398 3000 nt of promoter + ATG
tgatgcagatgctgaagcagataagggaaaagaatccaaagaatatgatgagaagacgacagaagctgaggcgaataaggaaaatgacactcaagaatctgatgagaagaagacagaagctgcagcaaataaggagaacgaaacccaagagtctgatgtcaagaagaccgaagctgcagtagcagaggagaagagtaacgacatgaaggcagaagacacaaacagaagcttggaggcgaatcaagttcaacagcagcagggagctgcagcttccgtgagctgttaaaacctatatcgttctgtacagagcacagagcgtgaagagtttgttgtgatttcaggtgtagcattaacattatgagtggttgttgtatgtgttggtagaactaatgtctctctatgttgtagttcagtccattatcatttgacgtttgtatctttgtacctttgtactttgttgtattattaatattaggcatttagactgtcctttgtctcatacttagacgagtgatgcaaagtgaatgaatcctaacacccaagtcccaaagcagaagattgcatggtaaagattaaaaagttaaaaacaaagtgagctttttgattacaaaagagtagatcttacaaagtagaacattacataataagataaaagaggtaaaaacacagagagctcgttgattacgaaagagtagatcttagggagcgtatgatatcagtgagggagacgactccttgaagcagaccctgttgatccatcacccatactctgtgcactcctctggtcaccactttctctatagcttcctccatagtcgactccacaccgcaactcaccacctccctctccttccccgaagttttctcggtgaactccagagctgtgagtggcagccacgtttgcaactccggtaggcgacatcctttcaaatcagttgctgaaaacgtacctatcacttttctatgtctcccctgcaatctcaaaaaacacaaaatgagtaaacattatatattaaccaaagtatatatgtaaaatgaagcctacattgactagctgcagatgatcctcttgtgctatatcaggtgcatgaacgatggggacagcgttgagcagagcacccttcataacgttgatggcattggaaacagtggttctctctgtgatggcgtaaacggaatcattaacagctccgagatcagagatggagcgtgagagaacagttttgaggtcatcaaagtgatggtctttaaggaaacgcaagagatccatctgagtaagcatcttgtaagcagaggcagactcaatcaactcaactcctgcaatagtgttattgctctctatgctgctctccactggcactaaagctcgatggatccctttgctaaacacttccatgcactctaacacgctggtattaggattcagtgtccagagactgagtccttcgaggcaatgaccgatgatggatgacacctgtgaactcatcttgcgatcaagatcagagagattggaatcttcaccggcgatatgagcaagtatgtcaagcatcgtgagaatcccgatatagtgttttcttacaactccagtttgtttgtctgattccatgatcatggaaccaccggctccgatccagtggcctggaggtgcagccactgggagggctgagatggagttagccaccaatgtgttcattgcgtgggaaagtgtagccgtgtatggtacctcgacgagccgtcggtttctgaccgttagatctttggccgtgacattgatcagacggctgtgatcttctttgctcttctcttcttgcatagtgttctactactgttgtcgtagcttgaacttgttgctttgagaacctttttaagtgtcgatcttggctcgaaatttgatgtgaatggatcaggacgccgtgtgatgatgatctagaagcacgtggcaatcgatacttgctaatgacatgcaacacgtggcatttttcattgggccttagctaacggcccagtagtatgtttaatgacccaaataacccttcgtctctgctttgtttttatttcttaaaatcagtatctccctcgcgtccgcaaatgaaacgacctgagaatccaagaacgtaggaaagaaatcagtgctgaagaagaaacacgaagatgacgagaatggaagttgcgcgactgtgagtatctttctttcgtctttcattttcttcgctgcattactctgcctcaatgagcttgatcgttcgagatttggtcgacttctgtttggagattctgtgtgttctatgattcgatatcttggatttagagttttcttttccatttattataaggagaacttcggattaatccttcctcagttacgcttgattagtagttcggtttctttctgagattgcggatgtgaattgatgcaaaacattacctctttttgatgattttcataatggatagggatgcattttaggatttgagtgtgcaatgagattacaagagttggttcttgtgaaaatcagcttagttttcttatggttaattgggtttgtcttcctgcaacgtagtgaagagaatggatttgaagaaccaaacaatggggaagaactttcctgggatgatctggagagagaagctgctagtaatatatcatctaaaagatctcatgctgagagatctcaccaacacgaatcttttacaaaaggtatctgcaaaaagattatttcttaaagtaatgttttcgagttattgtagatggtgaaacttttgcttaatctatggcaatgttatctgttttgtcatcttgatgatgtgagtgatgttacaaagcataatatctgtgattgatcaggtgacgaactttctggagacttgtacgaactgtggaggcaagaacagaacagcattgcggcaaggctagacaaagagctaaaatccaggtgggaactcgatgaactgattgaagaacagctgagcagataccagtcccattacgacaattccatg

SEQ ID NO: 7622 - DNA, 3000 bp, Unknown; identical to SEQ ID NO: 7612
  misc_feature (1)..( 3000): cDNA_ID_2172472_gDNA_ID_1621154_Annot_ID_173396 3000 nt of promoter + ATG

SEQ ID NO: 7623 - DNA, 3000 bp, Unknown; identical to SEQ ID NO: 7610
  misc_feature (1)..( 3000): cDNA_ID_3050931_gDNA_ID_1621154_Annot_ID_173394 3000 nt of promoter + ATG

SEQ ID NO: 7624 - DNA, 3000 bp, Unknown; identical to SEQ ID NO: 7609
  misc_feature (1)..( 3000): cDNA_ID_3050935_gDNA_ID_1621154_Annot_ID_173391 3000 nt of promoter + ATG

SEQ ID NO: 7625 - DNA, 3000 bp, Unknown; identical to SEQ ID NO: 7608
  misc_feature (1)..( 3000): cDNA_ID_1818332_gDNA_ID_1621154_Annot_ID_173388 3000 nt of promoter + ATG

SEQ ID NO: 7626 - DNA, 3000 bp, Unknown; identical to SEQ ID NO: 7603
  misc_feature (1)..( 3000): cDNA_ID_1818359_gDNA_ID_1621154_Annot_ID_173377 3000 nt of promoter + ATG

SEQ ID NO: 7627 - DNA, 3000 bp, Unknown; identical to SEQ ID NO: 7602
  misc_feature (1)..( 3000): cDNA_ID_2172437_gDNA_ID_1621154_Annot_ID_173376 3000 nt of promoter + ATG

SEQ ID NO: 7628 - DNA, 3000 bp, Unknown; identical to SEQ ID NO: 7601
  misc_feature (1)..( 3000): cDNA_ID_1818367_gDNA_ID_1621154_Annot_ID_173375 3000 nt of promoter + ATG

SEQ ID NO: 7629 - DNA, 3000 bp, Unknown
  misc_feature (1)..( 3000): cDNA_ID_2996323_gDNA_ID_1621154_Annot_ID_56968 3000 nt of promoter + ATG
agtgatggtctttaaggaaacgcaagagatccatctgagtaagcatcttgtaagcagaggcagactcaatcaactcaactcctgcaatagtgttattgctctctatgctgctctccactggcactaaagctcgatggatccctttgctaaacacttccatgcactctaacacgctggtattaggattcagtgtccagagactgagtccttcgaggcaatgaccgatgatggatgacacctgtgaactcatcttgcgatcaagatcagagagattggaatcttcaccggcgatatgagcaagtatgtcaagcatcgtgagaatcccgatatagtgttttcttacaactccagtttgtttgtctgattccatgatcatggaaccaccggctccgatccagtggcctggaggtgcagccactgggagggctgagatggagttagccaccaatgtgttcattgcgtgggaaagtgtagccgtgtatggtacctcgacgagccgtcggtttctgaccgttagatctttggccgtgacattgatcagacggctgtgatcttctttgctcttctcttcttgcatagtgttctactactgttgtcgtagcttgaacttgttgctttgagaacctttttaagtgtcgatcttggctcgaaatttgatgtgaatggatcaggacgccgtgtgatgatgatctagaagcacgtggcaatcgatacttgctaatgacatgcaacacgtggcatttttcattgggccttagctaacggcccagtagtatgtttaatgacccaaataacccttcgtctctgctttgtttttatttcttaaaatcagtatctccctcgcgtccgcaaatgaaacgacctgagaatccaagaacgtaggaaagaaatcagtgctgaagaagaaacacgaagatgacgagaatggaagttgcgcgactgtgagtatctttctttcgtctttcattttcttcgctgcattactctgcctcaatgagcttgatcgttcgagatttggtcgacttctgtttggagattctgtgtgttctatgattcgatatcttggatttagagttttcttttccatttattataaggagaacttcggattaatccttcctcagttacgcttgattagtagttcggtttctttctgagattgcggatgtgaattgatgcaaaacattacctctttttgatgattttcataatggatagggatgcattttaggatttgagtgtgcaatgagattacaagagttggttcttgtgaaaatcagcttagttttcttatggttaattgggtttgtcttcctgcaacgtagtgaagagaatggatttgaagaaccaaacaatggggaagaactttcctgggatgatctggagagagaagctgctagtaatatatcatctaaaagatctcatgctgagagatctcaccaacacgaatcttttacaaaaggtatctgcaaaaagattatttcttaaagtaatgttttcgagttattgtagatggtgaaacttttgcttaatctatggcaatgttatctgttttgtcatcttgatgatgtgagtgatgttacaaagcataatatctgtgattgatcaggtgacgaactttctggagacttgtacgaactgtggaggcaagaacagaacagcattgcggcaaggctagacaaagagctaaaatccaggtgggaactcgatgaactgattgaagaacagctgagcagataccagtcccattacgacaattccatggtttcaactttcttaaaggatgtctctaacctcgtcttacccacgtggataccacctcatgagctagctgctgtggcctggcttggagactggcgtcccacctccattcttgaccttgtccgcattctggcagctcaaaacccctccttctctctgtctgagtcgagtttacgcgtgctctctcagcttttacgtgagatacgcatcgaagaggccgttattgatgaggaatatgcagaaattcaggccaccggtgtcttgtacctccctttttccccgctctgcaatactcggttgcatgaagaagctctgcgttctgtgcaggagctgtttgggaacatacataaagtcatctcaaaggcacaacgactcaggtttgctttcctccccatcataaataaaagagaattgttgagaatgaacagaaacaaatagctgacaccagatagtgtgtgtggttaatgatgtcttagttttgttgagtgaagtgaaagctttgatcagcattatgagagaaagttgttatgattggcaggtataaagtgttggagctggtgatgaagaagctgctgaatcaaacggatacagccgagtttgtggtcgcatttgcagggattcaagacgccatacaccagtttggagagcagaagaagctaagaaagatttacccagcagttccttcacctctgaagggatcaggatcatctagttgagagctttgtagaagcaaagcaagtcccagtttcatagtaaaactaaatgctgtgatgtgggatctgcctgcttggaactaatgcctcttcatcaacccatacatgtttaggatgtacatgtttagctatcaccgtcctctggattcattgctattgtacgtacgttgtaagtcataacaaagatattgacaatgataaaaccaattcttgtatacaagtttttcaggctcttcttaacacttaacatgcaaatttgggtcatcatcagttgtatatgaaagaatatgtagagtttcatatatttccaaaaacgttagagaactattaacatgtgacccattgggcctgttttacacctttaggtccatttaagttgacgtgctccaactcgtaacctccgattaatgccacatgttctctcccgcctgaatcatgtcaatctcccacaaaagatctttgataaaaagaattgagccctaattccttgatgtttgttgaatcgcacagcagataaaaaaaaatg

SEQ ID NO: 7630 - DNA, 3000 bp, Unknown
  misc_feature (1)..( 3000): cDNA_ID_1008152_gDNA_ID_1621154_Annot_ID_56972 3000 nt of promoter + ATG
cgaaaatcacgtgattgaatgtccgaaatagtcgatagaataagaaaattaacttgcaagaggccaacgatgtttcaaccaaaaggcaaaagtttcctaaccgcgaatttaacgggtttatgaatctccttttctggtactctcttacgtatgcacgtgtcctcatgtgtggaccaaatagcccgattatttcaaaatgggcctttattgggccatactgatgtccacaatgaatgtaaagaagttaggttttacagcaacggcgcgaagaacagtcaaccccgaaatagaagtgatcaaatgccagcaaatgccaccttaaatttctccacaagaaaccgtttccttcttctgtattcaactctgatcaacggccattcgttcaaatttactaaattcaaagatgtttgttttgtgttcactttcaaaacttctccataaattgttttgtttttcattttctagttccttaagaaccgaatgaaaatgacatgtttccgtctccaataggtcgaattcacaagacaccaagaattatgcaatattggattcatctttgattagtcttgtccaaattatcttggcactgtgcttggatgcaaaagagtggatattgcttgtgctaatggcttcaaggatccagctttcaccgaagttgtagtatcggtgggactagaacatcatctgttcatgtaagaaaaattaattgctttcatagtttatcagccatggaatcgaatccgtgaatcactgcgaaatgttttgaaagattaacaaccggaaaagtgaactgataagagctttatatgtgagtatgagtggtaacagaatgattacaagacctgcgagggaaatcttcctaacatcatcatctctgtctttttcttcaatgtcttcctctgtttcatgggatgatgccgtagagagaagtacaaaagagtccaaagcatcttctgaggatacgagtcagcagaattgggaactttcaaatgcttcttcttctaaaggctctgacatatcaggtgtgactcatgtcaggatgcagccttcttcttcttctcaaggctctgaaatatctggtttgactcatctcaggatgcaaccagctccatctccgccttctaggttacgaccagttcacttgatgaataatggtatagcgaattacgatcccgggagaatccctgcatcggtgtttagtaagaatggggatgtggattggagcgaaatatcaaatgagtctttgtttagtctgaaaattgatggctatagaaagtcaaacgctcaagggtctcgtcacagtaatttaaaacctgatgaagttttgatgtcgggtgagttcttgagatattccccttctctggtagtcaaacctgaggatgcaaaagagaaaacatctgaagtggaagaggtaaagaataatgaagaaacaagacttcagagtcacaatcatcgagagaaatacccgtcatttccagatgtcccattgagtagtatccccaacaacttctattgcttatacgcgccgcggacaaaacctgtgtctttttcccttcctgtgggtgagaaaaagagtatgaagagaaagaagagaagaaagaacaagaagaagaagaataaaaaggagaagaagaagaagaagtgttgcacttgcatgtggacttggttgtgctcagtattttcaaagtgagtgtgtgacttgcgttgctctacaaatggagaaagtgtggctgctgctgcaagcaaacaatgtttttgtaatcatgagagttatgtattgacatttaaacaactatctttatttgcatccttaatgcttaatgtattcttacgctaatggttaacagttttcttctatgctttgattccagactattatttatttcattatagaaaatgataatgtattacgaatacaagctgtatgggaaaaatatgatgagtggggttgattataagacaatggattggagaggcatggaagatgcacaattattttgacttttaataataagctcataccaaacacactatctatatacattatacacattcgtcaattatcaagttgttcgaattattacaagttctttgatttggttgattaaaattacaataataccctcaatgccaagagatccgtataacggctgggggatgaataataacttctctggtcatcgaaacaaaggcaaatcatttcaaagcgaaaggaaaaggagaaacgtaaagagggcaaagcccttcttcttcttgttcgagaaggagctgcagcctcagataaggattcttttgatgcccagttgataaaggaagcgactttattttaaccaacgagattttatcatcaggtaagcaaagctgtttgattcgttgattcttttgtatatattgaatatgtttttgttcgctgttgattggtttcttctttggcttttatctataatagggttggttaattggtttgttatttgacaaggatcattgatcaccctcttgagaacatctcgagctttcccagatctatctgagctcctgggtttataaatcgcttccttcacatatcgatggggtgcgtttcttcttccgatttctgtttttgactttatgcagaatgttttggtatttgattgatttggatttgagattctgtttgatgggctttgttcctgcgttatgtgctgcttgggattcatgttcatgatagataaaccctaattttattgctggggaatggtgtttataaggttgttttatgcagatgagatagctatctctgaaagttttatagaaaaatgttttgctaaggaaataaggatgttttttgggcaatgatcaaaagttatggttttgtaacagagcagtggctgcgtgggttgctacagagaacacagatcaactgccgccagtctgaaggatccaccttccaattccattgctcgaccgtgtaagaaaccgagtgtctctgaagatttctggtcaacaagcacagttgatatg

SEQ ID NO: 7631 - DNA, 3000 bp, Unknown; identical to SEQ ID NO: 7619
  misc_feature (1)..( 3000): cDNA_ID_2108547_gDNA_ID_1621154_Annot_ID_56974 3000 nt of promoter + ATG

SEQ ID NO: 7632 - DNA, 3000 bp, Unknown; identical to SEQ ID NO: 7618
  misc_feature (1)..( 3000): cDNA_ID_1010722_gDNA_ID_1621154_Annot_ID_56976 3000 nt of promoter + ATG

SEQ ID NO: 7633 - DNA, 3000 bp, Unknown
  misc_feature (1)..( 3000): cDNA_ID_1818309_gDNA_ID_1621154_Annot_ID_56979 3000 nt of promoter + ATG
cgactcctctctattcctcctggtgctcctccaccggttttaatcggtctaagcttgtctttctcatcgattggtttgacctgttcagagctttccgacataggcttaggttgttcgtcgcgttgactttcgtctttctgctcgttgtttcccgatttgttgagttcggcgatgagacgatcgtcaaacactataccggaagatccctgacggcggaaagagattgttgatctttgaagaccctccatggatctatctctctctctgttgatgagctaaaagaagggcaaaactaggaaaagtgagtttaggccttataagtgattaatcaatcattgtgtttcagacttggtttccttttatttctgtcctcattattttttcatggggtcggtccactatttattgtttatttttatgatgatgcttccagtttctatttatttctttgtaacaacaatcatcggaaattaatgtaagcggattaacgatatcattcaaccggattattcaaacattaattgtaataaaaaaaaaaaagtaaaaaccattactgttattgatgattaaggcagagaattacatgttaattttttgtttgttttcacatctttaatcggattctcaacaccacataggcacataagtcctcttatatccatatttgttattttattccaaacttttggtttctttaaactcaaaaggggtaagactttttgtaattactattgttttatcagcaaattgcaaggattagataatagattagaaatgaacaggagaattgacttataggacacactaatttaatatttccttcttccccatttcggtaaaccaaatagactatttccttcttccccatttcggtaaaccaaatctattaggtgaggatgttattaaaatgccaaatctctctttataaaaacttgaaaggaaaaacaatacaaagtggtgaaagtgagtcaaagtaattcggttaccaatttgtattcaaagtcaacatcattgtactataatatggtataacttttgttcaataattcaccttcttatatcgtctgtttcttctcaggatcaccactaactaaaacatacgcatgtggtgggtttagcaaaactgtattctttggattaaagtaatgtgcataacacaaattaataaccccgtctgagttggcacaactcaccaatgttgaagattgagataaagaatttgggcccaatcgccgaatagaagtctatattcattactctcaggcccatccataaatacaattgtcaaaaagaaaataaaaaattggtggtccagctgggaacgagccagcaggccatggtgaatctgagtggcgtcgagctgtgatccgtccactgctgagagcgggaggtgatcgctgctctgtgaaaccagcctcacgcattgccctccactgcaagaaccgcctgagccaagccttcgcttaacacacacggatcactctcagcttggactgggcagcccggaacaatgccacaacagatccgacccgtgggccgagccagtgttccaccaacttattgtccccacacgggtcacaagcccacgttactgagctcgacgtacaagtattgatttaatttcatatataaagtaaaacattttgaggtatgtaaccgatgtgggacaaaatacaagtttgggcttcccagatcccacatttggtggaacacatatataaagagtctcttcgttgattagcttcccagatcccacatttcaggtaaaaacatcgtctgggctctttgccattttagcgaatgtggaaaggtgtggtttttttttgctctgctatggattttttttttcaaatcagggtttctctgttgaagtcatatcaggagcttgacatttgtttgtttgggaattagaagctagatacgtatattatatagcatcgtacatatcaaattttggtgtgtgttctaattgaatctgtacttgtttgtgtgttagtgggaggagctcttctcagaccttaagactattgctttagtggaatgcttctcgtaaatgtataagtgaggaaagaaactccattcgtatctatctactaccctaagccgtttatgcattttctgtccatcagaagatcaacacctgtttctggaggattccattgatttaagggattagatggatgatggaccatgtgggattcagtagatgacaagaacacaaaggaatccacctaacagagacaacccacatgttgcaggaaatacatataataatatcacaagaaacggaaaaagaagcagacagagacacctcttcttgaatttaacgccttacattgtggtatcttccatcttctttactgcctcatggtgaaatccagtgcatatatgattatttatctgaggcgaagattccttacttcatcttgatgcgactactactggtccaactttcattggatcggttgatttgaggccgttgttcttacattttggtgtcccacctgttcttttagtactgttttcctttttgtttctggcaatcagaaaacataaaggcaatcagtcatccttctcaataacatacaaagatttggttttcaagagaatcttctatagaaagctagacgtttacttctgtcttattaaggagaagtactggttctttcatttatatcttggctggtttgggaattgcatccaaatttcttgcagtgggtgtcagcctggagctgcagaaaagtgagttgatgttagagattgtaggatcttactccaaaaagccagaaaaggtccttgcgactctctaacttgaaagttgtttcctttttttgaatctgagctggttttggaattttggtgtcaagatttggaatttgaatctgtagtaagattcaggtttagtgggggagggaacaagttggaagcttttgctagttttgtcaaaggtgtcactaaagtactaactatcagaaaacattttcagccagaagcttggtg

SEQ ID NO: 7634 - DNA, 3000 bp, Unknown; identical to SEQ ID NO: 7616
  misc_feature (1)..( 3000): cDNA_ID_1818304_gDNA_ID_1621154_Annot_ID_56981 3000 nt of promoter + ATG

SEQ ID NO: 7635 - DNA, 3000 bp, Unknown
  misc_feature (1)..( 3000): cDNA_ID_1818296_gDNA_ID_1621154_Annot_ID_56984 3000 nt of promoter + ATG
aaattgcaagactaaatggtaaagtaaaagacttgaaaacgcaacaagaaagaagaagaacatacgcagtgaaatcagcagaagctgaggcagcacgaatagcatttttatcaaggctgcaactccaaactgctcccttatgtccttcaaaagtcccaatccagtcaccagtctctccattcctcaacatcggattcgaatctgaaatatcaaaagtcaaagaaacctcagctagagttcaacaatgtatgcaacttatcatcctaatttctccattagatcagccacaaatcaaacttcagacgatatataataaaaggcagcaaaatcaaattcgtcaaagcacattcgctatgcaaatcataatccaaaataggcacagttccaagtaaagatcatagatagtcaaatacaaatcgatcgaagatcatacctttgctggcgctaatgagaaagaacccatctggagtcaccggactataagccacatcgacgacgggacgagaatgcccgtggcacactaacggagctcccatttatcttcttatctattcactaacaaaccctaatgaacaaaatctaatcaattagtcgatttactcgtttggaagacaaggaatcaattaatttcatttcttaaaaaggataccagaaattttttgaatcgggtcaagattgcgttaagaaagaccaatccgactttgatcggtgcgaatgtatgacccgccagagaaatccccttgaagaggatcacacctatacaagggaagagaaggaatgataaaaggagaaactttttttttttagtttggtttgttatctatggcttaaacgcagagaagaactcgcggagacgacgatggtagtagttacacgctctcaattcagaaaacaaataaaccttttgtattttacgagtaagggcttatatttattactattgatgatattgccccataacttcaaagtaattaatttttacgttgaaagtttacaatagttattaaattgcccctatagaaataaactttggtcagtcactcctcaatcgcgtgaggattgaatagttttacgtgagaacttcacctaaccataatttttattcttagcaaaggcatttttttaaatttcaagattgactaaatatatacatgtagtttgtcctaattctgatataaatactgtcgtcgacggaattaatattatatatgtggataacgtataaactatgaaattaaaaatatgatgcttaagtgtttgactcaatgattcatcatgaaataataatctgaactttcttggtacggcgtttagaatctcgagtccttttcaaagctagattttaattggtttttcaaatcccgatctaccatccatgtgtatgtattaatcataagtaccacttaattatatattgcattatacaattcttattattcctgataacaaccgatacatatagtttgtttagtatgtactacatgttatctttgaatagaatgctaaaactttactcaggtattagatatgggttcaaagttcaaactcttttgataacatatatttcgatatatacacacacacgcaatttgaccggtcgaagattctggcacaataaaggcatttgcacgggcaagtgccattgacgtggagtgatatatgcatatatgagtgcattactgatcacgtcagcagtgaattttttgtataagtaactaggactatattaaattgtgtgtgcatgcctatttctacacataaacatctacacccactccaactacaagtaattttaaaatttcacaaacttggtgcagcattaatttttaacttcgttttccaataacttgcaaaaaaatttattttatttatgaaattaacaatatggaagattacattttctagatacaggttaaagcaatttaagcaaagaatataacatattggtatgttttttaaaatggaaataacttaagaaaaaatgaagactaaaggaaacaacattatacaaaaaaactatattaagttaaaattttcaataataaattatttaatttagatgaattgttcctctctatatatatgtcactttcttatacgaaaagaacagacagagtgttaaagcgtcaagatcacagatgtcagaatcacccactcgattactgacatgtggatgtaggcccaacataatacgtgtataaatgggccctgtctctccatttgctaacgttgcctcgtctttggcctataaatcttcctaaaccctataaatcgctacacagttacttctcggctccggctattctccttttctctttcgtcgccggtagtttgctcctccttacgcctcaaatttccgagttattgcatgttaactcctttgtctgattttgtttaatcctttcttttgtctgattatgtttttgtgagatgtgaaaggatttgttactgctaatttcgttgtcaaaactatgaaaaaggtgtagattcaatatacgacggatattaattaatggattttattgaaaaagttggattctttttttttttttttttttttgggtgcatatgcaatttcaaatttcactttatgagagaggagacgaggagacttagatctttgtcataagaagaaattttgcattacgttttgctttgttttatgtgctttgtgatgtttctctatttgagttgggcacattgcgttttcttattcatataaaagcatagaaaattgacattactagtaagtaacaaaagataaaacagctataagcttctttttctattgagaggtggaaaaagactggaatcgtcacaaatttagaaaaatataatatgaagattattttgtattaaatgtagtcagcaaaatgctagatttaaagtcattgctagatgtcatacataatatatagcttcctgtttttgtggtttaggtcatataaagagtagaccagaggcgacgagttctggagtctttgagggattctggatatg

SEQ ID NO: 7636 - DNA, 3000 bp, Unknown; identical to SEQ ID NO: 7614
  misc_feature (1)..( 3000): cDNA_ID_1818292_gDNA_ID_1621154_Annot_ID_56986 3000 nt of promoter + ATG

SEQ ID NO: 7637 - DNA, 3000 bp, Unknown; identical to SEQ ID NO: 7613
  misc_feature (1)..( 3000): cDNA_ID_1818288_gDNA_ID_1621154_Annot_ID_56987 3000 nt of promoter + ATG

SEQ ID NO: 7638 - DNA, 2388 bp, Unknown
  misc_feature (1)..( 2388): cDNA_ID_1818467_gDNA_ID_1621155_Annot_ID_56989 3000 nt of promoter + ATG
gaattctcttgcttactcttgcctgactctatatggatatatctcttcacttactctgtgttaaggtgttaacttagatagcgattttagaacagctgtattgtttgctagagctaatgcaggctctgttcgtctcataaaatccatttaaattggcatttgagcaggggcaccaattctgtgaatggtcgttttgcactcttgaattttagacaatcggtctcactttctttatctcgtgtcctaatcacaggtatttcctgcaccagcagatcgagagaggataaaatcatgtctatccgagctaggcgagttaagcagcacgttcaagcagttactcaactcaggcatggaacagctagtagcaaccgtaacaccaagaatccgtccggttctagacaccgtggctaccataagctacgagttaacagaaaccgagtacgcagagaatgaggtgaacgacccttgggtccaaagacttctccactcagtcgaaacaaatgccgcgtggctccaaccactaatgacatccaacaactacgactcgtttctgcatctcataattgatttcatagttaagagactcgaagtcataatgatgcagaaacggtttagccagcttggtgggcttcagcttgatcgagacacaagggctttggttagccatttctcgggtatgactcaaagaacagtgagagataagtttgctcggttaacgcagatggcgacgatactgaacttggaaaaggtctcagagattttggacttttggggagaaaactcaggacccatgacttggagactcacaccagctgaggttagacgggttttgggtctccgggtcgagttcaaacccgaatcaattgctgctctcaagttgtgatgttacttcttttctttattatgtcatctacacaactcgaaccaattctttcgaaatctgattggttcctcaaatattttaattgaatgaaaacttaaattaaaaatcaaacggtaaaaaagttaataagtgaaaacaaaacccaaaaactgcatttatttcatttacccttctaatgaatttaagcagtaagagaaagacagtcacaattacaaatatcacaactaacaagtagttaatatatatatatgtctatgtttctagataaggaacgttctatatttgtttgattcatagaaatagaagctcgtatgagaccgaaagatatcaatttaattatctacatatacatttttgcagctattttgtgaaataaattctgtagttgagacttatttacaatggctgatactagattttaatgtttgtttttgataattagaaaaaaaatcttcgaattaaatatttgacatttaacaatcttctctaaatctctccacattaactacacgattagttactaaaataaaacttccaaaatatttaatatcatttaattactacaaaattatcatttttgatattggtttctccatgactataacaactcgattataatcatcaaaacgcaaagatatttgataacatttaattactacaaaattacaaaatatttagacaataattcataaacgtatcataaataagatcaacattaataaaataaatagtttttttacgggacggattggcggaacaggtttggcatgacgatacttaataacaattgtaaactataaaataaaaatattttatgtatagattcaatttgcaaacttttatgtatagtaactttaataaataaattgttcccgcagtgtactgcgggttcaaatctagtaatatactccctctgtttcatattagttgtagtttaaggttacacacaaattaagaaatcataaaaatctcatttaatatacctcttttatataaaaacttcatttattataaccaattcaaccaataaaaaaatagatgattaaatataattggttaaaaaatattaaatacatttattatttgcatagaaagttgaaaacaacacttaaattgaaaaaaaaaaaaaccgttaaactacatttatatagaaacagagggagtagtaatttgaaaagaataataataataaatgttaaagtatttctttgagttgagaatttaggtcgatttttacgaacatatgctcaaatgtgacgtataaataaatgcgtatcaatattgatgctttgttcaattaccaaaaaaaaaaaaaagatgttttgttcgattcgataaatgttgggggcaaaacagagagatgagcaaaacatgggatcccgataaataaataaagacaactcttgtccttgtataaatagacttgcatcttcaagatatatatgtacaagtctctttacacctaacaagacacagtactaaatcatttgcagcttcttacaatg

SEQ ID NO: 7639 - DNA, 3000 bp, Unknown
  misc_feature (1)..( 3000): cDNA_ID_1818455_gDNA_ID_1621155_Annot_ID_56992 3000 nt of promoter + ATG
tattgcaaatacttaagaaaaacactcatgtttatcatacacttggatgagtactccaatctcaaaagcagagtaaatatcaagggaagaggcctttgaggtcctcacagctgtcagcttgtcgttcttcttgaaacggataagacttaaagttcataaacacattgaattacacaaagaagacacaaaaagttcctatatattgcaagacaaactctacttgcactctagctctcgttgctttggctttggctttagctttatttgcttcacgtttagccttgtaaggtatgatactgaagcttggaagtaatctgtgagaaatgtctgccaaattctacatgtttcggcataatcatccacaatctgataaattgttatgtagaatgaagacaatctccttggaaaactctgaaccatccctaaaccacttcaatcacaattcccaaattactgtatttattgggcaaaccaaaaacacaacttctcgagcattagttatagatgagagttgtaaaagcaattgcgatcaatatatcatcagctgattttcaacggttcagattaaaatttacaaaatttccttcttcttctttttttcttttttttttgagattcaagcccaaccaaattattaaacccgtttatggtttaagaaggcccatatggaagataatatcatataactaaggatacttagttttgttaactatattgatttttctcagtgcttcaaaagttgttacaaatccaatgctaattttgggcatgtctcttgagtcttgactaatcaattttttcttttaaaaaagaaaacagtaaactaattataggttgttgtgtcctgacaactctcagccttaataacttaagattcgcatcatcaaattattaagaattactcgaagagtagacttttagctgttttgaatttcaagatttgaaggatgattcaaatcgataaatgaggacacctacatttatgtaacgttgtccacgtctatgacaaataattttggactatgtgcaatgcatgattgttgggctgtatgtctaatttacagcattaatttttcgtaagactaaagtcttgattacttgtcaatcatgctgtaactttattgtaaaatttacagtctaaattttttttctttttaaggttatagtcgagtaaattctcaaagctctaatttttttactgtaaaaattttaattcaataaataaattctagaaattaaaattatcaacaaaaatatataataaaaacaaagatatgttctaaaaaaatgataattatcaaacctaaaaaaaaaagattataaataaatatcatatgaagaggtcaaagtacaagacgatgaccaaatgattgattctaggcaatatatggaaggaattcgagatgatattacaataaatttatgaaataattataggtaaaattatatttattttatcaataattcataaggttttattttatttttatatcatcataatatatttatttaaattagtaatacaaggtattttatttactataaaaatatattttattacaagtattatatttacaaatctatttttataaatatttaaaatcaaaaacttacagtaataaaagttacaggtatagccaacacaggtacatcaaaaattttacagcaaaaattctatagttacaacccaaccaatcatccacttaacttgtggaaaatttgtataaatttaaataacatctgagtaattagttttttatttgtttgatcaaatattattacggcactaaaatacctctaaacttttctagtccgaataaattctcatccacatccaccttttattctcatttttacattcattccgaaaaatcattactttctaaaaagaaaaaacgttcataaattctctaaacactcgtgcatcaacataaatccaccattttcttctatgaatatttccaaattcgaatttgaattatcgagctaataaaagctagcatgttagtatgttacaatctccggttatttgtaaagaagtaaaaagttccgagtcatatattaaatcgtgacatcctttatatatatatatatatatatatatatatatatatatatatatatatatatataagtcgtttaattcatgataattcgtgattcgcatcaaattagtagaatatgtattagaagtctaaatctcttagctgtttgcatgggaccatttttaaaaatatattatcaatttagaaaatttcaaaggcaaaggcgccgacgaccacgtctactacaactaaattatataagaattagcttgtgggacatttgtttaagttcaactactgtatttgaatcgttataaaaaaagtctcgagatcatccaatccataattaattattatattctgaatctgactctgattaatcttattatggtaaattgcaataatgtctccgaattctctttaatattcttttagcccaagcttctgaatgagacaagattgaccttacgttaaactgaggctaacacaaccgtaacaaatagttttttttttttttttgttgttgtttaattcgtattcttttagattatagtcgaaatgaaagtataatcgccggatccagttccaagccagtagaattcagcgcaacgattaaacaaattcatccactaggaaactaattcgtccacaaatctctagatgcgtaggctattaggtcggtttatatgtgttttggtttggagttatggaaaaaaagaataggtgatatttacaaagtttaattgacgtgtgtttatgtaagaaagaagggtgtcctttgttatttaagataggtgatggttcattttgcaaataactcttaacactggctattatattgggattacagaggcatatatcaacgtcttccatcttcacttggagtcttggagatctcatcaaacaaattagcaaacccttttgattcattgacttgtacacgatcaaaaaaatg

SEQ ID NO: 7640 - DNA, 3000 bp, Unknown
  misc_feature (1)..( 3000): cDNA_ID_1818450_gDNA_ID_1621155_Annot_ID_56994 3000 nt of promoter + ATG
cctgtgtgtatttctgtcatggccattttacaattcactgcttgtttgcatatgttgttaccagacaatataatctcccgcttttttatggctatagcttccagatggagacctccgggagaagattgagaaacttgcttcttctctaaagtttcctttgaagaagctgtttgttgtcgatggatctacaaggtcaagccatagcaatgtgagaagcttgagatctcttcctacctactttactctagtttaccattagaagcttacgtatcttgttacatcatacaggcttacatgtatggtttctttaagaacaaaaggattgttctttatgatacgttgattcagcaggtactgtgactcttgatgcttcaaacgagctatactcacatttctgtttctggttctgaaacataacataatcttctattgtgcagtgcaagaatgaggatgaaattgtggcggttattgcacacgagcttggacattggaaactgaatcacactacatactcgttcattgcagttcaagtgaggctcaaccgacagttcaaaaacttactcacatctacatttcacttaagaaatcatgtcttatgaccctctctcaatgttttgcttgcagatccttgccttcttacaatttggaggatacactcttgtcagaaactccactgatctcttcaggagtttcggatttgatacacagcctgttctcattggtttgatcatatttcaggtttgttatttttgccttttgacactaatctaatgaatcaaggatggattaagaaaaaaaaactctaaacctttggttatatctcctgtctgattatcacagcacactgtaataccactgcaacatctagtaagctttggcctgaacctcgttagtcgagcgtttgagtttcaggtaccatcttacaatccctcaagatccaaccatagtttctttattgcaatggcagcctcatctactaatctgagttaacgttccttttgcaggctgatgcttttgctgtgaagcttggctatgcaaaagatcttcgtcctgctctagtgaaactacaggtcagagaagataacaacagaacacaaactgttacctcaatttgtgtcacacacttaaatggattttttgttgggattttgcaggaagagaacttatcagcaatgaacactgatccattgtactcagcttatcactactcacatcctcctcttgttgaaaggcttcgagccattgatggagaagacaagaagacagattaagtccgcttaactcgtctcttgtacgggttgatgtcttttaggtgacaggtcgaaacaaaacaaaaaaaagtgtaaaaccatataggcagaggcctcttttgtttgttttttacttttacagtgggttttgcctagttactactagtttttgagtttcttaaaagtggaatcactcgcacggttcgatatgatcatttctgattcgtcttcttttattaaaatgaggagaatctaacgtatatgaatcattcttgttttgaaagtgatataggttatgattggtgttactaccacatgttagaaaatcgtgtaaaagtagtactaaattgaacatgggattcagcgatacagaattattgaacaaggcagaattgtttttatgagaatgatacatttcttgctatgatggtgcaataatgggtttctcttttcgcccaaaccttatccttttttctttatcatattctcataattacattaccctttaaagcatcccttctaaattctggattagtctgtataatatcattcattagttcaccggtttataaaaatcagaaagtttataagtttcaaaattttgctttggtgaaaagatcattcatatggttccaatttccaaaccattaatttaaattttagctcatagttgtatctcttcgtctcgatatggacaagggatcccaaagtacattataaatataaaaactatgggcatgggtcttttgacgcatacaaatttaaaacaacttaagctttagcctttgttctacctaatttagtaaattattagtataaactataaaggatctattatattatttaatacaagaatgaagaaaactatattatctactatattcgctctttcttttttttgtcaaaatggaatgctgatctggccactctacataactttcatctagcctctcatccttatctagataaacaaaatatgtggccctttgataggaaaaaatttcattcaaaaaatgcaaaggcagaataatttaattttacaaacgaatgttattaatgcagtctatagtctcttcggtataataaaagtgattccttttctccaaaaactattttgaatgatattaaagctcttaaatagcaatacactaaaaacgtagcttcattaatcaaaactcggatctaaatgtgtacttagtgaatgatattagtagagaatcatatccccaacaccgttatctctccgtcatctcatcgtttgtttttattacaaacaaaccccctcgggatcacgtaggtcccactatttttcctcttaactaaaagggtaataccgtcatttaccacacctctcgccgtcactaacacggagagagaaagaatcagacagctcatcccaagcacacacactcatatcagaaaatacacagacacaacacaacactgagagagagcttttcttttaaattccttcaatttttttttgttgttgtaaagaataataatttattcgattgaatttgtttattcgtgtctttgtttttactcaatcccctgtttccggttctgttcgattcttctctgtctctgttttgtttttcgtcattttgcctaaagccacatgcaacagtgattaactgaatttttattatccatatccattttgattcgccggaaagtttattcttttccggcgacaaatgcgaaagattcgaaaacccattttaaccaaatcaattctatgacgatg

SEQ ID NO: 7641 - DNA, 3000 bp, Unknown
  misc_feature (1)..( 3000): cDNA_ID_3439322_gDNA_ID_1621155_Annot_ID_56996 3000 nt of promoter + ATG
aaataacaaacctgaaatatgatcaaaccaatgagaacaggctgtgtatcaaatccgaaactcctgaagagatcagtggagtttctgacaagagtgtatcctccaaattgtaagaaggcaaggatctgcaagcaaaacattgagagagggtcataagacatgatttcttaagtgaaatgtagatgtgagtaagtttttgaactgtcggttgagcctcacttgaactgcaatgaacgagtatgtagtgtgattcagtttccaatgtccaagctcgtgtgcaataaccgccacaatttcatcctcattcttgcactgcacaatagaagattatgttatgtttcagaaccagaaacagaaatgtgagtatagctcgtttgaagcatcaagagtcacagtacctgctgaatcaacgtatcataaagaacaatccttttgttcttaaagaaaccatacatgtaagcctgtatgatgtaacaagatacgtaagcttctaatggtaaactagagtaaagtaggtaggaagagatctcaagcttctcacattgctatggcttgaccttgtagatccatcgacaacaaacagcttcttcaaaggaaactttagagaagaagcaagtttctcaatcttctcccggaggtctccatctggaagctatagccataaaaaagcgggagattatattgtctggtaacaacatatgcaaacaagcagtgaattgtaaaatggccatgacagaaatacacacaggagtgaacttgttgaagagcggtgctatcaagaccgggtatatagtcatcatcactagagacaggataaacatgaatgcccacagatagatggcaagataaggacctcctttctggaaaaagatagaaacttcatgctcagagaagcaaattttaaatttttaacacgaaaactaaaaactttgaagctcacactcaatggagaatagtcatccatgtgaaaaactcagaaataagatgaatccagaatcatcaaacctggactatgaaaattatcgcagcaacaatgggtgggcctagtatgacagagaggaatgttcctttgatcatgtccctaatgaacatccatattgtttgctgtcaacagaatttagaagcaaatttaatccacatctctgataaaaaaacgtaagtcacaaggtagtgttggaaatacgacatactttgttgaacccatgccgagactcgatcacgaaagttgagtacaaagaaaatggcaaatcagtgatctgcatcagaatataaaagaaatattattatcttaagaaaatagatattttgatgctaaacgtataggactatatgaaggggtttatttggaacacctgtgaccatgtcataacaccagccaagaatgaaagagtatgcagtatttcattctctggatcaaggcccaacctcggtaaaacagctccagacatctaaggtaaaaatgaaaactttacaattgtaatgtaacaactctatattcaaaatgagatactgtataccgaaaccagatatgtaccttccaaaaccaaggcaagatcccaaagaacaaaattgcagagtccataagtatagttacaaactcatgaacaaagtgaaaatagctgcatatattaaagttctcagtgatgatatcccctggcaattataaaaaactaaaatgatataaatatgatcaagacgaaaccttttgtcaagactgtatgctcgtgatttctcaaacttctcttggctaattacaccaaccaaggttttcgggagagttggaagcttgagagcagtgagttgcctcagatccaaatacgtctcaaaaatgtacatcactatcataaaacctgtaagaaaaagaataaaacagaagatgaaatacgaatctactctaaatgccacaacaacagatactccatcactgaaaattcaataacatcatctacttttttgatcaaccagatataaaaagatctcttgtgctgactactgatggaaacattggagcactgaaagagttttgatgcaacattcacatacggttccacaacacaaaacccatttcaaaaaactccagaaaactctagttgcagtcacgaacataataataccctgacaagaaaacccaaaacctcaagctgtatgacttgaacaaagaaaaatttcaagattctcaatttccaatcgggaatgaggaaaaaaaagactccgacttttcttcccaaatcctagattttggttaacagagaagctccgtacattctaaaaccgaggaagagatgatgaaatcacataagctcaaatcaaatcaaacgcacgagtaagacaagaaactagtaggagtaataaaacctcagatcaaggtacgcactattagaaaagaacaaaatttagaaacgagaagcagagacgatggtatatgaaacaaacgagtcatggaatctcaacacacacaacacagaaagcaaaacccaaacaaaaacgaaatacgatgagtgaaacaggatagtaaaatgtctcagaaaaaggttttgaagcttacccacgacggtttccatgaaaggaatcgccatggctgagaaaagagtgacctgaaccgcgatgaaagcagaagcaaatcgaagaaagcagaagcaaatcgaagaaagcagaggaacgacaaaagagaggtttttcgtttttgactcttctcaggtcggtgtggatatgtaaaacaacaaaaacacgggtacgggttataccttagaagcccaaatagtaaacgggctgagatttaggcccatatgaaacaacccctatattttatctaaaatctctaagtataatagtatattatcaaatattggggccttagttgaaatattatgttttaaaggggctaaacggaaaactccttatcctcaaactgtcaacaaattacgaaggtgccattgggtttaatcaacaacgaacgccgagagctctcacttcacactttatccacttggagcttcgaca

SEQ ID NO: 7642 - DNA, 3000 bp, Unknown
  misc_feature (1)..( 3000): cDNA_ID_1818442_gDNA_ID_1621155_Annot_ID_56997 3000 nt of promoter + ATG
ctagattttggttaacagagaagctccgtacattctaaaaccgaggaagagatgatgaaatcacataagctcaaatcaaatcaaacgcacgagtaagacaagaaactagtaggagtaataaaacctcagatcaaggtacgcactattagaaaagaacaaaatttagaaacgagaagcagagacgatggtatatgaaacaaacgagtcatggaatctcaacacacacaacacagaaagcaaaacccaaacaaaaacgaaatacgatgagtgaaacaggatagtaaaatgtctcagaaaaaggttttgaagcttacccacgacggtttccatgaaaggaatcgccatggctgagaaaagagtgacctgaaccgcgatgaaagcagaagcaaatcgaagaaagcagaagcaaatcgaagaaagcagaggaacgacaaaagagaggtttttcgtttttgactcttctcaggtcggtgtggatatgtaaaacaacaaaaacacgggtacgggttataccttagaagcccaaatagtaaacgggctgagatttaggcccatatgaaacaacccctatattttatctaaaatctctaagtataatagtatattatcaaatattggggccttagttgaaatattatgttttaaaggggctaaacggaaaactccttatcctcaaactgtcaacaaattacgaaggtgccattgggtttaatcaacaacgaacgccgagagctctcacttcacactttatccacttggagcttcgacaatggcgtctccttcgcttctgcagtcttccgcttcttcgtttcacggacgtttctcaccattagcggctccatcctccgcacgaatgctctctccgccgctcagaaacgtggtgaaagtctcggcgtctggaactgtactggtcgagaaatctgaagccgagaaaactcaacgcctcaaaaccgcttacctcgagaggattatccctgcgctcaaagaagagttcaagtacgttaatattcaccaggtaaccccaaatccttcccctctgagctcaaacctagtttttgttctgttgcgattgattgaagtctaattctcagtgaattcgaattttttgagcgaatgttaaacctaatttgcttttaatgataagtttgaattgatttcttctagaaaatgtagtgaagaagcctagatttaagattgttgtgttgataaaatcgtgctgttgggatgtgccatttacaaatgtgaatgtgaatttgtcaatctcatcattgttgtatatctgcttggacatcttctctaccaggttccaaaggtacagaagattgtagtgaattgtggtattggagatgcggcgcagaacgacaagggtttggaggctgcgatgaaggatatcgcgcttatcacagggcagaaacctattaagacacgagctagagcttccattgctactttcaagatcagggaagatcaacctcttgggattgctgtcactctcagaggagatgtgagctatatttctcttgactaatcaaactttccttttgagttatttatgtattaacattttgtgattttgactgttgtgacaggtaatgtactccttcttggatcgtcttatcaacttagcccttccgagaactcgagatttccaaggtgtgagtcccagtagctttgatgggaacggaaactacagtattggtgtgaaagaccaaggtgtattccctgaaatcaggttagttctattgtatctaccctcaaaatcaaaactactaacttgttatccgctggttcaacaagatcaagcatggtttctctttagtcccactctttgtttacaaccgagcaactaaactctatgttggttggttggtttattacactctaggtttgatgccgttggaaaaacgagaggaatggatgtatgcatcagcacaacggctaaaagcgatcaagaaggacagaaactattggctctaatgggaatgcctttcagggaaggaggtggtggcagcacaggcgcgatagtgcggaagaagaaactaaagtctcatcactttgatgctaaaggaaaaggaaagagatgatgaacatagctgcctattgtatgtatcgtcttctgtaaccaaccatttcatgtttcagaaaaaccatctccttttgtaatgctttatgagtcaatttgaaaataatatcagggatcttgttgttatggtaaaaatttatcaaggtttttctgtaatttattgaaagttttgtggattatacaaaatgtagcgcgtgagtgaacgtgaaaagctagcgcgtggatttgtcaattttaccttcccctttgagagaaatcgctcttctttgtaagacttggtttcgatcttctctttttcatcatcaatcgatcaaaacaaacagcaacagcaaaattatctttctgcagatcgaaaccctaattggtttctccgttctccttttgttcttctagaatcggcgactcttacttttttttctttctaattatccttttctgatggattctggaatccatgtaattccccattagcgctaaaaaccctagctgtcgaagaccttagattactgcagaaatgttataatctgttttcatcttttcccgatttgaggtttttatttattttggttgggtgagagaatccgatacgagagattaaagccttgtgagtttaggatgagctagttttctttggctttgagctgtaatttctcttctctgaaatctttcactgtacatatagctagatcctgatgaagttgcgtggtggtgaatcgtggtttaagttttgctagttgagatattattggtggttactgtaatatcgaagaatcatatttcacggtatttactatagacaactactgtagagttacttgattaaggcgttaagaagagatactggtgttttttggcctcaatcagctaagatttttgtgcattgtatgatgagtatagcaaatgaacaacaatttgcc

SEQ ID NO: 7643 - DNA, 3000 bp, Unknown
  misc_feature (1)..( 3000): cDNA_ID_1818432_gDNA_ID_1621155_Annot_ID_57000 3000 nt of promoter + ATG
caagaatcaacggctataaagatgtccgcgtggagacgatctcgaggacggagaagctctcacgttttggctagtaactactaatttttgtttatcactaatccactatttaaatagtagtattaatcttcattctttaactacaagtgtttactagccccaacaaaaagttacattgtcgaaaatttagcgattagtttttccgaaatagtgttctatctgaagacaaccttgagaggacgagccacttgttttagttccaagcttgaatctcttaccacttcctgagcttgcattggttttctatgcacagatatcaacacattaggcaaggtagtggaaattaatgagaggagaaactgaagaagaatgtaaaactcacagaaatttggggtttagatctcagcactttgattctaccacctttaccatcaggtccaatagagatgagatcatcttttcttggaacagaacctcctagtgatggagttgcttcgtttctctctccatgtttgctccatctaccaaggtttctatttgttccacttgactgccaaatgtttccactacctgcattggacaatcttcaatctactactacactcaagaacttgaattcatgatgtacaacaaaagtaccattgctgtaaggtgacactgatgatgtcgggtcttttctgatgttgaactttatatccttcaccatggaattatcacctttctcttcaatattagtattccaatctctaatgccagaagtgttggtttcaggaacataatcatcatctacatctataaccgagtctgttctgctaacgaaggagtcttctcttccccttaagcatgatccttgaatggtaaagccatccttttcttctaatttaccaggtggtgtggagattttctccactttgttgtctgatgaaagcattctgaaagaagacatgctctcgattgcaggctcggaaacttctgtgtaactgcatttctttgaaacgtttatgtcccgtagagctctgttctctctctcttcagttatcaactcaagttccctcattcgtttctggtcatagaataaacataataagagccagatatagaagacacaaagaagatcgagataaacaccaaaacacacacctttagtttttctatcttttccaaagctttttcaagtttctcagaagatcgtgcttcgcctcttcccagctgattgcacttggctagcaattccttataactcctgtcagagtaagaaagattgttttttattagagacttcataaaagaaaattcaaagacctaagagaaaagaaacgcaatgttcaatcctcctttcctcaaattcttgaccatacctacttatgaaatttcgtaatttcagtttaacaagttgttgttacgaatgaactaaggtaaatcaccatttcataagtcactgaaggtcaaattaatcttttttaatcggattacactgctgtagacatgacaaatgggaaataatgaaccaagttcactaagtcaatgaccaaaatgagagcagggaaggagtgacaactaagtgctaagcacctacctatatcaaataaccaaaactaagtgaagccatgtgaactgagtggaactaatctatgtgacaaacctattccgaataaccaaggacttgactagtgtgtctattgtatctttcgtcttcgcgttattccccaacaaggccaacttcagtacatcatcttcctccaagcttaaatcagaaaccctggatgcaaaacaagatattagactcagaaaaggtttaaccatacgagtgaatgattaaattagaacctgaagacactaaaagagcaatatgaaagatgttatcttacaatttaagcgatgcgagctccttggcaagagccacagttctctcctgtagcttaacacactgtgagttaagctggatacattcctgtaacaaacaaacacactaagaaactcaacacaaaattctgcctgtgaagcaaaaaggatctaaaatctaaggatgttgtatagtttaaacaaacctcagattttaacttaagcaaatgctgagtcgttgatatttcttgaagagcctcccaccttttcactttatcctccttcaattgctcattgcattgatgcaactgagacacacacaaacaaaaacaaaaaaaaaaaaaatcacataaccttatcttatcttataaaccattctaatcaaacgaaatgaacaaaattaaccttatcagagacttcaacattctcctttttcttcgcctccagagccgaagtaagattctgtaccttcccttcaagccgcttcacttctcctctcaacaaaaccggatcttcttcgattccaacaaccttatccgaggcaatcgaatcggtttgattcccagaagactgaaagtaaagtcgacaaggatcctttagagagcacttctgcttacaaatcggacaatttcgcttgttcgtactcgggcaatactcaaaccattgctgcaaactagggtttccgaaagaaatcgattaaacacataaatctataaaatttcggagataataaacttcattagagaattgattttgccgtactaaccaaagttcgtgaaagacatggccacaagcggagattgattgcagattctcaaccaccggtttaagatcttcgtagcagattgaacaaattgcattccccgccgcgttttcttcggccatagctatctctccggcaatcaccgactagtcagtttccgacacagtcaccattttcttctcgagaaaatcaaaaggcaaatatcagagagcaaacacatggcgcggataaaaagttgaaatttcaatggtaagcgcgaaaatctggggaaggatagcacgtgtaagtcacgtgagataaaaacataaacaaccagtggcttgtattaggcccaacgtttttaccctataggtccattaaagcccaaatcagctattgatcagtggtcaaacaca

SEQ ID NO: 7644 - DNA, 3000 bp, Unknown
  misc_feature (1)..( 3000): cDNA_ID_1807381_gDNA_ID_1621155_Annot_ID_57002 3000 nt of promoter + ATG
ccattaaagcccaatccagatataaaggaaagcacttgtaaaaagtcacgtgagaataacattttcaaccacagtggcttgtattggcccaacgtttttttcactaacggcccaaaaagcccaaatcagctattgattagtggaggagtactcatttattaattcctcctactaattggggtttaccaacttaacagaaaaaatgcatcagttgtgtgagttgtcgaacaatcaaagtgatttaccaacaaaatataaataaaagtaatcattaacttgattagatataaaattaaaaaaaaatcggttagtcaaacacaatgtttaaattaatgttgacttaactcgtttttagtaatattgtatgtatctttataataataaaagaatgcttgggtttgggtccacgcgtttttgtgatacaatgcctcgtgcaggccacttggagctaaatattttttttgctaaaaaaactcgtcctcgaaggtttcacgtggctcatgcacccctgactgggtcaggagaatcttgaccgttggatcaaagttgaagcatttataatagctttgaccgtccgatgaatgactacaaagattgtgattcgttataagccgtacgattgactaacacaaagaggaatcaacatcacgaggcgagagataatggtaacaacggcataaaagcatttttctcgacagctgtagcaaactccacgtcatcttatcttactcgccgtgtgaaccgttgattttatgaaaatttgtcaaccttttttactcgcggagatcacgcgctcccctcgtttggcacgtgtgtcacactctgcttcactcgtaaaattctttttccttttcttctttcttattgttcaccatataaattattttgaaccaattttttttttacaatacaaattgtttttaaatttctatacaaattatatattatttttatatttatgattattacataataattagttaaattttttcaaaataaatattcttaaatctgcgtgtttttagttaaaataatttatattgtgaaacggaaagaataatattttttccgaaaataaaatgtttagtaaatttgtgtgtttatttcaaaaattatgttattgtttttcttttttttaaatgagttgtagaatgggaagaactaaataaacacactactcatattattattttttataacattacctacatgtgctttgctgttgctattctcaaaaggtaatgaatggtacaatagtatcccatgtttagagtatgtggcagagtgatcaacactatggtgctaagtgacaatcactatctttctatctacatactttttatattgcatttaagcacattttttggaaaaatataaaatggaatacatatgtgttatccatgaatggttctttttttataaacatcagttgttagattgactattttgtaatgtcgaaagctcacaacaaattaaacttttattcttatcccttaacattataattttttttgtctaaattaatcttgacaacttccaattccataatcgttggtgtaaaaagatttaagaattgtttacttcatcttgtgcgcatcgataaaaagtgggcactagtacgaaagtatggtttcccactatttaaaatcaaatcaaaggatccctaaaagcgcgtgtgagagacgcgtggaaatgtccaaaggagtgtgaggttgacaaaagatgaattaagagattattcaaagcctttgacattttatcaaagtcaaccaaatacaagaaaccggaaaccataagtggttttagtcactaggcgacaaagacaggataagcatcgagataccttcttcaagcacatacttttctctctttctagaattgcccaaaaaagccaaagagactattcctctctctatatatatatagaatataaaatattctaatatacgtattatataatcggcatatacacgtattgtgattccgacagtgctcatctttttccaagtgtgttcatacttatttgcttttaaaacaagatacagagatatgtttaatttagtaatgtctaaacaattgctatcactaaaaggaaaatatgtcaaataaacactaacatttagtaaaattgtaacgataggttggcacaataatggcatcggtttatagaggacgattcctattagtttgctaattacaacatctagtattagttttgtgcaatcgtcacatgtccttcttcatttcctgttttatatacaaaaattattcagtatgtttacaccatccgtacacaaattttatttttagttaaatatattttatagtcacaagttgtgtgactcaacaaaatattttcaggtctttttttgtaattcataaattcatgtctattaatattttcaactaataaactaatttttgcgagataaactttgaatggttacagcgatccaagcggacaaaccatctacaaaccgaaccgctttttatttatcattcacaatctatagttcgtaatgaagcagaaccaaaaaaacaaataaatttgatgcggattgactttaaactaagtttgcagcggtttgttctctgtcctaaaaaatagtatagattggaccgttgacggattagttcgcactaaccacaacatatccgtctcaaaaaatagtatagactgtactgctgacggattattccggattaaccacaatatccattcaaaacaataagttgatatgtggaataattacaatgtaacaaaaagagagaagaaaacaaaattgtatattatactgtatttgaatcataaataataatttaataaaatctttcctccatttttttcaaccctttttttattttcgtccatcttcagtctctttataaacatatctctctacccttcaaaagtcagcgctctcttttgtctcctctgcttttttctcttctctcctcagagattcgaagctttttgtctcccctgagtaaccaaattca

SEQ ID NO: 7645 - DNA, 3000 bp, Unknown
  misc_feature (1)..( 3000): cDNA_ID_1818420_gDNA_ID_1621155_Annot_ID_57004 3000 nt of promoter + ATG
ataccactcaagacgtgtaagatgcaaaaacttcttttcagattgcactgcagtctactcttttttattctcaggcccaaggacaggttttggttgggaaaagtacagttgttgacgaggatgcaatatcgagtggcgtggctgaaaatgagttagcagtagatgaaatctacacttgtgaggcaagcttttctatgaaaaagaaaaaacctataattgttgttataatcttgtttatgatgtttgtctctgacttgtttagatttgcaccggttgagtctctcgagctcgccaaaccctgtttcccatctccaagttactttatgttgtgtgttctacaaaatcgttgagaataattcattggattctatagtttgagactgaactctgatcttttgaatctcctggaacttaatggtttcgatgcaaaagattgaggcctctattcttcaaagcctaatccttgagtcccctatggcagcgcttatattattttgtgtatttccatgctactctgtagattccactttcttgtttgatgatcaagatttctgctttgatttcaggaattacttaacagatctggtgcaagaactttggaaccaaggacgatgacgaaagagagcactaaagttgatctatagttttcactttcctagtacagtactgtgtgagtgtgagtggattgatgatgtacagcagctgacattttccctctgtaatttctctaatatacagcagctgatatttccactataaattatgggatgtgtatcaatatggaaatatattaagataaatactttattaaaaggttttgatttataagctttctcattacttgctgctaaatttattagtttcctccttgaattcagcaacttttcttgggtttagccttgtaccatcgtggcatttcctataaacttcagaaatctccatgtgcattctactacgcttgtgctttaagtatgttgaatactattagataatttcccaaggattatattaattccactaatccctaggttagctgcaagatgaagttaaagttcacaactttatctctgcaactagattttgagtattttgcttctcatttcagatcttctctaagaaaagacaaaagaagatggtgttagcttgtgttcttgttgattttgtctgagcttgagggatggggaagacgaatgtattatcgaagatcagagctttcaatggcgtcaatagacccatctatgtgttggcaggtttggcttttcttatctcagtagctacattagctaagttcaactacatcactccactacgcttctctgatcggttctgtaactatcatggaagctttgacggcgacaactacaacatcggaagccaaatgagaaagacaatcgaaaccgccatttttaaaatccaccaagaaatggatgatctcaaggctttagaagctaattcttctactcctccatcctctgtttcatcagcttcaggatccatgtttaggcatgtagcttttcttgcggatgttctttcgctagttcagtcggttcatatggaattgccttcgttcgaagagagatccgtagcagatcatccgttgaagcagcagaaaggtgaccctggtgagcattttatgagagaagagataaagaagtacataaagatcaaacctaaccggctcgggaagcagaatttcatgggagctaacggaacattcacctcgatcgggcacgcttgttttgcgatgaagaaagatctagaagagtatatggactatgatgttggagaaatctgcaatgatgattggagattagctcagaagcttatggttcatggatgcgatccgttgcctagaagacggtgcttctcccgtggcccgcagttataccacaaaccgtttccaatcaacgagtctttatggaagcttccggataatcggaatgtgagatggggacagtataagtgcaagaactttgcttgcctagcaagcaacacaacagcacgaaaagggttctttaaatgcactgattgcttcaacctcacgcaccacgaatctccgagatggcttaaccgaggcgaaatcgatcctgagacgaaccaaactgcggatttctcgatagctgaagtactcgagattaaaccgggagagattagaatcggactggatttcagcattggcactggaactttcgcagcaagaatgagagaacagaacgtcacgattgtatcagcaacaatcaaccttggcgctccattcaacgagatgatcgctctgcgcggtttagtcccgttgtacttaaccgtgaaccaacggttaccgttcttcgacagcacgcttgatatgattcacacgacgaggtttctcgatggatggattgatctaatacttcttgatttcgtgctgtttgattgggacagggttttaaggccaggtggattgttgtggatcgatggtttcttttgtctgaaagaagatgtgagtgattacatggaagcgtttaaagcgttgaggtataggaaacataagtgggttgtggtacctaagaaagataaagatgataaagaagttttcttctctgctgtgttagagaaacctccaagaccctttagatgattgatcattgcatagtctctgtctttactattatctttgtaatcatattcttaaaacaaaacagaatgtcaaaataaactgagttatattttagttatatgttccaatttgcttgtataaattcagactaagaatttcaccaaaagtgttatatgtttgacatttatgtttgtaatccattgtgatcaatatgatacgacgtagtaatgtaactctctgagcgagaaagagggttctccattttgttgttaacaacaaaagcaatctccactaggttcgggatgaacgaaccaacaggctcggaccgtggaacgcgcggtatataaacaactttgcctctttgttcatcgattccgttacatcggctcattggaggaaatcggaga

SEQ ID NO: 7646 - DNA, 3000 bp, Unknown
  misc_feature (1)..( 3000): cDNA_ID_1818416_gDNA_ID_1621155_Annot_ID_57005 3000 nt of promoter + ATG
tgatcgtatgcgccgttagctatccttacttgccgtttctcaacaattggttgattagtgtttctagacagaagcatcaggatcaagttctcgtcatcgctgaggattacgctactctctacaaagttaacgagaaatggcctggtcacgccgttctcattcctccggcgctcgattctcagaccgctcacaaattcggttctcaggtataatacatctacacagagttttcatcttctcgatccaattttatctctagcttccagttcatgaaatctagctgaaaaatggctttgaaatctgagaatccatacttagttttgatcagtgattcacttatcttgaatgttcgttgattagcttgtttagtccctgaggtttcggttttaagctgtgttttggctgatcacatgaataacaaaagatagtgaacttgtggttaatatatatgcttaagagcttctattgcaatggaatcgattgtttaaactaacttctcgtatgcatatcttgaatgttcgttgattagcttgtttagtccctgaggtttcggttttgagctgtgtttttgtacatccatggctgatcttatgaataacaaaagatagtgaacttgtggatctagtagcagcagccatttttcccctgtttctgtatgtgatactatatatgctaagagcttgtattacaatggaatcgattgtttaaactaatttcttgtatagggattcttcaatttcacagcacggaggccgcaacatctcttggaaattttggagttaggttacaatgttatgtacaacgatgttgatatggtttggttgcaagatccgtttcagtatttagagggaaagcacgatgcttacttcatggatgatatgactgcagtatgtatatttttttctcagacatcttcttcattgatggtatttggattagtgtacttattattgtcttgattatgttgtcagattaagcctttggatcactctcatgatttaccacctccgggtaaaaaaggaaggacttatatttgtagctgtatgattttcttgcgtcccactaatggcgcaaaacttctcatgaagaaatggatcgaggagcttgaaacgcaaccttggtccagagctaagaaagcaaatgatcagcctggttttaactgggcacttaacaaaacagctaatcaggtatgttctttcttcctagttccacagtaaaacagtaacttctcttctctgtaaattggtctcaataagtagttactacacaattggtgaattcaatgaaattctagcgtaaaatctcaaaagactgaagcttttgctacgccgagagaggttccgctttatctaaccgtagctactcaagcttttaatcaactctgtaatctacttatgaatgtttagttacgataagcttttttggcacacacatggctgatcttatgaataacaaaagatagtgaacttgtggatgtagtagtagcagccatttttaccctgtttctgtatgtaataatatatatgttaagagcttgtattgcaatggaatcgattgtttaaactattttcagaggaattttatgacatcaaagtttaaaatctcaaaagactgaaccttttagtactcactcctacgaatgttgtttcaattcgagaggtaatttgatttggtttgaattcattcttcaactctttttgtattatctctgttctacaggtggatatgtacttgctttcgcaggcagctttcccaacaggaggattgtatttcaagaacaaaacatgggttaaagaaacaaagggaaaacatgcgataatccacaataactacatagtcggttttgagaagaagatcaaacgtttccgtgactttaatctatggctagtcgatgatcatgcttccgagtctcctttagggaaattagagtaaattccaatggcagaaaaagattttttgtcgctccatctttcttcttgttattggaatattcaggctgcagaaaggaagaaagatccatcgagtaaattcttttacattttttgggggtctttaaagtcatgtgaagaggtgttgttattggctaattcaatacgagttgagttgaatttggtaatgtagactactagaattggtattgggtctgaaatttcttaaataatcgaaacaaatactgacagctagcatatgaatacgagggtccacaagagtattaaacatatttattttgaattatagttgggtgttatttccacactttataacatgtgactaattttacaatctaatagaccttttggaggatgctgcttatgtaagatttaccgtaaatgataaacataaattaaatacgctctttgacgtcccattgtttggtcacacacactctagacttttcattcattcgtgtgttactcaaatctatttattcccagatctgatatatatatttattgcaattactaaatcccaatttccataaataatgatttctatgtaactcgttccataaattaaattatgcgtctaagttgtaacatataataaaaggataatatatttttcagtcacaccaaaaaaaaaattgataagaaagaaaaaaaaagagtgaaaattagaaagacagagaagcaaagattcttgctccctgcgaatccgcagctgcttcgaaacgcaaatccgatttgtagtctcctttgattcttccattgacgatacagcttctctttctctcttctctctgcttactttgctttttactaagctcacaagaatctacgcatctgtactgttattatgctgatgctctctacttaatcatcaccaccgcacgcagttcgagatttctggaattttctgtgtcggatgcgtttgagattcatcgaatctacttggttatagattggaaatttaggtggggatttgagttgcttagcttgtggtaggttacattttcttgtttgagattcagtgaatctctccagagttgcatgtatagaa

SEQ ID NO: 7647 - DNA, 3000 bp, Unknown
  misc_feature (1)..( 3000): cDNA_ID_1818408_gDNA_ID_1621155_Annot_ID_57007 3000 nt of promoter + ATG
ctaattacgtcctaccagaaataacaaaatcatcatcttttataaaaaaatcaatcactctctcttgtcttcttcatcttctctgtttgtgccttcctctttatcagaaattgcagcttgtacgaaaacaggtaaatcttcatatacgtagagcaatcaaatttttagttttaaggttttttattaagttcataaatttatgattttgctatgatctatttagggtttaaattatggcaaagtttacgagattgataacagccatggagctgagagccacggtggagaatcgaattcgatactctacaaaacacattaaacacttgccacctggctcaatcactgagtttgattggaaggattactgtcccgttggtttcgggtacgtacgtaataacatagtttcatgttttaaggtaaaaaaaagaagagaattggtttttgtaatgttttttttgttgttgtttgtagacttattcaagaacttgagggtatagatcatgatgattacttgctatccatttgcactgatgagactctcaagaagatttcttctgggaaaattggaaatgtctttcatatttccaatgataaccgttttctcatcaagattcttcgaaaatccgaaattaaggtaccccaaaatcatcttaacacaatctacttttaattttttcaagtgtgtatatatgttccatattgagtctttcattgaaaacaatcttgtgaaggtgacactagagatgcttccacgttactacagacatattaattatcacagatcatcactattcacaaggatttttggtgctcattctgtgaagcctcttggaggtgttaaggtgacaaggattatatatatataccactccattattagagtttgatcagccactaattagttacttttttggggatacagacatattttgctgtgatgtcaaacatgctacattcaacgatctttgtgaacaagctctatgatcttaaaggttctccgaaaggtcgatctaacaagaaaattgaagtgagaaacaccactgttttgaaggacatcgatttcgatttctgtttctacgttgatcctttggcgagacaacgcatcatcaagtactatcccacccccacccctctttctttctaccatcttgattctagttactcaacaatttattaaacacaaaaggggtcatctcattacaggcaaacaaagctagattgcgagcttttggaagaagaaggtataatggattatagcttattggttggtttacaatctaaaggctcatgtcaaggtaatgtttcttctctcttcttaggagtgcaactatttgcatatcgactttgaacttttctgatcataataataaatcactcttaacaggttcacttgatggattgaacccggtttacggtagcttcgcacctccaagtaaaaaatccttaccaacattcttcattcttttgttttatgttcttatataccaagtcttcaacataaatgtctaccgattaaatttttcaggctcgttcaaaagcaatagcacaaagtcgatgaagacggcttctagttctcctgatagatcttctgtagcaatgtattcatgctctcccgatagaggtaacaatgtaactttttaatctaattaatcatagtacttaacaaaaattacaatttttataaacttattgtcttactaacagattcagtcgaaaacgaaatgtcaatgactatacaatcagtgacaagcaatagcgcaagctcagaaacaaatatattagccacaacactcagtgacctctttcacaataggtaaagcattatcctactcctatataacaacattgctagaaatttcacatcaaaaaaaatatatatatatatctaacttttcttgtttcagctcaaatatcaattttgggatgaagattccagcgagggcacggcgagtgacgagagaaaccggagaagaagaatggtacaatgttgttttgtatatagggatagtagacacatttcaagactatggtatgaagaaacgcatagaacattgttacaaatccattcaatataactcaaactcaatctcaaccgtccatcctaagatctactcttctagattccaagactttgtctccaacatcttcctacctcacgacgatgatctctcttcgaaatattgagttgtttgttatttttgatttccaagtggaattattagagtgttaagaggtacacttcttacgacccaagttggtgttggtgtttgttgtccaaaaaatcctctcttttctgacttcattgttgatcgatcaacaaaatgtagagaaaaacatgaactattaatacacatatatcaaaaatataaaatacagaaaaagacaaaacccaaaataaaaaaaacccaacattgttcttggttcaacacaaaagaaaaaaccaatcaaaccaagtcaaccctttaattaaaactttcagttggaacatatatatctctgtttactttgttttgttaatcacaaagcagcatttagaacacttacagagattagtcttgtatgtctacattgttactctctttagatctcttagagattaggtttagccagttcaacgtttttctccttaatctctaaataattcttctgttacaacattacaacatatttaatatcttattatccttaacctaacaacttttatactaaacaaaacaaagccatttctatttgggctttacttatcttatggcccaattgacttttcttctttcttctttttcacgacgcttcttcttcctcctcgtacaacgggcttcttcttcctccattacttactcaagtatcttttctcttcatcatcttctcatctttctcttcaagtttctcttgtatgatattaagcaattaatagattccaacatagtcatgtttctgcgtttgattattgttcttggaagtataatctgaattggaaatctcttttattgcaggtttaag

SEQ ID NO: 7648 - DNA, 3000 bp, Unknown
  misc_feature (1)..( 3000): cDNA_ID_2999922_gDNA_ID_1621155_Annot_ID_57009 3000 nt of promoter + ATG
aaaaattgagaaatctagatagacataaatgaatcatttaaatttcattagcataaccaaacaacttatatattttattcatgttttttactttcattcttttatttgtattaaatgtttcagttactacaatatattattacatttaacaaactaagtaccgaccaataactaagagcaatgaagtgctaaaacgacaaacagtttactcatgcgtaagataaacgtgaagaagttcaaaacgaaacaaacttgacaaaaaatgaacaactttgaatgtaactgtacacagagccagaaactacaaaagtaaaaaatcatggtatattcgaagatgaaggaagatcttcatgatattccaaacatggctgagttctaaccatcgtcgccgccggcattctactccgaccaatccaaacatttccgatcgtttcactcttctccgactctctttccatatctcttaacctctttttcctcactaacttcaccgaaacaatgatcaccacaactacaataaccgaaactccaatcccggttaaaacaatccaccaccaattcctccgaaccaacaccggttcgtgtttcggtttgactttctcctggtttaggacaacaagtgcgtaatgcccatgagaattcgtagtggcacactcgtaattccgtatcgtattgctgatgttcaacaacaaaccattatctccaaagacgatgcatttgacttttgagcgatcacgagaagcgtgaggatcgaatttgatcaagattggcttgtctctcttgatcgaaaggttcaattttttgagatcattcgtgttggtcgcgtcataaccggtgaatccaataaccggagaaacaaatgagtaattatcagctaaccggaagtaaaccgatgaagagttatcaccgaaactctcaaagacaaaagctattcttttagcgtacggcgacgttttaaccatcggaggaatcaaaacaccactaaagtttgttccttttctccagaatatactgttacggaccgtaacaaccgatgctttgatgtcggaaagatttgacggaagtgaaacatcgtacaacgagcctgtgtgtcttcttgtagtcgcacgagccgcgtatgaacggatcagatcgtccaaatctgaaatgttgttgatgcaatgaaccatcgtttgtagattagagatgatgcagaagacgaagacgatgatgatgagaccaagctttgtagatcccattgccaagagaaaatcaagaacgacgatgatgaagaagaccaaaatgagttttggtgatcttcatcaagattagtaatataaaaaaaagaagctatgatatgattttgattaaaggatatgaatagaattgtgatccagatagataagaatcaaagtggaagaagcatgattgagatttggagacatgattgagattgagattgaggttgtgatgagggaatataattaagcacatatacacactcaaaaggaagtaagaggacatataataaaaatgtaacagctgcatgaaatatggatttgatgaatgtgtatggttgattaaataactattatatagaaaaaaaagagaccgtactttgatattcaaacttgtaagaaaaaaggggagagaaagttgggtttgagctgtattaatggtggatgctttttttttgacccaaaattatattgaagttggagtttatttttttttctaatcaaaattttgtaatggaggtgataagaaaaaagaagatgtcggctatgattatatgccgatgacgtaacgatcatgcaatttctttggttttagtattcttacgattcacatgtaatatgattataagaaaatattgaatttttgttcaaccattctgtcaatttagtgataaaattaaaatagctgtaaaataataatactattaccacattgaaaatttatttttttcttcatattttaaaattctcatctttaatatctcatcgtggactattttgatgtgcgaacattttttttttttttttcgggtaaaaatgaacaatattttttatgaaatcgtacataaaaccattcattttttctttaaatacagtcgaaaattagattgtcattgcaaatgagtaaactatcagttttactataaaaaatgtatgtatatttattttgaattgaaatgttaatgcaccaacaacattaatataaaccattatactattatgttgtaaacttgtgattattgtatctcacatctatggactcaaataattttaaattctggtggaaaaattagatagcgaactctttgttttttcatgccaactcatcctagatgaatacgtatgttgattatattaatcatacaaaaactaccaaataagattaaataaaacttttataatatcaactattttgttatattaacaagagaaatggagttttggttagtagttgaaagcgccagcgaagtattagggtggaagagctgtaccatcactcaattttagtgggtttgttatttatttctctctttttgccacatttcttttatcaaaaagaagtttcgttttttcattcacttatacaaaacataatttagagttagatatttaaagttcattgttcgaatttctctttttagttaatctcgtattgtcctcgtaactgtcttatagtttggttagaaacaaaaatcaaaggtttgcattcatttgccattttttcctcacctagaaaaagacaagagttatcaaaaaaacaagatgggcttttagtgacccatataatagatgggcctaaaaccccacagaatgcgagcattctataaacaccactgagttggatttctaaagataagaggagcgaccaataagagcgcgaggagcttccacgtgttactacacgaatcttgtttagtaaaaagcgcagctgcaaaaaaaatcgagtagagaagaagtaggcagacaaagaagaagaagaagaagttctcggcgtgcttcaatg

SEQ ID NO: 7649 - DNA, 3000 bp, Unknown
  misc_feature (1)..( 3000): cDNA_ID_1808490_gDNA_ID_1621155_Annot_ID_57012 3000 nt of promoter + ATG
aatatcaataatattttcagatattattataataaccaaaaatacccaaatattattataatacaattaaaaagtaaataaaaataggaaaatatcactttatatgctcagaagactgaaaaattaggtgtaggaattgtggactatttcaacagtaaaagaactaatgaagttactttattattcttctgtatttttcttttttttaattaaagtctcatatattgttttgttactaaatattttcattgttatcatcaggttaacctcgttaacaattattagtaaatattatgtataaattatccgttacagtaaacattattcatgtatcgaatatcttaacgttttcatataaatattattctgttatataatatattagcatgttatcattctatatatcatgtagttataattattatcatgttaattatataaaaaagtctaatttccttttattgtgctgaatatacataaataaaaaattctgatttacaattttaaatcgataaatatgttttaacaaataatttataaacttatcgcgatatcatagtttttaaaacattaaacaaataattatatacttatcatccgaatattacaattatttttattcaatagcatttttgtaattaatttttttaaaaaaaattttttggtttatatattatttatctttcatacttacctaaataactaatatttatatataaattctttattttttcatcatcctcccagcatatcgattaatatagtccataaaaatacgtcaagtttaatgcttccatgttagaagacgtgctctcaaaacttcttcttttgtttgttttctaattcacaacttgaatctaaaagaaacctggatcctaaacgttgaaaaatattaacctcgtaaacgaagacttgaaagatatatggggagtgttatatgatcacatagtgtaggtcgccttctgactatttttgtggtttatacaaaaagctacgtacagctgtaaagtcttctactctgtgtctctgtctatcatttaaagatggatttatagatagtccactttccaacaccaatcagatttgacaaaaatattaacattgcatttttgggataactatcgttgacttttttactacctattttatcggttagttattagactaaggaaacacagagtttaattgacagaacttctgagctgtttaggcccgtaattctttccctaattgataaaagggccctatttgtttaggtgcataacaggcttcattatatgggcttagaacggcccgatttgtttacatgaagacttttacattttaataatttgaacttgatcatgtaagtgagtatgagtaatgagctggtgaactttttttatgtgtgatctacataattatcacatagaataatagccataaggctttcggtatttgattcttatcaactgtggtccgacatctacttttatacacacccacttgtttttttgttaaaggcttttttctttgttttgaaagtaatgatagtgtatataactaaacataaaaactcgatattgatttgttgttttgagtatggaccctccaaaacatgaaaagacaagaaacaagattgatggcatagttgcaattttcttatacattatatgatgggtctgattggtaaccaaaaggtatacaagatttttagctgttagatttatcggaatagtgcaaagctgttagaaggaactatacaaagaaattattaaaaaaaggtgagtataaaacttttaataacacttttgataaagtttttgtgattggtaactttcaaagttatacaaagctatactattattattgtggttatcattcaaacccgatatcatcttggaaaaagttaaaatctctctccgctatacttaacaaaaataatttttttgggaaaattattttatctttttgtcgttccttccatattaagcccaacaatatttagataaaaatatagatagaactaatttacagtctgtgaagtatgtagtgtgaaagtatttcaactttttttatgatcccaaaattgatgtggttacgaaaacttactagtattacaaagactggaagaagtaaccaaacaaatggatcatactgaccaaacgggatcaagcactaacacagttgtaccattatcacgtggcgtacatatatggagagagtatatcttacgcacttagtaacgcgcgttagataacacctgatggtaccacatcataagaaaactttgcaaacaaatccttaaactaacaattgtttctgcatacaccccttgacttaaaattcttaacttttttttctacactaacttctttaacaattgaataacgagagtgtcgaaattcgagtgtacaacattttaaaactgtttttttttgtttttaaatccttaacctcttaaatataatatcaagtgtataattgtttaaatctttaaccttttaagaacttaaaagataggtgacgttgaacataattaaatatcactaaaaagaaaaaatcacaaatgcggctactaatcgccacacactcaacttcaccgctgacgtgcagatttttaatcaaatgaagaataatttcgcacatttcgaagtaaaagggctattttacaaaacatgattaagtcaaggggttggtttgcaaatatttcacaacagaaatgtgccattaaaacggcgtcgttatgattcaggcttaatcagtaggttgtgtcttttggcttttatcatcgccgccgggacacaacacaaagaggggcttagatttgtgctttcgagaagtgctttgatctctcttctccattttcacttctaatcggagatttctcttagggttttgttattcgttgagagatcgaattaaaaacttgtgaagaaatctctagggatcgtaatcgttgttggtgtggggtattacactgattccggtttgaacctgaatcgtatctatcaatcgatg

SEQ ID NO: 7650 - DNA, 3000 bp, Unknown
  misc_feature (1)..( 3000): cDNA_ID_1818392_gDNA_ID_1621155_Annot_ID_57013 3000 nt of promoter + ATG
gctttgtataactttgaaagttaccaatcacaaaaactttatcaaaagtgttattaaaagttttatactcacctttttttaataatttctttgtatagttccttctaacagctttgcactattccgataaatctaacagctaaaaatcttgtataccttttggttaccaatcagacccatcatataatgtataagaaaattgcaactatgccatcaatcttgtttcttgtcttttcatgttttggagggtccatactcaaaacaacaaatcaatatcgagtttttatgtttagttatatacactatcattactttcaaaacaaagaaaaaagcctttaacaaaaaaacaagtgggtgtgtataaaagtagatgtcggaccacagttgataagaatcaaataccgaaagccttatggctattattctatgtgataattatgtagatcacacataaaaaaagttcaccagctcattactcatactcacttacatgatcaagttcaaattattaaaatgtaaaagtcttcatgtaaacaaatcgggccgttctaagcccatataatgaagcctgttatgcacctaaacaaatagggcccttttatcaattagggaaagaattacgggcctaaacagctcagaagttctgtcaattaaactctgtgtttccttagtctaataactaaccgataaaataggtagtaaaaaagtcaacgatagttatcccaaaaatgcaatgttaatatttttgtcaaatctgattggtgttggaaagtggactatctataaatccatctttaaatgatagacagagacacagagtagaagactttacagctgtacgtagctttttgtataaaccacaaaaatagtcagaaggcgacctacactatgtgatcatataacactccccatatatctttcaagtcttcgtttacgaggttaatatttttcaacgtttaggatccaggtttcttttagattcaagttgtgaattagaaaacaaacaaaagaagaagttttgagagcacgtcttctaacatggaagcattaaacttgacgtatttttatggactatattaatcgatatgctgggaggatgatgaaaaaataaagaatttatatataaatattagttatttaggtaagtatgaaagataaataatatataaaccaaaaaattttttttaaaaaaattaattacaaaaatgctattgaataaaaataattgtaatattcggatgataagtatataattatttgtttaatgttttaaaaactatgatatcgcgataagtttataaattatttgttaaaacatatttatcgatttaaaattgtaaatcagaattttttatttatgtatattcagcacaataaaaggaaattagacttttttatataattaacatgataataattataactacatgatatatagaatgataacatgctaatatattatataacagaataatatttatatgaaaacgttaagatattcgatacatgaataatgtttactgtaacggataatttatacataatatttactaataattgttaacgaggttaacctgatgataacaatgaaaatatttagtaacaaaacaatatatgagactttaattaaaaaaaagaaaaatacagaagaataataaagtaacttcattagttcttttactgttgaaatagtccacaattcctacacctaatttttcagtcttctgagcatataaagtgatattttcctatttttatttactttttaattgtattataataatatttgggtatttttggttattataataatatctgaaaatattattgatatttttggttatttttatatttttactaaaacaaccgaaccgatccgaatccgaaccaaaatcgaaccaagtttttagaatatctgaatggttctcaacctcttcatatccgaatagatttgatatccaaaaaagaaccaaacagatagggatacccgaatgaccagacctagtattattgatataaaaaaggttgctcaatgtataatttcatttgactagctggtctgttttcgtacaaacacactcacaaaagtacgaaaataggaagtcgtcttagttttagaaaataactattgctgcttattggcatatattgaaaaatcaaatactactagtaatcgtaagttctaaatttgaatgtttttttcccgagtaattgaattgttcttagtaattaagttcacaaatttggaaaattgcgatatctgagaacgtattaatttacctgtcggtaaacagtcacactcatgtttctagatttcgtatattttagtaataatttggttagtctccttatctgcgagtcaacgagacccggtccgctcaaccgtactacagtctaaattctagtttcacgcgcttacttacattacatacgcgctcatctcttctttactcaaaagttttaaaaaacgaatatcaaatcaacgctaacaaagtttgattttttgcttccatcttcttcccctccttaagttttcaaatctattcatcaaattttcttttgtctttcccttaagattcccgggaaagccaaggaaaaacgctagaagaaaattaacataataatgttaattgttgcttaaaccttccagctcaagtttggtagtaagtaagcagacatttaatcccccaagaagcaattgaagaagacttttaattcttctgaattttctttccaaaaacccctttttagaaaattggttgcatcatagagattggttcatttattcccaccggagaagatcatcaaattcgtcttctcacctatatcgccgacgacattcttcacggttcgtttgatttctacctgttggttcttcgttttatctgaattcaatcggagatatatgtttttgagttcgaatttgataaaaaatcgaaacttttttgatttgaatcgcagttggaaaaaaacaaagcaaaaccctagaaatagtggctg

SEQ ID NO: 7651 - DNA, 3000 bp, Unknown
  misc_feature (1)..( 3000): cDNA_ID_2999909_gDNA_ID_1621155_Annot_ID_57014 3000 nt of promoter + ATG
tcaagttgattattggaatggtgtcatcaaattgatgaagaaatggttgacttacttgttgttgttgcagccatttattgaagagtttagccatccaatgctggataactgcgctgcaggaaacacagacgtgtttgtgaatggaagagagcttcacaagagagatttcgagttacttgtgggtcgtggtctgcctagagacaagaaccgttcttacattgttgatatatcaggaagaatccttgatcaagattcaggagaagaacttcacagccttggcaaattagccccaacgtaagcagattcacacaaatgatttttattcttttgagattttgagatcacctaagattctaaagttttagtgtgttaaacttgaaacaggattgagaaagtgaagcatggatttggtatgagagttccaagatcattagcttcatgaaaactccccctagtaacaactacacaaccaaaatatgattctgcttcttgtttccatcttcatattatttatttgttaaacacaactgtaaagtgttttttacatcttgattttgatttttggtattctttttaaaatatctttggggaaatgtctgtatgttttttattgcgaccagaaccggtttaggggttatagactgtatacaaaccgggttctctcggtacaaggtttgtgctttgtattatttccatttttttatggaatgatattagtttgctcttaatgacttttttttttatctcttttattgctcttttgtaagttgtaacagaagcttcatcgataacatggtttactcctcctaattccttattatctctggtttaactaaatcgtttatttaaaccggttttggtttgtaggtttctttcatgtcagcaacaatatatgtaggtcattcgaccatactcaacaattcaattaaacaatgttctcctagctgatctttctttcttcatgattagcttctaggcttgatttgccctttcctcgagttctaggtgaattatggattgggattatctatctatcggttagttatccggtttcatctttctttccactaaaatgttcatattgtctgctaattcctctcttggctgatggactagtttttgcacgtttctgaagtgggtccttcctaaaatacaagacaacagattataacttactcatgggcccaatatcaatatcaatatcaaacaagaaagagaatctgttcttaacaggcctcgtggtccgttcgtttagttttcatgtttcaatatttcttagaaaaatacaaaattagagtaagaacaaaaagatactaactagtagcgagcatgagaaaaacgagtaagcagaagttgtccactaataataaaattgtgaggaatcaagaaattctcaatacaaaaaaattttagcaatgaagaaataaaataaaatattattagcaataattggagtcactagaatgtttcatatctctttatatactaacactagtgttagttcattcacgcaaatgttaaaaaccaattctaccattgttaaacttataccaaatatttaaactagttacctgcatcattctaataactaataagtctcatgaattcacaaacatagcaatgttttgaataacccaatatatcatcaaaaagtgtggtgcttccgtgtttgctaagttccaagattcaagagaaaggttgatattgttgtaacgaaaggctgtggagatacaagtataccacctaagttgagataaaaggtgtgaggaccaaaagcagggcatgtgcttcttcacataaattaaaagaaaaaaactcaagttattactaatatgtgattaataaacacaaggacaatgagaccatctgggctggtccaacatatttttggattcctcaagcaaagttgaaaaaaaaaaacttttctgaattttttaatcagaatttcactatcaaaagtcataattgtaaaaaacaaatcctgaaatattctttattccatttccaatatatattgctgtcacaaagaaatctacaaaaatatttgttataacttaaaagaatgcccaacaatttagcctataatcatatatgcttcttggacaaaaaaaaatcttggaacaacaatgctaattaaatttttctttttttttttcttacacagagctaattaactttttcttttttgttgactgtggttaacataattccagggtgatggtatattcaatgtcgcagtatattcaatgttgcatggtgtgtgaatagttgtactataatattccctcttttcatttttatttgatattttaggaaaaatacacatattaaaaaaaatatattaaaattgatattaaatatattatttttttgtgttttacaattttttattattttaaaccaatgattgaactattaaaatttacaatttattaataataactaataaatattgaatagaaaatttacaaaatcaatctttttaaaacaaatatttttccaaaaaaatcaaataaaaaggaacagaaaaaatataatatgacagttcgaaagtataattcaaatctgtaattgttacggttttgttattcttctttcttgtcgttgtttgtgacaaaattgtaatcaaatatattgtatatctcacaatggtgtgactttttaataccatatttttttgtaacgattgtatcactacaatttactacttgtcacaaattcatgacaatagtttttactgttacaaatatgtttctattgagacaaaatattttgtatcaataaaattactttttctgcagtaattaataaatagactgtctgaaattcacaaaattattattcctgcatttaataaaagtaaaaaagggtaacaaaacatcactttcatggtcacaaagatcctaaaagttaatctcaaacctaaccatctcattctcacgagtccaactataaaatcattgaatagcttccaccaaattcactgtgctctcttcttca

SEQ ID NO: 7652 - DNA, 3000 bp, Unknown; identical to SEQ ID NO: 7648
  misc_feature (1)..( 3000): cDNA_ID_2124274_gDNA_ID_1621155_Annot_ID_173474 3000 nt of promoter + ATG

SEQ ID NO: 7653 - DNA, 3000 bp, Unknown
  misc_feature (1)..( 3000): cDNA_ID_3051036_gDNA_ID_1621155_Annot_ID_173471 3000 nt of promoter + ATG
atggatgatgtcgatgcatcatcacgtcttccgcttttcaacaatccgtactatcgcgatgctcttggtgactttggagctttttttgcaatctcaaacaagattgatcggttacacaagaattcatggattgggtttcagtcctggagagcgactgccaggaaggtaaacaactttttcttataaaatccttcatcctttgtatagtagaatgctaaaattaccctgtgatgtaatgtgggactttgaaacaggaatctttatccaagattgctgaagacgcattacttaatgctatacaaacacgaaaacacggagatgccttatatttttgggttcgcatggacaaagatcccagaaatcctctgcagaaacccttttggtcgttctgtgatgccataaatgctgggaattgcaggtagaaacactagagattttaaatcataattttataataatgtttgagactttggtcatttacctgactctttgcaatttatgggcttggatcaaggtttgcttacaacgaaactttgaagaaaatgtacagtatcaagaacttggactcattgccaccaatgcccgaggatggggatacatggtctgtgatgcagagctgggcattgccaacaagatccttcttagagtttgtcatgttctcaaggtacttgtttaccacattacccattgattgtctcagtcttagcctctttggagaaagaagagtgcttaagagtgtgttttcccatctgtttgtaggatgtttgtggattcactagatgcacagatatatgaagagcatcatcgaacaaaccgttgctatctgagtttaaccaaagtaagaaactcattccttcatctgcgaaagttcatgtgtttttagatctaaatcagatcagtccacttgggtttggatttatgtgttcaatttctcacaggacaagcattgctattcgcgggtactagagcttctggtgaacgtatgggcttaccacagtgcaagacgcattgtctacatagatcctgagactggtttgatgcaagagcaacacaaacagaagaaccggcgagggaaaatgtgggtgaagtggttcgattacacaactctgaaaacaatggacgaagatctagctgaagaagccgactcagaccgtcgtgtgggtcactggctatggccatggactggcgagatcgtgtggcgcggtacattagagaaagagaagcaaaagaagaatttagagaaagaggagaagaagaagaagagtcgagataagctgagtagaatgagaagtagaagtggtcgtcagaaagtgatcggaaaatatgtaaaaccaccgcctgagaacgaaactgttaccggaaattccactttgttaaatgtagtagacgcataaaagaaaacaaattaaaattgcttctttttttgttaggtcactaatttgtttcattcattgtttttggaaagattactgtataaaaggtctcaagtctcattcattcactctccctctctcttctcacctctcttcgatttaaccgacggcttaaattctccggcggtggagcttcactgtgaacaacaaagaaagagagaagatggaggagacgcaagttcttgagatcaatctcatctctgcgcaaggacttaaagaaccgacgggaaagctccggcgattgcagacttacgcatccgtctgggttgattcttccagcaaactccggactcgaattgatcggatcggctctgagaatccgatctggaacgacaaattcgttttccaggtatcgccggagtttctatctagcgaaacttctggtgtttcaatcgagatctacgccgttggttacttgcgagatcatctgatcggaactgttcgcttcctcgtgagtaacttcctcccaaccgccgccgtgaaagttccatctctcgtcgcgcttcagatccgtcgtccttctggaaagtttcacggcgttcttaacatcgcggctatggtgatggatgcttctgaacttccagctgatttcttcaagtcggttcaagagatccgtcggagtcggaaaatgagaaagtctagatctgcggttagttcgtcggagaacggttccgctgacgacggtgagagttcgaaagagaattcggtttgcggatcggttaatttctccgacgacggtactgactcgacggcgtcttctccgatgccgtctcctctcagagactggaacgctgttcgaaatttggcgggaaagaatcacgtgcgatcgtcatcggacggcggaggattgatgtgctgtttcttgatgaaatcgtcgggcatgttaccaccaagaagaaaaatgacggacggctgagatctgttgtcttgaatttccaacggttcagatgttcctttggttttctaaaccatcgatcttcgtcacgtgcatctctgtcaacggttcaggtctccttatcccttacgtcgtcgtttaggcagttttggcggttatgagtgttagttaacaaacagtttggaatttctttagttctagttgctcaaaacattatattcaataattgttgtttcgtttttgaacaattaaaaaatctttttgatatgaaatagtaataattcgtagatcacagaaaaaaagtgtagtaaaaattatgtaaaaagtgaaaaaaaaaaaaacgcgggaagtcgtttatgaagttttgaggagataattgttagtttaacggctggattagttaaaaccactaattacgtcctaccagaaataacaaaatcatcatcttttataaaaaaatcaatcactctctcttgtcttcttcatcttctctgtttgtgccttcctctttatcagaaattgcagcttgtacgaaaacaggtaaatcttcatatacgtagagcaatcaaatttttagttttaaggttttttattaagttcataaatttatgattttgctatgatctatttagggtttaaattatggcaaagtttacgagattgataacagcc

SEQ ID NO: 7654 - DNA, 3000 bp, Unknown; identical to SEQ ID NO: 7646
  misc_feature (1)..( 3000): cDNA_ID_3051042_gDNA_ID_1621155_Annot_ID_173468 3000 nt of promoter + ATG

SEQ ID NO: 7655 - DNA, 3000 bp, Unknown; identical to SEQ ID NO: 7645
  misc_feature (1)..( 3000): cDNA_ID_3051048_gDNA_ID_1621155_Annot_ID_173466 3000 nt of promoter + ATG

SEQ ID NO: 7656 - DNA, 3000 bp, Unknown; identical to SEQ ID NO: 7644
  misc_feature (1)..( 3000): cDNA_ID_1807381_gDNA_ID_1621155_Annot_ID_173463 3000 nt of promoter + ATG

SEQ ID NO: 7657 - DNA, 3000 bp, Unknown
  misc_feature (1)..( 3000): cDNA_ID_3051057_gDNA_ID_1621155_Annot_ID_173460 3000 nt of promoter + ATG
aatttggggtttagatctcagcactttgattctaccacctttaccatcaggtccaatagagatgagatcatcttttcttggaacagaacctcctagtgatggagttgcttcgtttctctctccatgtttgctccatctaccaaggtttctatttgttccacttgactgccaaatgtttccactacctgcattggacaatcttcaatctactactacactcaagaacttgaattcatgatgtacaacaaaagtaccattgctgtaaggtgacactgatgatgtcgggtcttttctgatgttgaactttatatccttcaccatggaattatcacctttctcttcaatattagtattccaatctctaatgccagaagtgttggtttcaggaacataatcatcatctacatctataaccgagtctgttctgctaacgaaggagtcttctcttccccttaagcatgatccttgaatggtaaagccatccttttcttctaatttaccaggtggtgtggagattttctccactttgttgtctgatgaaagcattctgaaagaagacatgctctcgattgcaggctcggaaacttctgtgtaactgcatttctttgaaacgtttatgtcccgtagagctctgttctctctctcttcagttatcaactcaagttccctcattcgtttctggtcatagaataaacataataagagccagatatagaagacacaaagaagatcgagataaacaccaaaacacacacctttagtttttctatcttttccaaagctttttcaagtttctcagaagatcgtgcttcgcctcttcccagctgattgcacttggctagcaattccttataactcctgtcagagtaagaaagattgttttttattagagacttcataaaagaaaattcaaagacctaagagaaaagaaacgcaatgttcaatcctcctttcctcaaattcttgaccatacctacttatgaaatttcgtaatttcagtttaacaagttgttgttacgaatgaactaaggtaaatcaccatttcataagtcactgaaggtcaaattaatcttttttaatcggattacactgctgtagacatgacaaatgggaaataatgaaccaagttcactaagtcaatgaccaaaatgagagcagggaaggagtgacaactaagtgctaagcacctacctatatcaaataaccaaaactaagtgaagccatgtgaactgagtggaactaatctatgtgacaaacctattccgaataaccaaggacttgactagtgtgtctattgtatctttcgtcttcgcgttattccccaacaaggccaacttcagtacatcatcttcctccaagcttaaatcagaaaccctggatgcaaaacaagatattagactcagaaaaggtttaaccatacgagtgaatgattaaattagaacctgaagacactaaaagagcaatatgaaagatgttatcttacaatttaagcgatgcgagctccttggcaagagccacagttctctcctgtagcttaacacactgtgagttaagctggatacattcctgtaacaaacaaacacactaagaaactcaacacaaaattctgcctgtgaagcaaaaaggatctaaaatctaaggatgttgtatagtttaaacaaacctcagattttaacttaagcaaatgctgagtcgttgatatttcttgaagagcctcccaccttttcactttatcctccttcaattgctcattgcattgatgcaactgagacacacacaaacaaaaacaaaaaaaaaaaaaatcacataaccttatcttatcttataaaccattctaatcaaacgaaatgaacaaaattaaccttatcagagacttcaacattctcctttttcttcgcctccagagccgaagtaagattctgtaccttcccttcaagccgcttcacttctcctctcaacaaaaccggatcttcttcgattccaacaaccttatccgaggcaatcgaatcggtttgattcccagaagactgaaagtaaagtcgacaaggatcctttagagagcacttctgcttacaaatcggacaatttcgcttgttcgtactcgggcaatactcaaaccattgctgcaaactagggtttccgaaagaaatcgattaaacacataaatctataaaatttcggagataataaacttcattagagaattgattttgccgtactaaccaaagttcgtgaaagacatggccacaagcggagattgattgcagattctcaaccaccggtttaagatcttcgtagcagattgaacaaattgcattccccgccgcgttttcttcggccatagctatctctccggcaatcaccgactagtcagtttccgacacagtcaccattttcttctcgagaaaatcaaaaggcaaatatcagagagcaaacacatggcgcggataaaaagttgaaatttcaatggtaagcgcgaaaatctggggaaggatagcacgtgtaagtcacgtgagataaaaacataaacaaccagtggcttgtattaggcccaacgtttttaccctataggtccattaaagcccaaatcagctattgatcagtggtcaaacacaatgtttaaattaatgttgacttaactcgtttttagtaatactagtacatcttttcgcatgcactaattaactcactctcgagagtagcgttcgtgagtctcgaggtttctcactattttttcttccgcagcgtcaccgactcagatttggtggtgctaggtcaccgtgttcttcacggcgttcgggagaatgtcttagttaccccagcttctccctaaggaaactccactactgttcaaaatccctttcctacacatctgtagttaaatgtcacataatctgttgaattacttgaggcttaaggtgtaaatgttatttttccttggcagagacctaaggtttatgtgtgtcttccagtttaaattatgtgtgggtgactcagaga

SEQ ID NO: 7658 - DNA, 3000 bp, Unknown; identical to SEQ ID NO: 7641
  misc_feature (1)..( 3000): cDNA_ID_3439322_gDNA_ID_1621155_Annot_ID_173456 3000 nt of promoter + ATG

SEQ ID NO: 7659 - DNA, 3000 bp, Unknown
  misc_feature (1)..( 3000): cDNA_ID_1387628_gDNA_ID_1621155_Annot_ID_173455 3000 nt of
tcaaataaagagtgtacaaatcaagacatgtcactccaacatgatcaaacacatttacacagtttctagaaatccaaactaaaaaaaaaactatcggatagagtctcacagcaacagtgcttcatcaaattcaccaggcagatttggcagcttcttgcaaacgtctttctcgctcaaggatataagaaacttcctcgtgtatgtaattcttggtttcctgaaaacaattgcaactgcagctgagaaatgtacaataagcagcaaaacagagacatggattttacaaaaaacagaaaaaacatacttttccgaatcatcattggtttcgacaagttgatccatggcaaattgttgttcatttgctatactcatcatacaatgcacaaaaatcttagctgattgaggccaaaaaacaccagtatctcttcttaacgccttaatcaagtaactctacagtagttgtctatagtaaataccgtgaaatatgattcttcgatattacagtaaccaccaataatatctcaactagcaaaacttaaaccacgattcaccaccacgcaacttcatcaggatctagctatatgtacagtgaaagatttcagagaagagaaattacagctcaaagccaaagaaaactagctcatcctaaactcacaaggctttaatctctcgtatcggattctctcacccaaccaaaataaataaaaacctcaaatcgggaaaagatgaaaacagattataacatttctgcagtaatctaaggtcttcgacagctagggtttttagcgctaatggggaattacatggattccagaatccatcagaaaaggataattagaaagaaaaaaaagtaagagtcgccgattctagaagaacaaaaggagaacggagaaaccaattagggtttcgatctgcagaaagataattttgctgttgctgtttgttttgatcgattgatgatgaaaaagagaagatcgaaaccaagtcttacaaagaagagcgatttctctcaaaggggaaggtaaaattgacaaatccacgcgctagcttttcacgttcactcacgcgctacattttgtataatccacaaaactttcaataaattacagaaaaaccttgataaatttttaccataacaacaagatccctgatattattttcaaattgactcataaagcattacaaaaggagatggtttttctgaaacatgaaatggttggttacagaagacgatacatacaataggcagctatgttcatcatctctttccttttcctttagcatcaaagtgatgagactttagtttcttcttccgcactatcgcgcctgtgctgccaccacctccttccctgaaaggcattcccattagagccaatagtttctgtccttcttgatcgcttttagccgttgtgctgatgcatacatccattcctctcgtttttccaacggcatcaaacctagagtgtaataaaccaaccaaccaacatagagtttagttgctcggttgtaaacaaagagtgggactaaagagaaaccatgcttgatcttgttgaaccagcggataacaagttagtagttttgattttgagggtagatacaatagaactaacctgatttcagggaatacaccttggtctttcacaccaatactgtagtttccgttcccatcaaagctactgggactcacaccttggaaatctcgagttctcggaagggctaagttgataagacgatccaagaaggagtacattacctgtcacaacagtcaaaatcacaaaatgttaatacataaataactcaaaaggaaagtttgattagtcaagagaaatatagctcacatctcctctgagagtgacagcaatcccaagaggttgatcttccctgatcttgaaagtagcaatggaagctctagctcgtgtcttaataggtttctgccctgtgataagcgcgatatccttcatcgcagcctccaaacccttgtcgttctgcgccgcatctccaataccacaattcactacaatcttctgtacctttggaacctggtagagaagatgtccaagcagatatacaacaatgatgagattgacaaattcacattcacatttgtaaatggcacatcccaacagcacgattttatcaacacaacaatcttaaatctaggcttcttcactacattttctagaagaaatcaattcaaacttatcattaaaagcaaattaggtttaacattcgctcaaaaaattcgaattcactgagaattagacttcaatcaatcgcaacagaacaaaaactaggtttgagctcagaggggaaggatttggggttacctggtgaatattaacgtacttgaactcttctttgagcgcagggataatcctctcgaggtaagcggttttgaggcgttgagttttctcggcttcagatttctcgaccagtacagttccagacgccgagactttcaccacgtttctgagcggcggagagagcattcgtgcggaggatggagccgctaatggtgagaaacgtccgtgaaacgaagaagcggaagactgcagaagcgaaggagacgccattgtcgaagctccaagtggataaagtgtgaagtgagagctctcggcgttcgttgttgattaaacccaatggcaccttcgtaatttgttgacagtttgaggataaggagttttccgtttagcccctttaaaacataatatttcaactaaggccccaatatttgataatatactattatacttagagattttagataaaatataggggttgtttcatatgggcctaaatctcagcccgtttactatttgggcttctaaggtataacccgtacccgtgtttttgttgttttacatatccacaccgacctgagaagagtcaaaaacgaaaaacctctcttttgtcgttcctctgctttcttcgatttgcttctgctttcttcgatttgcttctgctttcatcgcggttcaggtcactcttttctcagccatg

SEQ ID NO: 7660 - DNA, 3000 bp, Unknown
  misc_feature (1)..( 3000): cDNA_ID_3051024_gDNA_ID_1621155_Annot_ID_173485 3000 nt of promoter + ATG
tgaatctgtctcccttctgcaaaaccttccttattgctacaaacttgcaaaagcttaaccattgtgctatcataagctttagcaccagaaaactgcatctctctgaaaagttccacagccttttcccaattcccactccgcaagtttaccattacgatctcgttccatgcaagatcatctcttttaggcatttcatcgaataacttgttagcaaaacccaaactcacacatcttccataaaaacccatcgacgcagaaaccactcgtgtgtctgaattatcaagccctctcttgatcaaaccaccatggatagttaaacccagaaaccgatacattagaacagcacaaattctcaaaaccatagcgagaactacttcatcaaaatttactcctttgttctgtagctgaacaaattcctctaagaccctatacttttctactccgaaattctcagccttttccaaaaaatccctccatgaaacttgattccgagggaaccccatgaagaacacagtactagcatatccaaattcttgaaattcaaggtaacgagtgatcaagctcttagcgatgaactccaattcgaatcgatcgaataacttcatcatccgagcatgagtagctttaacagaaaccagatttttgcatccatttagcttcttcaacggataaaaatcccaacttggagacgacggttccagagatattgagaatggtatagattcaaacgactcatgtttgatttccagagaagaacaagaaaatgaatggttacctagatatcttcgctgcgagtgatgaagaaacaaggagctgtaacaatggcggtaagttgaagagaagttctccattttattcacttcacagtttccggataagaggacactatccgttttattggtattttcactacgatctcagaaacgcagcgttttatatgtttgaagaagattcactagcagaagatagcaaattactcatctaaacactacaaaaagttgagaaagattcaacatcattctcaagtgttcttacaacaaaagcagcaacttacataagcttgagctattagtgttcatcttcaagaatgatacaagacaagtaaacattttttcatgaaactaatctgtgatagtttaccatttttcccttggagtaccatcagggaacacaggagtaagtactttctcttctttctttctaggactacttgattttctacttgaaggacttaatccaatcttcacgctatcttcttcttcgtcttcatcatcatcatcaaagttaggaggcacatcttcctctccttcgtcatctgtccaatcgccatcatcatcattgccaccatcttcaccttccaagtaaccatcaacatcagaccattcttcagcatcactttcttcttcttcctcctcaccatctgcatcgcttccatcgatctctacctctcttccttcttcgtctttcctgggtcctcctctccttgggaaccttggtacagaaacaagtgcacgcatcttctctttcacaagagttaaaggatctttatctatcaattcagagttcctgtaagcttctcttaagaacaccgagtctctttcacctttcaaagacacgtagaagagatcagggtgcctaataagcattcccctcagttgttgtgagaatctgaattcctcacggaaatgagtcaagtgatccaccagcgttcttttctcagtcgttaagctcaaaagctcatgaataaccccacaagcatgcttttctttctcgagtgttcccgacctcaagtgggagaaatccttgtaaggagatatatactgcatgtcacggaactgagatatcttcctcgtctcactctttgaaagattgagaccccttggaagcttaaccctgttgaacttaggtggtctatcaataatcaaattcctttcttctgactctctagtcctattatcatcctcagataactcagcagctgacactgcaagctcaggatcccagtgagtcaactctaaagccggacctctaggcgtaggaaccacacggaaatattgcgggtaacgctgacaaatcgtgtcgcggaactctaacggaagccctaaatcagtcttcaaatgggaaatcttctccaacaatatccgcttatcaatagacatcatcaccagtttcctcagcttaacaaccagtacatcttcaagctcattcctaatcctcatttcgtcaaggtacaacctttcagcctctgatgtcatcttaaatctcaaagaataagctccttcttcaactatctcaaacacaccaggatatttcctaagcagagctataaaccgacgacgtttcttcaaacccaaatctctcctgtacttacccaaacccctaagagacatcatcctatcaggttgactcacaagaatcttcctaatgttcaacactaacttaagtttcttatccctttgaacaacgctatcgaaagtaagctctttccttctcttcacagcagctctcacaggctcaacaacaacacgagttttcctagaagtactccaaaacccatacttgttccccaaaatcaaaccttcccccataaactgagacctcgcagctcgaattgtggacatgggcaaaccggatttgaccgaaagcttggttttttcattgaatggagagttacaagagacaaacaaaggtttatgtgcagaaagcagaagcttgggctccatttctgagactccaagcctgtaaattgataactcctaataagtattctccgacgaaaaattgattccaggaaataaaaaaatcttaccttatcccttcggttcaatctagtaagaggttctgcagaagaatctgtttctggtcgcgaagatttggattggggtttaacgataaaagtcataaaaccctcttcttttttccagaatgatgtgtccatctctctgatatcctcttattggtctttaacgtaatatttgaccagaagcaggggtaaatatg

SEQ ID NO: 7661 - DNA, 3000 bp, Unknown; identical to SEQ ID NO: 7651
  misc_feature (1)..( 3000): cDNA_ID_2999909_gDNA_ID_1621155_Annot_ID_173482 3000 nt of promoter + ATG

SEQ ID NO: 7662 - DNA, 3000 bp, Unknown; identical to SEQ ID NO: 7649
  misc_feature (1)..( 3000): cDNA_ID_1808490_gDNA_ID_1621155_Annot_ID_173480 3000 nt of promoter + ATG

SEQ ID NO: 7663 - DNA, 3000 bp, Unknown
  misc_feature (1)..( 3000): cDNA_ID_2105259_gDNA_ID_1621155_Annot_ID_173477 3000 nt of promoter + ATG
cctagttcagagcagagaggacgagtccataccccagttgtattaccatcactaccattgctagagccatcattctcggagctagttgatatcaaaaccacgttagattctatatatctaagtatctattgaataagaaagagttgaggctagtttgacaaacctctgagaactcctatgttcactgctgctatgttcagcactcccaactttgttattgcttattgacattgcaagtccatcgaactctttcagctttttcatgaacccatgatctgagtttccagctgaattagctggtgcatcaatggtcaaaggggttgtaacctgcaaacattctcatacattcatatccaatatccatcatactgcacatttcacacagaaacatcacaagacaattgacttactccagatgctgattgagaaacaggaccttgtggttgtgagccctggtaaagtaaagtaggaaaacacaaatcagtaaatctggtcttttcaactatttgttgatataaagtaaccactaaaaggaagggaggattaccatttgaacaccaggatgagcataaactccaccaggagggcaaaatggtggatatggtgctccataaggagccatcattggctacaacaacaaagaaagatcaaactcaatccaaagtaacagatatacattcaacaagtttaatataagtaccgatggagacgcccacatataaggcggtggagcatgaccaggcgccaaatttgagttgtaatattgaggtataccaactctaggcccataatatgcctacaaatatcatgagaaacaagctaaaatcactcaggctaataaaacacaattcacacagcagaaacaaaacaaggtcaaagaaaaatcacctgcatagcagcccagtcatgatgatacacatgaacattactctgctcctgtatatatacaaagtaaaacaacaacaacaatcaaactttgactaaacacaaatctgttactaaaccaatcagtttccattgattccattacttacaggagcagcagcttgcgatggcttatcagagttgttagtggggtttccttcttcgttgctacccattgctcaatgcagagtaatgacacagtaactttataaacaaaaaaatgatcagatcttttagcagttcctctgtaaagcataaatctaaaagaacagtattcaattacacctagatctcgcaattgtggacatcaaactataaatataacagagatccgagtaactataaagtatagcaccactgaatctaccagtaaaagattcaaagtcgagttttttcctctgtcaaaagttcaaaactatcaccaactagtagagttacacaattcaatctacctttaactttcctagtaattttcttcactcaatacacactttctcgagaaaacagagcgttcatatataatcactcagatattcattgaagaaaataacgaaaaccaaaatccaaaaacgtaccttgagtctcagggaaaacaattcgaattgaacccacaaaagaaaaaaaaacaaattcgcttctctctcttagtcggagagaatggtttctctctctagaaccagagttcggtaaaagaagagagaggaaggagaagagaagaaaaagaagagagacacaacggagcgccaagaggctgatgaacacgtcaccgtacacgtgtcatgatcttgaagggtttgcaaagggaacgcatatgctgagctggcaaccctagatctgcgctggacattttaaatatctgacttaaataatgattggtacacgtagtcataatcgccaccgttcatcttgagatctctacgtagacttgacgtgctgctgattttattccttttaaataatgaaaatacagaattaaactataatgtataattcatttgagatccacagatgacgaaacgtggactaccaaatcaagcatatttgtttttaccatttaatcgacggctaatattgatttcatctacggtaaaatatatctttttttaaccagaaaaaggttagagtggtccccactgtaggatctactgacttgtgtcggccgttagtggttttataaagctgacgtgtcccactgaataaggaataccgttgtggtccctacggacaacgtgggattcgacgccagctcattttttaattttttcttgaaatcttttttaaaattttagacgatgactcaatcttcgccacgtaggatccacccaataaaaaagggttaacaaaatcttatctttaatgctaaattagttgagattaatccatgttgtttaaatccgaaatgatgcatataatcttgtttcttataatcattaagatttagactgaagatctaattccaatttaagagagtcactaaaaaaagaatgaattcaatttcagacaaatccgacaaggtcaaggtgacgtgttcttgatgccaattctagtgggagccacttgacgcgtgcagttagactcccggtccaagacataaatttacgttaataccctcctttattgggttattattgggccgtagttgaattattagacccaacctttttatcctgttcttgattggcacatactttgcaaaaagttaacaaaataacttttattgcaaggcattacaagagaaatgtcaaatttggttgttgcatacatgacatcttattcatatccaatccataaattgatgtgttgttattcaaactggtcttttgatgtattgttagacatatctcatatatattgaacccttggaatcaatataatagattgggctttatttatcttttattgggcttaaagggaattgttggactaaaaaaaccattaaggctataacacactaattacacgtacaatgagagtgagagtcacggacgggatgattacaagaatcatatagcaccaaatatctcatcctcactctcacatacaaacacacattttgttcacacagagatagacatg

SEQ ID NO: 7664 - DNA, 3000 bp, Unknown; identical to SEQ ID NO: 7639
  misc_feature (1)..( 3000): cDNA_ID_3089439_gDNA_ID_1621155_Annot_ID_173451 3000 nt of promoter + ATG

SEQ ID NO: 7665 - DNA, 3000 bp, Unknown; identical to SEQ ID NO: 7660
  misc_feature (1)..( 3000): cDNA_ID_1818384_gDNA_ID_1621155_Annot_ID_57016 3000 nt of promoter + ATG

SEQ ID NO: 7666 - DNA, 3000 bp, Unknown
  misc_feature (1)..( 3000): cDNA_ID_1818380_gDNA_ID_1621155_Annot_ID_57017 3000 nt of promoter + ATG
gttcagaacctgagacagaacaaatggaacagccaatgcagcaactccaccggcaataaccaaaggattgtctgtgacaaaattggatatcccttcaatcagaccatccgaatcaaaagatgaagaagtggtcatagattgttgcagagcttcctcgtacgtcagggatttagcaggagctgttgcactgcttagaacagaagttagaagagccaatccaccattgaatctcttcaagaagctttcttgggagattggtctctgtgattttggtggaaagaggttagggagcgagaaaggctttcgtggttctgatcttttctcggataacaccgacatagggctaaaagttgcggttttcagagcttccatgactctctctctctcagattctccttctacaccaagaattgtccactccgtatcatcaaacttttcccaacgattaaagatgatgaagaagaagtggaagaaaagtgtcaaggacaagagcattgagccgtttctagagagctgacgtggactgtgtaatcaatcctagccaccgcttgcttgacacgtggaatattcggatgagatacctcttgatcatgttttggtgtagaggactaaagcatagtgacttacttagtccgaaattgcatgtcaaatgtgtggccagagaatattgaagatgcttcaagagaagcctctgcatatttaccaaaatgtcctttatctagaacacaaagaacagagactagactagatacaaaaggttcctcagcatttgatttaagtgaacaaagaggatcaagtataacattaagaaaacataacatgatgcaatgtatggaacttacaatagatcaaagaaataatctaaaccttgtccgatttcccagattgaaatgccgattccccagagacgagcattctcaagccgtagaaggattgacatcaatgtaggatagaaaacagcatgcttgatgttcttatcatctctatacatgaaaagatgttcgccgctctctttatcccaacggaaagttggcttgtgtttctggagtaatgcgaggtaatcccttccggtgattgctcctccacctcctgaatcttgcgcaaaagaaaacagtttatgtcagttggttttgaaagaaaggcgggaagagaacaagttgcttatataagcttggatgctttatatacctccagagattacaaaatcgttgccgtaaaagttgataccaagaagaaccttcctggctatgtttgagtctatgttgttggatgacccaagcaggagcttgagagttaaatctatccacttgacaggagcattggggccagggttctggggatttgagaaatcataggtcataagagagaacccatcaaccgaatctttcaagaattgaagatcttctggcccaaaatcgtacatttggagcttctctgaacgaggcggaccaacgacatacatgaactgcatatgttgctggttgtttcttggtgagctcgttgagtgaagagcgtctccaagttgttttacgaatttcagtgcctagaagatttataaaaaagcttgctgacatgatgcattatgtggaaaaaaaatcgcagcggcctggaagagattacagggcataccattttccgcaaatcagggtcatgcaaaacgccataagctgcccaccttgaccaagactctaacacgataccattgtattccatttccctagagttcaaggcaaacatgatgacaaggtaagtgttaaaattcacaagctctaatgtaaagaaattcatccttttcagagcatgaaatatacaggaattgtagagctttgggagacccttacttgcactctgtgacaataagactgatagctttctctcttagtttttttttgttaagcatctccccaggaattgcttctagaacaactcttggtaatatctacataaaaggggaaaaaagtccagacaatcaaagaaggaaaaacaagttaaacatcagcattttccgggtaccgatctctggccaattcagagaaggaagaaaaataggtgtgctggttaaactaccagtgcattgcctcttgaccgaagctcttgaatccatcccttatcagcattatgtctcccttccaaaaccaatccagacccttggctaccagaaacagaaaccaaaaatgtcactactattttgtggaaaccatgagataattgcaggaacttagaactcattaacaaatgtatacaatatacctcttcaggtcgtaccataccggcgataaatgtgtaaactttgagttgaatatctttgccatatcatagcctttagagttcctacacagcatttttagcatatgaatccaatccctactgccctcagtgacaacaatttgtatattttcaatatctcaaatctaaaaatgttccaaagaaaccaaccatggagtaatgtaagctaacactggataatcatagtgcctagttgaattctctgaagccttggaatgttcctgaaacaaattcaaaccaaatttaatgaaaattcatcctaaagttttcagcttttcttctttgaattgcaacattgacccaaaactatggaactcacagtgaggatttcttggaaattaatatcagttttaacgattcccttttgacgtattgatgattccgtttggatgactcgatcagcgaatttgactttgtacacagcaatcgaaacggcgggaatcacaatgaagaagattacgaaaatggtgatgagtctccgatctgaatcttgttgtacgacttgacacagtgactcgtatccgtcgttccgccgtttcaaactctccgccgccgatgaacgtcgcctcctcgccatcgagtttctcaccagtgaaacagagaacgaaacaacatcgttagaactaggagatttttggaatgatgttaattccatatttacccctgcttctggtcaaatattacgttaaagaccaataagaggatatcagagag

SEQ ID NO: 7667 - DNA, 3000 bp, Unknown
  misc_feature (1)..( 3000): cDNA_ID_1818541_gDNA_ID_1621156_Annot_ID_57018 3000 nt of promoter + ATG
cttcaatctcacagtaagtctcttatgcatttaaatatactcacccattaggaatgcgttgaaataaactcactggtcctcttccttcctcagttatcaaatttcgctgtgatgtgggattcactgtttggctgggtatcatcgtcctctctggcatacatatatgggaaggaagaatctgctcatgaggagttcttattggttaacgggaaggagtacccccggaggattatcatggtagatgggctttcctcagagatcaagcagacaattgctgggtgccttgccagagctttaccgagagtcgtcactcatctcaggctgccaatagcgatatccgagttagaaaagggactggtacgtttccaatattttttcttctcattagtctgttatcgtcggtctacttataaaccaaatagcccatcctagtcaaattagtgattggtcccgtctatctttgtaaaatgtagcaagtactcctagaacgaaaccttagtatataagtatggaatcatatttgaaattataaactctttaaaagttcctcatgagaatcttgtctcaaacttacgctgggaagcttatatatagtttctcagtgatattggttgtgttttgttgttgagcagggaagcttgttggagacaatgtcgttgacaggagcagttccatcatttagggtaaaagaatggctagtgattgttcttcttttcttggatgcgttgtctgtatcacgtatccctcggattgcaccttatatatccaacagagacaaggtttgttccagtcaacttgaacataataaatggcgaactctaactgaatttaatctgttgataaatgttggtgaaaaatatcagattttggaaggaagtggaattggaaatgaagagtatgagacaatgaaggatatcctgttaccacttggccgtgttcctcagtttgctacccgaagcggggcgtagacaaaacccgggtttaaggtttattggtagaagaaagaaatcaacttaagatatatgaaaatagaggagtctataattttgaagccattgttttgaatgtatgaaagatcttgaagtcatgcttggcttgctttttacttggaacaaagatttgtcgcatttcgatatatgataaatgggtcagagacgttgagttgttccttttatgaaatttcttataagttagtaagttaatgagtttgaattgaaatgtcaaattttctttgactaagacatgttttcgtctaagattttgattctagactgtgtgtttctatgcatgcgagaagaaatttatgattgactaagtaatatcttaatccgtaccttttgtcgaaaaaaaatagtaataattcctagccagaatctcttgtttgttatataatacttgtttcaacatttaattcacatctactagtgtttataaatgaaatgtacatggaataaaataaagaattgtcaccataatgttttttcctaactataaattaaatgtagtagggataaaatccaataattggggatgaattattgagataggttactactttagatagggagggtctctcacctcaccttataataaaaaaagtggtcgttgattattttcttttttgtttcctctccgacacgtttgacccaacggcccattttcagcttctggtctccttcgtatattctttaggtatacaaattttaaaagtcaaaattaccctcacttattcttcttctaaataaattcctatactaattagatgtttttaactacaagaaaaattcaaagaaacatatggtggttttaatgtaccaatcacattaaaataatgggtttgattggtaacaattttaaaaaactgtacaaaattttctaaaacatacagttttaatatttaccgatcacaaaaactttattaaaaacgttacaaacagttttattctcaatttattttactaatttttcgtacagctaaagtttacagctccaactaacagctaaaacacttttagttaccaataatcctaataaataagttctttatgcattattttctatgacccttatctcttttggtttgttgtgttgggaagaaaatataaaagtttgaatggtcaaatctcaaaaagaggacaaaaactaaaaccaatgtaactttactaacttcgacgagtcccattattttttctttttcactttcaaagaaattatccatttgcctatcaatgatttaattttttttccccaccctaccaaaaaaaaaaaatgatttaattttttttcttttacaatatagtaataataaaattgtcttcacgagaagccagctatatagagagagatgattatagacgaatcacaaaataatataaagtaaaaatatttcataattcgtctctcaccggaaaaataaataaagttagagagagagattcataatcatcaaacccacaaatccttttttttttttttgttaaaacccacaaatccttactcgtacggatctctctctctttaatatcctaattcttctcttcatcgatctgagatttttacgttttcatcggtacgtcttaaagatctctctctttcttcatcccttcttctgggttttagcttcagatctgcttcaccatgaattttaatttaacccatcattttaaaatcgacagattctctcttctctaccaaactctaatttggttttaatgtttgggtcttttaaattttgcaactttttttgggcttatcattattttttttgttcccgttaaaaaaaaactttccttttcgtaattttagtgttctaaattgttttttacttatttgaagtgttcaattgttaagcttgaaagaattgtgttttgttcctttattgaaattgaatttgtgtgttttgttattagtaaagcaacaaactttactcattggattttaatctctgttgttatttgttgcaggcttgaaagtttgaagagttttgtagcctgaaaaatg

SEQ ID NO: 7668 - DNA, 3000 bp, Unknown
  misc_feature (1)..( 3000): cDNA_ID_1807165_gDNA_ID_1621156_Annot_ID_57019 3000 nt of promoter + ATG
atcctcttgacataactcatcctcccgcttcctttttcccctctttattgccaacgcttcctgattgcgaacagtctgctccataatttcatcacttggatgaagtacatccgagtacctctggtaactttcattgtctggtatgtcgcccgtagcattctcaaaaatggggatgggattgaacaactcattagtatccatctctccacggtacatgctgtatgcacccccacctcttgataatcagcataatcatccatggcgttgtgatcccgatcaatgtcactaagaacttcagcatcctctgcatcctctggtgcattcacgactggaataatttcctctgcatcactattcttctcttcagggcctatttcacgaatgaccatagcttggtttggaggaccctgctgtggcatgtcatcatcatcttcatcccccgagtcatgatcacctccaccattgaggattaggcaagcacctgaatcgtgagttagcatgccgcatacctcacagaagcctcaaagcctttcataacggaaccttaacagagtattgacgccttcctgaaattggaagttgcgttgaaatcgaagaggattgtcaacattccaattgatctgaacctgcacaaattccactcttgctactgcctcaacatcgtaatccacatccatgacatcacctatcgcacgcccaatcgcttcaattacatcacggctgagaaattggtatggtatgcccctgatttggatccagaaaggaatggtgttgagcggaggagcatttgccattggagtccatcgttgtaagatcaacatacggtcattgaaagcccccgggcctcgacgaaccaccatctccaaggattcttcagaggggaagatgaattggaattgatttccaggaattaggcggccatgaacaagtcccgattgaccccatacacgaggcattgaggcaacaatggagcgcaggttttgtcttcttggcatcacaggcctgcccaacaaaatgaatcgattgtccaccgctgcctgagccaccatcgcctccggaatcgttactgatgcatcatcaacacccagattgatgtcttgaacaacccgtatcagattatcagccattttcagaagtgttaagtagaagcgaaaaggatatagaagagtaagagggattgtcgaaattgcttgtggattgaatggatatccagattttccattatatagaaggaagggattcataaccgccaaaggagcatcgcgttgggatcgagggatcaacgtggagatacccgctaggatagtggctttctaacgacccacttcgccggcgaaatcgagaacaaccgtcacccaagtgacgagtaaccgcttaaaagcatttgtagtcgccattcttcacgtcttttgtttaatttattaatatatttttcttttttttcacctatttctaattttattcacatgaaaattcataaataaagaactactcctttttgttcaaaataaaataagataactactccttaaatttatctagatgtcatgaaatttagtaatttacaaaagactgaaaaaaacccacgcatagagctatcaagcgagccagaagtcttcgggctcagcccaaatagtaccatatcagagcgggattggacatcatttgttaggcctataaaatagcggaccttgcagacatgctcaatcgagttgtaggttttaacgggttttgttaatggatttgcggaccggtctgcagactacaaatatttaataaaaataaatctaaaatattaataaataaacacttttatataatttttaaaataaaaatataaaaaatgtgatagtgtaatgaaatataatatataaaattataagatttacaataataataataataataaaaaattcaaatttcataattgttaatttaaattttagttacttataaaaataaaagataaacttgcgggccggcctgctaacctgttgacgatagcagagcggatctaaacatattatttttgcgtgtagtcctaacggaccgatccgttgcgatcttacaaaaataagtgcccattgtagatcggtccaagtagacacgagccggcttacttgacacctctacccaggcacaaaacggcctaggttgttgtctttttgtctcgaactttgagctagagactagtgagtagcgaggttttagactttccgaacccaaaaccctacttataatattccgaacctaaagaccactctactttctccacgttttcttctcactttgtcttttatgtcgacattgtcccttaaacacatccacttctgcgcaatccaaccaataacctaatttaaattcgattttttttcttcttattataaagttgaaccatatttttgggtactttatcaatccaataactagaaattcggaagggaaagacgtaataactcataatcctttttatgacaaaaaacaataaattctcaaaacccataattagtggaaaaattaataaaatcaagtagtagtaattatttacttttctaatttccagatgtatctgtctttctcacaatcagataagccaaaaattaattgaccactgcgtgttagcttcctttacgtgtttctttcctttctctctcctctgtcacgcaagaacaataaatactatgatcacttgattttctccgacgaaattttccccagaaacaacaacagttcgagcaacaaaaccctgaactctatgtttctgttaaactcgtaaagtctcaatctttacgatttgttcttaaaaattctttcatttaaagttcttaaattggtcaacagtgtttatttttcctccaagtttgttaataatttaagatttccccacatgcattgaatatttgtcttttcttcttctttcttccatttcaaagttgtgagatttgattcgatgcttatgcagattcacaattttatgagaaattggacaaaaccctgatg

SEQ ID NO: 7669 - DNA, 3000 bp, Unknown
  misc_feature (1)..( 3000): cDNA_ID_1818533_gDNA_ID_1621156_Annot_ID_57021 3000 nt of promoter + ATG
tgtgacgacatcaacagactacttgcacaatactggtggagtaatggtccggataagcgctcaatgcactggttgtcatggaagagaatggcattgccaaaacaggaagggggcctaggttttcgagacatagaaagcttcaatatggctatgttaggtaaacaagcctggcgaatccttcaatcaccaaatagtcttctctcacgactacttagaggaaggtactttgcatcaacttctctcttaaatgcagaaacaggcacaaaaccatcctttatctagagatcaattttggaaggacgagatttgcttaaaaagggactgagggttctaataggtgaaggaaaggaaacaaacatctggatagataattggttaccaacgcatccccaaagagccccacgatgtcttgaaggaatcactccaaacgtatcgcatgtgaatcagttaattgagtcacgaccaaagagatggaacagatcacttgtcgaaaacctgtttcatgaggaggatgctaggctaatacttcaactccgtctaactagtcagccatcaccagatttgcttggttggaattatatggatgatggtgtctatacagttaaatcgggttactggctagctactcatctgcctaataacaatccggaatttgacccccctccaggagaaacaaaacagaaggaagcgatatggaagatgaagacaacaccaaaatcaaacatttcctgtggagagctctcacaaaaactttggcgacaggctctattcttacttcacgaagaataacaaatgaccctcaatgcaagcgatgttgtgcagcggaagaaactagagaacatctcttctttggatgtatttatgcccaagccgtgtggagagccacgcatgttagcagaccggaatttttcaacccaaatctttcctttgaagcgaagctcaagatacttatccaaattcataacgataagatgaatgatcctttaagaagacaactaccattgttgacactatggagaatatggaagagccgcaaccttttagtttatcaacgacgaagtagtacgtgggaacaagatgcacacaaggcaaccactgatgcttttgattggattccaagacaaaattctcggcgagatactcgaacacaattgaatcatggctgtcctgaggatggatagcgcaaaccagaatggggttacaagaaatgtaattatgatgcaagctacaaacaaaatggggtagaggtgaatgtaggctggatattgcgagatgaagaaggttactacaatgaagcttcccacaacaaagctcagacgtgcagtacaattctagaagctgaattacaagcattactcatggcgatgcaacacatgtggataaaagggcaccggaaaataatatttgaaagcgataacagtcaaatcccaaaacttctcaaaagtgaaataaacaacttcggtcttcataatcttatacaggaaataagagtatggcaacagaagtacacgagcgtgaagatacaatggactgcgagatcaagcaataaggcaacggattgtctagcgagaactcggagacccaatgatctttcatttgtcaattacttccatgtaccaaactttcttgtagacatccttcacgaggattacacttcatctatctaataaaagaagttgctgttaaaaaaaaaaagttagagataggtaaagtgaatttcatattttttggatagtatttttgaattgcttcattttcgagattaacaagcttcttctttttttaacaaccccagagtttcatcaactttcaagcaacagaaacacatgattaaaaaattaataacatcaaataaagcatattttaaaaattaaacttttcatcatatagattcttagaatgtgattgtggagccacgttggatctccagggttagatataaatgaaactgtctatgccgtgtgacagcccttgcaactattcaattcaaagttgaccatacatgaaactatttcaagcaaacgacgcccaacatcaagtattcaagttgttgatattgtctaaaagattcaccatatataaaagccaacttcatggaatcgaaattgtagcggtacaacagttactagatcaccactttatgacaagcacactcttgacatattaatcaaacttggccaagatgatcccgagctaaccacacaccacccacacatctaatatttgactgttcatgccacacttatattgaccttgagaaaaatgaagagtatatcgactcggttaacaaaacttcaacaagacaatttcttataaaaaaataatcatagactgataaatttctcaaaacacttttcaatttaaacaatttcataatatgtgtatgttgacatttctaatacatgaatagattgatgctcattgaactttattgaaatgtaaagaagagataaatgtgaaagattttatgttgtcttcaagaacaaaataagtttcaattatgttttataaaatgttgaatgtggctgttcaaaaaagtagccttgattacattaatcaaagtcttacacaatataacataagcttacacggacttctctaatgaataatgattataacttgggtttaggatcctcttttccacctagaggcttttatattgttctacaatttaattttttttaaaaaaaaaaaaaacaggagcaaaataagatagtgtgtatgtaacataatttattgttgttgtaagacattacaaataaaaaaaatatgattgcattgaagaaaacaatatcaaatgacaaatacatagaaacaaaataataattaagtaaggcaccgagagtagaaattaaaaaaagcttataaaacaaaggaatctcggtcacctctcaccaactccaatgctcacttatacagaagctgagaagcagaaccgcttttatataatcgcactcactcagagaaacagagaagacgatagatagagaaaaaaaaaaa

SEQ ID NO: 7670 - DNA, 3000 bp, Unknown
  misc_feature (1)..( 3000): cDNA_ID_1818523_gDNA_ID_1621156_Annot_ID_57024 3000 nt of promoter + ATG
tcaaaccctaatattttcatatttatcatacatgcccacacacatctaactttaaacttatgtaattagatttccatttttcaaataatatttatatttattttagcctaaatttagattttatgtacataaggcacaagcaaatttatcttgttaacttattaaaataaaacaatagagtagccgttcgattaggcctaaattcaatatatcaaaacattcaatcaattgaataacattttggtttggtataattaagaagcaagtttagatccaaaaatacagtctctattaaataggaaaactaccataatctttttaaggaaactaataattcatccctcaccataattatactaattaacttgccattctccttcgcctcctcttctagtcttcttatgattatttttcttcctcatcttgttttttttttttcagacaaaaacctagatagctaaacatgccttgtttgttcatcttcatagctttgcttctaagttcttgtattggaacgttgaaagcccttgatcagacttgtggcaacaaagtcgtgaacacaatcgtcgtcgaccaagccggttcaggtaagttccgtactgttcaagctgccattgattcggttggtgaattgaattctctatggatcaaaatcaaagtaaaacgaggtgtttacgtgtaagtaaataccaactctctactgtttttctttttccaattttagaactcagcgttcttgaccacaattttctagcatttgatttgtttcgaatgtaaaatattactgtcgttggtgtagaaataatgacctagtagcacttgacttcatcttaggcctctccacaattctacatttatactcaaataatttttctagtttcttcgttgttttggagagaattaaagcatagttgatatcattaaatcttgaattcgtgatgttctggttcatagaattctagaaccgtaattaatctaatttacaacgatttcgatggatttgcaattgttaattttcttaatagtaagattaacattaatagtaacatattgttttgtatgataatgaatgtataaaacagagagaaggtgataataccatataataaaccgtgcataatagtagaaggagagggacaaagagtcaccaccatcacgtataatggtcatgcagccactgacgtcagctcaactttcacttcatatccatcccatattgtcgtccgaaacttatcaatcatggtacgtaacggaacggaccaacatatcttttgacttatatactatattttgttacgtaacaatataattttgataatgataacattttatatgtttttgtggcagaacacttataatcgtttgactagtctaactaaagcaaacggtatgagttgggatataaagccagcggttgcgatttcggtttatggcgataaatcagcgttttacaactgtgatttcttggggttgcaagatacagtgtgggataatcttggcagacatcacttcaaaaattgttacatcgaaggtgctatcgatttcatttttggaagtggccaatctgtttacgaggtatgtatacttaatatctctctctattacgtacacttcgattttcaatggcaaaacacgaaaactgtacttgatcactatttacacaaagactgttacattcacagtacaaacacacttttataaaatctttgtttcaaaacgccctagaaaggagctaggcacagccacaccctgtactaaaatcagctttttgttctagaaaaagtaacatttcagtcattcaaataatagaaacaaacttggttaaaaccttgtttgtagcatgttttttcctagaacaaaactaaacatgtgacttgactagctaggaggactgattttttgtaagtcaacaagttgattttgagacaccaacgattaagatctatgtgaaacatgcatgaatcgtataaaatgtttgacaggactgtcatataaacgcaacggcaggagcattggcatcaaaagtgtcgtttgggtacataacggctcaaggaagaagtagcgattcggacccaagtgggttcgtgttcctacgaggtagtgtttcagggagcaccagtgtctatcttggacgagcctatggtccattcagtcgagtgatattcatccaaaccgatctctcttccgtcgtgcaccctgagggttggtactcttggcactatggtggatacgagtaagcacatctctaactataatatatcatatataccattatcaaactatatgtgataatgatgtttttttttgtgtgttaggatgagtttcacgtatgcagaagttgagtgtaaaggagcaggatcggatatgtcacgaagagttccttggattgataaacttcattctttttacactaaacaacaattctctatctctaatttcattgaccaagatcaatggatctctaatattcctcgtttttaaataaatcactttctcttttgttagattctagttgttttatgtaatttgtatttttcctttcttgttgaatattattgtctctttgaagtttgaactatgaagactttttattttcttaccttgtattcaaaccaaactgaaccgactatatatgtatgttttctcgtttcgattctggtacatttcgatcgctctttttatatgacttcggttttcatttcaattcggttcatctattacccgagtaaaccaaattgttattattattggttcattcattcattgtatttcaaattttgattctttatatttagtactctgccaattttcatcaaaattgcactaaaacaaaaacaaaaaaattagccaaattgtaaacgaatttgaaccaatatttggtaaaactgaaccgcaattccattcccagaattataccgaaccgttataaatacggttcaaagttcaatctcttcaactaaaaccgaacttttatctattcgaaccgaaccaacagaccca

SEQ ID NO: 7671 - DNA, 3000 bp, Unknown
  misc_feature (1)..( 3000): cDNA_ID_1818519_gDNA_ID_1621156_Annot_ID_57025 3000 nt of promoter + ATG
ctttttggtcaagcattcaacattttctacattttttgtaaagcagatcaatcttgttcttggttttaggtattgtctgaggaagagcagactgtaattgcagccactcctgctcaccctgaaggattatatggttagagctctctcactagttcattatcatattagaggccatggttatatcacttatggcatttcccatcatgatgacattttacttgtttttgatcagtcttatatgcaagttgtttggttggaaatttggttgagcaactttggaattttgcttggccgtccgccattgcaatgctatatccgagcttactacctgtggcagtcatggggtttgtcactaaattggcgataattgctggaggccctgtggttggaaagtttatggattatagtccgagagttcctacatatatctcgttgaatgtcattcaggtaaacttttcaaaaaacactgaatgaaaacatcacacatgactttgtggttactttccttcaacttttgtcacctgacattggaattaagtgtccatgtcataaacttattttatgtctacatgtttaggcagccgctcaagtgctatctgcaggaatgataattcatgcatacacggttccttccacatcggcgtcatcaattcttctgcagccttggttttttgcattgttattcgcaggggccattgacagtctatgtggaatagcatctggagtcgccattgaacgtgattgggttgtattggtatgctttctttgtgatgccatagaatacctgtttttataagaagataaaccgactgaagtaattaatttatcatttggtagttggccggcataaacagaccaatcgctcttgctcaagcaaatgctgttctccacagaatagatctgctttgcgaggtatagtaattttctctatggaatctatgtactttatgccctttgaacttttgaactccagtaattcatcaattgacataattgtaaccttaaatagatagctgggacgatgttatttggcattctcctatccaaatatgaccctgtgacctgcttaaagtttgctgccacactaatggtgggttctttgccaaccatggtaagtagcacctataaacttgtggttattcttctttcgtccaagctaaataagggaaacacaaagctgctgtgttgtacgaggctgaactatgtgtaatagaatcattcctgtttcctatgtttcaagtttcgaattcttttttcttcaattaaaaaggcagtctttctcgtttaggttttggataattggagcttagcctagatggagtattattagttcttttaactagataaataagctgtcatcaacattggagtgatactgttctgcttcagatcctagaagcaattccacttgcgctttaccaatttatatgggacttcttaccatcttgcacttctaatagaagaaatctgttttcttcagacagctcttatatggctgaccaacaagttctcctctggagttctggaccgtcctaaatgctccttgaacagctgttctgctgaaggatctcgtactaataccgacagtatttgtaaggaaaccttttactttatactacttggatacgcataatttatgatttgagcatgtagtagacatcacaaaataccatttgctttgttcatcagttgatattggcatggaaactatcaagctcggatggaaagaatatattcaacagccagttcttcctgctagcctcgcatatgtccttctctactttaacatcgtcctcaccccaggcagcttgatgactgcatttctaacacaacgatgtatgctacttcgactcggtcccttacttttctttagtgcttggatgaaaatcgtaattaatcttgcgagagtctttgtgctattacctattactctttcaaattagtcaccaatctgtcttttttcaacaggtgtgaatccatcagttattggtggtttcagtggattatgcgctgttatgggcgtcgccgcaaccttcttatcagcaaacttggtcaaacgagttggcattttaaaggtgaaatgttttcccgccatttgttatcttgagcttgtattgcgttcaagctgattaatgttattgcgtttgcgttttaaaacgatgcaggcgggtgcagtaggattgtttttccaagcttcactccttgccgttgctgttgctgtgtattgtagctcttctctatcccataaaagcccactcttcttcttcttgtccatgatcgtaagttgtttcttcactctctctctcgaccagtaatatgcggttttggtgttgactaaaaggtaacaaacaaatgcaggtattatcaaggctaggtcacatgtcttacggcgttgtgggagctcaaatacttcaaaccggcattccatcatccaaggctaatctcatcggcgcaacggagatctcagtggcaagtctagctgaatcgcttatgctcggagtagccatagcggcgaatgacgcttcccatttcgggtttctcgcggttctgtctcttttatcagttgttgcggcctcattgatattctgcagattgctgagaaatcccactgatgaacaaagacgactcttctccttcgaccctctctcaaattgatttggagcttttacattgaaatatttgtatagtagtttcactttcagtgtataaattctttatataaagtaaagaaaaaaattgactttggtgtgaaaaattcaagaagtattccacttccaccattactactctaaacaaaaagtactaaactggctaaaccttagttatttttctaaaccgagaattaacgagataatttaacaatcgatttcaaaaaccagcaaaccgaaatcacccaatttttggtcggtttggttcgattttgttttctttcacccctgacgaagaaaaaaaaaaccctagtcacactcagataacataaacctttgacaacaaattttg

SEQ ID NO: 7672 - DNA, 1943 bp, Unknown
  misc_feature (1)..( 1943): cDNA_ID_3051118_gDNA_ID_1621156_Annot_ID_173538 3000 nt of promoter + ATG
cttaatcattattttgaaatttgtaatgacttatgttctcttgttttcatgtctcagtggattccacaagactcgctgtctgctcctatatcttcagcggtgtacgcatgcaacagccagctgatctacaccactttccgcgatggtaacattggagtatttgacgcggacagtctcagattaagatgtcgtatctctccatccgcctacttgcctcaagggtaagtttatccaacatttcatcagattcttatttctaaatcactgtactttgtaaggtttggtacatgaatctgtataatagacttaaattgacttctgaaacatgagaaattggtatattttcataagccaaaatagttataaactcttctcattgattctctttgctttcacaggaatcaaggcttgtctcctcttgttgtggcggctcacccgcaagacccaaaccagtttgcggtaggtttgaatgacgggtcagtgaagatgatggaaccgacagagggtgaaggcaagtgggggatgattccaccctctgaagctatcaattcaccatccaccacaagcaaccaaactccagaacagttacaaagatgaacaaaccagaatggcttcctcataatccatcaatgtaactaatctcgattatttataggcagtgtcattagatcttcaaatgtagccttagtttcaagatttcaagatttcaagatattgaaaattggtaagaaataaagtttgtataaactacctgcaaatctctaatgagtgaatcaacaagaaactgaaactacactaggactaatactgacgaaaaccgatcaaccgtcatggctcgggtaggagaattccgtcaccatcatactgcaaaaccccgttcattggtttgcatctttcacccattagtattctcttcttgcacagctcctcttcttccattccttcacttaagcttcttcttcggtttcttctcctcttcaatctttgccctaagatgagtgtcttcagtcgaattcttgcgctttcccagaaactccccttcttctgaattgggttttgcttgagtttaacaaacacggtctcatcgccctcagaaccatctctctgttctctgttttcacctgaaagtgttttcttgcggttgaagacaccggaaatcacagaagtcatcttcttaactcgaaaaaccattctccgtctgatgaaatctctcttcatgttctcttctttctttatcttcttgcccatatcggcctctttcttgtgcctcctcgttatctctgatggtttaggtagtttgatcttgatcgttccttgttccattgaaaccctaaacttctacgacgttgacacagacgagtcttggcgagtctttgctcgtctcagggatgattttagagtttgatgaagatagtgatatcgtcatatgattcgatgaaaatggtaaagagagagttagtggtgtttgtggagagagtcgtgggtttgatttaactacacttcttctagtggtacagtacgttgacttgtgagaaaataaaaatcaatcacccattaaaccggccccgttttagccaatttgctttaaagcatctaaaccggtctaatcaaacgacttaaccaactaacacagttctccgtttcagaaaaccctaatttatcgttccttgtggtataagattgtaagaggaagattcatcgataacatggtttactcctctcagttcctcatatctctggtttagttaaatcgtttcggtaacccggttttggatgttgatttattttaagaatcaatcaaaaatcttcttaaacctcaatttctctctcgattcatcatcatcttcatcaccatcaaaattctcagttctccgggttggttcttcttccttcgtaaccagctcctaggctttgatttgatttacaaagatacaaaataaatg

SEQ ID NO: 7673 - DNA, 3000 bp, Unknown
  misc_feature (1)..( 3000): cDNA_ID_3051122_gDNA_ID_1621156_Annot_ID_173537 3000 nt of promoter + ATG
tttgttcagagaatatgaaagagtagtgtgtacattttgcctattgcctcaaacacttctttgagccggatattaatagtgagaactatattattttttagtatgtgcattttgtttttgtaaccaagatgtttcgagttttgggttggagaccataacatgttaattagtcttttctccgctaacaaaactcgaacttgataccttgaggcgcactttgtttggaagctccactcgaacttgagaacttaatagaccattttctttcaagcattgtgtcatccaattgatttttaaagatccagcaatcgttttaaagtgttggaaataccaaaatttacaatccaaggaactataatcttactagtattgatctaaaactataaataattatatagtcaattagatagacacttagttgctatcacaacattcgctgttatgttaccacaacaatctattcaaggccaaagtgtttacgtcgggagagacagtagaccttgtttactattcttaatgttccattcccaaagataaagtagacacttgaggaccctttccaaagccctaaacaaatcaaaagtgttttccaagtacatcaaatcattatcatcttaacctcttttgtcgtcttgtgtccaatctttaataattatgctaagcattgttattatctatttatgtatatcgtaactaagtaacacccttagatatctaaacagagataaacatgtcattagtgaaagtgatgtttggtctgtgtctcctactaattaggaagcaaatgaaatgatttcttccacttagcaatttaattaacttgattaaattctcccccaaaagagctaataactgcctcaacttaaaactatgcacttaagggtcttaattgttacaaaattagtaataaacggtcccatttcggatgcaataatccatttattattaagatccattgaattggaccactaaaacgtatacatacacacacacataatcataaatatatcaaaagaaactatctatctaagcaaagctatacttttacaggttggtgtgttcactgtgtttggcaaaaagggtcatgttcatttttaaaagttggtacttagatttctgtattttcaatgtcaataaagagacattcttgattttttttcttctaaaagatatgataataatacatgcaatgtagatattattatccccactagctaaaatcttataacagcatatttatagatcatggaaaataattcaatatttttgtctatttatgggggagatgacatgtagttaaatagtgcaaaactaattttagtgtaaaagttgaaagaagagaagaaaaaagtggaggttcagaaattgatgtgtgctttttatgaactgaaaactttatgtgcctaatcctcactttagccagcatgtttctgggctgccttttttagtgggccatttgatttcggcccgagtatttattttaatgtaatccttaatctaaaccattgattttataattagccacgtcgatcgaaaatacgcgcctattttttctttcctatggttaggatccgaagcttgggtttgaatatatttttatactagttttcaaaaactactgaaatatgcatgcccaaagttataaatgactgcaaaaattttgttatatcaaagtttcacccaataataagttatgtatagtaataaataggatgaaatcattaaaaagattttatgatataaaatgagataaatttgtggaatctacaaatcatgcatgtacttatattttatagatggataggggatactaatgtttgtgatatgcagagagttaattctcagctatagaattataaatgttttagattggattttgtaatcatgtttttttcaagtattaacattaattaaggataatataaatgtaacaacataaatttaacttcttcatatgcactaataattgtattgaatcattatttaatgtcaatatgttacgaagtaaaagttattgggaaaaaatcgactagtagattcatacattggaaaacaggtattatgcgaatgtgactacgaaacaaacttatagtttggaaacagtggattgatttgatgaaaaaatatatataaatcccgtatgcgaagtatataaatttattagaatttatatacttcacataagttagtttgaaattctcctaaatgataaaagtatgtattcaaaaatatttatatagttttaatgtccatgtttcataatccgattagtcagtacctaatgatcaaaatttattgaaaatattttattgaaatcacacactactctacacaaatattcttaggatccattacataaatggaaaatagttgtaacttttatagaataaaagaaaaagataaattattttattccactcattaatataaaatagtttatggaatattttttccttacaatatcctcagctgtgttgttaatagaataagtatccatatttgtccagattttcagcataaatggtataaaatacttctcaatattttatttccctaacatttactcctcttattgtataatcatttgcacccttacatatatttttatccaacctaatcaaaattttctcttctctgatccataaaactatacaaaaaaaaatagtaattaagagattaaaactatactaaaattttccttcttttaaattttgttttgtttttaagtttataaggacaaattacacatattgccacgaacggtaacaaagaaaaggaaacgaacctgggacgtttggagtcaggttcggagcgtatttcgccatctttcttcttctcccctaaattttatcttttagagagagaaaaaaagtgagagccgagaaagtgagggaaaattttcatttcaaaacaccttttcttcttcttcttcttcgtcttcttctccctttataaacaccgcaattttctctgcatctcataatttcaccagaatctcag

SEQ ID NO: 7674 - DNA, 3000 bp, Unknown
  misc_feature (1)..( 3000): cDNA_ID_2124179_gDNA_ID_1621156_Annot_ID_173535 3000 nt of promoter + ATG
cttgaacgaactcgctctgtttcaacttttctctgtgatcctctgctgaaagagactgcttctcaacattcctgtataagacagatcaagacaagaaccatcataacaaactctgcaatttgcatttctacaacaacaacaaaaaaaacactcagatcacaagagcttttaggttattggtaaaacaagggatcaactaaattccattaaggctcataaaaactaaggatgagtaatatgcgatgacttaacaagaatgatcaagaaatcaatgaggatatcatccagaagtgtaatccaaatgagaatgtggaagcatacctttcaggcaaactctgattcaatgttttcttggcagaacttgtgtctgcacatagacttgactcagaaatgaaaaagtcatcagccattggtgaaatgaatgaagacagtaaaggatcagcagctatactggcagaagaagaggatacagcacgtgatgttccttcaaataggctctgaaaatttccatcaggaaactctctcttcaagatcgatagcatggattgagccccgcctcttcttgatttccttttccgcgtcacgtaatattttgttaaggaatgtaactgttagagataaaatctttattatgatagtagaaaagatagaacaataaagcaacaagagtataaactcaatagaatcctccaaagctctcaattgcttggttaggtttcacaaacaaaacctaacccttacttctaacagaacataaataaaagactctaggaaaagtaaatcctaaactatttcctaaatcataaatcaggaagtattcatatcattaacacaactcattggaagaatcagataagtacatgatcgttaaaaatataactggtagagagagcaaaaaggatatcttgaacatatttgcatgttgtagggttatatgagcaatcatatcagagctcactttcaccgcacaaatgggacatacctacaagattaacaatgtcaaaacgcagaattgaaaacaaatcttgctattgtagcaataaacaagtgtcctagagttgatttcttctctgaggaacactgagtggcaattccaaatactatttcgacgcatttcattaggttactttcactttctttatatccaagaccagtaactactaaacatagaacagtgctcttaccaagaatgatatgatgaaacaataaatagattttgattcaaaacgagagaaaggtaacattgaggaaatatctaccccattttttgcatccataggatgatcttcatcaatgtgacagcatagagagacgatatcaaaatagtctgaacagaacgggcaagcatactcctccctgaagtcatcttctccttctatctcctcaaaccccaagaaattgtctgcgtttttcaaaaatgaagaaactagtcaaacacggccaagagaacattcgaaaatgtgacaactacaaaacaaaagcctagaaaataaaatgacaactacaaaacaaaagcctagaaaataaaatgggaaatactaaaaacgcgttccattctcgaagttccaatacaaatgggtttcagaagaaacatcaaagatatctaaataaacgaatggaaactagtagatcataaaaccttccctggcaaagacgtctaagtttgagatgaaactaaagcttttaaaaacgtttttaccaacaagaagttttgtatttacttgtaagtcaaacaagaatcatcaagattccagcttttgacattaagttcataccaaaacctagaaacaaaacacacacgcttaatcaatccctaaagcctcacattagtaaaatgcctcaaaagacagaatttatttcctccattttccttaaattcaatatcagcaaaacaaacatttgaacaatcaccatttcaaatattcagaacaagacacaatcaatgtcttgtcccattttgttcggaaaaccagaacagtaacaaaaatgtcaatctcttacagtcaatctcgatccttgatcaattcaaaagaaaacaaatttgaggtctaaatatcattgatatttttgcaatagaatcaagattaaatttaagacaaaaccaatcaaatctcaaattaagaaagaacaaatccaagttataatttttatcaaactcaccagatcgagacaagaaatcgagctgatatcttcttgaagccgatgcgagacgatcactccaagaatcagaatccattttttctacgaagattattacaaatcgaaaccaaagaatccactttttcaacaacaacaacaaaaaatcaaataaattccaagaatccgaattgatcttgagtccggataaaacaaaaacagagatattccgattcaagaatcaaaagattccgacgaaatgcaaagacgaagacgacgacgacgattttgcgtcttttttttctggaattcgtctttttatcttctttttttattatggtttttaattctttggatatagagagagagagagagtgaaagacatagaagagatgagttctattacatgtattaaattgttttttaacagcccgcacgaatgcatgccgtttaaaccttttacccgccgtgtttttcccttttggaatatcaaaacgtcatgctgttagtacgacgcttacgtgtcgaaatattattggtttgtatttggtaagctggtgaaacaggacaaagttagccgcgcaactgttttttaacttttttttttactgtttccaaagttttaagttttggggaaatagtgaaaagtgaaaacctcaatttgcaaatctgagagtttactttcctcatcggaaaaagttttgatctcgccgctctccgagcacttccttgtcggagtcccaatttttgtgttcggttttattctcggtcgatgatgaagccgcgattgtgttcagatcggagctgatttcgaatttggatgtgaaattgagattctagggatttcaaattttgacgatcatg

SEQ ID NO: 7675 - DNA, 3000 bp, Unknown
  misc_feature (1)..( 3000): cDNA_ID_1818501_gDNA_ID_1621156_Annot_ID_173526 3000 nt of promoter + ATG
tttttagtttttttgaattaaaaccttccaaactattgttattataaaattttaaaaccttccaaactattgttattaatattttcaaattttaatgctttacaaaatgtcattatttttgttattaatatatgaaaaagaaataaaaatattttgaatgtttttgttcatcaataccgatcaacactggtcaaccctatatttagacggttggcataccgagataaggtttgaaaaatttctcaaaaaaattataagaagatgaatctctaatctcaaatgtttgtttacatagaaatttactttctcaaaaaaatataaaaaataaagtataaaaaaataattaaatctattggatgttctaccaaaatatagaaaatagaaaataaaaaaataataagaaataaatctagttgtcgagggttggaccgatcaatcccaacatatgtgtctttatttgtttcgacatgtgaagattggaccgatcgatccatgcacttctcgtatcaattagtccatgagcttccgggatattcaacgtcgacatctgggatttggaccgatcagttcaagtcttgaatcaaccgatcttttaagtctttagggaaaaatgaattttaaagtacaaaatttagacccatcagactaatgtttggatcgaccggtcttttaaccctttctttttctctcatttattcttaacccgaacagatatgaaacctttcaaatcaacattacttagaatttgtaaaagactcgaaacataaaaaaaaaaaaaattagaaaagactgacgttagcacgacaaacacatcaaaaagaccaaagacaccaaaaatacaatatatcaacattccttctatatatgtgaaatgttacattttttgtgtggacaataaagttaccgtgtaatcaacaaaagaaagtaaacccaaaagatatctgggaactgtgcacaaacaagtgtctatttttggcaataacattaacaaacacatacatttacaatattagaaagtggtcgacaaaatactaaacggtggtcgaccgtcgacagaaacaaaaagaattgcgaaatggtaacactaattatttgtgcaatagttatgatttctataaggcttatgaaaactgagatatatgagaaagtggagcccgaaaacccattttgtggttcccaaaatacatggaaaataactattacgatttggcatattagacctttgcactgtttactataaagtttttttgccttcttctataactgaaaagtttatacctttgtatttgtatttccatctcccaatttgctctacatatctctctatctatagctgtttggacggactattattcacttattattattatttatttcattttaaaatttaacacaaattttattaagaatattatcttatattgaaagttgaataaaatcttaatatatacctcttattaacacaaactatatatctctttattgattgtgaattggttttgaattaaaaatccacaatctaatatagtattaaagtccaatttgcacatattcaattcaatttacattggtctgacctaatattaactcgtcaatccatatccgaacatatcaaaatcaataggttgaaaaaccatcatctcaaaaaacgttttagaaaattatttttcacattacaaattaaataatatatatatatatataatataattatttttactaattattaattaatttgagttggaaacgtacaatttaataaattctttatttcataaaaacactatactttaaatagatatcatatacgaaacagactatactattagcagagtatatcatttaattttcaaaacaaacaataatttggcataaactaaattttctttacgtaaaatggtccatacttgatctatatagtactacggattgggatttatgatctaatccataacggttttgtccatcgtggccattcaaatctcatatctatatttggattattaatttgcagaagaaatttataatttactgaaacctacaaacaattaattcgagacaacaaaataaaataaaaagggaataatacattaattaataattttggcagaggtggtggagtgagaaactgggaaaattcaaaacactctgtttctctctctcctctcactcttcgttctcttctctcgtcacatcaatccacactgtgaagtatctgtttttttttttttttagtttttcaagttctctgctgctactattggtctgtcttctctacctaaatcccaaatcccaaatcccaaatctagtatcatctaaccttacttcgtcctcttttgatttaacctctttctctgatctgacccatttctcaagaatctctctttcttcttaattcattggtgttttaaccttttcatcgattccaattctcaattgttgtctgtttgaggaacacaagacccccccttcccctagtgttgctcgcttctagggctagatcttctgggaacgcgaaagtttaggtctttaatcgattttgtgcgtaaacagtccgcagcatttctgggtttttgttcccgttgctacattttgttggtaacgtgtcgaattcgagaatttgattggtttcttcacaagggtctctggagttaacccaaaattggaatgagctcataagttaaagttgaggtctttgtaacctttaggtaaatttgggttcatgtgtgatctgatttctttgaatttcttaaaccgattcaagttttggtctttcacagctctcttctgtattatcctgtggtggtggtctcttctgaatgtgaattcaaattaacctgtcttaatctccatttagttcagctagaagttgggttaatttattgaggtttatgcaatttttggtccggtttgttttggaatcaagattatttttcgctgcatcttgcagtccaggacagtgattcagtgattgtgttatctgtagatgaactaaaaatg

SEQ ID NO: 7676 - DNA, 3000 bp, Unknown
  misc_feature (1)..( 3000): cDNA_ID_3051076_gDNA_ID_1621156_Annot_ID_173518 3000 nt of promoter + ATG
gaagtttaaaataataatataatttatttaacattaatttaatgagagaacattgtatttagcatgtattaatttgttttttaaagtcatttactatgggtaataatactcattaaaaaggccattgaagtttaaaataacaatataatttatttaacattaatttaattgaataaaattgcatttatcgttgtaatatagtgttttcattcattcgttacatcaaattaaaaattttgggcttataagacttaatttttgaatacttatgttatattctaagaatcttaacgcacacgttgaatacttatgttatattctaagaattttaacgcacacgtgtcacgtttattgttcagttgttgacatgtatcagatattttgtaattttttccaaaatgaaataggaaactaaaaaataaaacatatttacatattcaaatttatatgtcaacatctacaatatttaacttataattttcttaactagaaaggaaactaataataatataaagtgtataaaattaaattgtatttgtattgcaaaatcaaattgtatttgtattgcaaaatcaaattgtatttgaattttatacgatcaaattaaattttatttgtattattataaagtatatatttaaattatactacaaaatcaaatttgtaagattgaaatttggtttaagaaaatattaaattaaatattaaaagtatatcagttactatttaaactttaaatatcgtcaataagatggagtgtatagaattaaaaggcattttattatggggaaatatatagttaaaatgggtagtaaaattgaatgtgtatgattaaattttatttaatacataaattactaagttaaatattagaaaaagtgtgtggatctctatttactatatcaaattaaaatattatttataaatattttaataattttttaatattttatatccagctatttaggtcggccttatctggtatgtatatattgtaaaaactataaatttatcatgtacgatctttttgaaaaataatattggattttagagacaaacgaattatattttcaacagaaatcctgatttagttaaaaaaaagagaccaaaaacccctaatgtcgattgggaaaaaactgacctacatgatacatgataatcaacactacatattttttctttcgtcttttgaaaattggtttttaaaagaaagatgcaaattcaataataatttgtttgtggttttaatagtattagaaaaagcatattcttttaagttttgcgtacactgttggttcaagtccattagttacatttttttatattacattttttttttagttaactttgttactagatcttatgatacaaagctgaattttaaaaattcaatgacttttctaatgaatttaaatatatttcaatgattttttttaattatataaaaaattacattatttaaatatgcattaggccaccaaaattaaaaaatcggtcatgcaagaaagtctacatcaatgagtacgtcttgcgtctgatccccaactttccttctatatatggtaacaacaaaaatcgatggaatctttagacctaatatccaccaccggcaaatggcaagtggtcaaattagcctcaaatctcaacccgatgaaacctaccgtcaatgtgccacaaggtcattatgggttccaacatatattttgtcaacaagaaaggcatgggctgcaaagtgttggacttggacacaacaacacttaaaatggagagaaattatgatgcagctatgaaaaacaatgattatgccacctccctgtgttataaacaagcgtttatatatatttatatatattgttatattcttaattttggtatgaaaatgtgttattttttcaaatcacccaaaaaaacattccatcagaaaaataaagaaggctaatggaaaaaacacaaacaattggaacaaatccaaaggatgtcatcaataagccatatccaccatgtaaaatgtatacaatggaataactaaaacacaaatccaaaaaattaaactttaaataaaaaaaaactgattagaatctaggttaaaatttagtttttgatcaaggtatgaagaatgtatctcttcttcacaactttatcatcttcgtatagatcacatttaaactttcaaagtaaaaacataaagaaatttacaagatttggataacttcgaagccaacttttaatgagttcagaacctaaaaattgtgggaaggacaacaaccaaattgttagcctttggacattaatcgatggagcatcgattagcctctggacattaatcgatggagcattctgacacaagacaggactatagcctagttctgctttttctagtgagaaaagaaaagaaaaaaacattaaaatctgtgacatctcacgtgctctctctctctcttctatctctaattgtagtttgtatccaaatccacgcgcctttttccactctctgtctccacttttctttctagattaatcaaattctttgaaaccagtttctcacttcgcctctctcttcagatccgtcctctgtagctctgtatgtctcttctaatctctcctctcttacggtttctcgagattcttgtgttctgtttactcaattaccttggaaattaagctaaattttttgttagggtttgttttagaaatcgggtaaggcacatttgtgtttgatcttgttcctctgtctccaaaagcattgattcatacccagtttcgttaggttttgatgtttgaaccttaacatttgaattttgaatttcaaaaagtatagatgaggtctggtttctaagttcccccactcagaaagtaatgatttttttggtacttttcctttgtttgtcttggtttagtaactttttgtcttttagggtttacaaaagattgaagctttatgttctcttcttttgattttccaacacttatctcttgttctgtgaagggttgcagagaaca

SEQ ID NO: 7677 - DNA, 3000 bp, Unknown
  misc_feature (1)..( 3000): cDNA_ID_3051084_gDNA_ID_1621156_Annot_ID_173514 3000 nt of promoter + ATG
cctcctcttctagtcttcttatgattatttttcttcctcatcttgttttttttttttcagacaaaaacctagatagctaaacatgccttgtttgttcatcttcatagctttgcttctaagttcttgtattggaacgttgaaagcccttgatcagacttgtggcaacaaagtcgtgaacacaatcgtcgtcgaccaagccggttcaggtaagttccgtactgttcaagctgccattgattcggttggtgaattgaattctctatggatcaaaatcaaagtaaaacgaggtgtttacgtgtaagtaaataccaactctctactgtttttctttttccaattttagaactcagcgttcttgaccacaattttctagcatttgatttgtttcgaatgtaaaatattactgtcgttggtgtagaaataatgacctagtagcacttgacttcatcttaggcctctccacaattctacatttatactcaaataatttttctagtttcttcgttgttttggagagaattaaagcatagttgatatcattaaatcttgaattcgtgatgttctggttcatagaattctagaaccgtaattaatctaatttacaacgatttcgatggatttgcaattgttaattttcttaatagtaagattaacattaatagtaacatattgttttgtatgataatgaatgtataaaacagagagaaggtgataataccatataataaaccgtgcataatagtagaaggagagggacaaagagtcaccaccatcacgtataatggtcatgcagccactgacgtcagctcaactttcacttcatatccatcccatattgtcgtccgaaacttatcaatcatggtacgtaacggaacggaccaacatatcttttgacttatatactatattttgttacgtaacaatataattttgataatgataacattttatatgtttttgtggcagaacacttataatcgtttgactagtctaactaaagcaaacggtatgagttgggatataaagccagcggttgcgatttcggtttatggcgataaatcagcgttttacaactgtgatttcttggggttgcaagatacagtgtgggataatcttggcagacatcacttcaaaaattgttacatcgaaggtgctatcgatttcatttttggaagtggccaatctgtttacgaggtatgtatacttaatatctctctctattacgtacacttcgattttcaatggcaaaacacgaaaactgtacttgatcactatttacacaaagactgttacattcacagtacaaacacacttttataaaatctttgtttcaaaacgccctagaaaggagctaggcacagccacaccctgtactaaaatcagctttttgttctagaaaaagtaacatttcagtcattcaaataatagaaacaaacttggttaaaaccttgtttgtagcatgttttttcctagaacaaaactaaacatgtgacttgactagctaggaggactgattttttgtaagtcaacaagttgattttgagacaccaacgattaagatctatgtgaaacatgcatgaatcgtataaaatgtttgacaggactgtcatataaacgcaacggcaggagcattggcatcaaaagtgtcgtttgggtacataacggctcaaggaagaagtagcgattcggacccaagtgggttcgtgttcctacgaggtagtgtttcagggagcaccagtgtctatcttggacgagcctatggtccattcagtcgagtgatattcatccaaaccgatctctcttccgtcgtgcaccctgagggttggtactcttggcactatggtggatacgagtaagcacatctctaactataatatatcatatataccattatcaaactatatgtgataatgatgtttttttttgtgtgttaggatgagtttcacgtatgcagaagttgagtgtaaaggagcaggatcggatatgtcacgaagagttccttggattgataaacttcattctttttacactaaacaacaattctctatctctaatttcattgaccaagatcaatggatctctaatattcctcgtttttaaataaatcactttctcttttgttagattctagttgttttatgtaatttgtatttttcctttcttgttgaatattattgtctctttgaagtttgaactatgaagactttttattttcttaccttgtattcaaaccaaactgaaccgactatatatgtatgttttctcgtttcgattctggtacatttcgatcgctctttttatatgacttcggttttcatttcaattcggttcatctattacccgagtaaaccaaattgttattattattggttcattcattcattgtatttcaaattttgattctttatatttagtactctgccaattttcatcaaaattgcactaaaacaaaaacaaaaaaattagccaaattgtaaacgaatttgaaccaatatttggtaaaactgaaccgcaattccattcccagaattataccgaaccgttataaatacggttcaaagttcaatctcttcaactaaaaccgaacttttatctattcgaaccgaaccaacagacccaatggccatggatgatatggttagccaggtggctatggattactggttacaaataaatctacgtggcttaatctcccttacacaaaactctctgtgccttttcttccccacttgagctaattcgcttaaacggcgtgcttcgcgacgaaccgccacagataaggttcttctttttttttccaatatctctggattttttttcccctcgttgaagaaaatctagtggtgattaagccataggggaaacaaaacccagagagacgagtttgctagattttttttttttttggaggctgcatgagtttggagaagaaggcgagtagtacaaattacaactccagaaaggagaagaggagaatcaatttatagaatggttgtttca

SEQ ID NO: 7678 - DNA, 3000 bp, Unknown; identical to SEQ ID NO: 7669
  misc_feature (1)..( 3000): cDNA_ID_2124101_gDNA_ID_1621156_Annot_ID_173507 3000 nt of promoter + ATG

SEQ ID NO: 7679 - DNA, 3000 bp, Unknown; identical to SEQ ID NO: 7667
  misc_feature (1)..( 3000): cDNA_ID_3051091_gDNA_ID_1621156_Annot_ID_173501 3000 nt of promoter + ATG

SEQ ID NO: 7680 - DNA, 3000 bp, Unknown; identical to SEQ ID NO: 7676
  misc_feature (1)..( 3000): cDNA_ID_1818515_gDNA_ID_1621156_Annot_ID_57026 3000 nt of promoter + ATG

SEQ ID NO: 7681 - DNA, 3000 bp, Unknown
  misc_feature (1)..( 3000): cDNA_ID_1818511_gDNA_ID_1621156_Annot_ID_57027 3000 nt of promoter + ATG
tgaactaaagtttgtttggtctcttctgagtgtttagcattatctataaagtttatttaattcttcttaattttcgtacaggtcttccctgacacacttcttgatgcacttctaaaagcaatgctgcatccaaatgtggaaacccgtgtaggagcgcatgaaatattctctgtaattctcttgcaaagttctggtcaatctcaggctggacttgcatcagtgagagcttctggctatcttaatgaatcaagaaactggaggagtgatacaacctctgcgttcacatctgtcactgctcgtttagacaagctcaggaaggagaaggatggcgtcaagattgagaagaatggttacaataatactcacgaggatcttaagaactacaaatcgtccccaaagtttcacaagttgaattccataattgataggactgctgggtttatcaatctagctgatatggtaacatttttccttgcttacaattggatgttgtgtgctaaaggaccatcatatgtttatgcaattgtctgatactgtttggtgatgcagttaccatcgatgatgaagtttacggaagatcaaatcgggcaactgttatctgcattttggatacaatcagcacttcctgatatcttaccttcaaacattgaagctattgctcattcttttagcttggtgcttctgtccttgcgactaaaggtcaacataaaagtttctcctcttttctggctctcttaatatttctctttcatagaggaagttttcactttcatgacgctatacttaaagcttctcatgattattttaattacagaatcctgatgacgggcttgttgttcgagccttccagcttctcttctcattgaggactctttcgttggaccttaataacggtactgattgatgaaactctcttaaactgatcaaagtttaagaaatcgcttatgtgcagtcaaactttctctttttcaggcacattaccctcagtttgcaagcggttgatccttgctttatccacaagtatgctgatgttcgctgccaaaatatatcagattcctcatatttgtgaaatgttgaaggcccaacttcctggtgatgtgagttcccaatgtgttgtttcagttattacttttattttatccatggagattgtgtatcacttgattatatactcaaaattttcaggtggatccttatcttttcattggagatgacttacaacttcacgtaagaccacaggcaaatatgaaagattttgggtcctcaagcgatagccagatggctacttcaatgctgtttgagatgcgaagcaaagtagaactgtccaacactattataaccgatattgtcgcaaaaaatctacctaaactttcgaaggtaaatcttatattttctgtttcttagtgaacaataccttttaagccccaatgttcgattctcttgtactgatttgattttatgtactctcttgttaagctcgaggaagctgatgtgaagatgcaaatcttggagcaatttacacctgatgatgcttttatgtttggatcaaggccaaacattgaacctcaaccaaaccaaagtatctctaaggaatcgctgtccttcgatgaggtaaactattctctgaagttccatattccattgggattttgataatattcagaactgttaacacttatgtttctttattacaggacatacctgccggttcaatggttgaggacgaagtgacgagtgaactctctgtgcgtttccccccaagaggatctccctcaccatctattcctcaagttatcagcattggacagctcatggaatctgtaagcatagaccacattcgacataaagaagaaactggctgatatatatatttgtgtcttcttataattggtttgtgatatgttatctaggcgcttgaggtcgctggtcaagtggttgggtcatctgtctctacttctccgcttccttatgacacaatgactaaccgctgtgaaacctttgggactggtactagagagaagctctcaaggtggttggccactgagaaccgtcagatgaatgggctctatggaaattcacttgaggaatcatctgcacttgagaaggtacgtaacagctgagttggtaaacacattagaactacaaactgttaaaatctgctatggtccttagtaatagtgagaaagatcataactttgtgataccaaatgggctggttaagagaaaggtagaaactttatcatacgaggcttacacgttgagacacgttgttacaggtagtagaagatgggaacatctatgggagagaatctggaatgttgcaggattcatggtccatgatgagactacctccagctagtccctttgacaatttcctcaaagcagcaggagctggaagatgattcaactaacttgatcatatcaatctctgtagaaagtgtgtaatcttgttgttcttattggatttgtagagaactaacttatctagggccaatcacgatgcttctcgtagtaatctagaatcagtagtaagtaatgcttgtttcgttaggacaagaatctctgttagtgttgtcgttataatcagtagagaaccaatgctatctagatttgtatcaaattctcttcattacctttaaacgcatcatcaaaacaaaatcgaagataaagttcacaactttaaaggccacatcttttactaatggcggtgaagcaaacggctttagttggccggaccggtttggttttctgataaccggaaaattcaatgaaccgactccaaaacgacgtcgtgttattgtgaaggcaaaatggtgttgttctctctgctgcctttaaaattggggttttgcttcgtcggggtttatgaagggctttgatactaatcttcgtctacaggcttcttctccagaattctccaatggtttcttgcctaaaaggcaaaactttataaaactcaatcgcagaaattgttaccccagatcttctttctctcccacc

SEQ ID NO: 7682 - DNA, 3000 bp, Unknown; identical to SEQ ID NO: 7675
  misc_feature (1)..( 3000): cDNA_ID_1818501_gDNA_ID_1621156_Annot_ID_57031 3000 nt of promoter + ATG

SEQ ID NO: 7683 - DNA, 3000 bp, Unknown
  misc_feature (1)..( 3000): cDNA_ID_1818493_gDNA_ID_1621156_Annot_ID_57034 3000 nt of promoter + ATG
aacgatcttgctcaaattatgaaggatctttctgcacttgtgatagatcaggttaaacttatttaatcccatattctctttgtctagcttttgagtcttcttcctttcgaaaaacaaactcaaagcaacccgtttaattgcagggtacaatagttgatcggatagactataatatcgaaaacgtcgctactactgttgaagatggtctcaaacaactacagaaggtaaaaatagtgttctctcttcaacattaatgtccaactatttgtttgtcccaattctaaatgaagtggatcgcataaaaaaacttcacaggcagagcgaacgcagagacatggaggtatggtgaagtgcgcatccgtgcttgtcatcctctgtttcatcatgctgctactcttaatcctcaaggaaatattcttgtgatcggatactataatccctggttagatcaataagaaaagttcgatccttaactatttcattctttagccccgaacatcgcatgttttccttcagggcttttggtttcaacttctttgcatttaacaatactaagatcctttgcagagtagttagtacgtaatattattgtgtagaagaagaccatagatagtcagaggtcgatgtctgaggagttgagagatctgtgcaccaacgccaaaatactctcttcacgctaaagtcaagtgttcttttaaaatgtataagattccagtcatagttgttggaacttgtttttgacaaaatggttttgaccattgtaacttgtggattttccggtgaagacgttcattggagtgaccagatttcgggcaagatggaatcgtagctgcgagcactacatggtggagtattcaaatgtgaaaacgagtttgtttgaaatcttttactttccggttattgtatcttcgcataaattacaaattctcaacattctagttcttttaaaaacatatatcatttacaaatgtataaatatttttcacttgaaacaatgaaaactttatacacgtttttgtgatgagttaatatgaattaaattacatctcaagttctcaactctagtttgaaattggtcatgccaaatagcctaattgaacttgtattgttattgtgtcattatcatggttcaaacccatattataatcatactgttgacaaaaattataattttaatattaaatttgtgttattatttttgtagataattagctggagggtttttaaaagaaaaatataaaaaaaaaattaaataatgattatatcagcgcttaaaaaagatagtattatcctggatagcacattattttttttatctgtttctaatgattctttaaattacctttaaatataataaattacatatctaagaattttttaaaatttatgataatattttatcttttttaaatgtagcatgtatataataaatttaaaacttatattatatatagtgcttcaataaaatccttgaacatgtataaccaaaaaaaaacctcaaacaacatgtgcatggatgtttaccaattatcatttaaaatatagttatcttatttacaatggatgtttaccaattattggttatatatttatttacaaaaataaaatgaaaaaaagtagttgatggttttagtctttttttcgcaatagggataattttattgtttaagtcaaatattacatggattatgaaataccccagaacaaaaaagctacagaaacatattaggcccaactaaagcccaacagagaaaccgtctatggaagaagaaatattatcttttgtctctatccaaagccacgtgtcttctgctggagagaaaccaatacacgtactggatgagaatccaaagttttcccgacttcatccttcgccgtcaaacatcgactccggtgaagattcaacgtcgattaacaaatcaaacatggaatcttatgggttttcaccggtaaaaataatcgaagccctaattagagaaacaacagctcaaggtaatgttaatatgcaacggaaatcacttttttttccaactcaaatctctgatttgtttcctgcaattctaaactcaaaaagaaaaacaggttagataataagtaacaaaaagcgaaaaccgctctatcattatcaccaacacatctcaaatgagatttattgaaagcaaagctaatttatgaaaaaacaaaaagcagcaaaagaacgctgacggcatagccgaccatcatcactgtgaaagctgaatgataccggacaagagctggccaacaccggaaagaactggtaattgccagacgataatccctatcagagaagacggtagccggaaaaaaattcggacggcaaagtgagtttgaggtttctctctctctgaaagaatttagaaagagaagagagagaaaaaactttggtacttaattaattatttaagtaattaattgatgattttagtttgtcttggaaacatacttaaaaccaaaaaaatatggaaatggattgtaatttgtcttggaaacatacttaaaaccactcaaaaaactagatttcctgtttttttttggagaaatgtttttgaaaaaccacaatcatttaaggccttgtagttttattgccaatggagtatgagttactatcaaaaattgaaaaacaagtgaaattcatatcctttttagtcttagctgtataattttctgcatggccggatctagttagtacctaatataagttaaactatacaaagttatagttaagattacttcattaattatattaaaagaggattagtactttagtagataacccataaacgaaagctaagtagttgaatttgcatgtgtacgtatatggagtataaagcagtatgtactatttatttatttagtgcatagtctttttactttcttaaatcacacttccctctcaactccgtaactcccacagatataataatttattttattttcatatcttagaattaaatttgttctctgaagataattctgatg

SEQ ID NO: 7684 - DNA, 3000 bp, Unknown; identical to SEQ ID NO: 7674
  misc_feature (1)..( 3000): cDNA_ID_1818489_gDNA_ID_1621156_Annot_ID_57035 3000 nt of promoter + ATG

SEQ ID NO: 7685 - DNA, 3000 bp, Unknown; identical to SEQ ID NO: 7673
  misc_feature (1)..( 3000): cDNA_ID_1818481_gDNA_ID_1621156_Annot_ID_57037 3000 nt of promoter + ATG

SEQ ID NO: 7686 - DNA, 267 bp, Unknown
  misc_feature (1)..( 267): cDNA_ID_1818618_gDNA_ID_1621157_Annot_ID_57041 3000 nt of promoter + ATG
gaattcatccctagatgtcagaatctaagcaatggagctactgttgaggtaagtaacttgtcaaatattttgtatgaaaactgaaagacaaaaattggaaaaatgaaaactttgttggtgagttgttcaggtgatggagagtagaccaagagcagatatctatatcaacttgcctgcattgagaaagctagattcaatgcttatggtaacatatattatccgaaaaatgtatatgactattctcggtctgattatgaatcatacatg

SEQ ID NO: 7687 - DNA, 3000 bp, Unknown
  misc_feature (1)..( 3000): cDNA_ID_1818614_gDNA_ID_1621157_Annot_ID_57042 3000 nt of promoter + ATG
aagacgacaattttttttatttgtttaacatgaatctaaattatacttgagactatagaaacaaatagaatttatacaagaaaaatgtacttaccaaaaaaaaaaatatatatccaagaaaaatgttgaaacaattactacatactttgaagattgatctaagcaaatattgatcggatcatagtaatgaattcgaaatctaagaccatacaaaacatgccataggaagagctttaaaaatccaaaaagaataaaaatctgaaaaatcccaaaaaaggaaataaaaatggattcacaagacgaaacccttgttgcatagcatagcatccaccatcatgtcaaaactagtctaataaataaaatactattttacccatttagcccctaggagcttaggcaagagaacgcaaggacagaatcggaaatataaaccagaaaaggttaagattttcttaccagaacagtgtgtgttagatcgaaattcgatcgatcaatcgcaaaaaaaagagagtttgttgttgttgttgcttctctgcttctattcgattattcttcttctatttagtctttgtttggtgtttgttctcttccttcttcttctttcctcagagcacacgataactattttcacatcccaaactacggaatcacaaaaatctgcagataaaggaattgtttttacacagcagagagagagagcattcgttgtcctcattacaccaaaaaagtgcacaagagaagagattgaaaaagaaaagagtcaaactttaacaaagcccaagactcttctttgcttcttcttcttctgggccttgttatttattgcttcttcttcctctctgaatctctctcgcgctctagatttcccctttattggaaaaccctcaatttctataaagttccaagctttggttctgttttcgtttaccaaatctctcccttgattcgtcgaatctcgtggttcttcgagtttctctcatcagggtcgaggtcgaattcgcggaatttcctgtcaaaaccctaactttgattcgactccggattgtggggtcatctcgagctcctattggttagttttcgatttgaaaccctagcttttatttattttatcgtacggattaatatttgtttgcgtagttcgatttggtatatttgatgatcatggtgattgttttctagctcagaaaaggatttagttttagcagatttttgtttgcttctatctggatttgttcttctctggtatgtatgtagcttgacgcagtgtgttttcaactgggaataaatacttccttcttcgataaagcatctaactttaattcagattctgttttgtgtatagaaatattgttcatgatgattatttgtatgtactagaattgtacttccacgctttcatgttttctagtttggttgcttgattagggttggcttatatttactcaagatacttatcatgcaaagctcagaatttcactttaagtgatgtatgttatagataaagtttcaggctaaatatttgaagagaatgtggaacgtattaggcgatttgaactatatgactgttagagtaagcgtaatgagctcttttgagcagctgatctgtgatatgattacagacaactaaatttcataggaatatatgagaattaaagccgagtttcaaaacttctattgcacacacaatattgagactatatgtaactttagtgttttcttcttcttattcagtgtaaattcaacaccaggggtacttttatgtttcagggtttacttccatcaatggggttgcgctgtcgccagtgctaagttttatgctgtaaggagatattgaaaataaaagtggaagtccatgaaaaagtttcttatggtgctagactgtggattggtgcttagagtttattgtggtatgttgatgtcagaaccagtatgctggatatagttgggagaaatgcaaaggtatcatgctgccaactgcactagtgcagtcaacaatagtgctataggtggtgcatccgcgagggactcaggacgagctgattcctcttcgattggaaactattcactaaactccaggcatgttgatagaaagaagtacttacatagttattttatatgttgatacatttgaagacgtttgaatactttctttactgcaggagaccaccaccgttgacaccctacaagttgaagtgtgaaaaggacggtctgaattcccggtaattcctctttcaccttatccctagtttaggtattcgataaacacaatatagatgattttaaattttgctgttttagatttgtagcttgggatttcattcttttatctccgataggctaagtccttggagtacttgttaatggatgaagttggcactcttttccatttttgatttacttccctagatgatttatactttttctctattgcagattagggccgcctgattttcatcctccaacatcaaattctcccgaagagaatctgaccaaagagtatgttcaatttggatacaaggaaactgttgatggacttaaggtgcgatcaactgaatttagcagctatgcttttaatttttttgtagtatcgtagttaattatcattgacatgtttgcaattaaaataaatatcttagatcttattttggaccatgcctatagtattttcctatagatgctcagcagtaaaataagaatagtttcttactgaggctgaatgttcattgtagcttgataggttgtaatgatgatttcttcaatgtagtcatataagatgcttacaactcagaaagtctacattattataagtttcatcttttccgatgttagagtttttaattccttattccactagttttcgcgcattatcttgtaattgaggttctgaacctttggcctttacaggaatccgaagaaattatattgtcccaggtccatactttctcaaagcctgttgtccataagtgcaaagaggtacggtactagaaattatagacaatg

SEQ ID NO: 7688 - DNA, 3000 bp, Unknown
  misc_feature (1)..( 3000): cDNA_ID_1818610_gDNA_ID_1621157_Annot_ID_57043 3000 nt of promoter + ATG
ccttgtgctcaaatttttgttttcagaaaatttaaagtgttagttacaaacttttaaaattttggacccttattgcaaaaatatcaaaaaatttagatcttaaaaccttgttaaaattagaaaaaaatggtggatccagtgctttagcactgcctctaagccgagcctgcttatacatatatgcagagaattttgcactatttgaaacgcaccgcattgtacagttcggtcaccattaaattgtaaatgatataaattgtgataataatacggtttagatgcttagaaactccacgttaagggaaaaattgcttacagtgtcactaacttcgtcagtggtttgtacccaaaaaaaaaaacaattcctcagtgggagagagtttatgtcgtcaatatctatttgtcggtcgataagtgccaacctcaaaaaacaatgacacgtttgtatcaatttctgaatcttaatttatactataaaatagtgtatacgtttgtacgcgtgctattgatagataagtggtaactatgtgtgttttgtgtatgtaaatgtataactatggtcccgtccctgactgaattaagttgcttaaagaaaactcaactcaagtaactgagcatggtcaagatctattcgattaaattttgatatatataccaaatggtttcgacttttgctaattgctatgccacatgaatcagacaatgctagctaattatttctgttgtaccataaagtgcttggctttatcagtaaaccccacataacaacattttgcttaacggaaactttaagtacgagttctaacattcaattatgctctgtttgattagattcaaacaaataaatagtttcttgatattgtaaagttctatttgtgtatttaatatcatatataagttttttttgcgattcaaactcgagttaagatagagacgattgacgtgacgttacaatatatgcacacgagtcacaacaaaatattatatctataatcgacggttgaaacaagaactctagctaatgttttggttacactcggttttcggacatggtttagaaaagcacaactcttccttaagagaatgacaaaacgtcgtcgttaactttagattaatgacttggtcaatgaaaacaatcgcatttggtgtaataatctcaaatactacgtgttctccatattccataaccagccaagcaaaagcaccaatgaccaattacgtctctcctctttggccgcgcccactcaattcttataatttatctatttgcaccctctttctctaaaaagttacaatttgacccctatagtttcactttcacttattcttataatttatctatttgcacctttttcctctaaacgttacaatttgacccctatattttcacttttattcatacaagcccattttgtttttctctctgctttcatgctcgcagacaacaatcctcgtcactgccatgtctcaaattcagagctttgagagatcaattatttaccggtgaggctaatgatgaaggctgttgaaaaaatctctgcaaaatacttttcttccatgtaaagcttctaactttttctctctctctctctctctctcctctgttgtttctgtagagaggaatagaagatgatgggcccattttccaactgtgattgttctctttatatttctttctcctgtggaggctagcaaaggccacgacgttgtggttgtcaaattggcataaagttttccacttttttactctgattttttctcccatttctctctcactttttctttgcctttgcccaattcagagaactaatggctttgtcggtcatcgatagataaacaaaatttaatctttatctctctctttctcttgtttgtcaaaagatgcccaccaacacagaaatgaggaaaaaaagatctcttttttatttgaatgttgaacagtaagaagaaggtttattctattctattgggttgggttgttcatcaactttggaaatttaaagatgcattttttatgatccttttttctccgcctttgttgttgatttgatcgtgtatgattacggaagcttgggggggtttttatcagacagaacctggaaaagttgtcagatgaaacaatgtggcttggagattggatcatcaacttttcctctgttttcaactttataagctatcattttgcttaatcttcttcattctcttctctcggccttggctttgaagaaatctcaattttcttcttcttcttcttctaccgttttgtccggcgatcagagctggttcaggagaaaccttaagtcttggtatcaaaagaaagaaagttttggaatttacctctgctgctgcaacttgcaacactttttttatatatattggatttttctatggctttgctcaaacgtaagcaaagcagatgaaatctagctacaatcgctgttgcccttgtatgaagtttggaatttaaggaattcaggagaatctaagaggtactttcttgtactttcctcttctgtctttttccaatagggaaaggtatcttatttgctccattagtctgtatctctcaggctttgtgttctcttagttctccttaatctttgccttattagttgaacaagtaagcaaattataaaaggagtttgctttagggaactggtagaggatcctttacttcttacttgttatcttaatttatttctcaagaattccattgcagtgtttaggaaggctaattctttcttctctttttaagtactcctaagcgtggaaattttttggtcttgttctcttgttgtttgttactcaaggatctgagattgttgtccataagtagaatttaccggagttgtaatttctatatctgaaactcattattgtaccgttgtgtgtggtgtgtcttatagtttgctgcttaatagttttcttgttcttcttcagcatttctaaaggggcaacgttatagaaggttaggaaggagcatttgtatagaaagtcatg

SEQ ID NO: 7689 - DNA, 3000 bp, Unknown
  misc_feature (1)..( 3000): cDNA_ID_2996391_gDNA_ID_1621157_Annot_ID_57044 3000 nt of promoter + ATG
aatgtgtgggtttaaaataaaaaatggcctataattaatctagtgtctgactttgttctatgtataactttttttacattcatagacccttgtttctattcttaaaaaactttatatgataaaacatgcaatgatcatatcatacgtcttatccaaccagaatacaagagtcttgacatcattctcaatggtttttctaagcgaacctgaagtacacacatcaatacacgcctcatatcacaaaaaaggatgttattttgacaattatatcgtaacacatgttaccatctatgcatgccttcaaacatcaaagtcaattgaaggaaacacacctctcagttgtcggtgacttcccggatcatgtaaagatgactttttgaaaaccaagaacatcattgcccactccaaagctgttacctctcattccaaactcgatcgtaatcgccatattcaagaaatacgtacttggagatcatgcacaaggctttttaaaaatagaccgaactttactagttactatctaccaatcaggttatgaaagtaggcaaaaggggaagggtcaaggcccatgagacatattttccaaatagacactaaaaatgagccagatttttcaacaacacatttggtttaagggctcaaaaaatatttgtcaacacccagttttaaaacaaaagaaaatagtaaattacaggcccaaatgtttttgttgccctatagatattagtatttcttaaccagtcgctgataattattgatgaatagttgagagacgataaagattgagctgtcaggaatacaaatcaaacatgatattgttcgtttacattattactcaacgaacattcacgtttccaaattctgatatcttttctaatatttctccacatgtagcatatcattagttactgtttaaaaatgagtaccaaaaacgtgaaattattacaataacgtataaatgttaaatatttcgagcaatcaatacttgtcaagactcattgttagtaatgcatcactataattcattctttttttgtcttggtcaaacatgtatgaagcgagcagagtctatgaatgtcatattatagacatacgtatgcggctttggtcgggaccggcccaataaaacaatacacatgttcaacgggttcttccacgtgtcaaacttatgttggctggacggtatgtgactgtgcattgtggttacgtttccaaaatgaatacgtaagaacttttcctaaattatgtcttttgcacaatactgtaagtctgtaactatggtactaaacattataatatcgaattggaaacatttacatttgagaattttagtgtttgttggcaacgaagcatgtgagatcacagagaagcaatactcatctctgagctgttcaaacagttttacatgtcagcacccaaatatagtcactatattcaaaaacaaaattatttacttgcattcaatgctagccttttttattcggtccacaacaaattataaatatttgtatataagaaaaatcagagacctgattttgtaatgcgtggcttgtcaatttcaagcaacacagaaaaaagctaactaagcaaaaaacaaaaaaaaataacaagtggctggttgatagaatgtatctttcatcagtacataacactgtttttttgtcaacgtaaaacagatttttataacttttgtttgccctcaacttttttcattacattttctggaatatcgcatggttgaataattaaaagttaaaaatgatttttatgaagcacggcattatactatatagtcagtcccaacgaaaatgactttacataaagctgtcaattttttctccaacggtcagataattgtttcgttgaatagtcagttttttttttactattttactattgggctttattgggctcttacaattttatcgatttttgtttaccgtccagaaagtggaccctgtgggaagaggaaaagaaaaaaaaagggtcaggttttttgtctttatacgagagcacatcggtacgttccagaacaaccctctctagtctcctccatcattatctttatttaatagtaaccctagtacaaattaccaaactattcaacattaacataattattcaacattcaccatcatgaataataactagttgagaaaaacgtaactagactagtttgatctgtcaacataaaaagagaaaaaagaatttcgtgactagtaaagtttaagaccattcacaaatgatcattgaaattattagttctaaactcttagtttggttatctatttggttttgattcgtatctatttggttattcggttttttggttttaaagtttagtattcattcgactattttgaaattttggttcgtttttttttttttttttgaaatttaatatccattcgattattttgcttttaatatttttaaatatttcaattattttttgatattttttgaatattgttactatttaatatatatttttaaatatttttaattactaagtatagaaataactaatatttttgaaaataaaattatattttggatattttagatcatctaaaatattttagttaggtactaattcatttttggttattttgattataaaatttaatatctattcaacaatttttaaattgttgattcaattcggttctgtttttttttttcatttaggtttagtacatttggttcagtttatttgactctcagtttatttgcctaagccttgaaattaggtgttaactattggttattctagttgaaatttgaaataaagaaaaaactatacgttatactattttattttcttagcaataactaaaaataaatgtttggaaacgttaggcaattttattatattctatcgttgttctctataaatgaagtctcgaccacacacttggtagctacacacgagaaagaaaaagctcacaactttaacctttctggagagagaagaacaaaagagggagagggagagaa

SEQ ID NO: 7690 - DNA, 3000 bp, Unknown
  misc_feature (1)..( 3000): cDNA_ID_1818599_gDNA_ID_1621157_Annot_ID_57049 3000 nt of promoter + ATG
gaagaggccaacctcgccaatgcccatgaacgcccgcactacaagcaaaaaaggaagaccaagtctagcagcaataggtgtcataatagtggcaaaggaccaccagacaacaccaaaacctaaaacaaccttcccgccaaacttatctgcccatatacctcccagaatctatgtccaagagaagatgagctaaagttagaataaatataccctctctttcgagttctataaaagatcagattctacagagagtgatagtattagacctgacctgagtaagtaaatagccccagaagaaagaggactgaattaagccaacagttgcactactccagttatattcttgtgacatgggaagaattgcaatgctcatgttcacctgccacaagcatctctcattaagtaatatatatcttacttcttcagataagtagagaaaataagcaagatatacaacttacacggtccatattgcaaagaagaaaagacgaaaagcataacaagacgatcacccagcgtctaggaaactgctgccaccatggagatgcgttctgtagatttccttcaactaaaatagcttcagctgagccatcagccgatggcacaactccttccgtgatatctgactcctctgatttgtagtaagcacgagatctgttgatcttgatactgttcctaaacctaattacactgtccattcttggttgaaggaaacatccaaaacttcttctcatgtgtcccgattcatgatgtaaactagcttgcagaggttgatgattacggcacaacaatgctacaaagattaagaaaatgcttaagcacaaattgcataatatagctaggtagagaggtataaaagataccgatatataccatttggaaaaagcttggaaacctctgcaccactttttccaagtctctgacaaccattgcctacaaagtaaagcaatcttagcaaatttggaagcaatgcacacattagtgatatcgttcgctacacagaagcaagctacgctcaagcctaatcactaacataatccgataaacaactaaaaagccctaacagattcaaaaagaggagggggatagatatacctgagccgatgaaggaaccgaagttccgatttgaaatcaagccaccgagggccatgttgcttctcagaacaaaaatgtcaagggaagaaggagaagaagaagagagaaggattcaagcttcttccatagaagcggagtaaacgaaggaacctttggataaagccgagagagagactgagagacgctgaagcgggaaaatccctctctattggggaaggaaggaagaggaaaggggggtcgatatagtgacacgtggcacatcatcttctactcgttggaacctccgttctgttctcatttcatgaatctacccccacgttgcaaagaggaaacatgggtactattggttaatggcaggggtattattggaagttattgtggaaaatatctgagccgttaccgccgaagatgacgtcacctttagagaaatagagagagctgacaaaagaaaaaggtaggttggttaatatattgggcttacaatctcatttgtatttttgatgggcttaaaaataaaattgtcttctacatttttttgtttccatttgttcaaagttccaactgctgaaaagtgaaaacaaagagacatttattgctaaagtgcagcccataaaataactaaaatactaaaattaagcactaaaattgtacaacaatgtcattagtttttactaaaatcttgaggatttgtcattttgaacacttaaaactgtatgtatatataaaatgtttttgcaaaatatgtactttaaaccaaatactaaattttaaaaacaaatctaaccgactatatccacgtattaactggtatctattattaactaaaaatggcaaattcacaaactatatggaaaattgcaaaatcaacaaatgtcactttcaaaagtggctttctcataattgattctttttataaaaaaaaaaaatgagacatatattaatatatataacaactttggtgactataagctcttagagtaaaacaaagtcactatattaaattttgagaagaaaaataatcctggaaaccttaatgttttatgatacaattttacacatagatatataattacatactttgaccagacacatattttttaaaaaaaaatctccagtcagtggctatttgataaagccactaaaaattcttgaccaattttgtggccactatattgcttatagtataaatcattcacaatttggatcataggttttattcatcaattttgtccaaaaaaaaacttaaaattttgtcaaaaaactatagtataaaataggttttgtcaaaaaaacttaaaattatgctatttgtgaaaatttctcttttatctatttttaaattactttgttaattaatagtgctatattcttaattcttgtataaaaatgtgttattcttgcaaatcaccctctaatttttctgatatattttccaaaataaaataactcttcatcttcctcactcactctctctctactccactcttcatcaagcgttgagtcatcgccgtgttgttccttttccttccctctctagcgtaagctccagatttcttctattctctgttttcacagtgaaatctctcgtttaatgaattttttcgattcccctatgcatttcgtgatttaacgcctttactcacttgttacttaaaaatatatttttgatttcgctaggttccttatcatgcatgcgtcactctcttagctcaattttgtaaatgctgtatcactttcgtctcttttgctttatccagtgtcaattttgttttgtttgttaagttgttgcctagggtttctcttgctcgtgggattgcctagaaattgagtctcttttgggccttattttgttcttcttctctgtttttgtaacattctttttctccaggtaaagcaggtacgatg

SEQ ID NO: 7691 - DNA, 3000 bp, Unknown
  misc_feature (1)..( 3000): cDNA_ID_1818595_gDNA_ID_1621157_Annot_ID_57050 3000 nt of promoter + ATG
gagaggtactcacctattggaccttgagattgaaagtcgtctgcacgtgcacaccaaccataagcctttgactctgaatctccactcctctcagtccactcttttttgcaggacccttgggtctcaaattccttttcaagctctgtggcagcagcaaacccactccagtcactgtcaaacttagcaataaccccaacaatcgaatcttgttcgacccaaaaggcattcacttcaacaggcttgaatttggaaagggtctgcagccaatatactgaatcaagtagaagctccttgtcatccgtttctttcaaagggttaacaacaatccccatccatggccagacatagacgttatgaggatttggttcagtctcgtctaacagaggaggaacaaccggagggcgtggaagaggttctgcataaccagcaagatcattctctaaaaacttagctaaagcaagatgattagacttctgtaaagcacttctggtggcagaacctttggaaacaccagtagcatgtgcatgcaactccttgtacttgtaatcttgcttcttcttgcctacacaaaaggggcatctgagccgtccattcaccttcaccttgtagtaagtctcactgcgtaaaaggtggtagggtgttttagaatactcctcaatctctgactcgctgatctcagactcttcatcagaaatgtccatcgtacctgctttacctggagaaaaagaatgttacaaaaacagagaagaagaacaaaataaggcccaaaagagactcaatttctaggcaatcccacgagcaagagaaaccctaggcaacaacttaacaaacaaaacaaaattgacactggataaagcaaaagagacgaaagtgatacagcatttacaaaattgagctaagagagtgacgcatgcatgataaggaacctagcgaaatcaaaaatatatttttaagtaacaagtgagtaaaggcgttaaatcacgaaatgcataggggaatcgaaaaaattcattaaacgagagatttcactgtgaaaacagagaatagaagaaatctggagcttacgctagagagggaaggaaaaggaacaacacggcgatgactcaacgcttgatgaagagtggagtagagagagagtgagtgaggaagatgaagagttattttattttggaaaatatatcagaaaaattagagggtgatttgcaagaataacacatttttatacaagaattaagaatatagcactattaattaacaaagtaatttaaaaatagataaaagagaaattttcacaaatagcataattttaagtttttttgacaaaacctattttatactatagttttttgacaaaattttaagtttttttttggacaaaattgatgaataaaacctatgatccaaattgtgaatgatttatactataagcaatatagtggccacaaaattggtcaagaatttttagtggctttatcaaatagccactgactggagatttttttttaaaaaatatgtgtctggtcaaagtatgtaattatatatctatgtgtaaaattgtatcataaaacattaaggtttccaggattatttttcttctcaaaatttaatatagtgactttgttttactctaagagcttatagtcaccaaagttgttatatatattaatatatgtctcattttttttttttataaaaagaatcaattatgagaaagccacttttgaaagtgacatttgttgattttgcaattttccatatagtttgtgaatttgccatttttagttaataatagataccagttaatacgtggatatagtcggttagatttgtttttaaaatttagtatttggtttaaagtacatattttgcaaaaacattttatatatacatacagttttaagtgttcaaaatgacaaatcctcaagattttagtaaaaactaatgacattgttgtacaattttagtgcttaattttagtattttagttattttatgggctgcactttagcaataaatgtctctttgttttcacttttcagcagttggaactttgaacaaatggaaacaaaaaaatgtagaagacaattttatttttaagcccatcaaaaatacaaatgagattgtaagcccaatatattaaccaacctacctttttcttttgtcagctctctctatttctctaaaggtgacgtcatcttcggcggtaacggctcagatattttccacaataacttccaataatacccctgccattaaccaatagtacccatgtttcctctttgcaacgtgggggtagattcatgaaatgagaacagaacggaggttccaacgagtagaagatgatgtgccacgtgtcactatatcgacccccctttcctcttccttccttccccaatagagagggattttcccgcttcagcgtctctcagtctctctctcggctttatccaaaggttccttcgtttactccgcttctatggaagaagcttgaatccttctctcttcttcttctccttcttcccttgacatttttgttctgagaagcaacatggccctcggtggcttgatttcaaatcggaacttcggttccttcatcggctcaggtatatctatccccctcctctttttgaatctgttagggctttttagttgtttatcggattatgttagtgattaggcttgagcgtagcttgcttctgtgtagcgaacgatatcactaatgtgtgcattgcttccaaatttgctaagattgctttactttgtaggcaatggttgtcagagacttggaaaaagtggtgcagaggtttccaagctttttccaaatggtatatatcggtatcttttatacctctctacctagctatattatgcaatttgtgcttaagcattttcttaatctttgtagcattgttgtgccgtaatcatcaacctctgcaagctagtttacatcatgaatcgggacacatgagaagaagttttggatgtttccttcaaccaaga

SEQ ID NO: 7692 - DNA, 3000 bp, Unknown
  misc_feature (1)..( 3000): cDNA_ID_1818591_gDNA_ID_1621157_Annot_ID_57051 3000 nt of promoter + ATG
aagaaaaagaatcaaattcctccatatcgttctgtatcgcctccatgtacgtaaagaaagttggtcactcttacggaaagacaccatttttaccaggtctgagcaatttataaggaaagctatttttcacttgccttgtactctattaaatactagggatgattcagcatccgcaaacagtaaatgagaaaccgcatgacttgcatttaccacctttatactaattattaacttatctatttatgctttctgaatattagcaatcagcacttttgtgcatagtacatataaatatgaggagagaggatcttcttgtcgtaggccgcattggggagtaattaagcctcttgattgaccgttaagtagcgccatatgttagactgatgtgatacaccacatcatccattgtatttatgtctcccaacaatccatttttcataataaactctcgataaaatttgattcaatctgatcataagcctttcatgttagtttttataaccataaactttcttttgtatgacgaatttgttcagagaccataaaacatctcttgcgttataagaatattatctaaaatcaatggtctttcgataaagactaattgtgtttctaaaacaaaatttatttttctattttctatttatttaattttccttctcatttttagttgtttttataatatactaagcgaggtagtataaatctagaatcctgaaccagcagtcaaatatcactatttaaagctaactatttaggtttaataataccttaggatattattaccatttacgtaaaaaagtttgaacctggaaaacatatatatctacgtagagtaccgaatattctaaaccatttaaaatattttataatgatcaaccatgattgaaatcaagtagaaaaacttgaacaatgatcttctagttcattttagttgtttcacttaaaaaggatttaaaaagagagtcaacattgcgttttaaatgcattttgaggtttggcaaaccatctacaagctatctgacatctacagactacgtacagttgtgttccatttgttacaattacaacaatcagcttgtttgtttttggcaaattaagagtcatgagtgtgtatacgaaattactttttggtggtctgaatttatgaatgcagttacactaacccttcttcaaaaataaaaatgaatgcggttatactaaactatcaaatatatctactagcaaatatgaaactacattcagtaacagtgatctctctttttggatacaagatgaaacattgttctcttctcatgctctaaatagaaaatactctacgaaatgaaaatgtatgtcatcttataagaactatacatttttactccgatggttaattctttgaaggattctcgacagtttagaagtctgcaaaaaatataatctcataagaaaaaaattctaagtctcttgatacaatgcatatagaaactgacaaataatcgaagaaattgtacttgagcccattacgactattgaaaattctgattttggatgaattcagcggaaactacaaatttaagagtactttatgtgtataatatgaagcctatatatatagaattactaatgtaataaaataagaaccggtgaaaagggggacaagatcacaaggttttcgcattcagtgcctttacagagttatatatttgatgatgttattgcttacttgcctaatagtactatactactatatatatctaaggtaacacatgtatatatatgtcacatagacattactagtatatattatgtacttctatcatatatttatgatattgcagttgcagcgtacacaagtcagctccttttgacttttacatctcatgaatgcattgccatgacatctaatcttactcgagatttgtgcatgcacattattcacttttgtcttttgcaatttttgttattgtaaaaaaaggaaaaacaaatgtaaaagagagagagaccagaaaggtctaactaaacctaaagagtcaatgaaatgtgtttctttcttgtgggattaatcaattcactctttaacacttctttataccattgaagaaattagatgaaagagtcacgagttgcttaccaaatccctcacaagaattgagaactgataaaccaaattgagaagattaaatatcacgtctccttttgatctctattataattaatcgaaaataaaaataagagttttcaacaaaacgtgatcattggtttacgatcacttgcaaagtcaaacctaaaacgtagcattagtacactaaccttaaatactaattatatcatgcaaaccctaatgtcattacctaactatacatgtgtaatgtgttcaacagatcttcttaacccacattagatcaatattaaacaataaaaagattcttatatattctactacttacttcttcttattcccatccatatttttctgtgcctttaggttctcaactaatctcatttaatttagctagcacacagagaaacacacacgtatataaataatatgataacacacaaaaagactcatatatataaataattagagtcattaaatgtggattcatcattaaatgaaacaactcttcttctctgtacaatttctcttcacaccttcaccaaattctttgacttcaaaaatcttataaaatttatatatctccaaaaccataaaaccaaaacgagttttcacaaataaattacttagttgaaatttcaaatctcattcaattagggtacactctctcaacaatccacattaatgagggttgctgcttctgatggctagcagtaacagttttatcgcctccacttcttaatgccatctttttcctcttccctctccttctctatatatattttctgactctgcaaaaccttaattcatccatctctcaaacaccatttttggaaacaccatttcatattccttaaacttttccattttagtatcatttcatattcattgatatg

SEQ ID NO: 7693 - DNA, 3000 bp, Unknown
  misc_feature (1)..( 3000): cDNA_ID_1818587_gDNA_ID_1621157_Annot_ID_57052 3000 nt of promoter + ATG
tcttcttcttctcctcttccttcttccaccaccatctgtacaaagcaaagttatcatcaaaggaaaccaaaccattctgagtttcaaagctattttccggcttggtttcttcagcaccaccaatggttcctccaattggtacttgggtatctcttacgcttctatgccaactcccacccacgtttgggtcgccaatcgaatccgacccgtttcggatcctgactcttccactctcgagctcacctccaccggatacctaatcgtcagtaacctccgtgacggcgtcgtttggcagacggataacaaacaacccggaaccgatttccggttctctgaaaccgggaatctgattttgatcaacgacgacggttctccggtttggcagagctttgacaatccgactgacacgtggcttccggggatgaatgtcaccggtctaacagctatgacttcgtggcggagtctcttcgatccttcgccggggttttactctctgagactgagtccaagcttcaacgagttccagcttgtttacaaaggaaccacaccgtattggtccaccggaaattggaccggagaagccttcgtcggcgttccggaaatgaccattccttacatctacaggttccatttcgttaacccttacactcccacggcgtcgttttggtacatcgtcccaccgttggactccgtttccgagccacggctgacgcggttcatggtcggcgccaacggccagctgaagcagtacacttgggatccacagacgcagagctggaacatgttctggttgcagccggaggatccttgccgcgtttacaatctctgtggtcaattagggttttgtagcagcgaattgctcaagccctgtgcttgcatccgcggtttccggcctaggaacgacgccgcgtggagatctgatgattacagcgacggatgccgccgtgaaaacggtgattccggcgaaaagagtgatacttttgaagccgttggtgatctacgctacgatggtgatgtgaagatgtcacggttgcaggtaagcaagagctcttgcgccaaaacttgcttaggaaactcttcttgtgttggtttttatcataaggagaagtctaatctctgcaaaattttactcgagtcgccgaataatctgaagaattcgagctcgtggactggagttagtgaagatgtattgtatatcagagaaccaaagaaagggaattcaaagggaaacatctctaagtctataattatattgtgcagcgttgttgggtcaatctcagttcttgggtttacattgttagtgccattgattctgttgaagaggagtcgaaagaggaagaagactaggaaacaagacgaagatgggtttgctgtgttgaatcttaaggtattttctttcaaggagcttcaatcagctaccaatgggttctcggataaggtcggacacggcggttttggggcggtgtttaagggaacattaccgggttcttctacattcgtggctgtgaaacgcttagaaagacctggaagcggggagagtgagttccgggcagaggtatgcaccattgggaacattcaacatgtcaatctcgttaggcttagaggtttctgttcagagaatcttcataggcttcttgtctatgattacatgccacaaggatccttgagttcctatctgtctagaacaagccccaaattgctaagctgggagacccgtttcaggatcgcgttaggtactgccaaagggatcgcgtacttgcatgaaggatgcagggactgtattatacactgtgatatcaaaccggagaacattcttttggacagtgattacaacgccaaagtgtctgattttggcttggctaagctccttggacgtgacttcagcagagttctagccacgatgagagggacatggggctacgtggctcccgaatggatatctggtttgcccatcacgacaaaagctgatgtgtatagctttggaatgacattgctcgagctgatcggtggtagaagaaatgtcattgttaatagcgatacactgggagagaaagagacagaaccagagaaatggtatttagagaatgtcttttacttggaatcaattgtaagagagaaaaaaacatatacattgaatcaatgaatcccttttcaggttctttccgccatgggcagcgcgtgagatcatacaaggcaatgtggactctgtggttgactctagactcaacggagaatataacactgaagaggtgacgaggatggcaacggtggcgatatggtgcatacaagacaatgaagagataaggccagcaatgggaacggtagtgaagatgcttgaaggagttgtggaggtgacggttcctccaccgcctaaattaatacaagctcttgtctccggcgattcataccgaggagtgagcggcacaagctgtagtgaaggccatggctgttcggatctcaatacaggtttgtctagccctggctcacggtcgtcttttggtagaccttctccttgatcaattttgtaaggtgatttggtcaaaaccagccttaaatgttttaagtgttgctctctaagagggtttaattagtttaaactgtatttgttggttgtatgatatttgacttaatcgacattaacagttaaaaccatggattatgtctttcttcttagtttgaaagttcttgtcactttgataatcttctaatggcatatatgtaaattcttacagaatgtattgtatgagaatcattacgtgattgaatcaataaacccatgtcgatactttaaactatatgaacggtcacaataaacccatgttctctcttcttctactccacggctaaccttaatcttaggcaaaccagaaacacaaattacaagaacaaacataaaaaagaatctcttgtcttgtctgctttcaatcctcatgtctctaatcctccccaagtagagaaatataaaaacttagacaaatattgccacaaccggtgaaaatg

SEQ ID NO: 7694 - DNA, 3000 bp, Unknown
  misc_feature (1)..( 3000): cDNA_ID_1818583_gDNA_ID_1621157_Annot_ID_57053 3000 nt of promoter + ATG
ctgtgtgtcgaaaccctccgtcgccagcatttattcttctcacttttcttcaccggagaatcacgacaacatcaaattctccggcgacatctcaggttatcttcgtttactgctctcatcggttaattattccatctctttttttgtttcccggagtcggctttcgtgtactttttgtttttggtcttttcggcttcttcaattttagggttcgcgtactgtttagtgttgtttagtttctgatttagatgtgcttactgtgttcatgttgtcgtctattcttatgagaagatcttatggtagagttacatatcaatgatgttaccaattttgaaggttattgtgttgtgtttgattaaaattggctcaagtgtgaaatgcttttgctcgcgtcactgttttcattgcaacttgactgaatcctagaggttgttttagaatatagattcaagtttcagctattgatgggacattacaacagagcataaggaacattcccatacctttgtgtttcttatggataactttggcatcagatcaactttttcttttgtcattttgcttattaacactgtaataatcacttgttattgggatttctcaagtctgctttgattaatcttgtttcgtaatgttcttctcactattcactcttcccatacctttgtgtttcttatggatgactttgccatcagaccaacttttcttttgtcattttgcttactaacactgtaataatcactttttttttattggggtttcttaagagtacttttgattaatcttgttgcattcaagtaatcgttgttcagttcactcttttcctgcagtggcagtgcatctgtaaaatgcttcaaggactgttgttcgctactcttgcttaattattactatagctggtgaaaatgggaggttgctgtagttcttcgaggaagtcacatcttgttggaacacctgtttactattatgtcagtaatccttttcaccatcttgcatttgtgttgctttgcactactgactatctatagattatgattttagttaaaacaaatcgggacaagagcatgattttagaatctcaacaatttcttgtaacaatctcgcttgagtggtcgatagtagactactagaggtcgtgagtgagctgtgtttgaaaaatgtcttctgaattatctacagttatttgattgtgacactctacaaagtttctatttattaaaagtttgttacgcagtgtccagaatcttttgaagagcttgtcccttcaggaacccgtgctggtgtgggatcagcattcaccacaggcctcttggttgatataggtttggagacatctatacctgacaccttttgtgctcctgctcctcttccatatgatttgcttttggggcgaccacaatgcacagattctgagtccatcaaaggaaggatgagtggaagcagttttgaaacgctagcgacgtgtgaagatcttggggaatcagactgtaaaactctagccagctcagtcattctttcaccgaggaaatcagatttctcgaaacatcaaggattgaagatattggttgatgaagaggaggactgttgtcctatttgctttgaaggtaagaaatcaagaccgttgaataaaaagaactctttaactcttgtttttatgagagagctaaacagagtcgtggattgcactatgcagattatgatgttgagaatccaagactaacgacaaagtgtgagcacgaatttcacctctcttgtcttctggagtggattgaaagaagcgatagatgcccaatatgtgataaggtgtgtttcccgcttgagctttctttggcagatcgattgtcttgatgatcaaagaattgcactttactgttgggaattcgtagttagatcaaccattgatggttgcgtaattagggtaaataagtgcacaatttggcaactaactaacattctgtcttctttaacacaggaagttgtgtttgatgatcgcttgaactagcatcattactatcccctggcttgaaagtttgaaggtgtggcgctttgtttggttagtctactacataattagcatacatctattttgtttcttcctcacacactttaagtgttgggtctccacatttccacttagttttgtcgtattggttatgttcgttttgcccttgtgcgatcatatagatatacataacaattgtaaatattacctagcttcttgttcgttcgtttgtgatctccggggtgtgatagagaagaaaggaccaccatttcagtattttgattgtttgcatcttcaaaatcatgtccactcttgtcttgatccatgattctatcttagcaatattggttaatgccctgatctgggaatcataataagcatgattttgtttgtttgtttggttaaagaaagagagagattctattagatatggatatagtataattccatagtctaaagagaaactgaatattccaaatagtaaattgatccacatgcgactagtcttgtcgtgtgtaagatattaaaaagaaaatgattctttgattaacaccttttgtctgctgcataaagtaattaattagaaataattaagaaaaaggttaggaatcatttaagaagaagagaaaaaagatgtcatggctttgacttctagccacttatgtctgccactgccacctccctcttctcaattcctattctgcccttctctttcttttagttcctatcctgccggtgttgatgaatgagggttaatatagtaactttggcgttaggaactatagttccaaaacctttttctgaatgaatttactttttggaggtatgaagtcacagcttttacagattttatcttgcaaaaattctctccacatttcaaacgtctaatagttaaagagagcttttgttttttctttcccatgtctatcagtatcaccaccgagaaaatatcatcaacaccaccaaccaaacattaacccacccgagagtacccaatg

SEQ ID NO: 7695 - DNA, 3000 bp, Unknown
  misc_feature (1)..( 3000): cDNA_ID_1818579_gDNA_ID_1621157_Annot_ID_57054 3000 nt of promoter + ATG
ataactgtagataattcagaagacatttttcaaacacagctcactcacgacctctagtagtctactatcgaccactcaagcgagattgttacaagaaattgttgagattctaaaatcatgctcttgtcccgatttgttttaactaaaatcataatctatagatagtcagtagtgcaaagcaacacaaatgcaagatggtgaaaaggattactgacataatagtaaacaggtgttccaacaagatgtgacttcctcgaagaactacagcaacctcccattttcaccagctatagtaataattaagcaagagtagcgaacaacagtccttgaagcattttacagatgcactgccactgcaggaaaagagtgaactgaacaacgattacttgaatgcaacaagattaatcaaaagtactcttaagaaaccccaataaaaaaaaagtgattattacagtgttagtaagcaaaatgacaaaagaaaagttggtctgatggcaaagtcatccataagaaacacaaaggtatgggaagagtgaatagtgagaagaacattacgaaacaagattaatcaaagcagacttgagaaatcccaataacaagtgattattacagtgttaataagcaaaatgacaaaagaaaaagttgatctgatgccaaagttatccataagaaacacaaaggtatgggaatgttccttatgctctgttgtaatgtcccatcaatagctgaaacttgaatctatattctaaaacaacctctaggattcagtcaagttgcaatgaaaacagtgacgcgagcaaaagcatttcacacttgagccaattttaatcaaacacaacacaataaccttcaaaattggtaacatcattgatatgtaactctaccataagatcttctcataagaatagacgacaacatgaacacagtaagcacatctaaatcagaaactaaacaacactaaacagtacgcgaaccctaaaattgaagaagccgaaaagaccaaaaacaaaaagtacacgaaagccgactccgggaaacaaaaaaagagatggaataattaaccgatgagagcagtaaacgaagataacctgagatgtcgccggagaatttgatgttgtcgtgattctccggtgaagaaaagtgagaagaataaatgctggcgacggagggtttcgacacacagagctccttttctctagtcgaataacctcatcatagtaagtaattatactgtaatcctactttactttatttagtttgcctaattattctcaaatctcattaaataccttttaaatagtacgacgtcggttaaggatacgggctaatcattgggcttttgttttctgaaacatgggctataaacattttagaccatggtccattctacagaaggtcaaaccctctgtcgctatcagaggctattgaatattttgctggtaaggtctcaattctcatcatccttcacctgcctatgaatcttccttgttaaccgtaacctaatattgattgacttctaatcaaagtaatttaatctaccattttattatttcctctaatctaagcctttttcatataaaatgtatctaatagtaactttataagaaaaatattatacctttttcttggtatctttgttgtaaaaaaaaatacaaattaaatgcgagttcgattattgcattaatagagatagacccatctggcatttaatatggtggcggcggaataatcgctaacaagatattagttgaaaattttcaaatcattcggatagattacgtctggcattgaactaattatcctctataaattcaataatgacagaatttagtagatgttctaaatactaaaattatttaataatcttacatatgcaattttccatgtacgtgctgttttggagcgtttaaaccgaattaaagtactactgtaaataaattgaatcgaatttaccgaaccaaaattgaagaaaaaaaaaattaaatcgaaccgaaccaaaaattggaaactagtcgaataaatattaaattctataaccgaaatatctgaaataaaaccgaataaatacaaaccaaaatattttgggtaaaatatctaaagtataaatatatttttaaaagtgttaattatttctagactaaataactaaaaatacttgaaaatataaataaaatagtaaaaatatttggaaatatctaaaaatatttaaaaatattcaaaataaccgaaatattttaaatgaaataaccgaatggatactaaattttaaaatcgaaaccgaacagaactttcaaataaccgaatggatactaaactttaaaaccgaaaaaatcgataacggaatggataactgaacgccgagaactactattatatacaaagtatttagttattcaataaaatttgaaaccaatcgttttttttcaaaattaataattatcgaatttaaatctaaggaataaaaaagcttattacaaatcattagacaaaatgtaataaaaaaaaaggaaattatacacattaattatcttagcttgtcgagtttaaattttgttaatcagagaacgtcaagttgtacagctggcgtcaataaatacccaaaacagtcgtctttttcaacggagaagaaaaagttgaaaaaattgtaaagtcagtctctccgactcttccttccttccgtgttcaccattgctacacgttctccacgaactttccgatgcccagtcgtcggagacatagctacaccgtcggatctcctgcaaccacatcttccaattacagtaacactactttcaccgatcgttccttcccgacaacccctgcccgtacatccaccgacacaaccacctccatcgctcgtcgcatctccggtatcttcatcaactgcttcactcctcccgattccgtttcctccaactacatcgacaattcaaagtcctcttccggtatagtttgatcagtaattcttagattttagacttttagtggaaacagttgatg

SEQ ID NO: 7696 - DNA, 3000 bp, Unknown
  misc_feature (1)..( 3000): cDNA_ID_1818575_gDNA_ID_1621157_Annot_ID_57055 3000 nt of promoter + ATG
tgggagattgtaatgacactgctcaaaggtaattatccatttggttcttcactccactttcgactattgtctgcttccttcgttagtttcggtgtttttttctagggttttactcgtatttttgataatcgggtaatttaatttcgcccgaatccaaatgccgggcgacccggttataatttttcaattatcttattttcgattatcgtctaggtttaatagctccgtgagtagtaatcaaagtctagtctccgtagagaagcttaatctcaatgcggcggaggaggataagtacgctatatcgccggaagttgaagacccaatggatcagagcgatgactatgacaagaaatccgaagctcttgagcctaattcgccggtcaaaacttccggtgatgatgaaaaagtggttgtaacaattccgacggcgcctaaacgtggacggccacgtggttcgggaaagaaagtttccgctccggcattgaagaatccgtacgagttttactattactctggtttcgggccacggtgggggagaaaaagaggcggctccgacgacgagaagatggttataaacgatagtaaaaagagtagaagtagcgctagtagcagtagtgacgaagacggtcataaaacggcggcgtttggaggtgggagtgtgagtttcgacgagtttgattttgtggatgaggattatgacgtaatggaacaagatcaaggaagtgatcatgggaggaagaaaaagaatgagaagatgataatgatgaagaagacgatgaagaaaggaaggaagcccgtaaaggaaaggtctttgaaatccctcatgtgaaatattttatggcttttaagggtatttccgtctttttctacttgttgttattgtctggttttgttggtacgggggtttggtctgtttgtttagtttgggaacatttgtaggaagattttctacatctctgttgtatttgttagatgactgttttagttgttctttaaattgtttttttcatagactctgatgttgtctacacagatttaaagagtcttgaacaattttcaaatcaccatcggttaaacctaattgtatacatgtttcgaatcctatcctaaattgttaagttaaaagtaaatatgagggtcttttaagagtttaacaaaagatatagctttacatagaacaatttaaaatatagaaggttttaggagcgtctcaattttcaaatttaaatttatatcgattaattgaacatgtacattatatgattacaatctatcaaatgtataaaaatattacaaaagataataccttttaattttatttcagagatacaaataaaatgatataagagtacactgttttgcggagtatcataatctgaattaattttaataattcaaaatatcttttaatatatatatttatcattatataaaaaatctcaaaaaatattttctgatttaatattactaatacatgataacaagtaacaacatgcatcatattagaaaaataatatactcgcaaaaactttaaacctaaatttttttgtcctaaagaaacacttttatccctcaattttgtttatatgatgatgttggagcttgtggatctcctaatctctcagagatttgctctgattttgtgcgaagtttgttttttatatgatgatgatgttggttgtcggattaattcctccacaaaaacacttaacattcccaatttctcttttcttcatctttattttctccgattaatttttctgtaattttggggattttgtgaggttcattttgtgtttgaattgatttgatctattttaattttgaatatgtatggcaaatctatttttttttttaatttcaatctgaaaccagagaagaaattatcttaagtagagtacgagttataggtttccataagattgtgatttattcgttttcaccaaccactaaaagaaagagacaaaaaacacgttgcattagttttgttggcgtctttagcattttcaatgtagtctatattatacattggttcagcttgaaaatttgcaaccttgataattaatattgggattccctataattactggttcgcatatctcactcgacaactcgtatttaacataattatagcaacaaatcaccacaaaatatactgaatttagaagattttccataaaattcaataacatctatacattttttttgccgatcaatgcaggtttacaaacttcagttaattatgttagttaacatttttaagttttaacaattttctatattaagatctttatgaaaaggaaaaagaaaaaatgaaaataaaaatatgtataactcaatcattataatatagagaatagagaaattaatgtcattgttagtctcattatgttagcttccaaataaattaagaaaaaaatccttaattctaaaataaaataaataattagaattaaaaaaaaaatcaaatataagaagaagttttctaaaaaattaacaaaaagttagtaataaacaaccgagagcgagttttcattcattaactcgctcttggttgcttattcaagatttatttgaatggatggtacgaatgtaacatgtgcagtaaatattagatttaatgtcttagtgagcattttgcaataaaaatctgtggatttcatgtttattacaaacagtttcttataaaacatttccttcattattcattaagaaaattaattaagagcacaaacatttccttgttcgtttgccctagacaaggcaataaatcatatcctagagaagcgtaatcgatcattcgattttctttacctaagcgtacaattgaatgttttcttatattatttcttccgttcctttgtcttattattccttaagtctatgttcttacttacgttcactctttttttcttggttactcggacagattccaagtttcttattctacaagataaatgaatcttggttaaaatcaaacgtggaggttgtgaagaaatg

SEQ ID NO: 7697 - DNA, 3000 bp, Unknown
  misc_feature (1)..( 3000): cDNA_ID_1808340_gDNA_ID_1621157_Annot_ID_57056 3000 nt of promoter + ATG
ttcatgcaagaaaaagccttggtttcatattcataaatcataatacaatataattaattaattggaccttttatttttatactttattcaaagttagtctaatacttttacgccacatatattctaaatcttgagtaattaaaatgaatgaatatagcaatgatctacatgtgatttagctatctctatattaaattgaatataatgtgaattttttttttgtctattggtagcctaatctggaatataagatttccaaataaaatctcagaaaataaagctctataaatttacaagtcaattagctatctctattttaataattgaatatcatatgcttttgcttcaaaggcatgtttttcaacaatgtgaacatctcttttcaccttttctttatttcattgtccttgtccgtcaccaaccaatcatacacttttttcccattgacatgttcttctatgattggtttctttccatcacagtcagtatctttatctctttgacgtacgtttcaatcttcttctctaaatcccgccctcgcgttccacgctaacacctaattctaatatatacaaatcatataaatagccatttttatatcctctcgtaacttttccttctttctttctccaaatttgatcgtaaaaaagattcctatcttcttcaccattcttttcttgaaaaagaatcatgggcttatcttatagcggcgccggagttattatcgccggagttatcttgaatgattttatcaaatcagttcgttcttttcttgatattcgtcgtttgtttggttcggcatcttcagggagcactatcatcgacaagattccgatggacgatatgcttccggcaacaaagttcgaggatatatcatcaagggttaatccgccggagagctgccggatatgccaagatgagttcgacggcggtgacgaagtccggtgtttgaggaattgcgtacatgtttatcacaagacgtgtattgaccgttggatccaagacgataagatgacgtgtcctttgtgtaggaccccgatcgttcctgatttctatttttttcgtttgtaaattagaaaagctaaatgtttcattaatcagattttttttcagcaaatagatatcaatcgttcactaataaaaactaattttttgtctagtttatttatttagttacttcccataattcatttccgtttaaaaattatggttatcatagtcctggacgttcggttatccattcgatttcggttatattcattcagttatcggtttgttgttctaaaggtattcattcagtttggtttcgattctttcggttttcagatatttttttgattattttcaagtatttttattattttatatatattctcaagtatttttaattatttactttagaaataactaatacttttaaaattttgattgatgtttcggatattttcggtttgtatcaattcggtttcggttatttcagttatagaatttagtatgcattcgattagtttccaattttcggttcggtacggttcattatttttgcttcgatttcagtttgatatattcggttcagaatatttgttcagacttagttgataattgagaactctttctcgaaacgtttaaatattaaaagatcacaaaatgggataaacaactacaagaaaattttgccttaatcgacgtcacatgtaaacaaaagaactaaatcggattcaatgttgggcctttcttgaagcccacatgctatttgggtcaaaagcgccaagacccaagacatatctcttaaaatctttgaactttttgagttttgatcacataagaatttacgataagatttactcaccacgagaacacacacgtggcagtttcactgattaaataacacatttggtgtattcactaatatcaaataaatgacgtcatttcacgcttctaatttatttcctaatgtacatttagtgataaaaccctacatacgtgttagagatacggccccgtgcacctactcaaaatagtaaagtcaaagaacgaccgtcagattctatgtctccctcctcagcttataatcaaatcgtggccgttgattctcttttgactcagaacgagcattaacggtgacctttttatccgacttcaccaccatcgttgccgccgcattcgatcgatcactaatcacaattctccagctcaagtgggacattcgtgttcgccactctctcgcctgtcacgcgtgtctctcacgctccacattttttttaatccccttaatcacacgatcttaaggtgtctgatttcactaaaaacatcggaggcaaaaaatgaaaaatcccatgtgcatgctcagtcaaactcacccctcacgtgacacattgcctctatcacgtgatagacgagtaccatttctagatacaactaagattcatatagatcctttaggatttatttttttacagtgttgtatgtttaaattgaacacatttatgccgttgacaaaatttaaaagtaaatatgaggttgacttttgatttataacagattcgtagtatagaatatttacaattgattgaccaacaaaaatgagcaaagatgttaccgtgggtcgattctttacctgggaacttaaatttggtaaaaattagcggcagcttttcttttttaattatgcctactactacatcagaggggtattatagggaactagagtaaaacctaaggacatttccgaccaatgaaaaaaacatggaaaatataagaagggctgagaaaagcaaacaaaaaaaaagttttaataaaccagagaaaaaaaagaaccctcctatcgagttctgtgagatctgcttcaaaagaaaaaaaaactggtggagaagaagaggtgaatcgagttataagcttacgtggtgatgtaaaatatttatatattgagcattttatacatcttcttcttacttgtgtttggtttcttttgggccaaagtattgttttgggtaaaaaatg

SEQ ID NO: 7698 - DNA, 3000 bp, Unknown
  misc_feature (1)..( 3000): cDNA_ID_1818571_gDNA_ID_1621157_Annot_ID_57057 3000 nt of promoter + ATG
caagtcatcgatctgcagtgggatcttggatgctattgctcgccactgagcacgtgacttattcacaatcacctatatatgttattatacttcagggtcagattcaaacaaatgagataattaaatcattgcgagtgttaactcagtgtggcattatgaaagctagagcattagcttctgcaatatgaagatgaatagtgagaaacagataaactaacctgactcgaaaacagtgaattgggtaccaaaaccggaaatttttctgcattcaacaaagatgttgtcgtaagtcccatttcaataacttgaccttctacggatccagcctgcaaagtggggacaaggaagacactatatcttgagaaaaatatgagtgagaactgccaatatatttgcttgctctatgaaactaaataaaagaagagagcagaaaagaaaaaaaggttcaactaactttgatagtatcacccatagagaaaggccgcgagaattgcattgacagaccactcagcacattaccaaggatatctctggcagcaaatgcggtggctacccctgaaaacgcaaatcaaaattggtatgttatgagcaaatactatagaatcagtaggatatctaaaaatgttagcaacccctgaaaaagataagactatatgcttgtgatggcctctagaggcctttattttctgttgaatcctagcaattagcattataggctgagcaaaacgactaatatgaaatggagaacattagacagacctccaactccaccaactgtcaagatagattgaacagctacaccacatgcttcagcagaagccatcaaaccgatagcgaaaagaccaacagatgatactttgtctaaagtcaataccttctccctatcaagcccaccaaaactcttagccgacaacattcgggtaatcacattggtcttccaccgatataggaaccacacaagtgagagaataaccgctcccttcacagtcggggaaaagtattgagctgctatagttgttggcgccaccattgcagcactgcagcatatcacattcatcaagtctatctattttctacaacatacatgtcaaaggaataaagctagagagactcacatttgtgcaaaagcaatgaaggtcaccaagtaacgagcaggatcctctaaagctccccaaaagcttttctcataaggaacatcttcgttagagaagccaacgggaagcagtttagcggaactttgcatagcataagtgtgaaaccttctaagaatcctaggcatcacaacccaagcaaataaagtaccagtcatagtgagactaacaggaactataacatctttaagataagggttagagtcaaggaactgctgaacatgagggatcatctcatcagagacatctttagtcttctttgcagtctcagtaacagcatcgacactagtctgcaacacatctttagctttctcaacccaatcattcccattcccattcccatcaccagagccagtaacaccagaggctacaatacttccgaaatcatcagatttggagctgaaagctcgtgcgtacgaagaatggcctaagtaattgaaaggcttagcatcattatgcaggcgtatgttcgatgaaaaggagatcatcgaaggagaagcttttggtccatcaagaaggtttccgcaagtaaaggccctggcatgagagtttaggagaccagaacacgattttgcagtggcatgaggttttattgatctttgaattgacttgagaagcgataacctaactccggccattgatctacaaatcaaaatcaaaaatcaggatttagaagtcttaatcacattcttaaccaattgaagaagaacacagtgttcactaattaagagcttgctagagtttcgataatggcggaccagatcaaaaattgaagtcaatggaatgtgaagagatcatagaacttgtatattacctggagagacttgaaggtagctagattcttagccaaaattctcgctgagagataaagaaagaattctaaattttgcttggcaaagagggaaagaagatgaagaagaagaagagacaggtttatttcgtcaactctgcttcttattcggtaacatcgacgtcgttttagtcaccttcaacttctgggccttttgggcctaatgattcaaatttgttgggcttaatgcaagtttgattaatttggtgcaaaaccttattaagaaacacacacacacaaagttgtgaatttgtgaatttacttaactacgtacatatatataatcattaattaatcacggtgtttgtcaaatatatatggttacaaattcaatatgttttggacaaaataatatgtgcctaaatctgcttataaatgacaaaatatatacaaccactaaaaatagaagagatatttatcatgaattgtactccaataaaaaaggtattgactttagacaaagtatcatcctaagatggagtattttgcaaatacttggctacaataaaaaaaactgatagatttgtgtgaaaaacgctattttcagttattaattactgtaatcattaatgttgaaatgtcgttttccatcttatggttttattcttgtggagaattaatgttccaaaaacagctttgactctaataaattgggaaatataaaaaggagatttctttctaaatccaaaattttttttaactaaataagattattttagacatcatcaaaatatatcttgtcttaaatttgagttaagttgtcttaattaaatttctcggagtagtgtaataattttcatatgtaaattaacaattgacagcatcgagacaaaccttgcctttttggcattagataatacagattataattgtaattaaaaaaaaataaacttggtttcatttcttaataaaaagccttcaatctcaccaacaccaccactgtcacaactcacaaagcaaaaaaaaaactagtcttcttctatgtcaatcagagccatg

SEQ ID NO: 7699 - DNA, 3000 bp, Unknown
  misc_feature (1)..( 3000): cDNA_ID_1818567_gDNA_ID_1621157_Annot_ID_57058 3000 nt of promoter + ATG
tttcaaaaagcaagtcctctttgtgaagttaacaagaagcaaactatttatcagaataagcaacaatttcgtcatttgcacaagctgccacattgatcaccattgtccccttggtcgttgttggcactaatttacaacaatctctccgtggagcctacaaaaacatttgacaatttctcgtgaacaataatagaagactaaagagttctgaatagtaaattaacagcaaaaattatgtaccttgctccacctatccggagtaggctttttgtagacaaatatctgattgatctcggaaggatccgcgattccccattcacatttaggataccattcgtcgtgcctcaagtattggctaatcgtcgttgtatcagaagaagaagagttactaaacgcatgagagaaataaaacacacgaggacgctgacaatccgtccatgttaccggacgtgtgttgaatgcaagattagtgaaatcgctacgtaagtgccaatcattaaaagtgcgagtaggcacttccatcatccttgctggcatatacgtacgcgtgatttgaactgtgtatccccacgagattgacattgtccactgatgactcttatcatagcataccgattgttggacaagactcgctgaatcgagtttcgctgggatcattagcttctttaatgcgttgactcggtttgtttttgggaatataggatccactacgtctaggtgatggattgatactattggtgcttgtggatggacagataatagccctaagagattcccgtatacatcaaactgttataaaccataccataaaattaataatcagtaagtgaagtaacaagagtcaatgacaaatgaatctaatcacggattttaagttttactatttcacatttactttgtgtttttccggctgatttttctcggtaataacaaaactaacctgatggaatccaacttctttagtgagaggaacaccaagctcagccatacaagcatgaatccgatcatcggatccgtacaaatcggagtatctctcgatacaccgatcttgcatcttctccaaaaccttggctaatggataacttatagcaaaccctcctccaccgtacgccattccataagaaaactgatgaagattctgcaaatgactctcggacggagctccgatgtaataaaactgtttatgatcgtactttctcaaaaccctaacaagattttccgtgaaaaacacggtatcgtcgtcacccatcacaacccacctcacgtttctctccgcttccgttccgtttaacatcctcaccgtctcggacacgattctcgtgatcctgatcgctgatctgtgaccgttacggtaacggtacttgaaactcgacgtgtcggaagagattctgatctgaggcaaagctgatgaagaagaaacggtgtcgttgatgggtttgtcgagccaaacggcgccgttcatgactccgttaggtttccaccatgttttcacgtattctctacgatgcttccatagatctgaagacgcggcgattccgaagactatgtgtttgagctccgtttgttcctcaggtgtttgacccgacccgagacggataacgggtacgaggagagaattgggggatttagaaggtgaatatgggtttagaaaagagatgaaactgaatgagtataagagatatgagacgaagatcaagaagacgacgatggctgtgaaggaacatggagatgaagaagaagaataaaagggtttattagatttgtcgtaagaaagtgttttttgatctcccatggctctgattgacatagaagaagactagttttttttttgctttgtgagttgtgacagtggtggtgttggtgagattgaaggctttttattaagaaatgaaaccaagtttatttttttttaattacaattataatctgtattatctaatgccaaaaaggcaaggtttgtctcgatgctgtcaattgttaatttacatatgaaaattattacactactccgagaaatttaattaagacaacttaactcaaatttaagacaagatatattttgatgatgtctaaaataatcttatttagttaaaaaaaattttggatttagaaagaaatctcctttttatatttcccaatttattagagtcaaagctgtttttggaacattaattctccacaagaataaaaccataagatggaaaacgacatttcaacattaatgattacagtaattaataactgaaaatagcgtttttcacacaaatctatcagttttttttattgtagccaagtatttgcaaaatactccatcttaggatgatactttgtctaaagtcaataccttttttattggagtacaattcatgataaatatctcttctatttttagtggttgtatatattttgtcatttataagcagatttaggcacatattattttgtccaaaacatattgaatttgtaaccatatatatttgacaaacaccgtgattaattaatgattatatatatgtacgtagttaagtaaattcacaaattcacaactttgtgtgtgtgtgtttcttaataaggttttgcaccaaattaatcaaacttgcattaagcccaacaaatttgaatcattaggcccaaaaggcccagaagttgaaggtgactaaaacgacgtcgatgttaccgaataagaagcagagttgacgaaataaacctgtctcttcttcttcttcatcttctttccctctttgccaagcaaaatttagaattctttctttatctctcagcgagaattttggctaagaatctagctaccttcaagtctctccaggtaatatacaagttctatgatctcttcacattccattgacttcaatttttgatctggtccgccattatcgaaactctagcaagctcttaattagtgaacactgtgttcttcttcaattggttaagaatgtgattaagacttctaaatcctgatttttgattttgatttgtagatca

SEQ ID NO: 7700 - DNA, 3000 bp, Unknown
  misc_feature (1)..( 3000): cDNA_ID_1818559_gDNA_ID_1621157_Annot_ID_57060 3000 nt of promoter + ATG
caactgattttaaataacaaaaatcttaaatataaatcttaaaacaaaaaaaaaatacaaaaatgatattttgataacatgagcattatatgcacatatatcaactgattttaaataaccaaaattttaaatatagatattaaataaaaaataaaaataaatgaatgatgttttggtaataggaggattacatgcatgagtcaactgttgtttaattaacataaatcttaactatagatattaaatgaaaaatgaaaatacataaatgatgttttggtaataggaggactacatgcacgagtcaactgttgtttaaataacataaatcttaaatatagatattaaatgaaaatacatgaatgttgttttggtaataagaggactacatgcacgagtcaactattgtttaaataacataaatcttaattataaatattaaaataaaaaataaatacatgaatggtgtcttggtatcaggagcactacataggcaagtcaactgattttaaataacaaaaattttaaatataaatcttaaaacaaaaaaatacaaaaatgatattttggtaaatggaccactatatgcacatatatcaactgattttaaataacaaaaattttaaatatagatattaaataaaaaataaaaatacatgaatgatgttttggtaataagaggactacatgcatgagtcaactattgtttaactaacataaatcttaattatatattaaatgaaaatacatgaatgttgttttggtaataagaggactacatgcacgagtcaactattgttttaaaaacataaatcttaattataaatattaaaataaaaaataaaatacatgaatggtgacttggtatcaagagcactacataggcaagtcaactgattttaaataacaaaaatctttaatctcttaaaacaaaaaaaaatacaaaaattatattttggtaacaggagcactatatgcacatatatcaactaattttaaaataacaaaatttttaaatatagatattaaataaaaaatgaaaatacatgaataatattttggtaataggagtacttcatgcacaagtcaactgttgtttaaataacataaatcttagttataaatattaaataaaaaataaaatacataaatggtgtcttggtaacaggaacactacataaacatgtcaactgattttaaataacaaaatcttaaaataaatattaaaataaaaatgataatacatgaatagtgtcttggtaataggaggaatacatagaaagatacactgattttaaataataaaatatgaaataaaaatacataaatgatgtattggtaacataagcactacatgcacatgtcaactgattttaaataacaaaaatgttatgttaaaacaaaaataaaaatacatgaatgatgtcttggtaagagaaggactgcatgcatagatcaactgtttttaaataacagaaatcttaactctaaatattaaaacaaaaaggaaaatacagaaataatgtcttgataataggagcactatatgcaaaggtaaacatgtattttttctgcttccctcccattcaaagccttaatcaatgaagttttggctaaaagaatgatctttgaccgatggagtattgtgtcgcttgatgtgatctttttacattagaattgtggtcatttgtctcagggaaaagaggagctatacaatataacaagaggtccttcttgaggtggtgaagatcataaagaagcacggttacgttccttttgtaatattccttggatctcgaaatcgagtacaagttcctatcatgctaatggcggagatggatgaaggcattttacattgtaatctgttcatttaatttggattgctttcattgtttcatttgtttgacatacatagacactaatagttgaggattatgtatttacaacaataaagtgttccactacacaaggtacaatcgatatatatatagtgttaactctcatttgtgtatatatgcatatcagtttgtaggtgttactatgatagtagtacatttattaatttataaaaatttatacgtaaaatacaatattaattttttaaaaagaaaaattttaatttagtttttctttatgttttattgtttgtatattctgttagatttttttttattactttttttattttttctctgtaagatattgtgcatgtatacgacgttaacgtgagacttaatccaattttttattacacaaatcttaacaatgatttttcatataaaaaaagttacaaaaccaaatatgacggatcaaatacgcaaagagttatgtgaatacaaaagagatcacaccaactatactctagaaagagttgcaattatgacttgaacaaaagtttcatataaaattagtctttgaatgtatgctaaagatttatgattattaattttatgatattactggtaccatatttttacatagggatttcaaaaaaaatattatcttattatcttatcgattttggttaatttttacattaccccgatttgagaccgacaaaatttattaatttatcgtgtaatatgttttgttcaaataccttttaatatctatttaataataaaaaaatattcaatcagaaatggataatatataatataattatttacttaaaatatatcagcaatgaatcttaaaatgtagaaaaaactaaattttaatttattatataaaaaaggtagataaaatattttatactattaagtgactaaaatgatagatttttgcaagagcaaaattgtactattgatgaatattaaacagtagaaaaaaagatgaaagtgtttgttttgttatgaatgttgagaaaagtatggccaagtgttactcatcctattttgcttttctttttctctcgggtttcactttttaaaggtcgtgaagattgggaatcactgctctgcatgcgccctagaatcagcaagtctaaagcaagcaataagc

SEQ ID NO: 7701 - DNA, 3000 bp, Unknown
  misc_feature (1)..( 3000): cDNA_ID_1818556_gDNA_ID_1621157_Annot_ID_57061 3000 nt of promoter + ATG
tttgcttttgttttctttagagagaaacaagaacacgtttaagagcatgatgtcttgataataaaacttgggtgattctcttacaagatacaaacacacatacttattatagttttacttgaaacacttacacacacaagcatgctcttaaacgcataattaactctgatttcttgcaagctactctactacatattgggactctaacaacaagcatgctcataaacacaatttatgtttctttttatttcctcacctactttgcagtttcaagatgcagaatctcttaatttttttattatagacataataacttctgtgaaagattgtaactaaatgtatatgttttattttggttgcatttggtacttgagaaagaggaactagtgtcaccagaataactcaaactgcacgtaattatcataaacaataaatatacaatttacaaacatcatttcagaatccattttgtttaatgaggttgaacctatcaccatataagctatttagaactcttgttgaatatgtttgtgaatccattctattgtgtgtttctttgttttgtaataactctggtcatgagttttgagtagagagacattaaaaaaagaagcacatttacaaaatcctaaaagttcattacaaccatcgaccaaaaggtttgttagacaacttatcttaatcttgttatagctaattctcacacgagaatccaaaagactaaaaatccataaacgtagatagaaagataaaccctaagatagataacaaaagagggcattacatccttagattaaccctatacaatccctaagatagcttcttcttcttcttcttcttagttggtttgagcaagcaccgaagtcacatccttcaaaacatccatctccgccaacaacaactcacatttcttagcgtccacaaccttcatcttctcttgaatcttcttcttagtctccagagacaccttgctccacttcttcttcacagaatactcatccaaaccgagattcgcgataaccggaacaagaaaagactcctcaaaccactccgaatctgctccaagaatcacttgctcatcttctataaccaaaggtttctccaccttcttctccttgctattagccttacccttaacaagaatagattcatctttcttcacaggagattcaacgttcataccatcagatccccaaatcaaaacagccaaacccaaacatttcttatcatgattcgattcaccacttttgttcttccggttaacaaaatacttattctttaatcttctaatcttgtcaaagaactggacatgactaacatcaaagcttatagatttcttggcgatatcaaaaaacgcattcttatgatcccaaggacttgtacctgtctcagctttgaaatcaatcactgcctgtagaagagagatctcatcttcttcactccatactctctgaggattcgcctttttgttatcgtcctctttcttaactcttttgacatgcatgtcccttgaggtgcttccttcaccagctcgcttcttccctgacttcaccgccggtgattcagcagcaccttctttcttcttccgcctggttaagacgaatgactgcttctctgagtcatcagaagaatctgtcttagaattcacagcggcggaaggagattttagggttttagaggaaggaactgtgacaggatctttgggtttgctttcttcagaagaagacttaaagatctcttcagaagaactctcaacttcgcttgaagaagcggttgctggactttccaaaggagccattggattttcttctttcagattctcgggtatgagtaccaagtgggaactgaagggacaattttagggtttgtgagttgcgagactttttatttttttacactgtaacatctcttatatttaagaaacaattaaagtaaataaagctcaacaacaaaaactaattaagcccaacaaaataaataaaccatcatccttatatgtaacactgtaacatgggaaaaaaaaacaattttttgcccaaatgtataagaaatttgtataacaaaattcatactagattttcttgttgtaattcttggtatacaaaatgaaaggtttctttgttgtaaaacaaaaatatatgtactaaaagtaattttacaaagtcgctttatatttttacatttagaaagatcatttgatcaagtgggaaacctttattgaaattaacaaagtggaaaagattgtaagtagtgaaatttagtgtcatctatagacaaaaaaaatgtaaattagaatttaggaatatgaattcggttaggattagtcgattaggtttattgagtaaactcaataaaaattactgtagtaatacttcagtactcggttcggtttatagttaccgaactgaaaccaaacgattattctaatttaattgaagttaccaatttttatcttaagtttaattaaaattattgaaaaatatgaactctctcttacagtaaaccgacctgaaattggtttttggttccaatttgacaccaatattttatcttgaaccaaatcgaaatttatgctattaaaattgaaccgagccgaactttactttcggtctacttcggttcaagaaatttcaatccaatacatatgaattctgaaagtcctgaaccgaaccagagtgtttaaccacaataaaagtctcttcaatggtctcttcttgagtatatcaatggtctctcatagtttcaacaacaccaataaactgtcatcttcaagttggagtttattacactcgttccttcaagaaactgtaccgtcgactttcagatttagccatttaggacttctcaagattttgaaaatggcgcatcaacatttcttcaagcctcttcttcctggcttccacgcctccttggtactctctttctcgctctttcccttcttctatctctgtctatgtctctctgagaagctaaagatgagtctggttttgtatttgcatg

SEQ ID NO: 7702 - DNA, 3000 bp, Unknown
  misc_feature (1)..( 3000): cDNA_ID_1818549_gDNA_ID_1621157_Annot_ID_57063 3000 nt of promoter + ATG
tcattcgtcttaaccaggcggaagaagaaagaaggtgctgctgaatcaccggcggtgaagtcagggaagaagcgagctggtgaaggaagcacctcaagggacatgcatgtcaaaagagttaagaaagaggacgataacaaaaaggcgaatcctcagagagtatggagtgaagaagatgagatctctcttctacaggcagtgattgatttcaaagctgagacaggtacaagtccttgggatcataagaatgcgttttttgatatcgccaagaaatctataagctttgatgttagtcatgtccagttctttgacaagattagaagattaaagaataagtattttgttaaccggaagaacaaaagtggtgaatcgaatcatgataagaaatgtttgggtttggctgttttgatttggggatctgatggtatgaacgttgaatctcctgtgaagaaagatgaatctattcttgttaagggtaaggctaatagcaaggagaagaaggtggagaaacctttggttatagaagatgagcaagtgattcttggagcagattcggagtggtttgaggagtcttttcttgttccggttatcgcgaatctcggtttggatgagtattctgtgaagaagaagtggagcaaggtgtctctggagactaagaagaagattcaagagaagatgaaggttgtggacgctaagaaatgtgagttgttgttggcggagatggatgttttgaaggatgtgacttcggtgcttgctcaaaccaactaagaagaagaagaagaagaagctatcttagggattgtatagggttaatctaaggatgtaatgccctcttttgttatctatcttagggtttatctttctatctacgtttatggatttttagtcttttggattctcgtgtgagaattagctataacaagattaagataagttgtctaacaaaccttttggtcgatggttgtaatgaacttttaggattttgtaaatgtgcttctttttttaatgtctctctactcaaaactcatgaccagagttattacaaaacaaagaaacacacaatagaatggattcacaaacatattcaacaagagttctaaatagcttatatggtgataggttcaacctcattaaacaaaatggattctgaaatgatgtttgtaaattgtatatttattgtttatgataattacgtgcagtttgagttattctggtgacactagttcctctttctcaagtaccaaatgcaaccaaaataaaacatatacatttagttacaatctttcacagaagttattatgtctataataaaaaaattaagagattctgcatcttgaaactgcaaagtaggtgaggaaataaaaagaaacataaattgtgtttatgagcatgcttgttgttagagtcccaatatgtagtagagtagcttgcaagaaatcagagttaattatgcgtttaagagcatgcttgtgtgtgtaagtgtttcaagtaaaactataataagtatgtgtgtttgtatcttgtaagagaatcacccaagttttattatcaagacatcatgctcttaaacgtgttcttgtttctctctaaagaaaacaaaagcaaaacagagtgacaagagagtgagagtgctgacctcaaaagaatgttggaagaggtagtttgagagtgaaagtgtgattttcaacagatatcttcctcacgtagaagaagttgaatggttaatatcaatattgttatgtataaccaagaaagctatagaattgcactatgatattgtgaagctgcagaaaaataaacaacagtaaagtacatacttgaacaagaaaatgaactttgttagtccgcgtacttgtcttaactcttatgcaggggtagccaagcaatatgaaacatttagtgtggcccattttttttttttcaaattctttaacaaaaattatttacaaaatggccccaattttattgattttaacgataattggccctaaattttaaaacctttcaaaataatcttggattttttgtttttttgtatgttgcccataaaaccgtcaggtcttaggtaaaacatctataaattaatattcaataaattaataaactttataaattaataaattcattcaatcccgagttgaaaccagtgtaagaattgatacaaatcgataaattaataaaataataactttttgtgaaaatcatatgtaaatatttggtcccatcaatattataaattcactaatttatatatatatatatatagatatatactaaaatatgaatatagtattcaatttgtattaattctttgtagaatttaattctaatatttttactaaatcgaaaaatttagttttggtttttaaacttgataattgtttaataattgtaattggtttcaaaaatattattgattataagaaaagaaaaaaaataccttttttgattgaatattataagaaattacataatttgtaaaatttctttataaattaatatctcttcaaattaataaattttatcaatcttaaaattattaatttatagagattttacctaatatgcatttttaactaaaagtcataatgttatatattttatttatatttagagaataatatatatattaaaaaaaaaaaaaaaaaaggttgacaagtggaaatatgtgaccggcaatagtaagttaagttgaccaaaaccaaaaccaataaaatcaaaatcgagagactctttcttcccccaagcgaagaagcgatgatcaaaattttacaacggttcctccattttcagcgaaggtaagtctcacctaattccttggaactaagctccgctgtgatccgaatgtacttatatatctctctcttctgatcaattcgcaaaccgccattgttgcttttttgaaatttcgcttctgatgaagaaatgttgatcggagaaaacgttgaagacgtttgaatttctttatgaattagtcagttgtggtgttagttagttacg

SEQ ID NO: 7703 - DNA, 3000 bp, Unknown
  misc_feature (1)..( 3000): cDNA_ID_3051169_gDNA_ID_1621157_Annot_ID_173590 3000 nt of promoter + ATG
ttcagttcccacttggtactcatacccgagaatctgaaagaagaaaatccaatggctcctttggaaagtccagcaaccgcttcttcaagcgaagttgagagttcttctgaagagatctttaagtcttcttctgaagaaagcaaacccaaagatcctgtcacagttccttcctctaaaaccctaaaatctccttccgccgctgtgaattctaagacagattcttctgatgactcagagaagcagtcattcgtcttaaccaggcggaagaagaaagaaggtgctgctgaatcaccggcggtgaagtcagggaagaagcgagctggtgaaggaagcacctcaagggacatgcatgtcaaaagagttaagaaagaggacgataacaaaaaggcgaatcctcagagagtatggagtgaagaagatgagatctctcttctacaggcagtgattgatttcaaagctgagacaggtacaagtccttgggatcataagaatgcgttttttgatatcgccaagaaatctataagctttgatgttagtcatgtccagttctttgacaagattagaagattaaagaataagtattttgttaaccggaagaacaaaagtggtgaatcgaatcatgataagaaatgtttgggtttggctgttttgatttggggatctgatggtatgaacgttgaatctcctgtgaagaaagatgaatctattcttgttaagggtaaggctaatagcaaggagaagaaggtggagaaacctttggttatagaagatgagcaagtgattcttggagcagattcggagtggtttgaggagtcttttcttgttccggttatcgcgaatctcggtttggatgagtattctgtgaagaagaagtggagcaaggtgtctctggagactaagaagaagattcaagagaagatgaaggttgtggacgctaagaaatgtgagttgttgttggcggagatggatgttttgaaggatgtgacttcggtgcttgctcaaaccaactaagaagaagaagaagaagaagctatcttagggattgtatagggttaatctaaggatgtaatgccctcttttgttatctatcttagggtttatctttctatctacgtttatggatttttagtcttttggattctcgtgtgagaattagctataacaagattaagataagttgtctaacaaaccttttggtcgatggttgtaatgaacttttaggattttgtaaatgtgcttctttttttaatgtctctctactcaaaactcatgaccagagttattacaaaacaaagaaacacacaatagaatggattcacaaacatattcaacaagagttctaaatagcttatatggtgataggttcaacctcattaaacaaaatggattctgaaatgatgtttgtaaattgtatatttattgtttatgataattacgtgcagtttgagttattctggtgacactagttcctctttctcaagtaccaaatgcaaccaaaataaaacatatacatttagttacaatctttcacagaagttattatgtctataataaaaaaattaagagattctgcatcttgaaactgcaaagtaggtgaggaaataaaaagaaacataaattgtgtttatgagcatgcttgttgttagagtcccaatatgtagtagagtagcttgcaagaaatcagagttaattatgcgtttaagagcatgcttgtgtgtgtaagtgtttcaagtaaaactataataagtatgtgtgtttgtatcttgtaagagaatcacccaagttttattatcaagacatcatgctcttaaacgtgttcttgtttctctctaaagaaaacaaaagcaaaacagagtgacaagagagtgagagtgctgacctcaaaagaatgttggaagaggtagtttgagagtgaaagtgtgattttcaacagatatcttcctcacgtagaagaagttgaatggttaatatcaatattgttatgtataaccaagaaagctatagaattgcactatgatattgtgaagctgcagaaaaataaacaacagtaaagtacatacttgaacaagaaaatgaactttgttagtccgcgtacttgtcttaactcttatgcaggggtagccaagcaatatgaaacatttagtgtggcccattttttttttttcaaattctttaacaaaaattatttacaaaatggccccaattttattgattttaacgataattggccctaaattttaaaacctttcaaaataatcttggattttttgtttttttgtatgttgcccataaaaccgtcaggtcttaggtaaaacatctataaattaatattcaataaattaataaactttataaattaataaattcattcaatcccgagttgaaaccagtgtaagaattgatacaaatcgataaattaataaaataataactttttgtgaaaatcatatgtaaatatttggtcccatcaatattataaattcactaatttatatatatatatatatagatatatactaaaatatgaatatagtattcaatttgtattaattctttgtagaatttaattctaatatttttactaaatcgaaaaatttagttttggtttttaaacttgataattgtttaataattgtaattggtttcaaaaatattattgattataagaaaagaaaaaaaataccttttttgattgaatattataagaaattacataatttgtaaaatttctttataaattaatatctcttcaaattaataaattttatcaatcttaaaattattaatttatagagattttacctaatatgcatttttaactaaaagtcataatgttatatattttatttatatttagagaataatatatatattaaaaaaaaaaaaaaaaaaggttgacaagtggaaatatgtgaccggcaatagtaagttaagttgaccaaaaccaaaaccaataaaatcaaaatcgagagactctttcttcccccaagcgaagaagcg

SEQ ID NO: 7704 - DNA, 3000 bp, Unknown
  misc_feature (1)..( 3000): cDNA_ID_2038555_gDNA_ID_1621157_Annot_ID_173587 3000 nt of promoter + ATG
tatacataacaatattgatattaaccattcaacttcttctacgtgaggaagatatctgttgaaaatcacactttcactctcaaactacctcttccaacattcttttgaggtcagcactctcactctcttgtcactctgttttgcttttgttttctttagagagaaacaagaacacgtttaagagcatgatgtcttgataataaaacttgggtgattctcttacaagatacaaacacacatacttattatagttttacttgaaacacttacacacacaagcatgctcttaaacgcataattaactctgatttcttgcaagctactctactacatattgggactctaacaacaagcatgctcataaacacaatttatgtttctttttatttcctcacctactttgcagtttcaagatgcagaatctcttaatttttttattatagacataataacttctgtgaaagattgtaactaaatgtatatgttttattttggttgcatttggtacttgagaaagaggaactagtgtcaccagaataactcaaactgcacgtaattatcataaacaataaatatacaatttacaaacatcatttcagaatccattttgtttaatgaggttgaacctatcaccatataagctatttagaactcttgttgaatatgtttgtgaatccattctattgtgtgtttctttgttttgtaataactctggtcatgagttttgagtagagagacattaaaaaaagaagcacatttacaaaatcctaaaagttcattacaaccatcgaccaaaaggtttgttagacaacttatcttaatcttgttatagctaattctcacacgagaatccaaaagactaaaaatccataaacgtagatagaaagataaaccctaagatagataacaaaagagggcattacatccttagattaaccctatacaatccctaagatagcttcttcttcttcttcttcttagttggtttgagcaagcaccgaagtcacatccttcaaaacatccatctccgccaacaacaactcacatttcttagcgtccacaaccttcatcttctcttgaatcttcttcttagtctccagagacaccttgctccacttcttcttcacagaatactcatccaaaccgagattcgcgataaccggaacaagaaaagactcctcaaaccactccgaatctgctccaagaatcacttgctcatcttctataaccaaaggtttctccaccttcttctccttgctattagccttacccttaacaagaatagattcatctttcttcacaggagattcaacgttcataccatcagatccccaaatcaaaacagccaaacccaaacatttcttatcatgattcgattcaccacttttgttcttccggttaacaaaatacttattctttaatcttctaatcttgtcaaagaactggacatgactaacatcaaagcttatagatttcttggcgatatcaaaaaacgcattcttatgatcccaaggacttgtacctgtctcagctttgaaatcaatcactgcctgtagaagagagatctcatcttcttcactccatactctctgaggattcgcctttttgttatcgtcctctttcttaactcttttgacatgcatgtcccttgaggtgcttccttcaccagctcgcttcttccctgacttcaccgccggtgattcagcagcaccttctttcttcttccgcctggttaagacgaatgactgcttctctgagtcatcagaagaatctgtcttagaattcacagcggcggaaggagattttagggttttagaggaaggaactgtgacaggatctttgggtttgctttcttcagaagaagacttaaagatctcttcagaagaactctcaacttcgcttgaagaagcggttgctggactttccaaaggagccattggattttcttctttcagattctcgggtatgagtaccaagtgggaactgaagggacaattttagggtttgtgagttgcgagactttttatttttttacactgtaacatctcttatatttaagaaacaattaaagtaaataaagctcaacaacaaaaactaattaagcccaacaaaataaataaaccatcatccttatatgtaacactgtaacatgggaaaaaaaaacaattttttgcccaaatgtataagaaatttgtataacaaaattcatactagattttcttgttgtaattcttggtatacaaaatgaaaggtttctttgttgtaaaacaaaaatatatgtactaaaagtaattttacaaagtcgctttatatttttacatttagaaagatcatttgatcaagtgggaaacctttattgaaattaacaaagtggaaaagattgtaagtagtgaaatttagtgtcatctatagacaaaaaaaatgtaaattagaatttaggaatatgaattcggttaggattagtcgattaggtttattgagtaaactcaataaaaattactgtagtaatacttcagtactcggttcggtttatagttaccgaactgaaaccaaacgattattctaatttaattgaagttaccaatttttatcttaagtttaattaaaattattgaaaaatatgaactctctcttacagtaaaccgacctgaaattggtttttggttccaatttgacaccaatattttatcttgaaccaaatcgaaatttatgctattaaaattgaaccgagccgaactttactttcggtctacttcggttcaagaaatttcaatccaatacatatgaattctgaaagtcctgaaccgaaccagagtgtttaaccacaataaaagtctcttcaatggtctcttcttgagtatatcaatggtctctcatagtttcaacaacaccaataaactgtcatcttcaagttggagtttattacactcgttccttcaagaaactgtaccgtcgactttcagatttagccatttaggacttctcaagattttgaaaatg

SEQ ID NO: 7705 - DNA, 3000 bp, Unknown; identical to SEQ ID NO: 7697
  misc_feature (1)..( 3000): cDNA_ID_1808340_gDNA_ID_1621157_Annot_ID_173577 3000 nt of promoter + ATG

SEQ ID NO: 7706 - DNA, 3000 bp, Unknown
  misc_feature (1)..( 3000): cDNA_ID_3051180_gDNA_ID_1621157_Annot_ID_173575 3000 nt of promoter + ATG
ttcattaactcgctcttggttgcttattcaagatttatttgaatggatggtacgaatgtaacatgtgcagtaaatattagatttaatgtcttagtgagcattttgcaataaaaatctgtggatttcatgtttattacaaacagtttcttataaaacatttccttcattattcattaagaaaattaattaagagcacaaacatttccttgttcgtttgccctagacaaggcaataaatcatatcctagagaagcgtaatcgatcattcgattttctttacctaagcgtacaattgaatgttttcttatattatttcttccgttcctttgtcttattattccttaagtctatgttcttacttacgttcactctttttttcttggttactcggacagattccaagtttcttattctacaagataaatgaatcttggttaaaatcaaacgtggaggttgtgaagaaatggacaagacaagtcagttgcctgatgaattgctggtgaaggtattatcatttcttccaacaaaagatgctgtaagaacgagtcttttatcgatgcgatggaagtctctttggatgtggctgccgaaactggagtacgattttaggcattattcagtttcggaaggccaagggttagctagatttattactttgagtctactaggacataaagctccggccattgaaagcttgagtctcaagcttaggtatggagcaattggatcaattaaacctgaagatatctatctctgggtttcacttgcagttcatgatagcaacgtccgtgagttaagtctcaagctttgtacttttgcggagcgtccaactaaattgcccaaaagcttatataaatgcaaatcgattgtgatcttgaaactgaaagacgagattctcgttgatgttcctcgtaaggtatgtctcccctccttgaaaacattgttccttggacgtgtgacttactcggatgaagattctcttcaccgacttctctccaactgccctgttcttgaggatctagttgtggaacgagatagaattgacaatttggggaaattgagtgtggttgtcaagtccttgcagagactaaccctaaagatgtcttgtccttgtcatcttgatgggattatgatgaatactccttctttgaagtatttgaaagtcactgatgaaaggcaagagagtgatagtgataatgagagtgatagtgatagtcctcgatacttctacgattttgaagatatgcctaagttggaggaggcagattttgtattgacattccaaaatatcaaaaagttctttaaatttgtcacatctattaagcgtctttcgttatgcttgggagtctacaccgaagaggtaatctgtttccatcaatctatcaaacttatttttgaacaatattcttgaagttgaatcttttgtcatcttatgcagtctttatatcatgagggtcttgtcttcaaccagcttgaacaattgaagatatgttcatgtgattcagattggtcaattttactttctcggttactcgaaagttctcccaatttacgagagctcgaggcttacgtgatagaagtaagtttcttcgttagagacatattccattggttcaatttactatattgtttaagccaaacttctcatgtttgatcacaggatcatccagataggcgtgtggatctaccaaatcagtggggcaatcagctgaattgtgttcctaaatgtttgttgtcgagtctcgaaacgttcaagtggagtgagatgtatggattgctgcagaaccagatggatgtggctaaatatatcttgagaaatgctcgatgcttaaagtctgcgacaatcttttttccgacaacctatgctaaagaaacaagagatgagatgatcgaggagttgtcactttcttttcaaggtccagagacatgccaagtcttcttccattgaggatgtgaatcataaggattcaaacttgcatttccatagacactaccctccatattacaatggttttttatttgcagcaacttgatctaaacttaaggtgttttttttgtctttgttttttttgtatactttatctttgagcatactatttttcttgagacattggctttatctttttctgagatcttaacaaataaccgaactttgaagagacaagacatgacatgaacttttatttgcagcaacttgatcataacacaagactcaaacacaagactcaaacacaagactcttcagcttatagatcataaagtagatcaatagcacaaaaagatatcaattagaagatcagtcaacaatatagatgttgtagaaatttgcatcctaataaagttcattacaaagaaatgacccaagtttcccacacatatccgcatcaaaaaaacaagtgccataacattgcattaagattcatattcatattaccaaacagagcacttgcacacatacatcaacacaaaaccggcaagaacatcataggaacactcatttgaaaaaacccaaggaatagattcgactatgtaaacacaaacaagtatctaggaaaatcaaaaacataagtaatagaagaatatgttaccttcaaagaagaacgagattttctcagcgctctcaaacccgggttctcaaacccgaaccggaccggaaccggaccattacccatttaacccgacggtttacccataagccgagccctaattttttcaaagaaaagggccctaaacttttcgtcttctcgcttcccttcctctatctcgtcttctcgcttcccttactctatcccatagaaaaaccctgaatttggtttggccaatgatgtcaaaactcttcattgatacttaagaaagttttctccattgttcttcttatggtctcattcacatttggtaagtctcttcaacgattttggttttgtgagcacttacttcttcttacaagaattacatgtctttgttcaggttgtaactgttgatctgtttctgtcacaaaatg

SEQ ID NO: 7707 - DNA, 3000 bp, Unknown
  misc_feature (1)..( 3000): cDNA_ID_3087818_gDNA_ID_1621157_Annot_ID_173573 3000 nt of promoter + ATG
tcacacgtcgctagcgtttcaaaactgcttccactcatccttcctttgatggactcagaatctgtgcattgtggtcgccccaaaagcaaatcatatggaagaggagcaggagcacaaaaggtgtcaggtatagatgtctccaaacctatatcaaccaagaggcctgtggtgaatgctgatcccacaccagcacgggttcctgaagggacaagctcttcaaaagattctggacactgcgtaacaaacttttaataaatagaaactttgtagagtgtcacaatcaaataactgtagataattcagaagacatttttcaaacacagctcactcacgacctctagtagtctactatcgaccactcaagcgagattgttacaagaaattgttgagattctaaaatcatgctcttgtcccgatttgttttaactaaaatcataatctatagatagtcagtagtgcaaagcaacacaaatgcaagatggtgaaaaggattactgacataatagtaaacaggtgttccaacaagatgtgacttcctcgaagaactacagcaacctcccattttcaccagctatagtaataattaagcaagagtagcgaacaacagtccttgaagcattttacagatgcactgccactgcaggaaaagagtgaactgaacaacgattacttgaatgcaacaagattaatcaaaagtactcttaagaaaccccaataaaaaaaaagtgattattacagtgttagtaagcaaaatgacaaaagaaaagttggtctgatggcaaagtcatccataagaaacacaaaggtatgggaagagtgaatagtgagaagaacattacgaaacaagattaatcaaagcagacttgagaaatcccaataacaagtgattattacagtgttaataagcaaaatgacaaaagaaaaagttgatctgatgccaaagttatccataagaaacacaaaggtatgggaatgttccttatgctctgttgtaatgtcccatcaatagctgaaacttgaatctatattctaaaacaacctctaggattcagtcaagttgcaatgaaaacagtgacgcgagcaaaagcatttcacacttgagccaattttaatcaaacacaacacaataaccttcaaaattggtaacatcattgatatgtaactctaccataagatcttctcataagaatagacgacaacatgaacacagtaagcacatctaaatcagaaactaaacaacactaaacagtacgcgaaccctaaaattgaagaagccgaaaagaccaaaaacaaaaagtacacgaaagccgactccgggaaacaaaaaaagagatggaataattaaccgatgagagcagtaaacgaagataacctgagatgtcgccggagaatttgatgttgtcgtgattctccggtgaagaaaagtgagaagaataaatgctggcgacggagggtttcgacacacagagctccttttctctagtcgaataacctcatcatagtaagtaattatactgtaatcctactttactttatttagtttgcctaattattctcaaatctcattaaataccttttaaatagtacgacgtcggttaaggatacgggctaatcattgggcttttgttttctgaaacatgggctataaacattttagaccatggtccattctacagaaggtcaaaccctctgtcgctatcagaggctattgaatattttgctggtaaggtctcaattctcatcatccttcacctgcctatgaatcttccttgttaaccgtaacctaatattgattgacttctaatcaaagtaatttaatctaccattttattatttcctctaatctaagcctttttcatataaaatgtatctaatagtaactttataagaaaaatattatacctttttcttggtatctttgttgtaaaaaaaaatacaaattaaatgcgagttcgattattgcattaatagagatagacccatctggcatttaatatggtggcggcggaataatcgctaacaagatattagttgaaaattttcaaatcattcggatagattacgtctggcattgaactaattatcctctataaattcaataatgacagaatttagtagatgttctaaatactaaaattatttaataatcttacatatgcaattttccatgtacgtgctgttttggagcgtttaaaccgaattaaagtactactgtaaataaattgaatcgaatttaccgaaccaaaattgaagaaaaaaaaaattaaatcgaaccgaaccaaaaattggaaactagtcgaataaatattaaattctataaccgaaatatctgaaataaaaccgaataaatacaaaccaaaatattttgggtaaaatatctaaagtataaatatatttttaaaagtgttaattatttctagactaaataactaaaaatacttgaaaatataaataaaatagtaaaaatatttggaaatatctaaaaatatttaaaaatattcaaaataaccgaaatattttaaatgaaataaccgaatggatactaaattttaaaatcgaaaccgaacagaactttcaaataaccgaatggatactaaactttaaaaccgaaaaaatcgataacggaatggataactgaacgccgagaactactattatatacaaagtatttagttattcaataaaatttgaaaccaatcgttttttttcaaaattaataattatcgaatttaaatctaaggaataaaaaagcttattacaaatcattagacaaaatgtaataaaaaaaaaggaaattatacacattaattatcttagcttgtcgagtttaaattttgttaatcagagaacgtcaagttgtacagctggcgtcaataaatacccaaaacagtcgtctttttcaacggagaagaaaaagttgaaaaaattgtaaagtcagtctctccgactcttccttccttccgtgttcaccattgctacacgttctccacgaactttccg

SEQ ID NO: 7708 - DNA, 3000 bp, Unknown; identical to SEQ ID NO: 7693
  misc_feature (1)..( 3000): cDNA_ID_3087810_gDNA_ID_1621157_Annot_ID_173568 3000 nt of promoter + ATG

SEQ ID NO: 7709 - DNA, 3000 bp, Unknown; identical to SEQ ID NO: 7692
  misc_feature (1)..( 3000): cDNA_ID_1818591_gDNA_ID_1621157_Annot_ID_173564 3000 nt of promoter + ATG

SEQ ID NO: 7710 - DNA, 3000 bp, Unknown
  misc_feature (1)..( 3000): cDNA_ID_3045007_gDNA_ID_1621157_Annot_ID_173563 3000 nt of promoter + ATG
tcaagcttttgcctctccagttcagttagtgcttcatgtttttccaattgtttggcccgagactccaagtcccgcatcttacgatccagttcatttcttagcttctctttatcatataggattctctggatatggcgaagtgacatctgctgcatcttctttgtttctgagaggagataaagtacaaaaaatagtcagataccctaaatgctatatgagtcggaaacatatcagtgtgtgagtaaataccttcagcaaaagcttggtgcaagttttttttctcatctaggaccctttgcagtgacattgccgtcctgttgtaactgtgttgggccttgttcagatcttcgtttgtcatatcaatcatatttgaaagtacgtccagaagagtgtttctatcctgcacattgttttgcaaaatatctgaaactgttcttagcgttccctccttggagaggtactcacctattggaccttgagattgaaagtcgtctgcacgtgcacaccaaccataagcctttgactctgaatctccactcctctcagtccactcttttttgcaggacccttgggtctcaaattccttttcaagctctgtggcagcagcaaacccactccagtcactgtcaaacttagcaataaccccaacaatcgaatcttgttcgacccaaaaggcattcacttcaacaggcttgaatttggaaagggtctgcagccaatatactgaatcaagtagaagctccttgtcatccgtttctttcaaagggttaacaacaatccccatccatggccagacatagacgttatgaggatttggttcagtctcgtctaacagaggaggaacaaccggagggcgtggaagaggttctgcataaccagcaagatcattctctaaaaacttagctaaagcaagatgattagacttctgtaaagcacttctggtggcagaacctttggaaacaccagtagcatgtgcatgcaactccttgtacttgtaatcttgcttcttcttgcctacacaaaaggggcatctgagccgtccattcaccttcaccttgtagtaagtctcactgcgtaaaaggtggtagggtgttttagaatactcctcaatctctgactcgctgatctcagactcttcatcagaaatgtccatcgtacctgctttacctggagaaaaagaatgttacaaaaacagagaagaagaacaaaataaggcccaaaagagactcaatttctaggcaatcccacgagcaagagaaaccctaggcaacaacttaacaaacaaaacaaaattgacactggataaagcaaaagagacgaaagtgatacagcatttacaaaattgagctaagagagtgacgcatgcatgataaggaacctagcgaaatcaaaaatatatttttaagtaacaagtgagtaaaggcgttaaatcacgaaatgcataggggaatcgaaaaaattcattaaacgagagatttcactgtgaaaacagagaatagaagaaatctggagcttacgctagagagggaaggaaaaggaacaacacggcgatgactcaacgcttgatgaagagtggagtagagagagagtgagtgaggaagatgaagagttattttattttggaaaatatatcagaaaaattagagggtgatttgcaagaataacacatttttatacaagaattaagaatatagcactattaattaacaaagtaatttaaaaatagataaaagagaaattttcacaaatagcataattttaagtttttttgacaaaacctattttatactatagttttttgacaaaattttaagtttttttttggacaaaattgatgaataaaacctatgatccaaattgtgaatgatttatactataagcaatatagtggccacaaaattggtcaagaatttttagtggctttatcaaatagccactgactggagatttttttttaaaaaatatgtgtctggtcaaagtatgtaattatatatctatgtgtaaaattgtatcataaaacattaaggtttccaggattatttttcttctcaaaatttaatatagtgactttgttttactctaagagcttatagtcaccaaagttgttatatatattaatatatgtctcattttttttttttataaaaagaatcaattatgagaaagccacttttgaaagtgacatttgttgattttgcaattttccatatagtttgtgaatttgccatttttagttaataatagataccagttaatacgtggatatagtcggttagatttgtttttaaaatttagtatttggtttaaagtacatattttgcaaaaacattttatatatacatacagttttaagtgttcaaaatgacaaatcctcaagattttagtaaaaactaatgacattgttgtacaattttagtgcttaattttagtattttagttattttatgggctgcactttagcaataaatgtctctttgttttcacttttcagcagttggaactttgaacaaatggaaacaaaaaaatgtagaagacaattttatttttaagcccatcaaaaatacaaatgagattgtaagcccaatatattaaccaacctacctttttcttttgtcagctctctctatttctctaaaggtgacgtcatcttcggcggtaacggctcagatattttccacaataacttccaataatacccctgccattaaccaatagtacccatgtttcctctttgcaacgtgggggtagattcatgaaatgagaacagaacggaggttccaacgagtagaagatgatgtgccacgtgtcactatatcgacccccctttcctcttccttccttccccaatagagagggattttcccgcttcagcgtctctcagtctctctctcggctttatccaaaggttccttcgtttactccgcttctatggaagaagcttgaatccttctctcttcttcttctccttcttcccttgacatttttgttctgagaagcaac

SEQ ID NO: 7711 - DNA, 3000 bp, Unknown; identical to SEQ ID NO: 7690
  misc_feature (1)..( 3000): cDNA_ID_2038493_gDNA_ID_1621157_Annot_ID_173562 3000 nt of promoter + ATG

SEQ ID NO: 7712 - DNA, 3000 bp, Unknown; identical to SEQ ID NO: 7689
  misc_feature (1)..( 3000): cDNA_ID_3609923_gDNA_ID_1621157_Annot_ID_173556 3000 nt of promoter + ATG

SEQ ID NO: 7713 - DNA, 3000 bp, Unknown; identical to SEQ ID NO: 7688
  misc_feature (1)..( 3000): cDNA_ID_3051209_gDNA_ID_1621157_Annot_ID_173553 3000 nt of promoter + ATG

SEQ ID NO: 7714 - DNA, 820 bp, Unknown
  misc_feature (1)..( 820): cDNA_ID_2187203_gDNA_ID_1621158_Annot_ID_57065 3000 nt of promoter + ATG
accgtacctcttcgtcttcagataacataaactccacttgttcttgagctgatgttttcagctcatcaacaagctcaggagagttctttagtgtatcaatggacatggcgaaatgaagagctgacaagaagacattctttgtattgagggatacatcaatgacatcgtcctgcatttttcgatgttttaactgcgaattcatcaaatcaagaaacatattttaagtagattatcaataaatcctaaatccaatcaaaagacttaaaacttttctataatcaacaactctaactacataaacaacaaaccaataagaacacaattaccaaatttgtaactgaaatttccttacgttcatcgatttcaagaaccctaattagcatttcatagctctgttttcgtcaatctaatcacattttacagagtaattaacaaaacaaacaaaacagagaaaaatacttactttttccccaaaattttcttcctttaagttaaacaacaatggaggatgataataaacaacattgctttgaatgaagagtgaagaagaaagattgaaactttagcaatccaatggggatcttcacacgctgatttggtttaactaaaccgaatcgaatttggttgataataaaacgacgtcgtataactgaaggatattacggtaatttaagtcaaggccatcgtcattgtcattgaatagatcaaaccattttactaaagaacacagttttctagattctctagagagataagagtgagagaagagaagagaagatccaaaagcgtgggaaaatcgaattagggttttctgaaaatg

SEQ ID NO: 7715 - DNA, 3000 bp, Unknown
  misc_feature (1)..( 3000): cDNA_ID_1818665_gDNA_ID_1621158_Annot_ID_57067 3000 nt of promoter + ATG
tatgtcagtgaaggagctgcatttattggaacatctagagattttaaccatagatattgtgtcaactatggttttggagcaaatgattgacgctggcactttgatgaattgtatgcaagaggtatctattcgttgtctcatttatgaccaagaacaagacacaaagttacgtctgccaactatggatagccttcgtagtctgaccatgtggaactgtgaaatttcagagatagagatagagaggttaacatggaacacaaatccaacaagtccatgtttcttcaacctctcccaagtcattattcatgtttgttctagtctcaaggatttgacttggctattgtttgctccgaacattacttatctcatgattgagcagttggagcagctacaagaattaattagtcacgcaaaagccaccggtgttactgaggaggagcagcaacaactgcataagattattcctttccagaaattacaaattctacacttgtctagtttacctgagctaaagagcatctattggatttctctgtcttttccatgcctaagtggaatctacgtggaaagatgtccaaagctgagaaaacttccattggattctaaaactggtaccgttggaaagaagtttgtcctacaatacaaagaaacagaatggatcgagagtgttgaatggaaggatgaagccactaaactccatttcttaccatcaaccaaactggtgtatatcctctcctagctccattctctctctgtttgatcaaaacaaataatataaataatgtattagcactaacgaaatcttttctttgtcagttgatttagctctttggttactcctaagacagcctgtaggccgtaggacaagccggtttttcaagaaccatatcagacgacacaaactgtcttacactatgaacatcaagcaaatgtaaccaactttctgttttctttcctaccactggattgtattttatatttcctctcccaccgtctcttttgttctgcaacttttctttatctttcctatttttttcaaacaagatcttccctatttattacagtcaaatctttaagtgatccaacatcaattttcttccaaaaatttaaaaatctatcccggcctgcaatttctttcactatgttaagtcttatgacaagtatctataaaacaccacgtttaaaactactgtttaagaaaatatacaaatcaagtcaactattaagacatgtaaacataattgaaagtttaaaactatcaaatcacatgtgatcccagattcttcacatggtagctaggcctaggctcaccttctaatagaagtagcaaatggaatttatcaattatgtgatctcagatcccatacatattattattataggatctcgaagataaagtaaacagagagaggtaacaaacataagaaaaaatctattagatttagttggtgaccaaatgatgttagtcaacaagtggttatcaatttgcttaacacatttttttcttgtaaactgcaaaatttgcacaaactaatttcttgaccactccggtttaagaagattggtttgagtctttgtctctctgagaaataaacaagaaaaggacatgaaaggtattcgatctgccaacgtgacattgtgagaatgggtaatataaattccaaataagattctctcttaatttggattatcctcctccatatgtaatataatttggaatctcgtgattgcttttttttttctatttgtaaggtttcatttagaaacagaaataatttgcatcccaacttagatactactaaccttatatgggcttatttggtagataggcaaaacttttacaaaaagttgtaaataaattatttgtcttacatgctttaaataaatattaaattgtatgttatcgaatagatgataaatttgttaaaaacttaaaatcgtcacaaagcccattgttataaaatttaaaatatatatttcttccaacttagggggtgttattggttccaaattataaggaattttgatgatttcaatcaaatcctagaaagtaaagaaatgaaagattttaaacgattgttagagagtattttataatcttgttgattagtttttcataatcttgtaaagtttctctaacaatctctttattttgataatacttttcatgactttccatgactttattttgtgaagaaaaatgtagaaagtcatgaaccaataacataataatttaaatcattaacaatcattaacaatcaaagattcttttgttttaattgaataacacaaaacttttaatgactttataagagtatgaatctaataaccaaaatttatgaagattttagattactttttacaaatcttaaatgaataacacaaaaatttaacatacttttaaaaaatcttgattgaataacaatagattttacataacagtttaaatcactaaaacttttttaaaatcataaacgaataacacccccttagtaaacatatatacatatgaggaaagaaagatatattaaattaagactctgcatgggtagctttaatatttgtttcaacaacgaatacaaaccaaccataagattagagatgatagaccaataacccttaaaaatatgaaatatcgttttgtccttttacccttttagttataatagaaaagacatgaaatagtgtatagctaaatttttgtaagactttgatgttaaaagaaattttatgtagacaagaaaattatcttagcaaaacgaaagtaataagtttgaaggaggatacaaatgtttataattgaatgaaaatctattgaaaacaaaactactttaatgtcaaaaattaaataagaagtaaatatacaatagacagttgttggatattattatttcaaatgggccaactcttcaagacgtgaagaagactagaagatagctttgtcagattcacatctccccaaaaaaaaaacagagcaagaagaagaagaagaagacaacc

SEQ ID NO: 7716 - DNA, 3000 bp, Unknown
  misc_feature (1)..( 3000): cDNA_ID_1818661_gDNA_ID_1621158_Annot_ID_57068 3000 nt of promoter + ATG
aaaaagaatataaaattacaaaaatatctttactaaaatttactaacaatttaaaaacatttctatttaaaacaaaaattagcttctttttttgttgtcgatatcaaaaaaattggttcacggtttttttttctttttcacgaattatattgatactagataaggcccgcctaaataggcgggtgtatgatataaatttatttaaatattaacagtaatatttaaactttatatagtaaatagtaatcaacacactttttctaatatttaatgtagtaatttttgtattacataaaattttaatcatacacattcaattttacttatattttaactatctatttcatcataataaactattttgttatttataatataaaaactacattcggacactctgtgaaaacgacatcccgtttgtatcctctaacaatgtcggacttacaactgttggacaaacatcaaataaatataaaccgagcagtaattaaaacgcatagtttgctaatccatttactatgcgattagctttactatacacatgagtaactcggactatgcagtccctatacactccatcttattaatgatatttgaattttaaatagtaacgtaactctcatactttttcagtatgtaattttgtatttttttaaaccaaatttcaatcttacaaattcgattttgcaatacaatttaaatacctattttatcataataaaatatataatttaatgatatacactccatcttattgttagtttttttatataatttaattatatacactccatcttattgttagttttacattttagataagaaaattgtaagttaaatatttagatataaatatattaattagtatatataaatatcttttttttttagtttcctattttcttttaggaaaaagtaaaaaaaaatcaaaaacatgtcaaaatctaagatcgttcaaataaccacgtgtcatgatctcgtgagttagtaactttcaaaactgtactttatataataagatttgaatttcaaatagtaacgtaactctcatactttttcagtatgtaatttagtatttctttaaaccaaatttcaatcttacaaattcgattttgcaatacaatttaaatacctattttaccataataaaatatataatttaatgatatacactccatcttgttgttagttttttatataatttaattatatacactccatcttattgttagttttacattttagttaagaaaattgtaagttaaatatttagatataaacatattaattagtatatataaatatctttgttttttagtttcctattttcttttaggaaaaagtaaaaaaaaaatcaaacatatgtcaaaatctaagatcgtttaaataaccacgtgtcatgatctcgtgagttagtaactttcaaaactgtactttatataataagattagattggaaacgttacaatacacatgagaaaataaaagtttaaacttcaagaagacaccatgctcgacccataacctacgacaagataaggaaggaattttccgataatacattgtaaaaaccaaacaaatcttgtctcgagactaaacgaagctctcgaagctcaccataaagacttcccgcacaacaaattatgaagaggggcttcttcataacttatggcaataacaagatagtggaacttggccttctcaataaatgcttctttttcaatgagtgcctttgtcaagggtcttccggatgaaccgtaagataatcgagaaccacttagacgttttaacgccacaacgatcaataaattaagcaaaccatcatctgctacacgatgagagaaaactcaaatataatcaaagtgctcaaccccaaactaacaaagattaacttagtcgggaagagaagattagcccaaacaagggagacggaagtccaaacgagggagacaattaaacctaatcctctgatgttaccatatctcacagagacgaactgatcagagcaacaagtcgacacaaaagaggaatacatgagagacattggagataccgagatatcgaggaggcgatccaatgttgcacagatgcagctttgggagaaaagaaacgagccgtcaagagagaagcaaaagcctccaaagtccgtcaagactcagcgaagagaaccacccgacaaagacgacgttgtgactccactctgtgaccaccgaacaagaacgatgacccaagaacacccttgaccaacagatcctatagatctgagtaccaagacccaacctcattaaatctgccccacaacacccactattccaaaatgtagagcctcgatgcttccacaaacaaagaatacaaagacaagaaatgaaaaactatgcagagaaacaaagaaggtgactgacgctggtgctatttgagcctccacgcgctggtcactttgtgttaaagcaggaagacgagagaaaaaaatattattttaggtcaaccttgtcgatttttgcgatacttagagcttcgatttttagggttaacggttcacctctgctatattttttttatcagaattcaactccaacaaactaaatcactttccgtgataaagaaaagaaaagtgcaaaaatttggattttgttgatccaaaataaaatacaaagaactgaaatcttaaaatcatatactaaactagttgttatttgtaaatttcttataaccctttcttacatttttaaattaccctacatataactttttcttacatttttaaaatatcctacaattatctaactaaacacccaaaaatatttttaccgttttatgttatcaacttatcatcgtgtccgacaaaaaaaaaaaaacttatcatcgtgctcctttacatttttcgtgacctaaaactgctacgacatcgttttagtgacttacttgctaaaaccctttttaactttctttcaagctaaagacctgcacaaactctctctcgaattcttttgtttcgaagcc

SEQ ID NO: 7717 - DNA, 3000 bp, Unknown
  misc_feature (1)..( 3000): cDNA_ID_1818653_gDNA_ID_1621158_Annot_ID_57071 3000 nt of promoter + ATG
ccactatcttcggatagagcagagaagatcgcggctttatttcggacaagcaaaaaggttgtgatatggattacgactaagattgatgccacaaatgtaacttggagcaatttcttcacaatatatatatcgaaccttgagcgaaatctttcatgtaagagtttcttcacaatatatatatcgaaccttgagcgaaatctttcatgtaagagtttcttcattgacatggagaagaaagttgctatggtttttgataaagaaaaaggaaaaaaagtcgctcacaacattattaatatcattggagaggctggatgcgtgaggaaattggttcttaaagaatctggagacaaaagctgttggccacttgtgtgctcttatgttccaagtacagtgcaaatcaagcaacataatagaggcaaaaggcaaaaaaaagtgattaggaaaggcatcgacattgatatgagacatgataaacgtatcaaggttgattagtctcaatttacaaagtctatatagtttatatgtttttcacttacccgtttaacttttttcttcccatctattgttctatatggacaaaattttcatgttttaattttttaagttttacaaaaccgctgtgtgatctattaaatgactagttttgtcgtctgaaatatcacatccgtctccggcggtgtggttgatgcaagttgcaagtatagaagaatatgtgtacttgtctcttactctgcacttgatgagattgtgttgcggcttctgactacatgtatgtggtttattccttacattgtttcatgatttgaaagtaggttatggatgtgttatggtttgtacggctacactttcagacatacacaaaatattacgaattgatctcatggcacatcactccgtcttcgagtcacctctatgtgtatctagtagctttctcgttatgattgtttttcttcttggatcagttttggttgctcaatttaaccttttttctagagaacattcaactaggaatctcactatcataaaatcattaaaggttttgttagttgtagtatgttatggatattcacttgcctgtagagaacaaacattcaagttgcaaattgtgtatatgctttacttttgaaacttgcatgaaacttttgtcatggcgtgtcagtacatagagttgagtaatcatggctttgctatatttgccctgatctacgttgaagtttccatatagtatctttttttcctagtcaaaagttggtttttcactaataaaaatttatgcagatagagagaaaccaaactgcactaaacgagcttaaccatgcattagaagatagagatatatactcgatttggtatgttaaggaagcaaccaactttgaacccatatccatttttctaataaactacgtacatgagaatcctcgtagcaacatttatagaagagatacccaaaccatgtgtaacataattaattaaagtctaaagacagcattggaagagattacacacatgagtatccaaaacgaacaagctgtcactatccaaaacaaacttcaagtgagaaaagtaataaaacatgaactaaaagatagtttaagagattgttaaagcattttcttgcagagttaggttttctcctgatcccacattgtaattaatgatgttgtacatgtcctctaaaaatctgtttgctggcattcgaatctttgcagctatcttttcctacaaacaattgcctagttttctgataatgacggcagtgtgatcttaatgacacaatggacgccgtcacatttctagagtgctattagctagggaatggttattaactttctcaaactttgatcaaggaactatgttttgccttttcttttgatgtaagttgaaatgatacatattttctcacatatgggctaccaaatcttttcttatagttgtcgaacgtaactaaacatatgctgacacagttgtataaataattttacgattcacgtttctgaaaatgttagttagtattagcctatgataattaactatacttcgctttatgtaaatcaaaggccaacttttttgaatatctatatgtaagaataaattacagctattaataaatacgagatgtaacttaattcagaaatgttcacacacatatggaacaagaagatttatccctgaaatagtattcacagtttggatcttatacctttttatgtaaaagaaaagattcaaacaaaaatctttcttatacaaataagattcaatcaaacatatattcctggaagttttgaacataaaaaaatgatttacaaaaaaattctcctaatttattaaaactgaatatttaataacataaaatctcttataatttatgtatatacaaaacaaattccatgatattcatagaatctcataaggttagattcttattataaaaagtagacaatctctaataatttatgtgtcgtgatattaattagaaatctctaataactcaaataggatattaatctaaattcgttgacaaaaatagatagagaatcattgttattcaacgcccaaaaccaaagtcattagtcaatgtcactcgtgaaactatccaaagataagagtttatgggattcgctaatctattacattaaagccacgtgtcttaatcttagatgttcaatagacttgccacgtcacacattgtctctctcgtttctcaaatcgcgtttcttctggtggaggtcaaactttttgattagcaaataaaagtcacacaagccgaatccaaaaatgtaacaagaaaaacaaatcttcacaaggcaaaaaatccaaaattgagttttttttttcttcattttttacaatggtgtctcggtttcgtcttgctctagagtacttctaagtctctctgttcttacttcgatttcgatttttattctcttttttttttttttttgaagacggatttggttggtggtttttagggctgttttgggttcgagacgacgtaagaag

SEQ ID NO: 7718 - DNA, 3000 bp, Unknown
  misc_feature (1)..( 3000): cDNA_ID_1818649_gDNA_ID_1621158_Annot_ID_57072 3000 nt of promoter + ATG
gttatatctacgaactggaagtttgcattctttagcctctcagtccatgtctccagaagcttaccttcaggggcttcacgagcaatgtgtccaacaacttgtgaatcatttccatcaccccgggatagatcacggatggcacgaaatatggcatccatcagccctgttccatcatcacccttaggcttaacatgcatgataacatcaagcttcaactcatcatgtgcaggttttttcacaacttcaagtagagaagccttgttcctactacacaggaaatggatctgcttcttggtaaaaaccataattgtatctggaaactcatacccaagaagccaaatattcaacgctgaagatttcaggtaacgcagatcatcagaagcaggaggggtagcaatggcaagagcgtcggcagatccccataagtctgcactgtgcttcttccagtgttcatacaatgctcttgcacgtgagataaagtttttaacatctatggaataagtattcccagcttttggaggcactccactaggaggggctcgggcattaccattccgagagtctgccatctaaagagtccagcagcaacctatactgcgaagaaaaagtaaaataatactcagaaacaagaaagttttacataaacgagacagagagagattcacaagcctaaagctttcactaatcaggaaaaaaacaaaagactaatctttttatcaaaaattgaaaagaccaacaaaaccttatctcgtgaatgccaaataaagttcaacagtttttaaacaacgtcaatctccaaatgcgcaggacataatcatatacatataggtattggcaacaaaaacgtgaaaatgagaactaatatcgcaaaacattagactctatatatatcaaaaacgtgaaacaatgtcgagagatataaacttaacgaatccaaattgaaatctagggtttcatagccttcaaaataggtcaaaatttgcagtaaattacaccaaatttcagacccagaaagaaaaattagggtaaggaaaaaaaaaaccacttcgaaatagaatcaataaaatctcaaaattaaagcaaagacgcgaacggaagcttcgcacggcgaaaccctagaaatggaagaacaagaaaaaacaaaaatcaattacttgtctaacgcagcgaaatcaaaatggatcgagttaagaacatgattttaaacgaagaatcaaatcgaagaacacgaaaacgagatttaaacaagttgaatcgtagattaaaaacagtgagaaatcgaaaaagggggaagaacagaaaaatcaagcgaagagtttacccagatggttaacggaggaaaataacaaggtagctttacacaaaggcggttttggccgcgaaacaagaagaaaaacaaactccggcgaggctctcttcgagagagaatggggagagagtaagcgaaagttaccaaagaatggtttttctaccaaggcatttcctgagagtggaacatacttttattctgatgatggtgggcttcgcttactgttaaacaccgatttgtattgggcttaacatagtgactaataaaggcccatgtactatatttttgttttgccggtggcccatttactatatcgttgtcgattttgttatatatgaatgataaaaaataaacagcaaccgagctaattgaaccagaagaccaaaccaagtttatctcgaaattagaccgaaacttgtttacaactcgattggtttaaaactcaagagaaattaaaccgatttttagtgtgacaatacattatacatgcatggatatgtgatctcaaatttgtgctttagttttaagatttgagagagagagttttcaacttttgacctttggctataactacaaaattatctttgtaaatgtagtttacagtatataatgatgaggtacataaccatattataaagttaatgaagtaaatgattatcactttttttatttgcaaaatcacttaattgggaagtgatttctcaaaaaaagaaaaaatgctatgttattaaataaatgatgaatcattacattttatgtttgttttatactatatatctaagtatatactcttaccaaaaaaaaaattagtatataatgatttatcttatatgcggtttagaattgtttgaagctagatcaatgtacgcttaatgcctaacactgtttcagagcgatatcgccatatggttgatcctgtttcaatacctgtaattcaaaaaacaacacatttcagctaagaggcaatgcagagatagaaaaataaaggaacaatccctattgaggaacaattaccaatgtcgaaaacattcgagcagctaatttccttgtctttccagccaatatcttgctcaaacttagatctccaatgctctacaatgttcaaagaatgttacacgttagtagagaaacaataagctctcaaagctagctacgtacatggtttttggaatctttatttaccttgttctctttggcaaagcatcagaaattatgggagctttcatcattttctcttgttgtcattataccggcgactactccaatggctccagcatgccaatgactttgcttgtgtcgtattggaacatgtcgaattctcgactttcttatcatttatatctttgctgattattttgatatgatcaaacgacgacgttttagtgatatgattactctcatgttgtgaattctgattttcacaatgtgttgggttggtaggatttatattctcttaaattaatgtatcaagttctacttaaatttgtagtatccctagagaagactttttttttgtagtctctttctctgagttcatctagtgtttgtcttctattggcttaaacaaatgattggtcaagtcaacatcaaatacttgttcaaacgatgacattatattctataagtaaatgtaaagtttttatttcttgaagaaaaacaaagacttgtttcttcttgttcttgatataatg

SEQ ID NO: 7719 - DNA, 3000 bp, Unknown
  misc_feature (1)..( 3000): cDNA_ID_1818641_gDNA_ID_1621158_Annot_ID_57074 3000 nt of promoter + ATG
aacgacctcatcgtcatcttttctctcatggaagatgaccacaatagttacacttgagtttatatcttgtatatgtccatatatgagatacccaatacattgctcccttggcttagccgtccatgcacactgtcaaaatttagcaaatcttagatagaaatgtcactaaaagtgtacaattcaattgtttattaatcggtcatgctcatgtctcatgcaacacgtcttctttctttggtctcttactaatcaaacttatttaattgaatagaatgtgatgaaatattgccaataccacatcatggtgtgtatcatggttatgatcgggctggacaggatttcgaactttggtccctaaatgacgtctttaacagttttatcaacaaaaaaattaggtcatgatttttgcttctattagaatattatttcaaaaaatataactcttttacagtctttcttttgttttccgtataaagcgaaatgaatgatcggataacaaaacttatcttgagagttaattatcttttctttctctctagctctcaatagtcaataccctcatactaactagtaataacgatatataaaatcgagaaattatattttagatattcatctcaattttttgaaccacctcaacgttaaccaattcatttcaagtttgttccggcataccactcattgtttaacttgttccaattcgttgaactattatgttcagcttaacacgttaatatcaaataattaacagtttatgtagttgtaaatgtaaattaagattttatacattttatatatctgacattgtttaagcaaacatttttaccaaaagtgtatagcatatattggatgttgtcaagtttttttagcctagttcgaaccatctaatttttaccatcgaatttatatatctaaagccgaatccagtgtttctcatggtcgggtagaactgaaatttcgactttaactgacatctctaatgtcggccttatctacaaaaaaaaaagtattgatgtttggttctactatatatataagtatcaattgtggcataacatttttactattatctttttattttttttaaatcataataacggatcagagaggaaatcttcttgtgggttgtcctttttctctctctcaatagtgtcatagttgggctaattgacatttcttacattggctttatctacaacgaattaagtagtgatatgtttgattccacgggtggaaaaaaaaaaacagacctgaaattcgaccataaatccgacctgaagtactccataaatccgatcgagtacgagtcttttcctttgtcaatatgtttgatctagagagtcttggtacaaaaagcaagaaaaacaagtgaagatggtgataaaaacaaggtcgactgaagccaaatcgatgttagcgttatagtgtcgtagggttaggaattaggattttggccttaatttaaaagtaaatagaaaagaaaacaggggaaaaatgtatcttcctagtattgaacttggcaacttacggtattaataattaataagactgtaacattagagccaatgtttaactttgccaacttatttgtacaatagtatttttatatacattttggatagttttgttgggtaattttgggtattgggtaaaacctgaaccaaacccgaaccgaactccaagatgatgctatagaatatctaggggtcatgtattcctaaacccgaaacccaaaataccagaaccgaaccaacaaatacccgaatgcctagtctatttggttctattatatagaggtgtttattgtgtgacataacattttcacttcttccctttcatcttctcaagttcgaaatgacaacttcgagaggaaagcttctcttgtgagtaatatcatctctatttctctctcaaagtattttatagtctttttgagtcacatagtttgtacatgatttgaaggatcttgggaaaatcagaagatttagggattctaagacctatccacgattgtttaggtttttctctttcttttcgtaattttttctttgggttttcgtaatgatatatttcagtagttcactggattgatgtgtttatcttttgttaaattggatcggttgaatatgaatgagttattaaatttagtttcacaattttgggtgatgagagaatctaggtcactcgctcagaaaatttagggattttattacctatgcacgatgttttagttattcttgttttttttctctctctctttagtcgcaataacttctttggttttatgaacatgatgtcatattaaatgtagaatctataacatgatttattgatctgatgcatcttagtggagttcgtggccaatgacaacagtaaaacctctataaattattaatattgggagtaagaaaattgattaatttaaagaggtattaatttatcgataaattaataaaattgtacaacttttgtaaactcttacaaaactttgatataaaatgtagttttttttgtaatttcaagtagaaaacaattcttaagtttaaaaaacaatacaaatttttttttaattttgtaaaatactagaattgtacactaagttaataaaaattgaagaaaaaaattactacagtcatattttacatatgatatttataatatttattagtacaattattaatttatactattgatgggaccatatatttaaataagattttcaaaaaaaattattattattttattaatttattgatttgtatttataactttcactatgaaataataattagggtttcaaagactaatgttttttgagctttcttgaagcatcttgcaacaaatttaggactttcaagttgagacaatttttagtctcatgggtcatggctttgtatatatttcatgtcttacgctccaaaaacaaacccaaatataagttaatttgatgatcgaaatctatatatatgtaggtcaaacgaagatgtcagtaacaatggg

SEQ ID NO: 7720 - DNA, 3000 bp, Unknown
  misc_feature (1)..( 3000): cDNA_ID_1818637_gDNA_ID_1621158_Annot_ID_57075 3000 nt of promoter + ATG
atagtgaggaagagaggaagagaaggaagatgaaagcgtttgggaaatcgcgtcctggaagtagcggtgcaggcggtagtagcagcatgaagaacatgccaccatctaaacgcagcaggcaccggtgaaaacaaaataatcaagagtttgagttctgcttgcttatcattttagccttttgttctgcttatcttttgtatcatataaaaaaactgctttagattattatctatctattctatgcccttgggaaaataatgaagtcttaggtttcttgtcgttcttaataaaatttgtttcgacttaaattggcagaaaataccattgtggcatcctctaacggttggtcttgtaaataattaaagggtatgccataaaccaaaaggtaaaaatgaatacttaagttattaaagaaatcttggattcaccattattattatgagatacgaagatgttcccactattagtggtggtgagtttcctgtgggacaagcaatagaaaggtttccaatcgacgatgtctaagagacaaaacacatcaaagctcacaagctcattcacccatctccctgctgatgctgatcttgtcttcatcacccatgcatcaacttcaacttaattagcttatatacacaactctctctggtatatataagaagagtaatatattttggcagttgtttctcttgcatgtggttctttggagagttcctttagagtcattgaacgtatgagtacaaaggatgttgtgacatggacatggatgatttatgcatatggaatgtatagcgaaggtgagaaagctgttgaaaacttttgttgatatcgaaaaatcaggtcttgttcccgatggtgttgtcttcattttcatcatcaatgcttgcagccactctggcttgccttgcttcattgaacacatcaagaaagaatcctggatgtagctggaggattgaaatcggtaaaaaacaatctccttctagtctctcgtcattctcatactctgttttatgtgtatgcatgcccaaatcctttgtattggcttaagatgaaaatggagtcttgatgtgtatttcatcggagatgcttaaggaaatcagggagataagctttagtatatagttttcactgtataaatatctgtttaacatgttttcttcccgttacatataaaacattccttaaaaaaaaaaaaaaaattgggaatcgcataacaaactggaaaaaaagaaataataaaaaggaaacaaaataataaaaagtaaatccttttagaaaaacaaattcctttatttcaacatctataaatactactagcaaaacaattaaaccaacaaaaaaagaaaagcaaaacaattagtccatacgaagaagaaagaaaccctaagaatgaaagaagacggaatttgcttggagtgcaagaggccaacagaaaccgtggttaactacaagaacggagatacaatctgcattgagtgtggccatgtcatagagaataacatcatcgatgacctagacggtgcttcgaccaaccctaatctcaaatccggccatctccccactatcatcttcaaacttagcggaaaatcttcctcccttgcctcaaaattgcgccgaacacagaatgaaatgatcaaaaacaagcaggaagaagatgtaatcaagatagcctatgcggaaatcgagaggatgaccgaagcgctagggttaactttcggtatcagtaatacggcgtgcaagattctttcgaaactggataaaaagaacttacgcggagggaagagtttgagagggctttgcgcggcctctgtatcaagggcatgtcgccaagtgaatataccaaaaacattgaaagagatctcggcagtagccaacgtggatatgaaggagataaacaaagcggtgaagcttcttggagattctttcggtactatttgaatgatatggaaattcaatcacatgtaaaagactacggaaattaatcaataaaactatatatatattttttttgcataacctcgaatcagtcacatacaaagacttttaaagttgaaacataaatctgaaatgtaagttttcataacagtactgaatcatttttttttttggacatgaatgtaaacagtactaaatcttaaagtcaacataagtttcacatattcaatgatcaaataaaaaggaaaacggaaagatagctcatcttacctttaccatcatccatatttgcttatcatttcatcgaatctaagatgtcttaagacggtggttcaatccaaagactcataagagggcaaaggtctttctgcttttcaaatcttgatggttttggaagcggcttacgcggatagtacctgcctttatcaaacgagtaggatacacatgatctcttgcaacgtaaaccataaaactttgggaagtacacactgttccacatgccacaaacattcaatctcgtctctgaggagtacttacttgcaaagattgtcaggccgtcaagagtagcaccactcatctcctcccaatccgaggagacaagtttatacagcaacggtatctcgctgctacatgtaaacatgagaaagagctctcctttctatcaaacaacaagagactccttctcctacagagacttcaatccatcgcaacaacattgtttctgtttcagtttcagttaaaggagattcaggcccaaaagaaaaagagaagcccacgaagcccatcctttactcatcgaaactctgcaacaatcaaagcagaggaacatcacgcgagacaccgccgtcgacaaacataaacgtgcacaatcattttgatgttcttggaagcagcagcatttcatgcaactaggacacctgtcattagctattatgtaatcctcctctttatatagttctctgcttgtaatcgaattcactaaggaagaaatacacaattattttctctctgaagcttttgcttctactttcatggtatcagagcttaggactttgttcctaagccatg

SEQ ID NO: 7721 - DNA, 3000 bp, Unknown
  misc_feature (1)..( 3000): cDNA_ID_3051223_gDNA_ID_1621158_Annot_ID_173622 3000 nt of promoter + ATG
agttctctgcttgtaatcgaattcactaaggaagaaatacacaattattttctctctgaagcttttgcttctactttcactttctgctcagccaagtaaattctcttcctaagactaaaccattcttcattgtacatatgaatataagggcatatatgttcattccatgcttgatgactcattgtgcgggaagctagatcaaagtcaactaaaacacctcccgagctgaagcaatagaagtgaccattggcatagacaagattgctatgcatgtacggctcaaatccatgagagcaagaaaaatcttgagtaatccactcagttgctccaggaaagcaaatgcttatacgaatgataaatctcgtaaaaggtcttaacgctattaccgcacaagtacctgatgtaggtaccgaagagaaagcaacagcctgaaaggacaactcacactttggcaagtttataagctccctagtatacgggttgaggaagaacatgtccactaaactggatcttcgcataagcaaccatccgtctttcgagtaacaaacatcggttccaactaactcgggtaaattcagtgtgtaactcttccttcccaatggatcgaagagaatagtcacgccgtaatgtctcggaaagctgataacccatggatgcttctccacaacccgaactgattcagcggctttacgccatgctcggcagaccgcggatgcacgaatgttatcttttaaaccaagataagacattattatttccaaaaggcttgatgtaaggtcagcaatagtaagaacttcttcttcagcccattgttactaacatcttcgtttgaccttcataattaaagatttcgatcattaaattaactgaaataaatatatattgcttttggagccgtaagacatgaaataccacaaaaccatgagattgaaaattgtctcaaaccaagatgctacaagaaagccgagaaaacaataaaagttgtcccaaactcatcttagaaaccctaattgtttcatagtggaagttataattatttacgggaataattggccacgaactccacgaagatgcatcagatcaataaatcatgctatagattctacatttaatatggcatcttgttcataaaaccaaaaacctttgatagagatgggatagagagtattgagagagagatagagatgggataactcaccaaatgagctttcctctctgagttgccatttcgatttagagaagatgaaaggggagaattagatatcttatgtaacaatttgacacctctaaataaaaccaaatacggttggtcattcggatacttgttcgggtttggttctgatattttagattttcgggtatttggtttagagatccaggtagaggtgtaaaacgggccggtccgcaatgggtatttttttgttggactactaacaaaaaaatctatgtcaaggcccatctcatgggcttaacttttatattttaaaaataaacaaaataataaaataaatttaaaaattttaaattaataattttagatttaatataatctttaagatttacttttaaaaaaaaatatcattctataaattaaattgctttatattatcacatattattgtttcataattaagtaaaagatatttatttatctatattatatatttatttttgttaaacatttgtatcctgcggccgctccgccaatctatggacaaatccgctaaaacccacaatctatttgggcttgcccgttaggctttctattttatggacataaagcgatgtccaatcccaccctgccgtggtacaatataggctaatctcaaaggccgagttacataatactttgtttatttatatgtattaaaggattttttttgttacaaaataagtgttgttttcaactttagttaaaaaaagaaaaatagttaatatttcttgaccaattatgtttaccgtatatttttttattggttgaattggttataattaataaaatctttatataaaaagaggtgagttaaatgagatttttgtgattttttaattttttgtaaaatcttaaactacaactataaattaaaacatatggagtattatattaaaaactgctttagattatcatcaattatatgccctaggaaaataatgtcccattgaggattaggatctagtcgttcctgaaaaacacattgctgacttaatattggcagaaaataccattttgaaattatgagtgtgacacataaacccttcaattagctagaaactttatcgtcctgtatggaaaaatagcccatttagttgaggacatgactaacaaaattcatgtctcaatcagactaatcgatcattaactttatagattgcgcatgacggaagcaaaagaaacaaacaccttctcaaagtttgcaattttagcctcgtgaaactttatactctttcaaacgcaaactccctttttaaaagtgtacattcctaaaatagaatatctgcttttatgaatttttgcctccaataaacttgataattaattgatatctagccggcagctaaatctaaaatttctcaagacatcaatccaatttcatccttagttttccgggtacacattttttccacacaatctacgagagaccgctatttaatcttacatcaaaattatattattgcactagttaacaactgggatagtttaaagcaatggccagtgacaactgacttaatcctacctctttcactcctttttaagaaactttacaaccatttctccggtcattaagtcttgctagctacaacataattagacatttaacttttaaagatatcaatccatccttccttcaatatacctagtattctttccaattgttgtttgtgtaatgaggtatatttttttgtaaacatcattatcgacttaaataatattgcatagtgaatgtaaatagtgagaaaatttacgacaacaacttaacaaaaccaaaatgaatgtaaatg

SEQ ID NO: 7722 - DNA, 3000 bp, Unknown; identical to SEQ ID NO: 7717
  misc_feature (1)..( 3000): cDNA_ID_3051230_gDNA_ID_1621158_Annot_ID_173615 3000 nt of promoter + ATG

SEQ ID NO: 7723 - DNA, 3000 bp, Unknown; identical to SEQ ID NO: 7715
  misc_feature (1)..( 3000): cDNA_ID_2144327_gDNA_ID_1621158_Annot_ID_173609 3000 nt of promoter + ATG

SEQ ID NO: 7724 - DNA, 998 bp, Unknown
  misc_feature (1)..( 998): cDNA_ID_1818725_gDNA_ID_1621159_Annot_ID_57080 3000 nt of promoter + ATG
aagcttgttcagcggtttgtcaatgataaagacaatacactatcaaaacctgtgaaggtaagaaagagtttccgttatataggcgtatatgttatgaatattgttagattcatggcaatggttaataaccacataccaccatatagtttgcagctgggtatcaacgtagaggtgcggaggagacgaaaggaaagattcggaaagacgcttcagatgttctagttcaatgtccgttgctggaccgcattaaatgctttgaaactgtggcagctggagtgaaagacattgtaccagattcagttgtggatctcaaatctccagaggtagtgtgtatagatagaaaataattctatcttcgttgcatcatcgcgtttataaagtctgaaagattggagtaaaaatgtgcagttatgtgttctggtggaactgttaccgctctctagaatatcaagtggctcctttgtagctgctgtttcagtgcttccacatagactcgttagcacaaagccgaaactctgcatcaagcctctagtccctgaatccaaacacaaaaagggaccaaactgacaggtgcaaaggctgatcgctgcattcgattttcgagagccaaagatatcaatagaagttgtaatctctctgtttttgtttagatatgtcttttgctttcagtatctctaatggagttaacaacaatgtctgacctatgttattcaagagaacaaagataaacccatctccaccgctttttccctatgttcacaatgttacagtttgtaaggctaagctatggcaacttggaaatcaatcggttcaattcggtttttaaattaaaccaatcgatttataaacaaatgtcggtttaagcaaggttcggtttggtccacctctggtacgtggttttccaaatcgcgctctgaaacagtgttggcttcctggttccatcttcgcgacgccaagagcctgagattatcccagtggaaagaagagaaaccctaatg

SEQ ID NO: 7725 - DNA, 3000 bp, Unknown
  misc_feature (1)..( 3000): cDNA_ID_1818721_gDNA_ID_1621159_Annot_ID_57081 3000 nt of promoter + ATG
tatgtgaatgtggccgaggagatgccaaattttcaagaatctcctctttctacaacgctatttacaaacaaaagcaaacactagttttacatttacagtccatacttatcgactcgtaaaaaacaaaacaagaaaaatacaaaattatcatcttattcttaccttgtgtttgagttccctaattccaccaatactcctcactttaacgttatggaatccgtagaagagaaggaaaatgcaatcggttcaaccggcagaaaagaccggaccagaatgttgagtagtggaaacaatgggtccgacgattagagaagcaaacaaaaaccctcttcgacaaaatttaattcaacaaatactgtcatccatatcttttcttttcatgtacgtttgattatacacgtaaaagacttttgcgtggtgtaatgagatggaacacgtggcaagacagcatgcactcgcacatgtacttagtcagacagatttcgttgtctttgaactgtgctcgtgttttctcgcatttccgcacgtggtctcaagtcaaccattatccacttcaactcctacgattttgtttctatatcactacctccatacatataaccaaattttgaatgttactattagatcgtgttgtgaatcttgcattcaagcttcttggacttgcctctaacaattcactcttcatggattcctcccgtcgagttccattttcacgacatgatgataaaggaaaacatgttgacagataaactgaagagtaaatatatagttatattttggttttccaaagaaaataaaaattagtcaaatttttgtttttttctttgatgtgcagtgttagaatttcttccttccaaataacttaactcggaatattattgagaggctatagacaagcaaactagtgtcggccttccttgatgtttaaggtcccaatctagagcaatgaaaaacaagacaacttttttgagaaaaattcaatctgcctttataaatcgtcttttttggttacttggatctgttacgtttctacaatgaaccaaattaaacaactatggtgttttcattaagcaaactaaacaactacagctatataagtggagatatggaaaggggtcatgttcctacattccagaacaaaggatcatatctttattactgtgaaagaaatgacaattttttaaataaataaaatgtaatttcttcaattttgttttttgtaattttacaatgagtgcaacattttagtaaatgtttttatgctattatacaaatcaaacgagaatattaaaatgacatagtcacgaaatcaaatttattgagagtaagcttgataaatcaaatttagaactaaccaaatctttgactttcttatttgctctcacattcctgaacagttagatcaatcgtactctccaacttttctacgcacaaaatttaaaaatttgatagtttttcttttcattaaataaaagacgagaaacggttatatttgcctgagtagaaaccgccgataacaacaaagtggaaaatatggctagtttgtatttttaagtaatttctcgatttaatttacttaggacaaaaatgtatttatagagaaatcgtgcttttatttatttattgagaagattcttttttgttgttttgtaaatatttatttaacatttttattggtacagtgacttatgttttacaatataaaggatttataaaaataaaaattatttttctttgtctcttaaatatggatatacccaaatatcattttccataaaaattcggtgttatccaaatctcaaaaccctatttttcatagatgtttttgtttctcttataaattcatcactgaatctctcatgctcaccattaattctcagcaataaaaacaaagaatgaacgattcaatgaaagctccaaaattctttaaaaaccagctaaaactagcggaagcacattatcaaagaggtaatctaaaaggagccattgaaatcgtgaatgacttaacgtttggtcacccaaacacatcttcaaaccaccatgagatctcacagattctcctcgcctatcaaatcaacttgactagccaaaaagccagtttcacacactacgatatcttgagaatctcaaatccgttctgtagccatcagatgattcaaagaaagtacagagacatcttggttaagctctaccccgacacaaataaatctattgccgccaaatcagctttcgagattattaattatgcgtggaagatcttgtccgatcctgaaaaacgaaaagattacaatatcaaaaaaaggtttaagtgaagatgattcatgtctccagaagatcatgaaccacatcaaacagtgaggcaagggtttcatgtctttcttgggaattggaatacaaaacctatttgttcttcttctttttttaggttaattttatgattttattttattttatctaggtattaattccaagtaaacttgtgacagtttgaaagtgctaatggatatttttacaaactttttttgaatttatttaaatgcaaaatttacagttttgctgccataataattatgatttgataagaaaagttacgattctagtagagtttgcttttcgttggaataacgtgattatatttattttattttaatacaagataattacatataatgatataatatgttgcgaaaaaagtctctgattcttgggagaaaagattcgaaaagaaggaaggatccaacaaaatccgaaattattattaactgaaaaaacaaaaattttgcgccagcgtggcaatacttctctgtcaggaggaaggatccaacaaccaataaaactccgacccggatccgaacccgaaagcaccagacgactcgtcctccacgatcccaatttctccaatttcaattttgccaaagagcgagagagaaggaagaagatccagacgaagtggtttgccttcagggaacgagagagagaaagagattttaacaaacgatg

SEQ ID NO: 7726 - DNA, 998 bp, Unknown; identical to SEQ ID NO: 7724
  misc_feature (1)..( 998): cDNA_ID_2138588_gDNA_ID_1621159_Annot_ID_173636 3000 nt of promoter + ATG

SEQ ID NO: 7727 - DNA, 3000 bp, Unknown
  misc_feature (1)..( 3000): cDNA_ID_3051254_gDNA_ID_1621159_Annot_ID_173644 3000 nt of promoter + ATG
acaagagcagctagaaacacgacatcaaagctctttaagctctctgtcacgtccattatatcaacggtgtggaagaacatgcgttgagagatgtctggatcagaggaaaccagaagagaagcgagtgagttcgctgatgggtcgatgtcaaagttgtgaaagattgtgtctttgagatggaatgaagcaagaacgatggaagtgagaggaagaggaccagatccaatgaaagccacactctttgggacaaagccatttaggttttgttcgaggaggtcgaactcgagctttccgagtttcaaatagttgttgtaataagggaaaatgtttaaatgatgaagtgggttgtcttggtaagaggtcaagatcgaagagaaatggttttctaagtgaccttcggctagaccacaaatcttgatgagattaagtcgaatctcttggactctgtcacacatcttggtgacatcgatgttagggtttggtggtatgcatgtggaaacgagctgcttgaagagaatgttgacatcttcggatggttttagactctcaagctttgagatcttttcgtagagatcgcatattgtttgcaccaattgttcgtcttggcaacccatgtcgacactatgaggttattgatttttctctttctctttggagaataatcgtgtgttctcgggtggtgtgaactgtttggactggagggatggatatttattggcgtggggttggggatctacatcaactagaaaaagaatctaattattttaacatttcattattcaaatatactatataacgtacacttgcgtttttgtttctttttttgtttaactaattaagaatagatccttatatttaggttttgaagtaaaagatttatttaagtcaagatattagtttaatgtttacagtattggtttagtttctatgatttctgatttaggtttaaggttttagtttaggtttagagtgtatgttttcgattatagaaatttcattcctaattgctataaaatttacaatcattttcaaaattatcctggttatgaaaaatgacttgtgtgaacatggattagatccaaaaatgttataaattattggatatattgtattacactaagcaagatgtacagtaattgatggatgatatgaaacgtataatctccattaattgatggattacatgaaagctaaatgagataatttgtttgttttattccattcttctgtatataaaaaatgagataaggtttgaatgtgtccatgtagtacttcttccaactcgtatgagacaactacacaaaagtttgatgccttatcatttttctgtacgtagcatatgatgtaaacacataattacacagaaataaagagtccattactatattatggggcagttcaaaatatatagccaagagcttttagtcttttagaaagaaatgtgcatgacttgcgacaacacaaaaagtgtaactaaccacagtaattaaaaatatatatatggagtaactactaacctatataacaagttgcttgaccgaaaaacatacgtcctttgtctgtttccaaacatcaactttggaattaaattgtaagacttcctcacaaatatcaaactgagttttcaatattttttgaaaagaatatgcgaatttcagaagaagataatctcttcatggcgtgtgccttccacaaatttcttacggctctccttgttttcttttgatatgcttcatgaatctctcaaattcttcacgcaatcatatatattttcatatctagaaagaataataatttttttttttttatctcaatatagcttttaggaattctaggagagtagcatatatgggatatatacgttgacaaaaaaaacacgtatatgaaattggaatccatgtgagacgaatataaaagattggaagaagacacaaataataagaggtacttaaagatacacacacacacaacaacttgaaaggatcgatattcttttatgtaaatgacgcatcatatttatttcttatgcgaaaaaacatattcgaaacaaagaaaaaagaaaacatgtttgatctatgcatttttgcctcttctattaactccacggccaacttgattaattatatatgccaacaaaattcatacaacactattaatattcgtttgtttttctccttctcaatttcaacattaatttttaaagttttatgtttattttttgtggttgtcagtcaatggattccataatgtatatattattttcgtagagatgctaagatttttttttctcttctttttcttcctgtataaataagattgcgtgaagaacttgcggaatttcatgagtgagacaagaaaacaaggagagccataagaagtgtgtggaaggcacacgccaaaaaagatattatattctcagagaaatggacatattcttaatatttccaaaaattgaagtttcagtttgataattgtacgaaaacttacaaaaatttgtcaatgttaatgttttgaaacggatgaaagaaagtatatttagtcaagtaacctgttatagtcatgttcacttcactatcaactctatcttcttattggattgcattgtccatctcccagtttattcttcttctttttcaaaattaatttatttcctcatgttacattaacatctatctattgatttttttttttttgtaatgttaaatttatttatcaattaaagtaacaaaatatattactgaagatttaaatgattgttgccatttgccaaagctaaagagataggtctgttaaccaaaaaaaaaacattttaatgggccacatgtgtggaaaagcccatacactttaaaacaaaacgtctccccggtttgattcaatcttctctcttggtttttctggttcggtaacttaccccaaagtctagtccggtttaatctcccaaatcaattttattgaaaagaacatgtcatcgttctgagtttgggttttcgagctctaata

SEQ ID NO: 7728 - DNA, 3000 bp, Unknown
  misc_feature (1)..( 3000): cDNA_ID_2138612_gDNA_ID_1621159_Annot_ID_173658 3000 nt of promoter + ATG
cttggcaatactacgaatagagaaaccagagacaagtattggtaccttccagagaccgtcgttgaggtaatgcatgttgtcaactcctattcctttgttaatgctctttctgtgaacatacacaagaaaagtttagcgatgcgaaagaaattttatgagcaaacaggggaaacacggccaaaattgatcctggtgcaggtatgtgtatctaagggaagaaggaatatcaataaagtgacaaagatagggttacttggagaggcctggagccaagagactgtattttggctaagatacgaaagtatatcaaagcacatgtttgtattttcaaataaattccagcgaaaaattgacttacatgtcctttgctgacattttggtgaagcctattgctaaggcatgttgctttccttctgcatatatggcctaaacaaatacagattcatggtttaagatcagcatatacaaacaaaaatgcaacccagggaaatactgtttttattcataccactggcctttcagcctcgacttcttgatccagaacgcctcccggggatgtaagaccaggacacattatgtttgcaccagacagaacaaactttatggcacctctatcaacttgaaacctcttcattatatttgggtctgcaaaactccaaacattcagctgccaaatttttgacattcgtggctaattgaaaaaactccaagtttctttctatgtatcattcaagtatgtaaaagttagctgaacgtggtgttttcaagaatattttatactcttctggtaacagccaatgccaaaaccttctcactatgataagggtcagctaacccggaaaacataaaacaaaatatactaaacaaaaatcctggctaaccaatcatacgtggaccttttatatagttcactcgcatgaaaaaagccaaaggaacaacaacttacaggaaccaaaccccaggaagttctaaataactcagagaaaagtgtcggacatactattcaggtatatgcagtatttgaaccaggtaagttctactgcagaccacagtaagactaacaggtgtgaagaagagtgattgtatgaataaaacacccagatatgttatgttttgataacaagaccatatagcatggatggtgtgaaggaaaagtgatattacattgatgaagaagccgcagtgttggcatgtatggcccgtcacggatacagaagaagagggggacattgttgacaacaactagggtcagatggtttgggctgcacgagaaatatagtcaggaatactgtaagacatagatagtgggtaaaagaaaattcagaaaacaaaacaatgaatatgagtttgttaatttacagaccacttcactacgataagaggaatctttttgggaagtagatcctccatcactgattcaagtcccgggtactgcaacattaacataaacatatttatatctgacaaacttcacgaaatcataaaagtttaagaaggggaaaaagacaaatgaaacaacagacatacctcatcttggatactctggcggatcctacgttgaacagatgccttcacttggttttgtgatgaaatctcctccaaacaaaacctaaataaaaagtagtgaacataaataacaccttcatagacataatggtatatcaaatagatctaaagttgatagcagtagggaaaaataaactttatacaagattcactatgaatgtataagcatgtttcaggagatggataaacacaaactccatgatagtagagagtttagactggtcaaatcaagacacaaactttcctctatgacccacgactctttgtacagatttgataaatcaaatagtgacactatcaatatagaaaccaaaactttacaatagcaagatgttagcttttgagaactcaaaaccttctactttgaagaaaatataacaaccaatatgcccataccaaggctactctaagcaatcaaattaacaatgtggtcgacaacaagtagaagggagtgagttctcgatagttattagagtaagtggatactaaataaagagaccatcacattctttatcaactagtataaacaatgccgagatgttgaaaccactaattcttagattctacaatccgggtatgaaaaacagtttctatctaaataaaaaagtagagaaagaatctagaaagagacaaagatgcttacttcttaaacatgttcgaggtttattgaaaatgatcaccagcttctaactatggtatcttcttccctgcaagcgaacagtggaagatgattgataacggaaatatcggaacatcactcaacaaaccaaaaatttggacatcatatcgcaacaaattcaataggaaaaatactgaaattccaaaacagaaaaaccaaacggaacagagcaggaactcacggactgagagagaccgtggacggtgtcacggcggaaaatggtcttggacggagttactaatcggcgaattgagatttgagaggtggtagtagaggaaccgagagaatgtttctctcaaaaaaatccccaagtgtttccgatctagtgtctcttttgtccaaaaacgacagtgtttaggaaacctaggagaatgaatgacccgatggtccgaatccgattcgaaattggttcgaattgtaataactaacatacaatattccggtttgaatgataagaaaaaacacattcgatccggttagaacaatatattaacaggcccattaaaacatatgggccgatcttgatcaactgggctattcatcgttgatacatgcggccgcacaggattaaaatccagttccgttttataaaaggatactagtttccaaacgaacggtggttgtctcctttccagaacaatctaacgctttctcgaacatcttcttcttcttctttctcgaaattatttttccagtaatcaatttcttctcttctagatttttacaggaactaattttctgctctgaggtatcag

SEQ ID NO: 7729 - DNA, 3000 bp, Unknown
  misc_feature (1)..( 3000): cDNA_ID_3051250_gDNA_ID_1621159_Annot_ID_173646 3000 nt of promoter + ATG
agccaagccaaacgaatgatgatgatatatataacatcaacggtttttgaagagtaggtgcaaattctttttgtgtatcatcatgtaactctttgactctcagtttaaagtcaataaaatatatcgctgcctaattatatcaatgagcagttgaaatcaattcttgctagatttgtgttcaaacaaactatgttcttgttctcttcacgtagaatcacctctctacgctcttacaccataatcaaacattcaagttgttattcgactttggtttctgatggtaacatcttctcgattcaacactttcaatctcttatgcaaaaatatgaatcaaaccttaaaatcatccaccagctccattcacacttcaccacttctgggtttcttctccttcatcagaagcaaaactctgggaaactttttctattcaatcctctgcttcgatgctattctcttggcgaaacccctcttcatgcttacttcctctacgaccaactccaacgactccatttcttgtctgatcacaataagagtctgcctccttttgatagtttcacttacctctttctcctgaaagcgagttcgaatccgcggttcccatctttactactgggaattggactccacgggttgactctaaaactgggttttgaatctcatgtctacgtgcagacagctttggttggtatgtatcttgttggtggaaacatgattgatgctcacaaagtgtttgatgaaatgcctgagagaaatccggtaacttggaatgtgatgatcactggccttactaatttgggagatttcgaaaaagctctttgctttttggagaagatgccgaatcggacggtagtgtcttggaccactatcattgatgggtatgcacgagtagataaacccaaggaagctatactcttgttttcaagaatggttgcttgcgacgcaataaagcccaacgagataaccattctcgccattctcccagctgtttggaacttgggagacttaaagatgtgcggatcagttcatgcttatgttgggaaaagagggtttgttccatgtgatatccgtgtgactaactctctcatcgacgcttatgcaaaatgtgggtgtattcaaagcgcgttcaagtttttcatagagattccaaacggaaggaagaatcttgtatcgtggacaacgatgatctcggcgtttgcaattcacggaatgggaaaagaagcggtcagtatgtttaaagacatggaaagattaggattgaagccgaacagagtgaccatgatcagtgttttgaacgcttgcagccatggaggtttagcagaagaagagtttctagagtttttcaacacgatggtaaacgagtacaagatcacgccggatgtgaagcactatggatgtctagtagatatgttgagaagaaaaggaagattagaagaagcagagaagattgctttggagattccaatagaagaaaaagctgtggtttggagaatgctgcttggagcttgtagcgtttatgatgatgctgaattggctgagagggttactagaaagctaatggagctagagagaagccatggaggagactatgtgcttatgtccaacatcttttgtggtactggaagatttttagatgcgcagagatttcggaaacagatggatgttagaggagtagctaaacttccaggacattcacaagtaacatagcggagcatgtatatatttatgactccaatctttattgttttgatgataaacttcagaatttttgggagctctgttctgatcctcaatgttttgatcataaactcccaaaaggtgttttctattctgaatggttttattggattataaagaaacgcaaacctaatcaagaagaccaagttcataattcattgtcataataacttcacaagaaaaaaggaaaacatgagagcattgctgggtgcaagtttgatagataataaaagaaaaagcgatgagaatctgcaacaagggtttttgatgattcctcttctgaagacccaagcttatgaaatcttgttcatagaccactgggggttgcatgtgtttctgtgctgcgcttggattctcctgaagatgggtcagcaccgaatctgtgaggatgatctgtttcttgcatccccttttcctaaaccctaaatcctaaactcccaatcttcaatgagttttgatcataaactcctaaagtttggtgagctctctaatgaagtctcagttagctgagattacagtgacaaagatgtgtaaaatacaatggagctcaaatcattcaaagagattaaaaaagactaaatggatcaatgagtaacaagaacatgcataaaaatagttcattttttgaaaaaactttgcttcaatgggtgtcattatcaaatttgaatccaagtcagattttgagtagcttttacgctaatcttcttcacacaaaaaaaccatcaacacaaaaagatttataatttaaaattttatcggcccaaaatacacacatcaatcttcctctcggcccacgcttttagaatttttgtagatttaaaaattcagttggaatctaacggctgagatcacgtttaatccaacaaaccaagctatatatttactaaaacacccgagagatctgcttcttttgtttactctactctccacgagaagcacacttgttttttgtttatatcaccgcaccaaccgctaatatctttacacgtgtcaaatcttttgcttaaggctaattatgcacagccttctttctcccgttttatccaatactataacgacatgtcattctcaatgacaaatgtatctgacgtgtcggttacctattggattacgtggctgcagatttacacgacgtagcctaaaataaaatccatgagagcaaagctcacttgctagctcctctcctcgcggtatatataagctccaggtcttgtacatcttcatcatctgatctcggggaagctccgatctgagttttttttagca

SEQ ID NO: 7730 - DNA, 3000 bp, Unknown
  misc_feature (1)..( 3000): cDNA_ID_3051249_gDNA_ID_1621159_Annot_ID_173659 3000 nt of promoter + ATG
gtttctctcaaaaaaatccccaagtgtttccgatctagtgtctcttttgtccaaaaacgacagtgtttaggaaacctaggagaatgaatgacccgatggtccgaatccgattcgaaattggttcgaattgtaataactaacatacaatattccggtttgaatgataagaaaaaacacattcgatccggttagaacaatatattaacaggcccattaaaacatatgggccgatcttgatcaactgggctattcatcgttgatacatgcggccgcacaggattaaaatccagttccgttttataaaaggatactagtttccaaacgaacggtggttgtctcctttccagaacaatctaacgctttctcgaacatcttcttcttcttctttctcgaaattatttttccagtaatcaatttcttctcttctagatttttacaggaactaattttctgctctgaggtatcagatgagtagccgatggaatcgtacgatctacgttgggaatttgcctggagatattcgcaagtgtgaggttgaagatctcttctacaaggtttgaaaattcctcttttctctcgataaaaattgaattcattatgacttgtttgggttcataaatttgcaattctgtcttgctgagacaatttaaatcgactcttatgtatatttgtttcagtatggaccaattgtggacattgatttgaagattccaccgagacctcctggttatgcctttgtcgaggtatattgatcaagtacaaatttgtttttttcttcttcttgtaatagtataggctaatgactaagatagtttgttattggtggcagtttgaagatcctcgtgatgcagacgatgcaatttatggacgtgatggttatgattttgatgggtgtcgacttcgggttagtaaacgcatgatgaaagctagcttaattttctgtaatttcttgtaaaggtgttatctttgtgtgatgtttttaggttgagattgcacatggtggtcgtagattttcaccatcagttgataggtacagcagcagctacagtgcgagccgtgcaccttcaagacgctctgactaccgcggtttgtagagtcttctcgattgtgttatttggtgttgtgtaaaattttatatttgaaaactcatttttactacctaaacatgtagtgcttgtgaccggattaccgccttctgcttcgtggcaggaccttaaggtaagggacactatatagtctttttctctgaatgttggttctctatatcatgttttggatttatctcttttctgaaatgatgttatttgctatttacgggtgattaggatcacatgcgcaaagctggagatgtctgcttctctgaagttttccctgaccgtaaaggtgagttgacattcgatagtttggataagcttttgattgatgtgttagtaaattagtctttgtgaaggagaataggtgttaagcatctgaactgctaaactcacattcagtatttctttgtaggcatgtctggggttgtggattatagcaactatgatgatatgaagtacgcagtaagttttatatctttgcaacgcaaatgttcctggacttatgccttagactgcttttgtttcatagtataccgagctgaatttatcttcctggaggccagtgttggatctttgatgttcccttaaaatttttgatgtgacagataaggaaacttgatgccactgaatttcgaaatgctttctctagtgcttatatacgggtatgttgtattgctttctttgattttgttaagcataagtggatatggagtcatctctgaatttactgttcaggtgagggaatatgagtcgaggagtgtgagtcgaagcccagatgattctaaaagctatagaagcaggagtcggagccgtggtccaagctgtagctatagtagcaagagcaggaggtctttttttttttttttttttcataaacctaagacatataagggatttttattgtaacttatttatgaaattaactgacttctaaatgcaatgcagtgtgtcacctgctagatccatttccccgcgttcacggccccttagtcgttctcgctcgctatacagctctgtctcaaggtatgagtgttagatttgtatcattattatatatgtagttaccccttcatggatcacttgttcttgcatagtgaactccttactagctttattacttacaactaagcaccttttgttgcttccgtacacagttgaatttgtttgagtcttttttccctcatagtggactagtctattgtcacttgattttcttcctttgttgatgttttctatgtcatgcaaactccaatatgggtaaaggttacctccttgtttgggattaccagagttccttttcatttcttacacgtgaatgtgtttgttttttatgttttgagttcttgacagagatgctcccatcatatttagtccttttcctttctctttgtgtcgttctcttctggatgtttccttctgataaagctttacttcttaacttttttccagcgacggtgaatttattacgtatcaatcttcattatccgacttataatttaaagaacacttagctagatgtttcactttttgaaaatttatttctatcggaagggggaagatggatttctgaggcatgtcctcgatcatttaccgtgattacaattgtattgcgttgtttgttttctagatctggctcactgctacgagctggggattggatctagatgggtcatctagatggattcttggactggatttacaaagctggattagcatgaacttgaacttctgtttttacggtctggtctggtctggtactccgcgcgtatcagctgtaggatctgatcgcaaagttttggactatgattactctgattcctcaatatatttatctttttgacaatagtggattctgtgttgagttcttttctaggacagcatttaagctcccgggactagatgggag

SEQ ID NO: 7731 - DNA, 3000 bp, Unknown; identical to SEQ ID NO: 7725
  misc_feature (1)..( 3000): cDNA_ID_1818721_gDNA_ID_1621159_Annot_ID_173637 3000 nt of promoter + ATG

SEQ ID NO: 7732 - DNA, 3000 bp, Unknown; identical to SEQ ID NO: 7727
  misc_feature (1)..( 3000): cDNA_ID_1818714_gDNA_ID_1621159_Annot_ID_57085 3000 nt of promoter + ATG

SEQ ID NO: 7733 - DNA, 3000 bp, Unknown; identical to SEQ ID NO: 7729
  misc_feature (1)..( 3000): cDNA_ID_1818706_gDNA_ID_1621159_Annot_ID_57087 3000 nt of promoter + ATG

SEQ ID NO: 7734 - DNA, 3000 bp, Unknown
  misc_feature (1)..( 3000): cDNA_ID_1818702_gDNA_ID_1621159_Annot_ID_57089 3000 nt of promoter + ATG
taagggttcatttaaactcaaatgctgaagtaatcctttacttccaaaaggtttattggcgtctctatgtttagtggtttaacctattaaatagaaacatgtttgtaactaacctggtttttcttttatcttctctatcattaaatccatggtcacaccagtttgacacatttagtaatctatatcttttgttcacctttatttacacttttatatcatgttcatttggatgtaactgtagaactcgcaactttttgttttttatgcttgcattaacttacatgaaaatttagctctcttagacataataataaacaattagtgtgcctaaaataaactgattaccgcagacttcaaggatgacccagagctctacgtcttccccaagctgaaatatgttggactcgaattgtggcaggtaaataaatctttgtcactttgaatgaccttcgaagatatgctttattcccatgactctcatctaatacatgttactcttccaggtgaaatcaggatcattgttcgacaatgtcttgatctgcgatgacccagactatgccaagaagttggcagatgaaacatggggaaagctcaaggatgtaggtgtttaaaatacccaatttcataacacagtttttttttttttgtttctggttactgatcagaatatccaatctaatatcacattgcaggcggagaaagcagctttcgatgaggctgagaagaagaatgaggaagaggtaaatatctctcctaattatttagcttaattcatttgaatctctctaaaacaagtagtttggacttttgtggagtttctactgccaattatgtaattgttgtaaccaagttgggaatagataatctaagacggcattctcctttttctgtgttgatacaggaatccaaggacgcacctgcggaatctgatgtaagcacttgtgaaggatcaaattttttagagtcttgtttgtttctgtcaaggtcctaatattatatgtgatataaattccaggctgaagacgaaccagaggatgatgaaggaggagatgattccgattctgaatctaaggccgaggagaccaaatcagtagatagcgaggaaacctctgagaaagacgccaccgctcatgtatgctaccacaatatcacttggagaaatttcactcatccataattttgttgttttccttgagttgtggttaaaactgcgtgatttggttttgcaggatgagctataggtgaaaggttgaagatttgaagaccaaagttttcagtctctttattgttttatcgttttcttttgaagtattttagcatctagtttgtcggagatagaaacaagttttagcaaaactaaaagggggatacaatgtctgtcagatgctcattttagactttaaaaaaccatgaagaagttttgcagttgcttctctttctctactcttgtttctctgctaagccaatgtccgccaaaatcggattctggtgtattcgttcactgctccccaccctttgagaatttgttgttagtctcttgtcagtcaatacagaccaccaagtccataatccaacagtccaacgtccctgcaagttgattgatactagagtagtagtaatgtagaatgtctttcactttccaaacaatttccacattgtctatacacttatactgggttcacttccattgtgaagacagatgttgagataacaaaaattatatagagataattgtaccccaaccacagatgcttagaacgctagagaacgaatgcagtgcaatctttgttttaccttaaccttagacagcaatattttaattcatgatgtcattctcaaaagatgaagtcacaatctttatacaaaacagcgtcctagcatattgagatggtatttaagcccagaaaaagctgattgagaaccaaaaaaagaaaaacaattacgcaggccctattaagtaatgggcttggttttttggtaaagataatatatttagattatttcttttatttctattggtcttcgtaccttcacgcggatcagtgttagaaaagaatgaaatctgtccgtagaattgtattaatctacggttgctgtgatttcacgcggatcgtgatagaaacctcttatatccgttgattaaaaaccaatgaacgatccagatctaatcccgctgaaaaagaaaagcgaaatattttccctcccacttcttgtaatttccagacgataaatatccccttcctcaatcgaaacaaactatccagatctcaactttctctcatcttcaaattaaaatcaaacagtttcttaataacattttacttcatggctcgtaccaagcagacggctaggaaatcaaccggaggaaaggctccaaggaagcagctggcgacaaaagcggcgaggaaatctgctccggccaccggaggagtgaagaagccacacagattcagacccggaactgttgctttaagagaaatcaggaagtaccagaagagcactgagcttcttatccgtaaactccctttccagaggcttgtcagagagatcgctcaggacttcaaaaccgatcttcgtttccagagcagtgccgtcgccgctcttcaggaagctgctgaagcttacctcgtcggactcttcgaagacaccaatctctgcgccattcacgccaagagggtcacgatcatgcccaaggacatccagctcgcgagaagaatcagaggagaacgagcttagatctaagtattctggttactcttgtgttttgattagaaccataagattgtaaaatttcaagttaaatccaagggttataatattaattccaagcaattatcttttgttctatcaaagtattgactttttagttgactttattaatcactaattgtttggttaatttgtgctagttcacaactcattatagtctcacaaattaatcagctttgacgctgaaattgttgtgaagatcattgttaattagttgtgattcgatcgaag

SEQ ID NO: 7735 - DNA, 3000 bp, Unknown
  misc_feature (1)..( 3000): cDNA_ID_1818687_gDNA_ID_1621159_Annot_ID_57093 3000 nt of promoter + ATG
cctcttttttgcacaaccctaacgaggccaagattccatagaaccaatcgaataaaaacatgacgtcttcttcctgatatcggattataatccacacaacaaccaaaaaaatcaccagaacagaatcgggagacagagagagatgaagaacagaacagaaaaccaaaatcaaagtttcgtttcgttgatgaagatatagttgtatgttgtaacattagtgtatatatatgcaaacaaaaaaagaaattaaaaaacacgtgggtaatggggactggtaaattgatgcggagccttgtgattggtagtcatcatcgtcattcgatcaatatgaaccgtcggatcctagaacttgtcgttgcgatgttttttattacgttaaactttttaagattaaaggcttaataccacgtggcaaaaccttaatggccaggacccaggagagtttatttcctccacaagttattattatgagccgtctgaggaaagctacccacatttaattcaaacacataggatacattttttttattgttcaacagacatgatcaaagtgtatatacaatggagtatttaactttgaaacagaaataaaataacatgtaattactgtttcaacgcataaagaatcaaagtgcttacgaagacgagaaatattgtagttccggtgagaccacggtgtttgaagcagtcacccccgcttcctacagaatggccaccaccggtaccgccattaccatttccactgctgccacggccgccgctattagaagatcctctactgccccctttaccgctgttgccgcctcgaccactgctgccacctccaccaccaccacgacctcctccaccgccaccaccgctgcttcgaagctcccgctgccaaaccgggaaatctatcttacaacacgttttgttacctaagatggaattaggtttcagatggacggctgagacagaagtatttgtgattgaagcaacggcttggatatgcgcatgaatcgctagtaacaatagtaatacgtgaaccatacgtttcatgaatctgtgtatctccatactaatcttttcttttatgtttatttatcgctctaacccaaaaaggaaaaaatgagcttttgtgtagtacgatctctgtttatatttcatctggtcaacgtctaaaatctaacttcatttcctaggaaaaaagaaatggatgccactactagtctactatagagcaatattagcgaaatatttacgtttatgtaaggtgtcgagcctctcatttatcaaattttgaaaaattcctaaggaaaggccaactaactttttcttagctatgaacaggcccaacaactttgcttgggtcataggtcccacgaggaaaaaaaagaattttggatatggcctggctaaatctatctttatgtatttttgttatgttcaattttacgatcattacaagcacaaacattaacttaagtaggtctatttactatctttaatttctgtttcatttcgtttaatttctgaatgagtctagttacgttccattggtttcattttccaggcataatcaatacacaacattaagtgaccaaactaaactaacctattacaatgtctacctcttctcattccgttcacgacccgcaacacgcatcacagatcattttacaataatctacatcaggttaccaactggtgctaaactaattagtctcaagtttccaagcattatacgatatatagcaacatataacttcgtggtaatacgtgtctgtttttttcccaatatcgtgtgtattatatacaccattaaaatattatatcttcaccaatttttgaatgagttggtatcatgtactccatgaatgtatcacaaagcgaaaaaaaaagaattaatattattgaaaaaagtctacaagaaattgaagtatataattttcaatgaattggattatcaatagggtcacattcaaagatgtggttacaatcatcaaagcaaaacttttttcgtttgtatttctaaatatcttatttcttgttgactgaattatatatatctcgaaggaaaactaaaaataaattttcaagctgacttttattcagctggttataaaaccatcgaatcatgtttatattggctttcaaaacacctctacatacgcaagaaaaaatagttatacaaggtagttgtccaaccaagagtttcattataagcctttatttcttcatagaatttagagatccccagaatttattttcactttctaatttattataagggaagtaaaatagctctgcatagaattgcacatttctattggtatataactagctacacatgcaacttttcaaatttaaacataaattttaataagacaatggtattacttattagtacaaagagatacaaattctgtttagatcaactgggaattgtaatcgctaagaatttttgttaaaacatagtacaaatttatttattcccattataaaacctagtggatggttggaaactacataaacgggttataaattccgtagctatagaagttcgtacatattaaaatggagcaattaagaataataaacagaaaatgatttataatattgaaattgtccatctatagaaacccaggagactcgggggcctctgaatcatgcctcgctcttcttcttcgtttcctttttctgttgttttaatttcatacaaagaacaacaaaaaaacaaaaaaaaaacaaagagagggtcaaacattttttttgttctctctcaatttctttcattatattttctcttccttataaatctgagcaatgttccacatataagtgaatattcttgtatctatctacacagctttgattttctttgttcggttttggaaaaatctgtttcgagttaagaattctaaattttggttgtgagattctagtggtcgagatttggggtttgagaattttccaggtttcttgttgatcaagctaagagcattgaatcgtttcttgtca

SEQ ID NO: 7736 - DNA, 3000 bp, Unknown; identical to SEQ ID NO: 7728
  misc_feature (1)..( 3000): cDNA_ID_1818677_gDNA_ID_1621159_Annot_ID_57098 3000 nt of promoter + ATG

SEQ ID NO: 7737 - DNA, 3000 bp, Unknown
  misc_feature (1)..( 3000): cDNA_ID_1818841_gDNA_ID_1621160_Annot_ID_57100 3000 nt of promoter + ATG
tgtacatcttttaaaacccttttaaaatctcttgtaaatcttttaaaaccctattaaaattccttataaatattttagaacccttttaaaatcaattgtaaatcttttaaaacccttttaaaatcccttgtaaatctatttcccgtcaaaaaaaatttttttacgggaaaattatttttggtggaattttattttttgaaaaattttggcgggaaaattgtgacgagaaatttattttagaatattttaggcaaaaaaatattaatatttcattttgttaacctaaaacaatttccaaataggggtaaaatgatcattaaaaatttaaagagggtagaaatgaaaattgctaaaaaaaagggtagagttgaaaaggggcatcatgaaaagggcattagaaagaatttttcttttagtttaagaatagaacgatttaaaaaacaaaacaaaaaatcaaaaattttatattgaactcggagatgtcaaaactaaattttgttaatacgctaagatattttaaaataaaatgatgttgtacaaatacaatgcaatgatactactttttagtttataaataaacttacaaataaaaatttaaataattaatggttatattataaaaataaaattacatttacgttattcataaatttagacttatagattagcagtttcaatttaaaaatatattaaaaatattggtggtgttaaaatgcatatgtactatatgtttatattatttatttttcaattgaagaaacacaatacatttaactgaatatatgtactatatgtttatattatgagatatgttggaaaaacatacatttttcaaacataattatcgaactagtacagttcctattcataatttgagattttaccgggtccacctcttcgtctaatacacgaactgtgaaatagaaaaaaatggggtatatcttgtgtgatggaaattacgtataagggttaggtttttgattggtgagagatagaaagaaagagacagcgtgtgggagagagggtgtgtgggtcagatttttttatttttttttattttgcttttatttgttacctcatattcttctaatgtctcataattaaagtgttcgttaatgaattttgtttttctaaaatttaacaaatacataaaaatctatgtttttttctttatcatttgatatgcaatttgtttgataattttttaaaaaattatatcataaactattgtacataaaaatttgatgtatagatataaaccactgtacagatgtatctgtatagtgatgtacagatatatttgtacaccacatctgtacagtggtatctgtacagtggtgtacagatataagccatttacatatatagatacaaattaatatagatgaataaacaactatacaaataagtacaaaaattactctttgtctttgtgttattttttgtttctggtattttaacaaaatagttttcttattctctttattcaattgtatctgtacagtagtatctgtacagtggtgtacagatacatctgtacagatataaattactgtacagatataaggtatttacatatatggatataaattattatagatgaataaacaactgtacaaataagtacaaaaattactttttgtctttgtgttcttttttgtttctggtatttcaacaatatagtttttttattctctctattcaattggtttagagactagctaatatgcttatttattttccatggtttgtggttgtgagaggagaggttgtggttaaacacaaaataacgtgaatcgaatataaacaatgatattaccagcagtgacaaatatcacataaaaattgaatccgaacatagccagttagtatatacatgattcgaagccaactacaaatttctgaattagcaaccataataatgtatagatagaaatcaacctgcgactaaattattgattgacgagcagaaaacctaacttcaaagagagaaaaaaagaaatgcatagtaatatctgtacagtggtctatatctgtacagtagtctatacctgtacagtgctcagtaatataaaatttaaaaattattaaacaaaatgcatatcaaatgattgagaaaaaaacataaatttttatgtatatgatctattttggaaaaataaattttacaaacgagcattttaattcttaaaattgaagggaatgaaatataatatattaaaaaaaggaaaatataaaaaaaacggacccacactctagttctttcacacgctttctctctctccataaaacctctcttctattgttttagtgacatgaatgtaaatagatgattttataagtggcaaaaacgaactcaccataaagccaacagtaacatatatagtacaaacccaatattaaataggaaccgtactattttctaattattttcccaaaacgtactaattttcaaacaaactcttatattatctatagttttcttatttaaaaattcgaaatatttaattttagcaagtttagttaacaaaaataagtagtatatcgaaataataatgtttggcacgatgaatagtaaaattaaataaatgaaaaagctgagaataattgtatgcttaacatataaatatcagaaactcttttttaatatattgagtggatgataaaattaaaaatttaaagcctcaatgataataaattatagtcttctatcgaatatgtgagctacactatttaagtacaagtgccaacaaaatagaattatttagaatgcattgacctttgtaatgtattaaacttaatttccttttattttttaatatcaatatacagtatactatcaagttgacaaataaaaacaaaaaaaagacatgttctaaacagaatcatatttattttacatttatatactgtaatatctttcgtttaatgaaagactcaaaaacttttcttaaaggactcgaaacctccccctctctctttctctctctctcgttcgag

SEQ ID NO: 7738 - DNA, 3000 bp, Unknown
  misc_feature (1)..( 3000): cDNA_ID_1818736_gDNA_ID_1621160_Annot_ID_173696 3000 nt of promoter + ATG
ggagcaagtgagtgacatatatatacatcaattattcaattaatctttagggttttgatctatataatgttcagatgttctgaatcgtttttgatgtatgacatattttggtttttttttttgttggattttggttgccaggattttctcaatatgttctttgggaaggtctttaaaccggtatctccggtatacaacctgattttgtctgtgctttggcgccatccggggaaggttgacttggagagtgtcaaagttgttcactactgtccacctgtaagtactttttcttaagctccaaagatgggaaattaattggaatataatatatggtatatgaccaaaaaaaaaaaaaaatggtatataatatatggtatatgacttttattctgctgagcatataaaattgttagttttgggggaaatttagtatctctattactataaaatctatatatatacatcaatataaattaattttattccaaattaaaccttctttaaacagaaattaaagtattgtcctatatgggaatgcatttacatgaggatagttctgccaatgctttctcttgcattttaacatctattgattattattggtgaaactaaaatgaaagggatccaagccatggaggtacacaggagaagaacctaacatggacagagaagacgtcaaaatgttaattaagaaatggtgggatatctacaatgacgagtctcttgattttaaaccgaaaagccctgcagatttggaagcaaccgttttggaatcaacaattatagcttcggtaaccgaagcaccactttcctactctcctgctgcaccttctgccgcttgagaaatcggaaacgcaagtaccacaagaatgtatgtttgaatcaagttggtgtgtttttgatatattctcattttttgtatttgtttggtgtggtgaattttgtttcgtttttgttaaattactatttgccaactgcaaagaaatacttatttcaaattacaaataatctatttgtatttatgcttatatgttcaatcttgtataataaagtaatgttttctttaaaagagttatgatttgacaatctgatgtttcaatttcttgcagtaactttacttaattaatttcttaaaaaattagacacgttactggtttcaacacattataggctactgcttcaattagtaactatgatttagaaaaagaatgagaaagaatatataatctaatgcttgaaatagactacaaattttaatatattttttaattttgttgtaagtctagattatacattaatgccgtctacctaactaaatcacatgaatatttaaattgttaatcattgtctgttttattcacactaaatattttcttcttcttcttatctctctttttttttttttttttttttctagtaacagtataagggagagatagtaatcataaaaaattgaatacaaagaaagaaaaaaataaacaataagagcaccctcaataggggtttctaaacaagtttcttaacaaataataaaaattttatatgatttaaatattacataagtctcttaaatttgatgaaacctaagtaaattgtctcttaattaagagataattggttttagtttcaccaaatttaagagacccataattaaaaataatatttatctatacttacactttaattttgtttaagagatttatgattagaaattaccactgaggatgctctaaggtgctgacacaatgcgcaagaatcaatagtgtcacattatgaaattcaagttttgttgttttgttgagttaaatttatcaaattcaaggttatgtgtgctaacaagcataactggattcattggaagatatgggggcaaaatgataacaaagaatgcttcatgtcattttgtaaacagtttgattgaaaaaaatggttaacaaagaatgcatgcatacaagaacgaaagagcttaaaacttgaaagtaggcaattatttaacaatggggggaggggaggcataaacaactcaaacacgattcgtgggtttaaccaacctaaccctaactcttaggcccacgattatgatttttatatttttgaactcagaaattgagtttttcccatatatactgtgaactagtccgtcacatgttatcatcaaatgccccgaccatcccaaccaatgttcttcgtgggcctatcaacaaggtcagaaacgcgagtgaatgtatggtttatgtcagtaactgttattacaagtggtcgacaaaacacttccatgtcttgaatacgacaagacgtaggagaagcacttccatatctcttaatacgacaaggttatcagcaatgcggtggaacttgatttgaagtcaatgaaagcatttactgctcatatttgattcgatttgttgaataggcgtagaattttccattcaattaaactacacaagtaaattttttatttttctttaaaagtctttttttgtttgtttaaacagaaaattagtagtacagaaaatgaaatatttttctatacaacgaaaacacctctaagttttatatatagatttgaaaaaagttgttattattattttattttttggcatcgaaattatttctattctgggagagcgtttgtatttcaaattctattttttttggtcaaaacaaaacacctttagattacttttcagtttcttacattttagtttaacgcacagaaaaaaaaaaaatactattttctatccaatccggagaagactaaatgacaggtcagcaaaattcgtctctctttctttttaaaagaaaaattattgacgcaatcaatacagccaaacatcgctccatgaagaagaaaaaacaacaacaacaagtcagccatggagaaagagagaagaagtagatagatggtttagatccaaagtagttgatcgttgaaatttatttctatttaacgttgaaaaaagagaattttgcaaaaacccaaacaaaaaacccgccatg

SEQ ID NO: 7739 - DNA, 3000 bp, Unknown
  misc_feature (1)..( 3000): cDNA_ID_2992526_gDNA_ID_1621160_Annot_ID_173694 3000 nt of promoter + ATG
attgaaggttcttcttcttcctctctatctctactaggtaatctctaacctaatctctgaactctctttcatactttggattatgtttgattaattaataataaattaatagtgtagctttgtccgaaatatagggtttccgggagaagtcatggctagaaccgaagtctcagggaaagataggttaagcgatttaccgtgtcatttgctatgtcgcatcctctctaatctctctaccaaggaatcggttcgtactagcgttttgtcccctcgttggagtaatctctggtcgcttgtttctgttttggatttggatttccaagattttaaaggtgaacacgacatgggagaattcatagatagctttatggaatatcacgaagagttaggcttgaagttgaagagcttcaatatgttttatgatgctaatgagcacttgcatgagccatttgtgaggaggctaaataaagtggttaggcgtggagtttgtgatctgaatattcagaatatggtggatgttgatgtagcattagttaggatgcctccctcgctttattcatgtgctactttagtgaatttgattctctactgtgttgtctttgatcatccaagatcaaaatcggtttctttacctagtgtgaagaaaatgtattttgagggggtcaagtttgatggtgattctgttctggagactctcatatcgcatagtccggttcttgaggagttaaccgtgattccgcatccggaggattatttggaagtcatatgtgttcgttctcaatcactggagagctttagacttgagtctaagcgttttgagtgtgacaatcccaaagttgaaatcgattctccaagccttgagtttatgagtatctgtgataagaaacctgaaagccttaaaatacatagaattggtccttttgcggaggtaaccgttgatgttgagtttgatgttgaggatgatgatccattggagatatctaagatacgtaagtttctcgtcgggttatccacatttcacgaactgaccatctctgctcgaactctagaggtacacatatgattggtggattaaatataacattaagcttgtacaattttgtatatggtgttgacttactttttttttggctatacacagtccatccatgactactccaaggtgggaccattgcctccattctctaacttgtttggcttggatgcttcgttagtcgaatcttcttgggaagttttaccagcctttcttagttgctgcatgaatctagattcgctcgtcatagtgagtttcatttatttgtctatatttcacgtagttacattgagattcatatcccaagaaaacttatcaaaagttttatgttactaggaacttgactgtgttccagagatggaggagattaaactctcaccagtgcctcaatgtgtcttatcctctctcgactttcttcagttgaaggcaccatcgacaccaagtaaaatgaaacttgcgacatattttaggaagaagtgtacacgcttgacgaaaatgcttttaagtgggcagtaacatcatcaagaaaatgaaaaggattccaaagatatgctgaaaggtgtcaagttgttatgtgtataatgtcgtctctcctaaatcaagtttacctatcaacagttaattatcaaataatctattgtaagactttttagattttcttgttagacatggctttatgttttctagtttttttttatggatgttctttagtaaatttctatctcttaaaacaaaattgaaattctatgttgcaactatatgtaggattgattataaatttttatattctttcattgattcttactcgtaaactatattgcaatgagtaaacttaaaagtgaagtatcttggacttcatccatgttgttacgggttggattcaacgtcaaagtttcgttgaaagtttgttgctatagttttctatatatatatcacatgcattgtaattaggttgctatagtgtacaatacatgtaaaatatacaaaactatagcaacaaagttttagatacttaattgcttcctttaatctcaaaccatttggttgaatctatcaagtacacaggacatatgctcattcaaattgggtaactaagagcacccccaacgctggactctatgaaaatcccttaaaaacatacaaataataatattttaatcttattagggcttctgtataatttgaccaataataaaaacacatgtatataattttctcgagactgtcccttaaataaagaattttagggcctctctctcttcttacacttaccttttaattatttttcattctttttatcattagaaattttgttaagggaccaccgttggtggtcctctaatcacgcatggagtctagacgaaataagaaacgcattaataagacatatattattttttggtgaaagtataatgtagacaaaaaaaaaagataaagcttttgttttcttagacataacccaaagaacataccatatatatagcagaattagattaaaaacagtcagatcagaaaacaaaacaatctgaatagctaattgcacaaaaagctagggttttgttaaggattttccgagtttaataccgggaactgatcctcgtgaattgtcgagatagcgcttaatgttttgtaaatatttaatattaaccccaaatattcgattttgaccaatttataccccatcgagatatttctactgctgactttttagtgttttgtatttgacctcgtttgatggacgaaccggaatataattgtgttggttggtcaaccatttgtttttagcattttctggtctttaattaatcgctaagtaatctaattctggattaagaagaaaaaaaaacttcaaaagagacgcttttatacaacgctttgagcattacttggccctctcaaaagaatacacagaccagtcttcgtgtgctcgtaattggcgattctcaaattcgatctccgtacaaaca

SEQ ID NO: 7740 - DNA, 3000 bp, Unknown
  misc_feature (1)..( 3000): cDNA_ID_1818742_gDNA_ID_1621160_Annot_ID_173693 3000 nt of promoter + ATG
cttgattaaaatcacacgacttaagtttatgcgaactctttattttttataaagttaagttaacaaccctggtgattttagaattggtgaggaagatatgattagcaaattacaagattcttttttatgtgatatatatgtacttatgattcccaaaaaaggatgtgcttacgaccagctttttgccacatatggataaatctttggcaatatatatggctcgattggattttgagtttaatggcctttcatagattatgctaaaattggagtattttcaataggtttgatcactgacttaactgggtgctttacaaagagttatggtaaggcatactgtttatcaaaaaaaataaaattgtaaggcatacaacttcatacaagatatgaagatatcatatcgaggtagaaacaggatcgcgagtactatacaaagaattattagagaattcaacagatatatgttcaagataatacaaagtacgatagtgttaaaaataccttcaagtcttcaaccatttatacatcatgcgacagattattattatacaattccttagaagtataattaaaacaaaataaatagttgtattttagtgaaactagccatattgaattttgatccgttaattacagttctataacaatacgaaaattaaataattgtcaataattacaaaaatgatcaagatcaatggattacaaggattcaatgggaggacaaagccactaaagttactgttttatatttagctgtgctgcaatcatatgtcgatgaaactttaactttcattactaaaaattttcatctttactgggtttccacactaaatttgtttcttctttgcttgtctattccctcaaactaaatcatcatggtttgggtgggtcaaagattgcaacggctcttctctgtctatgcttaacccttaattagtgtacgctttgatgtcctttgagatggttcttacttcttagctattttgcttgtatacagttgttgaagctggtagaaaaaaacgaaagaaagagatctctattggcacttcttggcgggaaaataacaaatgcaaacatggaaatttgggtttgcctgatctagaaatacaaaacgaagatgtttttgtttgtttgttttttttcggaactttaaacaggaaaaaattgtatagatcatgaatcttacaatggtatatataatagaatattttgtttcatgaagcgatatgtgttttgttcctcgattatcatgtcttgctatggttcttatctatacactaatgaatgtttcttctctactaagtagtaattaagtgctatacgggagggtcgtttcgattattcgatatatagttatttcttttttcttagatacttattttgatttctatgatgcaaatagtagtataaatatgcattaatgcaattatcttcgctttcttcctttctaagacgaattgcttagcttctcgttattgtctttgagttgtttctctctctctctctctattttgcagcaacgtgaggctgtgtctttccatgagcaagtggtgaatcaattttctcagaggttatgtgtttggagaagttatattcacaacatctccaaaaatatgtatttaagaccatttcagggatatcaaattggtcaaaatttagaaaattgaaacttcaagaaactacattttaatatatatactttctctttaaccacgtaaccatttcctattcccattattcttataaaaatcgttccacatttctgtatgtccgttaatgattttatgcaatctaaaaaaaactatactattttatattgtgagttgttgttttattcaattaccaataatgtactatttagttgtttttaaaaaatggctaaatatgttaggcacaaaattaaagataccttctactatcatatttgccaaacacatatttcctttccttatcctctttaaaccattactcaaacacaccttattttgttcttatatattttgaatatccaaatttagtttttttcaaatatctctattgattattaccatatatgatttgttgaaatttatgtacatttaatgctttgatttttttaaatgcactttacatttctatataaaacattacatatatatatatatacatatattaaaatgtagtcatttgaaatattatacataaaattatttataagattggaaagcataaaattaaatattataaatgatcattcataaaattaaatagcataagatttacctagactagcaggcaattttacctagttttggttaaaacttacaatgtatctctctttcataaaaagtgtaattttgacacatttcacacattaaaaatgagttaaacatacaaatatacccttatttaatatacccctaattataccataatgatttaaatagaaaatttcttttagctttagacaagaggaaaatctgaaaactagttaaaatgtaaacgatattattttgtgaattgtgaaacggatagaattgaacaagagttgagaaaaaaaaacggatacaatttgagcttttattcttgaaagacaaagagttaacaaaaaaaaaatcaatcatgagtatttcaagtattcttttatattaacagtaaattaaatacatatcattatttcgattgacaataaagttcattaaatgtaattaaaaaaaaatcacaacgtttcgttttgtggtcaataaaatattgaagaaatttgaaagggcgctcacgacacgtttcgtatagcctctttttatttttcaacttattataaaaactgtcaaagaggaagaaaatctagcgagaagatctctggtcgtcaaattgaaggttcttcttcttcctctctatctctactaggtaatctctaacctaatctctgaactctctttcatactttggattatgtttgattaattaataataaattaatagtgtagctttgtccgaaatatagggtttccgggagaagtc

SEQ ID NO: 7741 - DNA, 3000 bp, Unknown
  misc_feature (1)..( 3000): cDNA_ID_1818746_gDNA_ID_1621160_Annot_ID_173692 3000 nt of promoter + ATG
ctaaaacgtttctttcatattttcatacttatatatttgtaagcaaatgtatatatatgtattttagttgtaaactagttagaatgcttagttcttttctagtagtattgattacatctggagtatattatcacagtcatttagtaaagttaagcatgtgttaggtttacataaattgatttttaaacaaaagtaaaaggttatataagtagaaaatcattatttgggtggtgaggatcatattacatccaaatgaaagtaaagtatgaaaattgatgcaacaaaaacataatttacacatactattgggatgttacaatattgattaagatagtgttagtaacattcatttaaaacattcatttagtgcataattatgttacttataattgattaaaaaaaaataaaaaaaaataaaaaaacaaattatgtaaaagaaatgagatgttaatataataaaaaataatctcattaaaattttattattagcaataatataattcaacttttattagataaattgtttttatcatacttcaaaattttaaatgtgttagtgagttttagaatgaaagtaaatttaaatgcatggagaatagaagtataaaactaaatttattcaattctatatgtaaaatttttaagaagaagattaaatttaaagtaagactttggtctctaagagcaaattactatattttttatttatctacttaaagaaaaaataaaaattattaaatccaactaaaatttataatagatgtcgttagaactagcttcctacatggagaaatctttggtaaaatttagctagaatggatttggagtttataatggctttaaagattatgagaaatttgattgtttgtcaataggtttataggtttgatcactgacttgtgcttacttaatcagcaaactcactcacctcactttgatcgtgaactcaagaccaaacaggcttcttggttaatattctcacacggataaagaaaagaattcttacagtaaattttgacacatattaagacaagatttttttttttgtttaaattgtttcctccatgtatagttcattcaattctgtacactttggaacatagtttggtttcagtatttgtaggcccaacttggacaacaaatactcaaagcttgaacaaccagtgctctagtgaaaccgtcccgaagatagtgagaccgttttctgttttcttgtctcggagactcggacaataaaattaattcattctggctacttatcaaagaagtcttattatagtatgtgatttttttattattttttattattatttttattttattttgtgtgtttaaacttcttatctagaagaattaagcatccaactgatagactaaattatatcttcatcttccttaaaattcactgtgacgagggcttaaagtcttggcgaggctctttctatttaaagtttttttctggtttgtcattgatttccatttgtttacatcaaatcaaaccaacagagttaattataaggagaaaaatatatgttaattaatggaatggaatcactgtttatttcaatatctatccaaaattttgaaataagaaaaatcattcaacattaaattttatatccactggtcttaaacaaagttctgtcaatacaaccatacattctataatctaattgactacatactaattgatatatatatatatatatatatcgtgatcttattatgaagtgattgccggatgttataggaaagttgcaacgtctaaaacatctcaatttggaaatgacgaagagtattgatgagatatcttcaattcaaacttttcgtccgatgctagcacaatagaggagctgcattaacgattggaactactagaaatctgaaacataatatgtcctaagttcaagaatttataaacgcaccttataacttataacttttagataaaatctaaacttcaggaaaactgcggactatctaactacaaaaagaacaatgagacaaatattttatctgggaaacaaatatgcaaacataacatttttggaatgctctaaaaaaactaattattatttttgaatataaggacacaattctctttttgaaacataaacgactgacaagttgagattgagttgccgacgacttgactatgattaaacgagtgtatggggttagctatcatgttagttttttcagggtttattgaagacatttatttctaactttaatggggattaaatagttattaaggtttagatttcgtgattaaaattcaaatttcacgatttacaataccaattaacatttcgaatgaagaggacaaacaacatttgttcagaggttaaacaccatgaagtttagttactatctcacttttattctttcaactttaatttatttttcctttaatttttcttgtttttcttataattttacatatgttgtacttatatttttgcttataaatctctagttaatatttaaaatagtttatattgtcagaacctgatttgttatatttgttttactcagtatctcactagttattttttaaactataaatatgtttagtgcaaaagagatattaatattggtctaaattcataaataagaaattttcatttacccatatatatatacgaattacccaaaagacagattgaaagacaagagttttcatttatgtaacaactgtagattaaaattcacattactattagtctatatatactaatatattataactaagattgaaatgccttggatatctttccttataaataatgttaattattttaatcaacaataaggtaaaaaaaaattcaaaacaaatagagataagatctctgttggccaatcgagtgttcttctttctcgttctcacctaatcttacacctaaaatctcacgtaatctctgaactctcttggtacttaggactatgattcatttcgtagcttagtttgtgtggaagttagggttttcgttagaagtc

SEQ ID NO: 7742 - DNA, 3000 bp, Unknown
  misc_feature (1)..( 3000): cDNA_ID_1818768_gDNA_ID_1621160_Annot_ID_173687 3000 nt of promoter + ATG
acctgaatcaagaccccgaccgcaacatcgaagacgacacagccttgacaatgttaacaatggtggtttacctctaccaagaagaacatatgttattctccggcccaataatccgactagtccactcggaaacataattgcgccaccaaatcaagcaccaccacggcatgtgaactcacatgattactttactggagcatcaagcttagagcagctgattgaacaactaacacaagacgataggcctggaccaccacctgcgtcagaacccaccattaattccctaccatctgtgaaaataacaccacaacatctaactaacgacatgtcccaatgcacagtgtgcatggaagaattcattgttggtggggacgcaacggaattaccatgtaaacatatttaccataaagattgtatagtcccgtggcttaggcttaacaattcttgccctatctgccgccgtgacctgccacttgtcaacaccgttgctgaatctcgagaaaggagcaatcctattagacaagacatgcctgaaagaaggcgtccaaggtggatgcaactcggtaacatttggccatttagagcaagataccaaagggttagtccagaagaaacagcaaaccagaatcctcgagataacaggagctaactctgaatattccatgggaaataaaaatcgtgactatctatatgtatagactctatgagacattgtctatttgaatgtgcatgtatatctcagaaataaactcaagcgaaacatatttaacgactagagaaagccctaccaagcccatagcgataagaaggacttgcatgctataacaaaaataattagtggaaaaagactgtaaccttgagtaaactaaacttctctctcaaatcttactgcagttctgtcttagtggtcttactgtaacatcctttagtttcttgaacccatccattaaagagggaaataaagttgcgaaataaagagagatcatcaagagtcaattggtcaccacgaaaattataaataacggtcgctactaacttaaaagcacatttattctctactctcttcctattcgcttcgtctccaagaaacaaacactcattcttgcgtttgatctttctttctctagatcccatatttttcttgatcaatttagtttcattatggaggaagatgcagcttttgatctactcaaagccgaactcttaaacgcagaagacgatgcaataatctcacgttatctgaagcgtatggtcgtcaacggagactcatggcctgatcacttcatcgaagacgcagacgtgttcaacaagaatccaaatgtggagttcgatgctgagagccctagcttcgtgatagttaaacctcgaacagaggcttgtggtaaaaccgatggatgtgaaactggttgctggaggatcatgggtcgtgataaaccgataaaatcgacggagactgtgaagattcaagggttcaagaagattctcaagttctgcctaaagaggaaacctagaggatacaagagaagttgggtaatggaagagtataggcttaccaataacttgaactggaagcaagatcatgtgatttgcaagattcggtttatgtttgaagctgaaatcagtttcttgctagccaagcatttctacactacatcagaatcacttcctcgaaatgagctgttgccagcttacggattcctttcatcagataagcaattggaggatgtatcttatccggtgacgataatgacttctgaaggaaacgattggcctagctacgttaccaacaatgtgtattgtctgcatccattggagctcgttgatcttcaagatcggatgtttaatgattacggaacctgcatcttcgctaacaagacttgtggtaaaaccgatagatgcattaatggtggttactggaaaattttgcaccgtgataggctgatcaagtcaaagtccgggatagttattggtttcaagaaggtgtttaagtttcatgaaacggagaaagaaagatacttctgtggtggagaagatgtgaaggtaacttggactctagaagagtataggcttagcgtgaagcagaataaattcttgtgcgttatcaagtttacttatgataactaagaatcttttctttggattttatgatcatcttagtatcttgaggacattctctttaaaacatatatcgatagtctttgtgtttatatttctctgttcaatatgatttagagactagtgtgcttttttctctctttcatgtggtttgtgattgtgagaggagaggcttttttgtcgctgcaatattttaaacccaaaataacactaatcgcatgtaaacaatcgatattagcagcaatcacaaacatcagagacaaattgagccttatgtaaccaaacatgtacatatgattcgacaacaacctacatgtttctgaatcagcaacccgaacaatctataaattaaatgaagatcaattaaattgacatgtttttttatctgctaagcagagattgttgttgtgttgatttctcgtgtatatgcacatgtagcctttttggttgccagagacttaagagagaaagaatattttcctctgttttaagaaatattcaaagaatgccatggactaggatataaaatgccatggtctaatatgatccgttttaacattatatttatacatatgtcaacgaaacaactatcatatattttaagctgatactaatttaagcagaccaggaaaaacaaaaaaaaaagtttataaattttttatccattatagcaaagtcaaaatatccgtggacgaagggtggtagcgaaataaagagacatcatcaagggtaaattggtcactacgtaaagatataatggtccccactaaagtttcaacatgagtctcacttcttcttcgctctccaagaaacaaaacactcgatcttgcgtttgatctttctctctctatagatctttttcttgatcgattttatctcattatg

SEQ ID NO: 7743 - DNA, 3000 bp, Unknown
  misc_feature (1)..( 3000): cDNA_ID_3051283_gDNA_ID_1621160_Annot_ID_173682 3000 nt of promoter + ATG
ctacgttaccaacgatgtgtaccgtttgcatccgttgacgcttgtggatcctcaagatgacaagtttaaagagttcggaacctgtatctttgctaacaggacaaagacttgtggtaaaaccgatgaatgtgatggtggtggttgctggaggatcgtagaaggtcatagagttatcaagtcaaaaggtaaggttcttggttacaggaggatttttcaattttcggaaaatgaggaaccaagaaatgtttgtgaaggagaagatccgaagaaaactgcttggttcatagaagagtataggcctgacgaaaataataagaaggataaagtgttatgcgttatcaagttcttaatcccactcaaccaaaggtaacaaggagattttactctggaagtcatactccgtagcacttcgatgtgttcttactgagactggtcacattagctgatagggtatatcaaaaaaaaaaaaaaattactctttgtctttattttttttttttgtttctagtatttcaacaatatagttttcttattctctctattaattgctttagagactagttaatattcttattttccatggtttgtggttgtgagatgagaggtttgtgattaaacacaaaataacgctaatcgaatataaacaatgatattaccagtaatgacaaacatcacacaaaaattaaaccccgcacgtaatcaatttcttttttaccaaaaaaaaaagtctatctttctcgattcgagagagaagctaaggcgaactactgatggagagataagatttaatagcatttttattggaagatctttcacaactaaaataattaaaaaaaatagaaatgaaaaaaaaagagaaaatttctcactttgcccatagactctgaattaatctaacaaactcattttgccagatatattaattctattggtgtgatttaatttagttatttcaaattttatttgaataataaaattgtaacaaaaacaatacattttattcatcaaagaccatttttgtagatcttaccgatgaggattgtctaagtggttaaatctatcaataactagactttctatcttttaaaatgagtttagttaataactagactctttttttttttttagaacaaaatatcttcaactatacatttcaattttcagagtctttaatcaatgaataacaatgaggaaaaacaatgaataagttttaagctaaaaaagaagaagaaaaaaaaaaagaaaaaagaaaagaaaaaataacgaatacatttaattttccaaaacaaatctaaatattcaaaatgtaagttaaactgatacttcaccatctacttatcaatcaaaatttccagtttatttagcttccaaatccggtaccatgacactctaaatctggacccgcagctggtatgtttatatcgatcgacaaagccttaatttagaaaattttagaatttataactcgtggagccgaccaatttttaatgaatttgccataataaaaagattagttttcgaataaaccaaatgaagaaagatgtggttacctgttgaacaagtgttccaattttcctacatgaatgcattggaccatccttttgtcacacacagcttggaccaatctttatttattcatttcaccaacattccaccgacatatctctctcgcgggaaagggcattttaaaaacatttagcaatttaggagcgatgctcaatatttatttattttttttttattttttttggatgtaaattcaaatataacacaataacggtactatcataaattactagcttacctatctgaattttcattttgttatttataaatataatggtatttcattatatgatatcaaacttaaaatatctaaataaatatgatttctcataatttatttaatctaaaaatgcgtatggaaataacacaaaatttgtttggataagatatcatctttttgtcaacaaattatattagttctagtaaaaatatatataatactaactctaaacgattcaaaaaattcaaaccaaaatagtagaacctgaaaaaataatatcatggtgctaatttatccattttaaagtatggaaaatacgtgaaaagtgaggaaacaagaaactcctaaatattttcgaaatcatccaagattccaagtgtgttgagaaagcaagtagctagttcacagcctgagagccaatccaaattttttttttttttttttgaacaacatagccaatccaaattcaagttcaatttataacttatatatggagctgaccaatttgagtcttggattaatccaaaggttccaaattttttttcttttttacaaatctatatatatggtcttcattacaaatttacattacgtattccaatttctgcggatagattttttcttacttcatacagaactaaatctaagaccatctccattggtagtctctcaagagagtttctcactactaaaataataaaaataataaaaagagaagagagagagtatagaaagtttctcaagtgagaaactatgagatattctctacaagccatcattacatttctctcctctcaattggttcaattttttcattaaaataaaaatttaatcatataataaaaatttagtaaaatactaatttgtttgtttgaaaaactttttgggtttctccttgatggagatgcccaaagatattttttacacttcatatagtactaattactaaatctaggataatatatttttcaaaccccaaaacaaaaatggatagtagtacactactatgcatatttgatatttctatttgtgggaagcgtaatattcatttcaacacgtggtaattcaaaagtggaccatctttctttttcatcctcacagaaataacactggaggggcaggtggtacagtgagcgagagactcgtaatttattaattctaagttctgacaagccaataatggaacgaaaagagagaaaaagtgtgaaaaaatg

SEQ ID NO: 7744 - DNA, 3000 bp, Unknown
  misc_feature (1)..( 3000): cDNA_ID_3051287_gDNA_ID_1621160_Annot_ID_173681 3000 nt of promoter + ATG
catctttctttttcatcctcacagaaataacactggaggggcaggtggtacagtgagcgagagactcgtaatttattaattctaagttctgacaagccaataatggaacgaaaagagagaaaaagtgtgaaaaaatggaaaagacttttgctctgattaccatttttcttgcttttgctttctccgggaaatgcagcgacgttttcagcagatgtgattttcctgagggattcgtctttggatcttccacttctgcttatcaggtttggaatcaatttattatcttgaatcttcgaacagaactgaaacaaaggttttaatatctgaaagtgggaaggagctgttgcggaagacggaaggaaacctagtgtctgggacagattttgtcactcacgtaagagctttcgtttttcaacatttaattattgttagtgtttgaacaaatattaatattaacattgcagataataaccaaggtaacggagatataacatgtgatgggtatcacaaatacaaggttctttctcttctctgctaatttactcttgctacattatgagttttttgttcatcaagcctgagtttattgtgactattcaggaagatgtgaagttgatggtggacactaacttagatgctttcagattctccatctcttggtctaggctaatacctagtaagtcttcattaatcttcagttttactcattaatcttagatcaagtttatgatcagttcttaattatctcattagatagaagaggccctgttaaccaaaagggtcttcagttctacaagaatcttatccaagaattagtaaaccatggtaagacctctcgtcatatccactcgatattctgcgcggtgttattattattaacttgactttaagtaaactaattactataggaattgaaccatatgttacactgcaccactttgatcatcctcaatatcttgaggacgaatatgaaggatggctcaaccacatgatcgtgtaggttaacaaaaagcggcattgtactttctttttacagattatgtagaaaaagatgatgtgaaatagtaaacaaaacttgttgttgtttttaccattgcagcgaagactttactgcttatgcagatgtttgcttcagagagtttggaaaccatgtcaaattctggaccacgatcaacgagggcaatatattctctattggaggttacaacgatggggattcaccgcctggtcgttgttccataccaggccaaaactgcttattagggaactcttccactgaaccatatattgtaggccataatttgttgcttgcgcacgcctctgtttcaagactatataagcaaaattacaaggtacatatagttttgcataacactattcttgaatgtgtgagttgatgacaagagaacaataacatactaaatagtacatacaatgtgcaggataagcagggaggttccataggctttagcatattgacgatagggtttagtccttccacaagctccaaagatgatgccattgcaactcaaagagccaacgatttcttcaacggctggtgagtcaagcacaaactgttccaaaagatatcctcataaaatgagaagaaataccaaatacactctttcaaactcaggatgcttgggcctcttatatatggagactatccggatacaatgaaaagaatcgtcggatcaagaatgcccgttttctcggaggaagaatcagaacaagtgaaaggctcatctgactatataggaatcaatcactatcttgcagcttctatcacaaacagcaaactgaaaccttctatttcaggaaaccctgatttctactcagacatgaacgtaattttgagttgtaggaatcaaactcaatctttttgactaacaaaaattagctctttactatttatctcgatattttttcttcgctaaccatctcgtcttcgctttactgcttgggagggacagtctttgcgaatttttcatcttctgaggtaagagtttctacggctaccaaattcttatacaaagttttaaaccaaatgagtgttcttagttattttttgttttgttttggataagtatgatgttgctccatgggctatagaagctgtcttgtagtatgtaaagcagagctatggcaatcctcctgtctacgttcttgagaatggtctctctctctctctcattctctctctatctctctctcgttttagtcagctaaattctcttgttaatgtcaacgaataggtcgaccgataaatcgagattcgcagttgaaagaaaaggacacaccaaggattgagttcttacaagcttacattggtggtgtgctgaaatccattaggtgagtaaagtttcttattgcatattttcgtcacttctcttgtcagtgtaataaagaaaaaaaacattactacatgtaggaatggatcagatacgagaggctactttgtatggtcacttatggatttatacgagattaaggggggatacgatgttggttatggattgtactctgtcaatttcagtgatcctcatcgcaaaagatctcccaaactctctgctcattggtattctgattttctcaagggcaaaaccgcttttcttggttctcaaggcatcacggaattgcagagcaacctctctccttactcctagtaatgaattgcaataatatattctgatgaatccgttgtcataatgagaagcgtaataaattcattcgaatattatttgttttcatttattttacaatcaaatattgataaccgaattgcttcttatttcaaaatggactgaaaacagtgcaaaaaaatcccaataatgtatgaaaaactcaaaactaaaggctttttttttgtaaaaacgctagagttatttatttcaacacgtgttacacactttaaataaatacagtggaccatatactttgtttcttcgtcacacaaatattatctctagtagcagtacaagagaaagagcattagaaatg

SEQ ID NO: 7745 - DNA, 3000 bp, Unknown
  misc_feature (1)..( 3000): cDNA_ID_1818803_gDNA_ID_1621160_Annot_ID_173678 3000 nt of promoter + ATG
ctatgcgatagttgcgaccggatgattcacagtcacgaggacgcggtgccgccgcattcgaggtgtaagctttgcgtaatctgcaagagaccttctcgccgttttctcattggcggctatcagtttaatttcccaccggttcatcctcctgcggcagaggggattccagttacgcccccaacagaactacctcaacaagatattaattatgattatctagatgatgttgatgatttttcttggtttggtaggtgaatagaaaatcgtcttctttagctttttatttatgtgtgtttcttagagttttcgttaggggtttaattcttggtgttataattgcttctggatttgaaaaagaaaagaagaagaaaaaaaaaacaatcagttggatttaatatgttagaagaaaataaaatgtcaaaactaactccaatttgttcgaggatggaagatatcatatcttgatgtatgtatatctcatcatttaactagaaactatctagaaaccacaattaccgaaaaaacataaaacaattttgctaaaatgttaagaacacaaattaatttgattaacaatcgatgcttaaggggtttataggaattaaataatatttttttttcaacaataaaattaaatttcactttgcgattttaattttatttaagaaagtcaagaaccaactccaatatttccggggatgtgattttctcaataaaatcgtctaattatcttgatttttgatgttgttgttgtactttacgtgaatatctcacaattagtaagcagagtagaagattttgattagtatgacgacaaaaaatagtacaaataaaatttacatgaccttttttgtgttaaaaaaagttacatgatgttctgcaagaaaatatgcttgtataataaataatttttattaatattttatttctgactattttcttcaataagagaaaacatagtcattttgtaaaaggaaagaacgaaataaaaatgcaaattcttcacgttttgttaaatagatctaatttagttcttatttaagaacttaatattacatctttaaaccaaagtaaaatatacaaatattgacaactatcggtctaattatttcaataagcaaagattatagaataatttcgttaagtgtatatatcgaagagaaaaaaacaaaggacaaatcggtcaattcactaatttgatataaacggtaccaacagatgacgaagcgcctctctatatatagagtaccttctttcccaagaaacactatcatcttcatattttacatcttccgtttcttgtttctctcccttcatcaatcatcatcagcattttccttaaatcttcttcttctaagagatcttagtttcactgaagaacgaagatgatgaagtcaagacgtgaacaatcaatcgaagaagcaatcgtcgcaaattatttgaagatgatgatcgataacgtaaacgtttggcctcgccacttcctccgaagcgaagacgtgtactgcaagaatccgtggacgcttttcgttactagagatcctataatcctacacttcggacgatacttcttcgttaatcggagtgtgaattcaggtttaaccgatggatgtgaatacggttgttggagaatcatcggtcgtgatagagtgatcaagtcggtgacgaccgggaagattctagggttaaagaaggtttataagttctgtgaaactgatcggaaaccgaaatcggtttttaagttcttggaaaaggagaagagaagagtaagagatagacgaatctgggcgatggaagagtataggtttgcaagtacgtggaaacaagattacgtgatctgcaagattcgacgtctgtatccacaaccatttgactacatgttggcccagcacattcgaggttactataaatgaatcactgatattctgatcctggatttgaacactcgattactgtttttggtgtcacgttattgaacccgttgtttgggaattttcatgtattctcattatccagtttcttgatttctctcattcatctttgttcaatctttttgtttgtttggggcaaatcgtctctgtacaatctttatgttactagaattgaaaagaaagattggtggaatcgttttaaaactgtggcatctttaagtgttatttttggttatgcaattgcgttgattttgtaaagaaatatttagatgtagggtgattggtcggtggatttgttatcgagttccaaatttggaattcttctaagattagatttctctatccaaaggcataattttcttttatacattgatactattgctaatttgctctcaaacatgattctcaattgacctaacaaaaaatatatatacagtactaaatgtagacattacctacgattaaataattttattgttgcgtttacacaaaaaaaaaattgttgttgctatcttaaatatactgcaatattccaaatttagtttgcgaaaaaaggagatatcacaaaatgataaataaatcaaagtgtaatcaaagacttcaaaaatagatttcattgtacatttgaaacataagcaaaaaatacattttcttgatatactcaactaaaattctacaatgtcttaactctcaataactgtttataatcttaagttaaatgcttctatttacaaaacgaaaacgataagtagaaaattccatcaaataatgaatcttcaaaaaaaatatacaccatgaaaaagtaaagaaagattcacaaataaaaaatggtttctgataagtctacaaaagtagctttaatatcacccatatcgaagttaaatttctattacgtacgaaatgcaatgtgtatattttgagtatatacaaaaatggttcatgtacttttatgaaaattgaaaactagctgggtgttatacaaaaaaaaaaaaaagagcaattttgtgtctaaatattaaagggataataaaaattcaattttgtgattggtcgtatgtcgacgacaatg

SEQ ID NO: 7746 - DNA, 3000 bp, Unknown
  misc_feature (1)..( 3000): cDNA_ID_2136020_gDNA_ID_1621160_Annot_ID_173677 3000 nt of promoter + ATG
tttaattactctttatctgtgtgtgtgtgtgtgtgtgtcaaagttacaatttctttcccttctttacgacaaaaatcttaagtaacttttgtttattgttacacgtgtcaataaattattggctcattattccattgtttcaaagtcaattttcattatacaagacaaataataggcagtcgggaaaatataattcatctatacttaataaagaaaattaatggtaatttgcttaattgaccaacaaactcttaatatattcaatttatttttatgatattattgtcttggtacttagtaatcattaatcaatatacttatttaagcaatcatccttgaaaacatgatgataaaataatatttttaatggatcaagatacttaaccagtttaatttataaaagaaagaaatttacttgttgatccactcaatttagccttgaaatctttggtggttgattagcctttgctttggaagtgacaaatctgattcaatttggggtgaagatggtgacgttggtgtggagtgaagtcggcggtgctgagctcctttgttaattctttcatatgtcatcttggaaggttgctagatcggaggttttgtccttctatcaccactttgaatattattttcatcgttgtaggcgatttggtgttcttagttgggctttacttctctttctcggctattcattctgtttttagtttgggactgagttcttggctaaagaattgtggtgtcgtttactgattttttgagaatggttgtggattgaagccttagttttaaggctttggttgggtctacaaatgtcctcgtgtaagaaatgagggtcctctttggcattttccccttcggatatcaagttttctccttgtacctttgctttctcgtcttctttggttgctggaaggtagtattagtttggttctttgctctactctatttgattatccgtcttcatttctgctgaggtagtggttgtgtgagctcggtttagcccttttctcgggctttctcttttgaaggcattctaatgatttggttttcttcaaggcttttgtttgtaacctttcttgtggtgaagagtttctagtagtgaattgctttggagtctttaattgttagtcatctccatgtcttagtgattgtcaagtttagtctcagtaatcttgttttgtactagttgataggtttttgtttactatgggtttgtccattttaatggttcatatataaaaataacactcttgtgacccaaaaaaaaaaacacatattctatcttaattgtttttttttaatgatatttaaaattttaatagtaaaccacacattttttctatatttagtgtttttacttttatctcaatttatttattctctcaatatatctttaaataacgtcagttatttttgttgtttactaaataattactactgtgtaacttaaactttaaatattagtgacgataaaaaagactttaaatattagtaacttatccttaacgttttactcaaacataattatacttaattctcattcatctttgtactattgagttttcccattataatctttatctatgcatcacaccatttatgtgttttgttgagatctatattttatagttatcttaacatagcaataggaaaaagagaaattttttgacaaatactaaaaaaacttatttggaaggtccccattttttataaatctgttatattatgaattatcttattatataataaataattaataattacgaatatataattaattttttgtgattcatgtatatagattcttttcggttaggaaattttctattttttgtttttaaatattttaacaaaaacttagatttgacacatgtcgatatctcatcaatgtagttgactcgtgcgtgatcacgttagttagcaactttaaaaaccctattttatataataagatgcaaacttgaataaaatggttctatttgagacttgtttttttgtacaaaattagaaagatccaaaattcaaactgatcaaaccgtacaaattagggtttttttgtcgtgtattacgtcattagaaaatattatttttaacaatgatgatcttatacatttgataagcaaatctaaactagggttttgaaatcctaaattaaagtaaatgtttcatgtacatgacacatacattttcaaaaaattagaaaaatccaaaactcaaaccgttctaatccaataaaattaagttttttttgtcgttagaaaatactatttctaatgatgatattacatttttcaagaaaattcaaactagggtttcatgacaatacacatgcatatctttaacactattggaaaaatctaaaacctcaaaccgatccaacaagataaaattaatttttttgtcgtgtctgttaaaaagtactattttcaatgatgatcttatatttttcaagtaaatccaaactagggtttcatgacaatatacatacatttcacaaaatcgaaaactcaaaccgctccaaccttataaaattaagtttttcttttgtcgtgtattaaatcgttagaaaatattatttttaatgataattttatatttttcacaagtaaatctgaactagtgttttaaaaatcctaaattaataatatttgagcaaaagtaaattcttgacaattacacatacccatacatttacacaagtaaataagttactcaaattgcaaaattaccaacatttacgaaataacaaaaaaaagggaaaaaatctctttcttttgtggattgcgaaaaagagtcaaacattttcacaagcaaataattgctcaagttacaaaattaccaaactttacgaaaacaaaaaatagaaaaaaatccttttgtttgtttgtttgtttgtgaggaagagactcttcaaaaaggggctgacagtgaagagattgtgagaacaaagacgacaaatgggcgattgagcgaagaagaaaccttcgttctctctcggaa

SEQ ID NO: 7747 - DNA, 3000 bp, Unknown
  misc_feature (1)..( 3000): cDNA_ID_1818829_gDNA_ID_1621160_Annot_ID_173671 3000 nt of promoter + ATG
cgaccaccccttcttttcttcggttcagaatcaggaacaggaagtggcttaggctgtcttgcaggaggaggttcttgccatttctcaatcttcttacggatctcctccctgaaagcttttccacttatccctaacggatcccctctagtagcatcaactcttgctgccaaagttgattttgcagccacgagcctgccagcgcgagcctgaagtccaggaggcgtgctttggtaaatctctgtctgctccagataacccacacgggactgagacgttgcagaagaaaacccagcaaggttcttcctcttgtggccaagaacttgaacattacacgcaggcattttagcaagtgctgacaaacctccagcagtccccatgagtttggctgcaacagcactcccaacaatagcagaaagattaggtgcaatagatcccatcttactttcaacaaactcaaggaccttcttccttgcggaatcaagatctaaagcccgatcacaagcctctaacaccttttgcaaaacatcctctggcagtgcactccctttcgtagttaaagcagtaactgaaacaaccatgataatagctgaaggaagaaggtcagcgagatcaacaagagccaaatccgtctcattcccaatcttcttcacaacacatgcatagtcaatagggtgatgaaccaacgactcaagctcttgaaacttaagcttgtacttgtctttgataaagttgtggacaataacgatttcattctcaatatcgaccgaaagctgattacaatccacaataagcttatactcaggatcatcttccaagacagttcctttctcagctccatcagaatctttcccaagagcctcctctactttatgcataatatcagcatatctctgactcttctgcagcttagaaacattatcgagatcatcatagttaagtgtctctaaatcagccatatccatatcaacatcttcttcttcctttccaacatcaccatcattctcgtcctgcatatgtataatcaaacaaactacaattacaatcatagctcctccaagtaaacagataatagtaatcaaaagtgttttaacactcaccaattctgcttcattgtcagataactcgtccaaatcagcaaggaaagaatcttcaagagttgcctataacaaatccaacatattgaaagttagtaaaacaagcttaagaataactcaaatctcggaaacaaagcaatatctatgatctcggaatccctaattttgaaattgaactttagagaagatgagtcaaatcaaaattaacacaatacgattacaataaacagagaatacaatcgccaataactgaaacaatgaagaaaatagagttaaagaaacgcttaccatatctctttctacttgggaggcaaaagcttcagtgattctcctacggataaaagaaaaatcgttgattcagaaaccctaatttatagagaaagcttgggatatacacaattgattagaggaggataatcaaaagttacctgaagaatcgaaggagaaatcaatcgattagattcgagaagaaaattgaagagcagcgagcgactagtgttttttccttaggaaggcgaagaggaatgttttcagttgaaaccttgtgtgctataaaaaagtcgagtttcgaagccggcaatatttgggccttttttaatgggccttctttgaaactaacactagtaaatgggcttctgcaaatttccgttttaaaatatcttactatacaatcttttgttgaaataattatatttctacaaaaggaagttactctttaggtttgcttcagttctattttatgtcacactagattttaatccgcggtacaccgcggggataattaattttttaatatatataaaaatttgcaaattgtatctatatataaaatatttttattttaaagtttacaattgttattaagtaacgtcctgccaaacccgtcccgtaaaagaaacctatttattttattaatgttgattttatttatgatatatttataaatcattgtataaatattttgtaattttgtagtaattaactgctatcaaatatttctgcggtttgatgcttataatcgaattgttatagtcatgaaaaaagcaatatcaaaaatgataattttgtagtgtttaaatgatattaaatattttggaagttttattttagtaactaattgtgtagttaatatggagagatttcgggaagatagttaaatgtcaaatatttaattcgaagatttactttctaattatcaaaaataattattaaatgtcagtggcagccactgtaaataagtcccaacttgaggatttatttcacaaagtggctgcaaaaatgtatatatagattaaaataattatacatatgtagcaaattttatattacaattacaaatcaacaattttttttgataaaacaaaattttcacccatcgaaaaaaaaaaattctctctttataatgtgtttcttgaaacaacaaaaaattaaactaaaatctattgtatatcaaataaaatagagtaaaatgtatctaaaaaaatggttgagacagagatccttgttctccattggggaaaatgttgctaccaaaaaagcaaagaaactaaaaagagtaaattttttcttgaataaagtaaatttccattatacataacaaaagaaagaaggaactaaaatacttttataggataaggatagataatcgaggaaaaaaaaaaaaaaatatagtgttttcattgggaacgttattaaagtagttcaaataattgtctgtttcttgacagtaactatgaacatgttacccgtgagatattgtcagagagtgaagtcacactcaaccaataacaatgaccaatccaatctcttctaatttttcctccaaccaaaattataatcctttcaagaaaacagagttgttagtttctctgcttcttctcgttttggaggattattctaaataatg

SEQ ID NO: 7748 - DNA, 3000 bp, Unknown
  misc_feature (1)..( 3000): cDNA_ID_2136000_gDNA_ID_1621160_Annot_ID_173670 3000 nt of promoter + ATG
gaaatatgggaaaatcttgccaaaaacatatacaaaactaagttctcaacaaactggtctactattttaacttctgtctctactacttggcgaaacagaacagagagttttcttgctagatacatcttccaggaaaccatacacaccatatggcatgagagaaatggtagaagacatggggaacgttcgaattcagcgactcatctaatccggtggctcgacaaacaaatgaggaatcaaatttccacaatcgcagcaagcggagactatcgatatgataaggctctccaactatagtttcaatcaagatcatgagcttttttacaaaaaattttctactctttcaatcatatgttgcacttgatgtataaacgtttatttactttttaaatataatttaacattaaattcaaaaaaaaaaaaaatattatgatttttgattggtaactggtaaccccatttaacttataaaatcacaaaaaaaatatttatgcatgacaacctttgccgagtcgcataatggttaaagttaagttaaaacatctattaaaatgattaagtgatagcattattcgtaagttacgagtatacgacaaatcatatttgatatgataacgttctttattattaattagcatcggtgccactttcttgtcaaatatatttatcttctctctttatcaatcataaaattaatgatatcttaaagtctttgataactgaccaaaacataaagattttttcttttgtttttgaattttgagcactatgtaaacatgatacattatgttatatatacaatatgtagtacaaaatatatttattaatgaaataaaattgtttgtgatttcattgatgaattcttaatttgttaaaaaaaatcatgtgaaattgaatatggttgatagtttgaatatgttgacacttgacattaataaatttgtatatatattattttatgaaaaatagatttgtacaatttaattagttatgaacttttgattgtttgttttactattttttttatcgacaacatatataatatgcaaatttgaatcatatgactatgatacatcgacggcattaacataaaccataacgctagaaatcttaaagtattctaatagcctaatttggtttttattagaattaaaaccctacataatcctggatgtgcgtaacgtagtagttgagctctattcttatacaccagtaaagtaaataaataaaaagaacagaaaatttcatgagcatgcagtagaaaaatcagtcgaatgttataaaaatagggttacagctaagttcgacgaggtgctatttcattggatatcacgaaacttgatcgtcaatatgttttctttttgtcttttttgtttttgggtcaacagatgtataaatgtatttgtatatagcttacatgaagaacacttggttagctaaaaagaaaagctaaaagaaacaaaagaggaggcagctaaaaaacgaaaaaagagccagcattatagatgagcctcttcgtgagcaagtgagtcgtttattgtaagatttgcctcttctaatttttttctttaaaaccttataattgtatttaaacaaatatcttcataagaaaaaatatcaaatagatatcaatgtacttttctttgaaataggatttcgctattaatccttattttaacattcatataactgaccaattatattggtatacagaaaaaaagaattgtatttgtttttttcacattttagtaaatctcatttttttctttctaaattatgattaatatgaaaattaaaatagaaagtgacatgtccttattttaactccttttatttcattcattggtttaatgttatttacctaaggatactaatcattggtttttgaaagataacaataaaaattcattccaaacatgtggtgcaattatatataattacaaagtggatagagtatagaactacaaaatggatagagtttagttataacaactaatttaaaaaagtgttcatttgatagagtctaaaatcaccacttacattgactaaccccaaaaatttgtcctaaacactaatcaatccgaagattataaaatgtcgacaaagaaaataaaataaaataggagtctatgagtcgatggaacttatccaactaaactttaataagaatgaaccaaactcaattttgtaataatatttaaaatacgtttttactctctcccagaatatcccatctctctgattccaattcctcctctctctctttcgtctctctacttcgaattgattgttttaaccgccggtgatcggagcaaactctctgacggtgaccgccggtgatcattttttgtgaacttcacttttggtaagcagctttgacttttgttcataatccttcacttttccttttcaattttgctttttcctctgatctgatcttagttattaagctgttgaatcgcatgatcctttcttctctgattgattatttctaatccttcatgggttttatgacgaatcgtgtcttagggattggttttttctgggttgggtttctaaatttgttggtctaagaacagtgaaattgttgtttcagtgatctcagattctacacttctagtgattgaactgttatggaaaattacaaaatatgtggctctgctttcatttaaattcaatcatcatcatctctgctacttgatgatcaggtcaccttctctgtgttttgtaatctccataacgtaagagtttgtttgatattgcaattttgaataagatgattagcatccaatccaatagctgatgttgaaacctaactctgtaaagactttaaatttgttttctctggctttgtgctcgttgaagggtaacctaaagatttgacctttttgatccaacacttctctttttgtactgtaggtgtataaagcatagttcgttgggaacttttttttacagctttggagtaactacctttcatggtttttggttccaacaatg

SEQ ID NO: 7749 - DNA, 3000 bp, Unknown; identical to SEQ ID NO: 7737
  misc_feature (1)..( 3000): cDNA_ID_1818841_gDNA_ID_1621160_Annot_ID_173668 3000 nt of promoter + ATG

SEQ ID NO: 7750 - DNA, 3000 bp, Unknown; identical to SEQ ID NO: 7748
  misc_feature (1)..( 3000): cDNA_ID_1818833_gDNA_ID_1621160_Annot_ID_57102 3000 nt of promoter + ATG

SEQ ID NO: 7751 - DNA, 3000 bp, Unknown; identical to SEQ ID NO: 7747
  misc_feature (1)..( 3000): cDNA_ID_1818829_gDNA_ID_1621160_Annot_ID_57103 3000 nt of promoter + ATG

SEQ ID NO: 7752 - DNA, 3000 bp, Unknown
  misc_feature (1)..( 3000): cDNA_ID_1818813_gDNA_ID_1621160_Annot_ID_57107 3000 nt of promoter + ATG
agagaataaataaattgagataaaagtaaaaacactaaatatagaaaaaatgtgtggtttactattaaaattttaaatatcattaaaaaaaaacaattaagatagaatatgtgtttttttttttgggtcacaagagtgttatttttatatatgaaccattaaaatggacaaacccatagtaaacaaaaacctatcaactagtacaaaacaagattactgagactaaacttgacaatcactaagacatggagatgactaacaattaaagactccaaagcaattcactactagaaactcttcaccacaagaaaggttacaaacaaaagccttgaagaaaaccaaatcattagaatgccttcaaaagagaaagcccgagaaaagggctaaaccgagctcacacaaccactacctcagcagaaatgaagacggataatcaaatagagtagagcaaagaaccaaactaatactaccttccagcaaccaaagaagacgagaaagcaaaggtacaaggagaaaacttgatatccgaaggggaaaatgccaaagaggaccctcatttcttacacgaggacatttgtagacccaaccaaagccttaaaactaaggcttcaatccacaaccattctcaaaaaatcagtaaacgacaccacaattctttagccaagaactcagtcccaaactaaaaacagaatgaatagccgagaaagagaagtaaagcccaactaagaacaccaaatcgcctacaacgatgaaaataatattcaaagtggtgatagaaggacaaaacctccgatctagcaaccttccaagatgacatatgaaagaattaacaaaggagctcagcaccgccgacttcactccacaccaacgtcaccatcttcaccccaaattgaatcagatttgtcacttccaaagcaaaggctaatcaaccaccaaagatttcaaggctaaattgagtggatcaacaagtaaatttctttcttttataaattaaactggttaagtatcttgatccattaaaaatattattttatcatcatgttttcaaggatgattgcttaaataagtatattgattaatgattactaagtaccaagacaataatatcataaaaataaattgaatatattaagagtttgttggtcaattaagcaaattaccattaattttctttattaagtatagatgaattatattttcccgactgcctattatttgtcttgtataatgaaaattgactttgaaacaatggaataatgagccaataatttattgacacgtgtaacaataaacaaaagttacttaagatttttgtcgtaaagaagggaaagaaattgtaactttgacacacacacacacacacacagataaagagtaattaaaattggagtttctgatttctagggcacaaaatctttagattcggtgaagtcattcattacttcattgccaaagcttgtaaccaaaactcccatggccgacgaatcttcttctccggccacgggggatcccaattcacagaaaccagaatccactactccgatttcaattcccaatccaaatcccaatccttcactaacaccaccgccgcctcaacaacattcgcaaccaccagtcgctcctctggttccacctggtccgccttatgctcctccggctcagattcctagctcgcttctccccaccaatctcccgccgccaccaccattccgtcccggtatgcagttcactcccgttgcgaattttcaaaaccctagctctggagttcctcctccaggatctatgcctcagtatcaaccgcagcctggtatgagacctttccagcctatggctaatggttatcccggaattcatggtgttgctcctcctggtgccatgcctcctcatggtgggttcttctatctcttaattttataagttcttactcttttttttgtttatgatgcactttaggctatatagtttattttcgtggcgttttttttcgttctgtgtatgttgaatgtgaatttgtgatgcttaaagtagtgaaggggaactatatatgtctatgtagttggattagattaaaggtttagagtaaaaagaagttttattgaaagaggaattagggagaaaactagaaacaggaacaccgatgaccgggtgttttctcctacagcgtcttgattgagttccctgagaatggttgcaaggcatcaaattttgggtagggactcacttctacgactccctcattttggtatgcgcaaattcgctttttgttcttcttattctcttaatttatttagttagtgtaacacatctttaaccaaaccgcttacctaaaggttcttgaaagatttgccccaatttatatgttaagttgagaattactgtagttttaagaacaaaactttgaacttgatgggttaatcaactgccagcagcaagcatttgtagcgactgagtgctccttggtcttgattttgaggtattgcaattctttcaaattacaccttccgttacatcttcgacatgtttcttttttctattcccttctgtggtcaagctgctaatggttgaaataaagctattatgatgggtaataatagtttttataagttctatatgggcatgaaatgatgggagtttcaatattactgaatctcaaattcaacagatgattatagattcttacctatttcaagttgccctgtgaggtatgactacttaatgtggtaataatgactacgatcctggtgctatcttctcaatgtgtccttcaggatctctgttcagctgggtggtatttgtactgcctctggtgtgcatatctaatttgctctagtttgtggtaacaatacaaaatgatttttatttactgcttcttgatactcttgatttatgccaatgcagttgttcagggtattccaatgtaaacatctactgatgaatttgtagagacttgtttttgtttatgcagggcttctccggtatccttctccatatccaacaatg

SEQ ID NO: 7753 - DNA, 3000 bp, Unknown; identical to SEQ ID NO: 7746
  misc_feature (1)..( 3000): cDNA_ID_1818807_gDNA_ID_1621160_Annot_ID_57109 3000 nt of promoter + ATG

SEQ ID NO: 7754 - DNA, 3000 bp, Unknown; identical to SEQ ID NO: 7745
  misc_feature (1)..( 3000): cDNA_ID_1818803_gDNA_ID_1621160_Annot_ID_57110 3000 nt of promoter + ATG

SEQ ID NO: 7755 - DNA, 3000 bp, Unknown
  misc_feature (1)..( 3000): cDNA_ID_1818791_gDNA_ID_1621160_Annot_ID_57113 3000 nt of promoter + ATG
ttctccgggaaatgcagcgacgttttcagcagatgtgattttcctgagggattcgtctttggatcttccacttctgcttatcaggtttggaatcaatttattatcttgaatcttcgaacagaactgaaacaaaggttttaatatctgaaagtgggaaggagctgttgcggaagacggaaggaaacctagtgtctgggacagattttgtcactcacgtaagagctttcgtttttcaacatttaattattgttagtgtttgaacaaatattaatattaacattgcagataataaccaaggtaacggagatataacatgtgatgggtatcacaaatacaaggttctttctcttctctgctaatttactcttgctacattatgagttttttgttcatcaagcctgagtttattgtgactattcaggaagatgtgaagttgatggtggacactaacttagatgctttcagattctccatctcttggtctaggctaatacctagtaagtcttcattaatcttcagttttactcattaatcttagatcaagtttatgatcagttcttaattatctcattagatagaagaggccctgttaaccaaaagggtcttcagttctacaagaatcttatccaagaattagtaaaccatggtaagacctctcgtcatatccactcgatattctgcgcggtgttattattattaacttgactttaagtaaactaattactataggaattgaaccatatgttacactgcaccactttgatcatcctcaatatcttgaggacgaatatgaaggatggctcaaccacatgatcgtgtaggttaacaaaaagcggcattgtactttctttttacagattatgtagaaaaagatgatgtgaaatagtaaacaaaacttgttgttgtttttaccattgcagcgaagactttactgcttatgcagatgtttgcttcagagagtttggaaaccatgtcaaattctggaccacgatcaacgagggcaatatattctctattggaggttacaacgatggggattcaccgcctggtcgttgttccataccaggccaaaactgcttattagggaactcttccactgaaccatatattgtaggccataatttgttgcttgcgcacgcctctgtttcaagactatataagcaaaattacaaggtacatatagttttgcataacactattcttgaatgtgtgagttgatgacaagagaacaataacatactaaatagtacatacaatgtgcaggataagcagggaggttccataggctttagcatattgacgatagggtttagtccttccacaagctccaaagatgatgccattgcaactcaaagagccaacgatttcttcaacggctggtgagtcaagcacaaactgttccaaaagatatcctcataaaatgagaagaaataccaaatacactctttcaaactcaggatgcttgggcctcttatatatggagactatccggatacaatgaaaagaatcgtcggatcaagaatgcccgttttctcggaggaagaatcagaacaagtgaaaggctcatctgactatataggaatcaatcactatcttgcagcttctatcacaaacagcaaactgaaaccttctatttcaggaaaccctgatttctactcagacatgaacgtaattttgagttgtaggaatcaaactcaatctttttgactaacaaaaattagctctttactatttatctcgatattttttcttcgctaaccatctcgtcttcgctttactgcttgggagggacagtctttgcgaatttttcatcttctgaggtaagagtttctacggctaccaaattcttatacaaagttttaaaccaaatgagtgttcttagttattttttgttttgttttggataagtatgatgttgctccatgggctatagaagctgtcttgtagtatgtaaagcagagctatggcaatcctcctgtctacgttcttgagaatggtctctctctctctctcattctctctctatctctctctcgttttagtcagctaaattctcttgttaatgtcaacgaataggtcgaccgataaatcgagattcgcagttgaaagaaaaggacacaccaaggattgagttcttacaagcttacattggtggtgtgctgaaatccattaggtgagtaaagtttcttattgcatattttcgtcacttctcttgtcagtgtaataaagaaaaaaaacattactacatgtaggaatggatcagatacgagaggctactttgtatggtcacttatggatttatacgagattaaggggggatacgatgttggttatggattgtactctgtcaatttcagtgatcctcatcgcaaaagatctcccaaactctctgctcattggtattctgattttctcaagggcaaaaccgcttttcttggttctcaaggcatcacggaattgcagagcaacctctctccttactcctagtaatgaattgcaataatatattctgatgaatccgttgtcataatgagaagcgtaataaattcattcgaatattatttgttttcatttattttacaatcaaatattgataaccgaattgcttcttatttcaaaatggactgaaaacagtgcaaaaaaatcccaataatgtatgaaaaactcaaaactaaaggctttttttttgtaaaaacgctagagttatttatttcaacacgtgttacacactttaaataaatacagtggaccatatactttgtttcttcgtcacacaaatattatctctagtagcagtacaagagaaagagcattagaaatggaacagttttttgctctgtttaccatttttctatcttttgctttccccgggagatgcagcgacgttttcagcagatctgatttccccgagggattcctcttcggagctggcacttctgcttatcaggtttggaatcaattcctaagctttttttttttttggaatttttgaaccaaatg

SEQ ID NO: 7756 - DNA, 3000 bp, Unknown; identical to SEQ ID NO: 7743
  misc_feature (1)..( 3000): cDNA_ID_1818787_gDNA_ID_1621160_Annot_ID_57114 3000 nt of promoter + ATG

SEQ ID NO: 7757 - DNA, 3000 bp, Unknown; identical to SEQ ID NO: 7742
  misc_feature (1)..( 3000): cDNA_ID_1818768_gDNA_ID_1621160_Annot_ID_57119 3000 nt of promoter + ATG

SEQ ID NO: 7758 - DNA, 3000 bp, Unknown; identical to SEQ ID NO: 7741
  misc_feature (1)..( 3000): cDNA_ID_1818746_gDNA_ID_1621160_Annot_ID_57125 3000 nt of promoter + ATG

SEQ ID NO: 7759 - DNA, 3000 bp, Unknown; identical to SEQ ID NO: 7740
  misc_feature (1)..( 3000): cDNA_ID_1818742_gDNA_ID_1621160_Annot_ID_57126 3000 nt of promoter + ATG

SEQ ID NO: 7760 - DNA, 3000 bp, Unknown; identical to SEQ ID NO: 7739
  misc_feature (1)..( 3000): cDNA_ID_2992526_gDNA_ID_1621160_Annot_ID_57127 3000 nt of promoter + ATG

SEQ ID NO: 7761 - DNA, 3000 bp, Unknown; identical to SEQ ID NO: 7738
  misc_feature (1)..( 3000): cDNA_ID_1818736_gDNA_ID_1621160_Annot_ID_57129 3000 nt of promoter + ATG

SEQ ID NO: 7762 - DNA, 3000 bp, Unknown
  misc_feature (1)..( 3000): cDNA_ID_1989617_gDNA_ID_1621161_Annot_ID_57853 3000 nt of promoter + ATG
agagagtggcatgggactgactaatgctcctaaatcacataggcatctgttgaaagccactgtacctaaaaagcatggtagagtgaatgaaccaggatcactaagcttcttaggaacgatcttcttctgtatgatagcactgcattcatgactcaatactaccatcccttgcacttcttgaattctctccacgatcaagtctttcaaaaacttgtgggtatctaggattagcgctagagcgtcaacaagaggtatccgcaactcaacctccttgatgttcttcgcaaacatagctctatacttatatgccaatgctttctagtgacagccaggaaatggaagctagggtttgtaaggaggaggaacaaagaccttttctttgtttttgacagcaactagtttcggagatgttattgggaagggtggtcgagtaacgtgatcgagtggctgctcgagtgactggttgagtgaccggtcgagttgtttgtcagcttgatcttattaagaccgaaatcctccccatcttgatctacactgtcctcagtgactgtcttaggttcctctcttgttggaagtgcttttccactgtgcagagtgatagcgtgagaatattcttttgcacatgcttttgtgggctaagaagaatcctttccagcttgtcattcagcgctttgatctcgttactgtgtttgtcatctgagtcagttgtgcctctgatggtcctgtcacagtcctcgttgtaatttccatctgactaagctaggttctcaaccaattcccagccttctacaatatctttattctggaaatttccattgctggcggtatccagaagcattctgatccgtggtaaaacacgtctgtataaagtgcggagcagagaggctttcttgaagccatggtgagggcattggttggtgtacccttgaaacgctcccatacttcacagaagcttacaccagtcttctgtgaaaaacaagaaaatctcatttctgagtcttgcatttctagcgttggagaagaactttgccagaaaagcattcttgcaatcatccctggtgctgattgagtcatggggtagattcttctcccaaatgtgtgctttgtctcccaaagagaatggaaacaaccggagcttgaatgcgtcgtcactgacaccattgatttttgttaggttacagagcctatcaaattcatccaagtggtcgagtggatcctctattggcagaccatgaaatttgttcccctgaatcttcgagatgagaccactcttaatctcgaagttgttgttaaggatagtaggaggtgcaattcctttcctctaacggtggtcccgtggtgcatctctagcaccaatgtttgcagggccattctttgttcgtcagccatttcgagtggttgctgaggtacaaggttgtctgtgtttctcctttctctgagctcgcgagctatgcggttgatgttatcgttgaaaagaaggttctggttgcctgttgatcgagtttgcatacagtagaggtgtacctggatcaagaagacaacaagaaaaacacacagtcagtacttaaagcaaaaattgaaaaagaacttgatctaagcaagtttgaaatctcaaatataacaaacaaacacccaattggcaatggcgccaaattgataataggtttttaagatcaattaatcctaaagcactatcatgtcattgtagtactgaaggttgtcaatccaaattggtgtgatgctagcaatcaagatgcaatcagagttcacagagtcaagcaaagcaataacaagttttggtgtgttctagcagtcctaagtgaacatgtaagaaacagaaattcaagcagaacagtaaaaacactcgaccaacacagctttttgccaagcactgagtgtggtcgagtgacaggtcgagtaacaccagaaaatgtaacagggatactcgactgcacagtctgttgctagacaactgggtggtcgagtatcaggtcgagtaacaggagaaaaatgcaaaaactgagcaacagggaaaaagatgcaataaacaacagtagagtaaacaaagaaatcaattggatgagaaatttccggggatggggtaattgagtagttttgttttctaagtttaaaggtgattgacatgctcactaaattatccgtagacaacaagttcggtaaccatatctaagtgccaccgcaaaagaaaccctaaagttaaaccagtcccagactcaatcaccattgacgagagctaacctaacaggcattacgaatcaacaaattaaagccaaaacgctccctgcaaccaataccttggtacagagccacgaatctctggagttagtggttcagacattagtgcacaaaaaaaaaaaaaaaaaaagtggttcagacattttatcgaacttcttttaggtgcataaatgtctgggctcaaattctagttgatcagaaagtaataggcattaagaacaactaatccagaagagatctataaatcaaactcaaccacctagcatattgagaattctaaactacttaacccatcctcagaagcctagtcactactcagacatcattgtagagaacataaacgatgataataatgaaaacatgatagcaacagagtaatagcaggctgataacaggatgaacaacttagtaaacaaaatcaaaagcaagtactaaatactgaatagattaagagaaatccgaattacaaaatgtcaagaacacagtgtttgcggaataaaacttcggttacaaaaatgtaaaatacatgctacttatagcaaaatattctgaaaccaccctaatactcaaaacgacacagtattgggacagattaagaacggcactcgacccaggtggtcgagtgaatggtcgagtgatgagctggagtcttcttttcttccttgtgctcgagtgtttggttgagtgcggaatggaaaagactctgaagctggtagtcgagtatgaagtcgagtgatagagatg

SEQ ID NO: 7763 - DNA, 3000 bp, Unknown
  misc_feature (1)..( 3000): cDNA_ID_1989617_gDNA_ID_1621161_Annot_ID_173707 3000 nt of promoter + ATG
attaaagccaaaacgctccctgcaaccaataccttggtacagagccacgaatctctggagttagtggttcagacattagtgcacaaaaaaaaaaaaaaaaaaagtggttcagacattttatcgaacttcttttaggtgcataaatgtctgggctcaaattctagttgatcagaaagtaataggcattaagaacaactaatccagaagagatctataaatcaaactcaaccacctagcatattgagaattctaaactacttaacccatcctcagaagcctagtcactactcagacatcattgtagagaacataaacgatgataataatgaaaacatgatagcaacagagtaatagcaggctgataacaggatgaacaacttagtaaacaaaatcaaaagcaagtactaaatactgaatagattaagagaaatccgaattacaaaatgtcaagaacacagtgtttgcggaataaaacttcggttacaaaaatgtaaaatacatgctacttatagcaaaatattctgaaaccaccctaatactcaaaacgacacagtattgggacagattaagaacggcactcgacccaggtggtcgagtgaatggtcgagtgatgagctggagtcttcttttcttccttgtgctcgagtgtttggttgagtgcggaatggaaaagactctgaagctggtagtcgagtatgaagtcgagtgatagagatggtggtactcgacttggtggtagagtggtcggtcgagtgtgtgatgatggtgagactcggcggtgcaatcgagtaagtgatcgagtggatgtgatggaggtactcgactagggggtcgagtggtgtgatcgagtgatggtcaggtggtggagacgatgatactcgaccatgtggtcgagtagtggtgcaaagtgacgaggccttctgctcgatagggggtcgagtggattgatacgatcagctccgcttcttccaattagctcgtcaatagctccaaatcacctgaaaacaacacaaatatgcaacatgcatgcaaaactatcctaaacatgcaaagtgatgacaaatgatgagaaatggtataaaacagtggtgatatgatgctaaagtgatgaaaaatggatgctcaaaacatgtaaaatgcacacttatcaatcacccacagacaagcaggtaggttgagatctctaacagggagataaaaacaattctggaaaagactgttgggattacacggaaagactggtctgcaaagctcgatgacgcattgtgggcttacatgacagctttcaagacacccattggtacaacttcttttaagcttctctatggaaaatcatgtcacctacctgttgagctcgagtacaaagctatgtggacggtaaaactcctgaactttgacataaaaaccgctgaggagaagcggttgatccaactccgtgaccttgatgagatccgtttagaagcttatgagagatctaaaatatacaaggagggaactaagctttttcatgacaagaaaatcatcaccaaagatttccaggttggtgatcaggtgctgctattcaactctcgcttgaaactcttcccaggaaagcttaagtctagatggtctggtcttttctgtatcactgaaattcgtccttatggagcagtcactctagctggtaagagtggagatttcacagtaaatgatcaaaggctcaagaaatacttagcagatcaaatccttccggaggtaacgtcggttcatctccaggaactttttgatgattaaaagagtaagggagtcaagttaatgacttaaaataagctaacttggaagaagtcccatgcctttctctgtacatattttctttgtgatttctgatgcgttttactagtgttttcaggagatagctgccaatgtttaagtgcaatggatccaatctcagtaattaactcgaccacatgctttggagatcgagtgtctctgtgaaatcgagtaaaaacaaggtttcatttgtcacttaatctaattggccacgtgctgatgagaatctgtagtcgagtgaaattgatgattcagatcctttatattcaaccatatactcgactaacagagacttacagaagattccaagttctcctgaggttttcccagtcaacaggaactaagcttaaagacaaaacaacagggcatggaccacacgcgttttgttcctgaagataagatggagagagaatcacagaatcattctctaccacaccttttgaattcgccctcactctccccaaaagtaaaatctactcgacccatctctcttcatctctccaccgacactcctatttctctacttcaacacaaatcgccatctctcacttgcccaaagagttactcgattcagaccatttcactcgatttcgtcgccatactcgaccaattcactctaccgttcaccgtcacttcgttctcgccacaacactcgaccgggaagagcaaagacacctgagcacaactcgccgtactcgaccacctctacgccgctgcagtcgagtgccacaatcgaattctgtagtcgagttcccaattcgagttccccatctcgttcaccgtcaaagcctcaagaactactcgagtacatcaacaggactcgaccacctcacaaccgtaaccaagtgcaccatctactcgaccatcgattcgtggttccgtccctgtaaatcttgttcagcgtcaactaacagtttactcgtccacttgatttcaccagctgaactcgacctcaacagatatactcgaccgtcgatttctgttctactcaattcaaatcgttaaagaagaactcgggaacagttcagtttactcgagtacaagattatactcgaccaattaggtccatttcattgcctggtatcattgagactaacctattaacatttgagttttgagttctcaatctttcgcaggagaatcatgagtaactatagtggcagttcttcaattgatcctgactataacatg

SEQ ID NO: 7764 - DNA, 3000 bp, Unknown
  misc_feature (1)..( 3000): cDNA_ID_1809501_gDNA_ID_1621162_Annot_ID_57133 3000 nt of promoter + ATG
cggaactccggagcaagatcttgacgagatccgtcaacatttccacgcacgcaaacgaggtgagcctcaccgtgtcctcgaagaaattcagaccggaggagattcttcttccggtgacggtggaggtaattccggtgggagtaataactacgagacgtttgacatcaacaagattttcgttgacgaaggtgaagaagagaaacccgacccgaataaaccttacactctcggacccaagatatcagattgggatgagcagagatctgattggttagctaagaaccctagcttccctaatttcatcggacctaacaagccacgtgttcttttggtgactggttcggcgccaaaaccatgtgagaatcctgtcggtgatcattacctcttgaaatcgatcaagaacaagatcgattactgtaggttacatgggatcgagatcttctacaacatggctcttctcgatgcagagatggctggtttttgggcaaagcttccattgattaggaagcttttgttgtcacatcctgagattgagtttctttggtggatggatagtgatgctatgtttacagatatggcttttgagcttccatgggagaggtataaagattacaatctggtgatgcatggatggaatgagatggtttatgatcagaagaattggattgggttgaatacagggagtttcttgcttaggaacaatcaatgggcacttgatttgcttgatacttgggctcccatgggtcctaaagggaagatccgtgaagaagcgggtaaggttttgacccgtgagctcaaggatagaccggtgttcgaagctgatgatcagtctgctatggtttatctgttggctactcagcgagacgcttggggcaataaggtacaaactgattttgactggtatataactatgaacttgattccatttcagcattggtttgatgtggaaaaaaaaaaaaactaaatttggaaacttgtggtttgcttgttgtggtttatcatgtctcttgaacatcaaaaataacaatgtgagttgctttttgtggtttatcatgtctcttgatcatcaaaaatgacaatgtgagttgcatcttgtggtttctgacatctgtgtaagggtctattattgaagtaaactcaaatctttgcttggtttggattttgttgagctactcatttgagccactgcattgttgttataggtgtacctagaaagtggatactatcttcacggttactgggggattcttgtggacagatatgaagaaatgatagaaaactaccacccgggtctaggagatcacagatggccattggtgactcactttgtcggttgcaaaccgtgtgggaaatttggtgattacccggtggaacggtgtctaaaacaaatggacagagcctttaactttggagataaccagattctgcaaatctatggtttcactcacaaatctttggctagtcgtaaagtcaagagagtgcggaacgagactagcaatccgttggagatgaaagacgagctcgggttgcttcatccggcgtttaaggcggttaaggtacaaaccaatcaagtttgaatcggttttgcgtttaggatttgtgttatgtttctcgctatatttatgtcttgtgtctttgcttgttgttgtactaagatggatgataaagtattgtgcagagacatcagttaattctttggttttactttgtctctacgtctagagttctattacgaaatcaaaatgttgtttttcttcctttttgttctttgtaatccattagaacttgagattttgtagcttcatggatcaataatctgtgttaattcaagaacttttttttaacctgatttcacattcaactaattatttacttttagtatgcaaaatgtgaaaaaatcacattgagttagtatagttctgagatcatattcacaagttttgtgtagtttaggagtttaattcgaaaaacaaaatttggcatgtggtcagattcttttgcagtatgggttgttgtatctgaaatctgaatgtctttaattgataataaaatcatgtatacgggctattattagggggaggccttataaaagcccatctgaaaactaaaatcacggcctaatatatggaatccgtgttatacaaaaatccaagataattcgtagataatggtgagaaaatcgtttgtggccaagcaatttcgggtagggaggatcaacaaagatacaaaaaagatttctttcttctttataaaacccaaatctcaaaatgttatctcgttttttattttaaatgttttattttattttgttgttgtgtggtttttttggtttttagtaaagagaagatataacaaaaccctaattctcatgagttcaaaaaccctagatttagtgagcccatcaaaacattttccattggggaagattttaacatttggagaattgtgcataataaaaacaaaatattaaacagtaaatactttccaaaaagtgactaaaatattctaaatttactcaacaaaaattgaaaattcttgacaaaaaaattactgttttttaaaatgatacaatgtttttcaaattttaaccacaaatgattattgtacttcttcctcaaataaaaaaagaaactctatatattttggcttgagccaatgaagcgacacagtttaaagcgtagcacaaaagagagccctcttggaaacttcaccaacatagaagcgagggtaattcggtaatttcatcatcatcctcaaaacacaaactgagaagataaaatcccaaggcaaagaagaaaaacgaagagtcattttttgttcgccgagtgaccttatctctcccaattctctcttcttcaaaagagagagagcagccaaattctcaatcataaaaaccttcacacaaaaaagggtaaattcctttaaaccctatctatctatcgctatctccttcctccacaagtttggcggagaaagagtctcagtagcaaagcggaaatg

SEQ ID NO: 7765 - DNA, 3000 bp, Unknown; identical to SEQ ID NO: 4992
  misc_feature (1)..( 3000): cDNA_ID_1809497_gDNA_ID_1621162_Annot_ID_57134 3000 nt of promoter + ATG

SEQ ID NO: 7766 - DNA, 3000 bp, Unknown
  misc_feature (1)..( 3000): cDNA_ID_1809493_gDNA_ID_1621162_Annot_ID_57135 3000 nt of promoter + ATG
tacacctataacaacaatgcagtggctcaaatgagtagctcaacaaaatccaaaccaagcaaagatttgagtttacttcaataatagacccttacacagatgtcagaaaccacaagatgcaactcacattgtcatttttgatgatcaagagacatgataaaccacaaaaagcaactcacattgttatttttgatgttcaagagacatgataaaccacaacaagcaaaccacaagtttccaaatttagtttttttttttttccacatcaaaccaatgctgaaatggaatcaagttcatagttatataccagtcaaaatcagtttgtaccttattgccccaagcgtctcgctgagtagccaacagataaaccatagcagactgatcatcagcttcgaacaccggtctatccttgagctcacgggtcaaaaccttacccgcttcttcacggatcttccctttaggacccatgggagcccaagtatcaagcaaatcaagtgcccattgattgttcctaagcaagaaactccctgtattcaacccaatccaattcttctgatcataaaccatctcattccatccatgcatcaccagattgtaatctttatacctctcccatggaagctcaaaagccatatctgtaaacatagcatcactatccatccaccaaagaaactcaatctcaggatgtgacaacaaaagcttcctaatcaatggaagctttgcccaaaaaccagccatctctgcatcgagaagagccatgttgtagaagatctcgatcccatgtaacctacagtaatcgatcttgttcttgatcgatttcaagaggtaatgatcaccgacaggattctcacatggttttggcgccgaaccagtcaccaaaagaacacgtggcttgttaggtccgatgaaattagggaagctagggttcttagctaaccaatcagatctctgctcatcccaatctgatatcttgggtccgagagtgtaaggtttattcgggtcgggtttctcttcttcaccttcgtcaacgaaaatcttgttgatgtcaaacgtctcgtagttattactcccaccggaattacctccaccgtcaccggaagaagaatctcctccggtctgaatttcttcgaggacacggtgaggctcacctcgtttgcgtgcgtggaaatgttgacggatctcgtcaagatcttgctccggagttccgaatttaccggcgccgattgtgctacgtaggacaacaacggtaagaagaagacagagaatcgttacctttaattggcgtaaagctctttggattctccggcaccggtaagctcctaaacacctctcaatcatcttctttcttcttacaagattctctgtaaaagatctgtgctttatgtgtttttaagagaagatctgagtttccattaatgtaagagattcgaatttgataataacactgttaattaccaaagttacttactacaacaagagaagagaagcgaggagagtttttgtgtttttggacacgacagttaagattgtctgatttcacttaattgtcggtggtagtgatgagttagtagcgttgttgacacgtggcgaagttctagagcgtatcatttgcgatcaattatcttgaccgttgatgcagttatagatctatctataaaaaactaaaaatctaacagcgttgaaaagtcaactcgttgttttttttgtacaaactcgtttgtttatttatatatagaaaactagttgaaaagaaaaaggagcataaatagcataatattttaacttgtttgatatagttaaatacttaaattactaattagaggttaggaagttacccaaatgacttttggaattcattatattgtgatatggtttataaaaaatgttttttttccctcatcatgaaaagataccattattagtattacataagtactagattttaacttacggtgtaccgcggaaacaatttatttttaaagttagtatatataaaaatatcatttattttattaatgttgatcttatttatgatatgtttatgaatcatttgtttaaatattttagtcgatgcgggacattgaaccacatatttttcgtcaattggttaatatattttcatttttaaaatttcgaatcacggaaaaaattttgatttttttttaaactctatatattatataatgatgttaaaaaattgtgatatattaaactttttaaaagtttaaatattgataacgttttattaagtttaaatatagaaataattatatttaaaaagttaatattttttaccttttaggtaatgacataataaatctaaaagcaaggatttagaagatttagatctttaattaaatattttcattcctaaataattaagcatgacattgtaaataagttcaaatacatgatttatttatttaaacaaaaacgtttagtaagaataatatttatttaaataaaaaactttgttttaaaatattgttaacaaatatgtttatgctaattttaagggattgatgtgaagtttgtttggattaaatttgattgataatgtgattgacaatttaaattaagaatgtaaagtaaaattaattagtttgaaaaaaagatttaatgctaatggcattattgtaaataacttcaaatctaggatttatttggtaaaatggctccaaaaatgtatatgtagattacataatgaaaaaaatatctcataaaatatcagaaatcactatttatcattacatcatgaaaattataaaacaatcaaaaatcattaaccactaattacattacgaaaaagtttatatcatgaaaaacatcaaaccagtctcttaagggtatgcttatctcctattatactcatctgttaggccccctaatgatgatgtgacccccttctccgttgaacgaattcagtctcttcatccttttaggtgtgactcctccttggctactcagttaacagctattcctagtgatgaagagatcact

SEQ ID NO: 7767 - DNA, 3000 bp, Unknown; identical to SEQ ID NO: 4992
  misc_feature (1)..( 3000): cDNA_ID_1809497_gDNA_ID_1621162_Annot_ID_173715 3000 nt of promoter + ATG

SEQ ID NO: 7768 - DNA, 3000 bp, Unknown
  misc_feature (1)..( 3000): cDNA_ID_1809489_gDNA_ID_1621162_Annot_ID_57136 3000 nt of promoter + ATG
ttgttctctctcatgtgtcaaactcgtttcatctacgtagcatcgagatttcagttaatcgaatctcctgttatcatggacatgttatataaaatggatatagatcagtaaaaaggtttccgaatggatatatttaaatggattcgttattatggacaccaaaaaattgtttgttgatttttctttcagtttgcagagacctccaccttcaaaaccttatggacatggaactttggtttctttacaaaacacggttaatcgaatctcctattattattgacatggtatatagaatggatacggatcagtagaaaggtttctgaatggatatatttaaatggacttgttattatagataccaaaaaattatttgttgatttttctttcagtttggagagacctccaccttcaagatcttatggacatggaactttggtttctatacgaaccacggttaatcgaatttcttgttattattgacatggtatatagattggatatggatcagtaaaaaggtttctgaatggatatatttaaatggacttgttattatggataccaaaattttttaccaaattcctgagataatcgagatcgaattgtttaagaaacttctcccatttatttgcagaatcgttatcaccaatttttagtgagccgccgtcataatcgataagaggaatcaaacctagaagttatggagacgtggagagagaaaggcactacaaatgtgagagagagaaagagagagagagagagatctttttttctattttgcgtaaggatcgtggaagagagaaaaaatatttaatttgtgttaaaattcaaaataaaagtagttgtttaagttaggggtaaaaatgtcttaaaaaaagtcaaataatggaaaaagtgtcctcaccctcataagtgcataaaaaagaataagattatctaaaagtgcctaaacgtgtcacatttttatatatctccgtctttttttcttcttttttgtaaaatgacttaattacccttagtttttagtcggtgaagtttagagatcttgtggtaatttggtctttgcattcaaaacgctgaatcataaaaacaaaatattatgctgttaatttgactcaaattttctttgttataaagtataatctttattattattttgttcaaaagctgaagcattttttagacaaagaaagtcataacttagtagatattcaatatttaaaaaatgacattatttcctagattttgtagttaatacatttctatagagttatatattatgaatttatataaagtttttttttaacacaatgaatattatatatatatataagttttatgtatttaagtttccttttgaaggaaatgaacatacacattgtaaccgacttaaattaaattacgaaaaggtcacgtgatgtggcatgcatggatgtatatagtcaaaaagactgattaagagactgaattcatgcgaacacgtgcccaatacaaaacaaacggttagacgaacggatactcccaaagtgtttctgttcatcgaacgaaacgtatgttgctcttgttgttgttgtgtagtagtagcgaactacccggttcggtatttttttttcttctttcaaaaatattctcaacgatttcatgttttttgttttgttttattcatgttcttggtcaaacattattgatttggtttcgataaacctattcttgaggattttattatatacctttgatcaaaatacaaatgggtgactttttctttacttcatttgcttcttttttggggtgttagaaaaaaacacttaaaaaaaaaaaaataggagtgataaaacagagtttgaccatagtgtttgcgtcattgtgagtgaaaatgaatgtggtaaagtaaaaaagatttgactactagttgggagtcaattactccagaaaaagcaagtagatgaagaatcttacctccttatctcttgtatacgtgcttgtggtatttgccccaagggggggagctacaatacctctcgcattctccttttgtacaattataaaaagtgaactgtctttccaaaaaaggaaattattattatattctctcaatgtgaaaattacaatagtttatccgacttgatttcacatattttaggttttaattgttaagtttagaataataacaataatgataaatttttgaaaaagaataactaaaaataataattgatgaaattcatttagtttattcattaatttaaatcagctataagtctttttgttaaattgctaatttttatgtgttttacatgtttgtgcttttccaatatctttttgtttgaaaactttaaaagtcaataaattactcaattttctaaaaacgacaaattaaatttgtcggatgcgttaattccaacgtgtaagtactttttgatttatagataacggaattaccattatatagatcacaaagacataaaaacaaaagtacaatgtttaatccagaattttctcgttgacgaagcgtgtattcattgattatgggatctaaattgtcgtgtgtgtttataatttttttaataattaaaattattataaagtcaatttacattgttaatatgcaaatatatcaatcaaaatacacacataaatatgtggatttaaattcggatattatagtgttcaaattttttaaaaatatggaatatcgatggtcaagttatttatatatttgacccgtaaaatgtacagtaattaatttaaacgcagagagacaataaaaattaaataaaaaaaagttttgcaggtttatgtttaatttataaattgaccatcccagtaatcatttacatgatatctctctgattcttcgatttctctttctctctctctcgctctatccttctcctatctctaatctcttgtcttctctctctttctctatcgggaaaccaagcggctcttctttggatcaaaggcgaagtcaaggcggagaaagaaaagagagggtcgtgagat

SEQ ID NO: 7769 - DNA, 3000 bp, Unknown
  misc_feature (1)..( 3000): cDNA_ID_3091633_gDNA_ID_1621162_Annot_ID_57137 3000 nt of promoter + ATG
ggtggaaatgtccctgctgctggttatgaaattagaccaatcgtgcaccttcttggtgaatcttcttcatttgatataaggggtagcatctccagattactggatgaacgaagggaagtgaaagaattcctcagagaatttgacctttcatcaactatatcgactagacgccaagcttttaaggatagtctgcgaggaggagtactcaatgctcaaaacatagatatttcttttgagaacttcccatattatttaaggtaagattgcttaatattatgttacatttgtattacacatcttgctttcgatggtttgatgatttatagccaaaaatatatctaaattgtctcagtgctacaacaaagggtgttttgatgatatcgatgtatgttcatatgaacggtggaagcaagtatgcaaattttgcaacagacttgactacagcctgtccccgtatcttactctctggaccatcaggtatttctactttttgctgagtccattcctctaaacaagtttacctttgtatatataaggtctgagattcctatatttcttaccatttgaaatatttttaggctctgagatatatcaggaaatgttggcaaaagcgcttgctaaacagtttggggccaaattgatgattgttgattctcttttgttgcctggggtaatcttcttttcccctttattttttttttcatcttttagttgacagacctaagtgatctagtagaatgaggtccatgaacaggatcttgataaatacatagatacataaatcttgatccaaaaagaaaaaatcctaatagtcgagaaccaatcaggagtgtttcagcttatattactactaatgtatatacacattccaatgttgttttatttattacaatatttattgcatcttgagcaagtggatattaactggtagtgttgactttttcgtcccaaatagcttatattactacctatcacagtgtccactcggacatcggacattatttttcagcaggctcctttataagtaataggtttgttcattccggtgaattcaatgattttgtactgtttctggatggtttcagggatcaccagccagggaagctgaatcctctaaagaaggttctaggcgtgaaaggctgtctatgcttgctaaaagagctgttcaggctgcacaagtattgcagcataagaaaccgacttcaagtgttgatgctgatataacaggtggctcaacattaagctctcaggctttgccaaaacaagaagtgtcaacagcaacttctaaaagttacacattcaaagcaggcatgatgtttttcttttcatctgactgttcaacttcttttgatgtaccactcctgttttgttgaacaagcatttttatcattttcaggtgacagagttaaatttgtaggtccttcggcttctgcaatttcttctcttcaaggccagcttaggtattgtttactgtttttaaaagtcttcacatctgctgtaaatgtgtgttgtattcacaactttgctcttactttttccctgctatgtaatataggggaccggccattggttcccagggaaaagtagcccttgcatttgaagacaactgtgcttcaaaaattgggattagattcgataggcctgtacaagatggcaatgatcttggtggcctctgcgaagaagaccatggttttttttgtgctggtaatcgcgggctgttttttttctttctaactttacttaacttaaaaagtgaactttattaatattattctttgtgtgcagctagctcacttcggttagaaggttcttctagcgatgatgctgataaactcgccgttaatgaaatctttgaggtagcttttactttaagttttgtgataactacttatggcttgtagctacaggatagtaacctcttgacccataccataggtcgcacttagtgagagtgaaggagggtcattaatattgtttctgaaagatattgagaaatctcttgtggggaacagtgatgtgtatgcaaccttgaaaagcaagcttgagactttaccggaaaatatagttgtcattgcctcgcagacccagttggacagccgaaaggagaaagtaggaaactttttcagtcttctctatttctgttttggtatcttttaagttggttttaatttgcttatctgtatagttaattagagatttgatggttctttttcagtcccatcctggaggtttcttgtttactaagtttggtggcaatcagacggcactactggatctagcatttccggtatgatgacctgacttatcttgaactattttccatttcttgaaatagttgtgtacctaaataattctatcctgatggtaaggttcaccaaagtcatcttagatttggtatcttattgatgaaatgatttttcctattatctgcaggataattttggtaaactgcacgatagaagcaaagaaacacctaaatcaatgaaacaaataactcgactatttcctaacaaaatcgccatccagttacctcaggttgttaccttcattcatgatttcttgtctgggataattttatttttcctttttcttatgctccgaagatgtaataggaagaagctttactctcggattggaaggagaaacttgaccgtgacacagagattttgaaggttcaggctaatataaccagcatccttgcagtgagtatcttctaatcatgcccttagtaatataagcgttccttgtttcttttcatttttttccttttgcttatttctttgtaatgatgcctgcaggtcctcgccaaaaacaaacttgactgccctgaccttggaacgttgtgcatcaaagatcaaacccttccatctgaaagtaggcctcgttcacttgctttttctttctttattttgtcctgataacccggttgtttgactaaccaaaaactatgtgttcataggtgttgaaaaagtggttggctgggctttcggtcaccatctt

SEQ ID NO: 7770 - DNA, 3000 bp, Unknown
  misc_feature (1)..( 3000): cDNA_ID_1809482_gDNA_ID_1621162_Annot_ID_57138 3000 nt of promoter + ATG
gctatacggatttatttgttagttgttactcctacataactgaaaccaaacatatatttgatgtttaatgcagcctacgaaaggtatactgttgtttggacctcctggtactggaaagacgatgctggcaaaagcagtagcaactgaggctggcgcaaatttcatcaatatctcaatgtccagcattacttcgaaggtaactctcataaagtgatatgatttccttttatgctttcttttaatgattgtacttgaccatttacactaaatgctttgcagtggtttggtgagggagagaagtacgttaaagctgtcttctccttagcgagcaagattgcgccaagtgtcatttttgttgatgaggtatgtttgaagatattaaaaagcgttctctgttctctcccacctttgaagccagtctttttatgtactttctcgatctgatgattgtggaaaatcattattcaggttgatagcatgttgggtagacgtgaaaatccaggggaacatgaagctatgcgtaagatgaagaacgagttcatggtaaactgggatggtttaagaacaaaggatagagaacgggttctggtactcgctgccaccaacagaccatttgacctagacgaagctgttattagacggcttccccggaggtaaaaccaccacttttccctctgttgtctgttagttgtgaagaatattgcaaccattgttgatcctctcctgcatactacttctgtgcagattgatggttaatcttccagatgcaacgaacagatcaaagatcttgagcgttattctagcaaaagaagaaatagcaccagacgtcgatttagaagctatagcaaatatgacagatgggtactcaggaagtgacttaaaggtctcgactttctataaccttccctctcaatctccttcccctgtaaaaaaactcacacacgtattcttttttggttgcagaatctgtgtgtgaccgcagcacattttccaatccgagaaatactggagaaagaaaagaaggtttggtttctgtttaatgcgattgcttctcgaatcctgaagtccatttacattactcgcataactcattctttttattattctggctgttgttttgactacaggagaaaactgcagctcaggctgagaaccgtcccacaccgccattgtatagctgcacagatgttcgttccctgacaatgaacgatttcaaggctgcccatgatcaggtaagtcaagacaaagaagccaatgagtttcacatatgtgataataactttgaaaagaaagctaaatgatcagaaacatgtaggtatgcgcaagtgtgtcttcagactcgtcgaacatgaacgaacttcagcaatggaacgagctgtatggtgaaggaggatcgaggaagaagacgtcgttgagctacttcatgtagaagagagacaaaagagagagggagggagatttgttcgtttttgatctctctcgtgttcggtttttttttttgaatctcattttggtcgtttaatttataaatttgtgtacagagagaaagggtgttgttcgttttgctgtctaattcattttctttctcaacataagatgaaaaaaacattcgctgtataatctaatacatgcgtatgtatatagaggctcggatcttttaaggataaggacataattctaaatcttcaaggtgtgtgctttgagagtctttagaaaactaaatagtgcattattataaacttatgatctgatatgtctatacgtctcgtaaccaaaaccagagtatcgaaactaaagataagaaaacgaaacgaaataaagcaatttaatttacttaccattgcacaaaggcaagaagtgtttggtgccaaatgacgggtataacattcgtctccttatgaaatctaaagaagtgagtggtaaccgcatcaatcgcccgatacgccattgcatatctcttctccagaataactttgatgaagaaactgcatccacacacacaaaaacagaatgcaaccaaataaagacacacaatacctatatgtgtaagtgtaaggttagcctgcgttttaccttgttcggccataaaaattccaactccgccaaacttagcaaagcagcactgcagttcataacattagcactgcgttttattcacgcttaataacattagagagacgtttagctattgaagctccatccttggaaagcaaggcatcaagtaacttgtcttcttcctcagtggccatatcctggtaattaagttggatctgaaactcttgagattgctcatcaacatcatcatcatcaatcaaatatcttccaatccatacactgccttcttaataaaggcagtcattgggattttctgacttctatttgctgctcataggctagcttaaggatcttcggcgttagtttcacaaatccatagaatttagaaaccctatcaattccaaaatctacaaaaaggttttaaaatttcccactcaccttcctgaggaggaggctacgacgcgaatagctttacgtttccacttaatcgccattggatatagtcaagaagtagagactatgtgagattgagggaacgcaatttagcatatgaagaagaaaccctacttgactttagccctaaaatctattacgtgacccaagcggctacttgtacatctgtcataacgggcagaatattttggtctaagcccaatgagctaatatgggctttaaatcttaagtccattaacatcaaattcaatttgttcaaacgcgaaacgcaaatcgcattgtgcagctgcgtcccagtgttgaaactcttcgaactcccaaaacgcaaaagcttcgtcttcttcttcatccttgtctcaccttcgattttggcggcaaaacataaaccctaagggttttctcactctctctctctcttctcacacacacagtcccagagtacggtggtgttgattcgattgaggagattcatctgtttatagggtttagcaa

SEQ ID NO: 7771 - DNA, 3000 bp, Unknown
  misc_feature (1)..( 3000): cDNA_ID_1838830_gDNA_ID_1621162_Annot_ID_57139 3000 nt of promoter + ATG
ttctcctggaacacaagctgataatgttgaaagacatgagagagtaagtaggctattgtagttaaaaaaatgtcttagtaggatgctaattgtttgtggctatttcttttgttagtttatctcctaaaattactgttattcaaccactatatcatctacaggaacatgaaaagcctataaggtttgaagaaccaacatcagataacacactcaccaagggggatgtggaaagggtttcagaggacaatccacggtgcagtcagccactgcgatctgtggccacagtgctggattccccagctcagtcaaccggtcctaaaatgttttccacattagaatttagtttccaaaacctcaggacaaggaggttagagaggctgtcgagattgcagtccacaggttatgtatctaaatgtatgaatacgccacagcctaaaaagtaagatttctttccttcttcttttgtgtagtgtgtttctatttgcatttagagaaatgggattctttaaaatgacaactacgtctacaggtgctttgccgctgcaacattagagttatctcaaccggatgatgaagagcgaaaagcaagggctttagctgcagctacttctgagctggaaaggctttttcgaaaagaggatttcaggagaatgcaggttgctatctttttgactaagcgagcaccgaaagattgatagattaaaaaaatttcattctactctatcctggctcggtcgagaaatatatttatctgttttttctgtgtgataggtactcgggcaattcaatcttgggttcatcattgcaaaattggagcgagatctgttcattgtggatcaggtgagtcttcatatatgcatgcttccagagcccttttttcctccttcgatttgtttagttattggttgagttgtggaaaatggaagtttctatcatttcagagttcttccctagtctgatttttgaagaaatggtatagactagtgattgaattttatggccagcatgcagctgatgagaaattcaacttcgaacatttagcaaggtcaactgtcctgaaccagcaacccttactccagtgagtttctttgtgagatcaatctagattcttgatttcattacactgctttcactttttcacatcaaattccccggcggcattcttttatgtcccatgttactttagctatacttgaaccagtagtaatacctcttttccactactctatatgttacccatatttatctatttttttcctaaactcaggcctttgaacttggaactctctccagaagaagaagtaactgtgttaatgcacatggatattatcaggtgaaggatcaccattacttcttttgtaacattttcttattcttgctatcggtttggagattcaataatgtaacaactttccagggaaaatggctttcttctagaggagaatccaagtgctcctcccggaaaacactttagactacgagccattccttatagcaagaatatcacctttggagtcgaaggtagtttttctgtacctctgctgcatcaaatgtcttttgcattacatgttaatatttactttattgttttgggcagatcttaaagacctgatctcaactctaggagataaccatggggaatgttcggttgctagtagctacaaaaccagcaaaacagattcgatttgtccatcacgagtccgtgcaatgctagcatcccgagcatgcagatcatctgtgatgatcggagatccactcagaaaaaacgaaatgcagaaggtaaccaatgcttaccctaagataaacaacaatgtcccttgatagctaacgatggaatccatctctattaaattcaacttgaattgtaaaacacattcttctgcatatgttaacgcttttgtcatttgggttttggtcagatagtagaacacttggcagatctcgaatctccttggaattgcccacacggacgaccaacaatgcgtcatcttgtggacttgacaactttactcacattacctgatgacgacaatgtcaatgatgatgatgatgatgatgcaaccatctcattggcatgaacactcaaaagtcttaacgtatttagatgtgagaatccttaagattaacattgaggaacactcggttataactacaatcgtaaatgtaaattgtcttagtctatatgatctttttggtcacaacaggtaatttcattttcctttgattacttctcgtgaaaaaacaaattaacagttgtggttttccattgatttcaaaaattatctcaaattttggctaaaaaaagaaaaagaaaagagagatgcttcagaatcagaagagaacagtccacttaaaagtcttaaaccctaaaatgaaatccttccatctaaaacgcagtaaacgtcaccgtttgattcttcgtgacccacctaactacgatacactagcttgtagaggataaatgctccgagccctataaacacaaactatgtggagctactaaaggagaagtctttctctctcgatcaagccaagtaaaaaaaaaatcctaatctttgcgtcaccgttcgtgtttcctcttctctctagggttctccttcaacagttttccagtaaacatgaggtaacaaataagaaatcctttttctcttctctctagggatctttacctaaactcttcccttcgataaatcgtgcttctcagattcatttcgtgcttttgttgctttgttcacttcaatttttcatttttactcatgggtttctctgggaatcttggtttcttttttcaatcggttgatttagtgctacgctttcattggattcctgatgactgctgaaaaaaattttagggttttaaattggggttagggtttattgtgttgggtaccggaatttctctgtacattatagccagcaattgtttctgaatatatctgcatcaatctcttcttgtttagacctgaatcttagagcagttggatttagggtttagggttt

SEQ ID NO: 7772 - DNA, 3000 bp, Unknown
  misc_feature (1)..( 3000): cDNA_ID_1809467_gDNA_ID_1621162_Annot_ID_57144 3000 nt of promoter + ATG
acaaagaattattggtctgacagaaaggagtttatcccacatcccaagtcctatacatggctcgaaatggattacggaaaagaggaaaatgattcaccggtgagtgttttggaatcctcacttctctttctcttcttactatttgttgtgtggtatgatccaagggatctgctggaatgaggtttttgagtgcatatctacttttctttttcccgtttaattgcaattatatattttttttctcttcgttcaaatgtgcactttactcagagttcacgattgttttttttctcaggtcaataatgatattccgagttcatcttccgaagttaaacctgaacaatcaaaactagatactcgggttgccaagttcatctctcttatatgtaatgtcagcatgatggcacagcatatgatggaaataggtttgagtctaactttgatcacttcattcaagtgagagcatccattggcagattaacagtgatttttatatgtcgatacattatctctttgttttggtgtcctattacctgcgtttgtacttcctatcttttgtcctatccatttgtttgccattttgctggtttctttacttcttgctgatttttcatacatcttctaaatttggaattgaaggatataacgctaacaaattgccactcggcaagataagcaagtccacaatttcaaaggtaaagatagtaaacagtctgtttggtctcatttccgtaaattatagtttggtgtgatttcagatgatataatctcctcttccacatgtctagggttatgaagtgctgaagagaatatcggaggtgattgatcggtatgatagaacgaggcttgaggaactgagtgggtatgtatctggttaattgctagacaatttttcgcatttagttgattatgtaactgtttcccataaagaaattagatttgaactagtctaactttgtttatcattgatgcagagagttctacacagtgatacctcatgattttggttttaagaaaatgagtaagttcatctgtgctaaggtttacgatatatataactaaacattcactaacatctgaattccgagctgtaacaggccagtttgttatagacactcctcaaaagttgaaacagaaaattgaaatggtaatttttcctactgtttccttacttgactagttttggtcttcagaaaagcaatggtttgtcgctacatgttttgtgtagtttttaatatatcgtttttttgtaaggttgaagcattaggtgagattgaactcgcaacaaagttgttgtccgtcgacccgggattgcaggtaattcagtcagtctatgtggtttgaaggcatgaaatcactccgtcgtatagttctctaagaatatgacattattttttgcaatggctgtaggatgatcctttatattatcactaccagcaacttaattgtggtttgacgccagtaggaaatgattcagaggagttctctatggtaaattttcggttttgtgaactttgaacaaatatctttgatactcgagcatctcaaacatgtctgtgttttaaaccttttggtgtttactccttaaaaccaaaatcaggttgctaattacatggagaacactcatgcaaagacgcattcgggatatacggttgagattgctcaactatttagagcttcgagagctgttgaagctgatcgattccaacaggtatgttatggtatttcgagcttgtcagtaccatacacattattctgatttctcgtttttggcattgtgagactttaatttttcttggcagttttcaagttcgaagaacaggatgctactctggcacggttcacgtctcactaactgggctggtattttatctcaaggtaacatgttactctttttcctcttagtaactactttttttcttctcctcttgggggattttcaattgcatagtaaaatgaacaactatgagacaccaagcaggtctgcgaatagctcctcctgaagcgcctgtaactggttacatgtttggaaaaggggtttactttgcggatatgttctccaagagtgcgaactattgctatgccaacactggcgctaatgatggcgttctgctcctctgcgaggtatactcgcttcttgtctctattcatatagaaaacaacaaaactactgtataactacaggacctctatagccattcaacataactatccttatgtttcctaacgataaaaacttctctaggttgctttgggagacatgaatgaacttctgtattcagattataacgcggataatctacccccgggaaagctaaggtatgaagataatctcattcatatttcacacaagttccttatctcaaaccgcaatgaattatgatttactatttttgtactgtaccttgatttgttatttgatggttgcagcacaaaaggtgtggggaaaacagcaccaaacccatcagaggctcaaacactagaagacggtgttgttgttccacttggcaaaccagtggaacgttcatgctccaaggtttttgtttttgtcttgcttcaacacacattcacaaaatctaactctctcaaatttcataaactgactttatataacttttgcaggggatgttgttgtacaacgaatatatagtctacaatgtggaacaaatcaagatgcgttatgtgatccaagtcaaattcaactacaagcactaaaacttatgtatattagcttttgaacatcaactaattatccaaaaatcagcgttttattgtatttctttcaaactccttcatctctgattttgcacggttcactcgtatattggtacgctaaaccgcaaaccatacccaattttatccggtttagttggtatgattgagaaattcttattctctgaaactcgattttattagtatttaagcgaaagagaagaaaccctacgaaaatctcaatcggaaactaaacggcaaaaaaaaaaaaaagcagaggcagccatg

SEQ ID NO: 7773 - DNA, 3000 bp, Unknown
  misc_feature (1)..( 3000): cDNA_ID_1809463_gDNA_ID_1621162_Annot_ID_57145 3000 nt of promoter + ATG
attctggcctttgagtcttttgacccataattagctttgctttttttatataattaaagtcaaaattggactttttttttttgtttaaatatagttagattttaaatgtgtgatttacaaggggaaattaatgttttatgtcaaacaaaaaaaatcaatgatttatttgaaaaatgcaaactttcagagttattatccaatatttttagttgaataatattttttctgttctttattatttaattttttagaaaaaaatttgtttcaaaaagttaatttttaaaaagtttttatgcattatttattagttattattgataatttgtaaactttaagataaataattgaatattattagtttaaagttataaaaaaatataaattacaaaaattaatatatttatgattagttttaatatatttttttaatctgtgtttttttttagaaaattaattataaatttaatacgatttaaataattcggttatattttgaaaattgtaaaattaaatcttagtaaaaccgttgaaaatttgtgtttcaacttattttccattactttctaattataacgtattacaaaaaaaaaattgtattatacgaacggttcaatgattgatgctcatctactataagtagacgtgtgtaaagtaggcaaagtgaggttcgaattataaaatgtgtttaagcatgtcaagatgccatttgttaaaagtttattgactaacttgcgtgtactagccgtccatctacaatacaaaaatatgttatagcctacaataaatgatagtatgaaaaattaaatagcactatgatattttgaggcggtggagtttctattgattggttatcgatgaccacttgcatcgtcaaatggttctttgattcgtggtttcggccccagcttcatactatcacgagactcgaccatcttgtttttttcttcttcttcttggtaaatggtttcacaacttggttcctctttctttcattttattttatatactatcatagcattttggttggatttctcgagatagtatattttttagttactatcattacataagtatattttaaaaaactaattatatgaattatgtagctaactagatagataatcgtataaccaattcatgttagtatagtatagtttaagtatgtattttgggattacaagtgtggttggcatcaagacaaggatggtgatagcctttctctgtaatttggtttaagaaaagtttttgcattttatgtataaacgtgttttttttttataatttaaaatttcaacaaaaaacaattttttttaataatgattgaccactatagacaatttaaatgataaaaaaaacccccaatttttcacaatgttttggagattagtctagattttttgtccaaattttccgattgtaagaattaagaagcaatgaacatttgtgttaagcttaatgatttgtactcacaatatcttttaaatttaaaattgttaaccaaaatatcctatatattgtacttgtaatagaaatataaactattaaaaacaacactttattcatataatataagttaaaacatatgttttttttagtatgttctaatcacacctattaaaaaaagttgaagctaaatgagccaaaaagaaaaataaagataggggatggggacaggctgtaatgttaggcggttggtatatgaactgagaacatgtctgttggttcggtccatctacaccactcaaccatttggctatgttttctttttggcttttgcatgttctctctacttttcttctttggtcaaaatctctatctcgtcttttacatggcttacccgaatgttagttgtcatgtaaatttggttatgaaaagatattttatataaactttatcgtatattaatatcgttatcatctaaccattttttaaaactaaactagaaccatccagttttacaagagtttttttttttttttttctaactaaataatatttgaagtgtacaatattaacaatatatgggccaaataatagtggaaaccaaatcgttagtcccactttatgatgggcctgttgattcttatgtcttcttcgtaagttgtgattatgcagattacgggctaataaacatgcatgtttagtttttactgtccaagtaacgaaattttatcttttgggttgttggcccatttcatatattccaaatgccaaatccagcccggctcgacacagcactgctcggctcaacactcgtatgcggttggtagccacttaagaccttggtttgattaacatgttacgaataatttgtgtccctttttcttcaaggagactaatctcttttaataaaaaagaattgtgtcattagtcaacacaagtcctataatccgtttacggtaatttgtatgcacgtccttggaaaagtgagtagtggcgtagcattacagccaaaaactatttgtatatttttcttttcgttaaacaaccagcaaaattttcagaaaaatgttcttaaattataaattagtagtacattttaaaacatagagattttttgtttcttttaatagaagagttaaacctatgtacaaaatttcaactccttttcaaagtatttgcctgttactagatttttaacctttttttttttatctttcatgattttctattgcttgccatcatcaatggtaggaaataaatactattttaaaaaggtcaggggtggatttaagaatcaatccaaaagtttggggtcttttggagattaaaaagttatatgggaaatatccacaaatatgaacgagaacttttgtcaaaaaaatttaaaataatttttcaaaaagccctaaagctttcaagggaagccatcgatgaagaagaaaacgaagaagaagactcttcaaatgctcgcgcgaactcacttctgacgaaaaccatacttcctcagtctcattccctttccgacgaactattctcctgaagaagaagacgaaaatg

SEQ ID NO: 7774 - DNA, 3000 bp, Unknown
  misc_feature (1)..( 3000): cDNA_ID_1809460_gDNA_ID_1621162_Annot_ID_57146 3000 nt of promoter + ATG
ggagttcgtcgactttgagcttgttcgccattttcgtcttcttcttcaggagaatagttcgtcggaaagggaatgagactgaggaagtatggttttcgtcagaagtgagttcgcgcgagcatttgaagagtcttcttcttcgttttcttcttcatcgatggcttcccttgaaagctttagggctttttgaaaaattattttaaatttttttgacaaaagttctcgttcatatttgtggatatttcccatataactttttaatctccaaaagaccccaaacttttggattgattcttaaatccacccctgacctttttaaaatagtatttatttcctaccattgatgatggcaagcaatagaaaatcatgaaagataaaaaaaaaaaggttaaaaatctagtaacaggcaaatactttgaaaaggagttgaaattttgtacataggtttaactcttctattaaaagaaacaaaaaatctctatgttttaaaatgtactactaatttataatttaagaacatttttctgaaaattttgctggttgtttaacgaaaagaaaaatatacaaatagtttttggctgtaatgctacgccactactcacttttccaaggacgtgcatacaaattaccgtaaacggattataggacttgtgttgactaatgacacaattcttttttattaaaagagattagtctccttgaagaaaaagggacacaaattattcgtaacatgttaatcaaaccaaggtcttaagtggctaccaaccgcatacgagtgttgagccgagcagtgctgtgtcgagccgggctggatttggcatttggaatatatgaaatgggccaacaacccaaaagataaaatttcgttacttggacagtaaaaactaaacatgcatgtttattagcccgtaatctgcataatcacaacttacgaagaagacataagaatcaacaggcccatcataaagtgggactaacgatttggtttccactattatttggcccatatattgttaatattgtacacttcaaatattatttagttagaaaaaaaaaaaaaaaaactcttgtaaaactggatggttctagtttagttttaaaaaatggttagatgataacgatattaatatacgataaagtttatataaaatatcttttcataaccaaatttacatgacaactaacattcgggtaagccatgtaaaagacgagatagagattttgaccaaagaagaaaagtagagagaacatgcaaaagccaaaaagaaaacatagccaaatggttgagtggtgtagatggaccgaaccaacagacatgttctcagttcatataccaaccgcctaacattacagcctgtccccatcccctatctttatttttctttttggctcatttagcttcaactttttttaataggtgtgattagaacatactaaaaaaaacatatgttttaacttatattatatgaataaagtgttgtttttaatagtttatatttctattacaagtacaatatataggatattttggttaacaattttaaatttaaaagatattgtgagtacaaatcattaagcttaacacaaatgttcattgcttcttaattcttacaatcggaaaatttggacaaaaaatctagactaatctccaaaacattgtgaaaaattgggggttttttttatcatttaaattgtctatagtggtcaatcattattaaaaaaaattgttttttgttgaaattttaaattataaaaaaaaaacacgtttatacataaaatgcaaaaacttttcttaaaccaaattacagagaaaggctatcaccatccttgtcttgatgccaaccacacttgtaatcccaaaatacatacttaaactatactatactaacatgaattggttatacgattatctatctagttagctacataattcatataattagttttttaaaatatacttatgtaatgatagtaactaaaaaatatactatctcgagaaatccaaccaaaatgctatgatagtatataaaataaaatgaaagaaagaggaaccaagttgtgaaaccatttaccaagaagaagaagaaaaaaacaagatggtcgagtctcgtgatagtatgaagctggggccgaaaccacgaatcaaagaaccatttgacgatgcaagtggtcatcgataaccaatcaatagaaactccaccgcctcaaaatatcatagtgctatttaatttttcatactatcatttattgtaggctataacatatttttgtattgtagatggacggctagtacacgcaagttagtcaataaacttttaacaaatggcatcttgacatgcttaaacacattttataattcgaacctcactttgcctactttacacacgtctacttatagtagatgagcatcaatcattgaaccgttcgtataatacaattttttttttgtaatacgttataattagaaagtaatggaaaataagttgaaacacaaattttcaacggttttactaagatttaattttacaattttcaaaatataaccgaattatttaaatcgtattaaatttataattaattttctaaaaaaaaacacagattaaaaaaatatattaaaactaatcataaatatattaatttttgtaatttatatttttttataactttaaactaataatattcaattatttatcttaaagtttacaaattatcaataataactaataaataatgcataaaaactttttaaaaattaactttttgaaacaaatttttttctaaaaaattaaataataaagaacagaaaaaatattattcaactaaaaatattggataataactctgaaagtttgcatttttcaaataaatcattgattttttttgtttgacataaaacattaatttccccttgtaaatcacacatttaaaatctaactatatttaaacaaaaaaaaaaagtccaattttgactttaattatataaaaaaagcaaagctaatt

SEQ ID NO: 7775 - DNA, 3000 bp, Unknown
  misc_feature (1)..( 3000): cDNA_ID_1809512_gDNA_ID_1621162_Annot_ID_173737 3000 nt of promoter + ATG
aatgcgttagttgagagtatctataaataattgaccctttttcattttaggataatgttttaatttaaataagttataccaatctaaaatcagcaaaaagaaaacaaaacatactataataaaattttcggaaacacaaataccatgaacatgcaagtgcaactaaacaaatgttttattatattaagttaacgtcacagtcaagtctttgggtcagaatccatcgttctcggacagtctgcgtttttaccgtttacgcattttccatagcattccatagtctttgggtcagaatccatcgttaccgtttacctatattaagtttactgtattctccaaccaacaccatattttattaaaaaaaaatttatttacatatattacaaaaccatattaaaaattaaatataaatatattacttttttgttaaaaaaaaataatatatatattacttttgtgatatataattttttataattctaaccaatagtattcaataaatttttgtgaagtttacaattctttaagaataactaataaatattgataaaagtactgtacttatctttttgaaacaacaaaattcctaaaaaaacaatactgtaacaaggagcagaaaagtattatattaaatcaaatactaacaaaataatagctagtatttgataactagtttgtttagtaatacaaacaaaaaaatgttaaatgaaatgcaaaactctttaccattttacgatttttgaaacaaactttttttttactataaaatacaatactgtaacaaaaacaaagggagtattatattgaatcaaaatacaaacaaaataatagctagtctttgataactagttagtaacacaaacaaaaaagtgtaaaaccaactgcaaaattctttacgattttaaatgcaacatcttaaggtggaccatgatggatgattcatgagtcttgactcttcttgaggctcaattatttgggcgtgttgaccaaaaaattgttccattgaaacaattttttctatatcctcatcaaatacatttttaaaatatgttgacaaaaaaaaaaagagaaaaatgcgtactataaatttatgagatctcagtctattaaacaaagaaaaatgttacatctccaactttacaaaaagctgattttatttcttctcatatttttctactggaaatgcaggtgtgttaatgataagtatgtgtagtaaaaattcaaacacaaaaatgatttatgataatgcattgtagattcacatattataaaggtgtaataattgaacaaattaggctcaatcctagtaacggaagcacttgctcttcgcaatgcccttaaaatggcagccgatcaatcggatatagcctctttcacggtattgttggactctcaagtcttgatctcacttatcaatgctaagaaatatctttcaaatctcaaagaaaatcatccatgatattgcttcgttttgtaattctttcgcttctatctctattgcttatgtcccaaagtcgtccaatactttagccgactccttagttaagtcagtccttgtggcttttacttcctcctcccctccaagaatgtaacactctctgtcttttagcaatgcaagttcggtttgaacaaaaacaaattatcacaaaatgccaaaaaatgaaagacaattaatttataattaggctcataagtcaaatagccaataacttgccccatacctaagatagttactttaggcgaaacgacggagaatttaaggacaattgactatagaaaagactctatattatactattcacagtgtcccaaatatatataaattgcctaacacattgccaccgtcgttgacaagttttcttagattcaaaatttagtacatagtatatattatataatttataaacctaagaaatgaaggaaggtggatcttaatatgtataattaatagaggcaagacatgaaggaagatggatctttaccaaaaacagctgggcagctttgaaaatgcaatgttcgatgataataatatctcaataacaaacaacgcgtttttatctcagaagactccaatatattgacttggaaccactaaaagtcgcattattattgttttgttatatatatatataatcccaaaaagtaaacaaacaaaaaataaaatacaaactattgcggaacaatacaatatatatatatatatatatgtaattcttattgattcaattttgaaagaaatttctttgtctatatattattttgatgtttttgtgtttaacctcatgaatagagagataattctccggcttggtaaacaaatacgttggattgtttttttacaaacaaaatctcaatatatttctaactttagccctacgaaccaaactacaggtcaataaacgacgtgaaatcaagctaaatggcaaattattagaattagtccgaataataaacaaattcgtctaaaattgtagaaaattttgggatctaagaatgagactacatcatttttttttatcaacaactacatcattttaaaccaaacttagaattgttaggtctcaaacttctaacaccgatttgctgcaaaaacaattatggatcggatcaagatatagagaggatttcacatttgacttctattgcttactcattccaaaagacggtttggtctagtttttgaaatttaaccaatcttgaaaatacggaatttgtaatgtactttacaaaaattgtatatgctaattataattttgtgatctcaaatattcatgtttatatgataagataagagataacatgaatgcattattatataataccatagaagatagaatgtatacagtctcaaaataacaaaatttaatacggacccacatcccaaacctctcccactctatatatttggtctctataaaacccactaaacctaaacttttccaaaatcataccaaaaaaacatttagtaacatcaaaatttacaaaaaacaaaaaaacatg

SEQ ID NO: 7776 - DNA, 3000 bp, Unknown
  misc_feature (1)..( 3000): cDNA_ID_1809460_gDNA_ID_1621162_Annot_ID_173732 3000 nt of promoter + ATG
ttatttcctaccattgatgatggcaagcaatagaaaatcatgaaagataaaaaaaaaaaggttaaaaatctagtaacaggcaaatactttgaaaaggagttgaaattttgtacataggtttaactcttctattaaaagaaacaaaaaatctctatgttttaaaatgtactactaatttataatttaagaacatttttctgaaaattttgctggttgtttaacgaaaagaaaaatatacaaatagtttttggctgtaatgctacgccactactcacttttccaaggacgtgcatacaaattaccgtaaacggattataggacttgtgttgactaatgacacaattcttttttattaaaagagattagtctccttgaagaaaaagggacacaaattattcgtaacatgttaatcaaaccaaggtcttaagtggctaccaaccgcatacgagtgttgagccgagcagtgctgtgtcgagccgggctggatttggcatttggaatatatgaaatgggccaacaacccaaaagataaaatttcgttacttggacagtaaaaactaaacatgcatgtttattagcccgtaatctgcataatcacaacttacgaagaagacataagaatcaacaggcccatcataaagtgggactaacgatttggtttccactattatttggcccatatattgttaatattgtacacttcaaatattatttagttagaaaaaaaaaaaaaaaaactcttgtaaaactggatggttctagtttagttttaaaaaatggttagatgataacgatattaatatacgataaagtttatataaaatatcttttcataaccaaatttacatgacaactaacattcgggtaagccatgtaaaagacgagatagagattttgaccaaagaagaaaagtagagagaacatgcaaaagccaaaaagaaaacatagccaaatggttgagtggtgtagatggaccgaaccaacagacatgttctcagttcatataccaaccgcctaacattacagcctgtccccatcccctatctttatttttctttttggctcatttagcttcaactttttttaataggtgtgattagaacatactaaaaaaaacatatgttttaacttatattatatgaataaagtgttgtttttaatagtttatatttctattacaagtacaatatataggatattttggttaacaattttaaatttaaaagatattgtgagtacaaatcattaagcttaacacaaatgttcattgcttcttaattcttacaatcggaaaatttggacaaaaaatctagactaatctccaaaacattgtgaaaaattgggggttttttttatcatttaaattgtctatagtggtcaatcattattaaaaaaaattgttttttgttgaaattttaaattataaaaaaaaaacacgtttatacataaaatgcaaaaacttttcttaaaccaaattacagagaaaggctatcaccatccttgtcttgatgccaaccacacttgtaatcccaaaatacatacttaaactatactatactaacatgaattggttatacgattatctatctagttagctacataattcatataattagttttttaaaatatacttatgtaatgatagtaactaaaaaatatactatctcgagaaatccaaccaaaatgctatgatagtatataaaataaaatgaaagaaagaggaaccaagttgtgaaaccatttaccaagaagaagaagaaaaaaacaagatggtcgagtctcgtgatagtatgaagctggggccgaaaccacgaatcaaagaaccatttgacgatgcaagtggtcatcgataaccaatcaatagaaactccaccgcctcaaaatatcatagtgctatttaatttttcatactatcatttattgtaggctataacatatttttgtattgtagatggacggctagtacacgcaagttagtcaataaacttttaacaaatggcatcttgacatgcttaaacacattttataattcgaacctcactttgcctactttacacacgtctacttatagtagatgagcatcaatcattgaaccgttcgtataatacaattttttttttgtaatacgttataattagaaagtaatggaaaataagttgaaacacaaattttcaacggttttactaagatttaattttacaattttcaaaatataaccgaattatttaaatcgtattaaatttataattaattttctaaaaaaaaacacagattaaaaaaatatattaaaactaatcataaatatattaatttttgtaatttatatttttttataactttaaactaataatattcaattatttatcttaaagtttacaaattatcaataataactaataaataatgcataaaaactttttaaaaattaactttttgaaacaaatttttttctaaaaaattaaataataaagaacagaaaaaatattattcaactaaaaatattggataataactctgaaagtttgcatttttcaaataaatcattgattttttttgtttgacataaaacattaatttccccttgtaaatcacacatttaaaatctaactatatttaaacaaaaaaaaaaagtccaattttgactttaattatataaaaaaagcaaagctaattatgggtcaaaagactcaaaggccagaattgacgcagccgtttatgagaagtgagaagacaatttcggagtcacttcctttatttcctctcttccttcactctctcctatataaaccttcctctcctcttcctctcttctcatctcttcaaaccattttcgaaagccttgagagagagaacacagacgataccaactttcttcaatctcgttgccgcagtataattatctcattcctcggatatatctctccttctgcggcggcgacaagaagctacaagaataaaaagtctgttttctctcttttcaagaaaccacttacttcgaaa

SEQ ID NO: 7777 - DNA, 3000 bp, Unknown; identical to SEQ ID NO: 7772
  misc_feature (1)..( 3000): cDNA_ID_3091656_gDNA_ID_1621162_Annot_ID_173730 3000 nt of promoter + ATG

SEQ ID NO: 7778 - DNA, 3000 bp, Unknown
  misc_feature (1)..( 3000): cDNA_ID_3046694_gDNA_ID_1621162_Annot_ID_173724 3000 nt of promoter + ATG
cgaagaaaggggaaggttctttatcagtccatgatgtaactcaccttgacaagacacctagcaaaggtttgcctcagttaaatgtgactgagaaagttactgatgcaagtaaagacttgagcagccgctctagctttgcccagtcaactttgaatacttttgttaccatgggaaaaagaaaacatgaaaacataagcaccatcctctctgaaacacctgtcctcagaaaccaaacttctagttatcgtgtggagaaaagcaaatttgaagttcgtgccttagcttcaaggtgtctcgtggaaggcgatcaacttgatgatatggtcatctcaaaggaagatatgacaccaagcgaaagagattctgaactaggcaatcggatttctcctggaacacaagctgataatgttgaaagacatgagagagtaagtaggctattgtagttaaaaaaatgtcttagtaggatgctaattgtttgtggctatttcttttgttagtttatctcctaaaattactgttattcaaccactatatcatctacaggaacatgaaaagcctataaggtttgaagaaccaacatcagataacacactcaccaagggggatgtggaaagggtttcagaggacaatccacggtgcagtcagccactgcgatctgtggccacagtgctggattccccagctcagtcaaccggtcctaaaatgttttccacattagaatttagtttccaaaacctcaggacaaggaggttagagaggctgtcgagattgcagtccacaggttatgtatctaaatgtatgaatacgccacagcctaaaaagtaagatttctttccttcttcttttgtgtagtgtgtttctatttgcatttagagaaatgggattctttaaaatgacaactacgtctacaggtgctttgccgctgcaacattagagttatctcaaccggatgatgaagagcgaaaagcaagggctttagctgcagctacttctgagctggaaaggctttttcgaaaagaggatttcaggagaatgcaggttgctatctttttgactaagcgagcaccgaaagattgatagattaaaaaaatttcattctactctatcctggctcggtcgagaaatatatttatctgttttttctgtgtgataggtactcgggcaattcaatcttgggttcatcattgcaaaattggagcgagatctgttcattgtggatcaggtgagtcttcatatatgcatgcttccagagcccttttttcctccttcgatttgtttagttattggttgagttgtggaaaatggaagtttctatcatttcagagttcttccctagtctgatttttgaagaaatggtatagactagtgattgaattttatggccagcatgcagctgatgagaaattcaacttcgaacatttagcaaggtcaactgtcctgaaccagcaacccttactccagtgagtttctttgtgagatcaatctagattcttgatttcattacactgctttcactttttcacatcaaattccccggcggcattcttttatgtcccatgttactttagctatacttgaaccagtagtaatacctcttttccactactctatatgttacccatatttatctatttttttcctaaactcaggcctttgaacttggaactctctccagaagaagaagtaactgtgttaatgcacatggatattatcaggtgaaggatcaccattacttcttttgtaacattttcttattcttgctatcggtttggagattcaataatgtaacaactttccagggaaaatggctttcttctagaggagaatccaagtgctcctcccggaaaacactttagactacgagccattccttatagcaagaatatcacctttggagtcgaaggtagtttttctgtacctctgctgcatcaaatgtcttttgcattacatgttaatatttactttattgttttgggcagatcttaaagacctgatctcaactctaggagataaccatggggaatgttcggttgctagtagctacaaaaccagcaaaacagattcgatttgtccatcacgagtccgtgcaatgctagcatcccgagcatgcagatcatctgtgatgatcggagatccactcagaaaaaacgaaatgcagaaggtaaccaatgcttaccctaagataaacaacaatgtcccttgatagctaacgatggaatccatctctattaaattcaacttgaattgtaaaacacattcttctgcatatgttaacgcttttgtcatttgggttttggtcagatagtagaacacttggcagatctcgaatctccttggaattgcccacacggacgaccaacaatgcgtcatcttgtggacttgacaactttactcacattacctgatgacgacaatgtcaatgatgatgatgatgatgatgcaaccatctcattggcatgaacactcaaaagtcttaacgtatttagatgtgagaatccttaagattaacattgaggaacactcggttataactacaatcgtaaatgtaaattgtcttagtctatatgatctttttggtcacaacaggtaatttcattttcctttgattacttctcgtgaaaaaacaaattaacagttgtggttttccattgatttcaaaaattatctcaaattttggctaaaaaaagaaaaagaaaagagagatgcttcagaatcagaagagaacagtccacttaaaagtcttaaaccctaaaatgaaatccttccatctaaaacgcagtaaacgtcaccgtttgattcttcgtgacccacctaactacgatacactagcttgtagaggataaatgctccgagccctataaacacaaactatgtggagctactaaaggagaagtctttctctctcgatcaagccaagtaaaaaaaaaatcctaatctttgcgtcaccgttcgtgtttcctcttctctctagggttctccttcaacagttttccagtaaac

SEQ ID NO: 7779 - DNA, 3000 bp, Unknown; identical to SEQ ID NO: 7770
  misc_feature (1)..( 3000): cDNA_ID_3091641_gDNA_ID_1621162_Annot_ID_173723 3000 nt of promoter + ATG

SEQ ID NO: 7780 - DNA, 3000 bp, Unknown; identical to SEQ ID NO: 7768
  misc_feature (1)..( 3000): cDNA_ID_3091633_gDNA_ID_1621162_Annot_ID_173721 3000 nt of promoter + ATG

SEQ ID NO: 7781 - DNA, 3000 bp, Unknown
  misc_feature (1)..( 3000): cDNA_ID_3046702_gDNA_ID_1621162_Annot_ID_173718 3000 nt of promoter + ATG
accacaagcacgtatacaagagataaggaggtaagattcttcatctacttgctttttctggagtaattgactcccaactagtagtcaaatcttttttactttaccacattcattttcactcacaatgacgcaaacactatggtcaaactctgttttatcactcctatttttttttttttaagtgtttttttctaacaccccaaaaaagaagcaaatgaagtaaagaaaaagtcacccatttgtattttgatcaaaggtatataataaaatcctcaagaataggtttatcgaaaccaaatcaataatgtttgaccaagaacatgaataaaacaaaacaaaaaacatgaaatcgttgagaatatttttgaaagaagaaaaaaaaataccgaaccgggtagttcgctactactacacaacaacaacaagagcaacatacgtttcgttcgatgaacagaaacactttgggagtatccgttcgtctaaccgtttgttttgtattgggcacgtgttcgcatgaattcagtctcttaatcagtctttttgactatatacatccatgcatgccacatcacgtgaccttttcgtaatttaatttaagtcggttacaatgtgtatgttcatttccttcaaaaggaaacttaaatacataaaacttatatatatatataatattcattgtgttaaaaaaaaactttatataaattcataatatataactctatagaaatgtattaactacaaaatctaggaaataatgtcattttttaaatattgaatatctactaagttatgactttctttgtctaaaaaatgcttcagcttttgaacaaaataataataaagattatactttataacaaagaaaatttgagtcaaattaacagcataatattttgtttttatgattcagcgttttgaatgcaaagaccaaattaccacaagatctctaaacttcaccgactaaaaactaagggtaattaagtcattttacaaaaaagaagaaaaaaagacggagatatataaaaatgtgacacgtttaggcacttttagataatcttattcttttttatgcacttatgagggtgaggacactttttccattatttgactttttttaagacatttttacccctaacttaaacaactacttttattttgaattttaacacaaattaaatattttttctctcttccacgatccttacgcaaaatagaaaaaaagatctctctctctctctctttctctctctcacatttgtagtgcctttctctctccacgtctccataacttctaggtttgattcctcttatcgattatgacggcggctcactaaaaattggtgataacgattctgcaaataaatgggagaagtttcttaaacaattcgatctcgattatctcaggaatttggtaaaaaattttggtatccataataacaagtccatttaaatatatccattcagaaacctttttactgatccatatccaatctatataccatgtcaataataacaagaaattcgattaaccgtggttcgtatagaaaccaaagttccatgtccataagatcttgaaggtggaggtctctccaaactgaaagaaaaatcaacaaataattttttggtatctataataacaagtccatttaaatatatccattcagaaacctttctactgatccgtatccattctatataccatgtcaataataataggagattcgattaaccgtgttttgtaaagaaaccaaagttccatgtccataaggttttgaaggtggaggtctctgcaaactgaaagaaaaatcaacaaacaattttttggtgtccataataacgaatccatttaaatatatccattcggaaacctttttactgatctatatccattttatataacatgtccatgataacaggagattcgattaactgaaatctcgatgctacgtagatgaaacgagtttgacacatgagagagaacaaaaatcaaatcaagccgccattgttgaagatgaagaagtttcttctcattttttacaaagatgaaaagagagagaggtgaagagagagagagatgaagagagagagagatgaagagagagagaaagagagaaaacgtgggttaagagaatattttagttaagagggtattttagtaaaaaaacatagagaaaatgcctaatcttttgaaagtgcctaaaaacggaaataattttaataaaatgtttaagagtgtaatattctctatataaaatcgtaaattttgtatttttaatcatcaattcataaatcttccaaattagaatggggacaatggttctaccatggcagggcttcatatccagggaagtgagcaacttatgtaactcaagaaggaacgagctgactcttggagggttagtgacattctttggtgagaaaattcccagtggtctcaaactcgagaaacagatcgcactcggaaaatgagtcgtcctcgtgggaaatgtaggcaccacacggtcagaagaagactcatcttatgaaggaaacctcgagctcaggcttagggaagctgatttcccaataggccaaaaccaaccgcatatgggagtgtctctaaaaaattcgaaagatgatttaacagtcacagccaatctacgacatcaagtctctgtgggaagacagacaaaggtaacaacttttgtaagtcttgacagcaagaggaccgggtgtttcactgtccgaacaaacagctcagatcagttgcagattgctgtcatggctctgcttctccttgccatgtgatgtcaacctacatgaagatttttcgatcagaggaaagaactgatattaatctttaggattaggttgttttaattacgttcttgccaaatttgatttgattttatggaattaattgtaaaagacttggggctatttatatgaaagtttcgtgattttcattgataagtaggtcgtcaaagaaatagagaagaagcccaaaaaaataaaataatg

SEQ ID NO: 7782 - DNA, 3000 bp, Unknown
  misc_feature (1)..( 3000): cDNA_ID_1809454_gDNA_ID_1621162_Annot_ID_57149 3000 nt of promoter + ATG
tatttgacttactataaagtttttgttctaaagtattactaatttattttttcaataataccacaatttttatataaaatctattcaaccaaaataaatttgaaataaatttaaaatataaaatttggatattctatttctaatttagggtatatatttcaaccatttaaaagaaattttgattcatttgaatattagtttatggtattatatttggtttctaattttcaatttagggtatatatttttactatttttctaaaaaattgactcaatttaatattaaattagtgtttgctcttaattttattttctattttatattttcattaaatttaattaaagtttatagtgttagtttgtgaaattttaaaaatattgtgttgattttggaagaaaacctttttggtgctatatttgtcaatagctctattttatattagtcataaaaaataaaataaaaatatctcaaatattttgactccaaaaatattaaattaatgacatttctttgttcattcacacctgagagtaaagaagtgagaaggagaagaaagaagcaatggagaagatagagcacacgacgatatctaccaatggtattaacatgcatgtggcttcgattggttcaggtccagtgatcctattcgtccatggctttcccgatctctggtactcatggcgtcaccagcttgtctctttcgctgccttaggttaccgcgcaatcgctccagatcttcgaggatacggcgattccgatgcgccgccgtctcgtgaatcttacaccatccttcatatcgtcggagacctcgtcggattactggattcgctcggtgttgatcgggttttcctcgtcggtcacgattggggagcaattgttgcgtggtggctttgtatgatcaggcctgatcgagtcaacgcgttggtcaacactagcgttgtgtttaatccgaggaatccttctgtgaaacctgttgatgcgtttagggctttgttcggcgatgattactacatttgcaggtttcaggtaatactttaaactcatgaacacttaattgaaatgaaaattagggtttggtgaagttctcagtggttgaaatcaaagacatacttagggtttattgatgattactgttcatgatttgatcacgttaatgatagattggttgattatgaacaagagttgtggcaaattgctttatagccaatgcttctttggtgtttagttatgagatcaagttattgaaccgatttgagatagatgtatatttaggcgattgctttttgccatgccttgatactgcttcaagaaagttgagctttttatgtgtaaatgtatacacaatgagaaatttcttagccactattagtttctgtttgtgtctatagaaacagagaccagccacctacctatacatagctgaacttagctcaggctctgactctgataatgcaagttgctattgatgattagaaaaaggcaattagtgcttactttaatatagtgcagtcaaagtcaaagtcatttactttatttgagttacttgctttaagtaaatgtagttggatcagtcttgtggtcttcaattgcttaagttggtcctactaaagattttgagtttcttttttctcaggagcctggagagatcgaagaggactttgctcaagttgatacaaaaaagttaataaccagatttttcacttcgcgtaacccacgtccaccttgcattccaaagtcagttggtttcagaggtttacctgatccaccttctttgcccgcttggctcaccgaacaagatgtcaggttctacggagacaagtttagccaaaaaggcttcaccggtgggctaaactactatcgcgccctgaacctgtaagtcttatgaattctagccacctattctacatcatacaatcatcttttcatggttaatcttggacttgaatcaatctggtcttatcctaacctgcagaagctgggaactaacagctccatggaccggtctacaaatcaaagtccctgtgaaattcatagtgggtgatctagacataacatacaatatccccggaacaaaggaatacatacatgaaggtggtttgaagaagcacgtaccttttctacaagaagtggtggtaatggaaggtgtaggtcacttcctccatcaagagaagcctgacgaggtcactgaccatatctatggcttcttcaagaaattcagaacccgcgaaaccgcatccttgtagtagttctccgtctgcacaatgtcaaattcaaggttgattaagcttgatcagggttacttactgtcttagagccctactatgtaatgttttcaaggatgctatctgtgtattgtgcttgtttaataatttagcaaaatataataatagaacaaataatttctcaaatgttggccatctccagttcaatatatccttaaacttttcttatgtccaaattaattttcaaaatgttgaattcctatggtttctagaaaacttcaattaagcatagatgattttttttaggtgaaattaatatcaaaaaactgaaatatatgtacaattttatcaaaaattataaatctactaaggacatttatacctaccaactgaataaattcaataaaatatataataccaatgttttttttttgtcaacagaattggtgtattaattttttggcagtggatattttcaacaaaatctaaagcgcgttcgaccacgcgcctgtgacgcgtaaaactcagtttgacaaatattcacaattaattgaagacgccagtcagaagaaaaaaccactacgcagcttgaaaagacaaacacaccctcgtcttcttccgtcgcaccgcttctacagcaatgtcattttagtcaaaccccaaaattcgagctccctttgaagaaaaaaccaccaaatcagtttcgttgtcccaaatccaaaattcctccttcttcttcgctgtaacgctttatacctaatcggagataaaacaatg

SEQ ID NO: 7783 - DNA, 3000 bp, Unknown; identical to SEQ ID NO: 7775
  misc_feature (1)..( 3000): cDNA_ID_1809512_gDNA_ID_1621162_Annot_ID_57151 3000 nt of promoter + ATG

SEQ ID NO: 7784 - DNA, 3000 bp, Unknown
  misc_feature (1)..( 3000): cDNA_ID_1828945_gDNA_ID_1621163_Annot_ID_57157 3000 nt of promoter + ATG
actgcaaaatctgtgatattttcgtccacaagaaatgtggcgagtcctccgaatatatcgagcatccatctcaccccaatcacactcttcagcttctaagtactagaggaaatagccatgactgtgatttatgtggaaagaacatcggggatctattctatcgttgtgagatctgtgacttcgacatggatctatactgtgccaagtatccaccaccagaggttattaacatttccaagacgcatcaccacaagctcaaccttctcaaggagctgatccagtttgactgtgatgctaagtgtggcactaatgattaatgggtttccatacaaatgttatgaatgcgatttattcttccacaaagattgcgtatggcatccgccagaggtaaatcacactttagaggtaaaccactcttaccactccttgcaccctcttaagcttcacactggtcaactaccgaattattctgaccgaaaatgtcgtctatgcgcaaaagaaattgaagttggattgttttatcattgttctttgtgtaatttcaccttggatatgtcttgtgttttaaatccaccacaacgatatctttggaatttgaaagctcatgaccaccaactcaccctgctcccaagtctccgttcttttttatgtagtgcttgcggtttgaatggcgaccgaagcccttacatatgtgttcaatgtgactttatgatccatcaagtctgtcttcatcttcctcgtgtcataaacattaatcggcatgatcaccgcgtctctcgaacttctgttcttggtgttgttaattcggtatgtggagtttgtcgccagaaggtggattggacttgtggaggtttttcttgtccgaggtgtcctggctatgccgctcattccctatgtgctactagagaagatgtgtggaacggaaaagaactcgaaggagtacccgaagaaatagaagatatagagccatatgtggtaatagatgacaatacaatacaacatttcagccacaaagagcattacctaagactccacgttaatagtgttctttgtgatgacaacaagcggtgcagcgcatgcacccatccaatctgtctccaatctttctacggttgtatggattgtgacttcattctccaccaaaactgcgctggatttcttagaatgaaatggcatgtgctacacaatgaacgtcttactctagttactaatgagactgaagtctttaagtgttatgcttgtgagagatggtccaatggtttcaggtaccagcaagggtataaatcattcgatgttcggtgcggttcaatttctgagccatttttccatccaagtcatcccgatcatcccttatattgcattttaccttacggaaaaatattctgcaatggttgttacaagttcaaatatggaatgctcgtgtgcgttgaatatgaatgtaatcatttaatatgcttcaattgcgctactctaccaccagtggtaaagcatagagttgacgatcatcctctctcactatgctatggtgaaaaggctagtggtatatgttggtgtgacatttgtgaagccaaagccgatccagagatatggttctacacgtgtaaagaccaacgtgctagtttacatacaagttgtgtgcttggagacttttcagggctcatgccgggaagcacactcaagagtgcgagcaattcatctgaggtgctgctcaacaatattgtatctcgtccattttgcagctttttagagctcatgccgggaagcacgctagagagtgcgggcaaatcagttgaggtggggctcaataaaagtacatctcgtccattttgcatctcgtgtaagttgcattgcatttttcctatcatcttgaaaagacttggaacctcagatgaatacttttgctctattctatgcatctgaaagcaagatgtctagggaatggggttctcttttagatttcttgtaccattataagttgatttccttaatgtattatttatctaagaatcttgcagttttagttcgatatgatctagctgtttcaaacgtgttatgcctttcgttttctattataaaacatcaccttagaaaatgaagaacacactactatcggtcttgtctgttcataaggtatatttaggttacattgtgcataaatgaagaaggatattgcttcataaaagctggagcagcaatctatctatataaaaggaagcaatatccttcttcattttattgtccatctagaagcaatatcctagaacaaacttcgattttggatgttcgttgattagctctgaccgttgactcggatcataagtttatgtagaccttaaggtttcggttttgagctgtgtttagtaaatccacggttgatcttacaaataacaatagatggtcaaattgtagatgttgtagtagtagtagccatttttctttaaaaacttttaaataacaaaactcattctcatcgtttaaaactaaaagacacaaatgaaaattattaatcaattttaaatttagttccaatacaatttttgaattttcggtaggcaaacataattttgttgagttgactccacattctaatttttttttttttttaagaaataacgtgaatttttcttgcgtgttaactcatcttaaaatcattgaaaagtaatactccaagttgaccttaatatacttggcgtcaaaattggcttcattgtgcaagttgttcttttttttttttgtcaaagaattgtgcaagttgtgatcttaataagttgattaggactggcaacttctgtcttatttaagattcattatcataagtgtaaagtaatgaagaagttcacgatagctaggtattatacaagtttaattaatttcgtgtgtgctacttaaagtgctacgaagaaactttgacttttctaatatatatttctctatcttgaatccgattcaagcttgtgaaagtctctctgcaaatcttgttgctctgttgctacaacaatg

SEQ ID NO: 7785 - DNA, 3000 bp, Unknown
  misc_feature (1)..( 3000): cDNA_ID_1809307_gDNA_ID_1621163_Annot_ID_57158 3000 nt of promoter + ATG
atgatgattctgttacacctgatcctaaagaggaagatgatatctcttattgttcactttgtgatttagaggtttgctttcttttcttcactagtatttacattagcaatcacttttatttaaaagctaggacttatttagacgtttctttgtgtgttttgcttaggttaaacgcagcagtaagcattgcaggacatgtaaccggtgtgtcgaagggtttgatcaccattgtagggtaaggttttgggggttctttccacctgaatcttacagtttctgagtttttgaaactgctaatctttgtgtgtatttggtgtattcagtggcttaataactgcgttgggaaaaagaattacacgacgtttatactcctgatggttttcgtcttgcttatggtgtgtgttgctctctcaactacttgaaacgtaaaccttaaaagttcttgttcattgaaacaatgatatagacttgcttttgttgcaacagctaataatagaaggtggaacagctcttgccgtatttgtcagatgttttgtggacaagaaaggaatggaaatggaattgaagagaaggctttatgtagagttccctcaatgggctcttgctacaatatctgtaaagtttcatatacatatgctgcttcctcatgacatctacgtagcttctttttgtttatgagtttatgatgttttgtcctcttacagattatcttggtcttgttcacggcttatggctcagccgccatggggcagcttttcctcttccatgtagttctcataagaaaggtaactcttacaggtgaatgaatttgatttagagttctttatttgacaagtagtatcaaacatttgcaggggatgagaacatatgactacatattagcgatgaaggaggagaatcaatttacagaagtggacccttttgatgaattagattcgtcttcagatgaaagctcagattttgattcgcctgaaagattaagaccaacgtttatctccaagtttatgtgcaggaaagcaaatgaggtgattcaacttctcatttctccttgtattgttgtcacttttaaggactctcaaagattatattttgtgttttaacagaatcagcagagactatccataaaaatagaaggagatgaacagtcaccttcttccacgctgatcaacaagaaaccggggtttcatgtaagcataaacccatggaaactgataacattaagcagtgaaaaggctctacaagcagctgagaaagcaaaggaaagactgaggaagacgaaaccagtttccgggactgaagaaaattcacttaagccacttccattagagaccaaattcggacttttgttagatcctgacaataacaacactgtgttgcaaccatcaacaactgcagcagtaaagcttcaggtttcacctggaagattctcaagcccacgaagaaggttctcaggctcttcatcttcaactgtgccttcgccgaagcaaaaatacagaactaactttgacttgaagctaactgaagtctctagggagctggaaagttacatctcaagacaggttttatgttctgtgataaaacaagatggaagtgaagcatcaccaagataaaaaaaaaaaaaaaaactgtatttttgggtgttgtgcattaactctgttacttactttctggttgtttgttctcagtctctgagaaatatttaagatctgcttaaacttttgcctcctcttgttcaactttataccgagtatatatataaatatgttcatcatgagatgcaaaaatgtggttatttattaaaattaaaaagtaggacataacactctactaatgaacgcataaagaaacgaatggaattttaaactaaaagtttcctaatgaagccataaacttagcatcttcttctgttgtgttttgtacaagtaataaactagcaatctctggatccatctcttgaaacaattcgttgtgagtagtggctgtttcacaaggttgctgctgttctgtggtttgattcatagtcatcaccggaacattgttttgttcctcaagttgttgttgagaagccaagtttccaaccacattgtgttgttgttgagtctccataggaacgactgaaagatcattgttttgatgatatggctgacagcaatgtcgttcatctatggcttgattcatcataactggaagctgtgaagagagatgtgtggcttgtccaataatcttgttttgttgttgctccattgagaagtgttgatcttgatgatccaatatgtattcttcttgaagctccattggaagttgtgagggatctgtgtcttctactaaaccttcaaaatcaatccaagtatggaccagaggttccaatccgctgatgctcccccatggcttgagccgagagtgaaggatcagtctcttgtctacaaaactggttctggttctcagccatgtttccataaccataattctgatgcacaaggttgctgcggttctttatgagtcaagtgtggtggctctttggtttggttcattgtcataaacagaacatcgtcttgttggtacgtctccataggaaccactgaaatatcattgttctgtccaagagactgatgatatagttgaccataatgctcctcctccatggcttgcttcatcttaactgcaagctgtgaagaattaaaaattatggatcatgccgattgtcacactaaagaataaaaaaattgactatttcttacaagttacaagtggttcattttaataatgattagtgatatatatattgtcacttgtcagtatcatactatcattattgttaatgaaatattataagagcatcgttgagatcaacggagaagacttttgacttttgacttttgagagagaaagaaacccgagatttcagatccaacctttttcttcttccaaatcttgaagtatatacttttttagattcaacctattttcttcttcttcaaaatcttgtagtttacgaccatg

SEQ ID NO: 7786 - DNA, 3000 bp, Unknown
  misc_feature (1)..( 3000): cDNA_ID_1809299_gDNA_ID_1621163_Annot_ID_57160 3000 nt of promoter + ATG
atgatgataaccaaattttttgaaatttccttctgtttcattctaaatttcgtttaagaatttttcacagtcaattggtaagagcaaatatattttgaaacgtggtcctggccaaatcaaggatgattacggcttgaaaatttgtattaatacacttttatcttataactaaaaaattaacatgataaagataaatttgaaatttcttttaaatatatgaatgaaatacaaaacatatttaaaaaagaataaaaacgaattattaaaactaacatttattgtgaaacagcaaaaaaagaatttatgcatactatcagaaataattttaaatgaattcatcaaacaaatgttttttttctttataagaatgtaaaatatcattataaaatgaaaagtttaagttattacatgacacataactttaaaaaaaagttgcatgccaaaaaaaggtaaaaaaaacatagaaacataaaccattcgaacctcattctcgttgatcaacaaaattttaaacaattaggctcttagtgcgaagatctaataaagtcaatctaaatactctcctaagtaaacatgagacaaataccaagagcagaaaaagaaacaagaacaaaaggtgaaagacgaaaagcgaagaacataaaaagaaataagaaaaaaaatgtgaaaggcgaaaagcaaagaggaagtcctttcgataatagcccgaaaaacaaatgaaatttctttttatgttctttgacatataattttgtagatacgtttcttttttgctagcacctttctctgaactggatggatacgatctcatatctcaccgatagcacgtttgaccctctctacttcactaacttatgcatgtttcatgtttggaacgaaagaaataacaacattcttctacaactacgtactttacacaattaaccaaccatctcagttataattataagacctcgatttaattttaccaaaagttattgtatttttagtgagtcttgttgtattaatgctctaagaaaaaagttttctccagaataaacaatcaaggagcaaatatttcagcgccaataaatatagtagcctttaggatggtccaaatctggtaaaatatatccttagctaaaatgttgatctaactaaagagatttatatgtcaatttccaaccaaaagatttaggccctgaatggatgctgattttcgattcagtttttggattttgattttagtttctagattttagattttagttttagatttttgttaatatatttttgttttaaaaacttcaaaaaattagtttttagtttttgagaaaaataacgttgatggagtaaaaactagattccctaaattttagaaaaactaaaaaactaaaatcatgaatggaaaattacaacaaaatagtttttcaaattgtagggaaaccaaaattttaaaatcttgattgttatgaaaataagtttttgaaaaacaaaatccaaaaactcttacaaaatctacaaaacattcaagaccttattcttctcaggtttatatcttaaacaaaacaaaatccaaaatgctatttaacaaaacaaacaaacaagttctcttttgaaattaattatttatatgatattaatttccaaataaaacctgaaaagttatcataatcagatatacatttttaatgtggaaaaatcacgtaataacattataaatatatatatgtaaactaatattgtgaaatctaagactctgtatatatagtactgactactgaacaagtatataaattttatgtttataattataaaacgaatcattaaagatatcaaatctgaatctcaaataactaacccaaaatcatgatatctatataaatatattcaaatgaccttgcacgacggtctacactgagcttgttgacgatgacagattcagaaattctgattattagtttagaaaaaaaaaactatagtattattattaactattttaaatttttaagaaaaaggcaaaataaatgacgagtttaagactttggtagttagctccggtttcaatgaatggtccaagttggagagattaggttctttttcttccctatgtgggtcccattcttccttgtgtgggtcccactctctttaacgtttcttcaccgtcctttagtgccaccgttatgccgtgccgtcaactccgttgacttcaggacaacgctgctcgtcttttactgagtctcactcacgtcgtctttctccgtcaactttcttactaacggccacttaacggaaatccgtcactgttaacaattaaattaattccgctcgacatttatcgccgatttacacgtcacttttttctatcttaccctggttatttaacacgtgtacatttatgacgctatatatcgaggaatttatccatctcaaggcattttctcaattatattctggctgcaagtatccaaattttataccagttctaaacaaaattagaaagaaaacaaaataacaataaagacatacttataatattgagatcaaatctgacatttaagaaccactcaagatcttcctattttaaaaggcaaaagaaagagtcagactgatacttatcataaataattttcaacatatatatcaaatgtttgagcacataaaatataaatatcaaatataaattttaaatgcaacgctgtaaattttcgttttatgtatgtcataagaattgattagataaaattggcattttcgcataatttacgtaattagtataaactaaatcattatgcaatttcggaaattaccaaccttctaatataatattcccaacagttgcttggtcatttatttgtatgtgtaacatttgacaaaagagtgatttctcgttgaaaatggaaacctttagctaagactttacacaacttatcctcataaatttagtctttatataaagggactctcttttttttctttttcttctctctatctctatctatctctctttgtctgcaaatg

SEQ ID NO: 7787 - DNA, 3000 bp, Unknown
  misc_feature (1)..( 3000): cDNA_ID_1809296_gDNA_ID_1621163_Annot_ID_57161 3000 nt of promoter + ATG
aggcatcaagtaataatacataagagggaatgatggatcaaacggtgttgatggtatcagtaagacatcggagaatgcaaccgagaccagctctctcagtgagtttctcgtgaatcttcaggcactgatcgcaggtgggtcggtccccagtagaaagtcctctgtacaagtacctgagaattttaagcaaaaacattctatcaaagagcacagacagcctgaggatagagctttccaattcatacatattacaaaacgcattacagcaaaaaaaaaaaaaaccaactttgcacttacttcatgagaatgtcgtaatattcgacatcaagagcattgagcattccgtcaatatccttaatggccattaaagctctgtgcacaactatccaattagccgactgcagttgagttttttttggctcagtaaatcaaaaaaaaaaaaaaagatggtttcggaaagagagagaccttgcaacgttcatcgcgagttttcggaggcgaaccttcaagagccgttttcaaagcttctacatgtttgtacctgcacacattaaaacaccgataagggattaaaccaaaaacaaaagaagactttagggtttagctccaaggtctgatattactgtttgagtaggctttcaatcttcctcgatttggtttcgatcctcgcgattattgcttctgcgttatcagcttcaacgaattctgccattcttcgattcgatctttctctccgatcagagatttcccctctttcccttctttaattgaaaaaatgagagagagagaggaaaacaactcaatcgccatttgaccatttcaaaagggaactgagtgccgtttgtcttggccttaaacggcacgtagtcttaaatgcttatgctgccactgaatgatggatgatggaagcttcattttttttttcattttttgtcaataggattttcatcgataggattcaagttgaaatacaagagccggcaagtacaaaccacttccggagacataagccgatgagtacaagaacactcccgaagccaaataccaaacaaggtaaacaaagggaacaaaatccaaacaaaccaattacactatattcattgaaatttcctcgatcaggttctagaaatccaaaaaagacttacaaatcctaagtcatagaaaattaaaacaaatctgagactaaaaaagacacacaaacgggttacaatacaagaatctccttttctttcttggtataacaattttttttttattataaatctctcttataaatttttaatagtaatatttgttggaccgaattttttatatttatactaatgaacttttctttacgattttgttaccattttggtatcatttttacgattttaatttattaacctccttaattaaaatcgcaacctattctattttattaacacaggtcaaaatatatttttttctgcgctcgaccctaatatgttaacaaaatggttgtttctgcccaaatctcattatatttgtatggatagacgaagagcattttgataatactcttttggaatgtttctttatcattctaattaggatcctacatcgaaagtatactataaatggagtaaacacactcatgactgctaagtgctaacactagtatatatggaacacaaccaatccaatcattacccattggttttaaattagaatctgatgaaacttaacattaactttctctaatcattaatgatattggtagtcttataacaaatatattgccaagattcggtctaagaccacttgatagaactatgtataaaacttcttttttttaactgccaaacctatataaagtggacgtgtaaactaaagcatggtgatcacttcacatcgcaccaatgtagtggatctaaacgtctctttgtgtaatcacgtggtcgaattaatggtcaatcatttagcaattaaccaaatttgaaataacatccgaaaaaagtcggtttagtgggaggagaagtgagaatgatgtttcatgaatgctcgttaggaactcttcgaaagacgataacctcggatggatgtttatggtgtcggcttctagtggttaaacataattagatcgtctactgaaaagttggagatgtggttgagaaactcgtaccctacatatggttactcgtctgctggtttaatcgttgggattgatcgtgtactagtctttcttaaaggccaagaattttgtcgtcgtagttaatatatgttggcgtacgttttactgtttttcttgagaaataattggatcttaagcttattaaaaaagtcgtcacgacttggtccaactcgtacatatcacaagttgctcggcgcttttcatgttagttagccaccgacctcgaactttgaaattttatattttttaacttcaaaaacaattctttgatagttttgttttcattgctaatatttctctcaatttttttttattgtttttatttttgtatagaatagtattcaaaatgaaactataattcagtatggaacactttctgttttatttaatatttacttcataatgaattatgtttcaaattttcaaagaatatatttatatttgaatttggttagtaccttccaaagaagcttaattccccacattaaaattcaacttggtcttcatattaacattattcaattgaattcagactgaaatggttcactttatctggtttgaaatatatgtcatgcattttccaaatcaagaatgaatcttcttgaaagaaaaaaaatgagaaaaaagaagaaggagaggaatgggtctcctaacaatgaaaaagagaataaacccttaaataattgcaactatataaaataaaaagtataaactccactaaaaaaagtcaaaacgtagaccaaaacaaaaacatgtaactaagtcgtccactactacatctctatgactctatataacaacaaagccaaaaccacatcttctcacacaaaacacaaaaaagaacaaat

SEQ ID NO: 7788 - DNA, 3000 bp, Unknown
  misc_feature (1)..( 3000): cDNA_ID_2992328_gDNA_ID_1621163_Annot_ID_57162 3000 nt of promoter + ATG
actcgacttgcagaaaataatatatatatgtatatatatatatacatatatatttaaacatagttattatttgtgttttggatataactgaacgcatccaaagcacttcggagcttgtgaatcgttataacatgcaaactattttgcagaatatgatttattattatattgtattgcaaatgatcttaattttttttttgtgcaaacaaatgatctatactagttttttttaaacgacattagcatctacaaaataactatcgtcattagccactgattgtaatattgttacaatataatttgtatagctgtaaactatttatgttgtcagttctagttttgatatatttactgtcgctaattctaacatgtttgcattcaaaaccgctgattaattgacattgttactatatagagcataaaacggtgcttcattggatgactattgactaatataccaaatgtgactatgtgagtttatgatttagttacataaatatacagatatgtttatctatttatttatagaaagtctttcaagaaatctacaaaaattaaagaaataaagagagtatgcctatctgtacgtcggtggctgtatattgtgaaaataattaatgtcgtatattattgcaagtacttagggatcagggctgagtctacgacaagatacgtatcaatgcacacgtccaaattttttttttttttgtgtacaaatggtcatggtctccagacggtgacattttaaaaaacattatttgattggtctttgtaatttttattttccaacctgtcttgtcatttcgactacgaaacgtacgattttttcaatcacgtttactaatatcatacaccgaaaataaacagttcacaaacgcatcttaattattcaaattcatgaatgttttatataatcgagtatcatatcaacatttatttgatattttgatgtcgtatgtatatcaatgttgttagctgtaaactgtccaatgaaaatccatttaatatttggacaaattattattagggaaattaatgtaatgtggagtattttatatgaaatgtgtattaatgacgacgaccttacttgatcccggaagtgtgtattaatttaatcgcggtgcatcgctgtccacacggttgggttcatgcgtacgtggtatttgctggcaagtggcagtgaagtttcttgtttgatactgtatgttccattcatgtctttccctagatgcatgtttcttctatttttatatattaatatttttttgtttttcttattatgttttctttccctttgtgaggagaataattgcgatacgattatttgttttaacagaaaaaagtgaagcgaaaaagatgattcgaagtttgaagtacgattaaaatttttctttttccggatccgagtttgatcttctttagaaacaaaaattatatttgtttagaaagtctgtcagttgggttttggcccaattgatttacctggtagtcagaaatgtaagtgacctgactacccttgacattagtcagaaaacattctaaactcgagataaacactgtggtagttctttagaaagaagtcgactctaaagtactttggcgtaaaacaaaaaaatttcccttgaaattatactttatttgtttgacataaatgtttcaaatataatcttcttttaatcaatgtagttaaatttttttgatagaagcacgtcagaatttcacactagtaatgtataagtggtaatcatcattgcctaaaacaatgattaattaaaattttagaattcgtcgtcgacaaagaatttttcttatgatgaaggttttgtgcataattatgaacggatccatttatttcactctaactaggaatagatgtttgatgggatacaagtgaacacgacacaaagtaacaaaaattcatttaacgtcacaaattattctcaatcgaatttcgaagtatcaagaaaaagggcaattaaaaacgtaatctcattatgtctttgaaatctaaattaaaagttgagtttattttaattattaatttcctttttgatgatgtaggggatgacaattgacaaccaatttgatttgaaagattaacataaatcattttgagcatacatatattgcttaaatcacacccgtttatctctaaaaacctccataatttatatcaggaaaataaatctagttattgatatcgccatcaaatatttttttcttaaattgtttttttttgttgttgttgaaaatttaattagaaagataagtggacaacgacgcgagacaaagacacaatctttagggccttgagtaaattagggacagcataaacacatgcactagtcctgtctttatttaattatgtggtgtttactctaatgacgtcgctttgattaaccaagtggtcataattaatatatcgatcgaattatataattatcataaatttgaataagcatgttgccttttattaaagaggtttaataaagtttggtaataatggactttgacttcaaactcgattctcatgtaattaattaatatttacatcaaaatttggtcactaatattaccaaattaatatactaaaatgttaattcgcaaataaaacactaattccaaataaagggtcattatgataaacacgtattgaacttgataaagcaaagcaaaaataatgggtttcaaggtttggttatatatgacaaaaaaaaaaaaaggtttggttatatatctattgggcctataaccatgttataacaaatttgggcctaactaaaataataaaataaacgtaatggtcctttttatatttgggtcaaacccaactctaaacccaaaccaaagaaaaagtatacggtacggtacacagacttatggtgtgtgtgattgcaggtgaatatttctcgtcgtcttctcctttcttctgaagaagattacccaatctgaaaaaaaccaagaagctgacaaaattccgaattctctgcgatttccatg

SEQ ID NO: 7789 - DNA, 3000 bp, Unknown
  misc_feature (1)..( 3000): cDNA_ID_1809290_gDNA_ID_1621163_Annot_ID_57163 3000 nt of promoter + ATG
tctctcatgagtagttttaaaatcgaaatagatcataataaaacagaagaaaaacaccagaaagccaaaacaaaaattatgcaaccagcctcgtcaaaacactgaagactcccgtgcaatacgctcttgaagccatgatagacatcctaacgccacatatgaagtaaagcgtatttcctttgtcacactataagcaatatctgtagcgaaagaatggctttcggtgaaaagagataaaaacttaactcgttcatcacatgtactacttgcaagattttatccagctttcagtgaagagagatggaaacttacttcacacatcacctcaaaatttctctattgaattattttatatggaggaacatttagtacaaatttaaaaaccaatagacactcaataacttcccataaagaaatcggtttggtatattactaaattatggacgttagaccgattcttatactgagcagtcatactaaattaaaattttagattggtttatattcattttttctaaaaagtgaatgaaaatcacattcagtactattaacaaaaaaatgtaaacaataatttacaaaatagaagcctacacgtgtagtctttaacttgggtttgagacagaaaaaggacctacaaggatgagtcgagatacgttatccaccaaagtcacagtgtatcacatgcctttgcctctgtccttctccgtttctccattcggctccacaattttcccattccctgatttgcgtctatggaaattactctacactaatgctgtttcctaccgttggatctataagctgagccgttagatctaactatttcttgtcaacatcagttgactgtaaaaactagactcaatgtgggcttgaaacatgctcttcatgtgataaatgtcctgattcctaaagagttttgtttctaatccatgtaaaaaatatacagtaatagtaataatattgcaaaacatatacaattgttgaaaaataccatgaataattcgtattattcttgttattgtaattataatggtacgtcgataattgatgttacattttatcgaagccgtctccaagacttggcttatattccatgaagattcctctctttttttttttttatgttgaaggccatggtttagactttagacaccgaatcttcttttattttactttttttttaatgataatggacaaaatattttaatataaaactttaaactaaacaaataagttgacatcaattcttcatattaatctagttattgacaatgtatgtctcttggtattttgaaacttgagagtcttccatctttactattttaaaattttagccggagtagtttgtacatgtaatggttttacaaaacatgatcaataactttataaaacaagcgtaatacggcgttcaaatttggtttctgcatgaaataaaataagtagattaaatagtgtttgaataaaataatactaatcttagttaactaagttttatacgacagttattcgtttgagtatgatatcataaaacaatgatatatttactcattttagatgttctaggtgtagtagttaattattgcaagtcaagtaatataaaagttaaagagagcaaaggtactaatagtatatgtttatgcacataagttgattaaatatatgtataaccaataatggctcggaatcattgtgtgttttatgcctggcacaatattatattggttcagacttagttaaacactcttttagaagtgattaaatattcagttgaatgaatataaaattgaattcttatgttttgttaactttaatcattggagcgaattattaattatatccttcctgattaaaaaataacttcctgtttacatatgggatatatgttacaaaaaaatacatatttagtgtcaatttttacaaataactttcaatcgtgataaagattttaacatatgaggtaaatccgtaaatgttttgttttccttacaatatagaaactcttctctttttgctaaaggaatattaattgatttaactgaacaactaaacttgttgtgactttaagtgattcatgaaactttcttattttcccatataaaatcgcagaatgttatacgttgagtaaatagactctttttgatcatgtcgaagaacttaatggctgtgaaaataattatgtagaagaattagacgcgacccacatttattgcaaatcataaatgcgaaatatacaagctgtggacaacgttctaaataaagatcaaacctcaaatttttataaaatacaatatatatattagatctatatagtacgatttatcccaaacaaaaggatagcgtgtggttcgcaaatcaaaccttgaagaagaaactaagctaataattttacttcaacaccaaaagaaaatataagttcacacagtcacatccttttcatagcttttaaagtattatctctacttttattcgttttcataagttactgaaaagtgtgacttttatatccatacttactatatcaaatatatgtgggattaatattcatttatagaaaatttaaatcgcaataactcaatatcagccattaaattttacattattatcgtaatttacatcaaattttgctataaaataaaatacaattatatcatatttctgttttagttgaattatatagtattattttatataaatgtatttcacttttcatacactaattacttattctacaatactaccaaacagaaccaaatttgtttttgactagagtaaacttcaacgtaccgaaacaaaaacccttttgtttatattccccaaatcctcctctccttttctcatcttctcacttcaaactctctctatctttctctctcacctcatattatgaactaaagatttctctgaaagctgacttcataaactttttctgaagaagaaacacacaaaaacgatcgatcttgaattgattctttgtagtattttatttacatatatatatag

SEQ ID NO: 7790 - DNA, 3000 bp, Unknown
  misc_feature (1)..( 3000): cDNA_ID_3090143_gDNA_ID_1621163_Annot_ID_173768 3000 nt of promoter + ATG
gttgattatatacatctgttgaaaccgagttgatcatggtaatattcatctccctcctgtttcttactttttgatattgaactcattcgaaaactcttctaattttctgatattgttgattatacagcctcacccggatgtcaagccaatggcatatgcaaacaatgattaaagatgttctctcttcctttaagcttatccagcaacagttattctcatgtagattcagtttttccctttttcaatttttttttgttttagaaacccacttaaggattccatcaatggtcaataaaattttcaaaaactctaaaaaatctctaaactactaaactatccaaatttattaataaaaaatacatagaaactttacttagaaactaatcattggatttgctattacttactaatctgtttattttacttaaaaacagattattttatcttcaaattagcttacgaatctgtttttttctctcctagaattaacaactgcgtttatgttgtgcgttatggttttataaattgttaggaattatgagttgaaaatttaatctttgtttaacctcttatgagtagtagtagtaatggtttaatttattactactactcgaagacccaaccgaatccgatccaaaaaacacgaaaaaccgaaccggacctgacccaaaaaaaccaatccgaatctaaacccgaaattttaaaatattccaacgcatcctacacttttaaacccgaaaaccggaaatccgaacccaaaaaacccgatccgaacttgaagtcttaaaatacccagacgggttttagatttctaaatccgtaaaaacccgaacccaaaaaatccaatccgaatacccaaacgcccatgcctagaatttataaaactattacagttaaatctaaatttatcttttactaatcgtgtgtgatcggttttataccaaattagaaaggaagttaagatttaaagttacactagtggctagaaattaaccatgtgtttgattgcatgtgtgtgatagatttccctaggcatgtaatctaaagtctaaacttcctcctccaattccgacttcggacctccttttcttaccactttcaaaattttccagatcttgttaggagctttatattagtatcttgttacaagctttctttaatattatcatcaaaaaggcataattacaatgccttgacaccatccatggagaatcaaacatcgttatccgaatccttaaaaagcaatacgaataaaggtcccatcgcgtacaacccacgggcctctctctatttcaacctcattaatcgtcttctccatcaccatgcatcatcatcattaggtctaatatcatgcgtccacaatacaaagacgtgaacgataaattagactcgacggccaagcacaaaaccaacagccatggcggtcgttatgataatccttacgtccacattactagtcccacatcagcttctgataagagtaagtctaaaaaatgattgttcgtgtcttaattatgcttatgataaatcttgattgatatatgatacatgtagggtcgaaggataaggttcttgaggtgttgaatcgctgtgggaagaaagtagaggacgctactcgcaaagcggaagcattagtcggaggtttaaaagaccaccgtacgtgagagtttatattttacacatgttgtcttcttaatcgatccctaaaacatttttttacatatggtctatgcatgaaaccgggcatgaacagtgaagtttagtcctagcataagtgatgcagcaatggctaggctttctcaaggcactaagatgatcgttgaaggaggaccagagagagtgtttcaacgagagtttggtgttttagctgtagagaaacttttagattcgtttgtttgctacatatcgactacttcgggaccagtgaccggagtgatatacatttccaacagaagaatcgctttttgtagcgactatgccattcgtcttccttcttctgccggtggaaacggtgttgcggcatattacaaggttagaccatgagtttcaaacaatattttttgtaatagaagtttggttcatacttaaaaaaaaagatctaagttggtattggtaacaagaattgaattgttctttgtgaaatagctgttttcattttgtaaaataagaaaataataatttggtttctaaagattagtgactatataatatattgagcaataataaaatttatatgtgatattgtattataatgttgtatattgataggtggtgatggagtgggagaagataagtagcattagttcatcaacgaacgtgttgaagccaagtgagagatacgtgcatatggtgacacgagatgggtttgagttttggttcatgggctttgtctcctacatcgatgctttcaattgtctcaacaaagctctcctcaattcccgttgtaatcatgccatgtaatcaaattctaattttcttatcaaaactacgaagactattttgatcagatctcataaaatatcaaaaaaaaaaattacaagtttaccaccaaaattatttatctgattcataactttgaccaaccaaaaaaatacaaaattgggataactgagttacacaggtaacttattgatgcttgttaaattgtcattgcgatttcgtaacaaagggtccaactccaatcccataaaaaattacgaacgatgtgtaatgactaatgacgcaacgtggcaatcatgtataccttcaacggcctagaattctgtagattgcatcaatcaacggctaagatcttcttttggctcttaacaaagtcattggctgattcagtttcccaagaaatgtctctgtcattgtgcagtagataagccactctctctctctttctctctttttgctattataaagaaaaagattcattctcccaccattgaggtttaacttatacaaacagatctttttgaaattggattcatctaagaagcagactctgttttcatg

SEQ ID NO: 7791 - DNA, 3000 bp, Unknown
  misc_feature (1)..( 3000): cDNA_ID_1809283_gDNA_ID_1621163_Annot_ID_173766 3000 nt of promoter + ATG
ttagatcgacgaatcgagagttcgcgaagcttcccggaggtaagtccgactaagtcggtggcggcaaccaaagcttttttccctgaagacgttattaaaccttcgagatctccatttctcgctctttgtaactccggtgactgattatagatctctttcgctacaagcgaaacaccattgacgagcctggtaaagctcttgctccacgaactcatcacgaagccgcgtgcaaagttactcttcttaatcgtggatttgactttcctctttttttttgttttccatttttgtcaatttggttttgaagaattttctcgagaaagtatataatgtgtgtgtttttgcgttagaccacgaagatcggagacgtcgacgaggaaccgaggtttacgtggggagccgataaccagaaactgctcctccaaggtttctagtttcggccggcccaattagcctattctttttttattgtcaccatataaggcccattgggctataaaggagttttacgagtagcttccttaaccatttgtgatgttttgttggattgctcccgtaacatgtagttttaattgtccaaatatatttcatcaatttatgatgtgtttttttgtgtgtgataagaatgtaatgttaataaggtttaggaaacgacatcagtaagatcctagatacattgtcccatgccgaaaaggtaaaaaatatggaagcatagacaatcgagaattagatcatcactacatctttaagccgtgaagctttagacaaagctatgaaatgaacgcgataaaaaaattcctctaagcaaaacatggcaagaaacaagagctataaaagaaaaagaaactttaaaatgattataaagcgaagcgaaaatcccttcaacgtgagccccaacctaagaaggagcgatgcaacatgagctaaaggcggcaggcaatgctgttttctaccaacatccccaatcagtagcatggacaaagcaacttcttatcctccaaaagtcatactaacatcttcagaacactatgaaacaatcctataacacctcaaccaaattgaagcttcagaagacatatactaacacctccaatactaacaatttatgatgttaatcaccaaaaaatattttaaagatatgtatgtattagtaatacagtatcaccaatctttggctggtctaactcaaacatttagagagagaccgaacttaaataagagagactaatggttgtaaataatgagattcatgagactagcaaatcttcatgtctaagttgaaaattatcggatccgtcatgtgaaatccaaaaataacgatacagttttgttttctcagataaagtgaaagtcaaaccaaaaaactatataattggctgctttacattaacagtagaaaaccaacaataattgaattttatgctgctactaccaatgttgtaatatgtataagcgttcattatttaaatttatatacaatggccgccaaaaaaaataaaaatatgcttaagtacaatgcatctccactcataaaaggtaacacgagaaagaaattatataatacgaacaaacaaaattgagacccctaagtaaatatgaaaatcatctttgaaactattaatcttctctaactaattttcttaacgtaaaagaggactttattttaactttcggtgatattactccaatcttagggtacgaacaaatattgttattaaaccatttcgaatataaaattggtcaagccactcagaattgtcaggatggtaggcaatatagtatattggattaattaaaaactataacacagtgattagttggcattaaactacaggtggtcatcattttgtctatacatataaaccaaattgtatttagtcttgagatcttcaaaaacatctgagagctttgacaaaaaaaaagacgaagagaaaaatgtccattagagctcaagaaattcaaacccttgaaggtatagtaactctcaatctctctcttttaagttttaacggtttatacttttaatccgttttacatcatttgttaagcttttgctaacctctctaagatcctgagatccaaaaacatacttaagattttgatccacctggtttatattccatctcttagaagttttatttgctttctagattagatcggtttgactatatcgatcatattatatttgatttataaactataagtataagacttctgtttaggtgaaaatcacaagtcctttagtgatattgttgaagatttcctcttgaagatcattagcacaagttaattcaaatccgttattgtttaaagatcatcaacctaaaacattgccaataagtttcctcaaaagttcatttggatctataattttagttttttttttgtcttttattttcataatgcaaatagagagtcaatgacaatttagtgaaagatatatagttaataactttaagtgggtgaataatattggcattttaaatttacataatttatagtggaagattcaattaatacgtcatattttaattttcttttgggggtattttcattatattaaaaacttttaaaaaagttttttttttattttaatttaagaattataaacttataatatataaagttacatccgaaaaagaagagaaatttattctaaattgtagaccgaaaatgtataaaaatacctttactttaacaaaaaaaaaaaaaaaaaaaaatacctttaaaaaatatctataaatacacagcacaaacaaaacttttaaatgtttccaatctaggaaaaaaaaatattttggtttcgacgtaaaaaagaataatattgtagatagaaaacattttgaaaagtttttaattatgaatatatttaattaaatccataatttatatattttaaatgggcccattttgactttaagaaaatataaggcccaaatagaaagcctatagctcaaagcaagcctgcttttagaccgctttccagatctagaagaaaca

SEQ ID NO: 7792 - DNA, 3000 bp, Unknown
  misc_feature (1)..( 3000): cDNA_ID_1809286_gDNA_ID_1621163_Annot_ID_173765 3000 nt of promoter + ATG
gaattgaatcgcggagaactgtcgccaaatcggcaggtgaaacatctacgagaagaagctagcagtgtcgaggaaggcgaaaaagaggttatcaggcgatattttttagtcggagagtgtgaattcgttaggccggaagtggtggctaacgcggcggcgcgtgggtggtgaaaggcggaagagaagtctaataagatcggagaagattgcattgtttcttctagatctggaaagcggtctaaaagcaggcttgctttgagctataggctttctatttgggccttatattttcttaaagtcaaaatgggcccatttaaaatatataaattatggatttaattaaatatattcataattaaaaacttttcaaaatgttttctatctacaatattattcttttttacgtcgaaaccaaaatatttttttttcctagattggaaacatttaaaagttttgtttgtgctgtgtatttatagatattttttaaaggtatttttttttttttttttttttgttaaagtaaaggtatttttatacattttcggtctacaatttagaataaatttctcttctttttcggatgtaactttatatattataagtttataattcttaaattaaaataaaaaaaaaacttttttaaaagtttttaatataatgaaaatacccccaaaagaaaattaaaatatgacgtattaattgaatcttccactataaattatgtaaatttaaaatgccaatattattcacccacttaaagttattaactatatatctttcactaaattgtcattgactctctatttgcattatgaaaataaaagacaaaaaaaaaactaaaattatagatccaaatgaacttttgaggaaacttattggcaatgttttaggttgatgatctttaaacaataacggatttgaattaacttgtgctaatgatcttcaagaggaaatcttcaacaatatcactaaaggacttgtgattttcacctaaacagaagtcttatacttatagtttataaatcaaatataatatgatcgatatagtcaaaccgatctaatctagaaagcaaataaaacttctaagagatggaatataaaccaggtggatcaaaatcttaagtatgtttttggatctcaggatcttagagaggttagcaaaagcttaacaaatgatgtaaaacggattaaaagtataaaccgttaaaacttaaaagagagagattgagagttactataccttcaagggtttgaatttcttgagctctaatggacatttttctcttcgtctttttttttgtcaaagctctcagatgtttttgaagatctcaagactaaatacaatttggtttatatgtatagacaaaatgatgaccacctgtagtttaatgccaactaatcactgtgttatagtttttaattaatccaatatactatattgcctaccatcctgacaattctgagtggcttgaccaattttatattcgaaatggtttaataacaatatttgttcgtaccctaagattggagtaatatcaccgaaagttaaaataaagtcctcttttacgttaagaaaattagttagagaagattaatagtttcaaagatgattttcatatttacttaggggtctcaattttgtttgttcgtattatataatttctttctcgtgttaccttttatgagtggagatgcattgtacttaagcatatttttattttttttggcggccattgtatataaatttaaataatgaacgcttatacatattacaacattggtagtagcagcataaaattcaattattgttggttttctactgttaatgtaaagcagccaattatatagttttttggtttgactttcactttatctgagaaaacaaaactgtatcgttatttttggatttcacatgacggatccgataattttcaacttagacatgaagatttgctagtctcatgaatctcattatttacaaccattagtctctcttatttaagttcggtctctctctaaatgtttgagttagaccagccaaagattggtgatactgtattactaatacatacatatctttaaaatattttttggtgattaacatcataaattgttagtattggaggtgttagtatatgtcttctgaagcttcaatttggttgaggtgttataggattgtttcatagtgttctgaagatgttagtatgacttttggaggataagaagttgctttgtccatgctactgattggggatgttggtagaaaacagcattgcctgccgcctttagctcatgttgcatcgctccttcttaggttggggctcacgttgaagggattttcgcttcgctttataatcattttaaagtttctttttcttttatagctcttgtttcttgccatgttttgcttagaggaatttttttatcgcgttcatttcatagctttgtctaaagcttcacggcttaaagatgtagtgatgatctaattctcgattgtctatgcttccatattttttaccttttcggcatgggacaatgtatctaggatcttactgatgtcgtttcctaaaccttattaacattacattcttatcacacacaaaaaaacacatcataaattgatgaaatatatttggacaattaaaactacatgttacgggagcaatccaacaaaacatcacaaatggttaaggaagctactcgtaaaactcctttatagcccaatgggccttatatggtgacaataaaaaaagaataggctaattgggccggccgaaactagaaaccttggaggagcagtttctggttatcggctccccacgtaaacctcggttcctcgtcgacgtctccgatcttcgtggtctaacgcaaaaacacacacattatatactttctcgagaaaattcttcaaaaccaaattgacaaaaatggaaaacaaaaaaaaagaggaaagtcaaatccacgattaagaagagtaactttgcacgcggcttcgtgatg

SEQ ID NO: 7793 - DNA, 3000 bp, Unknown; identical to SEQ ID NO: 7788
  misc_feature (1)..( 3000): cDNA_ID_3046534_gDNA_ID_1621163_Annot_ID_173762 3000 nt of promoter + ATG

SEQ ID NO: 7794 - DNA, 3000 bp, Unknown; identical to SEQ ID NO: 7786
  misc_feature (1)..( 3000): cDNA_ID_3090128_gDNA_ID_1621163_Annot_ID_173759 3000 nt of promoter + ATG

SEQ ID NO: 7795 - DNA, 3000 bp, Unknown
  misc_feature (1)..( 3000): cDNA_ID_2147341_gDNA_ID_1621163_Annot_ID_173758 3000 nt of promoter + ATG
taattaccgatactacggtatgattttgggtaaatttcaacgtctttttctttcaattttcttataaaactgacacatctttcttgcaaatttttgtttggcaaaaaggatgtacctcaagctggttcctcacaagctctagagaacagaagaccaaaggatatgaaccatgaaactccggccaccaccttgaaacgacggtctccagacgacgtggatggtcgtgatatgcaccgaggatcaccaaaaactcctcgaatagaccaaaacaagagtactaatcatgaagaacaacaaaaccctcatgatcaattaccctatagaaaagctagggtttccgttagagctagatctgatgccactacggtaactttctataagttactaatttttttgattcgtttaaccttacatatatatatgagttatgaaaattgaatcaatattaatatataatataggtaaatgacggatgtcaatggagaaaatacggtcagaaaatggcgaaagggaatccatgtcctcgcgcttattatcgttgcaccatggccgttggatgtcctgtccgtaaacaggttagtataactatatatatgagaaaatgttatcataattatagaaaaaaaaatttggtattagaattttgtattgattaacgtatatagtattggttcttttcgtcaacatgtagctttgaatataaaaattgacataataacaacactaatataaccgattatattacgtatcctttagaagtattgatttagagcaataccataaaaccttattaaagtccttcatacaacagatttagaaagttttaagaagagtatagaaaataattctaaatttagaaaggctttactaaatccctttctaacaaaatcttttacttatgaaaaaccaaaactagaatgcgacatatttattcttaaagaaaactttattgttttacgtaacaaaatgatttaaaatgtttatttgaatgtaaataggtccaacgatgcgcggaggatacaactatcttgacaacaacgtacgaaggaaaccataaccatcctcttcccccgtcagccacagccatggctgcaaccacctccgccgcagcagccatgctcttatcaggctcctcctccagcaacctccaccaaacactctctagcccctccgccacgtcatcatcatccttctaccataacttcccatacacctccacaatcgcaacactctctgcctcagctcctttccccaccataaccttagacctcaccaacccacctcgaccgctacaaccgccaccgcagtttctaagccagtatggtcccgccgcgtttttaccaaacgctaatcaaattaggtctatgaataataataaccagcagttattaatacctaatttgtttggcccacaagccccaccacgtgaaatggtcgattcagttagggctgcgattgcgatggatccgaacttcacggcggcacttgcggccgcgatctcaaacattatcggaggaggtaataacgacaacaataataatactgatattaatgataacaaggttgatgcaaaaagtggagggagtagtaacggagattcgccacagcttcctcagtcttgcaccactttctctacaaactaattttactaccattattatatgttatcttattatatattacacacacatattatacattatgcgtatcttaagtttttttttggtgtacattatatatgaatgatatggagatcactgagagagagagagagctattataggttttttttttacaggtttacacgattttggctatcgtttttttttcttctatgttaagaacgaggggtgtaggttttatttttcctacttcttatgaatcatactctgtatatgtatacatcttaaatatatattatgttaaaaaagaacatgcatgcctgtatgatatattaatatattacaatgtaactatataatatgactatatgagtaacattttttgttatatctactgaataagatatcatgagaggtatcaaatataacaacgacaaggatcagtactgtattagatttattgttcgtttcgcagttgtcaaagaccataacaatgattgttcgattttgtagttgttagctcaattattatatatatatatatatatatatatatatatatatatatatatatatatatatatatatatatatgaaacaattgtagtaactaagctgatttcttttagtattttaaattttaattagcgatgaatcagtgaaatttgttattgtcaaccacaactaaatcggtatgagtataacctaccacaagttactgtcaatgattactaaatatttataatttagttgttgatagttgttgccaatgattacaaagcgtacacgatattgtgtatatgaacaaaatacaaagaaactaaagaacaacaaggtcgctgatatataccaaatcgtcggtttaaccggctctgccagtgtatattttcctagtgacaattgtcacatatgtaaaatgtgttaaataaaacttgagaaaggaggccactttaacacaactacttcaacctttaacatctaaaatagaaaacgtggcccataaaatgcaaaggaggccgaattaggcccaataaacataaatgggccaatttaaattagtcacgttaaaagagctcaagaatcaccaaagagtaaagtagatccgagcgttacttcaaaatttgaaaacccgaccgttggtctctctcttcttctaatacaaacaaaaataaaaatcaaaacaactggaaaaaaataaattcagaaagtaaacacaaactttcattattaattattaatccctttgaataaaaccagtctctgtaaatctccgtagctgagaggagtgaccatggactcatgaagatattgattgatttagcagagatttcttcttccttgaagatctgaaaaatcaaagttttttcaagttacaatg

SEQ ID NO: 7796 - DNA, 3000 bp, Unknown; identical to SEQ ID NO: 7784
  misc_feature (1)..( 3000): cDNA_ID_1828945_gDNA_ID_1621163_Annot_ID_173755 3000 nt of promoter + ATG

SEQ ID NO: 7797 - DNA, 3000 bp, Unknown; identical to SEQ ID NO: 7792
  misc_feature (1)..( 3000): cDNA_ID_1809286_gDNA_ID_1621163_Annot_ID_57164 3000 nt of promoter + ATG

SEQ ID NO: 7798 - DNA, 3000 bp, Unknown; identical to SEQ ID NO: 7791
  misc_feature (1)..( 3000): cDNA_ID_1809283_gDNA_ID_1621163_Annot_ID_57165 3000 nt of promoter + ATG

SEQ ID NO: 7799 - DNA, 3000 bp, Unknown
  misc_feature (1)..( 3000): cDNA_ID_1809276_gDNA_ID_1621163_Annot_ID_57167 3000 nt of promoter + ATG
ctaaacttttagtcatttgaaaaaccaccataaaaaactttaatctcgataaaactacacgtactttcggatttgttgttaaaactatgtctccaattgaaccgaccagttaaccgataattatacacccggtttgaattacccaaaatttaaccgaacctaattcgattttgactctattttaacccaattttgacccaaaaaatatattctctagaagaagaatactatttatttatttacatttaattttgataaaaatactaaattaattaattttaccaaaattcttttataataaaaatatataccgcaaaataatataacaaaatagacaacaaattctttttataaatacaatggtgttatttatataaatgtatttggtatatactctaaatttaataattcaaaggtctttttctttcttaaaacacataatcatatatatatatatatatatatataaaaagaaaactcatcttgaatatataaaaagaaaactgaatctataaagaaaaattgatttataaataccataatatatactttgattgtggtgtttacggatatatttatataaaaataaatttggcatattttttgaatttcattatgtatataaagttcaaaggtcatatattatgattgcaagaaaaatgaatattttgttttaaaaaacgacatagctttaagtttataaaaaaatagaaatgattgccaaaaggaaaatgtatatgtttgtatattatcaaaattttataacaaaatgtaggctcaaaatataatgtggggtatattttgtcatattaaattttgttaaaattaagttataatttaatatttttaattgtttatcacaaataaaaattaataaaaatacttttacttcttaagaagacaatttatttacattttttgggtcaaaattgctaaaatagaatcaaaatcggattaattttggttaaattctgggtaagtcaaaccggatgaaaaattatcggttaactggtcggtttaattggaggcgtagttttaagaacaaatccgaaagtatgtgtagttttatcgagattaaagttttttatgatggttttttaagtggctaaaagtttagggtgaaaagttgagattccaactagtatagggctgaaaattcagtcaacccgttaattttatacgtactttgtttcttatacataatatatctgtaagcttatacgtactgtaccatggtactttaatttttctctttttggtaaagcacttatatttttctatttccctatagtgtagttaaaacagtataattcgattgtcaatcattttatttatttgaaaatacggaatttatcattgaaaaatagagagtggttggtccatgtgtgagtttatcaaatggaatcagcgcatcatccatgtgataagtacgtggacttaccattagatatgccatgatattagggtatctataatttatattacatgactgctaaattgataatgttacgtaaacgtacttatgtattataacgtttgacttcgaccatctttgaaatttcaaggttatatagtaggttgaagagccaaatagttatgtttataatattgattatcagtctgtgtctggaatatggatatcaagcaatctaaataaacttaaagaagttcattaaccttcatggaggaactacaaagagattttgatattttgttcggttgaagtagaatttagaagtcagtcctatacttagtcaactataaactgtaaaacagttaacttcaaataccaaatactcatagataatctagttatcatcagcgtaagttggcaacttgcaacgtaccacggaatttacgtaaatggaggagcacttatcagttgatttcgtacgttgtttttttaagataaatcgtacgttgaattttcaacaaaagctcattgataatatgatattcgaattctacattcattgccaattattaagacaacttgccatttggttatacatctatgtaataactcgtataccaaagaactattttatgtaatgataatactagctattctcacgagacgcgttataagttgtacttaaaaacaattgcatgtaatatatcacacaattacatgtaatatatcacacaattacatgttgagttttattaaaaatgttttatttaacatgatgcaaaacttaggtttatgtactgcgggacgactgtttctacacttgatatttatccaagttttctatttttaaccgatagttttatcgaagacaagaaaactatttgggttggttaaagtggttggaaatagtttttctttattcaaaaaaaaaaatggtttttaatgttgctacactagtcttagggtctgaatgatgattgtcgttttgcggtgcgggagaagtgcagtgcagttcaaatagtaacgaaaatacatagatacatatgtatatgtagagatcttgatactgttacagcactgttgcggtgcggttttgggtgcggtctatgtcaccattcatagccttcttcattttgttatgtacaattaacgccaatttacctgtaattaaaccactcattggctaaaaaactatatatatatataacttggttgacaagagaaataatataaaacttgggatagtgagaaaaagttataatatttgaaagaaactaaacacaactacctataagtcacatgcacttataggattaacttaattatcatatgcctgaaaactccgtatttttcgcacttcttacaatcattgaatcaatcatcaccaaatcatattattattttcaacgttttccgctaattccaagtcatatctaactaatttatgcatatatcttaatccaaacaagctctttgagttctactataaatagctgctaaagcctaagtcttatgcatccaacaatcttcaacttcttctctaatcaaaagttaaaacacctaagaaattgaaagaaaacaaaatg

SEQ ID NO: 7800 - DNA, 3000 bp, Unknown; identical to SEQ ID NO: 7790
  misc_feature (1)..( 3000): cDNA_ID_1841214_gDNA_ID_1621163_Annot_ID_57168 3000 nt of promoter + ATG

SEQ ID NO: 7801 - DNA, 3000 bp, Unknown; identical to SEQ ID NO: 5030
  misc_feature (1)..( 3000): cDNA_ID_3075380_gDNA_ID_1621164_Annot_ID_57174 3000 nt of promoter + ATG

SEQ ID NO: 7802 - DNA, 3000 bp, Unknown
  misc_feature (1)..( 3000): cDNA_ID_3594240_gDNA_ID_1621164_Annot_ID_57181 3000 nt of promoter + ATG
tatttctatagttgtttatgtatttataaaaaaataaataattgtatttacttaactttgtttacccacataaaagactttcgtgctatggaaaagggttaagactatttacgaacgagaagagatttattagtttatacgaacggaaagagattcacctgtattaacgtacgaaaatgaggatttagttgaactcttacaggaaaagagaataaaacagttttaacgaacagaaaagaagtttatatatattttttctgttatattaggttttccttatttgtgtacaagttaaatttttggaacaaagacaatgatcaaagttcataactgtatttttttttctattataaattcagaattagaataattgcaagaaaacttattacttctaaagttgtttctatatatataaaagaaaaaaaaaagaaaaaaataattgtatttatctgactatgtttacctacgtaaaagactttcgtgccacggaaaaggtttaagactatttacgaacgagaagagatttactagtttacatgaacgaaaagagatttacctgtattaacgtacgaaaatgaggatttagttgaattttcgcgggaaaagagagttaacggttttaacgaacagaaaatgagttacttgtaaaaaatacttagcatatgtttaagtgaaatttctagttaactatgagaaactgtttcacgccctttggaatatatatggcaacttgatcaatgtatatgaccaattttagctaagttatcaattttcttacttttttacacatatcatataagttacttgtaaagtacactattttttgatatgatcaattttaaaaagaaaaatattattatttaagtaagatatctaaatattaattttaatatcttttgataaataatttactataattagttaatagacattagtgatcataaatatattaccagattatgtaatacaattattaataagtatttttaccaaatattaattgaattttagcctaaatagttaatcaacattaatatttcattaacatggtaccaaattgcctaattataatgtcaatgtgtctgaattttaaatatattaccaaattatacattaaaatattaatattttgttatagtatttatttgaataaagaaatttagtattttcttcctataaaaggatgactaggagacaaatttttagatttttaaaataaaaggctgactcttccagaactaaatatagatatattatttattaattaaaggttactaaagtgaagtctaagtgatttggtttaagaatttttgtttagaatttacaattttcagtttagttttagataattttgttaattggatattgacattttgtttgtagccagaagttgttgtttttaaaagaaaagctttatttttgctacccaataatgatgagaagagattacataaacaaattaaaatcaatacatgatacgaactaatctagctaaacgatttactcaataacttcacccaattcgtttcgaaatctaagcaatatatccctcaaaaaatcataactaacataaccaacataagtgtttccaattttgagcgaatgagaacaaacttcttccctgacacttaactcttcgtaagatgattaaaataatatatgattattgcttcttcacacacacgatctctaaagcaatttacccattaaatctttatatctatatataaaaataagtttgatacattactatgctctttgatgggcaaaagtaaaaaaaaattgctttgattttgtagacgagttttgggcatgcaatttttatttacatcttttcaacaaaaacaattaaacaaaacaaaattttgcttagacattgtccatgttaaagttcaaaaattgtacgaaaagtaagcggtagaaaattttgctctatttaggtttatcgaagtaatctttctatttgttatatgttgtataatttatagtaatatgtttatttagttacaatcttttcgtaggttaactatattacttctaacttttgtatgtttaacagattttttatttacctctatcaaaaccctgcaaaacacacaatcaaactcgcaatactctactacatcgattaactaatccacgacacttattttcttttgtacttaaaagttaaaaatatattaacacgtcctatagtaaagcggtgtatgcctcgtccacggattctaaagtttacacatgttttaagtttaacaccttaaaaccatctaaactctactttttaaaagggttttatgcaaaaaaatcctcaaactcgtctatttttacaactttattcttcagatccaaaaaatgcaaaatatcatatgaatttcaaaataatacacaatatagatttttcgttactatcaaattttaaaattttgataaataatatattaaatcggaacctcgagatgaagagttcaagtatatctttaaaagttttaaaaacaaatgtatgtaatcgtgaaaacatttacaatatatataaaattgcaaaataggctattttagatttcataagattattttgtattttttaaaacaacaaactcaagtctacataattaatatattcaactcaaaactccaaactgaaagcttaagaagcccaacaattgtaagcccaattaaaaagcccagtaagtgaacgcgtaaacaaaaaaagtaaagactctcatggaacaatcaaaaacgccgaaacaatgcttcgtctccgattattccacgaaacaccgcgtttttgtttacatttcttctctttctctctctctcttctctcatatctctctcttcgccgtcaggttttgcccaaatttctcggtcttcttcactcccgcgagttttttttctcgggaaaattttccaattccaagctccattgaagccaagtaagaggtgcgattctcttcaattttgacttggaacttgtaaatagcgtatggatttgagctggtt

SEQ ID NO: 7803 - DNA, 3000 bp, Unknown
  misc_feature (1)..( 3000): cDNA_ID_1809334_gDNA_ID_1621164_Annot_ID_57182 3000 nt of promoter + ATG
gattttcaaacttttgaactgtcttaataatcttaaacgacatttgaagtgtctactttatgggattttatgagttaaaagtcagaatttgtgcaaacgcgcaggttcaagccctgtttaggatcggaaggggtactcttccggaagtacctgatacgttatcactagatgctcggcttttcatacttaagtgtcttaaagtgaacccggaagagcggccaactgcagctgaactgctgaaccatccatttgtgagaagacccttaccatccgtgggttcaggaggctcgggatcagcatctccccttctccgtagatgaggctaattttagtaaatttcctcaataggtgaagtatttagttgcttttttcatgaggatattatcagaatcaacaaaagctatatattcttctaacattgatgtcctaatgtacaaaagcaggcataacccgaagatttatgagagattagatcccagagaaactattgggagacacgagacatgattcttcgacacacacacacgtgcggtcgggttgcgcagcaagagccaaacttacttagtttctgtgtcattcgttggttatttgttgcaagttatgtgttgggcttgattttaaaactgaagagccttatttttctaggaattagaaatgtcgaccttggggtttttgggtgtataggttttgtttagttttttttgttaaattatagtgtatgtatgtctgtatctatatcatgtaatgtataattatagttggttcttatagttcctggcttgttgtaactgtgtacacacatcgatgggtttaagttctatttgtctcatattttaaagaaatctgctgctctaatcatctattaaaaagtatagtcaagatattttctataattcaggtcaaagccactttaattgaagtctatataattcaacttgtttttttttcttttacaatattgcccgttgaaaagttattggaaatgatggatttataaaaaaattcaaaagtgaccaaaaaaaaagataatcgaaagaattttggctttgaccattttcaacggggatctaaatgccaggaaaaaaaatacacaagatacctatacttgggattataccaagtttggagtacgactagatagaatatttgttagattcgctttgatccgttattctactcaatttaattataattttctaatcacctaattaattatttgaactactagttttaacattgaaaagagaaatataaaatattactatttttgataaaattttactatttttggattaaattttatatttttatatttttttaaaataaatatttaacaaatccgatatatgataattaaatggtttagattttaacggatattcaaaaccaccgaatatttggtctctctcaaagcaaatacaaaaaaaaaaaaataagtattctgataaagcaaatcgaatcacaaacaacaccaaaatcccggatatctgctctctgctcagccctaattcggaggctatactgtcaattctggatattgggtgctcacacaggttatacaaaacaagaatagtctccaagaggtttcatagccaagtctaaccctattttgactctttacgttatttctcgtgtctttttagtgtcttttcaggtattttatgcaataagacaatattggagataaggaaacattttgtagcaaaaactaacgaaaaggaagctaaggacgactttggttcaagaatcagcaacgagtgtcgaccgacacactcttggtgtcgatcgacactagtttcggcccagcaaaaaccctagacgctttcgagtttccagaagctcaactttgtcccagaagatttccctatttgcattattagtccctggacgtttttagggtctatatatattgtttttagacctaagtttcatttatcaagtcttttatcaagttctttgcaaaccctattgtaagagacataagctattcatccattgttattcagagtttcattcagatctatatacagtgaagagatcccttctttccccttctctattcattgtgtttatgcttttttatctcaattatgttgtttgtttcattcaatatgtctgagtaatctgcttgttaggaatagggtttctcattagggattcatatggtttagtatattgccccctttgctaagttatctgtagaattcttcatctttaattatacctaatgttatatctagagtaattaactagatcttgaatccagacaatagatatgtccgccataggtatttgtagttgaatctattatttgatcagtttggtctataggtgtgtaataagaatcggcctatttactaagatgaacaattgaactcgttaagaatgcatatttaggttgatagtctctcggcttctccggtcactattagctatagatatagggagtttcgcggcacgcccaccggttattccataattagagtttgagtttaagaatggttcgataacaacctagctttcattagatctactaaccaatagcttcctgagaataccctgttcctagctcttttcctaatcgtttacaacacaatcaatctgctgttttcttattttgttttcttaatatttcacacataccctgctagcttaatctcgatatttaactcactgtttgaacaaaagaactccttgaattcgatcctaaaatactgcaattgatctcttatttgagagagtagttctaggtaatttgaaccatatcaaatttggcgccgttgccgaagttcttgggaatcatcattgagtttagtttagagattttgtctagtttttacttctattttgttactcacgcgtttcttgttttcttcttttctgtgtttcaggtgtatgcctaggcaaacaaggagcacaaaacagaaggagcttatcaacttgtctgttctggacttgggaaaacttgaatgcaccaaacgaaaaactcagaaattagca

SEQ ID NO: 7804 - DNA, 3000 bp, Unknown
  misc_feature (1)..( 3000): cDNA_ID_3089051_gDNA_ID_1621164_Annot_ID_173808 3000 nt of promoter + ATG
tgatctaaccaaagttttttggaatctaatagcaataacaatctcaataaatgtttttgcatttctaaacggttgcattttttatcataacttttcgttaaaatatttaatgtttgttttacagtcgtgtttttttgtcgtatcttttcgttaatatatttatggttatttttggtggacagttatacttattcaactttagtcgtatcttttcgattctgaacggttacgtctttttatcgtaacttttcattaatattatttacgattacttttgcggttgtgtcttcttgtcgcatatttttgttaaaatattgcatattttgggaaaatttatgtaataattcaaatatttgaatatatttatataataattaaatacataaatactaggcctgggcattcggttcttctgttctatagcctcttaagatctacgagggaaccgaaaaagtttcggtttggttcagatacttagaaagaaagccgagaaattaccgaactctaatagataccggtttggttccggttattttacccaaaataccaaaaagaaaaaaaacgaaataaccaaatattcgattaacaaaattgtaaaatattaaaaaattaacaaaactctattgggttataggtttgttaaaaatgtagtgggcttagatgtagttttgtatagggttgaccaaatattttttggttagattttggatttccatagatattcggtttgttcagttatacataatattcaatggatagtgtgactgaaatccgttcgaggatatttagtattatctagaaccgaaccggattcctttttcggtttggcttggttcggttcttcggttccggtttttatgcctaagccgttctaacttctatggttaattgaagaatgtgaaatggtggttaatattcaagaaattttaggaagccgaagtactaaatttagatactgaagaaaagaagaagaagcataagaagaggcctaaatgcccagagaattaaacaaatgggcctttaacaatatttttaacaatcagatctcaaaaagctaaagccttaatatataaacaaacatcaatctctggccgtcaaaggttacatctatcgccgccgctgagaccgccacttaaggccgtctcctccgcaatctccgtaaccaaaaccaccggcatcgcctggtaagctcgattttgtaatcatttcgatctcatatgatgtcgatctgttaaatcttgcgaaatcgatctttgttttgttctgagatttagggtttcacgaatttgtgttctaggttttctggcttaatcatttctattgttttttgttcttattggttcttatgcttttggtgacacaaagatctcgactttttcttgactctctatgcgaatttgtcaaaagtcaaaactttgtaacagtttactctctttcgtgcttgtgtttatgtatgaacaatagcttcgctattgggattgtttatttcaccacacttgattaattatacatactattgaaaatgttatcaatcttggcgataaaaaccgtcattttcatgtgtcttagctctagtagcaccttttgtttagagatcctgagtttaaagaagcagtagctagcatctttggtatagtaaattgtttcactgacaaattgtatatcatttggttataactagattagtgaaatttaatggatgagattatgtagcattgttttaattttgtatggagagaactggtggtgggcttatttccaaaattttcctttgattaagtcaagaccctttattttgagaagtgagagagaggattgtctgagtattgtcgctttctcaaaatctttccggggctaagcagagaaaagctgatagttaagcttaggaatgtgatcttggtcttttaagaatcttgaaactagtgggtaacttggatccatcgaatttgttttccgtaggtgagtgttctttagcctatttctgagtctgaattatacagtgtagacatgaaaataggtttttatgtgatggactcttttgttttatggtttaatggatatgttgagttttgtttttcccatgagtctcttataaagttggaatttgattcatggaatcttggatccagattacttcgaatatataaatgaaagaacacttagatgtatcaaagggaacttaagcgtgtgtactgtttagtgtctcacaacttggaatttggattagcgctttcatgttttggagtttgatttatattcgtgatgtttggatttggatagtaccttggtccattgaactatgtatcataataatgctttggatatggatatcgttttgatgacttacttgataactgctcatacttaaaaaacatttgttctagaaatctagattctcgtctatgagtgtttatatgttgaattcatgtcgaagtcatagtttagagatctcattgagcatttccccttcggaagagtgaggagtcttgttttggggattctttttagggctagacctgtgaggaccttcattaattgagttcgttttattttgtacccaaatatgttttttcggcttatcccattggcattgaaaaagttattgtttacattaaaatgttatttttttctttcattgagattaccttgctagtcattggattttatcggttttaaacttttaatagctgaacaaaaggggttttattctaatgtttacttaacactagtctggtcataaacaagtataaattttgggtttaagttatacttcttttattggaaatacatatcaaattagggcgtttcatagatagttgatatattttcttcacttgcatgtagttatgttcggtattatcgagaacttactgtgtttgaagttcctcggcaggaaaatcctgtagagtttgagccaatgttgtcggtgtgaacctcaaaagttgtgggtgtttttcccgccgataaagctgctggcaagatgggttggggttgggtaga

SEQ ID NO: 7805 - DNA, 3000 bp, Unknown
  misc_feature (1)..( 3000): cDNA_ID_3046549_gDNA_ID_1621164_Annot_ID_173806 3000 nt of promoter + ATG
ttgtgtctctgggggatctatcaatacttcttggcaaaagggtcaacttctgcgacaaggatcgtttggctctgtgtatgaagccatttcagagtaagtcttactggttgcttatgtttgttgaacttaaatcaattacttagttttacgttatgcctttgctgatggatggttttgctgaatgtagagatggggacttctttgctgtcaaggaagtttcacttcttgatcagggaagtcaggcacaagaatgcatacaacaacttgagggggtatggaagtttcatatatgatcggcagtatatatctcattgatcagacaaaagtaggttgctaatccaccttaccttagccacatgttttcattttctacaggaaattgcactacttagtcagcttgagcatcagaatattctgcgatatcgtggcacagacaaggtatggccctggtgtccctttcttgttctcagttgcagttgcctaagcattttgttctgcaattaataacttatttcgttgtttgcaggacgggtcaaatttgtatatttttcttgagcttgtaacacaaggatcccttctagaactctaccgaagataccagattcgggactcgctaatctccttgtacacaaaacaaatccttgacggtttgaaatatcttcaccataaaggtttcattcacaggttagactagtaaactctcttgtcacagctgtaattcccaagcctctgatttcctgcacatcctaggttacttacttttctcatctgatgcgacaaagggacattaaatgtgcaactatattggtggacgccaatggcaccgtcaaacttgcagattttggattggcaaaggttcttttccaataatagatgtttatagcttttactctaacttaattacttggtccatcgtttatcccccttactcaatatatatgtcatttttttcatttaggtgtcaaagttaaacgacattaagtcccgcaaggaaactctattttggatggctccagaggtatacttcgggatccttcctcctgttttgattgttgtgaatacaatgacaaacatatcatatatcaatagcaatgatggatgttatactgttgcttatatatgttgttgcaaccgttgtgatatgggcttgatagcctcaaaaacccccgattatgtttccttcatagtttgattaaatttcctttatttctgtttataactgtaagtatgtttgtgtaattatacgtaacagatatatttgaattccttccactttcattgtagtttaggctatacttgatcaggttatatgttacagtttttcctaaatggaacataataatttgatcaggttattaaccggaaggataatgatggttacagaagtccagctgatatatggagcctcgggtgcactgtgctggaaatgtgtactggtcagatcccatactctgatctagaacccgtaagtcttcaggattttcaaacttttgaactgtcttataatcttaaacgacattgaagggtctacttaatgggattttatgagttaaaggtcagaatttgtgcaaacgcgcaggttgaagccctgtttaggatcagaaggggtacgcttccggaagtacctgatactttatcactagacgctcggcatttcatacttaagtgtctcaaattgaacccggaagagcgtccaactgcaactgagctactgaaccatccatttgtgagaaggcccttaccatcctcaggctcaggatcaacatctccgctaatccgtagatgaatctaattttattagattgcctccataggtgaagcctctagtttcgttttattgagaatatattaggatcaaacgctatattctaacattgatatcttaatgtatgagagcaggggtaaccagaaggtttatgagatattagaccccatagaaactttaggggagacacgagatatgattctttgatacatatgctgttttggttgcgcagcaagagctaaactttctcgagacatatcttcaggtagtttctgtctcattcattggttggttgttgtaagttgtgtcacttgtgtgtgttgagcttatatttaaaactgaagagccttggttaaattagagttttgggtgcataggtttgtttagttttgttaaattatagtatcatgtaatgtataagaagaaccttagttgatttagagtttcgggtgtataggcttgtttggttttgataaattatatagtgtatgcatgtaacccatatcatgtaatgtgtaattatagttggctcttatatagttcctgcttgttgcaactgtttacacatctcatgtctcgatggatttaatctccaatttttcttatatatatatctgaattatacatgcatacatacactataatttaacaaaactaaacttttcttttgggtgcaaaaacataacctatattcatctcttaattattttacgctgaagaaatctgctgtttcaattaaaaaagtatggtcaaaccaacattttctttgaaattttggtgaaagccactctcattgaagtgtatatatgattcaacttgtttcttacaatatttgccccgttgaaaacttttttgccatcgatgagtttctttaagggcaaagttcctttaagaaatgcttttagatttctttgtatacctatgaatttttaatcaagtgatgaagacacggagaaaaatcctaaattgatgctaaatattttatctgtggacttaaccaagtctcccacaaaaataatacaagaatctgcaacaatttttaaaattcagtattcaattattattcagatactattactagattgaaaattcaactcttgtcataagtcgtcgtcaacttcttttgtttgcttcttcctttttctctaacaggtgcagtgttactgccagttgtttggatatttccacttgtgtatttattctctctatctctttgacgtcgtctacagactaca

SEQ ID NO: 7806 - DNA, 3000 bp, Unknown; identical to SEQ ID NO: 7802
  misc_feature (1)..( 3000): cDNA_ID_3046557_gDNA_ID_1621164_Annot_ID_173801 3000 nt of promoter + ATG

SEQ ID NO: 7807 - DNA, 3000 bp, Unknown
  misc_feature (1)..( 3000): cDNA_ID_3046570_gDNA_ID_1621164_Annot_ID_173794 3000 nt of promoter + ATG
aaataattgaaatatccaaaaatatttaaagcaaaatactgaatggataaatttttaaaaccaaaagaaccgaaaccgaactttcaaaataaccaaatggatactaaactttagaaccaaaaaaaccaataaccgaatggatacaaaccaaaaccgaatggataaccgaacacccatgactattttgacaatgtatttctttacaaatttaagaaaattggcaatgaatataaactcattattggtaaagaatatttagttagattttcccatatctcttaataattaattgcattagcatatttggggatattttcttaaacaaaaagcaacattcattaaattttgctttcactttctaaaaaatcttggcatattaatacattgaacatgtcttcttataaatgaaccaaactaaaccaaaagatcctaatcaaaatcaaccaaacatgagcaaatcaatctttgttgtttgtatcactttattggttgttctatccccaactctaaatgctaaaatggtgacttacccgaatggtgatagacactgtgtaatggcccaaggccaagtgataagtgcatgcttgcaacaagccaacggactaccacatgcggattgttgctatgccataaacgatgtaaacagatatgtagagacaatctacggtcgtttagctctttgcaaatgtttccaggaaattctaaaagattctcgatttacaaaacttattggtatgcctgaaaaatgtgccattcctaatgctgtgccttttgaccccaaaacggattgtgacaggtttgtagaacatatttggcttaaaatgttttgaattatttgcactatctcgatagaactttaagattttctttgtaaataaagttctgagaaggttaaaaaattgatggttatgtaaaatttcattgattttaaaaagagaatattacgtgattagacacttttttgaaagttaattcctaattagccactttaaatggagaaggcactttagataaattattttacttatttaccctttaactatatttttttccatcggtcatctcttctctctccttttcccatctcttctctctttttttctttttttttcctcgctttatctaagaaaaaaacatttcccagaatatcttcaattccaaatctgcaattaatctccaaatccactctacgcgatggctttctcttctctctggactaattggagaatacgaggccttggtttctttaagattgtgatttattttgcaatttaaatatttgttttgacataaatttgagattcagttatctaagaaacttcttcttcttcaacaatggcggcttgatttgatttttgctctctctcatgtgtcaaactcgtttcatctatgtagcatcgagattccggttaatcgaatttcctgttattatggacatggtatacagaatggatatagagcagtaaaaatgtttctgaatggatatatttaaatggactcgttattatggacatcaaaacattgtttgttgatttttctttcggtttgcagagacctctaccttcaaaaccttatggacatggaactttggtttctttacaaaacacagttaatcgaatctcctgttattattgacatggtatatagaatggatatagatcagtagaaaggtttctgaatggatatatttaaatgaactcgttattatggacaccaaataattgtttgttgatttttctttcagttttgaagagacctccacttccaagaccttatggacatgaaattttggtttatttacaaactacggttaatcgaatctcctgttattatggacatggtatatagaatgaatatgaatcagtaaaaagttttctgaatggatatatttaaatggactctttattatggacaccacctctgagaccttatggacacaaaacttttaccaaattcctgagataatcgagatcgaattgtttaagaaacttctccaaaagttgtggagacgtggagagagagagagagagagagagagagagagagagagagagagagagagggagagagagagagagagagagagagagagagattgattttttatttacgtaaggatcgtggagagagaaaatatttaatttgtgttaaatttcaaaagaaaagtttaagggtaaaaatgtctttaaagaaatcaaataatagaaaaagtgccctctccctcataagtgcctcaaaaggaataaaattatttaaaagtgtctaaacgtgtcacattccattgtatatattggcataagaattagaaagagcttattcgtagaaagatgcattccagtttctattgcagcaacttcacagggtttatctctagccttaagcatcatgtaagtcgttttgtatttttcaaaagattgatttttgtttatatatatatatatataatgggggggggttgcgtattaggctaaagatatatcgtatgtaaatattatttacctaagatatgattctatcaagtatagaaaaccctttttctataaaatacttcttcactctgatgaataatacacatactttacaactagttcatagaagaagatgtttgggtgtggtttggttataataggctagaaatgaatatggtcttagttaagttctaagtagatttgctaaactagagtagttaaagagtgttatgttgttagtgtagagtagtgatgttaattgttattgttagagttccaatgtgtaagtgtagagtggcttgtgtaagatcaagctacaatctaggagtaaggtctaagtgagtctagtgtagcaagtgggtggagaaaatataactatatgtgtgtatgtgtgtgttatgttgtgttgttgtgtgagatcaaaagttattaacaatgtagacaattaaaagacaaaatcgtttcttgtgtttctctctaacaagaactacaagagagtgcaacaataagagagagacatagttaaagaatg

SEQ ID NO: 7808 - DNA, 3000 bp, Unknown
  misc_feature (1)..( 3000): cDNA_ID_3046577_gDNA_ID_1621164_Annot_ID_173791 3000 nt of promoter + ATG
attataactatataatttaaatttaaattatatatttttttattaatattgtttgttttgttttgtgttttagataatgtaattgtatcttaattgttatatctaggatttcacctttagtataccgtcttgtattactatcaacccaaacccgtcataccatctaatcatgttcaatgaaattaaacatatctaatggatttcacccgtggtatatcgtctcgtattactatcgacccaaacccgtcctaccatctaaccccgttcagtgaaattaaacattattttgttatttttgttttaataatactttaatataaaaatatataattcaaatcaatttaaaagttttctttcaaatggttatttaatttttataaagttcatatgatatattattataaacccatcctaccatcttatctcgttcggtgaaattaaacattttttttaataatacacttattaaaaaaattataattcaaatcaattcaaagttctttcaaataattatttaattttgtaagattttccatattataaatattgtaaacgttttccgttaaatattctaaaatgtttaataaattatagataactataatatttatcttttaataaagtataatattaataatgtgctaaactttctcttctttgaagtaattagaatttatgaaaatatattagataaggaaatgctagtaattaggaatattagtttattgataataattaatgctaatggcattccttgtaacttgtaagtgagttccaactctaggatttatttcacaaaatggctgcaaaaatgtatatgtagattgttcataaaagtatacaagtcattttcatgaaatcaaaacttataaaaatccacttcatgtttttttttgtttttttgaaatgttgggttaattttggaaacaaaaatcttttagtactatttttgtcaatcttcctacattttatcccaatttctatctaatgaatttttattaattgttttgggtattttggtaggcatatgcatagtacccgaacccgaggaaccaacccaaaattgacctgtaaactcgattcatatccaaacccgaaactttcaaatacccgaatgggtctaaacttcaaaactcaaaaaacccaaacctgaacccgacccgaataggtacctaaacatacctcaaatataagtatatattaataatatcttagttatatttatacttatacatacaaaatattctgatttttaagttattcttgtgtattgtcggttacttctggatatattcaaataaaactatatgagttggtttggtaattttttaaatttttaagtaatttgatagatttgcatacaaaatttttatattttaatatttaaattaattcaagcccgaacccgactagaaatctaaaaatatccgaacgggtcttaaattcaaaaatctcaaatgaataaaaaggattttaactagtatttataaatcatcgaatcaataatatataattttaattagaattttaagatcaatgattgaataacaatttttggttgaatttccaattcctaagctataaaccaataacccatcctaaatatttcaactaaaccgaaccgacaagaaatcgaaccaaaaaaattctggttcccttatcgatcataggaggcaggaaccaaaaaaacaaaaaaccgaatgaaaccgaataaccgaacgcccaacccttttgtacatacttaaaccgaccatattccatgtttcatgttacaaaaatagttaaaagattttacaactacagtagaaactctataaattaatactcgataaattaataaacacgataaattaataaattttgccggtcccaagtcgggccaatgtaaaaattaaccaaaatcgataagataataagataataatttttttgaaatccctatgtaaagttatagtcccactaatattataaattaataatcataaatcttaagtatatattttaagactaatttttatatgaattttttgttcaagctacaattacaattctttttaaaatacaactagtatgatatctgttgtactcacataactatttgcgtatttgatccgtcatagttgattttgtaaaatattttatttgagaaagcattgctaagatttgtgtaaagagaaactggattaagcttcatgtttacgtttacgttcacgttaatattgtaaatatacatacacaatatcttgccaaaaaataaattaaagaagtcaaataaaaataaaaatctaacataattatatatgcaaacaacaaagcatatagataattaaatctatatatacatttttacagccattttgtgaaataaattctggagttggaacttatttacaatgtctgccattagcttttaattattggtttttttttggcaaatatattaaaagcatatagataattaaatctatatatacatttttgcagctattttgtgaaataaatcttggagttcgaacttatttataatgcctgccattggcttttaatatatgttaataaacattttcaaaataatataatattgtattttacataaatatttctataaattaatatttattaacttatacgataaattaatatttattaacttatacgataaattaataaatattaatttataagataaattaatattattataaattaataaaattttatggtcctaacattatagagtttctactgaagaacaaaccgaaaagtaaaaaatatctaattctgtattaaaccagtaaaatttcgtaccgcagcgataccggtttactaatcaaacccgaaaaaaccactccgtatccgtaatcttcatctctcgctacgacacaccaactgtttaatttcccaatttgtcgccgactcttcgaccttaaatcaccggaatctttctctaggtcgccgtcaagcttctctccggagaatatggttttggaataaacgatg

SEQ ID NO: 7809 - DNA, 3000 bp, Unknown; identical to SEQ ID NO: 5030
  misc_feature (1)..( 3000): cDNA_ID_3075380_gDNA_ID_1621164_Annot_ID_173784 3000 nt of promoter + ATG

SEQ ID NO: 7810 - DNA, 3000 bp, Unknown
  misc_feature (1)..( 3000): cDNA_ID_1809330_gDNA_ID_1621164_Annot_ID_57183 3000 nt of promoter + ATG
atgcttgttttagaaggaagaagcctgtgcgttcttgtcaacgatttatatgccgttgcgcgattagagatgttggatattaagacattctaattttgttgtaagatttataaataattttaaaatataaattaattactagttaatgttcttccttgtatttcttttacagtattgaacatgtacaaaagtatgaaaagctaactagtattaccctaatctaataggaacatgtaattggaaactcaagttttcccgccaaatttttgccgtcaaaaaaatattttccgccaaacatttttcccgccaaattttttttttcgtaacaaattttttatcaaccaaaaaaatagttttaaaaatccttgtaaattttttttggcggaaaatagatttacaagggattttaaaagggttttaaaagatttataatgaattttaaaagggttttaaaacaattttaaaactcttttaaaacaattttaaaactcttttaaaacaattttaaacccctgtcaaaacaattttaaaccctttaaaaatctttaaaaaacctttgtaaatctattaaagtcttttaaaatcccttgtaaatcttttaaaactcttttaaaatcctttgtaaatcttttaaaacacttttaaaatcccttgtaaatattttaaaaccctttaaaaattccttgtaaatcttttaaagcccttttaaaatctcttttaaatctatttcccgccaaaaataattttggcgggaatttttggggggaattttttcgaaatttttttggcgtgaaaattttgtcgaaaaatttattttggaatattttaggtaaagaatattaatattttattttgttaacctaaaacaattttcaaataggggtaaaatggtcaattaaaatttaaagagggtagaaataaaaatggctaaaaaaaggtagagttgaaaaggggcatcgtgaaaagagcattagaaagaatttttaataaaattacacatattgtaaataaagttttttgtaaaaaattagttctgaacctataattaatattaaaagaaaatacaatttattttcattgataacttataaaaaacataatatatatacagtaaaacctctataaattattactcgataaattaataacctctataaattaataaattctttcggtcgcgagttggtaccagtctaaaaagtgacacaaatcgataaattaatcaaataataattttttgaaaatcctatataaacatatggtctcattaatatcataaattaataattatataaaaatatcaactatatatatatatgttataattatatataataactttaatgaaatataattttagtattgtttctttttgcttaaactcactttagttatttttaatttgattttagtaatttttactatatcaaaaactgttcgtgttgttttttaaacatgataattgattttatttgtaattagttctagaaaaatatttcaaataatgaatggaagcttatattttcataaaaaagtttttaaaaaacttatcaaattagaaaaatctctatataaattaataaatattaatttatcgataaattaatacttccataaattaatagaattttgcggtcccaacattatttatttattgaggttttactatatatatatccctatatattataaagaattttgatagatttaaaactttatttacaacccctgttagacgacaaagataggcttcacaaataggtagcaaatgaaaggttaaattggcatgtagcatatggaccgaaaatatgcgaataagtactaataaaaactgaggaatatcgaatattttcaaataagaaaccacaatgtcactttaaaaaatagtattttagctaatggcttttaattttgcgactaatttgcaatatctctatttttttaataaacaattaaccatttatatttttaaaatgggaacgatagaaaatgatacttatggtgattggttcaagctttgaaggctttaacttttttcttgtaaagtctttaaagattgagtttttaccaatcacacttttttattttaaataatttaaaagcttttaaagtctttcttataaatctgaactgtaacatataacaataaaattcacacaaagaactttataataaggtttttatatataatatacatcaaatgtaatatttgatattttttaatatctacatatacatttttgcagccactttgtgaaataaattctcaagttgagaattatttacagtggctgccactggcatttaataattatttttgataattagaaagtaaatcttcgaattaaatatttgacatttaactatttttccaaaatctctctacattaactacacgattagttactaaaataaaacttccaaaatatttaacatcatttaaaaattacaaaattatcatttttgatattgtttttttgtatgactataacaattcgattatacgcatcaacctacatagatatttgatagcagttaattaatacaaaattacaaaatatttagataatgattcataaacatatcataaataagatcaacattaataaaataaatagttttttttacggggcggattggcgagacgggtttggtagaacgttacttaataacaattgtaaactataaaataaaaatattttataaatagatacaatttgcaaacttttatatatactaacttaaaaaaaaaattgtccacgcggtataccgcggataaaaaactagtttttatatacataagtggattacttaagaaaaaaatgattaaaaggtactctttactctttactcctttagaagttacaacactatactggattacttaaaaacaaaaactttcatgaaaaagagaaaataataaaattgttgactggaaaataaaaatacaattaatataaagaaatctctctaacaactttaccaatcatcgtcgctcac

SEQ ID NO: 7811 - DNA, 3000 bp, Unknown; identical to SEQ ID NO: 7805
  misc_feature (1)..( 3000): cDNA_ID_1809326_gDNA_ID_1621164_Annot_ID_57184 3000 nt of promoter + ATG

SEQ ID NO: 7812 - DNA, 3000 bp, Unknown
  misc_feature (1)..( 3000): cDNA_ID_1809323_gDNA_ID_1621164_Annot_ID_57185 3000 nt of promoter + ATG
taccggtttggttccggttattttacccaaaataccaaaaagaaaaaaaacgaaataaccaaatattcgattaacaaaattgtaaaatattaaaaaattaacaaaactctattgggttataggtttgttaaaaatgtagtgggcttagatgtagttttgtatagggttgaccaaatattttttggttagattttggatttccatagatattcggtttgttcagttatacataatattcaatggatagtgtgactgaaatccgttcgaggatatttagtattatctagaaccgaaccggattcctttttcggtttggcttggttcggttcttcggttccggtttttatgcctaagccgttctaacttctatggttaattgaagaatgtgaaatggtggttaatattcaagaaattttaggaagccgaagtactaaatttagatactgaagaaaagaagaagaagcataagaagaggcctaaatgcccagagaattaaacaaatgggcctttaacaatatttttaacaatcagatctcaaaaagctaaagccttaatatataaacaaacatcaatctctggccgtcaaaggttacatctatcgccgccgctgagaccgccacttaaggccgtctcctccgcaatctccgtaaccaaaaccaccggcatcgcctggtaagctcgattttgtaatcatttcgatctcatatgatgtcgatctgttaaatcttgcgaaatcgatctttgttttgttctgagatttagggtttcacgaatttgtgttctaggttttctggcttaatcatttctattgttttttgttcttattggttcttatgcttttggtgacacaaagatctcgactttttcttgactctctatgcgaatttgtcaaaagtcaaaactttgtaacagtttactctctttcgtgcttgtgtttatgtatgaacaatagcttcgctattgggattgtttatttcaccacacttgattaattatacatactattgaaaatgttatcaatcttggcgataaaaaccgtcattttcatgtgtcttagctctagtagcaccttttgtttagagatcctgagtttaaagaagcagtagctagcatctttggtatagtaaattgtttcactgacaaattgtatatcatttggttataactagattagtgaaatttaatggatgagattatgtagcattgttttaattttgtatggagagaactggtggtgggcttatttccaaaattttcctttgattaagtcaagaccctttattttgagaagtgagagagaggattgtctgagtattgtcgctttctcaaaatctttccggggctaagcagagaaaagctgatagttaagcttaggaatgtgatcttggtcttttaagaatcttgaaactagtgggtaacttggatccatcgaatttgttttccgtaggtgagtgttctttagcctatttctgagtctgaattatacagtgtagacatgaaaataggtttttatgtgatggactcttttgttttatggtttaatggatatgttgagttttgtttttcccatgagtctcttataaagttggaatttgattcatggaatcttggatccagattacttcgaatatataaatgaaagaacacttagatgtatcaaagggaacttaagcgtgtgtactgtttagtgtctcacaacttggaatttggattagcgctttcatgttttggagtttgatttatattcgtgatgtttggatttggatagtaccttggtccattgaactatgtatcataataatgctttggatatggatatcgttttgatgacttacttgataactgctcatacttaaaaaacatttgttctagaaatctagattctcgtctatgagtgtttatatgttgaattcatgtcgaagtcatagtttagagatctcattgagcatttccccttcggaagagtgaggagtcttgttttggggattctttttagggctagacctgtgaggaccttcattaattgagttcgttttattttgtacccaaatatgttttttcggcttatcccattggcattgaaaaagttattgtttacattaaaatgttatttttttctttcattgagattaccttgctagtcattggattttatcggttttaaacttttaatagctgaacaaaaggggttttattctaatgtttacttaacactagtctggtcataaacaagtataaattttgggtttaagttatacttcttttattggaaatacatatcaaattagggcgtttcatagatagttgatatattttcttcacttgcatgtagttatgttcggtattatcgagaacttactgtgtttgaagttcctcggcaggaaaatcctgtagagtttgagccaatgttgtcggtgtgaacctcaaaagttgtgggtgtttttcccgccgataaagctgctggcaagatgggttggggttgggtagaatggtgtgtagggcaaggtaaggatgcttcacttacaaaagaatcatttagaaccgtttctttctttgggatctaaatgtgtttttttcggcttatcccattggctttgaaaaagttctctagtttgtttctttgtactaggagcattcttaccattctttaaacattgggcagtgaaagatattttcttggattagtattctgcttcttgtggtgttgtgtgacactcctagactatgttatttcctgttaacactgtctttgtaggacaggatgtgagaaatatgctgtttctgcaggataccctgaatttaccagtttaccggaatcatatcagaaacataaactcttatgttacaaaattgtaatggattagttgatgcgcattctgtgttttttcagttgtaaatttgcagaattgttgaatgttgattgctcgagaagagtcttgtgagtgaattctatttcttaatatatctgattatcgtttttgttgttgatttaattagcag

SEQ ID NO: 7813 - DNA, 3000 bp, Unknown
  misc_feature (1)..( 3000): cDNA_ID_4359805_gDNA_ID_1621165_Annot_ID_57187 3000 nt of promoter + ATG
aagggattgtaacagagttgcggacaaaaaaagtctcagaaaatatattcatgatccaatttacattcaacttttacacatgccaatatacctatcatacactagagtagccatgctatacatataaatttccagctgaatgaagagcataacatatgaacagaccaaatctagaatgttataatgacatggtagacaggattctttaacaaaaaaaaaagtacctggtaattcatgaaggtctcaatcagttccacagtctgatacgaaccaagaactgtagattgatacctgaacaaagaattaggcagatctaaatacattcacaagaaaaaatttaacaagtgaactcagactgatgtcattaaaaaacctaccagccaacagtgttgttgtcaacattaacctccctcagacatctcatcatctcaagctgataattagcaccatcagcttcaatttcttcatcatcatccctgacctgtcctcgtttaagatacaaattccagtaaatcacatgtacatcaatcatgaacaagctcttaaatcctcacaatgcgtgtaaaattcatcaacataccgggaaaggaaaacaattggtaacttcgaggacgctaccaacatcaagtccaagaagctgtccagtgacaagggtcggtgaaaactccttgcagtgtttgattatctttagtacagcctatcacaatagcaaacaaaattctcagcatcacaacttcctaccaaatgataatgggcaaattagcttcacctagagagtttttatttatcaaacaccatcggtcagcagaaaacgaggaaaaacacttaaaaccgtaaaatcagggaacactaagaaacgttaccagtccttcgatctgaacaactctaagcggaggagccaccgcctcatccttcgatatcgcctgcagaaacgacctagccactgcagaaataaaccacggaagaaacttagcacgacatatacagaaatcgtcaataaacagatgcaaatattaattctatgtcctagtgaagaacagagaggatgattatactgactggttgccattgaaatagtctccggtgatagtgaaagcttcctaggtcaaagaacttgaatctccgccgtgaaaccctaacgatgtgatatttttactgccggcggcggagatgagtaagagaaagaactttatgtgtttgatagggcttctcgaggatccgcagatttttttttcccttcaatttgggtgtagagaggaaaaaaaaaaagcgtttcgcagttaaaattgcaaaagagccctaaaatttgagattcttatagaatgatccctaaatgttttccgacctataataaggatggacccagcccatggacctataatgctattctcttgtaaaaggccaggaccataatattcctcaaaatattgaacatttaatttaatagcatgggcccattacactaaccaactagtcaaaacttagtaagaaaaaacaaacagtcatggagtcaactagaatccaaaacttttagaaactttccctccaaattccatccggtattagggtttaatcgaaaaagaggactaattcaaagtctaatctttagtaaccaactttaaaaagtctataagacatggtcatttcataagtccgtaagaaaatcaacaatgtcctaaataaacggcaaaaactagagaatcaccactggtatcaaaaaacgtaaaaccaaatatataaaacgtattaaatgtactatagtttattactcgaaagtcgaaaaccttgatgattcattgaaggtcaaagaagtcaacaataatattgatgccaaattaaatgactgcagtctctttgcgaggttggtgtttggactggtggaccgctggttaataattaactcagcctttacgtgaactcaattctcacctcttctttattacattttcatcacgcttaagctaagcaactaataaattcctaatttaataaacacttcaacatcctcgttttagagattgaataccaaccatgaatgttaacacatctttaactttcctctcaaacaaaaatccaacaatctatatcctcattgtataaataacatgaggtccatattaaaatacgattaaaaatattataaaaaccatgtgaagattcaacaagaaaaagaggtaggaaaaaaaagcagctcaataattggtagagagtgcaaagaggaaccagacaccaactgaataaaattgaaaaacaatgtctctccttactttaaataaatcatccctaaaattaattattcccaccatatttcttctgctccataccacacttcaccataaaatctctatataaattttctcagcagcagtaactaccttggccccaaaacctatctgtctctgaatcttggcaaagtaatagcaaccataacaataacgacaaaaatatacgtgaattatttttctctttctccttcgtctctccttcataaacccattattaattttttttataatactactattattcatgaatgcattgaagatgtcacagtgagaacaaaaaaaaagttttccaggcatggcttcacgtgatgacatcttcctcgaccaagaacttcgagaaaagatactcagaaagtgaagtgagagagagagaaaatgccggggaattttaatgcttcttcttctcttcttagtgctcactaccagaagatttctttccgccattaaagagcagagtagagcagagctctcactttcttcttcttcttcttcattttttacctttcccttttttgcttcgatcgagatgctttagcataatggggcagatctggaaagtgacttaataatagaaagtgatggctttgaggagattcatgggatgctttttatggaaactcgatttcgaactgtatcaatcatttctgtttcttttatgagctgaggaaaagagccactctttctgatttgattgattcatcattcatcgacaatg

SEQ ID NO: 7814 - DNA, 2247 bp, Unknown
  misc_feature (1)..( 2247): cDNA_ID_1394643_gDNA_ID_1621165_Annot_ID_57188 3000 nt of promoter + ATG
agttagctttgaaactaagaaccctaagttgatccaactggttcaaactcttctcgttaagtgagccggtgagattcaagtactcaagaacaagcttggagactcttccattcatacattctctaacaccttgccagttgcagagatctgttcctctccaagaaatcgaattagatggatcgattgaagatttcaagcttagtaaagcttcgacgtcgctagatctcgccggagtaaccaaacagaagaagactgtaaatgcaaagactacgaacgacaccgtactcgaagacgaagaagaagaagaagaagccattgtcgatgaatgatgaatcaatcaaatcagaaagagtggctcttttcctcagctcataaaagaaacagaaatgattgatacagttcgaaatcgagtttccataaaaagcatcccatgaatctcctcaaagccatcactttctattattaagtcactttccagatctgccccattatgctaaagcatctcgatcgaagcaaaaaagggaaaggtaaaaaatgaagaagaagaagaagaaagtgagagctctgctctactctgctctttaatggcggaaagaaatcttctggtagtgagcactaagaagagaagaagaagcattaaaattccccggcattttctctctctctcacttcactttctgagtatcttttctcgaagttcttggtcgaggaagatgtcatcacgtgaagccatgcctggaaaactttttttttgttctcactgtgacatcttcaatgcattcatgaataatagtagtattataaaaaaaattaataatgggtttatgaaggagagacgaaggagaaagagaaaaataattcacgtatatttttgtcgttattgttatggttgctattactttgccaagattcagagacagataggttttggggccaaggtagttactgctgctgagaaaatttatatagagattttatggtgaagtgtggtatggagcagaagaaatatggtgggaataattaattttagggatgatttatttaaagtaaggagagacattgtttttcaattttattcagttggtgtctggttcctctttgcactctctaccaattattgagctgcttttttttcctacctctttttcttgttgaatcttcacatggtttttataatatttttaatcgtattttaatatggacctcatgttatttatacaatgaggatatagattgttggatttttgtttgagaggaaagttaaagatgtgttaacattcatggttggtattcaatctctaaaacgaggatgttgaagtgtttattaaattaggaatttattagttgcttagcttaagcgtgatgaaaatgtaataaagaagaggtgagaattgagttcacgtaaaggctgagttaattattaaccagcggtccaccagtccaaacaccaacctcgcaaagagactgcagtcatttaatttggcatcaatattattgttgacttctttgaccttcaatgaatcatcaaggttttcgactttcgagtaataaactatagtacatttaatacgttttatatatttggttttacgttttttgataccagtggtgattctctagtttttgccgtttatttaggacattgttgattttcttacggacttatgaaatgaccatgtcttatagactttttaaagttggttactaaagattagactttgaattagtcctctttttcgattaaaccctaataccggatggaatttggagggaaagtttctaaaagttttggattctagttgactccatgactgtttgttttttcttactaagttttgactagttggttagtgtaatgggcccatgctattaaattaaatgttcaatattttgaggaatattatggtcctggccttttacaagagaatagcattataggtccatgggctgggtccatccttattataggtcggaaaacatttagggatcattctataagaatctcaaattttagggctcttttgcaattttaactgcgaaacgctttttttttttcctctctacacccaaattgaagggaaaaaaaaatctgcggatcctcgagaagccctatcaaacacataaagttctttctcttactcatctccgccgccggcagtaaaaatatcacatcgttagggtttcacggcggagattcaagttctttgacctaggaagctttcactatcaccggagactatttcaatg

SEQ ID NO: 7815 - DNA, 3000 bp, Unknown
  misc_feature (1)..( 3000): cDNA_ID_3046629_gDNA_ID_1621165_Annot_ID_57190 3000 nt of promoter + ATG
tacatagttatcaaaatcctaatcaaaagagtaaaaaatctaatttatagagattttattatagttgtagtgttagttccatcgctaaatcccttgaacgacaacgtttattatttcttcttcggacgattgtttgaagaaatttaaaaacgacatctttttattacttcctcttcgaaagattgtttaccaacaagaacaatggcggtttatcatctccttctctcgagcccaccttcgcttcttcttctccctccttctcctcgccgccctaacctcaccttaatccgccgtatcccagctcatcctcgcctcggaaactcgaccagcttgctttcttcttcgtcaccggtaattcggaaaattctggttcgtagcactctccgggaagaccaacccatcgcctctgactccgagagtagtcctactctactgatcggtgaagattctgctgcttttgaattagggaaacagaagcttgtttcctgggtttatttcggtgttgtccttggagttgttctctttatcctcaatgttgtttggatcgataattccaccggtttcggaaaatcattcatcgacgccgtctctaacatctccggctcaccggaggtatagatcaatttaacagtaactgaaccagtttcaatttcagttatttgattgttaaaaaccacttgtttttgcaggttgctatgttaatgcttatccttatatttgcaattgtacatagtggtttagctagtctaagggatataggagagaaacttataggtgaacgagcatttcgtgttttgtttgctggaatctctcttcctttagctatgagcaccattgtgagtactctctcttctaactctgcaatttttctcctgatcaatggtataaatacctgtttgatgtctcttatggtctatgcaatgccttgttcttctttcaggtttactttataaaccatagatatgatgggtcacagttatggcagcttcagggtgttcctggagtccatgaagctatttgggtcgctaattttgtatccttcttctttctctatccttcaaccttcaatcttctggaggtagcagctgttgacaaaccgaagatgcatctctgggagaccggcatcatgagaatcactcgacatcctcaggttttgaacatttccctaatgtgcctaaacatgaagacaatttccttcatttttgtgtttcaaaaatacagaaagattggatttttatgagccaaggtttattagtggctgtgttaatgagacccccaatcattgaatcaattatgggcaggtattggccattgacttaaatacacccattacatcagcacaatcaaatctcctcatccttctatgtttattacatcaatgcttgattactttacttgatattgcttttgatcttaaaattcttatccaattgcttcatcatgtgtttggaaaaacttgataatatatagaaagataggcattttagcttcagttttggtttgttctattctctcttcattatactggctttgttaatgagacttgattgttgcacctctctcctctgatcttctccagatggttggacaaatcgtttggtgtttagcacatactctctggatcggaaacacagtagctgcatcagcttctctcggtttgattgcacaccatttgtttggggcgtggaatggagacaggagattggcaaaaagatatggagaggattttgaaagcatcaagaagagaacaagtgtgattccatttgctgccattttcgaaggacggcaagttttacctgaggattactacaaagaatttgtcaggttgccatatcttgcaatcactgcgttaacggttggggcatattttgctcacccgctaatgcaaggtgcaagctttaggcttcattggtaaattatatgtcatgctttaggcttcattggtaaattatatgtcatttatgtttgtttgtttcctgcagtgttcataaagacttgttaaggaacaaatgtatacaaaaagccatattgtttgtgatacttgactcttcttcatttctcgattattttggctcaacactctgtaaccactatgtgtgagttcgatccaacaagtgggtttagattagtattaactaggaatgtttaatagtactgctaaatgaatatttaggtaaaactattttgtatataaattcccactcagatgtcatgggtcactctgacgcctaccactatactaatagaagtaaatttttcttttttcgatgtttagttacaatcggaaaatgaatctaaattttaactaatattaataatatgccaagatctccatccaaatctagattgatatctacatattgatgccttgatatctctaaactctaaagataaacttaaaggcaagtgattaattgttaactaaaattaaaaattaacaatacaattttaattcgctagttataaaaattttattaccaagaagaatatggaaaaaaaggaattggaggcaaaaaaaaaaaaaaaaaaaaaaaaagaggccaaaagaaaagaaagcaaaggagtatgaatacaacaaagaggttctgcaagaaacaaacaacacagccaattactactaaacaaacacactctctctttcattctttctctctctctctctctcgattttctcccattggagttcgcaattagctgccactctctgatcgatcttcttctcacatcacatcctttataatcttcagttctactgctcggaggtgtttgcttgcgttctctcttgtcggtcacatccctaattaccatcactgcccctgattaaagttttactctatcttctttgttgatgccaaatctgaggtgggtttctcatctttttattctttcagctgtgttttgtttcatttatttgtttctggatttgctaaaaccctaaatttgatatctttgggggcatcatcgtagctcaaatcagcttcaattatcaaatctccacga

SEQ ID NO: 7816 - DNA, 3000 bp, Unknown
  misc_feature (1)..( 3000): cDNA_ID_1809386_gDNA_ID_1621165_Annot_ID_57196 3000 nt of promoter + ATG
agaacagaagatgaacacgcttgaatcactagtgaaatacgcgagaggtctgaaacgaatggtgataaggattctccggatgaagagcaatcacagcagtgcagatgatttctgcgatgatatctgcaagttccggcacatgaacgagcatcttgttcatatagaatgaaataattttttgctgctaatcttattttcagccatttgatttctgtttctctttctggtcgctgagcatttcttatattgaactcttgagtaattgttgtttcctgattcatggttatgatgaacttatgacaattgttttttaaacgaaaaattatggacacatttcttaattagctttcttgttttcttaatctacattaataatatactagtagtgatctagcagaatataattacagtttatgataaagtttgtttttggagtatacttatgtatcaaagaagtattgtcctatgcttaaaaaagataaaagaagataatctccttaaaacaagataaacctcagattgcattacattaaaataaaacgagaaaacgcaaaacgcgcaccaccaacaatttcaaaaccaaaaaaacttgtctatatataacgtgattaactcctgcattgaaaaatgacctggtgataatttcttctcaattcaaatacataaataaatatcaataaaatggcgggccgcgacacattccagctgcgttttgcagcagtcgcggcatccgccgccgtattgatctttctcatggctggtcaagtcgcggagtcgcgtatgatcaatatctgctctcacaccgcgtatccatctttgtgccgacctctggtgaaacgtgtcacgagccctagaaaagccacgcaccgaaccatccaagctttggaggctaagacgaaactagctctagccgaaacagctaggttcaaaaacggtaaccaagcggtcagcacgtgttacgagacattgggcgacgcggtttacaatttggcaagcgcgagaaagagcataaggaaacgtgatgtgccggcgatgaacacgtatctaactgcggctgtgtctgattacggtgcatgtgtggacgggttcattgaaacacaacaggttaatgcgatccaaaatgcagtggttgacttgagaaaaattagcagcaattgcttggcgttgtctacattgattagatgatcgatttaagagaacaattgatttaatttttctcaaaacaaaaactaattaattgaagaaataaaaaatctcaagcaattaaaatttgggtttctttttgttgtttttgttttgagagagatgtttgttgttgatccatcattcgtatgtaacgccactgggtgtaactaattatatttgaatttcgtgtaattaataatcgctagtagattttttcatattcaacaatttgccgatagaaatgttttccattctcctttcttgaacccactttactttttcactatcaacaataagattaagttttgaccgaaaaataaaacaataagtgacaaagacaaacacaaactatagtaatgcacaactttttgttttgttaactactatcactaattcattattgatatggatatcattatgatgtttttagaaagtatatgtgtgattatgttttacttttcccaggatccataacaaaaaaatatctttgagaaaataatttggctatatcatatattggataaaaatattgccatttaaaatggtcttttaactctttttcttaaaatctgtatgtatattatagtttgatatgatcataaaagcattcaataatttttctttcatgcaaaactgatagatcttgctcaatgatcatgtttcaatgtctttaagtgttttaagaaagtgagaattgctttgatttggattgaaaaatattggaccataataaacacacataacattatacaaaattatcctttgcttctatatttaacatacattttgttttccacaatgtgtaaaactctctatagaagaaacaccacacaaaaacaccaaataaggtttagctaggatataattgacatgattgaacaagtgggcttgggatatatatcactacaagaatagaaagataaacaaaaatatcttctgcaattcgtggtttgtgaacacaagagaaaaaaaaaaaaaaacatgtcgaccaataaaaaaaagatacaagagaacgaagcataaaaatatcaaaacaaaaagacaaaaacaggaaaatagaaaaaagaaagaaaaattaaaaaaagctaaaatcaacggtgagaagattctgtatataataagaaaatatcacccaaataaaaaaaaaaggtggagtccacagataccgtccatcaacgtatcactgggctctctttctccgtgccgttcctcctacgtgctcgaataacgatgtgccacgtggtggaatcgaaggataaagtgtcgttttttacttcgattacacgtgagtgtatgtatgtgtgagtgagtgaagaagaacaaagagcgaagaaaccccccagcactcacttcatccataagatcattcaaattctgggatcttctctctttctctcattgtattcagtttcttcgtctcggttcgatcatcaggtatctttttcaattgaattttaccttcaatttcgattgctttcggtgtttttgttatttgattcaaattgcaaattttcttttgatagatattttcgttttgactataaaagacgattcttttcttcttagtgtatattgcacatgttccattcgcagaatgaagtaactgtttctctacaaagtgaaaataaaataaaaataacaagtgtggttctcttgtctaactctgtcagattcttctttttgagacaaatagtataacttgttccttttttttctcatctattgcaaaagcttcattgttttccttattatcttattatataatctctactttacttaacagatccggcaagtttgattcagtgacaagaaagc

SEQ ID NO: 7817 - DNA, 3000 bp, Unknown
  misc_feature (1)..( 3000): cDNA_ID_1809384_gDNA_ID_1621165_Annot_ID_57197 3000 nt of promoter + ATG
gttagctgccaaatgatacatgccatgccgcttcatccacctctttctttgatcttttctacatttcttcacaattttttagtttgtactaatttaatatttgtattggaatctcgcgaatggccttctctaaagccaaccaccaccacatcagtagttcagttaatagatatgcatatctacggacatttaaagctcacaaaatcaaatgtgtgtatgtttgtagatatcacaatgattcataaaaattacacaaccagtttgaccatatgatccaacaatgcaataatgcaaaatcacacaaccagcttgacctcaccatatgattcacaaccgatctcgtattcatagtatggcgtatatatgcatgcacaataaaaaattatcatatacgtgaaaaattgtgctatccacgataaatatatcgcaatgagtttgttttgacatttacgcaaaagtaaactaggattagaatgtataatcgattttggtgctcaatgcttaactaacaagtttaaggttgtttaattttttcttctctcttaagaatccactaatggtggaaatgtggaaggaagaatatggatttttttataatatgattaggatcttgaacctcacaagttatgcaacatatattatagatgctgaatctcaatttttgaaggtttacattgcatattatttacaagccatgacgacaagtatcaaatttatgtttgccacatattaaatttttaacatgcccatgtccaaatggttgtaactatgaagcagaaaacaatatacataccaataccatttgtaaatactagcatataactctgtacgtattcaaattacattatttctgttcttatcctgtataggttttaaatattgaaaaatataccatgcataatcaagggataggtaatgataattggtgggaataaattaaggatggcatgcatggatgggtccccaacataagcactcgagcatgcattgctaatactcagcctcgcgtgccaacactcccatgtccctaacacaaactacttagtaaattaaaatgatctaatctattatttacaattaattagtactaaactttgttatactcttccactaccacagttatactcttcacgtagttgttcatttatatgtatatttttcaagtagaagttaaaatcttatgaagatataatgctctcgaaaaaatgttgtaaaagaaaaagaaaaaagagagagagtagctgacagaaggaacatatagggaagagagtaaagagaaaaagcgaacttcaagaatcaacaataagaaaaagtaaattatttgcaaattcctctttttgtctcttaaaagatacaaaaaatgtttttttttttaaacacacagagaatgcaaactaacacaagataaaacaagaagaagaaacacagaattttgactgtcattatcataagaaacatagcaaccacaagactttcctttatatttggctatatacatttattcaaacaaacataatatgtttcaggctttgtattgctaattgggaacatttcccctcccccaactttttttttctcttttgaccaacttagcttatattaatttgatttcacttataactacatgttgcatacaatttttgcatattcttatctgctaataagtaaaactatgtgatagtcaagatagcatcaaacctacgggtccaaactaaggtttcaggtctaatattaggtatgggatccatctacactttttgttttttttactgagatagaatttacttattagcagatttcattttaggataaattccgataccaggtaaaatacaaacacaatttgaaaaggaatgattattgtttttaaagagattattcattaacacatgagacatttagactaaacaattactccacctctgttttagctagccatatctatataataggttctaataggtgatttaaggaggaagtgtgcatactcatattcttaagccatggaccaacaaagaaagagagaaaagcattgtagttagattttgcttagtcactttatgtcagtggtcttttatgattttgtcatttttatttcatttttggttcctctgtattcttggaggttaaaaaaaaaggaaaggcatgaatgatttcatcactatccaagccaagtacttataaaacacatataaacatttagactattactttaagacaccataattccataaaccccttttgaaactttctctcgtctctctctctctctttcttgttagcataaggccccaagaagacataagagtgttttcatgattctttatttgggttttgttatgaaaaaatttagcttctatagctttggaaatggtgagagcttgagaggattataaaaatcaagggtttttgtcttcttttgctcacttgctcattctttaatatcgagaaaacgttttgggctttgatgggaggtgtgttcgtgttgaggaaacccagaaacggcaataaatgccgtcgtttcgatcgatgcattacaatgagacaaacggaaacagagttgttctcagaagaaacaagaatgagaacaagagaaacaagacgaagaagaagaagcttcttcttagatatgatccttctgtttcgtacttgttcctccaacattcttttcctctctcttcttctcttgtcttcttctttttcctctgtcttgtccgagaatctctcacctagaaaccaaactctcaggccactcgatgagcttaataagctcaaagccattaatcaacatctcaggaagatcaataaaccttcaattaagacaattcatgtaagtttgaattagtattatcgtacgcgatcttctttttgcgttctttttcataaacacaatcttcttcttcctctgtctcagaaaaacaaaaaaaagcacttcctttctctgttcttgattctttatgctctgtttcaagaagtcgctctgttttttttttggtgtaa

SEQ ID NO: 7818 - DNA, 3000 bp, Unknown
  misc_feature (1)..( 3000): cDNA_ID_1809372_gDNA_ID_1621165_Annot_ID_173835 3000 nt of promoter + ATG
aaaccaaatcttttgaatctttttaacaaaaaaaaaaagaaaaaaaaaatctttgaatattataaactatgaaaatgatatcaaagtcatgaatagtttatggatgcatgtcttcgaaacaaaattacaaaatacatgaagtcgattcttataggattaatgttgatttgtttgacccgttgatattcattagaaatttaacgattttattctaattaatattatatatatgacatattaagaggtatagcacatatgtatatttttatataaaaaaaagtaattttgtttttaagatgatatatagacatatgttatttttttaacgtataatacaccttggtacaattttagaactaaaaaatttaaaattttaagttatatatatatatatattgttactttggttttgttttcaaaattgtataattatatttcgattgttaattatatgatttcatccgtagtatatataattccatattaatatcaactcaaacgcgtcctaccgtataaccccgtcatgtgaaattaaacatcattttgttatttttctaaaatttaaatatttatggtattgaaattaaaatatatatatatatatatatatattgatccaaactttataattgtattttaattgttatatataggatttcacccgtaatatatattgtctcatattaatatatatatatatattttaataaagtataactttttaaaagttttaaattttttgatatttaacttttaagaaactttaaatatttataatattttgaaatttttaaagattcagttctttaaaatagagattcagagtaaaccggataacatttttatttttggatgcctgataaatcaaacttccagttcattgttattcaaaattattttggttctttttataataagactctaaagcattgcccaatttcttaagtaatgtgggatctttcacacttacttttttctttatacatagagtaatatatgtctgtttacaaaaatttgaattacatcatatgcagaaaaaatctaatattttataaactatatatattttatataaaatcaaataaattagatataagaacaacaaaaagtgaaagaaaaagcatatatttatatttaatgtagatagagaaattttagaaaattcgtaattaattgattgtagttcaataatgataagatttaattaaggatttagacacatatttgttttagatagattttgtagaggctaaatatgtaatatagaaaagagttaatttaagtatttaatgcaaactaacaaattataaatttttagtaatagaatatttggttgaaatataactggtaaggacctaaatgttattagtaaatagttaagggatttttgaccaaaaagtctatcaaaaatgtatatgtagatataaaaatcatagaaaactctttaatgtataataacactatgacaatgccgcccattaacaaactcacggaaaaaaaaaaaactacttttctctattttctctcagtattgcttgcttcaagcatatttgtacttagtgtaaatacacgcccattaacaaacgtgaaccataatcttatccggtgaaatacatacgccaccaaatataataatatatcatgtggtcaaatcctgcaaaaaaactcatcaaagatattttgtgtattgtaaaatgattctatagtagtactaattaataggtaatatatactgttaactaatgtggacaattgtaaaacgacgacatagtcattgaaaacgaaatggagtatatctaatctggctgagagaagagttgatatgaaaagagagagcccgtgaacggatatacaaaatgagttttaaatgagaatagggaacccgaggaaacgcgtgacctaagctacgtaaattataaaaataacttatttttatattcatagggtgtgtttttatttacacaaatatatatagtatttgtatcaacttctatgtattaaatataaagagataaaaataccctttagatgcaagtaataaatggagtaacgagatggaaagagtcgttgagattcacacttcagttggcggtcctatttttgactttctaattatcaccggtcaacatattttgtagagattccatcgccgatgctcaagttttttgcaccctgtgaaaacatatatagaggtttttggtcggtgtttgccggcaacgacaaatatgtgatttcttagtttcttcaacaataaactcgtgtttgcctcttatctagctagaatgacctttgtttagtagttttctgaattgcagtttccctaaaccattatcttagtgcacatacataaattatggtgcaatatcattttggtaacgttactatttgttagatatttatttaacagaaaatgtcataatccttaaacacaaattcttatttaaatatgtaaacgttttctaaaacttatggcttcttctgatttattggatctaatatattggagcagccttttgtttaccattggaatactcaagctaagaataatattgttagcttgaaattttctacattctaatgtattctagtttcaactttcaactaacacatcatctttccacatagtaggcgcgtataccttcccaattttgtccctttaaaccggaaactaaccgaatttccctatccacattctaactaaaccgagacaaaccgtttcatttcgagcaagtcttgaacaaattagtttcagagtgctgctattcgtttttggtattcggacaaattaaacttgaaccgatggttagctacttagccaattaaaccgaaactatccaacatcttcataacgtgtctcatttgacagataggggcatttacgtcatttcggagtctccgccacatgtcagatttgttttataaacgaaaaaaattcggtatatttaatttgaagatatccgccggaaaattcgtaaatttgacccttcgtcttcggaaatg

SEQ ID NO: 7819 - DNA, 3000 bp, Unknown
  misc_feature (1)..( 3000): cDNA_ID_3046607_gDNA_ID_1621165_Annot_ID_173832 3000 nt of promoter + ATG
ttaatcaaaatatactgggctcaaatctaatttaaataagcccaataatatgttcatttgggccccaatagaaccacaattataccaaactaaactttgaagacagattattgggcttgggaatttgggcccaaatgaatatttttaatctgagcagagagcgactatggaaatataaattccgtacagcacgcttttcaaatttcattcgtaacagaaagacaacgaagaaaaaagaaaatttcgaaaaggagaaaaatatctttggaagatggcgggatctctaacagcatcaaaccgccgtagaaacgcggaggattcttcagaaatttaccggtggacgatcggttttgctcggtttgttcactatccatcttctccttctccgcatccagttctgaaacctctcggaaagagagagcagtatcattcgccccacggaacctggctgtcggcgtcttcttcgacggtttctctccacattgtcgacgaattgaaccgatccgatgtgattctatccgtcaaactcggccagaaagtccttgtgagttggatttttactctctctctctctctctttattatatatagttctatagatcggatgtttaggttggtgtttcgcgatggtttaagcttaatcaaattttgaaatcgggatctatacatttttgattaaacgtcatggtgtttaattgttcaatatctacaggaagaacactacatttcaaagctgaacttcacatggcctcagatgtcatgcgtttctgggtttccatctcgtggtagtcgagcgattttcgttacctatatggattctgctaaccaggcaagctcttaacacttgaatctcttttggattttatggaattaagatataaataagcttactatttacttactagtgatgaatttgatttactgttcatgagttagttgatacttcagatttgtgattgaaatcatgtggtttgtttgtgcttgttgttgttctccagatccagaaatttgctttaaggttttccacttgtgatgcagcgttggagtttgtggaagctcttaaggttagctattattgcaaagagtttccttattatatgttgatcagatggagacgatgtttcattaaccttgaattcagttttataagctattttcttcaaatcttgagccaaggattcctgtttttttctgtttgcaggagaagattaagggtttaaaggaagcttcgactcagaaccagaaaaataaaactaggtgtgatgtttctttccagtcagattacaacccttcagatgcgattatccccaggttagatcacattagagtgttgtgaatttgtactagttctctagtcaaaaatttagatattgtaaattcctttttgcagagccactcagaaagagccaaatatggttagacctcttaatagttatgttcctgaaatgctaccaagaattgtgtatgaagctcagtaccagaaaagtgaaactaggtccgaggtttctttccagtcagattacaacccttcaattgagattttccccaggttagatcacatttacagtgttgtgaatttatacaagtgcttgagccaaccatttagacatggtaaattcttctctgcagagccactgaggaagagccaaatatggttagattttttgatagttctgttcctgaagtgctaccaagacctgagtatgaagctggacaagccttatacccatcacaatccacgctaaatcaaatcccaagtcttcctccgagtttcacaaccttactctctggctgcttccccgactccactctaggtacatttttcattgtatctttacttatttggagtttgagacatatcaccctctttcacacatttcctctctattgaacctactactatagatgcaggccaaacaactgtgaagcagaatcctgatctaaagtcgcagatactggtacagtataaacaaacccgagtttcttttctctttcaacacatcaatacaattcaaatgatatctccaactttttgtttttggcagaagtacatggaagattcttcatttcaaggtgaacattctccccattacacacacacacaaacaatattgacccatatagattccaacttcacattcaagcttcaaacttcacttaataagtctttctaacaagtggttttctcgttatccagatatgctgcagaaagtagagagaattatcgacgaaattggaggtaactggattacctgatttatcataaacatatttactaggtatcaatcttattatccattttgagtcttttgttcatatattgcttaaaacaattgagattaaaaggagcaaaccaacattggtggaggacaaatgtagtttgtattttattttgtttcaactgcggacaaatgtatcaatttgctctattttcgtccaacaattagccgagaagatttttgatttgccttgagtttcaccttatggtgaaagcatgtgtttattagcttccacaatactcatatattatacgaagattttcttagattttgctatattacatttccttttcatttttgataaaaatgatatgaaaatttcgactgcctgcaatgatctgtaaacaggggaggtaggaatgagaccataatttttgaagtcacaatggttttggaaactaaattcaagaacttcctgttttgattttagggaatatgtttaataatttgcaaacagtgaaattcgagaacttccagtttcgaatttagagaatatggttataaactagatatatccgaaatgaatcgaaaataagatatttggaaatcaaccgaaatttctagctgtatattctctcgagtgaggtctttcctaattaaaatttctctatatccatatataaatagtatatactgattaagttttgtattacaaactagaacaattctacaaaacaagaaaaaaactcataacaaagtcctttgagacagccaaaacatg

SEQ ID NO: 7820 - DNA, 3000 bp, Unknown
  misc_feature (1)..( 3000): cDNA_ID_1809380_gDNA_ID_1621165_Annot_ID_173830 3000 nt of promoter + ATG
ttaaaactaaacaagctcgttgttggaaagaaaaagaatttcccaacgctaaggagctttgtttcgccaattgtccccctcttgaataatttttatggattctgtcatttcgaagcagatttttttaaaaaacgttgataaatctaaatatgtatgttgcatattcgatttaaggttttttatgacatttatttcgattttagtggattcctttacattaatgttacgatattcttattttctataatttaaattcactgaatatcaaccaattacatttctaaataaaaatatatattttataggtgttagataatccaattacagttgccaccaaaaaatatggaatttaaaactaaattacaagtatatgatatttaatttggatggggtttgttaggaaaagataaaataatttgcatagttttagtttttgagtcaaccaaatggatcaatagattaattgagaaaaagaaaagaaaaaagaaatcaatcataatgttttcgaattttttggaaagcttatacgatggaatcggagacgatgacgccgccgacgacgacgaagacaacaacaacgacgagaaaaccccgaaagcctcaacggaaagacacgatttctcgagaaacgccgttcgtttgtcaccggaagaggaggctcaagcgcgtggggttaaagatgatttgacggaacttggtcataccctcacgcgtcaatttcgtggtgtggctaactttctcgctccgttacctgatggatcttcttcttcttcctccgatctatcgaaccatcccaggtttaaccaatctcggtcttcagatcctggattgaatcaatcgcgttcttcagatcgggacgaatcgtgtgttggaagtgatacgccggagactggaattaggtttaggagctgggatttagaagaaaaattggcagaaggcaatgatccggaggatgaggaagaagaagaagaggaaacagatgaagaagaagaagaagaagaagagatcgctgcggttgctcttacagacgaagtgctagcatttgcgaggaacatagcaatgcatccagaaacttggttggattttcctcttgatcctgacgaagatcttgatggtaacgtatacattgagtcaagtctttcgctattagtcttcattgatttgacttataggcatatcaaaagtttgattatttcaacttttatctaatgtagatttggaaatgagtgatgctcaaagaggtcatgctttagctattgagcgtcttgctccgaggttagctgcattgagaatagagctttgtccatgtcatatgagtgttggttacttctggaaagtctattttgttcttcttctttcaaggctcaataaacacgatgctcatcttttgtcttctccacaggttaaaaaaacctgaatctcaatctcttcttgagtcaaaatgattctttgttgttgctgttgtttattcaacaaaatccttttgcttttgcaggtgatggaagctagagcattgtggatgaaagagcttcagaatcagacacattcttcaaaagaaagtagagatatgattcttgaggaagaagatattacaccatcaacttctaattactacaaccatgctcctcctgagtttctttctccaagaatatatgcttttgaacctccttcgattatgtatcgcgattttgaacacgggtttgaaaacgctcagttcatcgataaagctgttattgaggaaaaaccaatccagaagaacgacaaaaatagtgcaagccttagccaaacatctaaagatgttgttgatgatgatgatgatgattggccagaagaagaagattctgctaattcttgggctccaatgtttacagtgaatgaggatgatgtttctttcagtgatcttgaaggagacgacgatataagtagcttagcactcaagtctaagattacatcaaagggcacagaccaaaaaggaacatgaaacatcatctggcttgttgctttgccctgcctcacgagatcgaatcaatagaattgaacataagtactgtgtgctgagtcaaatcgtggaagtcttttgggtgagtttgattgttttgtggatttatgatgtttgctctcaaagagaaggaagaaagaaagaaaaaggttttgattgaaacatgtacagaagatttactttgacactgcaatttcattgtaatgttctctctcgccaaatgtaatgaaatattgaaaagcactatttcattcgcgtggaacttaaaagaaattgatagagaatggcgcaagtgaattcaagtgtaacaaactgttagaatcattattggattggaaaatcatatgggattttattgcttatgttgaggatttgtatgtatgaaaatgggaacaaccaggaggagctatcatcaattaacaaaataactcctatgacttaactaaaaaacaaatctatgttgaaatgtataacatttgtcaaaatgctagtactttgttaataattaaggggtgttattggtttgtgatttatatagagttttagtgatttaaaaatattatatagaatctgatgttattcaattcaaattttcattttttttttttaatttggtattattagtttaagatttataaaaattaatctaaaatcttcgtaagtaagattgcttccctaatacagagaaagaaagaaaaaccaagtaagattggtaatacgatgtcgtttcgcagaataatgcaaagctgaacccaatttaataagctgcacttttctttctttctcgagtctcccgtcgttttttatgtcagaaccaattcgtcaggtcgtgaataagtgactttatcgacgaaccaccactcagctgcagcaaatgatcgtttagctccggcgaagcgtaaaattcttcagatctctctggaattaataatccgtctgtttgatcgatctgattcggcaaatccttgagaaaacaaggagggaagaagaagaagaacatg

SEQ ID NO: 7821 - DNA, 3000 bp, Unknown
  misc_feature (1)..( 3000): cDNA_ID_2169259_gDNA_ID_1621165_Annot_ID_173826 3000 nt of promoter + ATG
ctggagatgccattgagaaactctatggaactgcacaggacattgaaggtgtgatcagagacgggaagctctatgtcgtccagacacgaccacaagtgtgatcaaattctctgaccacttcttaatgtgtacgttacgttttctgtccagtaaactccttatttgctctataagcaaagagtataatacagcataagcatatagtggattacaaaatgtgtagtacaaagacatttggcattaccattaagatataaataaaaaaactgtttattggagttggaagtttctccagcttttgcttcttgaagttgagtgcaactgaaaactgcttgtcgtttcactggtcgagcgatatgactacttagtgtttggcttttgtgaattagtgactcaactgtattcccaattcaaattagggtctaaattgtaataaaatatagataatgtttccttttttcctgaataattttcttttaagctttgacacacgaccgcaattgaaggcgattctttttttgtttctagattaagttagctgccaaatgatacatgccatgccgcttcatccacctctttctttgatcttttctacatttcttcacaattttttagtttgtactaatttaatatttgtattggaatctcgcgaatggccttctctaaagccaaccaccaccacatcagtagttcagttaatagatatgcatatctacggacatttaaagctcacaaaatcaaatgtgtgtatgtttgtagatatcacaatgattcataaaaattacacaaccagtttgaccatatgatccaacaatgcaataatgcaaaatcacacaaccagcttgacctcaccatatgattcacaaccgatctcgtattcatagtatggcgtatatatgcatgcacaataaaaaattatcatatacgtgaaaaattgtgctatccacgataaatatatcgcaatgagtttgttttgacatttacgcaaaagtaaactaggattagaatgtataatcgattttggtgctcaatgcttaactaacaagtttaaggttgtttaattttttcttctctcttaagaatccactaatggtggaaatgtggaaggaagaatatggatttttttataatatgattaggatcttgaacctcacaagttatgcaacatatattatagatgctgaatctcaatttttgaaggtttacattgcatattatttacaagccatgacgacaagtatcaaatttatgtttgccacatattaaatttttaacatgcccatgtccaaatggttgtaactatgaagcagaaaacaatatacataccaataccatttgtaaatactagcatataactctgtacgtattcaaattacattatttctgttcttatcctgtataggttttaaatattgaaaaatataccatgcataatcaagggataggtaatgataattggtgggaataaattaaggatggcatgcatggatgggtccccaacataagcactcgagcatgcattgctaatactcagcctcgcgtgccaacactcccatgtccctaacacaaactacttagtaaattaaaatgatctaatctattatttacaattaattagtactaaactttgttatactcttccactaccacagttatactcttcacgtagttgttcatttatatgtatatttttcaagtagaagttaaaatcttatgaagatataatgctctcgaaaaaatgttgtaaaagaaaaagaaaaaagagagagagtagctgacagaaggaacatatagggaagagagtaaagagaaaaagcgaacttcaagaatcaacaataagaaaaagtaaattatttgcaaattcctctttttgtctcttaaaagatacaaaaaatgtttttttttttaaacacacagagaatgcaaactaacacaagataaaacaagaagaagaaacacagaattttgactgtcattatcataagaaacatagcaaccacaagactttcctttatatttggctatatacatttattcaaacaaacataatatgtttcaggctttgtattgctaattgggaacatttcccctcccccaactttttttttctcttttgaccaacttagcttatattaatttgatttcacttataactacatgttgcatacaatttttgcatattcttatctgctaataagtaaaactatgtgatagtcaagatagcatcaaacctacgggtccaaactaaggtttcaggtctaatattaggtatgggatccatctacactttttgttttttttactgagatagaatttacttattagcagatttcattttaggataaattccgataccaggtaaaatacaaacacaatttgaaaaggaatgattattgtttttaaagagattattcattaacacatgagacatttagactaaacaattactccacctctgttttagctagccatatctatataataggttctaataggtgatttaaggaggaagtgtgcatactcatattcttaagccatggaccaacaaagaaagagagaaaagcattgtagttagattttgcttagtcactttatgtcagtggtcttttatgattttgtcatttttatttcatttttggttcctctgtattcttggaggttaaaaaaaaaggaaaggcatgaatgatttcatcactatccaagccaagtacttataaaacacatataaacatttagactattactttaagacaccataattccataaaccccttttgaaactttctctcgtctctctctctctctttcttgttagcataaggccccaagaagacataagagtgttttcatgattctttatttgggttttgttatgaaaaaatttagcttctatagctttggaaatggtgagagcttgagaggattataaaaatcaagggtttttgtcttcttttgctcacttgctcattctttaatatcgagaaaacgttttgggctttg

SEQ ID NO: 7822 - DNA, 3000 bp, Unknown; identical to SEQ ID NO: 7816
  misc_feature (1)..( 3000): cDNA_ID_2169255_gDNA_ID_1621165_Annot_ID_173825 3000 nt of promoter + ATG

SEQ ID NO: 7823 - DNA, 3000 bp, Unknown
  misc_feature (1)..( 3000): cDNA_ID_3046629_gDNA_ID_1621165_Annot_ID_173818 3000 nt of promoter + ATG
gctcgtaaatcagctggagaggagcctttaccagaagaggatccttcaaacccaatctttaaggcgatccctgaaccatctaggctagagagtttcctcatcacaaaccaagtctcaaacttctgtggccaaatcaatgggtatgttcctctttagtattgtttcaccatttttggagctttgaaagatacttaaaatgagtcgacctgttgttatgcagagtggctggccagaacttcagcaggctttacctgaccaaagcattgcacgacaactgattgcaaagactacccaagtttttgttttttgagtcagaaagtgaaagacttggtggtagaatggatcctatatttgtttttcgtggatgtttttgtttttatttttgttgttgtgaagtaatttaatttacaagcttttcaaaaaaaatctttattcttatgcataatgaaaaattattgaagttttgaaagatttatcttgtattggacctctgattgccttacaacaaattatacatagttatcaaaatcctaatcaaaagagtaaaaaatctaatttatagagattttattatagttgtagtgttagttccatcgctaaatcccttgaacgacaacgtttattatttcttcttcggacgattgtttgaagaaatttaaaaacgacatctttttattacttcctcttcgaaagattgtttaccaacaagaacaatggcggtttatcatctccttctctcgagcccaccttcgcttcttcttctccctccttctcctcgccgccctaacctcaccttaatccgccgtatcccagctcatcctcgcctcggaaactcgaccagcttgctttcttcttcgtcaccggtaattcggaaaattctggttcgtagcactctccgggaagaccaacccatcgcctctgactccgagagtagtcctactctactgatcggtgaagattctgctgcttttgaattagggaaacagaagcttgtttcctgggtttatttcggtgttgtccttggagttgttctctttatcctcaatgttgtttggatcgataattccaccggtttcggaaaatcattcatcgacgccgtctctaacatctccggctcaccggaggtatagatcaatttaacagtaactgaaccagtttcaatttcagttatttgattgttaaaaaccacttgtttttgcaggttgctatgttaatgcttatccttatatttgcaattgtacatagtggtttagctagtctaagggatataggagagaaacttataggtgaacgagcatttcgtgttttgtttgctggaatctctcttcctttagctatgagcaccattgtgagtactctctcttctaactctgcaatttttctcctgatcaatggtataaatacctgtttgatgtctcttatggtctatgcaatgccttgttcttctttcaggtttactttataaaccatagatatgatgggtcacagttatggcagcttcagggtgttcctggagtccatgaagctatttgggtcgctaattttgtatccttcttctttctctatccttcaaccttcaatcttctggaggtagcagctgttgacaaaccgaagatgcatctctgggagaccggcatcatgagaatcactcgacatcctcaggttttgaacatttccctaatgtgcctaaacatgaagacaatttccttcatttttgtgtttcaaaaatacagaaagattggatttttatgagccaaggtttattagtggctgtgttaatgagacccccaatcattgaatcaattatgggcaggtattggccattgacttaaatacacccattacatcagcacaatcaaatctcctcatccttctatgtttattacatcaatgcttgattactttacttgatattgcttttgatcttaaaattcttatccaattgcttcatcatgtgtttggaaaaacttgataatatatagaaagataggcattttagcttcagttttggtttgttctattctctcttcattatactggctttgttaatgagacttgattgttgcacctctctcctctgatcttctccagatggttggacaaatcgtttggtgtttagcacatactctctggatcggaaacacagtagctgcatcagcttctctcggtttgattgcacaccatttgtttggggcgtggaatggagacaggagattggcaaaaagatatggagaggattttgaaagcatcaagaagagaacaagtgtgattccatttgctgccattttcgaaggacggcaagttttacctgaggattactacaaagaatttgtcaggttgccatatcttgcaatcactgcgttaacggttggggcatattttgctcacccgctaatgcaaggtgcaagctttaggcttcattggtaaattatatgtcatgctttaggcttcattggtaaattatatgtcatttatgtttgtttgtttcctgcagtgttcataaagacttgttaaggaacaaatgtatacaaaaagccatattgtttgtgatacttgactcttcttcatttctcgattattttggctcaacactctgtaaccactatgtgtgagttcgatccaacaagtgggtttagattagtattaactaggaatgtttaatagtactgctaaatgaatatttaggtaaaactattttgtatataaattcccactcagatgtcatgggtcactctgacgcctaccactatactaatagaagtaaatttttcttttttcgatgtttagttacaatcggaaaatgaatctaaattttaactaatattaataatatgccaagatctccatccaaatctagattgatatctacatattgatgccttgatatctctaaactctaaagataaacttaaaggcaagtgattaattgttaactaaaattaaaaattaacaatacaattttaattcgctagttataaaaattttattaccaagaagaat

SEQ ID NO: 7824 - DNA, 2247 bp, Unknown; identical to SEQ ID NO: 7814
  misc_feature (1)..( 2247): cDNA_ID_1394643_gDNA_ID_1621165_Annot_ID_173816 3000 nt of promoter + ATG

SEQ ID NO: 7825 - DNA, 3000 bp, Unknown; identical to SEQ ID NO: 7813
  misc_feature (1)..( 3000): cDNA_ID_4359805_gDNA_ID_1621165_Annot_ID_173815 3000 nt of promoter + ATG

SEQ ID NO: 7826 - DNA, 3000 bp, Unknown; identical to SEQ ID NO: 7820
  misc_feature (1)..( 3000): cDNA_ID_1809380_gDNA_ID_1621165_Annot_ID_57199 3000 nt of promoter + ATG

SEQ ID NO: 7827 - DNA, 3000 bp, Unknown; identical to SEQ ID NO: 7818
  misc_feature (1)..( 3000): cDNA_ID_1809372_gDNA_ID_1621165_Annot_ID_57202 3000 nt of promoter + ATG

SEQ ID NO: 7828 - DNA, 1603 bp, Unknown
  misc_feature (1)..( 1603): cDNA_ID_1989570_gDNA_ID_1621166_Annot_ID_57856 3000 nt of promoter + ATG
aagcttagtagatatttattttctcctgatcattcaacatcaaaaatgaaaagtgtgtcttatgagaacaatttcttattttcttgaagaagtgtcatgattcgatttgtgagtctcatgcattattcaaaagttatacaattttgctagaaagagtcattttgcattttttttttttttacattgatatgattacctatgaggctatgacccatttctatatctttataattgatgtttattttaagtgatttgaaatgctctaacgatgaaattggtgatgaaaatgagagaatttaacccaattactggagatgatccattaaggtatattatcttcccttgtgtttactttagacaacgaaactatacgtgggaaaattttatgttaaaagttactataaaggtagtaacaaaacttataagatttcttccctttatagtatatttgaaaacctgactgactgagacatttttgttactataaagagaagaaaatatactagaaagctaaaacaagacattccatttcaaccaaaactataatctctactgatttaccttataactttttaccattctttgtcaactttaatagtcattttcacttttaagatgggttactttccaaaatttgaaaatctgactgagacgtttttgtgtgctttacatatacaaaaaaaactttagagcataagaacgactagaaaaaaaaaaaaaaaaactaaagtgagttcccacaaataacacaaaaatagaagaagcaataaaaaaaaaagagttacgttatagaaaagagttttcgtcaattattgtttccctggtgaaagagtaaaaagatgaaaaatcatattaacaataatagaagattacgataaaagcttaagatgggagagacctcatatgcataaagtgttcccatgccatttctatctctacatgttaaacctcattgctttcatcagcatctttctaccaaaccgatgaagtatgattgatatattgtgtgattcaaatctccaaattttgttttattgcatgattaaaaatatccccgaccttataatatacgtctaccttttgtttatgtccttgctgtccactatcaaaaataaaaaggaacatacagataggataacaaatacatcggaaactcaaaggaaatgagagaataaatacaaataaataatacttccaaattgtaaactctaatttaacaaggaaaaacattttctaaaaattatcatacgattaaaaaatattataagcattaaatagaaaaaaaaagtgtacgtgtgggtgtgggtcagaataattaaataattttgtacgtgtgggttttttagtcaaaagaatcaacaccgtctactttcactatagctaataatgtcgggacaatgtctcctaatagatcacctcccttagcttcctctacattatatattcaccattcttctttctttgttcctcaacagggctcacattctctatccaccaaaacttttcttctacttttctatctatatatctattgttgagctacaaagtgaaagtacttttacttgctatattgatcaccaagttatagcatttaaaaaaaatg

SEQ ID NO: 7829 - DNA, 3000 bp, Unknown
  misc_feature (1)..( 3000): cDNA_ID_1989567_gDNA_ID_1621166_Annot_ID_57859 3000 nt of promoter + ATG
agttctctttctctgatggtgtttaatctctctatctcatctcttgatgaaatcaacacgtcaacatgacacaacggtgtcacaattagtctcggcttcctgcaccaccacccatgagctctttcccttttctttgatctagtaaataaaactcaccacgacgtcgtttgtttggttactcagaggcggtggctacgatcccactgttaagccttagggtttctcaatgttttctttatttttccttctcgtcaaacaacgatgatatatatatatatatatacatatatattagtcttcggattttttctgcaacataaattttttgttttcctccagaatgctccattatctccaaatgaatcccaaacgtgtaaagacctgtaaaggactagaaaagactatagaaataaaaatagactctaaaacctatacctaaatcataactaaaagcagtaaaaatagggttatatcaaggagaacttatcgcaaagctctgaaatgggtacctagaatcaaacatccaatcacttgggctagagtgtacaaatctctggaattcgtagatcatgcatccatttgaacaatttttggacgctggaatacctaggatcgaattccaaactgaagtgagtgaaataaccattagggccaacgaatccagaagggatctaacctaatcttaactacctgactatcctagagattactctaatgtgtttagccatcgacttctactcttagtcttccaatagatctcctcatctatataggcttgattaagatcagttttcatatgtcttcctctatcaaagtagagccaccagttgcaatcgctctatccagcttatgctgaatgattttgattcactttgctgcattgatcttattttgttgcttccatgttgagataacctttctacaatgagtgagcttctccattaagggaacatgattatcatcgaccccattgtatctgttccagttgttaagcacaatgtctttgaaaccctctttatgagtgaggcgattgtcatagctgaagaaaccatgtctctcttccttataggttgagatgtttgtcacaagagggcgatggtctaattcaccaaactcctggaaatctgtctctgattctggaaataaagtgagctattcagtattagccattgtttgccaataaagtaggtgatggtctaattcaccaaactcctggatgtttattctttatctttagaaatagagtaatctattattcatctctatttttttctctacttttgaaaaaactttattttagatgtgaccattggagtacaatgcctctagaatagagtcacctctaaaatagagaaaaatatagagatgaccattggtaatggtcttaatgggggtggattgtaacaccccagtttcaagaatatgatagtgcatgcagagaggtttaagaattgatttggccatctatgtcaccgaattgcacttatcttttcggtcaaacgtcttgagaaaactctacagttaagcatgtttgggctagagtagttcactacaaaaaaagtcttcattgatagcataccattatagcacggattactcaattgctattgaagatgtcatgtaattttcgttattatattacagcagttgataaacgctaaaatatagttttaatattacagcactttataaacgctgatataaagttttaatgagcgggaacacaaaatacttattccgccaaataacacttagtcattttcgagaaaaaaaaccaaacacaaagcaacttttcgaaaaccctaagaaagaaaactctctcagtcctcagccgtctgtccgacgaactcactattccggccaccgattaaaccctccgttgcctctccgtcgccgccgtgaaagctctccgtgcaactggaacctccgccggcactcaatccgctctatatctgtccacttcgagatcgaatcgaaggcaagtcattttctatgttgtttttttctcctttgccactcaattcgttaccctagatctgtttccatcaatctctgagactcaataaccgatgtttgtgtgattttagaattcgttaccctagatctgttttctttatcgattcttaaaattttctctactttgcatgcctttgtttattgcgaattcatatgaatttcgtcttagtaatggtaacctgaactgctctaggtgcttgtgaacaattttgcattcgaaattgtgtatttatttgggcattagagttgcaaattttggattttggctctgtaatgtttgattttttattgagtgataaaacttgagaatttcattgtcagattgattaagcttcgtctgttgtctgaatcgtgttgttattgtctcatcgatttagttattttgttatgtcaaactatcattgattcactttcttgaatataaaacattttgctcattcactatattttgtttaatttgtaagcgttgctgagcgaatcaatggacatttggaagcttatcaattctctcttttcacaggaaaggttagtatcattgtctctcttttgtgaattgttttcttttgtcatagttagtatataagtttgagttatttgtgaatgttgtctgcttgttctgtgattgtttacttagaagaattcttttcagtttcatttattttaaaacatgctaatataatctagtaactgtacttatctactgaattgttttgatagagtgatttgtaaatgttgtattttgtgtttgtttatattgaagattcttttgagttacatttgtttaaaacctgctactataatcgagtagcatgtacttaaaacctgaattgctttgattgattacgtttataagtttgaatttatttgtgaatgttgtctacttattgtgtgattgcttattcaagagattcttttctttacacaatatggtatgctgcttaggttactaaaggttaatttatgttacggttagcacatagaatg

SEQ ID NO: 7830 - DNA, 3000 bp, Unknown
  misc_feature (1)..( 3000): cDNA_ID_2172815_gDNA_ID_1621166_Annot_ID_173858 3000 nt of promoter + ATG
attacttgcggtgtctagagagaagctgtattcatagtgaactctttggttgaaaatattcatcatgtgacctgatataaccttgtttttactgattttaactatgttttagatttagaattttgagtctttatgttatttctcgagttttttagagtcttagatattctatgcaatggggcaacaatggagatgaggagacattttggaggaagagctaaggaaaaggaaggtaaggactttcagttccagattcggtgagagtgtcgatcgacacactcttggtttcagcccagaaaagtccatgacgctttcaagtttacagaagtggaaatttgccccataacgttttatagggcatatatagttttagaggttattgtttagactaggggtgtcaaaatgagctgatagctcatgagctggctcaactcggctcggttattcatgagcgccagttctatttttaaggatcatttaataaatgagtttaatctcacgtgttatacgagcgagctttaatgaacatgaactagctcatgagcttggttttcttgaagtaatcatatatatgaaaggaggctaactctcttccacaacttgacacatcagcacatgagagcttgccacctagacttcataaaataagtaatacataaatagtaattaattcaacataacaacttaaataggaagatataattaatcagaatttgaaccatctctctttttacatttttttaattcaaaatatcctctttcattttgagatccacttaagtggctaaaatgatcataaaattcaaacatgctacatatattccttgcctaaaaattagacgattattatgaaagaaactaaatgaatatgcagattcaatatatctaagcttttcgagatttatgctaagaaaaccagtaatttaaaagatgtttgaggagctatctttataactaatacgtaggatataagattatgacaagaacttaactaaactttccaagaacctcaagttaaatatgtttagattgaatatgcagagacatggttaataaagacatgttatatttttagtgtaagaaggaaattttttaaaatttcaccgtctcacaatctaaacatataaccaaaaaaataaggatatataaaatatttttaaaaaaactgagaatctaaaacaacaataaaaaacaacttaaacacattcgtttttcagatgaactaatatagttggacttttcaaaaacaattacaaatcatatttatgttcaaaaccgatgcattcaactttactttatatgaacagacattatataaaacaatttgtaaattgtaatacataagcccgcacgtagtgcgagtactcatctagtatatacaaaaagtcaacaatcaacgtatatatatatatatatatttttctatcaaaaataaaaatatattcaggaaaatatatactccctctgtcccatgaagaaggattttttagaaatttcacattctttaaaaaataatgtataatgacaatttgaacctctttatactatttaaaataataattattatttatctaattatctaataagggtaaaacaggcaaacagttctaaaaatttacattggaaatataaaacttctatctaagtgggacaaattttttttttagaaaattcatttttatgggacggagggagtaagttacataacaatttcagaaaataaatattaataatatacacaaaatgtcaacaatgaaaacatatatctatatatatatatatatatataaatatatatatattttataaaaatagaaatatatcttaaaaaatatttaatttacataacaattttagaaaatataatttttttcatttatttgcattacctctcgaagtagctcatttagctcgcgatctagatgatctgagtttgagtttgtattttgaagctcgtataataaatgagttgagagatataagctattcttcccttgttcttcagagattcattcagttctcaatacagtgaagagatcctttcatactctaatcttatttgctgtgtttatgctttctatataaatatgttgcttgtttcaatcaatatgtatgagtagtttgcttgttaggaatagagtttctcattagcgattcatatggtttagtagatcgcccccatgttaggttatctatagaaattcttcatctttagttgtttttaatgttagatctagagtaattaattagaacttgaatacatacaatagaaatacccaccataggtatttgtagttggatctattctttgatgagcttggtttatagtataataagaatcggcctatctactaaggttaacaatttaattcggttagaatgcatttctaggtataagatctctcgacttctccttttattcttagctataggcatagtgagtttcgcggaaagccataggttattccataattagagtttgagtttaagaatggttctataacaacctaactttcattagatctacgaaccaatagtttcctgagaataccctacgcctagctatttattttaatcgtttcacataaaatcaatctgttattttcttactatgtatattgtttatttcaaccattctctgctagcttaatcatgacattcaattcattatgtgaacaaaagaactttgaggaaatttgatccttaaatactacaaccgatctcttatttgaaagagtaggtttaaggcaatctgaagcatatcaaatttggcgccgttgcaaaagttcttgggaatcaccattgagtttagtttagagatttcgtctagtttttactttgattttgttactcacgcgtttcttgttttctcttttttgtgtgtttaggtgtatgcctagacaaacaagaagcacacaacagaaggagctgatcaacttgtctattcttgacttgggaaaacttaaacgcaccaaccgcaaaactctgagattagcaatg

SEQ ID NO: 7831 - DNA, 3000 bp, Unknown
  misc_feature (1)..( 3000): cDNA_ID_3046647_gDNA_ID_1621166_Annot_ID_173850 3000 nt of promoter + ATG
aaaacctgttgggcacaagtgggtattcgtgcagaaaataaataagaaagatgggatcacacgatataaagtccggcttgttgcaaaaggtttttatccaagacaaggagttgattatgaagaaacatattctccggtcatggatgcaattacattctcgtaattaatgagcctttcagaatctaataatttagatatgtaccttatggatgtagtgacatcttatttatatggatctcttgataatgatatatatatatatatatgaaaatcccggaaggattaaattcttgaggcattagactcatcaaagtctaaggatatatatgcggtcaaaatacatcaattactttacggattgaaacaatccggatgcatgtggtataatcgtttaagtgattatctacttaagaaaaggtatgtgaataatgaaatctgcccttgcgttttcattaaaaaatacgcttcggaaactgtgatcattgttgtttatgttgatgcctaaatatatttggaactccaaagaagattgatgatgcacgaactcatatgaaagaaaagttcaaaatgaatgatcttggaaagacaaaattttgtcttgggctacaaattaagcatttccaagacggtatatttgtgcatcaatccaattatacaataaatattttaaagcgctttgatatggataaagcgaatcctgtaagtactccaatggtcaatagatcgttaaatgttgaaaacgatccatttagaccttgtgaggataacgaagattttcttggtcccgaagtaccttatatgagttccatcggtgcgacttatgtatcttgcaaattgtataagaccagatattgcttttgctactaatttgcttgcaaggtacaattcatcccctactcgaaggcattggaatgagataaaacacatcttccgttatcttcgaggtactattgatttaggattatattatcctagaaaatccgagtttggtctggttagttttgcagatgcagggtatctatcggaccttcataagtctagatcacaaaacagatatgtttttaccattggaggaactgcaatctcgtggcgttctcaaaagcagactatagtcgccacttcatcaaactacgcagaaataattgctcttcctgaagcatgtagagaatgtgtttggtttagatccatgactaaccatattcaagaagcaagcggattagtcatcaaaagagagccaacaagaatatatgaagataatgttgcatgtgttgctcaaatcaaagaaggatatatcaagagtgacaaagcgaaacatatacctccacgattcttctcctacactcaagaactcgagaagaataaggaagtcgacgttcaatacattcgttcaagtgacaatgcaacagatatattcacaaacgcgcttccaacttctacatttagaaagcatgttcaaagtattggaatgcgtcacttacgagacttgtgaagtcttttcgagggagagttcacgtcactgtactctttttccattgtcatgatttttatcccaatgggttaacgaagcagtgcgtacttcataaaaaatgagggataattaagggggagtgttgaaaatatggataattatccatcataactctctccacgtctcattaactttgtccccaataaaagtaaagtttatcttatcccttatcaattaataacttgatcaccaagttattgatcttatatatatatatgttgtattgtgcgaagagaaataagaagcataagaaaaagcaaattattctctctttaagtctttcatcttctagaaaataaaatagtattaaatatatttgcgttacagtttttaacaattatgtatatgtaattagttttcttttgattaaatatgttatgagttttaaacttttaatgacaaaaatagagaaaaaggttaatgtaaaatcacaagaaaaccaacaaaaaatggatttatgtaataaattttattgtctcaacatttgttttactttagctgttctttggcttcataatatattgcaagtttctcattgtaattttggtgttcagaaaacataattgtttcatggtcattttggcaatttcctaggtattttctttttagtttgtgaatactttcgtttttcctatcaacctactaatcaacagagctttccatgtacgaataaaaaaacaaataatcactacaagaaaatatgtgatattccaataaatccttccaataatcgtattttgttaaaatattataaccgatatcctataaatttgcaacaaatacttttttattgaatatttattgcaaatttctaaaaaaatttggttatgataaatttgtcacaaacatcgtacgaaaattgttagaattttcctacaaatatgatattgttgcaaattagcaataattattaaattattggaaattattaacaaaatatttgttagaaactaattttttatggaaatttatttctaacaagttaatgacaaaatatttgttgcaaaaatggacaaaaaataaaaacgaaaattaaaagaaataagagaaaataaaaaaataaaataaaaaaatttaagttaaatatgattcttcttctccttttttttctgtgaagatttacatctgaaaaaaaattgaaaactgttttcaatgataggaccaaaaaacaaaaatcgtgagtagatgtataattatatagatgaaggtactggagaattaacaaaataagatgtattgtccttgttctacttgtggtaatgagaaaaaatttcgagtagattctatttgaaagcacttatagtagaggatttacgcctggatattacatgtagttttctcatgggaaagattttgaaactttaacaaatagtaatgaagatgatgaaaatcatgggttggaacttggagataataatagtaatgaagaggaagagaatataactagagatccaaccagtgtaatacatatg

SEQ ID NO: 7832 - DNA, 1603 bp, Unknown; identical to SEQ ID NO: 7828
  misc_feature (1)..( 1603): cDNA_ID_1989570_gDNA_ID_1621166_Annot_ID_173847 3000 nt of

SEQ ID NO: 7833 - DNA, 3000 bp, Unknown
  misc_feature (1)..( 3000): cDNA_ID_1809450_gDNA_ID_1621167_Annot_ID_57204 3000 nt of promoter + ATG
aggaccaaaggaatgaaatagatttctatagtcagcggaggtatgcctcaaatttggtgcttcacataataaacattcagggtgagacaactaaaaaagagacaaaaataaaaaccttttgtagcttggtaaaggtagaacgtggattctgctaattcaggacgtagtggatagtacttcattgtcggatgtattatttgatgatcgagtagatacctgaacaaagatttgttcaatgtacttcagcgcaaacaacaaacttgaaaaatgactaactcaagatcgatgtaggaagcccgcaaagaaaagacaagtgaatacatacctctcaggtaatacaccaaacttttcccatacatggaaaaactcacgatgcgatgaatttgcagctgcaatatctccaacaagaacctagaagcaagaacttaagaatgacaatgagaagatacccttttcgactgttctttctatgacatttaagtaatccattcattcattatacctgcagaccaggccaaaacgcctgaagacttgtgagctgccagtaagttggttttccactccacatattagcttcatggtacctaaaccaggtagataaactcattagcaattttcagattttgcccaatagaagtcttaagtgtcataacagagattgcggaagtacattttttcaggctagtatattaccaaggcccatgtctgaagtacttctgagatgccagataagcagaatgaaacattcgccagtagtcttcttttccaaaaagaatataagccttcaagaggtattcatagaaagagtcaacccctttaaaagaccagaaatgaaattacacatcagagctacatcaatctaaggcacaagttaattccacacatataagtaaaattattttgctatctcttcggaacaagaactgccactagaatccctctgaatgaacaatataccagctccaatgctagaggagtactctatccattccccagttaccacatccaatgttgtcccaagcagatctaacgaacttcgcatcctccatagctgacgaagcgcacgtagtgcagctgattcaaacctcgggtcaccagtgagccgtgacaatgctcccatttcaagaacgagagaacctaaagcgtaaaatgcatatcaataaattcatgagcacattcggaaaactagaatgtaaaagaaagtagggataacaagatacataccacatcctgaagtgcttgtttcagttgtctcattctccattactccattctgccaaaagatattattcagggtcaaatattccattttccaagaaaactagaagagcaagctcaaacttaagcatagaaacctttaagaattgaatgaaaattatcaaagtgactgttccttttcgcattagatagccaggatttcagtgaagtaagtgctcaaagtgactgttccttttcgcattagatagccaggatttcagtgaagtaagtgcatttcataagtgacgattcaataccttcaaattaatccatgcatatggtaatcctgtaggtgtttcaaacgcgggtaaaaaacgttttccaaggtcttcagctaatcgaagaagctgattgttgtaggaaccctgaatcaacctattatttggatcaattgcaagaagatgagcagagataagtcctccaagaactcttatattgcactacaaatgagaagccaaaaagagcaccagttagaagcatcaagtgcgagtaaactcattttcagtactcaaggacacatccactcttgaagcaaacttcaacagaatacagaactagactcctacctcaaaaaggttgacccgggcatcaatatcgaaagtaagattttctgagagccagagaacccccttttcaaattctgtactgttccccaatatagcaaggctgggacaaaggagaatcatgtcaaacgggtactgaaaaaacacacagggaatgctttcacttatgcataacatacctggataatgattcaacaagagtaacagctgatccattataatctgttggcaggtgttcaagctggaaaatcagaaatctttgtgtcaagcttctgcttcaaaatcatttatgatgctatatgagctagtacaaagttaccttaagatttccaagctcactgagggagtctgtgaaacttttagttagaggctttagctcatcatgctgttggaattcagaacttagtgtaatccaaacccagtagccagaattcaacaacttaaagtagatcactaaccggaaatgcataagtcatgtaattgtcatacgcatgatagaacctgtaaaaacgagatttgaagggttttcaatagttgctaaacaaattgggtcatgaagaattaatataaaaatcactgcttacatacatctcgcgtactttctctcgcatttgtttcttcttgacctcgatatgctgcgatgaagggtcgacgacgaagaaagtgagagaaataagcaagcagaggaagagacgcctaggatggataggacaagacatgatgacgaagctgtgtaagaagccaatcaaatgaaaagagaggaaaggagaagaaggaatttatgaattcatcatctccgccagtctccgccgcgtctgatctctcgattagaacaacgtcagttcttctctaactggggatttgttcccttctttcaattaccattttgcccttttggtaaaaaacgaaagtcaaagagcagaaaatattataaaattttaaaagatattgattggttggttcccaaaaagtgaaaataccagaaccaaaaaaaaaaaaaatcataggaaaataagaaaaactcagcctttgcattgctattttaccaaattgcccttaaaccatctctagctaaagttaaaagttaaaacctatccatccatacatgtcctgaggtgtcaaaaactaaagcaaagcctctcagcacggtgagagattccggtgataacgtcctccgatg

SEQ ID NO: 7834 - DNA, 3000 bp, Unknown
  misc_feature (1)..( 3000): cDNA_ID_1809446_gDNA_ID_1621167_Annot_ID_57205 3000 nt of promoter + ATG
ctcggtgccataaggcccgaatgcacccacatatagacctgcacttagaattcagaacatatttcaagttgagttgtacaaaaacattctgagtccaaatcaaaagaaagagaataacactaatgcacaacatgcttaccatcaaaagggtctaagttgctttcaggagttatgattctattaaatgctgtatactcggagagatggtttcctttttgtgcctggtttatagcaagcttgacaatctcatgcacatgtttcgatacctagaacaataatcaaacaacctttatatctaaaaacattaacacgacaacgtaaaagaggttttaaataataacaaactcctagatctgattctagaggttaactttataaaaagcggtgtaaattcaagtaatataccttcaaagaagctttctctccccagaacgcctcggcaacctctggtggcaacagatctgaaagtccttgagctgcaagagctgttacttgttctttggacactctatttttccttgtatcgatatccctcttacttctcccaggaacatgcaatataaaggaatctctttcagtatccattatatttgccgacacacggacaatctcatcatctatagaggaatcctctatgttatgtagaacccctccgatgacaagcttagtgtttgaatgctttccataatctgcactatccatagatgagattgcttcaatactgtcattttcttcttcttctacttcttcttcatcatcagaagaatttgtttcctcagtgccttctccaaccagctcttcagtagcgtcatcactgccaacaatctcttcctcagggattttaataacatccattactttcagttttagccctgggattttatcttttagaaattttatcacatttttaattccttcttcagttggttccccagcatttagttgtgtatcttcttttttatccaccttcagttcacttcctcgtacatctaaaatggatgggtcattgatcgaggatttcgaggattgctgtacttttgaaaaggaattctcggaaatggttaggttttgcttcacgtgttgcacatacaccacctaaacacagcagataggtacatatcacttcaaaagggttaatcagtgattatcgaaacttcagagaagtttagagcagcaattatgaaacactaatcttatacaataatacaagatacaggtaaaaggatatactgtcaccagaactgttacttaattaaatgtgattttctcaaattacctgcataacatatcctccgtcagtgtctttaataacgaaaatctcaaacaggggtgttccagctgcttcagccaccagctgtctgtaagaaacagtaatgagattcaattatcaccagcaactgagaaaagatttaaatcctcagcataacctgctctcaccttggactgtaactcttgccaataaacctaccaacacctggagttatgtgtacaattctgccaaatggttcctcagaatctcgaggtaaaccaacccaccaacccacctatataaacatcagaaacgtgacaaatgcattgaaattctaaaacaatcatcgtctagataaaagcatagattcttgactagagatttgggtaacactgaaaccatgaagcaatccttgataagttgactaggtgaaaccatcacttatgtcaggaaacatatattacttcaactaaccttaactaccttaatagtttacagacatgtaacctattttcttgattcaaatgtgtaagagtcgtctagtaatatcttacaagctaaacaagaaagaacaaagtataaaggacggtaaacaaaattaccagtccacttcctgtctcgttacataacctggaagcatcatggtaacgctcttcgtttactgcagtctgcaaggaagttaatcatatataagtaagaagataacataagagtttgatgtaataaaaaaacacacatatataaacctgtaactggcgcatgatctcagcgacagcatcatcaacagtagcttctgaaatagcttgtttcaacttgactgcttcttcaaagtcttctttttcaacagcatcctcaagttgagactgttacataagctagaagactccaaatttagaaatctataatcaaccaataatcgaacaaaaaatcatcaatagtagacagagtttagatggatagaaccttgagaagagaaacaacgctctcgacttcttcaatctcggagaagtgacggttccaacgatcccaatcccaatcccacttatcctcactcgaactagtatcagctccatcaacagcggcgcaatttcgcagacagcttaaagatggggctttagggttacaggttgatatagaagaagcgaaggaatgtcgtagaccgatagatacggagaaatttgtgcgtttgttggtcgagagctccggctttagagaatttctggggctgaagaggatgtgaaattgaggaacagcgattatttggccgataagacatggttgagttgtcgccatcggaggacgttatcaccggaatctctcaccgtgctgagaggctttgctttagtttttgacacctcaggacatgtatggatggataggttttaacttttaactttagctagagatggtttaagggcaatttggtaaaatagcaatgcaaaggctgagtttttcttattttcctatgattttttttttttttggttctggtattttcactttttgggaaccaaccaatcaatatcttttaaaattttataatattttctgctctttgactttcgttttttaccaaaagggcaaaatggtaattgaaagaagggaacaaatccccagttagagaagaactgacgttgttctaatcgagagatcagacgcggcggagactggcggagatgatgaattcataaattccttcttctcctttcctctcttttcatttgattggcttcttacacagcttcgtcatc

SEQ ID NO: 7835 - DNA, 3000 bp, Unknown
  misc_feature (1)..( 3000): cDNA_ID_2175480_gDNA_ID_1621167_Annot_ID_57206 3000 nt of promoter + ATG
agatcttgacccgaaaaccctcgacacccggcttcttgaggtacattctctaggtgatgaggccctcttctatgatttgggtattaccgtgcctgctgaccatacccttggaattgagcctaactccatttatttcactcgtgatgatcgtatctgtcacaataaattgtcatgcctcgacatcggtgtcttcaatcttgcaacaaagaccgtcaaacgcttccacggtctctccaacttcaacttcaacgatgctcagtggtttcttccttcttgattctagccttctccatggtttctccctcggccttgctctgttgtcgtataaataaatttcaaaatagaaaatgttcatagttcacttacgttgatgatcataacataaatttagtgtccgacagctaagtgtctattaaggcattaattgatgttagagtattgtggattacaagtttacaacgatcatgttgttgggatgtcagtttagttttggtaaaccgacttatttgttattgctagtttagctttgttaattaacgttctgactttgattatgctttagtgcatatgtaaaggtatcctatcgtatataaaatcaatccatggaaatagtggctgcatgcatacccaaatcacatgtgtgtgcaaatattaattgtgctggttagaagatattaattacaagattaagcattttacttcacttacttcgttttttttattttgtatgtagagtttgtgaaagtccatagacaacacaatatcaaagagttcacgacacatgtgtgcctccacacttccacttactcttttttcacaactcgttcttgtcatatattttgttgttggttgttttcatttgagtaacctaatgtatgtttattcgttatatgttaaacaatcacagtattagctagctggtaaagttaaagcgacatattagagtaataaagatctcataatgtgtatacatattttgatcaaagacaactagaccgtcaacaatagtgcatagttgatcataacataattcatatgccgtatttaaatatatatataaatagcaaattggagaatctatttgcaaatggtagtacacttgaataaaagtacattaaaacctctaaaaattaataatattggaatgagatattttgttaattaattaagttaattaatttatcaagatattaataattattaatttgaggaaaatttgcctaatttctaagatatttaaattttataatttaaaatagattttgtagttagaataataattttctagaacgaactacatgaaaaaaatcaattatcatgcctcaaagacaacaccaaaatatttaattgcaatacaaatattagaaacgaactctaacaaaaactaatgcaaatttaagaataagcaaataacactaaagcatgttaaagtcttcttgaacattgaaataacacatctcgtacagagccggtccaacgtttttggatatctttatgcaaatatgtttttgaatttagttcatttgttaaatctaatttggttttacatattccactaccgttgatgtccttactttatagaacaaatacaacaatgataatccaaaccatcaattattatattgcttaattatttattattgatctataaacaactaaatataaaatctctatttacaaagttacgaatctttcaaatttggataatttcatgattaatgtaatcaatgcaaaatattttgttattgaattaaactcccctagttaagcaatacgacaaaaggaaaatagaatttgaatcaatcaaatattttttgttgtcgtttaggatgattgaagaagaaccgttcataatatcttggcagtaggtgaacagacccgttgttactttcttgtagcaaaagattagttgtattcctatttatgttagcaaatcggatgtctgccacaacaattttgtgtatttcatccactgctattctaccatgaccgtgtttctcaatggtaccatttgactctacaaattcagtcaaaactctcatcttcatttggtgatacttcaggtaagccataaacttgttgagactgtgatctatgattatcttctggatgatccaagatgtaaacaataccctcattcctaactgattgttcatcattatcatagaatttttcaaataaacaccttagttttctatctcaatcttacacctagaagatgtgttcataaccactgaattcatgtagtttttctccgacattcgctttcaaatatagctttgtgttttagaataagatatcaaaacctagagattcatgttcatgttcatgttatgcaatcaccttcacttgaagttgaaactttaccacttgatcatattcatagcatcatattgatcaaagcaaagtattacattatgtaattaaactcaactacctaagcaacatgacaaaagtaaaaatataaattgtatcaataaaaaaagaaaaagttttgttgtctattagaaatatatatttttttaaaaatcagaatttcactaataatatccttgatttctatttcactaataatatccttgatttttagtttgttaattgaaatacaacttactaatttgaaaaataaactttgttaaataaaaaatttactacattgtatacgtttaagcaaaacatatgttgtattcagaaatctttgtttgtttgtattttgtttacatcgtgtaatgtgaaaaagtcattagatttttacattttgtaatcaaagtatcaaaccaaaacaaatcaaactaaaccaaaaggtttttaagcaatttgaaccaaatgaaccaacatcaaaccaaatcgcatgatccaatacggtttgattgtttgtttcggttacaatggtgacaactgaaaatagctaaaagaggaggaatcagaatcaagcatccgattccgatcgacaaatagggtttagaatccacacacccaaatcggaaggcgaagaaaatg

SEQ ID NO: 7836 - DNA, 3000 bp, Unknown
  misc_feature (1)..( 3000): cDNA_ID_1809422_gDNA_ID_1621167_Annot_ID_57212 3000 nt of promoter + ATG
gaaagtttgaccaaaaaaaaaaaaagaagaaaaacatgaaaagagtcctgtctcaaaagaatggccacaaaataaaataagggtttagagtcctgtttcatatcggcataatagcggagccattctggtcaattgtcacagatttttaatgcagaagattagagtagagcagaaaggaatataaaacttcaacatacgaactcagacctgatcttgcagtggtaacaatagtgataggtcggttcgaagacagcaaacctaccagaaaaatagagatcagacgaagtaaatttaagtcattcctaagtctttcttaatcggctctatcaaataacgtttctgcgtctctttctctcgtccttagctgctatgtctaacatacgatctggttgtggcaatttgtggaagtctatcttactttcacagaggcatatgtttaaaagtgcatgtatgatgattttatctgaattgatggtttgaaatttgaaacctaagtccaaaatatttaaacactggcaatgtcacagattatacatcaaaagaaaaagaggataatagtctggaaatgtgagaacaacaccagaaagcaacagaaagaaacagagcaaggccgagggagaaaccatggagaaggctagaatcaagaaggaagaaaccactgagcatcgttgaagttgaagttggagagaccgtggaagcgtttgacggtctttgttgcaagattgaagacaccgatgtcgaggcatgacaatttattgtgacagatacgatcatcacgagtgaaataaatggagttaggctcaattccaagggtatggtcagcaggcacggtaatacccaaatcatagaagagggcctcatcacctagagaatgtacctcaagaagccgggtgtcgagggttttcgggtcaagatctttaggatccctcttgtacagatggaacatcctgtgactttcagaggtacctaaatcgtacgtaaagacaaccaaaacttgacctgctcttgtaacagcaatgcctttgttagatgggatagacctcttttgcttcatacgttcacgttccttcattgtcatacttggcatccacattggaagcctatgtttctcggatacatccttgaaaccatcttcatcttgtccagacaaatctaagtgtcgaatgaactcacgggtggcatagacgtaaagattgtaacctttcagtaccatatcgtttaaacctcgtaactccctctgaacctcgagctctgttggaatctcgcggtaatgatcatcccctgtcctgcaaaaccctagaaatgggtacatttcaaactgccacacaacaacgtagtttccattcttgtcgtcaacccacaaacgacctctcagatcttcggcagcatgaggaaattcatcacgaaatggatcctcatcatccattagcatatgcttgacattctcctctccttcacgccaaatcttaaaatggctacccttaaatgattctagtggtggaagatcgatcctcttctcgctaaatacatctataatatagagtttcattcgggaatctaccaccagaaaccacttacctgagtttcccaggaatcgataccctgaaaagtcactcttcgtctcgtaaaccctatcattgtatgggttgtacacactattactacgacaaccatccttttctgcagaaagcatcagcaatggagatctggcttttggccgctgaatcaaattcgaacgcagagccttagcagagtcaagcgttagcgtagtagacctttgcattattgggacggagatcgattatctcgtgctgaaaaaattgagcaagggttaaattgtgcacactgtgtgtaaatataggtaccaagcccaataacagcaacaaaaaatattctaacgggtctgtggcccaatataacatcatcatgaattatttttggttattcaagattttgagaaacgtttgtgtgtaaactcatagtcgtagttattcaagattctcttgatattttcaagttgaattttgcaagagatactctcagttgtacaagcttcattggtgtcattagcatatgtcagatcagtgatagtgttgatgggttctcaagaaggtattaatattatgaggttgggaaaaagatatagaattctttatgaattgaaaggaacctattcttaccaaaaaaaaacaaatgctatgtcacagactgtgtttgaatttgagaattacgttcagttgtgtgtttgactcaaagtagacggtattgcgacgatccgttcatggcttcatagtttttgtgtaggcaatggcatgcgatgtttagtgagacatatagtcgattttgtttccacattactactaattcaataaagctatagttagttcaaaatggctgacttttgtttcgaagttgcttagctttgataatagaattattagtttcgaattttatgttagtctttcaaaacgaactagctagtgatgtaaaatcgaatttatctgcacttgtacatagcaaaaactctttattttggtttgtattttgtaaacatcaatgacgtacaaaattggttatgacaaatttaataaaccaaaagaaaaacaaatataaacatgttgtgtagaatgtagataacaaatttctgcaataaggttattcagctgtctgaatgaacctaaactatgctaagatagtgttactataagtcttagttaggtgaacaaaaacggcgctcattggagctcctacaaagtaaaacgacaagttgtttctgcgtatggcggacctaaaagtttttttagaaaattaattgaagccatccggtttttctgttctgcatttttgtaattgcgtaaatcgcctaattgctcttgtgtgctgctgcttctgtgtcgccaagattcttcttcttcaaccttgaaaaaccctaaaagttaaccgccactgcgatacggcaccgtatttgacgtttccgccggacgaatctagaattcagta

SEQ ID NO: 7837 - DNA, 3000 bp, Unknown
  misc_feature (1)..( 3000): cDNA_ID_1809418_gDNA_ID_1621167_Annot_ID_57213 3000 nt of promoter + ATG
taaatgattacgaacctgtatgacaagaggaggaatatccaagaaactctgagcttgaaccttgaacaagagcttcctccaagacttgtttggtttgggagaaagttgaacaaaatcttgacaagttatatccatgaaagcttctgcgaaaactgcgccttctccattacagtctacctcgagcttgctcccttcatcggagactcttatccgacccgcgaaagggtagtaatcaactagaaccctagagagcgaatctttcagggtgagaggggatatagatttttggaaaaggtaaaggtacttgatagagaatctgagaaaatgatggtcgtcgaggtttgaaaggtagagagagtgatttggtgtgggagataaaggagttattaaggttggttggttttcctcgtacaaacaatccggcagttcttgcatcctccgtttatatttttcactttgttttttgagagagataggaaaaatggatagagatggtgggaagggaaagtagtaagcaagattggggagagctaaattggtggtaaaagttggaatccgcttaaacaggggtcagtcttcaactatctcggacccatgccaaatttaagtatttcttattaatgtgtcatttgtttgttatccttcattatagtatttcttaatctgtaatttgtttgttatccttcatatatataaccctcataattatttagtttgaagttggtttttgtaataaaaaatgtgtgtaagaaaattaagcggatatttttaacaatcggaaaaccgacattaaacaattttctttttttgttgatagtaagaaaaagggtgggatataaaatagaagtttatgtattttctttcacttcctcgctcgtctctctctctctatctatctgaaaccatcacgatcttcatctctaaagtaacgatcttctattttcttttgtaaacgaatatgatcctctcgactctctacgctttgattttttttcctttctctgttaggtttttctctccttgtaaaatcatctatcatgactggaggagagtatgcaaaagtaaacataacttgcaatgactcagttgttaaaatccttgatccttgttctatggctgaagtatccacaaaagtttcagaaattcttaagaaatcatccgatcccgaagtcgtttgtactctggatgtctctagtgaaatcatgaggaagattgtaaacattgaaggaaactaatgaacacctttataaatattcatataagagttctgtttcccacaccagaaagacagcttataacacatgcttgttggagcttcttctttcaaagcaactatcaaccagaagaagattcctacaaacccttctccactaaggatgagaagtggatccgcgaggaattcaacaaaaaagaagaagatcctaagaagctcttcgagcttttcaaggtatgtgcttatatgattatcatttataggactttcttaggttttggattacatttttttgctttctgctatattatcgggttattgctcaaattttatggatttgtacacctatgtggtgtgtaggcttcagagtaccttggatttgtacatccaagtcgtttgatcagaaggatggagacgaagaacagtatattcatcacatttatttataatccttcattaatgacgggttcatggacgaactacctacgaagccctccaatgaaaggcttatgctactttgggtttttgttttgcaagtctttacaattttcatagccatcttttttcctttgtagctcactttagaagaactttagaatcgtgtatcgtttatctgataccgtttgcttcacaacatacgttgagtcgataaattgattgtttttattttatgtttttatctgttttttgccatgagatcaaatcaatagatttaacatcttgtaaacctaaacatttttattttaataaataattaaaaatcactacataaatttttaatattttgacacaaaaacttatgtaaatctatttttgaaactagatatctgcttgtaccgttaaaaatagatttaacaaaacaactgagaaatttttttgactaagctttcaaacatacaatactaaatctaattctacttgaaaaaaaaagaaaaagaaaaaaaacaccacagcaaaaaaaattaatcgcttaatcaaatattacgtcgccaagcttgatattatagaaaactggtattaaaataacccaaactttcgaaaaaggactgtaaattacacatgttttaaaattttgtctaatatttttgcaccgttaaaaaccaaaacggaatataatatctttttgtaccatatgtgttgcaatgatgtaagaaatgcatgctaaatttaatagtaaatctagttgacatatgagttatatctatttttattaccgctaaaataaataaaattttcaatgtaattagaacttagaactcattcaagtatagtggataataggtaagtagaggccattactttatatgatgataaaacttagaattacttattaatcatgttttctttttttggcagcgtttacaattacaactaaatccaatttatgttttaattattgtttttaccatagtagaccatttcctcgaaacttaaacgtaatcattattttgccagagtgtacgagccataatctcgccacgtgtcccacgaactcgcatagcttaaagatttttttttaacaaacaaacaaacagtgctttttccgcaactttctccgccagctcaatttcagatctcggcggcgacggatccattccaatcgtgtttcagatcggtgactttgagttagaaccaaccaccttactcaatccgacttcagattgaaattgctatatcctacgcggattctcctgcaaacttggtgcggatctctgcgaaaattgctgttttggatgtttgatttgggagctgtgaaaaataggacggtggagtgagattatctgatg

SEQ ID NO: 7838 - DNA, 3000 bp, Unknown
  misc_feature (1)..( 3000): cDNA_ID_1809414_gDNA_ID_1621167_Annot_ID_57214 3000 nt of promoter + ATG
gaccacaattagaagcttcttcggcacaaaattgacctccttcttcccattttcagtctccgccacgaaactcaccgcatctacagctgcttcttcccgtttcctattttccaaccgttcttcaacgtagggctgtttgatctcgaaggagaatcgatcggaaccgtttacatcttccatttttccgaaaggtgtcaaacctaatacaaatccaagaagaaagaagacgagaaactggtaaaacggtcgcctccatggacctctacgcgagcttttaggatcagacgttactccgaggagcttggtgagatacgaaagaaattgcgaagaattgtgtttgctgctactaccaccaatggtgaaacctttgtgtgaacctccattctcgtgagaacgatcgtgatacatcggcgagagagttcgccggattgacgccatcagataatctcactccaccgtcctatttttcacagctcccaaatcaaacatccaaaacagcaattttcgcagagatccgcaccaagtttgcaggagaatccgcgtaggatatagcaatttcaatctgaagtcggattgagtaaggtggttggttctaactcaaagtcaccgatctgaaacacgattggaatggatccgtcgccgccgagatctgaaattgagctggcggagaaagttgcggaaaaagcactgtttgtttgtttgttaaaaaaaaatctttaagctatgcgagttcgtgggacacgtggcgagattatggctcgtacactctggcaaaataatgattacgtttaagtttcgaggaaatggtctactatggtaaaaacaataattaaaacataaattggatttagttgtaattgtaaacgctgccaaaaaaagaaaacatgattaataagtaattctaagttttatcatcatataaagtaatggcctctacttacctattatccactatacttgaatgagttctaagttctaattacattgaaaattttatttattttagcggtaataaaaatagatataactcatatgtcaactagatttactattaaatttagcatgcatttcttacatcattgcaacacatatggtacaaaaagatattatattccgttttggtttttaacggtgcaaaaatattagacaaaattttaaaacatgtgtaatttacagtcctttttcgaaagtttgggttattttaataccagttttctataatatcaagcttggcgacgtaatatttgattaagcgattaattttttttgctgtggtgttttttttctttttctttttttttcaagtagaattagatttagtattgtatgtttgaaagcttagtcaaaaaaatttctcagttgttttgttaaatctatttttaacggtacaagcagatatctagtttcaaaaatagatttacataagtttttgtgtcaaaatattaaaaatttatgtagtgatttttaattatttattaaaataaaaatgtttaggtttacaagatgttaaatctattgatttgatctcatggcaaaaaacagataaaaacataaaataaaaacaatcaatttatcgactcaacgtatgttgtgaagcaaacggtatcagataaacgatacacgattctaaagttcttctaaagtgagctacaaaggaaaaaagatggctatgaaaattgtaaagacttgcaaaacaaaaacccaaagtagcataagcctttcattggagggcttcgtaggtagttcgtccatgaacccgtcattaatgaaggattataaataaatgtgatgaatatactgttcttcgtctccatccttctgatcaaacgacttggatgtacaaatccaaggtactctgaagcctacacaccacataggtgtacaaatccataaaatttgagcaataacccgataatatagcagaaagcaaaaaaatgtaatccaaaacctaagaaagtcctataaatgataatcatataagcacataccttgaaaagctcgaagagcttcttaggatcttcttcttttttgttgaattcctcgcggatccacttctcatccttagtggagaagggtttgtaggaatcttcttctggttgatagttgctttgaaagaagaagctccaacaagcatgtgttataagctgtctttctggtgtgggaaacagaactcttatatgaatatttataaaggtgttcattagtttccttcaatgtttacaatcttcctcatgatttcactagagacatccagagtacaaacgacttcgggatcggatgatttcttaagaatttctgaaacttttgtggatacttcagccatagaacaaggatcaaggattttaacaactgagtcattgcaagttatgtttacttttgcatactctcctccagtcatgatagatgattttacaaggagagaaaaacctaacagagaaaggaaaaaaaatcaaagcgtagagagtcgagaggatcatattcgtttacaaaagaaaatagaagatcgttactttagagatgaagatcgtgatggtttcagatagatagagagagagagacgagcgaggaagtgaaagaaaatacataaacttctattttatatcccaccctttttcttactatcaacaaaaaaagaaaattgtttaatgtcggttttccgattgttaaaaatatccgcttaattttcttacacacattttttattacaaaaaccaacttcaaactaaataattatgagggttatatatatgaaggataacaaacaaattacagattaagaaatactataatgaaggataacaaacaaatgacacattaataagaaatacttaaatttggcatgggtccgagatagttgaagactgacccctgtttaagcggattccaacttttaccaccaatttagctctccccaatcttgcttactactttcccttcccaccatctctatccatttttcctatctctctcaaaaaacaaagtgaaaaatataaacggagg

SEQ ID NO: 7839 - DNA, 3000 bp, Unknown; identical to SEQ ID NO: 7838
  misc_feature (1)..( 3000): cDNA_ID_1809414_gDNA_ID_1621167_Annot_ID_173879 3000 nt of promoter + ATG

SEQ ID NO: 7840 - DNA, 3000 bp, Unknown
  misc_feature (1)..( 3000): cDNA_ID_2175516_gDNA_ID_1621167_Annot_ID_173878 3000 nt of promoter + ATG
taatctgatagagattaccaaaattggatatatattaatatttatttgaattttggcttcgatttaagaaccgtacgttaagctaaagttgatgaactaaactaaaacatgtattcctttgaattcatcgatcagtcaatatcattatcatactagcatggagaaagactgtttttaaactcatcatattatccattttgtgtttaataaaaaccaatcaaaaatcgacaagtgagctactctagtactctctttaattagtctttattggggttcatatgtctattttctgttttcaaacttatatataagaaaatatttcgtacataaaacatattaaaaccaatcaaaaatcgacaagtgaagtactcttttattatagaccactgaaatgtatatagaaactttagcatgcacgagaattctcatcttcgttatcttttccgtctaaaaacttaaccatgcaatactctagtctcttcacaacttcctccggcagggacatttgaactctgatggcatcattatcgctcgccacgggtaaaaataaacagtagatatcactcgtcaaaggacccatatacattggctttcctcctcccaagtccaactcctctaatcccaatttcgcccattgtgaaatgaccaaactgcacgagacgtccgttttcaccgttttatcctccagtaaatctatcgttgatcttacatattcgtcggtaattcttgattttgcctcttgtatcgattttacagcgtggtaaatattaccattgactaggtcttgtaccttgctctcggcgcaagctagtacgaatccattaccgtaatacccttggggaagttctggagttagtcgttttctcatattgactgagaataagagtttgaccagcatggtcattggtaaatctagagattgagcccacgagcgccaagtgttagccgctagtgcctcgaacgtggtgcattttagcgaaggagcgcaggttttctttaagcgtaggagatgagattggttgaaggttaaggtggcaggagccaatggttgggactgtaaatacttggaaatgtcgaaggtggagcttttgtctacggtggtggttcgggtgaaaccgggatgtgagtgtgtgacacgtggagggtttcgcggatctaatacgtgacgggagtggaatggtcgggtcggaagatgagcttggctagtggtcgcatgggcccatgcatgtaggaactgcgatgtgccaatgccgtcgcagaggcaatgattgatcgcggtgcagaggatcatacccccacaacggagatacgtcacctgaggcattaatattcgtaagatatcaaaatgtcgatttattattacattcgactagctttcaagcgttaataatcaaacttgctgatactttatacgtaagttcatagaaacgcagttttaataaaacacataacatgagttgaacaaaacgacttatagaatgaactaattcaatgcaagaaaaaaagggttttgtttttcgtgtaaacgagaaaagaaaaagagtatgattgaacagacaaattattctctatgcgcccttctttttcttccatataatctctttattaaagttcacgtattttaagagtagaaaataactttatgttattgatacatcgaatgcttatgcacgaccagtaaaagtatgcatttctaatttgaaaagaacaaagtggccgaatcaatttaggagttaggaatttaaaaacaatttagattattcctacgaattatatttaaacagaacagtcgatccaactaactttaagaaacctaaaatattcgagctacgtttatccccctccaaaacaaattcgaatataattctttcacgaaattaactaatatggaaacaatacgagtcatggttttgacttttgaaattgaaatcataagtttcccagcaagaaaaaaataaaataaatgattacgaacctgtatgacaagaggaggaatatccaagaaactctgagcttgaaccttgaacaagagcttcctccaagacttgtttggtttgggagaaagttgaacaaaatcttgacaagttatatccatgaaagcttctgcgaaaactgcgccttctccattacagtctacctcgagcttgctcccttcatcggagactcttatccgacccgcgaaagggtagtaatcaactagaaccctagagagcgaatctttcagggtgagaggggatatagatttttggaaaaggtaaaggtacttgatagagaatctgagaaaatgatggtcgtcgaggtttgaaaggtagagagagtgatttggtgtgggagataaaggagttattaaggttggttggttttcctcgtacaaacaatccggcagttcttgcatcctccgtttatatttttcactttgttttttgagagagataggaaaaatggatagagatggtgggaagggaaagtagtaagcaagattggggagagctaaattggtggtaaaagttggaatccgcttaaacaggggtcagtcttcaactatctcggacccatgccaaatttaagtatttcttattaatgtgtcatttgtttgttatccttcattatagtatttcttaatctgtaatttgtttgttatccttcatatatataaccctcataattatttagtttgaagttggtttttgtaataaaaaatgtgtgtaagaaaattaagcggatatttttaacaatcggaaaaccgacattaaacaattttctttttttgttgatagtaagaaaaagggtgggatataaaatagaagtttatgtattttctttcacttcctcgctcgtctctctctctctatctatctgaaaccatcacgatcttcatctctaaagtaacgatcttctattttcttttgtaaacgaatatgatcctctcgactctctacgctttgattttttttcctttctctgttaggtttttctctccttgtaaaatcatctatcatg

SEQ ID NO: 7841 - DNA, 3000 bp, Unknown
  misc_feature (1)..( 3000): cDNA_ID_3436784_gDNA_ID_1621167_Annot_ID_173877 3000 nt of promoter + ATG
tttcagggtgagaggggatatagatttttggaaaaggtaaaggtacttgatagagaatctgagaaaatgatggtcgtcgaggtttgaaaggtagagagagtgatttggtgtgggagataaaggagttattaaggttggttggttttcctcgtacaaacaatccggcagttcttgcatcctccgtttatatttttcactttgttttttgagagagataggaaaaatggatagagatggtgggaagggaaagtagtaagcaagattggggagagctaaattggtggtaaaagttggaatccgcttaaacaggggtcagtcttcaactatctcggacccatgccaaatttaagtatttcttattaatgtgtcatttgtttgttatccttcattatagtatttcttaatctgtaatttgtttgttatccttcatatatataaccctcataattatttagtttgaagttggtttttgtaataaaaaatgtgtgtaagaaaattaagcggatatttttaacaatcggaaaaccgacattaaacaattttctttttttgttgatagtaagaaaaagggtgggatataaaatagaagtttatgtattttctttcacttcctcgctcgtctctctctctctatctatctgaaaccatcacgatcttcatctctaaagtaacgatcttctattttcttttgtaaacgaatatgatcctctcgactctctacgctttgattttttttcctttctctgttaggtttttctctccttgtaaaatcatctatcatgactggaggagagtatgcaaaagtaaacataacttgcaatgactcagttgttaaaatccttgatccttgttctatggctgaagtatccacaaaagtttcagaaattcttaagaaatcatccgatcccgaagtcgtttgtactctggatgtctctagtgaaatcatgaggaagattgtaaacattgaaggaaactaatgaacacctttataaatattcatataagagttctgtttcccacaccagaaagacagcttataacacatgcttgttggagcttcttctttcaaagcaactatcaaccagaagaagattcctacaaacccttctccactaaggatgagaagtggatccgcgaggaattcaacaaaaaagaagaagatcctaagaagctcttcgagcttttcaaggtatgtgcttatatgattatcatttataggactttcttaggttttggattacatttttttgctttctgctatattatcgggttattgctcaaattttatggatttgtacacctatgtggtgtgtaggcttcagagtaccttggatttgtacatccaagtcgtttgatcagaaggatggagacgaagaacagtatattcatcacatttatttataatccttcattaatgacgggttcatggacgaactacctacgaagccctccaatgaaaggcttatgctactttgggtttttgttttgcaagtctttacaattttcatagccatcttttttcctttgtagctcactttagaagaactttagaatcgtgtatcgtttatctgataccgtttgcttcacaacatacgttgagtcgataaattgattgtttttattttatgtttttatctgttttttgccatgagatcaaatcaatagatttaacatcttgtaaacctaaacatttttattttaataaataattaaaaatcactacataaatttttaatattttgacacaaaaacttatgtaaatctatttttgaaactagatatctgcttgtaccgttaaaaatagatttaacaaaacaactgagaaatttttttgactaagctttcaaacatacaatactaaatctaattctacttgaaaaaaaaagaaaaagaaaaaaaacaccacagcaaaaaaaattaatcgcttaatcaaatattacgtcgccaagcttgatattatagaaaactggtattaaaataacccaaactttcgaaaaaggactgtaaattacacatgttttaaaattttgtctaatatttttgcaccgttaaaaaccaaaacggaatataatatctttttgtaccatatgtgttgcaatgatgtaagaaatgcatgctaaatttaatagtaaatctagttgacatatgagttatatctatttttattaccgctaaaataaataaaattttcaatgtaattagaacttagaactcattcaagtatagtggataataggtaagtagaggccattactttatatgatgataaaacttagaattacttattaatcatgttttctttttttggcagcgtttacaattacaactaaatccaatttatgttttaattattgtttttaccatagtagaccatttcctcgaaacttaaacgtaatcattattttgccagagtgtacgagccataatctcgccacgtgtcccacgaactcgcatagcttaaagatttttttttaacaaacaaacaaacagtgctttttccgcaactttctccgccagctcaatttcagatctcggcggcgacggatccattccaatcgtgtttcagatcggtgactttgagttagaaccaaccaccttactcaatccgacttcagattgaaattgctatatcctacgcggattctcctgcaaacttggtgcggatctctgcgaaaattgctgttttggatgtttgatttgggagctgtgaaaaataggacggtggagtgagattatctgatggcgtcaatccggcgaactctctcgccgatgtatcacgatcgttctcacgagaatggaggttcacacaaaggtttcaccattggtggtagtagcagcaaacacaattcttcgcaatttctttcgtatctcaccaagctcctcggagtaacgtctgatcctaaaagctcgcgtagaggtccatggaggcgaccgttttaccagtttctcgtcttctttcttcttggatttgtattaggtttgacacctttcggaaaaatg

SEQ ID NO: 7842 - DNA, 3000 bp, Unknown
  misc_feature (1)..( 3000): cDNA_ID_3046680_gDNA_ID_1621167_Annot_ID_173870 3000 nt of promoter + ATG
ctccgactatgaggctcggacgatgacggtctcgtccacggcgatctcaaactttcttattccagctttaagcgagattgcattaaacaaggttgatgagtcggtttctcgctttctcactgaaacaagaaagaaaacaactaaattattgaaataaacacaagcctaagatctagagaacaaagacacgagactacaaaaaaaaaacaagtaacaccaataatcaaatctgaacaaatcttacgtttaagttcgtcgaggacagatttagacacgaatgattgagtttttagaggataaagatgaatagatgataatgaattgatgaaggagaagagatgtgatgatgaatagattggagaagaatgttttttagatcggagaagggctcacttggtttgcaagaggcagtgaagaagcaaaataaaacaaattagggtaattgactagggttaagtttatatatgattgcatattttaataaaccgatcggtccgattaccgaaccgacccgacccgaaatccgaacaccaaaattaaattcgccgaacggttagttacagtatcttcggttttcgccgataaccgaaattatcagtttaatcgggtcggtttgctcggttcctgccgtaatcccaggcctaggaaacacggatggctctccattaaatagtgccttacgtaaaaacaccctgtcgtcttatctttctagagttgcaatgagggctgttttctgttacctatccaaaagccctttctttaaacgcagtttttatcttttaagacagctttcgttaaactgttaaaagaaaatgaaaatgcgatgtgaacaaattagaaagcaccaataaaaacatgccacatacattttctatttaataatttaattttcataaaaataaatcaaaacaaaattgagatcgtgcaaaacagaaaaaattttttaaaaaaaacaaaattaattattaaccaaaaaatatgggcttagtaatggaaagaaaaactttctaaaaaataaaattcaagccaatattgatatgcaaaaaaaaaaagtgtaaaaaatcctatattccttaatttgctcctaccaaccccttcacgatcaagctaaaatcaaagcatgttttattaaccgattttctctatttaatcattttttctattatcttccatttttttcttctcttgtggatgctatagaaactactatggaaattctattcaagttagcgcttaatttttctttatattcattcatttgctatttaactcatattaattgtgattttattgtacttatgttttccaaattacaaattattagtagtttaacgattttgttgttaataaacaaatacaaatatttgtattttgttgttaattatttgttgcacaaaataaacaaatacaaatattgcaacctgttgttaataatttgttagttttttaagctaatttttcttagttaactttacaaaatttaaatattgtctaaaaacagaaaaataaataggatttttagatagtataggatccacttttattttccaaaccctttaattatgattgaatctctactgctctctatcaacctcaatcttaacttgtccccgtacgtagtacggggtagaatacttgtatattagaaatttgatagtttttttttggagtcagaaatgtgttttatttattgtataaaaccaatataacaggccaagattttacttatatttaaaaacaaacaaacgtaagaatagaaaacaaaagtccaattaagtgaaccttaaactgaagataaagttgtatacagtacaaacacatgtcaattgagaaccaggttgaaagacacgttgaagaagttggagtcaccgatagattgttgcgacgtcagaaagctccaattccaccaaaaacatcataaatctcattcaatttacatatttatatatttgcctaaagaaacaaggtaaaatcccaattttagctttgttgagaatatgactccatttattgtagatctgtaaattttcttcatcttcttcttcaatcaacaacttttcaaccttcaatttttttttttttttacgtcaaccgatattaacttttcaaccttcaaaaaattttgttgttcacaaaatatatacttgtttttattgaaaaagttcttactatccaaaatatttgttccatcattaaaaatcgaaatagtcggaaaaagaaaaaacaaaagcgagaccaaacctaaacggtccggagaagaagctagcctatcattaccgaaagaccgctaaatccgaagccagagccgaccaccaatgttgattaaaccaccgatgtcagaaacatagccggatgaatatgcaaacgaaggcatctacaccggaagcaaagccaatctatatataccgttgagaaagctggtacaaccaaacgacaaacccacctcaaatgagataaaagtcaacgaaaaaatacatcagagaaatctgagagaatgaaaaatgaaagagagaagagagagaaaccttagaaatttgatagtttatacaggaaaaatacattaaaataatttagttttaaattgtaatgctacttgtcgtaaaaaaaagaaaaaaaaaatttcgaaatactacttagtaatttgaaaaaagaaaacaatattcaaaaaatttccatgttagcgcaaaaaaaaaaaaaatctataatcaaaccaaaccaaaccgaaacaaccaaaaccaacattaaacctaaatctcatgatttttgatttgaataaccacgagttcaccaatccctcttctacattcagtatttaaaatctttataaacacagttagacacataaacgtttctgaaaatcttgaataaccaaaaatgatccataatgataatgatgttacattgggccataggcccgttaaaatatttttctcttgctgttattgggcttggtactttatatatacattatcaaaagacgagaaaatctccgtcaagatg

SEQ ID NO: 7843 - DNA, 3000 bp, Unknown; identical to SEQ ID NO: 7835
  misc_feature (1)..( 3000): cDNA_ID_2175480_gDNA_ID_1621167_Annot_ID_173867 3000 nt of promoter + ATG

SEQ ID NO: 7844 - DNA, 3000 bp, Unknown; identical to SEQ ID NO: 7834
  misc_feature (1)..( 3000): cDNA_ID_1809446_gDNA_ID_1621167_Annot_ID_173866 3000 nt of promoter + ATG

SEQ ID NO: 7845 - DNA, 3000 bp, Unknown
  misc_feature (1)..( 3000): cDNA_ID_1989575_gDNA_ID_1621168_Annot_ID_57816 3000 nt of promoter + ATG
gtccgatccgtctggccgatccgatccgtctgacgatcggtctggccgatccgatccaacgatcggtcgacccgatccgattcgtctctaagacgaacggtctaccctctccatcctctacactccatcgaaccgttggaccgggaggtagcatgcgcatcagttcggtcgagttatactcgccgagccgcaccccctttccgaccaacaactctaggatgtgttaggactcctttaagaatgttttatggtgttttggatgttgtgagatgatgtgagattattccaaaggccttgggcgtcctcccttatatagggggcgaatggatgcttcccgaagcatcacatccgttccttgcaccactccgaaaggtcacatccgttccttgcacccttccaaaaggtcacatccgttccttccaaaaggtcacaaccgttcgttggtacccgctcgaccttacaccttttggccgagacaccttttcacccgtgagctaccacagtccaccagctcgagtgtcagctgaccagaccacccagctgggtcagtacacgatcagctcaccgagctcagtcgagctgtctgtcagctcacctagctgagctagctagtcttccagctggtttagctcacctagcttagctagctagttcatcctagcttgtccagctcacctagctggttcagctttgaactttctcgttcttctgactaagtattttagtccgtttcttgaccatggtctagttttctcctaaaacaacctcacctctttatgaacgcgggacgtggtcgtttcaagtctaccccccttaaactgaattcgtcctcgaattcggcgtgtgtaagatcttgcttactccctaactcgggaaacgggcgttacactttggttttaaagacttgcaatgttttaatcaagcactgttggccaaactagcttggagattactcactgattcaaggagtcttctttctcaaattttcaaaagtcggtactttttaaattcagatttcctcaatgcacctcaaggaactagcccttcttatgcttagaggagtattttatatggtagggaattattgatgggaggtctgaagaggattgtacaaaggtgtggatttataaatgggtgtttgatggtcagaaccggagaccaatgaatgtgcattcattgatggatatctagatgatagtaaataagttaattggtcatatcactcggaattggaacttgctgatactcagagatttatttcaggagaaacatgttcagttaattatgcaccagagacctcttgtcactatagaagacttctattgtcgggctaggactaatgatggtttatatacagtaaattcgggttatgatagaagtagtagagcgacttacccgaatcctttaaagaagctgaggtatgtccttctattaatcccttgtttgataagatttggaatcttgcaacggctccaaagattaaggtgttcatgtggaaagttttaaaaggtgcacttgcagtggaggatagactaagatcacatggaattcaaattaatgatgggtgtttattgtgtgaagaggaactttaaacaattaatcatattttgtttcagtgttcttttgctcgacaggtgtgggctcttgcgctcattcaatcacctgcaatggcatttggatcctctatcttcacgaatattgattatctgattcacaattctctgaacttgggactttctcaacaactgagatctgttagtccttggatcctgtggtttttatggaaaaaaagaaataagattttgtttgagggtacatgttcattgactcaagaaatcgttgattaagcttatgagaattgttctcaatggatcaatgctcaaggaaaagggtctgttatggttaagtcaagttcccagaattggattcctccaccagtggatgaacttaaatgtaacattggtgttgcttggactaaacagaagcaattagctggtatatcttgggtggttcgagattcgatggggcatgttttacttcacagtcgaagatcatattcttatgtacactctctatttgttgcaaaaattaaaagttgggaatgggcattagagagtatggatcatctacattatgataaaataacctttgccgcctcctctcctaatattattaaggctttgaataaaccaaatgacgggcatcggtcatatttctgaattactcaagttcactaaggataaaccacactggtttatgatgatgaaaacagattattgtaatacaggtgcttttgaaatagctaagagtgtcatcacaggaatgcggtggcaatcttatgtagctcacagtttcccctattggttgagaagtctttttgataaggaattgacttatcaatagagtatttgagttttcacaaggaggttaggattagattttaggtttgtcttttataagagtagaaatcaaagttttttttaagtaatgtaaaatttgatacaaatcgataaattaataagagaataatttttttgaaaatcttatgtaaatatatggtcccatcaatatcataaattaataattgtataaatatatcaactatatatatctattatatgtaagaaacttcaatgatatataattctagtattgtttttttcatcttaaattcatattagttcttgtttgaatttagttcatttatttttattgtatcaaaaacttttggttttgttttttagacataataactgtttttacttgtatttggttcgaaaaatatattttatatatagagagatatattatattgtcatagaaaaataaaaaattaggaaattaagaaaatttatctataaattaatacctctataaattaatagaattttgcggtcccaacattattaatttatagaggttttacactatatgcgttgtgtcttaggtttgtgtttagtatctaaaactcccttgtgtttctcttttctctttggtatc

SEQ ID NO: 7846 - DNA, 3000 bp, Unknown
  misc_feature (1)..( 3000): cDNA_ID_1989574_gDNA_ID_1621168_Annot_ID_57817 3000 nt of promoter + ATG
cagtcgaagatcatattcttatgtacactctctatttgttgcaaaaattaaaagttgggaatgggcattagagagtatggatcatctacattatgataaaataacctttgccgcctcctctcctaatattattaaggctttgaataaaccaaatgacgggcatcggtcatatttctgaattactcaagttcactaaggataaaccacactggtttatgatgatgaaaacagattattgtaatacaggtgcttttgaaatagctaagagtgtcatcacaggaatgcggtggcaatcttatgtagctcacagtttcccctattggttgagaagtctttttgataaggaattgacttatcaatagagtatttgagttttcacaaggaggttaggattagattttaggtttgtcttttataagagtagaaatcaaagttttttttaagtaatgtaaaatttgatacaaatcgataaattaataagagaataatttttttgaaaatcttatgtaaatatatggtcccatcaatatcataaattaataattgtataaatatatcaactatatatatctattatatgtaagaaacttcaatgatatataattctagtattgtttttttcatcttaaattcatattagttcttgtttgaatttagttcatttatttttattgtatcaaaaacttttggttttgttttttagacataataactgtttttacttgtatttggttcgaaaaatatattttatatatagagagatatattatattgtcatagaaaaataaaaaattaggaaattaagaaaatttatctataaattaatacctctataaattaatagaattttgcggtcccaacattattaatttatagaggttttacactatatgcgttgtgtcttaggtttgtgtttagtatctaaaactcccttgtgtttctcttttctctttggtatcatggcagatgagttatgggatgcattacaacacttagagttaggaagggaggatcctgctctgtttattccgcatgctacttatgcaactgttgaatctaggaatagacttagcttgattgttaggcctcttaatcctcgatctcaaaatctcaatgttgtggttgctgctttgccaagggtttgggatctgacgtctagagttcatgggagagtgattaatgcaacgtttgttcagtttctctttcagtttgaggtggatctcttgtctgtgctaagaagggaaccatggctctacaacagttggtttgtcacggctcatcgatgggaggtaaatatggcttttgagtacttgtctaatattgatctgtgggtgcaaatgtttgggatccctctcctctatgtttgtgaagaaaatgtggtagaaatagctcatggtttaggggaaataatatcattggattttcatgatgctactacaactcaaatagcttatattagagtgagaatccgatttgatattactgattgcataagattcttccaacgaattacctttgattctggtgagactgcgctgataaggtttcaatatgagaggttaagaagaatatgcagtagttgtttcaggctgactcatcataggaatttctgcccttatcaacaacctgagcctaggtctcttgttcgtggtcctactaacaaccttacaaggactagaagagaaggagtgtgtacccataatgaatatcatcgatcatccctgaactctcaatcgcatatgtctgaaaactcctttccagcgcctcttgaacctcctccaagagtggcagctccttctttgaatcctcatgaattggtggctgcttattttcctcaaggaagagcagtgtctttaccaaatataggaacactgaatctaatcttaatccatcatttagcagacaagcggtttcaaggaattttaacattcaaccgttttttggtcctgttattgctacaaatgttcctcgtgtggttgaagtaggtgagtgttctagacaaggagagtttggagaaccagtaaacaagatggataagggagactcaacaaaaaggaagaatatgggaagtgctagaagtgatgaagaagaaagaactcatggagttgttgggcataaggatggaggtattctgaaacctccaaagaagcgctaaacactctgaaaattttgtcatattttttgttttctatgctgcttaggatccatgatcgcagcttcaaggtttatataataagcgctgcattgggttcaagtatgcaggtccaaggtttgaataaggtgaagagtgggtatggccgttggaacactttttggttaaggctactctttgtgtgcagtttgttgtttcagtttacctatcactttttgattttacaacatgggtaacattgatgttttgttaggtcatgtttctttacttgttttggtgtttgtcttcaaactgaaagtggaaggtctactgatgtactttttgaactatgagagcagccccaacggtaaaatacattctcagtccattgtttctattattttaatcatttaagtataattttattatttatttatatttttagttacaaataaaaaaattgatcaattatactttatcacatataaagtgagtttttaagtacagtaaagcaaatccgtctttttaggactttctttctttctttcttacttctctcttactttttccaattaactatcattttttttctttttaagggacttattaaaaccgaccgctggggctactctgatcttaatatatatataaaaaaaagttgctccatgagttagcattgattacatttatcaatgtcttacatgggctacactaatgatagtatgttgggctttttatgtgtgctctagtagtattgtcgtttgtttgtatttgtactatgactcatcctcttgttcatcggatctaaagcgccactcaaaagggtttatgaaaaggttagggttttaacaacaactcaaaaaacagag

SEQ ID NO: 7847 - DNA, 2360 bp, Unknown
  misc_feature (1)..( 2360): cDNA_ID_1989571_gDNA_ID_1621168_Annot_ID_57820 3000 nt of promoter + ATG
caacacaaatatatatatctggatccaaaagaagcttcaaggatccagaattgtgctcactatgtttgtggagggcttgtttcctcaaaagaaattccattgtttagactatgtgaatattgaaatcttgttcttgttttgtctgtaatgctccttgttgtatataggacatccttggatgaaagaaggagaagcttcggataagcctattgatggcgttgttttatcccgtttgaagagatttcgagatgcgaacaagtttaagaaggtagttctaaaggtaaagagtgaaccattccctattcttgctactacctcctaagtattatcttaaacagcttactaatatgtgattttcctagtcactggaaacatatcataccctgggaaatgatccatcttcctatctttgtctatgaagcatcgatttatgatgtgtgtgtctgatttgcagtttattgcagcaaatctatcagaagaggaaatcaaaggtcttaagacactgttcaccaacatagatactgacaaaagtggaaatattactcttgaagaactcaaaacaggtcttactagacttggatctaacctctctaaaaccgaagtggagcaactcatggaagctgtgagttgattacttattgcatcggacttgtctttaaagaaaaaatataactttgtaacacataatgattaacttctcaggctgatatggatggtaatggaacaatcgacatagacgagtttatttctgcaacgatgcatagatacaaattggatagagatgaacatgtgtacaaagcattccaacactttgacaaagacaacgacgggtatgtttcttccactttttgcttattagtcgaataatgtttttgaactaaaatgtgaaatgcttgacaatacaataggcacataacgaaggaagagttggagatggcgatgaaggaggatggtgcgggagatgaaggtagcatcaaacaaatcatagccgatgctgataccgataatgtaagttggtcaatacatcaaacatgaaacatcagaccggtttttttcgaaacactgttaagtaatgaacaactctgttacaggatggaaaaataaactttgaggaattccgcacaatgatgagaactgagagcagcttgcagccagaaggggaacttcttccgatcatcaattgaataatacatatttgcatgctttaaggtattgaataatacatatttgtatggtttagtttgatctgtttaatccacattttttgtttgtcaaggttgtaaaatccaattaaaaagaattcattcttttggtatatttgtgattccttataaagtgtgttgtagttttatagatacttgacctaaggaattgagaaatacaaacatcaaaaatattcagagaattcaatagaatatttcggacgctctacgttttagggtttctttcacaatttgccttggcgtttaaggtaacctaactgagaaaggtttcttgttattcaataaaccatctctctgctacagcgagtgtcaatggctctcatcttccattagcgacgatgcatagacacagattggaacgagatgaacattttcagaaagcattgttgataaagacaacaacggtttgcagccacaagggaaacttcttcgtatccattgatcattaagctctgtaattgtttcactaaatagtggttttccggttttggtaaacccaaagattcaaagctaaaccggagaaaacagaggccttttctcttgtaaatttcttgatcattgcaaacctttctagctgaaacagagtttttcttttgaccgaaccgaatgtaccggaccgaaatatccgaaaccgaatggatataaaccgaaatattttggataaccgaaaatatccgaaatataaataaatttcaaaagtattagttatttctaaactaaataaataaaaatacttgagaatatatataaaatagtaaaaatattcgaaaataaccaaaaattatcctattatccgaaaataactgaattatccgacaatattcaaagtaaaataaccgaatggatactattttttaagagcaaaagaaccgaaaccgaaacctaactttcaaaataaccgaatggattctaaactttagaaccgaaaaaaacgataaccgaatggataaccgaacgcctaggactgataatatgaatttaaatattctaaagaccattgacttaaagaccaaatcattgtaaaccctctagctgcaccagagtgtttgcttttgaccaactatgtgaatttaaatattttaaagaacattgacttaaagaccaaatccacaaatgtacgagttcagaattgagatg

SEQ ID NO: 7848 - DNA, 3000 bp, Unknown; identical to SEQ ID NO: 7846
  misc_feature (1)..( 3000): cDNA_ID_3088205_gDNA_ID_1621168_Annot_ID_173901 3000 nt of promoter + ATG

SEQ ID NO: 7849 - DNA, 3000 bp, Unknown; identical to SEQ ID NO: 7845
  misc_feature (1)..( 3000): cDNA_ID_1989575_gDNA_ID_1621168_Annot_ID_173900 3000 nt of promoter + ATG

SEQ ID NO: 7850 - DNA, 3000 bp, Unknown
  misc_feature (1)..( 3000): cDNA_ID_3088209_gDNA_ID_1621168_Annot_ID_173899 3000 nt of promoter + ATG
tgtccttcaagatagactcagtagaacgagagacgccggagtggagacgttggtttctttctctccaaattgcataaacacaagagtgaaaggccagcctgataatgagacaaatatttttttcccttgagggagataagagccagttaagacagtccattaattgggcaggaggattaaggttggttgaggctgtaaaaaacctccacacgacaccactaaactggcactcaaagaagagatgtgctctcgaatcgtcatgagcattgcaaagaagacactcagcagggatcgagagaccccaattctgaagcctatcccttgtgtgcaatctattccacgccacaacccaacaaatgaaggcgtgcttaggaacatggttcttaaaccagaccgccttatgccaggggacggtgtgagattgcggatgcagagcagaccaagttcttggagcggagaatctgtttgatggtgcatgaaggtccgttttccaaagaaaggagtcgtcatgctgacagtcaagcaaaccctgagcctccgggagaagatttttaagctgaacaatgattggattcctgctacggcttgatgcaatccaccaagacgtgccccttaacgcatccctaaccacagcatcaataggcaaaccaactgtacgagggcctagaggaccgattacctctataagggggccaaggccaatccaattatcatgccaaaacttagcggtgaccccggaaccaacctcacaaacaataaagggccttgccacaactctgagcttacacatcttccaccatcttggatatcatttcaacaccttcaaggacatcttcgtcctctacatgagaggaaaggttcttcacataagtggagtcgaatcctgtaattgtggagttaaaatagaaaataagacaaataatgaagtagttcattaaagagttttattaaaatgcgaggaaccaaaaagaaaaaatttatatttgttttagttcataaaagattgaatgtggctgcaccaataatcagctttggctacattaatttacacaacatatatatggacttatatatatgaacccatatatatatatttatatatatgaacccatatatatatatttatatatatgaaaaactcttattataaaacctaataacattgatttagatggactacactaatgataatatcttgggtttttatgtgtgctcttatactattgtcgattgtatgatttattcttcatcggatctaaagcaatactcaaaaaggtttatgtgtgctcactcaaaaccttaactaggggttcaacaaaacaaaacaaaaaaactcaaaggagatggatttcgagttgagaaaactttcaagaacattttcaaactctagaaaaaaggaaagcttcattctatgaatggagttaaatagaaaataagacatgaaataaagtgattcattaaaaagttttttttttctcataagtgttatactttattttaaaacttgtgttgtaaagatacaactgtggaaccttccacttacaaatcttgacagttgacacatattaaatcttacaacgttggatcaactaaagtatagtcatccatgttgcataaaaacaaacaagtctagcttataagcagatgcccataaagaaagcccagtccaggaaacaaaacccttagagaaagtaaatttaaagattgccttccacccaaaagccacgtgtgatgtgaagaaacaaagttgaaacacgtggactgaagaagccttagtcgtcgctgttcatcgccgaactggttagcaactcagagaactccaaaaccatggaaaccgccagagcttcaagagaagtctatcaatttttaattagagaaccccaccaaacttcatcagcaaatcaggaaaggaaagatctaccaaaggcaattgactcccgaaatccaaggaacatcgacgtagagtaagtctttgagctttcaacaacacctaaaaacaaacaaaaaagcactcgtctccataaaacggttagagaaatagccacaattgcattagattcaaccgagaggcgtaaaaaactttaatctgcaactcaatttgttcctaaaaaattgaaatcgataagcttggaaaacaaatcgagccctttaaacaaaggaggttcaaggaattatattccaaatggaaacacaaaagacctcaatcaaaccaaatataaagaaatcgagagatgaaaacataaatctaaaccggaaatcaatttggccaaaagctagacgagacaccgaagataggcggtgaaactctggaccttagctagcccaccgccgctaaagaagccaacggaagccagacgcaagcagaccaccgccgtaaaaaaccggacagtgtcagaacgaaaacagatcaaacgttgcccaaaacgtcgctggacaaaagccagacatccatactgaaaaagccataaattctggacagaaaaccggccaacaaacgttgaagaagcgattattgtcggaaaaagaagatccagtgcttcctctctctaaaagatgctgatgagagaagagagagaaccaccaagatttatttaaatgcaaggaacaaaaaaatgtttgccttcaaggataaaatagatatagatttaatctctttaaatttaatcttcgtcaataaatttgcttcatgagttaacgcgatcaaactaaaaaaatctttgttctctcacttagcagctcattttagaaattctcatcgccgttcgtttgccgtcccgtttctgttgggcttaagaacttctcctctgtagtatatcattatacttgagcggagcccttgtccgaagaattaccagttttttgttggagttctgattcagttggatttcatttgctactttcaaaagttggtttgctgtttcaattaggctcgattctctgtgaattgattgcgcttggtttcttatcgaagttgattcaagtggatttctcgtcatgaat

SEQ ID NO: 7851 - DNA, 3000 bp, Unknown
  misc_feature (1)..( 3000): cDNA_ID_1989573_gDNA_ID_1621168_Annot_ID_57818 3000 nt of promoter + ATG
ttccagtgattaacttctatgtactgtttattttgttaaatcaacctcaacttctcggagatgccctccgagactagtaatcctgttattgcacattttgcttaatttcttggatttattatatatgtttttgttgcttgttgcattgacatcccttcagataattgttatctcaaattttcttctaaatgcaaattctttgaatttgagcaggcatcgacatgcagcagccagtgttggcacaaaagtatacatattcggtgggctttacaatgataagatagtttcctctatgcacattttggatacaaaggaccttcagtggaaagaagttgagcaacaaggtcaatggccctgtgcgcgccattcgcatgctatggttgcatatgggtcgcagtcattcatgtttggaggatacaatggggaaaatgtactcaatgatctatacagctttgatgtccaaagctgttcttggaaacttgaagtgatttctggaaaatggcctcatgccaggttttcacactcaatgtttgtttataagcataccattggcataattggaggttgtcctgtctcacaaaattgtcaagagttgactttgctagatctgaagcaccgattgtggaggagtgtgagattggaatttatgaacaaagagttgtttgttagaagtacagccagcattcttggtgatgatcttatcgtcattgggggtggggctgcttgctatgcttttgggacaaagtttagtgaaccagtgaaaatcaacttggttcaatctgtgactatgagtgaaaatcatcttcctccccaacctgaagatgtttctctagaatcgaataaaaacaatgcagatttgaagactgagacgtctctgtctcaaccatgggtgatacagctagaaagaaagtatgcaaagttcggcaaggacatacttaaaagtttcggatggttagaccttgagagaaaggtttactcaaacgaaaaaggtctttgtatatgctttcctgtgactgaaaacttttctgaacttttccatgagaagcagctattgggcaaggactttgaaaggtcagaggaaaataatctaacaaagggtctatcgttaaaagatatatcctgctcagcggctttgaatctattgaaggaacatggtgccaaaaaactcattaatgtagcttttgaagccaaaaaagttgcaaaatcccccttacagagaatgagagaagatatcacatctatacttaaacagaaaggcctaccagaagagcttttggatgagctcccacagaagtaagtgttccagaatcctgattttataatactcggggactaaaatggtgagaatctgattgcgtgcatgttgtttttgcttccatctgataagtaattggtgttttatctactattagatgggaacggcttggggatattgttgtggttcctgcaacatcctttaaagatccaacttggagctctatcaatgatgaagtttggtgtgctgtttctaaatcgcttagtgccaaccgccttgcacgccaagtatgttacttttagaagcttacaccaatattctataagtggaaacgtttacatcttttcatcttaaagccactcaaaacctacaatattgatttattataagctgtgagaatgctgagaactttacaaaccgttgtcttacccaattgcatctccttagcagtaagacttataccatcaattttgtgtctttttcagggacgagttgaacctaatggtacaagggatagtacattggagattcttgtgggagacaatggatgggttaatcaccgtgaaaatgggatcttgtactctttcgatgctacgaagtgtatgttctcatggggtaatctctcagaaaagcttcgtatgggtaacatggcctgtgaaaatgaagttgtcgtggacctgtttgctggaattggatattttgttctcccatttcttgtgaggtatatgccattattgaataaacgagaagagaaagtggttttatacaatcaaaagtcaatactttattagatcgcatgcaactacaatgcattcttaattgacatttacagggcaaaagcaaagctagtatatgcttgtgagtggaatccccatgctattgaagctcttcgacgtaatgttgaagcaaattctgtttctgagcgttgtatcattcttgaaggggataaccggatcaccgcaccaaaagtacggttgatgatattccaaacggctcaccgtctatttaattctatgcaaatggttctttttataactgttggatcgagtaaatcgctgaagtaatagattttgcgtttcaaatcttttgattctcagggagtagctgacagagtcaatcttggtctcatcccgagtagcgaaggaagctgggtcacagctattcaggcattaaggtgattttactttccttaaaacttattcttaactacaagaaccaggagcataaaatctggaacaagttttaaggttcagtctctccaaaagatataatctttaagacgattcaaactcagagatgcgaaaatcttaagccacactgctcttggaacctctgaatatgatccaaaaatgtaatcattagagagagcaaccgctcgattgaatgtatattcactgatgtctctgttcttgttattggaatttgtaggcctgagggaggaatactccatgtgcacggaaacgtcaaggactcagatgagagcagttggggcgagcatgtcaccaaaacattaagtgatatcgccagagccgaaggtaataagtttatgaacaaaatcgaaagctatttggactaaaaaaagagcattggttttttatcaagactaggagtttactaggacttatatttttttggggttttatggtttaaggtcgtagctgggaagttacagtggaacatatagagaaggtgaaatggtacgctcctcggattcgccatcttgttgccgatgtgagatgcagatg

SEQ ID NO: 7852 - DNA, 1533 bp, Unknown
  misc_feature (1)..( 1533): cDNA_ID_1809554_gDNA_ID_1621169_Annot_ID_57218 3000 nt of promoter + ATG
aagcttttttggaagagtttagagtttatggttaacctttttttttaagagattagtgcgttatagttgcaaatagtgcgtttttttccatcagaaaagttagtggaaacatgaacaaattgtcagttaaattatgttatcccacttgaatatttttgcattttgcttttaatttctaacggtccaccaaatcaccaaatggagtattttaattattcttgaattaaaaactcactcaaagatttgcttcttcccatccacccaggcggattgaagtttttagcgtctttttaattatcattttgtatttataatttattagatttttaaatttataatttgaaaattattatcatttatttattttatatcagacttaaatataaaaatattgtttttgagttgttatatttgttacctaaattcttgccaaaaaaaaagaaaaagagagaaaatcttctagcttcgaaaacatctaatactgtaatagtaaaatcattaaaacttttaaattggtttatcaaaactatgtcgtatattcttctccttctccacggaacccacacatagtagagaaacaatatgagcagtttatcacactcttgagttaccaattttctctcatttctcattattccttcactttctttcgaggtacttcatacatagtcgtctttctcaagttgttgtggattgtagagaagacctaataagctagagaatggattcgaggaagtctttatcttccatcgatagcttcaacgattgttacgtttgcttgtaacccaagattcgaaggtcaacaattccacggatgatataccttacttgagtctttatttctaaccagttatatgttacaagctaagtctgattcttgtattcttttctaccattgaaaccaataaaatggtctccttaccaagtaaaacagggttattattatgtactctaacaacattttccgttcaatcaatacaagaagcttttggatttcttatttcttttttttttttgggtttttttctttcaacaaaatgattataaattatttatttttctttaccaataagatttggggttttatgaaccatgatgaaatacttttttgtctttttatgaagaaatgatataactctgtttctcctctcttggtagcaattggctttttatttctcaggtaagtagtctcccccttttaaatccttattgggtgttgtattctcccaacaggcgtgagatgttcgttaaaaacaaaaacaattgctcaagagcatggcgtctggttctgttatgtatgtgtcttgttttaggtaataagagtcaacttcaattttgtggtcactttcttgctaattagttgtgataacagctgttgcttagaaacttcaacggccaagacttcaattttgtctcccagcgtagtagacttggaacttctgatatgactttgatcacaaacaagatatatctttaaaaaaccactttagaaagaaatctatttgccaaatcatccatctttctgaaactatg

SEQ ID NO: 7853 - DNA, 3000 bp, Unknown
  misc_feature (1)..( 3000): cDNA_ID_1809550_gDNA_ID_1621169_Annot_ID_57219 3000 nt of promoter + ATG
ttctcatctttcttgcttgcgtagtcgactagtcgctgaaactctgttttctcaggtgtggaatctgtttaaagagaacaaaattcgtgaggtgatagatctgtctttgagagattctgcgcttgattaccctcaagtgttgagatgcgttcaagttgctctattgtgtgtacaagaaaacgcggaagatagaccaagtatgttagacgttgtgtccatgatatatggcgaaggaaataatgctctttctttgcctaaagagcctgctttctatgatggtccccggagaagctttccagaaatgaaggttgagccacaggagccggaaaatgtatcggcgagtattaccatcacggtgctggaggcaaggtgaattgaaaataagaaaactgatataatgtgaatctcattgttacttgaaatgtttttcttcgtttaatagagatataaacggattatatattcgggaattaggatacatactcttacaagagcaagtaatatcttaagtatcaatatacgtgcatgcatgactcttataaatttttccgttatccgaatccgggaaagtaaaagatctatacatattcatctcaacttaattgatacataaaagaagaccaaattcaagagataacatgtaaaatataacacatggaagtaatatttaaggtctaaataacttggacaagaacttctaaccacattcaccaataatattaatattaaaacatacaactttatatgataagtattgtattatatagaactcgcaaactgaagaaattccgtagaaatctagctactatatgtcgttccggtagaatattaatgatgtattcatataaagtcatgctcataacttcttcttttttgggcaaaatagtattattatgttatacagtacataagtttagcaaaatagggtctacctctcttcttcaaaagacgacataggagccaacataatgcaagatagaactaacgctaattaagataatcgaaaagaatatgacttgggtgcaaagcaaaaggattacggtttcttgagagaaactcatccaccggtggaatcaatgagtgcttcatcttcttccaatatgctgatatcatcattaatattcttggtgtaaaacttgtaacagataatccagacatcattatacctaggaatccatatactcatttctttttctttttatcaattgggtgtgacggctaaatgatgtaagaacaatgaaaaataaaaaaaagagcaaagtagaagggaaaaagcaaaattcgggagaatatttttccaccagtatttgtattggaaattttttgttggtaatacaaaactttaaagagctgctgaagttgagtaatctttacgatgttcattttcaatcttgagactatatctatatgtgttaagattgtatggtagaacgtgatataatatctgtatggtaacacgtgagagtagtttgttggtccattctacaaatcgaactaccacatgacagaaacatgtatgatgtagatgtactgtatattttaacagttgcggacaacattggtcggaaaaaaaaaactcataccaaattggtaagtagtgatattaattttggttcaatttcttgatcatgtgaataatagaattaaaatttagccaagccagccaaaaccaaaagaatccgtaagcatagcaaatataaagccactttcgaaactagcaacaatgacggtgaaataattttatcctagtttagtagactagacagtagaaacatgatgtgataaataaaatgatttaatctcatttctcatacttcacttaaataagatattatcttatagatttcatgctttagttagcttctaagcgtgttttaatgattatagggggacataacgacattaacaacacacctcaaatagtatagtttaaatgtacatttacagaaaattcattttaaactgattctaaaatgtaaatttacagaaaaattaatttaaactaaattgataacccttttatgaaaaatattctaagatgttagtcgcaaaattgaaataataagaaaaagatttataataagaaaaagatttataaaactcaattttaaacacaattattggaaaaaacttctatacagagactttgagagaccagcgagcacgtgtcaaaggcatggcatttacttcgacggctaagtgagggacagggaccctgaccgtaacagttcccaaggagttacaatgttccgtacctccttcatttgctaatccctaacacttacgtgagtagtgttagttatttaccctaatcaacatttggattaggctaatccatgtttgtgaggaccactatgatatttttctctctttttttgtttctttatcattatgatatcattataatgaaaaaaaaaaaatggcgaaaaaaaaatatcattatgataaataaatatataattggcaatcaattacacatgccaccatacttttacctttgttcacaaagtctcaaaattacagtactcacagtcagtcaaaattatagtactcatcaatataaacattactaatttagataattttatgttaatagtggatctaatttatgaacccccaaacagtaaaacttttttttctaaaacattacaataaaaatgatatttgtaataccgctatatattttacgattagtcacaatcaaaacggtatcaatcgacaaaattactgatgaccaatagaaattttggcaaacattattacaaaaatgtgttatgtcaaactaaattaaatgaaaacaaaaaatttgtaattgaattattaaatacgttgccataaattgatgttttgcccttaattaattgattacagtatgattaaaaaggtataactaacataaataaatacccttcaagaaccaaccaatctctcattctttcgtcacccaccttcttcactctctgttattttcacaaaccagaaaaattcaagtacagagaa

SEQ ID NO: 7854 - DNA, 3000 bp, Unknown
  misc_feature (1)..( 3000): cDNA_ID_1809546_gDNA_ID_1621169_Annot_ID_57220 3000 nt of promoter + ATG
tggaactctttcaccggatctcaacaagtgtaaacagcttcaacggttgatcctctccgctaacaacttttccggtgagattcctggtgatatctggccggaattgactaatttagctcagcttgatctctctgctaacgaattttccggcgaaatccctaaggatatcggagagcttaagtctctctctggtactttgaatctctcctttaaccatttatccggccaaatccctaattccttaggaaatctaccggtgacagtctctcttgatctccggaacaacgatttctccggcgagattcctcaatctggttcgttctctaaccaggggccaaccgcatttctcaataatccgaaactgtgtggtttccctctccagaaaacttgtaaagacactgatgagaactctccggggactcgaaagtcgcccgagaataatgcggattctagaagagggttaagtactggattaatagtgttgatctcggtggcagatgcagcaagtgtagcttttattggtttagtgttagtttacttgtactggaagaaaaaagactctgagggagggtgtagctgcacagggaatgcgaaactcggtggtggttcggtgaaggggaaatcgtgttgttgtatcacggggtttccgaaagaggatgattcggaagcggaaggtaatgagagaggagaagggaaaggagatggagagcttgtagcgattgataaagggttttcttttgagcttgatgagttgttgagagcttctgcatatgttttggggaagagtgggttagggatagtgtataaagtggtgttagggaatggagttccggtggcggtgcggcgacttggggaaggaggggaacagaggtataaagagtttgttacggaggttcaagctatggggaaagtgaaacatcctaatgtggtgaagttaagagcttattattgggctcctgatgagaagcttttgattagtgacttcgttaacaatggaagtttagctgatgctcttagaggtattacattacttcttccttcttctttttctgcttatcgaattagtctactaactaaagtttgagatccggttctgttctattgacttaagaaatttatgttgactttgactttgtcaacgctagattagacattactaccttagtgagagatgagattagatctgagagatagtttgtgggattgtcaaagcaagagtggaccaagatttctttctctttttaggcatattttggtattttaatttagaatttagtcaagttacatgtaaaagagacatgtcttgtaagagaattcgacatgtccgaataataaatatcttttttaagtattagtatatgatttaagtgtggtagagtcttagagtagaagtaattagtaaaaatagcagaatgaggaaacaatgatgagagaagtttacttgtgggctaagagtaatgattttatacacccactctgttgagcctctagctgtcccgtctttttctcatcgtaactcattacttactttaatattggatacttgtttgttttggtgtgtgaatagggaggaatggtcaaccatcaccgagcttaacatggtcaacgcgtataaagatcgcaaaaggagctgcgcgtgggttagcttatctacacgagtgtagtccaaggaagttggtacatggcgacgttaagccttccaacattcttcttgattcctccttcactccttacatctctgacttcggtctcacacgtctcatcaccatcactgccgcttctgcctcttctaacgaaccttcctcctcctctgctgcgggtggtttcttaggtggagctcttccttacacttccatcaaaccctcagatagatccaacggctataaagcccccgaggcccggctccctggagggaggcctactcagaaatgggacgtatactccttcggtgttgtgcttatggagcttctcaccgggaaatcgccggattcttctccgttaagctcttcctcgacgtctacggtggttgttgaggtgccggatttggtgaagtgggtgaggaaagggtttgaagaggagactccattgtcggacatggttgatccaatgttacttcaagaagttcacgccaagcaacaagtcttgtccgtttttcatctagctctcgcttgtaccgaaggtgaccctgaagtccgtccacgtatgaagaacgtctctgagaacatcgacaaaatctgattcaattattatattcttttttctttaatttttcctattatatttttgtatctccgatagttcttacacgaggtcgttacgtcactcccacgtctgggactagtggtcgatttgtttttattgaataattatttgttatgaaaattgaatcaaatgagttatactttaggctttaaatggctttgtcttttattttgctgtctttttctcatctgttaaaagacaactcctagttaacgggcacttgtcttgtccttcagttgaagatacacatacaagatctaatatcttccaagaaccatccatttgaaatttcgcttttcatagagtttatgcaaatgtggatttgggtttttagatttaaacgggtcacagaatatttaacttggggtaaattttcaaaaaagcataatggataattaaaatttagattggcccattatatttatcaggcccactaattaaatgtttgttgcttttctgctttttgacattttacaccggcaacctttgtcggagaacggttaagtagctgggataactcaggcggcgtcgcggttaggtagagtagaagaaactacaagcaagagagagcgattcactgaaggtaaccacgtcttaaacaaaatgaaccgaactataaccgtttggttagaagatttaaaacggaatgatccggtttgattttttggtttcagattctgcgggtactggcgccaaatcataattcgtggttccggtcaaagtcacggcgaaacagcc

SEQ ID NO: 7855 - DNA, 3000 bp, Unknown
  misc_feature (1)..( 3000): cDNA_ID_1809542_gDNA_ID_1621169_Annot_ID_57221 3000 nt of promoter + ATG
agtgtggtcgtagcacacttgagaaggctatttcattcgtcaatgccaatgataattggaacgctagagttgtatatggtgacactgataggtaaacattaaccaccatctttcatggcactattttaacttcctacaatataaagtatagccagggtttcatgcttgcataagttaatatatattcgtattacttccgagtgtttattatggtcatttcagcagccttgacaagtatgtatcacagtttctttatttacttcttcctcgtggcctcatgcattttaattacttctgtagtatgtttgtcctcctaaaaggacgaactgtaaaagaagcttttgtagtcggacaagagattgcatctgcaataactgaaatgaacccacacccagtcactttaaagatggagaaagtctatcacccttgtttccttcttacgaagaagcgttatgttgggtacagttatgaaagtcccaatcagagagagcctatatttgatgcaaaaggtattgaaactgttcgaagagacacttgtgaagctgttgcgaaaactatggagcaatcgttgagactcttttttgaacagaagaacatctctaaggtacaaatttgatttcttgcactctttcgaattatcagctgaaactgcagtgtcgtacatctgcttttctctattcattgtgcaggttaagtcgtacttgtatagacagtggaagcggatactatcagggagagtgtctcttcaagattttatctttgcaaaagaagttcggttgggtacttacagcacaagagactcttcactccttcctccagcagctattgtggcaaccaaatcaatgaaagcagaccctcggacagagccacgctatgctgaacgagtgccttatgttgtgattcatggggagccaggagctcgacttgttgatatggttgttgatccactggttcttttggacgtcgatacaccctaccgactgaatgacttatactacatcaacaaacaaattataccagctttgcaaagggtatttggactcgtgggtgcagacttaaaccagtggtttttggagatgccccgtctcaccagaagctcccttggtcaacgtcccttaaactctaaaaactcacacaaaacaaggattgattatttttatctatcgaaacattgcatcttgtgtggggaagttgttcaagaatctgctcaactatgcaaccggtgccttcaaaataaaagtgctgctgctgcaaccattgtttggaagacttcaaagttggagagagagatgcaacacctagccacggtaagtactccaaaatctaacgtttatgaactgttacagaacttggtaacgtttacaaccatcatcttactgtctttactttccaagagatcgtgtgcttcatagaaacttgtacactttctgatgtgagcatttgcatttaatcttgcacacactttgaattcaaagagacagtttcatctcatggtagtcgcaaaacaatttatgctaaaaagtggagacttattagtttcagattatctttcagaaatgtttgctattttataacaagaacgagtgtagacctctttccatgtgtgcttaagttgtgaccttggtgaatctctgtagatgcattcagttccaactttgttggtccattaattgatttttctttatattatcttatttgcagatatgcagacactgtggtgggggagactgggtggtgcaaagcggagtgaaatgcaattcccttgcgtgctcagtcttttacgagagacggaaagttcagaaagagcttcgtggcctctcctccattgctactgagagtgagctttaccctaaatgcatggctgagtggttctaaccttgacgaaaactcaaaaaaaaaaaaaaaaaaccagtaatctaactctatcccatacgtatttccactcaaactaatctaaaccatcctatcctgttaagtaacgatgtgaatttttgtatttgcaggattttgagcgaactagtaggtttatatggttgtgatcaaagagcatttttttcaaggacgtgtgaatatgtgtatagatagtagtagcacccacgagtacagtactgtcactcatcattctgttcaactcctttgtgttgtgttgtgtataagcaatcttggaaaaaataattataattttgtatagcataccaagttcacgagaaagatagatagatagataaagaaacaaaaacaacataacaaaaaaaattaacagaagaaacaaaaacgcctacgagtcttttgggtggtggtgagatggtgcaatgcttcaatctctctctttttaagactttcgagcacaaccaactgtttcacacaaaatgggtgataatcccttcaatgtaggcaaaacttatagaatgcttaagaaaactgaataaggaaaaaacctcacctcttcaatagcacgctcccgcaaaatcgtaaagtgcatagccctgtgtttggatataatcttcgtatccatatatgataaagcaactacatggaaactggcagagttatatcaaacatataaatggtcatggatatgagtgtacaaaaagtaaaacagatttggtcatacacaatttgaatttcttcccgtaataaacatattcttaggctctatatatatatattgtatcaatgttattgagatcaataacacataataaagagttttcccccaaacccttctctagttagtagtttctataattttggcaaatagtattcaagtgctcttgcattctcaagtgattaattcaattcctaggtttcggtttcggtttcggtttggttcggttcgtctcggttattttaggaaaagaaaacaaaattagagagcaaacacgattggtcaaagtcaactcttctctaccttcctcacttcccagcttcactgatcatcgccaatcacaaaaccaactacacacattcatcatcatttcgattatattttacccgacc

SEQ ID NO: 7856 - DNA, 3000 bp, Unknown
  misc_feature (1)..( 3000): cDNA_ID_1809538_gDNA_ID_1621169_Annot_ID_57222 3000 nt of promoter + ATG
gtgtcaaactaaaaaatagttgtattacctttattcaagatttccaaaacatccgaacgaaaaacaaaaagattttatccaaagcctgaggtgactcacggccatgtaacatatgtggtttactctaattaacaaatggatcaaatggggttttatacgttaaaggctaatcaaaattaaaatatgaaccgtcaaaaatggctagctaccacataacttgtcaacatcgcgcggacaaatgattattacaaagaaaacgatttttaaaaagtgaaacgatcgctttcaggtcgccgcttttagattcagaatttcataaataagtaggctatagattaaataagagattaacaagccttctttttcattatggtgggtggtttaagtcaaacttcacgaaatgtttgctttgtcttacttttcattaataattggatgactttatcctttttctaagttttaacactaaagaatgtgtatatttggattgaagttccagatttcttaaagtcattcggaatcaaagatgtactttggaaaactttgttttttttttttaataccaacgaagcctgtaatgatttaccattttggtcttttagagagtttcggaaaaactagaaggatacttttttttcctgagatgttcatgatgcttaacatttaaataaaatcaaaatcttttgaaagtgttactttctatgatttgattaatgtcaccaatttttttttgtaaattaagaatcaataacaccctcttagtattattatcatggctttggatttcattccagttttagtttttttgggtatgtttagcttccttttttccaaactaaatttctaaaaaatatgttttttcggatttttttttgattatttgtttaaccgtcggttatgtttttcagtatagcttacgataacaatatcccacatcggaaattaggaaaagatcatgatagtatataagatatatgtcatcatttactcattgccaagtggttttgtttgaatgagataatatatctcattcattcattgtcaattagttttaagttaaaaaacttatattttaatatagtatcaaaatgcttgatccatacattttccagctcggttcgtattcgatatgatccgaatttggtctattgatccttgcttaatatatcgagagcagtggctaaaaaatcatcatctctacaaagcgtattatcatcgtcatcttgccacactgttagcaatatatattcatcctctcattttcacatccatttgataaagataatttgaattatttatatgccccctacatagcgaggattacaaagaaggaataaaactgaaagtgaaaaatgggatgcgactttaatagagtttcatggtcaccactacccataccagttggtccacgtcagacgtatacaaaggcatacgatacgattgcttgtgctttcagattgagacaccaaagatcaccgattcaccatcatctgatctgatgatatgcttttttcccatcttctgagtctttctttttttcttctaaatttcacaatatacatatattaatttcaataccattaccatcaataattttatagctacaactaaataacctacaatatacagaaaatataaaaaccatttctaattttaaaatgggttttgtgtaaaaaagactttaattattgcaactttatttacatcttaaaaaaatatagattaatcatacaaaatcaacaataatatataatataattttttttgctaccgtcaaatttataaaatttgaacaaataatatgtcaaattgaagtcctcacgattaagaatacaaatttagttttagaattttaaaattttaatgtatgtaattgtgaaattgtaggattaatctaccaaaaataattatatatataaaaaatatgatcaaaaatggtaaactttaacaaaaaaaataaaaaatgacaaatctggacaaaaattagtttatgcagtatataatattatttttgtagcaaaaacatgtctttgttttcttggttgtctcgatcaaaaacatgtcttgagagcatatatgaatactaatatagtattaaactataggatgatggggtcattgacgtggtgactagttgacattattatcaccgtaagatctgattgtgctatataatccctaatctgacgctccatttatttattcctccattaccattattagatctctctgtctctttctttctgtcaaaaatattatcttctttgcaccaacttcaacgcattacgaagcagaagacagaacccaaaaaccgacaaagttcccctattctctcggtataacctcatctttatcttctttctccgccattttctcttttctttgtataaatgtctttacccattttggattagattttccccctccaagtaaatgaatcatctgcttcttcaggtctccattgattctcctactctgttttcctcctatatttgtatttgatgttttgtttttttctttggaaccaaacaagtcataaagtttcgatctttgagatcttgcccaattcttggaactagtgtttggttttcttgataatatttctgtgagagaattcttcaattttcagattttcttgataatgttttgctcttttaggaaataatttatagccattcagatttattctcttgtttctttgtggtatatggtgcttgtaattttgcaaaatttggagcaccctatctttttgtttgatgttgatcttattggttcttgacttctttcaaagagttgacttatctgtaaaaaaatattttgcagaaaattcattacttctaaagatggatgttgtaggtggctgatgactcttcttccctagcatgacctttattggtaacatcttctttactcaaaaaagaaacattccttttggaagaatcttgttgttgttgttgttgactaatcttttttatcatgttcttggcagatacagagatg

SEQ ID NO: 7857 - DNA, 3000 bp, Unknown
  misc_feature (1)..( 3000): cDNA_ID_1807798_gDNA_ID_1621169_Annot_ID_57227 3000 nt of promoter + ATG
tacctgttttcggaatgataagcactcctatgttgaatcgaccatattttccccaaatacgggttccaaaccacgagcctagtgttgctgacctccttactcatcattaacaataagccatcgcaatgaaagacttgagatatctcaacatgattaaacttagctatttgctttatagatggctcaactacttcgacgttgttattttggattccatgaagatcaaatctcattgaacaaaccttagatccctttatcatgaaaccagcaaactgttgtctagcttctgctttacatatgacccgagctttagataaatcgttccatctcaatgctcctagagatattattgaaaccctagacagtatctcttctaccatatcctccggaagatcggatatcatcatcgtcgtcttcaaatgaaaatcagggttttttgacctatcatgtatttcctacagtttttcgatttgattatatatatgcgcataactttgggcccataactctaattttcttcttgcttcccgtttgtgtataacacaccttatatgccctcatatttcataaggaacattttgtagaagattattacaagattcacgaagagaaagaataaagacacaagacaaaacaaaaagatgcacctctctaaaacatctataaaacgctctatataatgtttatgtgtttgcgactgtgataaccacatctggcacatgcacatctcctagaagatctctactctaaaactcgacatacctctcccggtcatggtctcgtgcactgtctcggccacaatccatatggaattgcattgagaaagaaacccaagacataagtccaagtaaattgtttgaagctttgatcccaaattattttcacaattattacaaaaatttaacaattacaatcattctatagtactagaaatcttatttttagtccacgggagcaagttgcagtttgtcgcttctccttatgaacttattgcgaattttcttttctttttttaccctggaactttgctctaattcattgttcgataatagtaataattctcaacatcacaactacaaggggaaagcccggtacaagaaactcagtaagatttgttgatccataataattggtagtcttcaatcatatgatataaatgtatttataaaaaaccataaatgaccaatctttttcaaatgaaaacagaagaaatgaacgagaagaagatgatgaaagaaacaaataacgtactgtaaacaagactggctaataatctcgatcttttcttttcctcgataaccgagagttcttggccttgggtgattttcactaaactaggagcataagagactggtaggttagatggtatgaaagttactccgaaatccaatattctcaagtatccattatctccaatgacgtaagctatgttgcacctcatttgtttagataagcttctaccaaacactacggctaatttcttctcttggtcaatgaagaaactcgtaactaaaaacttaattctaaaatgagtaaatgttaagaagttgctccatgacacagcattgggttcaatcttagttgtcacccatatctccatctcagattcttcccaattattaaataacaccacaagatgttcctctctaacagaagatagagctacattatcatcaaacttagcaatttgaaatgggagaggaagacacgacacaaatctctctcttgtaaaatcaaaagaaagtaagcaaccagctagtccttcccctattttctcacctcgatagaaaaaataagtatttccctttattgacatgtcacgtacataaatatttgtatgcaagtcgggaatgatatcaagaaccttccatgaatcagatttaaaatcgtagatttcacaatttttcctattatacatcaagattttgtggttacggttgttgtcgtatccgagagcatacctatatttgaaatgctcagtatctctgcattggatcaacctggtttgtcccaaatacggattccaaaccacgatcttggaatctacctcatcagttaccaataacaacaagccatcgctgtaataaacttgaaataactcaagttcaataaatttatttatcttatttatagagagctcaactagttcaacgtcttcattttggatttcattaagatcaagtctcattgaacaaaccgtagattcgttcacatatctcgtgaaccctgtaaactgttgatttgcatctcctttacatacaatacgatctttggataaaccgttccatcgtttgcaagtagatctcactgctcctagagatgttatcggaaccctagacaaaatctcttctaccaaatcattcggaagatcagacatcatcatcgtcattttttcaaatgaaaaattagggttgaactatcacgtcttttccacacttttaagatttattctgagattgttcacagcataatatggattaatcttctaggaagccttatattgtgtaacagattaattgtacagatgcctttcatttgcagacttattaaagatgaaatgattaataagagcagatttgttctttttaatcatcagtcatcatcaatgtcaatattaataagccatcaaatcaatgaaagacttggaaaaatatctcaaacttacttacaccttcccacacacatttacggtcgattatatatgcaatagatgggccctaattttgggcccataacacttatcacaaaaggcccatcactttaaatcttcttcataattcactgctctcttcctcactacacagttttctattcttctagaatttgcttatgcagacattttcaatttcactcctccgtcactcttctccgttcctccgtcacaccgcgatttttcacggcggagttggagttagattcaaattccttcgcagcttttctcctctctcagcaagacgagataatcccgatgtctccagaaaaccccaaccgagcaaaaat

SEQ ID NO: 7858 - DNA, 3000 bp, Unknown
  misc_feature (1)..( 3000): cDNA_ID_1809519_gDNA_ID_1621169_Annot_ID_57229 3000 nt of promoter + ATG
gatgttttgtgtagtagctacacttttctcaaagtgaacatcagagttaccagctaataacttctccaacctcagacgaattttaccttcatctttcctaactgtattcccacgaaagtaaagaagcgttgtacgagcctcaaaaggatctcccataccatcatcgccctcctcattcaaagactcaacaacatgtacataaggagaaactacgtctttacttaaacgtgccatgtctttagaataacgcccaaaatccacaacaatgagaatcgacgcattcacttgttgccttagaaatctgaaagcattaggatgtgtcatcggaatcacatgatctttacctcctgaacgattccaatacttcgaattctcaagaaactccattaactcaacctgatcacacaacatgaaacaataatggtggcgattcataaagattcaaaattggcaacaaagtcaacgaatttgacattacccatcatcccaaatcaccggaatttcaaaaatttcgattaaaatttgacaatagttagggtttatagttcataattcgatcgccagacgctgcaatggtggcgattcataaagattcaaactttgcaaaaaaagtcaacgaatttgccattacccatcacccaaaatcaccggaatttcaaaaatttccgatcaaaattatacctgtaatagccgatcaaattcagtatctggatcagtcatgttcttcccatgagtattaaaactcaacgaagagaaaaaaggaacataaaacacatccgccaaatccggatcaaaaaccctaattgcttcattctcatcctcaccaccgttaagaagagaagccataagccaatactcaacgctatgttgtcttttaatcccagaagtctgaggccaagaaggtaaattcttccctgtgataggctcaacatctgagctatgaggatccatcatcgcgatattaaactttcgtgggagatcgtacatgaagacacggagaggttttccagaggagctacaaggagaagaagctccattgggttgggattggaggaggtagaagtaaggtcttggatcgacggttcccatgtagattgagaatgaagcaacgaggaagatgaagaagacgattgtacatattgttttgccgtacatttcttcttcgagagagatgatacagagaagaagaagaagaaagtgagagatttagatccaacggtctctgttttgggttttttcgttgcttggtgattgtaatgagttttgatgaaatgaaacgtattgagtcattagacatttaatgatttatgatttaagaaagattctttcagttacaaacaaatttactgtagttgttttttctttttcttttacacacaacataggtgttgtaattcaagaaattgcacattcactttagaagttttaaaagattaggtaattgcacattacaatcaatatttttttgtaaaatgatcactatactataatagaagctaaggatgttgaacacacaaaggattcaaaaagtaaatgtttggttttccggttcgatgttgaaagactgagttatagaggtaatggttcgaattaccatttttgcaactcttgttcatcttatttgattgtggtcaattggaaaaaacgtttacgggtttcttttggttttcagttttgttaccaacaatttgatcattgagacattgacaatccgattttgttcacatgtttgaaaataacgagcgaatgggccgaaccctgctgactcagacttggtcaaagtttttctaagcaaatttcattcttgggccgagtctagggataaagctcatatctagcatttatgtataaccaaaacacataggtgcatatagactagacgagtgacagtccaggatacatacatatagatatcctgataatgatatccatccttgctttgtgaggatcggacaactatgaagaatggactaaaattgtgcttgcctcaaagaagaaatttggtttcctcgacgaccaacttgtaaaaccagaggaaaactctccccagctatgatgattgaaaatccattaattaatactctcttgatatcttggatcaagataactattggtccgagacttggctaatatctcacacaaatagttggtacgtgatgtgtgggaacatatcatcacgtaaagaaaggaaacgtagtttgctttatttaacatacatagacatagttatgttcacgacactttaatgtctacatgtttttttgcgtgttggattacatcccaaaacaaaaaaaaaacatttgtgtcaaatgtttttaattaaaacaacgtgtcatttccttttaaccaaattttcttccctagatatataccccaatacatggtagtagatcttttttttggttttttttttggttcaaaggtagtaaactaattaagccttgattttattcctcttattcttcttagactcgtatttagttcacgagttacgtacaaagtttgtttttttgtctaagcaagcggaaatattttgtaagattataccatctacttttgctgcatcgtatttaaaagtcagaaaaacaacaatgtcactttgataatgacatctgtccatagacatgcaaaattgattcaaatttatgaaatcacctttaaattgtctaagatattcaaattaaatgacttcaaactttaaatcaaaattttaccaaatctacacttcagaacaaaatgaatctgaataaaattagatttagggaaacgtaaagacttcattatggaataaatcgtgaggacttttaagtcattttgcatctcactctcacgccgtaacagtctctctctatgacacaaagcgacggtgttcccgttctgttccgttccgttaagtttcggacttatattacagaactgaacaatcgttgtcttcaagtacgagatttgtctgatttttccaaagcgccgattcgaagatttgaatccatttcagtgatg

SEQ ID NO: 7859 - DNA, 3000 bp, Unknown
  misc_feature (1)..( 3000): cDNA_ID_1807798_gDNA_ID_1621169_Annot_ID_173923 3000 nt of promoter + ATG
aagataagtaattccctttattgaatgatatgcaacctttacgaaaattgttacccgagtggggaatgatattaagaaccctccacgaatgagatttaaaatcgtagatttcgtaatttataaaatacctcaagattttgtggtttacggttgttatcatatccgagagtatacctgttttcggaatgataagcactcctatgttgaatcgaccatattttccccaaatacgggttccaaaccacgagcctagtgttgctgacctccttactcatcattaacaataagccatcgcaatgaaagacttgagatatctcaacatgattaaacttagctatttgctttatagatggctcaactacttcgacgttgttattttggattccatgaagatcaaatctcattgaacaaaccttagatccctttatcatgaaaccagcaaactgttgtctagcttctgctttacatatgacccgagctttagataaatcgttccatctcaatgctcctagagatattattgaaaccctagacagtatctcttctaccatatcctccggaagatcggatatcatcatcgtcgtcttcaaatgaaaatcagggttttttgacctatcatgtatttcctacagtttttcgatttgattatatatatgcgcataactttgggcccataactctaattttcttcttgcttcccgtttgtgtataacacaccttatatgccctcatatttcataaggaacattttgtagaagattattacaagattcacgaagagaaagaataaagacacaagacaaaacaaaaagatgcacctctctaaaacatctataaaacgctctatataatgtttatgtgtttgcgactgtgataaccacatctggcacatgcacatctcctagaagatctctactctaaaactcgacatacctctcccggtcatggtctcgtgcactgtctcggccacaatccatatggaattgcattgagaaagaaacccaagacataagtccaagtaaattgtttgaagctttgatcccaaattattttcacaattattacaaaaatttaacaattacaatcattctatagtactagaaatcttatttttagtccacgggagcaagttgcagtttgtcgcttctccttatgaacttattgcgaattttcttttctttttttaccctggaactttgctctaattcattgttcgataatagtaataattctcaacatcacaactacaaggggaaagcccggtacaagaaactcagtaagatttgttgatccataataattggtagtcttcaatcatatgatataaatgtatttataaaaaaccataaatgaccaatctttttcaaatgaaaacagaagaaatgaacgagaagaagatgatgaaagaaacaaataacgtactgtaaacaagactggctaataatctcgatcttttcttttcctcgataaccgagagttcttggccttgggtgattttcactaaactaggagcataagagactggtaggttagatggtatgaaagttactccgaaatccaatattctcaagtatccattatctccaatgacgtaagctatgttgcacctcatttgtttagataagcttctaccaaacactacggctaatttcttctcttggtcaatgaagaaactcgtaactaaaaacttaattctaaaatgagtaaatgttaagaagttgctccatgacacagcattgggttcaatcttagttgtcacccatatctccatctcagattcttcccaattattaaataacaccacaagatgttcctctctaacagaagatagagctacattatcatcaaacttagcaatttgaaatgggagaggaagacacgacacaaatctctctcttgtaaaatcaaaagaaagtaagcaaccagctagtccttcccctattttctcacctcgatagaaaaaataagtatttccctttattgacatgtcacgtacataaatatttgtatgcaagtcgggaatgatatcaagaaccttccatgaatcagatttaaaatcgtagatttcacaatttttcctattatacatcaagattttgtggttacggttgttgtcgtatccgagagcatacctatatttgaaatgctcagtatctctgcattggatcaacctggtttgtcccaaatacggattccaaaccacgatcttggaatctacctcatcagttaccaataacaacaagccatcgctgtaataaacttgaaataactcaagttcaataaatttatttatcttatttatagagagctcaactagttcaacgtcttcattttggatttcattaagatcaagtctcattgaacaaaccgtagattcgttcacatatctcgtgaaccctgtaaactgttgatttgcatctcctttacatacaatacgatctttggataaaccgttccatcgtttgcaagtagatctcactgctcctagagatgttatcggaaccctagacaaaatctcttctaccaaatcattcggaagatcagacatcatcatcgtcattttttcaaatgaaaaattagggttgaactatcacgtcttttccacacttttaagatttattctgagattgttcacagcataatatggattaatcttctaggaagccttatattgtgtaacagattaattgtacagatgcctttcatttgcagacttattaaagatgaaatgattaataagagcagatttgttctttttaatcatcagtcatcatcaatgtcaatattaataagccatcaaatcaatgaaagacttggaaaaatatctcaaacttacttacaccttcccacacacatttacggtcgattatatatgcaatagatgggccctaattttgggcccataacacttatcacaaaaggcccatcactttaaatcttcttcataattcactgctctcttcctcactacacagttttctattcttctagaatttgctt

SEQ ID NO: 7860 - DNA, 3000 bp, Unknown
  misc_feature (1)..( 3000): cDNA_ID_3436222_gDNA_ID_1621169_Annot_ID_173918 3000 nt of promoter + ATG
aggtcgccgcttttagattcagaatttcataaataagtaggctatagattaaataagagattaacaagccttctttttcattatggtgggtggtttaagtcaaacttcacgaaatgtttgctttgtcttacttttcattaataattggatgactttatcctttttctaagttttaacactaaagaatgtgtatatttggattgaagttccagatttcttaaagtcattcggaatcaaagatgtactttggaaaactttgttttttttttttaataccaacgaagcctgtaatgatttaccattttggtcttttagagagtttcggaaaaactagaaggatacttttttttcctgagatgttcatgatgcttaacatttaaataaaatcaaaatcttttgaaagtgttactttctatgatttgattaatgtcaccaatttttttttgtaaattaagaatcaataacaccctcttagtattattatcatggctttggatttcattccagttttagtttttttgggtatgtttagcttccttttttccaaactaaatttctaaaaaatatgttttttcggatttttttttgattatttgtttaaccgtcggttatgtttttcagtatagcttacgataacaatatcccacatcggaaattaggaaaagatcatgatagtatataagatatatgtcatcatttactcattgccaagtggttttgtttgaatgagataatatatctcattcattcattgtcaattagttttaagttaaaaaacttatattttaatatagtatcaaaatgcttgatccatacattttccagctcggttcgtattcgatatgatccgaatttggtctattgatccttgcttaatatatcgagagcagtggctaaaaaatcatcatctctacaaagcgtattatcatcgtcatcttgccacactgttagcaatatatattcatcctctcattttcacatccatttgataaagataatttgaattatttatatgccccctacatagcgaggattacaaagaaggaataaaactgaaagtgaaaaatgggatgcgactttaatagagtttcatggtcaccactacccataccagttggtccacgtcagacgtatacaaaggcatacgatacgattgcttgtgctttcagattgagacaccaaagatcaccgattcaccatcatctgatctgatgatatgcttttttcccatcttctgagtctttctttttttcttctaaatttcacaatatacatatattaatttcaataccattaccatcaataattttatagctacaactaaataacctacaatatacagaaaatataaaaaccatttctaattttaaaatgggttttgtgtaaaaaagactttaattattgcaactttatttacatcttaaaaaaatatagattaatcatacaaaatcaacaataatatataatataattttttttgctaccgtcaaatttataaaatttgaacaaataatatgtcaaattgaagtcctcacgattaagaatacaaatttagttttagaattttaaaattttaatgtatgtaattgtgaaattgtaggattaatctaccaaaaataattatatatataaaaaatatgatcaaaaatggtaaactttaacaaaaaaaataaaaaatgacaaatctggacaaaaattagtttatgcagtatataatattatttttgtagcaaaaacatgtctttgttttcttggttgtctcgatcaaaaacatgtcttgagagcatatatgaatactaatatagtattaaactataggatgatggggtcattgacgtggtgactagttgacattattatcaccgtaagatctgattgtgctatataatccctaatctgacgctccatttatttattcctccattaccattattagatctctctgtctctttctttctgtcaaaaatattatcttctttgcaccaacttcaacgcattacgaagcagaagacagaacccaaaaaccgacaaagttcccctattctctcggtataacctcatctttatcttctttctccgccattttctcttttctttgtataaatgtctttacccattttggattagattttccccctccaagtaaatgaatcatctgcttcttcaggtctccattgattctcctactctgttttcctcctatatttgtatttgatgttttgtttttttctttggaaccaaacaagtcataaagtttcgatctttgagatcttgcccaattcttggaactagtgtttggttttcttgataatatttctgtgagagaattcttcaattttcagattttcttgataatgttttgctcttttaggaaataatttatagccattcagatttattctcttgtttctttgtggtatatggtgcttgtaattttgcaaaatttggagcaccctatctttttgtttgatgttgatcttattggttcttgacttctttcaaagagttgacttatctgtaaaaaaatattttgcagaaaattcattacttctaaagatggatgttgtaggtggctgatgactcttcttccctagcatgacctttattggtaacatcttctttactcaaaaaagaaacattccttttggaagaatcttgttgttgttgttgttgactaatcttttttatcatgttcttggcagatacagagatgtgtatgagaagaaacaacatcaatttaacaacagtcatagattctaacgaagccattggtatggaacatgaattagattctgctagacatcaatattcttcagtgctcactgcaattccattcttctccgctacattgtttattcctctctctttgaaaatcactatacgtgacgggtttcacgaaagtctttaataacatttccatacacaaaacacaaatagtttagagatttgttcttagggagatttagctatctctctgttcaaaagattggtctaaagatg

SEQ ID NO: 7861 - DNA, 3000 bp, Unknown; identical to SEQ ID NO: 7853
  misc_feature (1)..( 3000): cDNA_ID_1809550_gDNA_ID_1621169_Annot_ID_173914 3000 nt of promoter + ATG

SEQ ID NO: 7862 - DNA, 1278 bp, Unknown
  misc_feature (1)..( 1278): cDNA_ID_2135794_gDNA_ID_1621169_Annot_ID_173911 3000 nt of promoter + ATG
aagcttttttggaagagtttagagtttatggttaacctttttttttaagagattagtgcgttatagttgcaaatagtgcgtttttttccatcagaaaagttagtggaaacatgaacaaattgtcagttaaattatgttatcccacttgaatatttttgcattttgcttttaatttctaacggtccaccaaatcaccaaatggagtattttaattattcttgaattaaaaactcactcaaagatttgcttcttcccatccacccaggcggattgaagtttttagcgtctttttaattatcattttgtatttataatttattagatttttaaatttataatttgaaaattattatcatttatttattttatatcagacttaaatataaaaatattgtttttgagttgttatatttgttacctaaattcttgccaaaaaaaaagaaaaagagagaaaatcttctagcttcgaaaacatctaatactgtaatagtaaaatcattaaaacttttaaattggtttatcaaaactatgtcgtatattcttctccttctccacggaacccacacatagtagagaaacaatatgagcagtttatcacactcttgagttaccaattttctctcatttctcattattccttcactttctttcgaggtacttcatacatagtcgtctttctcaagttgttgtggattgtagagaagacctaataagctagagaatggattcgaggaagtctttatcttccatcgatagcttcaacgattgttacgtttgcttgtaacccaagattcgaaggtcaacaattccacggatgatataccttacttgagtctttatttctaaccagttatatgttacaagctaagtctgattcttgtattcttttctaccattgaaaccaataaaatggtctccttaccaagtaaaacagggttattattatgtactctaacaacattttccgttcaatcaatacaagaagcttttggatttcttatttcttttttttttttgggtttttttctttcaacaaaatgattataaattatttatttttctttaccaataagatttggggttttatgaaccatgatgaaatacttttttgtctttttatgaagaaatgatataactctgtttctcctctcttggtagcaattggctttttatttctcaggtaagtagtctcccccttttaaatccttattgggtgttgtattctcccaacaggcgtgagatgttcgttaaaaacaaaaacaattgctcaagagcatg

SEQ ID NO: 7863 - DNA, 3000 bp, Unknown
  misc_feature (1)..( 3000): cDNA_ID_3593506_gDNA_ID_1621169_Annot_ID_57230 3000 nt of promoter + ATG
agaagatgaatgttcattaaacaatattccatacgaaagagtactaagcagcataactgtattaccagcataaaaagctcttcagcaccattgaagagaaaaattacaggttgaggcgggacccaaccagaatccactaccagtcttgctaattcaagtagtgatgctgcaaaacggaaacacataaatccatgatttaatggtttagaaggtaaatctaaagatatagtaccaaactcacctacacatgacccacaatcaccagctccaggagagttaacaggactgtcataatgtgcattcatcaatacagatgcatcagtgtcaagagaattcattgacgagatactgcaaaaaaaaaaaaaaaacgatgaaaatgtttagcattaataattggggacacaatcattcaatgttgcagtctattgatgactgaataaaataacacaaagaatggtcaaccccaacgtgaatcataaatacaaacaacaaagtctcctgaacaacacgtaaaaaccataaatctcaatgtaccagtaaaggaacaaactttagtaccgcataagtatattagtatggtttctgtatccaagtgatatgctgtgtcctagaaacatcatgctaaaggaaccatccacttgagtctcttccacttcaaccctataacagcaacaaaaagcattcatttttcagctcagacacaaaaagttcacaagaaaaaaacattcttttcttggagagtgatgaaatctcaagcatttaagttattcaaaaaaaccttaaatttggtccagctctctccttcaccatctccaattgcgattttatatacgttgcagcttctttaagtccaggtcgtccttcctacaaaacccatgtcgtaaaaacaagatcagagagagacagagaaaagagagagatgaaacggcggcgaatcatcacctgacgaccatcgatctcttcagccaagacacggatgtgttcgacggctctagcttcagagaatcgttcgagaggagcgtttgccggaagcggagagatgaatttcatgtggaggacggagtaaacaatagctgacattaaagcgtagatgaagacgagtgagaagaggaatttgaatccagtgacatctcttgcgctcatcttccaaaacggcatcactgaaatggattcaaatcttcgaatcggcgctttggaaaaatcagacaaatctcgtacttgaagacaacgattgttcagttctgtaatataagtccgaaacttaacggaacggaacagaacgggaacaccgtcgctttgtgtcatagagagagactgttacggcgtgagagtgagatgcaaaatgacttaaaagtcctcacgatttattccataatgaagtctttacgtttccctaaatctaattttattcagattcattttgttctgaagtgtagatttggtaaaattttgatttaaagtttgaagtcatttaatttgaatatcttagacaatttaaaggtgatttcataaatttgaatcaattttgcatgtctatggacagatgtcattatcaaagtgacattgttgtttttctgacttttaaatacgatgcagcaaaagtagatggtataatcttacaaaatatttccgcttgcttagacaaaaaaacaaactttgtacgtaactcgtgaactaaatacgagtctaagaagaataagaggaataaaatcaaggcttaattagtttactacctttgaaccaaaaaaaaaaccaaaaaaaagatctactaccatgtattggggtatatatctagggaagaaaatttggttaaaaggaaatgacacgttgttttaattaaaaacatttgacacaaatgttttttttttgttttgggatgtaatccaacacgcaaaaaaacatgtagacattaaagtgtcgtgaacataactatgtctatgtatgttaaataaagcaaactacgtttcctttctttacgtgatgatatgttcccacacatcacgtaccaactatttgtgtgagatattagccaagtctcggaccaatagttatcttgatccaagatatcaagagagtattaattaatggattttcaatcatcatagctggggagagttttcctctggttttacaagttggtcgtcgaggaaaccaaatttcttctttgaggcaagcacaattttagtccattcttcatagttgtccgatcctcacaaagcaaggatggatatcattatcaggatatctatatgtatgtatcctggactgtcactcgtctagtctatatgcacctatgtgttttggttatacataaatgctagatatgagctttatccctagactcggcccaagaatgaaatttgcttagaaaaactttgaccaagtctgagtcagcagggttcggcccattcgctcgttattttcaaacatgtgaacaaaatcggattgtcaatgtctcaatgatcaaattgttggtaacaaaactgaaaaccaaaagaaacccgtaaacgttttttccaattgaccacaatcaaataagatgaacaagagttgcaaaaatggtaattcgaaccattacctctataactcagtctttcaacatcgaaccggaaaaccaaacatttactttttgaatcctttgtgtgttcaacatccttagcttctattatagtatagtgatcattttacaaaaaaatattgattgtaatgtgcaattacctaatcttttaaaacttctaaagtgaatgtgcaatttcttgaattacaacacctatgttgtgtgtaaaagaaaaagaaaaaacaactacagtaaatttgtttgtaactgaaagaatctttcttaaatcataaatcattaaatgtctaatgactcaatacgtttcatttcatcaaaactcattacaatcaccaagcaacgaaaaaacccaaaacagagaccgttggatctaaatctctcactttcttcttcttcttctctgtatcatctctctcgaagaagaa

SEQ ID NO: 7864 - DNA, 3000 bp, Unknown
  misc_feature (1)..( 3000): cDNA_ID_1809605_gDNA_ID_1621170_Annot_ID_57235 3000 nt of promoter + ATG
tcctaacgataagggtttatctaggaaacatatcgttgaaggcactaaagcttctctcaaacgacttgatatggattacgttgatgtgctctattgccacaggtgaccaatttcagatttgtttttttatttagtgattttattttttttcacttggttctttgaagatctagggttttgatatgatctgatttgagtgtaaggtttatctgaatatttctggtgtactatgttgtctgcgcatttaattttcttacatgtgcttgcctttagtacaaattgctgtttttgaatttataaaatttacaatttgaatccacttatgatgtagcttagtgctgtatagtgtggatctatttggtttccacttttatttcatatctgataattgggatctgcattttgccatacattgcacaagatattttggaaaagtggcatctttgcattgatctaagtgtcactagattctttgattgacatatgtttattaaaaatgtttcctttttttgtgtgaattgggtcatttattacaggccggatgcttcaactcctatcgaagagactgtgagggcgatgaactacgtgattgataagggttgggccttctattggggaaccagtgaatggtcagctcaacaaattacggaggcatggggagctgctgaccggttggatttggttggtccaattgtcgaacagccagaatacaacatgttcgctaggcacaaagtttgtaatctgactctctttttctttaatttactttcatgtttgcgtcttatcttgtacagtcttaagttgttgtagtctcgtgttatgtagctcaagttatgctcttctgttatgtaggttgagacagagtttcttcctctgtacaccaaccatggtataggtctcactacctggagcccacttgcatctggtgtgctcactggtaaatacaacaagggagctattccctcagacagccgatttgcattggagaactacaaagtattccttttttttcctttttcttgtgtattcttggtcatatttgctaagacctcaatctgcttctgcatctaactaatacactggtacatgtcttggttttaatttctttcgcagaaccttgccaatagatcacttgtggatgacgtgctgaggaaagttagcggtctcaaacccattgcagatgagctaggtgtaaccttggctcagcttgcaatcgcatggtgtgcttcaaatcctaatgtgtcatctgttatcactggtgccacaagggagtcacaggttagttcttgatcgcttataaagcattaacatagcgagtctcggtctagatttggatccaagatctgaaagattttgtttctttttttgtaccttgacagattcaagaaaatatgaaagctgttgatgtgatcccattgttgacccctattgttctggacaagattgagcaagtgatacagagcaaaccaaaacgtcctgaatcatataggtaaaaccaacatccaagatctctcttccctattcaatcgtttacaaaagagtgttgcaggaaaaagaaaacattagaagaagctctgtgatgtatgttgttggatgttgtctcgttttcgctttgtttgttctctttagcagcttatgcatttttaagactcagacagagagaaagagagactaatgtttttttttagtttttcttgtttcatcatttaaaaaacggtcttatttgttacttgttagtgcaacttaaagtttggttcttgtagtttgccatgtcatgacgtcaatatattgaatagctcatcaaacaattctggttatatcttaatgttgtgaagattttaatttagtgcaagggggttgatatgttattaataaagatttaatggaggtatttaaagctcaacgtgcacaacataatgtctcaactatataccatgtttttaaaaacatacatgcatagacatcctacacaatctttttaggtaagatcccaataaaaatctaaatttggatgatctgttttatttggttaacaaaactaagagatgagtaaagaaaataaaagagtttctggaattggctaaaaaaagaaagaaatagataaaaacgttccctcaaaaacctccacatgcaatttatgaatttactatttgaaaaaaataaaaataagataagacaaaattattaatagattgaagatgatttcacccatgattcaagtgcaacgaataaaatcaaaaataatttcaagaataagaaataaaaagagagaatttcgagagagaaaggtttagtttttattttgtttggagtttgtcacccacccgcgttattttgagagcgcttctctgcgtctctcttctctctctctctctcgcaaatcaaaaacctcaacttttgaaaaacttcaatctctagaaacattcttctcttttacccaaaaatctcatcttttgtttgtttgttattcttctccttcattgttaatctcattggccatttttccctaggtaatcaaattcatctaaagctccaatttttcaattcgattacaccacattcggtgtcatcaatgatctcgttgcttatatatgtatatacaattgatttgtgtgatcaacatttgcagaaaaaattgattttgaaatttgtttctcgttgttgttgttgttgttgttatgcagggtaatttctggtctaattcgtttgaatgagactctggtctttgtttgatttggtatgatcttgtagcaatataccctgaagatgtttgttggaggtttgctgatagacaaaattgcttgtggcttgtgaatctccattacctgttcgctgtatttcctcaaagagcgtaagagaatcctgtattttcctctcaacattttttgttttgaaatttggggagttgaagaacagaaattggttactcagaatctgtgatacaagagattgtgcagaagaaagaataaagcgtttttggttcttgagaacatgagaatg

SEQ ID NO: 7865 - DNA, 3000 bp, Unknown
  misc_feature (1)..( 3000): cDNA_ID_2042340_gDNA_ID_1621170_Annot_ID_57237 3000 nt of promoter + ATG
aagatatgtcgtaaactggaataatggtaacgacgattgatcgtttagctcatttaatattttcgcgtaatcgtccaattcatcaaagaaagacacactcttttactgaacttgtaatttttggctgattaaacaaacactatatggctagactttcccggtttaatggttaatgacaaaaattagtcacagagtcgaataatgggttcttgctgtttttcacttaggagaggtcgtgaggaaaatgagaaaaaaacgatgagtaaaaaagaagtgattgggaccaatttgacccgcgagttttggcgtaaccaaacatttcgcaccaacaagatcttctctttattatagctttttgcacttttacaaaagtaaatttgagcaataaaagtgtaacaaaaaaagtttcaattattactagttacccgccaatccaacctcccccataatgcacacacatggtacacatcatatatgtaatatataggacaatattttcttacgcgtatatatatatatatatatatatatatattcagaaattaactaattactgggaaacataataattaaaaaaatatttaaataatagaagatgataatgaagagtgcattttgacaatagtgtatttaaatctaattatatatgttaagcgaaacctatacaaacttcggagtgatctaaatttttagctaatagatcattcgattttacaaaaaaaaaaaaaaaaaatattattttctatttactatagctttacaacattcttttaattacgacagtgatgtttctccaattgataataatgttccataataatcaaacggaaacgagtatgttaatgtcaccgtagttaaactaagacaaaaggttctgacttctgaaccgtttgatcgtatcatcaattgtagcatgacgttggatcatcattatgtacccaacaaaaacatatataacgttgtactcaatatgatcattcacttcaagtcttcgaaagtaagttagaaattgtcaactatttaacaattttttttaacaaaatccaaccactcttcagaagcttaaaaaggtaaaaacctaccagattattctttcacaaattacagtcgttagattacttttcaaataatattgtgtagaaattctttatagtcacattttgaatgatagtaaccgtctactctaaactattatgtttaatctcaataatccatattttatagttggagtgggttgagacttgggagacggtcaaaacgttacaataatattcttagtttaaagctcgatttggtagaaagtttgactttacatatttgtgtattttttggataggataggtccgataggatttgggatatgatatcatgggttcgtccaagttatagtaatgttgggattgggggtaaattggtaaaactataattaggcaaagcgtgaagaaaaaaaaaattgacattatgatgagaggagttcgggttgttgcatgggaacattatttgtgctcccataaaggtaaataaaaaccaaattataatcatgggatatttaactaagaaaacttgatatcacgaggaaaatcattataagttcagatttaaagccttttcaaatatagcgtacataactatattctatatgtagtcgatgtctcgatgaaatgcttgtttattaaggagacgaatccactagcaatttttatatccaactaatttatttattttagtttctttctcaaaatataaatttcgattgtagtttaattgataagaccaaattcattgagcatgcagtaccctagcaaccaactaatcgtgagaacagtttgaaaattctaattgggatagtcaagtcaacgacctcaacgcgtattctttaagttcttccgttttctttttttctttctaagccgtgattaccgcctcggaaaatcatggagttttcacggaaaataatttttagactatagttatatactctaataaatacaattgcaatacccgctaattcagcaggaaactatgacaactggtttccgtgtacggaatgactctcttgcccgcatcattcttgatgatgtgtcatacactacaaggcaagaaaaaatcaataaataaatcaaagttaatagtagtatagtatatagtataatctgttttgctcagtcatattcactcaccgtaaatgccaaagtgaaagcatcagtttgaagccagttagcttctgtttttttattatgtcatattcaaaatcattcaattattcatatgtcaataattactcggttacagggtgaaattttataatctgattcgtatgaaccaacgactcaaaagtttagctagctagtagctactcaaaaaaaaaaaaaaactacttgttaaaactacaagtttagatttagacatatgttcactagattttgacagctacgcattccttaaaatgtctgatgtttaattagcatgatttactaaaatagacttgtatttattatgttaaaacaaaatacgcagtttttgttcgctgaaaatgttccaaaacaataatattctttaagcgaaaaatagaaattcatataattatattacagttaagggaaacaaaaagaggaagaattcgttggcaacaattgacaaatacctaaagcgtgcgaggtcagtaaatcacacgcttgagcagttagtggcggttagaacggtaaataaaggagacggaattaacaagtaatcacgttaaaaaaagctaaacgaagaatcaaattgtgtaggagacgacgtcgtatagatacataacggccgtctgtcttaacggctctttttggtgtcgtcttcttttatttttattttggtctcccaccagattctataagaggaccaatatatctccaaactcgtacattcactgtctttaactctcactactctctctctctctctcctctgttctaattctctaggaacagagtaaaagactttggctcagcttctgcctctcca

SEQ ID NO: 7866 - DNA, 3000 bp, Unknown
  misc_feature (1)..( 3000): cDNA_ID_1809601_gDNA_ID_1621170_Annot_ID_57239 3000 nt of promoter + ATG
aaatcagatcttttgtttaatatcctaagacgcaaactctaataagaagctttattttctcttattatttataaatgagagtattaaatttgtccggttatgagcatttgtaggtttctttgtggtttgtctttaacaaaacccaaatttctcaaaccctgattgttcgcctatagactcgatcttcgttttttttttgtcttaatcactcaataatatattgtctaaagtacattgtatatcattagttatgaattatgatgatatagctcgacatataaattaataatagaattcaaatgctcgctcgctgactgtagtaccctgatatcactagccaatacaacttacgaaaaaatgaaaaatgaaaaaaattttaaactcgaccaatcaatcgtccatggtatagttgtatcatcagacagcctttactaaggaaaaatgttataaattgggttcgtggccaaatttatgactttcaactgtcaccaaccttacattttgctatataaaccctaagaaactcattataaacttcaacaacataaaagacgatcaatataatctagaaaaaaaaaaagaagagagaagagagaaatgtcgagagctttgtcagtcgtttgtgtcttgctcgccatatccttcgtctgtgcacgtgctcgtcaggtgccgggagagtctgatgagggaaagacgacgggacatgacgatacaacaacaatgcccatgcatgcaaaagcagctgatcagttaccaccaaagagcgtcggcgacaaaaaatgcatcggaggagttgctggagtcggtggattcgccggagttggtggtgttgccggcgtgggaggtctagggatgccactcatcggtggtcttggcgggatcggtaagtatggtggcataggcggtgcagctggaatcggtggatttcatagtataggcggtgttggcggtctaggcggtgtcggaggaggtgttggcggtctaggcggtgttggagggggtgttggtggtctaggtggcgttggcggtctaggtggagctggtttaggcggtgtaggtggtgttggcggtggtattggtaaagccggtggtattggcggtttaggtggtctaggcggagccggaggtggtttaggtggagttggtggtctcggtaaggctggtggtattggtgttggtggtggtatcggtggtggacacggcgtggtcggtggtgtgatcgatccacatccttaatagagagtatttgttggttagggttttaattaaggaataattaattagtttcgatgttattgttggtcttttaattctgtgatcattagggtgacttttgatctattttctagtttgggcttttgtaacgtttgctttgatttcggccgtggtgttatgaaatgtgcgactctctatgtttgaatcgttttggtttaggaggttctcttcttccatacttttgcatgttcaaagacaaatttttaattaagaggaattatcaaggtttccgacgagatattttttgaaaatgaaattggtttgaacttgtaatgatatttaaaatatgaaaacatcactcaaaaatggatggagtacaaactttttccactatatatacattacatgtaaaaagtgtatagatttcgtttttgttgcactgtctaactctaaataagtcggatatcaaagttagtatatagtaaaaaaaaaaaaaagttagtatatatatccaagtggtaaaacccgtaaaattaacatatatatatatatatatatatatatatatatgagtttggtcaagggttttgaaagatctcgactaagagaagacatatgagttttggttcaaaaagtccttcgataatcattagaaacgaattaatatatagtaaaattgagtaaaaatgttaatctattaaccaaaggttaactatatagaagattaatatattataaaactaaccaaaacattggatattggtatatccggattattttcctcgttgatgatcgcaatattgcattcagccatctactacacacttcctcgttgatgatcacaataatgcattcagccatctactacacactgacacatatgattcgtaatttcgtatgaaatgtttgaactcatacttttaatttacatatttaagatggacgtaacaatgaacatttgttcagaacttgagattgtactacccctataaataacgcctatttactaattactatgcatggttcatcatggttggaaatttctttgcaaatgatctagtgtatattaatccaaaatatataggaaaaatacattaattgtgggaggaagacagcaagaatccacaaaaaggaagcactaataaatgacgtaataattgcgttgggatgagagggacacaaattaaagaagataggatttgcatgtcaaacacttgttgtcccatttcatgcatcgtcctctctattgtctatttcgctgtcacaacctctaaatttacatctcatgcaatttattacgacgtatacatacacccttcaaatttttattcgtttgcatttgtatatatatacatatatattagctagtaaaattaatcacaatttataattttgtaatcattaaaaatattgtagtaaaaaaagcaaaacccaaaaaaaatagaaaagaaaactgaactggttggtgtttgtggtattttttttaataattttgttaaggatttgatatgggtttcaattttaatggtggaccgaattgaaaatcatcgagtgaaaattgagctacttacaaagcccaattagatccaacgggcctcaaaatatcttttatattccattttttttaatttgtttttgtttaataaatcaaaaattgaaaagcgaaaggcagagaaaatttccaatataggcgaaatgtaaagagcgggaagctaaagcctagagagagattctcacactgccaaaacaaaatttccctgtagagagagagagaaagagtgagtg

SEQ ID NO: 7867 - DNA, 3000 bp, Unknown
  misc_feature (1)..( 3000): cDNA_ID_1809597_gDNA_ID_1621170_Annot_ID_57241 3000 nt of promoter + ATG
gatctccaagcgcttatatctcttatccaattaaaaactgcaaaatttgaagaccgaccattgacaatctctgagacttctttattgtcaccttcaaagtaaattttcctatagcccctactccaacaatgttgcatggccatgactaaagcttggagttcactttccatcggattggtagtaatagagcctatagcatgagctgcacctagaaaggttcctcgatcatcccgtaagagccaacccgctttactcggagcgttgctgtggtaagtgccgtcatagttgcatttcgtccaaccaatagggggtgttgtccagagattagctgttggttcttgtgacgttactctgtcaggttttgatgataaacggtgggtgtactcttctgcatcttgccattctttggcgtcttgtcttgcatatcggagagaagcttcccatggaatgatcttgtagtttagttttacaaaattgacctaaaattggtggataatgttacgacagagctacactaggactttggaatgggctttgctgtatgaggccttcgttacactaggactttcttcattctaactttttttcttcttttctttaaaaattattttaaccaaaactaaaactttcactaaaacatttaaataaataattttttaaaggttttttataaatactaaattaatatgacgttgtgaaatctaaccggatttttgatcccgccatttaaccgtggtcattagcgattccataaatccaacatatttttcacatcttcatgtatatttagcatttattttttgttttcttttcttaaaagtttttcaaattttttttgatttttttaaaagttttaataaatactaaattaatataacgttgtgaaatctaaccagattttggatcccgccatttaaccgtggtcattagcgattccacaaatccaacatgtttttcacatcttcatgtatatttagcatttaattatttttattttatttttttaaaaatgttttcaactctctttttttttcctttttcttttttttaaaagattttataaatactaaattaatatgacgttgtgaaatctaaccggattttggatcccgccatttaaccatggtcattaacgatttcacaaatctaacatatttttctcattttcatgtactatatttagcatttaattttatttattttctgaaaaggttttactctttttttcattttcaagaactcttgttttcaaaattttattgttttggatattaaattcacatataattatatatgatttggttcgatttcactcggtaagctttttcgaatatttttcacctggagctgtcaaataagccaatttcttgcagcttgctgatgaatcatgaaactgtttttgcctcatattacgattgaaacacttaagagaaaaccaatacaagaagaatactgtctgttgaatcattctcttattacccgaagaaaaaaagatataacaagaacatatcaatcctcagcgaaacatcattcatcatcatcatatgcatttgagagaaactaggaaatcaccacacatcaggacggagttccccagtagccggaggcatccagcgaccagaattgtacacattctcgccaactttccatcccggaacatctttcattacatcagcctcatattccagatactttttccactcagacacaaacctagaatgcaaaacggggattgaaacaagattgctatctgaaggttgctgcaggcacattgacttaaatttgagaatatggtttacctttcatcttcttctgcttgaagaatgggaagtattgttctacgagcagcatatttctcttccttcaatgccctaaacatcacatcaatcttgataagagcattaatcttgatacttactgatatcaaatcagacttgtttaggaccattgtaaatgcataagaagttaatgatcaagccagatataatactaaaacaatctatctacatagaaacagtatcccgataactactatcaaaacatgcaactagataattgctttcatcataacagattctcacatctttgcaattgtggctttaagagtttacaaattgttgacgaactttatattcgtttaaggctaaactcatgctgattaagcttcaaccaaaatgtcggggaatactaataacagaatacataacagtgattcaacaagcctatgtttccataggttaataatattaaccaattcctacgataaacatactcaagtttcaacaattattaaccaaaatgtatccttcactacattactatggtcatcaatcactccacaacactaattttaccaaggcgatctcgaattttagaggaaaaattgaaatgtgaacgagctattacaagtcgttcttacctgcggattttgtttccctggccgacctggtacattccccaagcaaaggcaccagaaacggcaaggaacatggccattgcactaggacccgtattggatatccggcgggcatatcggaccggtgcgaacccacccggtggcggaccatcctgaagcagcggcatatccttcacactcgccattcctggcttatttcttatcatcgcctccgtcatcttcaacgctcaatttcttctcgaccaaattgacttttgatcactgaatccgatttgattttgctgaaatcgagtgttctagggattccgatgaacaacgaagggaacgttggagattaactaggctaggaccatataactaagcccattagttagcaaatcacggagtcgtatgagatgaaatgggctataactaagcccatttcagatatgttcaaagacccaagtccataagtaagcaagtcacgtggagtcacgtgattatcttcttcttcttcttacatataaaatgccctaactacatgttcagaatatctttagccgccgacttggtatcatcaaatcgaggagattcgaagaagcatg

SEQ ID NO: 7868 - DNA, 3000 bp, Unknown
  misc_feature (1)..( 3000): cDNA_ID_1809589_gDNA_ID_1621170_Annot_ID_57243 3000 nt of promoter + ATG
ttagtatttataaaaaacctttaaaaaattatttatttaaatgttttagtgaaagttttagttttggttaaaataatttttaaagaaaagaagaaaaaaagttagaatgaagaaagtcctagtgtaacgaaggcctcatacagcaaagcccattccaaagtcctagtgtagctctgtcgtaacattatccaccaattttaggtcaattttgtaaaactaaactacaagatcattccatgggaagcttctctccgatatgcaagacaagacgccaaagaatggcaagatgcagaagagtacacccaccgtttatcatcaaaacctgacagagtaacgtcacaagaaccaacagctaatctctggacaacaccccctattggttggacgaaatgcaactatgacggcacttaccacagcaacgctccgagtaaagcgggttggctcttacgggatgatcgaggaacctttctaggtgcagctcatgctataggctctattactaccaatccgatggaaagtgaactccaagctttagtcatggccatgcaacattgttggagtaggggctataggaaaatttactttgaaggtgacaataaagaagtctcagagattgtcaatggtcggtcttcaaattttgcagtttttaattggataagagatataagcgcttggagatcaaaatttgaagaatgcaagtttacttggacaaggcgattttcaaacatggctgcagatgctctggcaaaacaacaacttcctttgaacactcagttttattgctataactatatcccgtttgtaataactgattttttacatcgcgactttgctacagcaaattattaataaagctgatgtttgaggaaaaaaaaaaaaactacaagatcaaaccctagttcctccgatgaaattgcggttagaaaactaaatattgattgacctaattcaaagagaccttttttgtgcagaaactaaatattaaaaatccaaggttccaagagatcaaataggaatttaagcgagaagcaacatacctgagtctcgtgacaacggcgcgtggtttgcgtcaatacttgggactctcggtgagatccgccatgatttgctagagagatcgtgaaacgcaagaaaacagagagacaaacggtggcgagatcattgatggtgtgatcaccgagttacagttccgacggttctgacggtggtgaaaatggatggtgatcatcgagctttgacgttctcgtgatcggtgagttctttttgtaagagaggaacagaaacaaacagaggctaaaaagacaaaagaagaagaagaaggtggattttttgttttcttctcgtaatccatgctttggaccttgtatcagccacttatgatcatttgctatattgatgctttccaattttagagtattgaaatgggtttctttgacaatcattttgagttagtcatcattccttgttctgaatcaagaattggcttttgttatgttgtctaggttctgcttgtaactagagtaatgctattgtagtctctgttgtttatttgtagaatcatagagagtcgtggaagcatgttttagttgttactctcgatttcttgtcgatgttgtggtgttataaattgagcgttttaaccaatacaagttaggagatggttagtatgtgactatgtgttagtggccatgtatgtagttcgatcagataatctgaatgatgtgctaaagagcttgcataggaagactgcctttgtgttagcttgcatagagacttgttgcaatatatgagactgaaaactattatgtgaaaactttaatttgtgtacaaatatttttaactcttaaaattaaactaacattgtaccaattagcacatgaaagaaacacagaattctgtgaacatatgatgaataactatataaacacattatggattcagttaaggagacagaaacaagaagatgaatttcagatatatagcaatagagtcacttataatcatatcagagcttatactttatacaaattatcactttagtccttaaattaaaaccgatttaatcgacaatcttgttattctttaaaacaatttgttcttattttcaatctttaaattttgcaacaatcgacagaacttatcgttattccgtgtttttattttcatatctttcttaaaatgtttcaaaataatatatgtttaatattttctgatttacaatagttattaagttatatgaaatataattattttaaattttattttatttttcagaaaactcttataagagagcttaccattagaatatgaaaaaaaattaaaactctcttataactttttaaaaattttaataataaaaaaatggagaaagcccgtgaaagagctcttacgaaccaaaaccattcagtccggttaagaattggttatcaagtttggttcctaaaagatatccaagttcaaaagcaaaaaaatatcttcttttctctctctctactctcttctcttcttctcttcttctcttcttctctggctgggcaaccatgattactgtcgtcacctccaggctctctctccttcctccagtcttctccgtcgttaactcttcttcttcgcgttccaaaggtgctcaatttatttctgccacgtcttctctttatagcactctgttttacacacgtcgttgattcttcagttttttaaaagacccgtcttatacaaaatttcagtgtaaccgatccctgaaattcgttaaagggatgaaattttatctaagattcggagttttcttttcgaacatagtggtaatgtttgtcgaatgcttgatttggtcttccacagctgtcactatcgagtttgaagatagaaatcttgtgttaacttagtatgtattactgcataatgtcaattctgtttgaaagcatcagaatttcggaacagatttttgtttcgtatagcatcgatctttgtcttgtgtgtttttatcttctctctgaagcctgc

SEQ ID NO: 7869 - DNA, 3000 bp, Unknown
  misc_feature (1)..( 3000): cDNA_ID_1809585_gDNA_ID_1621170_Annot_ID_57244 3000 nt of promoter + ATG
aactaatgtagaatgacacatgtcattttcttgtgtgatgatgtgtcactcatatggaaagtgttggccaacttttatatatatgattctgagaaagcacaagcaaaattcaatattctctccgtcgctaaaattttattgtccactaataaactagttgtaactgaatttttttttttggtgaatcaaatctttttataatatatatatttccattatagtataaactactagctactctgtttttcttaatgaggataaaatacattaaatttatgaagatttgtggagatatatacgaaaaaggaagcgttgtccgtaagtataggtatgcaatgcatatgatatgatcatacatatatgggctacatagcacgtatgatgtatgcacgtaaatcaaaacagtacatcgaacattttagttaaatttaaaccaacataccgtaagaatgctaagatatgtgtaatcggtgcattaatgttagctttcgaggtttctaggaaatgtgaccacaccactaaccaagtcttggaatatggtgaatgtgagcaattccccaagtctttttagtcttcacttctcactttatgatctctcaatcaacgagaatggaacacgccttcaatttcgattctctatatatatgcatcaaattaaccaaaaaatagtgtttattccaagaaatgttcagcaaccacgtacccgttatccacatgtagagcttatttcactttgatagtttatagttataatgatatgtgactttttgtgttaaataataaattgtgcctttttcaatatgctgactagcaaaagtgttgagttacgatatactttttggtaaacgagttatgactacagaaatggtcggtgaaactaaaaggtaagaacttccgaatattctcgagaatttctattcaattgttcgtcgattatccgattatatatggaaattaacactaacttctctgccaaagcaagcgcatattggttttcctctagattggtgcatattattctacattttcctccgatcatatttaagtgaaaaaattattggtatagtttagaataaagttaacgtcaaatattttttcattaatatgcatatgagctaagaattctttttcatttttttttggtaacactatatatacaataaagttactaattttgtaaacttctagtagtaaattgcctatttatcaccattcaccactggtaggtttattgatacaaaaaaaaatgtttagcttctcattagaaatcgacgtttgaatcgcaaatgggagttttgagcaatcatttaatttggatatatgcaacatcccaatgaatgtcttaacaacctaattatatagataggttcactggatcttgataacaatttatcttcaccaccaataacaaaagctagtacaaatgtttataagtatatttattaaaaatttaagattctcttcgtactaatatattgaaaaaacccggaaattacatataaaattattacaaaattgttattatcttattatcatttaaaaccaatatatatttctcatgaacccaagatatcttgatgtggcgatatctgttgacccaatacgtcaagcaaaacccataaattatcattatatacatttttattttatttttattttttctaacatatttatgaaaaaaaagttaattagtctgtggattgaggaagtctgtgggatgtgtagccacacctgatggaaggtttaaccacgttgcctcaaattccacagccgtctatacacatttatttacttttctaagaaaaataataattattagcttattaaatattacacctaccaacaaaagtaatataatctgataccaaaaaaagagtaacataaacagttatattttgtctttaaaatttcccctgcgtaatttctatgtttttcaacttaactctttttctatacatttttctccataaactctgtctatgttataatcgtcgcaaaatgtgaataaaatgtatataaagttttctttagcaaaaaaaaatactatataaagtgtagctcattaaaatcgtataacagttacataactagtatgcctaaaattcttgtatttctctaaaactagaccaaagaggagcaaaagagaaactccgaagtcccaatggacctttcatgtttatgtatatacatgatcgtgaagcaaaatgcgttgtcatgtctcttcagtgtaatcgatcaatgtaagcaacatataagtatcactttttttaaccctaaatgattcccacgttggcagcaacctgacatcaaatttaattatcttgctttctttctcttctcaagtgtatatccaaagtcatgtatatcttctctctcaatacgctttaaattttctattttatctggtttcgacttggactataagattttggcaactaaaaggagattaaaaatagtctctttaattcggtctgaaccgaccataatctctcttaatgattttaaacattttggtagttcttttcctaattaaaagagtcaatcttcatcttgtatatttgttgtatacgtagttgatatttgccatgcaaagaaaagaagatgcaaaatattgaaccacttttcttgtgactaattattgtatttgttggacgaggattaatttattaccaataagtaagggacatatgaaaaaaaaaaaataaagaaataatggtgggctgcaaagcttatcatttgagatataaataacattcagaagctaaatatataataataatatttttactaattttacaattaccaatttgcatcaagtcgtcttctctatttatacatctccttctccaatccaacagaacacacacatacacttacatctccatcctcttgtcttaaaaagtttccaaaatctttcttttttcttcttctacattcttaaaatttcttctgttttctcctcacaaccagacaagcaaactctaaactctgtggaagatg

SEQ ID NO: 7870 - DNA, 3000 bp, Unknown
  misc_feature (1)..( 3000): cDNA_ID_3046792_gDNA_ID_1621170_Annot_ID_173955 3000 nt of promoter + ATG
ttggaaaattaaggattattatgcaagaaacgtaaaaaacaaaaacgagattctggcatttctgaatatacaacacataacggacatgcatgaagctttaaagctaatacaacaagacctttgtttcatgaagaagagagctattgaatcttatattttttacctcagctatagacatcttcttctcttcttgatggtcattcatctatttcccataagaaccgagcgtactctccaagaataatgctggccaaacacagaaggtgataatgatcacatttcagttttaaagtgcgaaaacaaaaagaagattgtgtaagagctattacatatttctaattatacctatcatttggagaggcttcaacggccttctcaaagtagaacaaggccttctcatggtcattattaatactccagaacgccttcgcgtatctgcatagcgtttctccatcttctgtcttggacaagcttgatttgccttttcccgctgcatcagcctttttcggggacaaaaataaacgccaacattagagacttgaattgaaaagccaatgaacaacaacaccaggcagaatacaaacttgaatttatatgctagtaaatgtctactatgagctaagatgcctaaaaatttcaatgtcagatcgaacaataacaggtaacaattagagtcattcattgatccgcagagtttaaaccaaataatctatagagctacgacacaaaacccacctcaaattcgtcttttccttgtccagaagactcatcatcatcctcatcatcatcctcatcatcatcatccgcgtttatctcccagaggaaactagcatatgctgcaagaacaatgctgaaaagaaaaaacatattattatcacaggaactgataaccaatggtggtatttccaaaaaatgttccaacagacctatcatcaggagatgcttgaactgcacgttcaaagtagctcatggctttagcttcatcttggtgaagcttcattactaatctaccatagtttgctaaagctactccatcactaggctcaactacagtacacttatgataatactcttctgctccactaagatctcctttatactgttttcacattaacaaacgaaacttagacattaatagaaactacttcaaaacagagccattacacaacactaagatttgagtcaaaattcaatacctccaagaacttggcatagtttttgagaagcaaaggatgcaatggatactcctcgagcattcctttgtagtaatcaccacaattcttatcatcgtaacccggcaaatcgaatttgatctcactaccatacaaatcaaacttatcaattcctaaccctgcagctaaatgcataggagggcttggtggtctttcaatctcaaaacctagttcatctctcacaccaatcccaagcttcttaataacctcttcaaaaacacctctctcaccttcaccactatcttcttccttgtgtttcgcaaaactgaactcgccgccgtcaatagcatcaccaatcgtaaccgttctctccaaattctcctcgattccagtcaccggatcttcggatttgaacccatctccagagtcgcagtaaatcgagagagatgcctcgctcttcagcatctttttgggtctttctttctaaatccgtccaaagtcttcaactttaggttcaattgggtcgtcgttcacagattcctcgattgttatttgtgggttcttgattcggaggaccccaagacaacgaccaaacgaagatgattttgaggttcttaggtgaccgacccagttagagaaacaagataagtggggttctgttagatttcctgagaaacggcaaaactcaggaaaggatcttttagtatcatattgtttacaaattattccttaactttatgttttgtctatttgacccatcactccgaagcaaaaactaatctgttcttttgttcaagaaatcatcaattagtctcggttttatactaagcatacaatttttctaacgtatatcaacatttcaatttcggtttaagtatttgtgtacttacatattcaaaaaattagtttgggttcgatttggaaggaacaaaaagttttgtgactcgtgattaaataaagaaagaagggatatccacatgagttttgacctttcttttgggcggacaataaggtccacatgaactgaggttttttgagtctagaccggggcaagtcaataatacaaaaagaggacaacttgtcaaatcattggtccattcaaatgaaaagaagcccataataaatgtgacaaggatgtgtaacatggccacaaaataatcagtttggtttcgttcattttggactatggggttggttttgaaattccattccagcacatagaatttcagaacaccaattacgaaaggctttatcgtgttagaagttatatattttgagaagaaaaataaaagatattgttattatgaaggatcatgaactattctaagactgagctaacacgtgttacttgcttaatccttacactcaaaaagtctaaatgttaatggtattaaaaattattcaccttgtttgttattcttatttctgcaaaaccagacaacaattcagtaatcaaaaggacacatacgtaagttgaaattggaaagagttcttcaccaaagctaacttgatcctcacgaacgtctcctaaaatagcaatcttcagctgaagaacaacacacgcctcctaataaactcgttgtctttctcacatacacaaaaccaaatttagcaaaatggttattattacctttctccctcctttcggaaattgccaccaccaatcaaacaatctaccttcttcttcattcatcattcacttctcagaattttgagaattttgaattgagaattgcgagagagatctcattctccctctcgcaattctccgtcccctcgaatccaacaaaaagattttaatgtaaaatcactctattgatccacaatg

SEQ ID NO: 7871 - DNA, 3000 bp, Unknown
  misc_feature (1)..( 3000): cDNA_ID_3046796_gDNA_ID_1621170_Annot_ID_173954 3000 nt of promoter + ATG
cagaaccagcaacaatgaatatcgtcgtaccccacctccaggaatgagatttgttgcgcttcaagttcgtcgtacttcaggtcgacctcaggggattttgaacattggtgttggattaattgatggttctatgcggagtatgccgctttatacgcatatggattcatctgctgtgggatatagagatttgctcggagaagaagatcatcatctacaacatttgcatttaaatagcaacaaagggagctcaaagaatccacaatctccatcttctcgacagtaccaatccgtaatctcaaggcctgagctccgtcgtacgaagagcgatacaagttctatggttgtttcggatcttcttagcagggctgaacggagtcgtttagctaatagacaaccagcgagtgcaatagtgagcagtgaatctgaaactcttcccaccacgacagattctgatgagaaaaaatcgagtgagtatacacctcctagtaaaaaccttagagttccaaggcaacgatacaattcgattgaatcagatctcataaatccgtcgccaatggagaaccaccatgtggtagtgtcgagaagggagagacatgatgttatgccgtatagttcgtatcaacaaacaggtaagacaccgaggaagaagacaaggatcgagaaacaaagatcagtgaaagattacgatcgtggccgagcttccccgtacttatcgaagcacggaacaccattgagatcaaacattatcgcatctactccgatgagatctaacggagttggatcaactcctatgagatccaacatcatcgcaatgtcaccgatgcatcccaacatggttggatcgactccaatgcgaactcctatgcggtctaacatggttggttcgactccaatgagatcaaacatcgtcggatcaaccccgatccgatcaaactacatggctacaccgatgagaactcatcacgattttggtacaccagtgaggaatttagctggaagacgaatcttaactgaatcggagttaggaccatcgccatctgaagtggctgacaaattggcgaaagatagatcgcacgaaacggaaagttcaatactcagcgaatggagcatcgatgaatctagcatcgaaggattgcgatcaaaactcgagagatggcgaacagagcttccaccgttgtacgacataggatcaagccatataagtagcactgattacgatggcgcgagcgttccagctgcaactgccgggggaggaatgagttcaagacggaaaactccgacgacgaaaaagcataaccgccgtcacacagatggaggtaatggacttttctcgtgttttagtaagatttgtggtgtggaatgcagtttcgtatgcggtggtggtggtgggccgatggtctcagaaggatctactaagaaaggtggagccggacgtgtgcaacgcacatattccgctgacgatctgagctttgtgtgatctttattttattggtcttatattaacttttattttttttggaaaactatattttttaaggatctgagctgatgaattaatcaaatagtaaacaaaaattaatttattaatgttgtgttaataaatcatttatttttgtgtattcctcttcttcttccttatttttaaaaaattaaaaaatgttcttcttataatatagtgtttaatagaaagtgagctcacacaacaaaattagaaaactgtgaatgaatgtaagagagtgagtggaataaaaaaaatataaaaatgaaatctaagagtgagtgaacaaatgttggtattgtagacaatggtgactaaaattaaaaagaaacaaaatgatataaacattaatctaaaaaaaactaaaataaatatacaaattctgcatttctaactatactttcatgtattatgtatacttatttgattcatacatgatataaccggttatttagtttattttctatcaaatccatcaattagagcatgaaatctatgtactccttgataatgattttgatcaaaagtgtaatttccacaaaccaattgcgcctgcaaaagttttcaaaggatcatcaaacataatgatgaatatctcatcaccacgattttataataatgcatcttttcccaccattttttttccctcactttcttttataatcttgttcgacaacaatcatggtctaaggaaaaagttgaaaatatatattatcttagttattagaaaagaaagataatcaaatggtcaatatgcaaatggcatatgaccataaacgagtttgctagtataaagaatgatggccaacctgttaaagagagactaaaattaggtctaaaatctaggagcaatgtaaccaatacatagtatatgaaatataaaagttaatttagattttttgattagcccaaattaaagaaaaatggtatttaaaacagagactcttcatcctaaaggctaaagcaatacaatttttggttaagaaaagaaaaaaaccacaagcggaaaagaaaacaaaaaagaactatattatgatgcaacagcaacacaaagcaaaaccttgcacacacacatacaactgtaaacaagtttcttgggactctctattttctcttgctgcttgaaccaaacacaacaacgatatcccaacgagagcacaacaggtttgattatgtcggaagacaagttttgagagaaaacaaacaatattttataacaaaggagaagacttttggttagaaaaaattggtatggccattacaagacatatgggtcccaattctcatcactctctccaccaccaaaatcctcctctctctctctctcttttactctgttttcatcatctctttctctcgtctctctcaaaccctaaatacactctttctcttcttgttgtctccattctctctgtgtcatcaagcttcttttttgtgtgggttatttgaaagacactttctctgctggtatcattggagtctagggttttgttattgacatg

SEQ ID NO: 7872 - DNA, 3000 bp, Unknown
  misc_feature (1)..( 3000): cDNA_ID_2042293_gDNA_ID_1621170_Annot_ID_173949 3000 nt of promoter + ATG
actgaagatcggctttgtgttttgctgtccaagtcttagtgtgagctcaatttatgtttctcttgcagacagatcttatacatcttcacctagatataagttatagcacataactaaagtgtgtattctcattcactggcctgtcgatctcagtagttcatagcacataactaaagtgtgtgttctcattcactggcctgtcgatctcagtagttcatatagtcaaacacatcactgatatatctgatgatcaaattactttctgttttccatgtatttttggttagtaaattcctgagaattgtgcctttcatcaattatatttcttgcgttatttttcaccaacgagagatccttaggatgcatatttttcatcttgttgtaggatgaggaagatttttctgattcatcaaagaagggaaacgctgaaaaccctaggaaacatcaaattggggagaacatacccaagaaggataaaataaagtttcttgtgaacactgtaagcagaatttttttgtacactaagctatttctttttgcctttctaatggtttgtcgattatgagaattttcatattcttgtttaaccttagttttttactcttatggttcttattttgctctcatctgtgaatgcagcttcttgatattgaagataataaagaggctgtttatggagctctggatgcttgggttgcttgggagcgcaatttccccattgcttccctcaaaatagtaatagctagtcttgaaaaggaacatcaatggcatcgaatggtccaggtatctatcacctgagtgttctatctcttttctgggactcatgaaccatgaataatcaaatatccaagaacatatgtctattgctatagtaactgaaaaagtagaatagaatcttggggaggtgtttatttcttttcccctgtttaatcgtttgtaggtgataaagtggatcctaagtaagggacaagggaacacgatggggacgtacggacagttgatacgggcgttagatatggatcgtagagcagaagaggctcatgttatctggcgaaagaaagttgggaacgatctgcattctgtgccttggcaattatgcttacaaatgatgcgcatatatttccggaacaacatgttacaggaacttgttaaggttctttttcccccttgtcttcactgaccgaaaactaaataagaaaacattgcacattgatacttaactgaactagtaagttactttatttcgtggtgacctcaaacttgtgtttattttgttatgtgggttatgaagctattcaaggatctggagagttatgaccgtaagcctccggacaagcacattgtgcagaccgtggctgatgcttatgagcttttgggaatgcttgatgagaaagaacgggtagtgacgaagtatagccatcttttacttggtacaccatccgatgataaaccaagtagatcttcgaggaagaagaagaaaccaggtaggtgactgcgatttagccattgatatcttcaaccatctttaaagccgtttgatattgaactcatgtgctatagattcttgcgcaaaacaggataagttttaaactgtctaacttgtgatttcagaactgaggattccagaagcaacgacagaaggcgcagttgatgcagcaaaagctgaaatccaagaagagcgaaaagaaaatctggataatcaccaagaatcagaagctgccactgaaaaacaattcgaacatggagcgtaagttgtagtatttaatcgataaagtatcactgcaagagaaacatggactgtaaggatgtatttaatcgatggattgttgacaatgctcacatcccttgggatttgtcgcaatggatggatatagagtttagggtttgagtgcggcactagtattactgagaaataagataacaaaatcacatctacatctgaagttttcgacacactcaacatccaacggtctgaaccaactaccaaccaaaccaataacatcgtctaaaacctacaaactgattgaataaaaagataagctagggaaggtatcatagtggttcggtacggtttgaattggttagatgagattggacccctaccgaaaatagagtcttcggttacatttggtttaataacaagttcatttgaaagttaagaaaataactagtattcgaatttagagattgcgggagattgtatgttcattcgaaatacagtacagagatgcttcgattccagatctgcgtccggtctctaatggccattcgattctcgaccaaagagggaatctttcgggatgggttgatttgtgggaagtgggaaccaaacggaatgggaagacggaagaggaaaggtttaggagatatcaatcagacctccaaggccaaagtcaccttccgatttaggtaaagctttgaaataaagagataaattactctttttcaccggacacgaatgagatatcgtaatttggtaaacttgatagaagatgatcagtgacgttatttctcaccaacactataattccattttaagaaactttttctcattttagttacagttttccagtttgaaatctctcacacctttacgactagactacaaaccatatctcttacccatcaactcttaaaaatcaggcattgctttatcactcagtaattagtatttgacgtttagagtgtactcgattagatagatagctttgcgtccaattctctactttctatttaccttgtttcgtatcgaaattgataacgtaattgactataagaaactcttttgccaatcacttgctgttgtgtttttatgttcctgaaaacagttcagtaactggttttcttataaatgtcacgaagagcttacattttcttataaattacataaatgaattctgccaattttctctttcagacttttcttaaatttgagctcttcgtgcagctaactgttgcctattgattgattaactactttttggttagtttgggaagaaa

SEQ ID NO: 7873 - DNA, 3000 bp, Unknown
  misc_feature (1)..( 3000): cDNA_ID_3046804_gDNA_ID_1621170_Annot_ID_173948 3000 nt of promoter + ATG
tgatttttcgtccttaggttctgaagcttctgattcttcaccctttgcaaactcgatgttccctagatgaaggattgcagccactactcggaagattccatcctacagtagtagaattgtaagaagagttgttccaatgactcaacatgtaaaataactagaaagtacctgctcttcagaattgatcccaacaacgtccatagctttccttgtagctaggtattccttggaatcatcaagcccatccaacgcataacaattagactgatttagatagcgaaatgtgcttggttttcccaacttgtacctctcagtttcctgaaacctcatgaaaaaactatttagtcaacgtgaatctcatgtaaagcatgtacataagatttcgagctaacaccgccttagaagagaccagggcttacctgttctggtgcagcgcaaagcatgtaaaagcaatgatagtttctttcagggtctgagacttgacaaacccgcgacctctctagcaaatatgtcctaatagcagctcccgagattcttcccctctgatcaaactgaatctccacaaatttaccaaaacgactgcaaaatggaatttgcgtaagtatcttaaattgggttcaagaaaatacacaaaatggtcaaatcatcaaacgtgagactcctctcctccaccttgaattattgtttctaacggtttttgcattgccaaaagcttctaaaactggatttgactgcaaaacaggaaagtcaatcagcgaaaagtatgacaagatattactggaggaaactaaccaagtctatcttttgcaagaatgaagccatgtattttaaaaaattcattacctccaaaacttgctgctccacagatcttccttcactctcagctcttcctcccatgtaggcaagatactgcatgagcatcttcgtgctctctgtcttgccagcaccgctttccccactcaccaagatcgcctggctcactccctcgttaatcattttcctgaaaggttatgtttttggtgatcataatgccgaaaaacagttgtaagtgaaacaataatataagctaatttaaacggcaaaagagttacctgtacgcagaatctgcaacggcgaaaggatgtggactcaactcaccaaatgctgtgcccttgtactgtttcattgtctcacttccataaaggtggggcaatctcttaaagggattcacagctatcaatatatttcctgtgtacgtctggatccatcatgaaaaaaattagattgcataaactgtggagacatcttaagatcacgtgatggttaatgtaaacaacaaaattacttgaaagcaagaaatacttgacaactagtaatcgaattgaagcttacatatatttcatttgcattataacggcacttaagattgagcaggacccctggttcatgcaaatatgcaagctttgtcatgtcgtctactccaagttcagggaactcggggtccttggggtagacattatttaactttgccacaacctaagaaacaaatgcatcagaaacgagagctttttttctcaatgctcatgtcataaacaaatctcagataatgcatgaccattaaggaactagttccatggtcacagaactcagaagatcaaaagctaaacgttttccacaataacaaatgtctccatatcaagaaatcatatactccttcggcagattatctaacaagttttatactttcttaccgtctttccagagcagttaactgtgatttcttcactgttaacttcttctacttccccatctatccaggcatcatctggatcctccacccagacatgagaccctaccgttactttggctgaagcagcctgcacataaaccacatcataactacacaatcaaacaggtaactgaaaatcgaagacaacaacaaagagagatgaattttctcaaaaaaatcttttttttctttctttctcatccaaaacaaaatcaatagagagagtaaagttgttcacagctttgttcaatcatatacaaaccaatcaaaaaaggaatttttttgttttttaattcaacgacatatggttccatttttacacatttagaaactcaataacaatttgatacaccatacgaaaattcatgtatcacagtatgataaatttacataaattaaccaaaaaacgtttgttcacagaaaaattaaaattgaaatcacacaacagagagaaatcaaaacgaatcagattttgttagaagaaaccacaatgcgattaaagaagagaaagctcgtaccattgttatgatggaatttggtcagatttttctaaaacgatcccggctcgacaatacccaacaacgggagaaacatcaacacaaacttttgaaaatccaatcacaacggatccatgataaaatcaagaaccaaaatttcactttcccagcttcaaaactttctgatcgacgtcaacaacatagaaacataaacgaggctacatgcgcaaaatttcgtgacgattgcagaggatcttaaacccttgagtttttttccctttgaaaaaaaatcccagaacacataggtctgtttcatccagattttctcgcagaaacctgaattttttttttcttggattttcttgtcccctggtttatttccccccaaaacggacgttggaacttggaaagcgaacgaagaagaatcatgaaactttgtaattccgatgttaccccttttcattaaaccgatccggtttatctatctcgctttcaacggatctaatagaaaagagagaagcgtctttctcgttaatgggccaattcttttcttaatgggctacacgttttatcatctctatttcaacggatctactactacatagagaagaagcttctttttgttattaatgggccaattttttttattaatgggctaattgtaacagtatcatttctgaaaacccctcccttaatacgcctccgtcttcgttggttctcgtagcaccgtctcca

SEQ ID NO: 7874 - DNA, 3000 bp, Unknown; identical to SEQ ID NO: 7867
  misc_feature (1)..( 3000): cDNA_ID_1809597_gDNA_ID_1621170_Annot_ID_173941 3000 nt of promoter + ATG

SEQ ID NO: 7875 - DNA, 3000 bp, Unknown; identical to SEQ ID NO: 7865
  misc_feature (1)..( 3000): cDNA_ID_2042340_gDNA_ID_1621170_Annot_ID_173936 3000 nt of promoter + ATG

SEQ ID NO: 7876 - DNA, 3000 bp, Unknown
  misc_feature (1)..( 3000): cDNA_ID_1809581_gDNA_ID_1621170_Annot_ID_57245 3000 nt of promoter + ATG
agtgaagacaagggggaaaaagaaccttaacaagttcctgtaacatgttgttccggaaatatatgcgcatcatttgtaagcataattgccaaggcacagaatgcagatcgttcccaactttctttcgccagataacatgagcctcttctgctctacgatccatatctaacgcccgtatcaactgtccgtacgtccccatcgtgttcccttgtcccttacttaggatccactttatcacctacaaacgattaaacaggggaaaagaaataaacacctccccaagattctattctactttttcagttactatagcaatagacatatgttcttggatatttgattattcatggttcatgagtcccagaaaagagatagaacactcaggtgatagatacctggaccattcgatgccattgatgttccttttcaagactagctattactattttgagggaagcaatggggaaattgcgctcccaagcaacccaagcatccagagctccataaacagcctctttattatcttcaatatcaagaagctgcattcacagatgagagcaaaataagaaccataagagtaaaaaactaaggttaaacaagaatatgaaaattctcataatcgacaaaccattagaaaggcaaaaagaaatagcttagtgtacaaaaaaattctgcttacagtgttcacaagaaactttattttatccttcttgggtatgttctccccaatttgatgtttcctagggttttcagcgtttcccttctttgatgaatcagaaaaatcttcctcatcctacaacaagatgaaaaatatgcatcctaaggatctctcgttggtgaaaaataacgcaagaaatataattgatgaaaggcacaattctcaggaatttactaaccaaaaatacatggaaaacagaaagtaatttgatcatcagatatatcagtgatgtgtttgactatatgaactactgagatcgacaggccagtgaatgagaacacacactttagttatgtgctatgaactactgagatcgacaggccagtgaatgagaatacacactttagttatgtgctataacttatatctaggtgaagatgtataagatctgtctgcaagagaaacataaattgagctcacactaagacttggacagcaaaacacaaagccgatcttcagtgtaatctattgtacctcattcttcacaatacgtttaggagatgaatgagaatcagcgacaaactgatagctcatagattggacccttaaaaaggcgggcttgtttgtctggttgacctgagaaataacatgtatcacaaaatgaataaaaggaatctgaaatatacgtgtgcaccttttatttattggggtttttgaagtttaagatgaaaaacatttcacaactgaaaacttaccccaagaagatgatgaaatggaccagttagtgcgccagcattaccaacggtgttgtactttctgtagaagaatggtaaagtatcagattcaaatcaatacaccaagactcaagatgcagcttgtttttggcagtacaaaagcgagacttggagagcagaaagaaatgaagctaattgatccaatctgagcttttaccttattccattggaatgagaaaacactcctggctcacctacaataagtttcaaatcataagagactccgactatatgaagacctcaaccaggttacacaatctagcatttcacatttgtatgcaatttaatcaacttatcagaagaaaaagagagacctttcaaagttttacagaaattgtctacttaattaaatgaccatttttacagaaatcagctccaaattcgaaacttagagattccaagtcagtaaccaaacattagagtgctatcttcttccgcattaaacttttaagtatacaaacgaatttatcatgagcaatactaaccataattttcgtcacatcctcctccaatgaagagatttcttgctgctgaaatagaagctaacggcgccgttagatttcttgttgcgctactaacggcgcgtttcagaagcgttctaggaattagagaactgaaacccgccattggagacggtgctacgagaaccaacgaagacggaggcgtattaagggaggggttttcagaaatgatactgttacaattagcccattaataaaaaaaattggcccattaataacaaaaagaagcttcttctctatgtagtagtagatccgttgaaatagagatgataaaacgtgtagcccattaagaaaagaattggcccattaacgagaaagacgcttctctcttttctattagatccgttgaaagcgagatagataaaccggatcggtttaatgaaaaggggtaacatcggaattacaaagtttcatgattcttcttcgttcgctttccaagttccaacgtccgttttggggggaaataaaccaggggacaagaaaatccaagaaaaaaaaaattcaggtttctgcgagaaaatctggatgaaacagacctatgtgttctgggattttttttcaaagggaaaaaaactcaagggtttaagatcctctgcaatcgtcacgaaattttgcgcatgtagcctcgtttatgtttctatgttgttgacgtcgatcagaaagttttgaagctgggaaagtgaaattttggttcttgattttatcatggatccgttgtgattggattttcaaaagtttgtgttgatgtttctcccgttgttgggtattgtcgagccgggatcgttttagaaaaatctgaccaaattccatcataacaatggtacgagctttctcttctttaatcgcattgtggtttcttctaacaaaatctgattcgttttgatttctctctgttgtgtgatttcaattttaatttttctgtgaacaaacgttttttggttaatttatgtaaatttatcatactgtgatacatgaattttcgtatggtgtatcaaattgttattgagtttctaaatgtgtaaaaatg

SEQ ID NO: 7877 - DNA, 3000 bp, Unknown; identical to SEQ ID NO: 7873
  misc_feature (1)..( 3000): cDNA_ID_1809577_gDNA_ID_1621170_Annot_ID_57246 3000 nt of promoter + ATG

SEQ ID NO: 7878 - DNA, 3000 bp, Unknown; identical to SEQ ID NO: 7872
  misc_feature (1)..( 3000): cDNA_ID_1809573_gDNA_ID_1621170_Annot_ID_57247 3000 nt of promoter + ATG

SEQ ID NO: 7879 - DNA, 3000 bp, Unknown
  misc_feature (1)..( 3000): cDNA_ID_1809569_gDNA_ID_1621170_Annot_ID_57248 3000 nt of promoter + ATG
ggaggtggtgacgcaaaccatggatgatgcagcatatgcgtcgttatgacgagattcaggtttgttgcttctagcctaagtcctattttgatctcttggaaccttagatttataattttagcgcaacttgctgctgcataaagaaagtctctttaggttgtaggtcaatcaataattagttttctaaacgcaatttcataagaggaactagggtttgctcttgtagtcagttttacgaaattgacctaatttgcggttttcttgtctgttatcactttgtttcatttaggacaaattgacctttagttttcttcttgttattgtaggttcgtattcttgattcgccaaatcagtgggtgcatccgcaaaactgtttgtttggattcgtgatagacaacatattttgctatagcttggtaacgactttctatactctgtttcttattctttcttacaaaaaataataattgatttagttgtaaaatgtttttttttatttgatgattggattttttcaaaagctcttttttaatatatttattattattttaaaggttttataaatactaaattaatataacgttgtgaaatctaaccggattttggatcccgccatttaaccgtggtcattagcgattccacaaatccaacatgtttttcacatcttcatatgtatttagcatttgtatttttttttctttaaaggttttcaactctttttttatttttttaaagattttataaatactaaattaatatgactttgtgagatctaaccggattttggatcccgccatttaaccgtggtcattagcgattccacaaatccaacatgtttttcacatcttcatatgtatttagcatttgtatattttttttctttaaaggttttcaactcttttttttatttttttaaaggttttataaatactaaattaatatgacgttgtgaaatctaaccggattttggatctcgccatttaaccgtggtcattagcgattccacaaatccaacatgtttttcacatcttcatgtgtatttagcatttatgtttttattttattttctttaaaggttttcaactccttttttattttatttttattttttaaaggatttataaatactaaattaatatgacgttgtaaaatctaaccggattttggatcctgccatttaaccgtggtcattagcgattccacaaatccaacatgttttcacatcttcatgtgtatttagcatttatgtttttattttttttctttaaaggttttcaactcctcttttatttttttatttttgtaaaggttttataaatattaaattaatatgacgttgtgaaatctaaccggattttggatcccgccatttaaccgtggtcattagcgattgcacaaatccaacatatttttcacatgtatttagcatttgtgtttttttttctttaaaggttttcaactccttatttatttttttaaaggttttataaatactaaattaatatgacgttgtgaaatctaaccggattttggatcccgccatttaactgtggtcattagcaattccacaaatccaacatctttttcacatcttcatgtatatttaacatttatttttttaatttttttttcttaaaagattttcaactcttttttcgttttttaaaagttttataaatattaaattaatatgacgttatgaattctaaccgaattttggatcctgccatttaaccgtggtcattaaggattttataaatccaacatgtttttcacaaatcttcatgtgtatttagtattttttttttaaaaagtttttaactgtttctttttttcttttcttattttgattttttaaaaagtttttctatttcagggtggataaaattagcagaaacaaacaaatggaatagaatcaaatcaaaaatcaaacaaaaaccgaaaaccgaaaaaagaagagtaaattataaacataattaattaccattccccaaaaaccattcccaaaaaaactagctaccatattttcatgaaagttaaatacagaccaatcccaataataaaaaatctctcgaaagtgaagttttgcgcaaagaagtcggctcagatattatttgaagttttgaactatggtagatacttatttataaatcaattacatataaaattaccaaaagctaataaatcgtaagccacataattcacgtaagattcctgtccgtctctgaaagtgtggtcgttactcgttaccgacgaaccgttgattctatggaaacaagaaagtccagaaaaaaacaaaattgcatacacgtgaatcaacaatttatgggtcgacctgaaatatatttagaaaaataatttactaattctttttttgatagagaatttataacaaactttagtgacaagtcataatcaaaatcagatgactcatcattttccaattttcctaggacagtggatttttcatatggaccccttaaaaaataaatatattaataaatatctaaaagcttttgtaaccgttgattaattacttaaaaactcattagaagcttgattattagtggaagacagacaacctttgtacttaaataccttttatgagttttgtctgcctctaatttactctttgctacacgcttctagatccctcttccttcgtcaaaatctcatttttcttttttcttgttgatattgagaaatgacttaatcctatttcgtctccttcctcaattcaacgatgcttagggtttgccccaaaattatataaactcgtcgatacatacaaagcttgtgactagaattcgtttcttcaagagtaaagcttcctcctttcttctcctctgttttcatctctctgaaacaatggaaagaattatgataaatccattgttatcaattcaaaactccccaaccaagttcttgaaaccaccactttcgtccattcacaggcaacaacaacaacaagagaggcagagcaataacaatacccttttc

SEQ ID NO: 7880 - DNA, 3000 bp, Unknown; identical to SEQ ID NO: 7871
  misc_feature (1)..( 3000): cDNA_ID_3046796_gDNA_ID_1621170_Annot_ID_57250 3000 nt of promoter + ATG

SEQ ID NO: 7881 - DNA, 3000 bp, Unknown
  misc_feature (1)..( 3000): cDNA_ID_3046792_gDNA_ID_1621170_Annot_ID_57251 3000 nt of promoter + ATG
taaggattattatgcaagaaacgtaaaaaacaaaaacgagattctggcatttctgaatatacaacacataacggacatgcatgaagctttaaagctaatacaacaagacctttgtttcatgaagaagagagctattgaatcttatattttttacctcagctatagacatcttcttctcttcttgatggtcattcatctatttcccataagaaccgagcgtactctccaagaataatgctggccaaacacagaaggtgataatgatcacatttcagttttaaagtgcgaaaacaaaaagaagattgtgtaagagctattacatatttctaattatacctatcatttggagaggcttcaacggccttctcaaagtagaacaaggccttctcatggtcattattaatactccagaacgccttcgcgtatctgcatagcgtttctccatcttctgtcttggacaagcttgatttgccttttcccgctgcatcagcctttttcggggacaaaaataaacgccaacattagagacttgaattgaaaagccaatgaacaacaacaccaggcagaatacaaacttgaatttatatgctagtaaatgtctactatgagctaagatgcctaaaaatttcaatgtcagatcgaacaataacaggtaacaattagagtcattcattgatccgcagagtttaaaccaaataatctatagagctacgacacaaaacccacctcaaattcgtcttttccttgtccagaagactcatcatcatcctcatcatcatcctcatcatcatcatccgcgtttatctcccagaggaaactagcatatgctgcaagaacaatgctgaaaagaaaaaacatattattatcacaggaactgataaccaatggtggtatttccaaaaaatgttccaacagacctatcatcaggagatgcttgaactgcacgttcaaagtagctcatggctttagcttcatcttggtgaagcttcattactaatctaccatagtttgctaaagctactccatcactaggctcaactacagtacacttatgataatactcttctgctccactaagatctcctttatactgttttcacattaacaaacgaaacttagacattaatagaaactacttcaaaacagagccattacacaacactaagatttgagtcaaaattcaatacctccaagaacttggcatagtttttgagaagcaaaggatgcaatggatactcctcgagcattcctttgtagtaatcaccacaattcttatcatcgtaacccggcaaatcgaatttgatctcactaccatacaaatcaaacttatcaattcctaaccctgcagctaaatgcataggagggcttggtggtctttcaatctcaaaacctagttcatctctcacaccaatcccaagcttcttaataacctcttcaaaaacacctctctcaccttcaccactatcttcttccttgtgtttcgcaaaactgaactcgccgccgtcaatagcatcaccaatcgtaaccgttctctccaaattctcctcgattccagtcaccggatcttcggatttgaacccatctccagagtcgcagtaaatcgagagagatgcctcgctcttcagcatctttttgggtctttctttctaaatccgtccaaagtcttcaactttaggttcaattgggtcgtcgttcacagattcctcgattgttatttgtgggttcttgattcggaggaccccaagacaacgaccaaacgaagatgattttgaggttcttaggtgaccgacccagttagagaaacaagataagtggggttctgttagatttcctgagaaacggcaaaactcaggaaaggatcttttagtatcatattgtttacaaattattccttaactttatgttttgtctatttgacccatcactccgaagcaaaaactaatctgttcttttgttcaagaaatcatcaattagtctcggttttatactaagcatacaatttttctaacgtatatcaacatttcaatttcggtttaagtatttgtgtacttacatattcaaaaaattagtttgggttcgatttggaaggaacaaaaagttttgtgactcgtgattaaataaagaaagaagggatatccacatgagttttgacctttcttttgggcggacaataaggtccacatgaactgaggttttttgagtctagaccggggcaagtcaataatacaaaaagaggacaacttgtcaaatcattggtccattcaaatgaaaagaagcccataataaatgtgacaaggatgtgtaacatggccacaaaataatcagtttggtttcgttcattttggactatggggttggttttgaaattccattccagcacatagaatttcagaacaccaattacgaaaggctttatcgtgttagaagttatatattttgagaagaaaaataaaagatattgttattatgaaggatcatgaactattctaagactgagctaacacgtgttacttgcttaatccttacactcaaaaagtctaaatgttaatggtattaaaaattattcaccttgtttgttattcttatttctgcaaaaccagacaacaattcagtaatcaaaaggacacatacgtaagttgaaattggaaagagttcttcaccaaagctaacttgatcctcacgaacgtctcctaaaatagcaatcttcagctgaagaacaacacacgcctcctaataaactcgttgtctttctcacatacacaaaaccaaatttagcaaaatggttattattacctttctccctcctttcggaaattgccaccaccaatcaaacaatctaccttcttcttcattcatcattcacttctcagaattttgagaattttgaattgagaattgcgagagagatctcattctccctctcgcaattctccgtcccctcgaatccaacaaaaagattttaatgtaaaatcactctattgatccacaatgtcgatgatg

SEQ ID NO: 7882 - DNA, 3000 bp, Unknown
  misc_feature (1)..( 3000): cDNA_ID_2107008_gDNA_ID_1621171_Annot_ID_57253 3000 nt of promoter + ATG
ttagaaaatgatgaagatattagatattctctcgaaatcaagtcgagggccattaaaattgatgattattagaaaaaaggttataaatacttagttggaagacctagctagctaataactaagaaaattaatagaagaaactctctcttattgatatgtcgtcgtccatgcttctatattggatatagttctcgcatatgagtaaatctactatcattaatacaaaaacaataatatcaaacgcttaattagcatttgaacaataaaaatcatttatgtattcatgcataatttagacacacacacacacgcacacgcacgaatatatacatgttgtagtacactagcacttaggtctaaattttgagaactacgcaatatgacaagtaactaaatctttgttaacctaactaatgcgttgttgttgacatagatgaggtacgaaatggttgtaatatgaattcttatacacattagtatatgtggaagccaagtagccaacgaaacacttgcatgtaaatttttttgattattctttacaagcttaaacgttttttatttaacctatagaggtaaaagaaaaacagtgattttggttttgacttatataaaccgaaactctttctatcactctatagagataaatatacaaagaaatgagtaagtttctctcactatagcattaatggagctttagatcatcataaatgcattgcaccctctctatgcgctcatcaataactccttttaaatttcttattgcaactccacctgttcttttccttcctctcttgtcctcttctccttcttcttcttcaacaacaaacttccattgttcttaatacctagctagctcttccccggtttgagattatcccaaaataacaccggttctcgggtaaccggtcggtttttccggagcaaccaacccttttacttctctttatcattgtctcagatcttctgttcttcaaaggcaaaaatgggcataaaccaaagatcattgtgaattagggtttcactgtgtctccaaaagtaagatctctattatcaaaaaagatctttctctctctacacatatatgtatgcatatgcatttgtgtgtatgtatcttaggttatgtttatagatcggatccatattgcatgttgttgagactcttagatcttctatttttttgtttatggtgttttttggttctcaagatctcgatgcctatgatttgtttttttttctagattattttagtttaatttaatttaatgttttttgtgtctttttgcggagacttatgatctaagataaataaagcgttaccaaaaactttcttggagttagcagtttcaaaaggggtttgacgaaatctacttggtggttgtgtcacaaaaaaaagaccattgacttattgtcaacgctttaattaaccctatatactatatactatttttaatcgcttttaattaatcaaccctatatatcctgtattaaactaattaaacttagcctttttcattagttttgttactggaaacggttcgtctttagtgcacaaagaccaaggtcaatttaattctttaataaattcaattgagagatcagaagcttgtgaatctggttctctctctctcttctcttactagcttttgagtcgacaaaagagagagaaaagatcattaaactcgaatccaaaacttcaaccaacaaaagggaaaaaaagaaaaaataactacaaagagatctatctttagggtttcaaaactttcttgagtttcagatcgaattgagtaagtatttatattatttaagtgttcttcttactgtatcatttctgaccatacaccaaactagggtttcttaaagatcataactctctctctctcgcttcttcctacactagatctgtccgatagatctgatgctttgagaagtcttgtgactttcaagattgatttttctttttgtttgtttgtttatatgtacacatacttggagatagatatactctcatatatgttactgtgcatatggatggatccatcttaagtgtgaataaaaactacccaaatctcatttttgtttgtttcttatctcatttgttgtttttgtaaggccgtcattataaatctaaaacaatttatccgttttcgtaaagaaaatcgctttccaaaaaaaaaaactttgaagtaaaaatatcattttgggtctatattcaaatctctcctcatatttccatctcattatttgtaaaattaatatattaggtcattatcatattgattatagagtttatatgttatgttataaagtaaaagttatatatgtaaatattacgtttgtaatatatatatttatacatatgtacgtatacataatttgtatgtatatgtgcctcatttttaacaaatattatcgttaatctttagtttcattataattttttagggatgtatacattatataaatattttatgttatttatatctgaaatttctatactataacatcttagatagttttcatacgtaattaagagttttaattaatagttacataattatgattagatgaatttatctataaattgtatgcaaaaatatatacatatccaaccgaaaaaatggagagtaaacaaaaacctaacaattaatggtttagtacttgtgaaaatgataaaattattaatttaatatatagtttcataacagctagaaataactttcccttaatataattattttcttccatttccataatgattttcttcttcttcattctgtatacatatatgagcgtttcatatataatcttttactaattcgattgtgattttgattttgggcagtggaagatatacttggagaagaaaatcaaatcacgaaaatatattgatcagtgccttgaaggaaaccaaagttgacaactccaaaaatccatttcgttattaatatctaactgagtgatcatagtcaatcatccataacaatgtaccatccaaacatg

SEQ ID NO: 7883 - DNA, 3000 bp, Unknown
  misc_feature (1)..( 3000): cDNA_ID_1809637_gDNA_ID_1621171_Annot_ID_57254 3000 nt of promoter + ATG
attgcatcataatcgtttatcacccactagatcaaccgagttcataaataattaactgatatcaaaatacctgccacaacattaaacaccgcacactcagtagggcgctcaggtatcaagatatgtattggtatccaaaaaggtgtatttgccttggagctgcaagagatgagaacagagaaagatgaaaattgagaaattcatcactgcccatacattcaagacatagaaaagtaacaaaaaccataccttggaatcctggcacaggtctcggaagcacaagcaatagcattcaatttgccacaccacgcaacagcactaacacaaagaaaaggagaaaactttacaggaattgatgaaatttaaagattttccgatgggagagagagtcaaacctgaagttacggcacaattcaggaacactcatcttatgaagcaaattggaattgggctgcttaagcttaacacagaaaactgtagccggactcacaggatcaatctccatgttactactactactattatcgtcttctttctctccgtctactgatttctctaacaatttctcctcaacgacgacgagaatcggatcggtagactcaatagtctcttcctgcttctgctgtaatccttcttcctctttctcctccactatagctggagcttcgatgattcctccaccaccgctattattaaccaaagaaacttcttcttctgggttttgctgattcatgtcaacgaaagcaaacaaaaccctaaatttatagaaaaatcggagaaaagagggcaagtgtgacaaaaagtcgcgattgaaggcgacagaaagcactgtgcgttgagagagagagaaagtgtcaaagtgagaaactgttaagtggggttaacgagacgacttagtgcggggaaaattccaaaatccccacaaaatcaaaatcgaacaaaaaatgcaattttgattttagggtttggtggagtcacagtctcgtcgccgggatgcagaaaaaaaatctcggtgaaagtgatgcaaaaacgccgtcgtgtctggtcactttctctctaaatttttttcccctctttttgtaattttttactttttcttttaagagcaaaaaatgaagaagtaaattttaaatgatagttttgaatcttttgattaaggaaaatgatcataatttcattttttcttctaatttaccatcttcaaattcaaatttgtaaacatggaaaggtactaacttaatttgacatttggcatttgaggatccttgtttgacattagtttttttttttttttgctaaatttgttaatatcattacaatgagagttcagaaaatacaagaacgtacaacctatagaaaagtaaccaaggcaaaaaaaataaaaacaaggctacaatagaattagaaaagatttaggtgtgtttaacgaatccataaaagcattagccgctgccaacgcttgcgatgtcgtcgagaagtgattaggttgcgaagctcacgatccaccaatttgaagatgataagaggtgccacgcgagtagagttgtgcaaaatattaggcttaggcattagttcatttgcctcctcccaaatcaaaagttaggcttaggcataagtgtttcccatggttgttgtatctccctcaatgtagcacgaccaagaatgagaatcacttattgcttacaccaaattctttgagttacatgcatagcgtactgaaaactagttgtttcggcttctaactagatacaagcagagccatccatgagcacaaacgggtcaagctcatgcttgcggcttcaattaatataaagggaatttaatgaaaaaaaacctcaactttggccagatccatttttaaaccctaaactatgtttttagtaaaacaaaccctgaactaaaacctgttaataaacttaaccctaaacgttgtttaattactgtggggttaagtttattaacaggttttagttcagggtttgttttactaaaaacatagtttagggtttaaaaatggatctggccaaagttgagggtttttttcattaaattccctaatataaataaaacttttgcctcattttcttataactttcagtagaaaagttggttatttgcttataagattacattagagagtcaaaagtttgagttcatcttcatcttcatttgcctttttatttattttttcattttcactcattaaactagaaccaaaaaaaaattccttctttcaatctattaaatactagggatggatatgtctttgcaccatacccttttaaccaccttctcatatctaagaatgcaccaaatttcaaacttattcattccatgtttacaacattacttataagtttacttgagctagttgttcaatttaaaaatctccctatgtgaaggttgttttgcctcatcttccttctcattgtgtttattccattcattagcatccatcatctatcattgctctgtgacagtccaagatcttttgagcttttatgtgttgaccttctagtttcacataattgatcatcgattgaagttttgaactatttgttgaaaaataaataaatgtggttaatccgaactcaaattgaattgtgaggatgtgtctcatgcatgacttgctcaaaataatcagtgagcaagtattctaaaatttagactgaaaaaaaaaaaaaaaaataagaaaagaacaacaaaaaaaatgaattatgatttgtgttgcaaaccggattctaataccgagccgagagggtatgaccagatttaatttaccgctttttggtttaattcagacggctattggtcgaaccggaatgtttggtctggtttccaaaacattgatcaggactcgaaaaataaaagatcttattaaaatcaaggaagcaatcgtagtcttctgtttattgcttctccctcaaatattttcttattcgttaaggttacaaaaatcaaaaagactcgaagaaacctgagatcgaaaccccagccatg

SEQ ID NO: 7884 - DNA, 3000 bp, Unknown
  misc_feature (1)..( 3000): cDNA_ID_3046833_gDNA_ID_1621171_Annot_ID_173979 3000 nt of promoter + ATG
ctcgcttttagttcctttcttcacaaattccaactccagcgtcagcatagccagatcaaaattttcaggaggaacaaatctgcaagaacaagacaatattcagaaaccaaaaacgtattcatgccagaaaattaatataaaaacaagctgtataatcacctgctaacagataccatatcaccagtcgaaactctagcgtgtcgcctttgaatagcattgagagcaatatttccatcacggatgcttccatgtccagtaatcaccagttaagttcacaaaaatcgaaataaatgacacaatgaacaagttcaacattgtcaccgaccaaaggagcctagatttctataatccatgaaaaccagaaaaacctaacttgtactacgatcatagatcaatcaatcattataagaaccattcataaggccgagattcaaattcgaagatcgattttggtaaatttagcagtaattagccatatcacataaacaatcaactcctaggatcgcatttcgcattgcaatgtaagaaatgaatcgtaaaatggaaataagaaaggatatcagagagaaagaatgaagctatcggcaacgttggcgaggaagagatcggaaccgggaacggagaattgacggagatcggaagaagagcagtaagcgaggttagtaaaagctagatctgcggacggagtattggtcacagtcatcgtcatgacttgcgatccgtaacgacccgccatggctggggtttcgatctcaggtttcttcgagtctttttgatttttgtaaccttaacgaataagaaaatatttgagggagaagcaataaacagaagactacgattgcttccttgattttaataagatcttttatttttcgagtcctgatcaatgttttggaaaccagaccaaacattccggttcgaccaatagccgtctgaattaaaccaaaaagcggtaaattaaatctggtcataccctctcggctcggtattagaatccggtttgcaacacaaatcataattcattttttttgttgttcttttcttatttttttttttttttttcagtctaaattttagaatacttgctcactgattattttgagcaagtcatgcatgagacacatcctcacaattcaatttgagttcggattaaccacatttatttatttttcaacaaatagttcaaaacttcaatcgatgatcaattatgtgaaactagaaggtcaacacataaaagctcaaaagatcttggactgtcacagagcaatgatagatgatggatgctaatgaatggaataaacacaatgagaaggaagatgaggcaaaacaaccttcacatagggagatttttaaattgaacaactagctcaagtaaacttataagtaatgttgtaaacatggaatgaataagtttgaaatttggtgcattcttagatatgagaaggtggttaaaagggtatggtgcaaagacatatccatccctagtatttaatagattgaaagaaggaatttttttttggttctagtttaatgagtgaaaatgaaaaaataaataaaaaggcaaatgaagatgaagatgaactcaaacttttgactctctaatgtaatcttataagcaaataaccaacttttctactgaaagttataagaaaatgaggcaaaagttttatttatattagggaatttaatgaaaaaaaccctcaactttggccagatccatttttaaaccctaaactatgtttttagtaaaacaaaccctgaactaaaacctgttaataaacttaaccccacagtaattaaacaacgtttagggttaagtttattaacaggttttagttcagggtttgttttactaaaaacatagtttagggtttaaaaatggatctggccaaagttgaggttttttttcattaaattccctttatattaattgaagccgcaagcatgagcttgacccgtttgtgctcatggatggctctgcttgtatctagttagaagccgaaacaactagttttcagtacgctatgcatgtaactcaaagaatttggtgtaagcaataagtgattctcattcttggtcgtgctacattgagggagatacaacaaccatgggaaacacttatgcctaagcctaacttttgatttgggaggaggcaaatgaactaatgcctaagcctaatattttgcacaactctactcgcgtggcacctcttatcatcttcaaattggtggatcgtgagcttcgcaacctaatcacttctcgacgacatcgcaagcgttggcagcggctaatgcttttatggattcgttaaacacacctaaatcttttctaattctattgtagccttgtttttattttttttgccttggttacttttctataggttgtacgttcttgtattttctgaactctcattgtaatgatattaacaaatttagcaaaaaaaaaaaaaaactaatgtcaaacaaggatcctcaaatgccaaatgtcaaattaagttagtacctttccatgtttacaaatttgaatttgaagatggtaaattagaagaaaaaatgaaattatgatcattttccttaatcaaaagattcaaaactatcatttaaaatttacttcttcattttttgctcttaaaagaaaaagtaaaaaattacaaaaagaggggaaaaaaatttagagagaaagtgaccagacacgacggcgtttttgcatcactttcaccgagattttttttctgcatcccggcgacgagactgtgactccaccaaaccctaaaatcaaaattgcattttttgttcgattttgattttgtggggattttggaattttccccgcactaagtcgtctcgttaaccccacttaacagtttctcactttgacactttctctctctctcaacgcacagtgctttctgtcgccttcaatcgcgactttttgtcacacttgccctcttttctccgatttttctataaatttagggttttgtttgctttcgttgac

SEQ ID NO: 7885 - DNA, 3000 bp, Unknown; identical to SEQ ID NO: 7883
  misc_feature (1)..( 3000): cDNA_ID_2154662_gDNA_ID_1621171_Annot_ID_173977 3000 nt of promoter + ATG

SEQ ID NO: 7886 - DNA, 3000 bp, Unknown
  misc_feature (1)..( 3000): cDNA_ID_2154659_gDNA_ID_1621171_Annot_ID_173976 3000 nt of promoter + ATG
atagattccatgcacttttcttctcattaattttcaaagtgatttttggagaaaaaatgctatatttataagagttattactagtaaactatagttcaattaacaaaccttttggcaaataacagagttttaagatatgtgtaataagactattaaataaaagttcaaaaactttcataatcctactaattttctctttaagatatggtgaagtaatgtgccgtagagggactcaatttctagatattttgttatcttctggaaatttagctattataacaaaatttgtgagatcatgcaaatctaactccattgccaagtgaattgctcaaagcctcaaagtgttactcgagatgacgtttcagtcttttgtcgctttggagatattgtttgtcttcacaactagtgcgagaataatcaacatgcaaatttacgttctttttattttttttaataatatttccttgctatgttttgagttttgactttcttcccaaataacacaaaagataattccactcaaattcaccatcatttcatacaaattttcttacttttttctttccctatttctaagtttacattaaaataaatcaaacgccaaacactacacgatgtctacatatgtgaaaaaaaatcccaaaatgaatcagcagaaaatgcaaacaaaatccccttaagtatgcacaaagatgaccaaacttttgattttttttttctttcacctattatatgttctagattaatcgtgatacagttgatttatacgaagatttggataatacagatgatcttgaagattttggagatgatgatgatgaagaagatttctttcttctactgcttttcttcttgttatttttcggtaaatttatcggagtaactggaggtatatctcgtagtgtatctgatattcctcgttgactcgatccttgatcaaaatctatatttacaaaaagaacataatgtgattagtaaattttgactaaaagcctaaaactgtagtaaaaaagacattaggtgaacaaaatgttttgatttaagaaaataaaagggtgaataaacctcaaatctttttggtagaatgaataaacttcaatataccaaattgggtcctaattttcaaagattaaaaacaattcataaatcataacttaaagtttttcccatcttgcaaatttcattctgaaaccttcgtaaaaagttataatattttggtgcttatttcaataaagttcatttttggttttaagttaaatatatattaccaaattccatctcttatctgcaatgatgatatacaaatcttctatttattcaatctatatataaaatttggataacccatctatatttgtttacctattcaaattgtaatttgaaagtaagtggatggttaatcacatcaattttaaagaaaaaaaaccaaggaaatgaaaaagttaaaaacaaataaataacttaccagtggaagaagaagaagtgaagaaagaagtagaaggtcttgcattactgaaagatgatggtcttggagataaaagctcagccccgaccttaaactcactcatcttcacaagaaatacaaatattcactgattagctatatgaattttacttcttttttaggttttacttgttagaaactagaattttcacatataggccgaaaaggcactaaagagcttacccaaccaggagcactaccagatgaaccctcccagccaatatgagccacatgttttacatctgttggaaacccaatttctatttcatctctctctttctcaacggctgaaacataagataatattcttaaaagccaaacaattacatgagaacactctacaaatatgtgatagacatttggtataagtactcaaatattcttggtacacatcaaaaacataatgtagaagcaaatatcaaaagatatatgcactaaatgactatatatatatatatatatatatgttgaaagtttattagcaagaataatgcagtagtaaaatcgtaaaatcataaaatgtctattaaatagcatgaaaaacccctattatacatgaatatcacaataatttgtctaaaccacttttgaaaccacgctcatttacgattttatcatcgtgtcattttgcaaattaataaatcttcactgtatccctatttagcaattttcatcaaatataggtaaacaattaatatattatatgaagagagaaaatggtaaagaaagtatattaccaaatatttgagagatacatttgaagcctttatagatgcccttcattttcattgacatggtgaagaagatcacaaaacctccaaactataatgctgaatttgtcttcgattatccttcgtaagactcgattacctgaaaactatgtgtcctttctattgccaagattgaagaagccaaacaacaatctcctctctccggatgctacttcaatgttctatgttttgtttaccaaaagttctggtttcagtatttagtattttactaatcaacccacaatatatatacaaaaggaaactagtagcaaatgatcataaagatataatgcatgtgatagatgaataatgtttctcctatggaacaagattggaatttattcgtttgataaaagatctaattaagcttcaaaatttaactttataaaagcacataatgtgaaaatattttaagttcaagattggtatacatgaccattatcatatgattttgagatttttgacattataaacccatgaaattgaattattgatgatatatatcattaagaaacttaattacgataaagtttacctgtaattctataaactcgttggaaaaagaatgatataaacaagaatagcagaatagagaaacagcctctcctttgattctatgcttctttcatcttttggagaagcctctcttgataaatcacaaagcatattatgtacaaaaggaatctcaattaacaaaacataatttcgtgaatttctcacgaaagt

SEQ ID NO: 7887 - DNA, 3000 bp, Unknown; identical to SEQ ID NO: 7884
  misc_feature (1)..( 3000): cDNA_ID_1809633_gDNA_ID_1621171_Annot_ID_57255 3000 nt of promoter + ATG

SEQ ID NO: 7888 - DNA, 3000 bp, Unknown
  misc_feature (1)..( 3000): cDNA_ID_1809625_gDNA_ID_1621171_Annot_ID_57257 3000 nt of promoter + ATG
tattttgttatatttacataaatctcctttctttctccagcaacagagtgtattctgctcgataataaattggtaaatcacaacacaaaaaaaaagtgttaagagatccttctccctcttcgaagatgagcggtacggtgaaggatatcgtttcaaaggcggagcttgataacttgcgccagagcggcgcaccagtcgtgcttcacttctgggcttcttggtgtgatgcttcgaagcagatggatcaagttttctctcatctcgctactgatttccctcgtgctcacttctttagggttcgtctctgttctcttgaccaattcaaaattttatcactttcaatgaggtttttgactgttattggttttatcttcttaggttgaagctgaggaacatcctgagatatctgaggcttactctgttgctgctgtgccttatttcgtcttcttcaaggtaaagttacgttttttttgttccctatgatttgatcaaaacttaggatttagggtttttgtttttgcttaaagttgtttgtctaatttggtagaagaagaagacattgatgaagtcatacttattgattctttatgttgctttgtttggttgcaattttctgtctttatagcattgagagtgtgttcaaaagtttgaatctttgtccctatgttttgatcgaaagtttaggatttagggtttttgttttgattagtttgcgtctctgttagattactgaaagctgtttatctaatcaggtagtagaagaagatggttcgcctatccatttagctccagacttattgattctttgttttaattggttggttgcaattttctgtctttataggattgagagtgtgttcaaagcttgaatctttgtcactgcactgtaatgattgttctgaaagttgttactttcttctgactgtgaattcgttttcttattgaaggatggtaaaactgtggatacacttgagggtgcagatccatcaagtttagctaataaggttggcaaagttgctggttctagtacttctgcggagcctgctgctcctgcaagcttagggttggctgctgggccaacgattcttgaaactgtgaaggagaatgcgaaagcttctttacaagaccgagctcagcctgtatctaccgccgatgctctcaagagccgtttggaaaagctcactaattctcaccctgtcatgttattcatgaaaggtattcctgaagagcctaggtgtgggtttagcaggaaagtagttgacattttgaaagaggttaacgttgattttggaagttttgacatactatcggataacgaagtgcgagagggtttgaagaaattctctaactggccaacgtttcctcagctgtactgcaacggagagcttcttggtggagctgatatcgcaatagcgatgcacgagagcggtgaactaaaagatgctttcaaagatcttgggatcacgacagttggttcaaaagaaagtcaggatgaagctggaaaaggaggaggggttagttcaggaaacacaggcttaagtgagaccctccgagctcggctcgaaggtctggtcaattccaaaccagttatgctgttcatgaaaggaagaccagaagaaccaaagtgtgggttcagtgggaaagtggttgaaatcctcaaccaagaaaaaatcgagtttgggagtttcgatatcctcttagatgacgaagttcgccaaggccttaaagtgtattcaaactggtcaagctatcctcagctttacgtgaaaggcgagcttatgggtggatcagacattgtcttggagatgcaaaagagcggtgagctgaaaaaggtcttgaccgagaaagggatcactggagaacagagtcttgaagatagattgaaggcactgatcaattcctcggaagtaatgctattcatgaaaggttcaccagatgaaccgaaatgcggatttagctccaaagttgtgaaagcattgagaggagaaaacgtgagtttcggatcgtttgatatcttgactgatgaagaagtaaggcaagggattaagaatttctcaaactggccaacttttcctcagctatactacaaaggtgagttaattggaggatgtgatatcattatggagctaagtgagagtggtgatctcaaagcaactctatccgagtaagtaatatatacaagtctctgtctgctggtttgccttggtgagagagaacatttcagttatggtaataatatgttttaggtgttacaaacattgatattgttgcttctcaagctttgtcttgttatttctattgctgagtctattagattcataactatttttctctctttgtatcaacataatctttatttatggttatcttgaccacatttgcttttagactgagtaacaaaacaaagagtggtttaaacaaagaaagcttgatccgacggctaggattaacaccaatctttctatgttacagagtttcttaagatccgacggctgggattttgtgtgattaaactcaaatttcttagaatcaaaccgaatggaaatcatttgtttagagtttagaccaaactgcaatcgagcattaaccgagactttgtacatttaaacaagatttaaaccaaaagtcatcataattttaaaattgatactgatattgacaattagttaaatattaaactaaaatggttttggttttacatttcaatgacttttagccaaaaccgaaccataattttaccaaaccaaatttaacattctccaaaccaaataaagaacctgtataaaccgagcggacacttaaaccggaaaataaaattaaaattcggacaaagaaatttcgttaaaccctaaaccccaaaggtcttgtttgctgtatctcctccatcgctcctgcgccgcgttttctctctcaagctcttaaaaaacctttctttgatttgataatcctaaaatcgtttttccgaggaaaccctaatttcttgttcgaactcgaaagatg

SEQ ID NO: 7889 - DNA, 3000 bp, Unknown
  misc_feature (1)..( 3000): cDNA_ID_1989583_gDNA_ID_1621172_Annot_ID_57805 3000 nt of promoter + ATG
caataacgacaaaaaatgtgagaccatcattttctacggtttgtattatgtatgtttttgtggatttgtattcatggactacttcaatattcatggatttgtcactagtggatttgtcactagtggatttgtcactagtagatttgtatacttgaaaccataattatattttttatttaatttctatcatattttaatcatttacatttttatcagaacgacgtagttgtcaaatggtcataaaacccaaatttatggggtttcctatagaaacaagcttagtctcctcgtacaactttcaccacacaactacaacatggtagatcgacttggaggtatctcgattgtctgcccttgtggcgaggaagtagtgatgaaaacatcagctactccaaggaaccctggtcgtttgttttatgtatgtcccctgggatcttccgtaagtaaatctactaattatctaataatttctactacttgctatccaaaataactatcaataatacaggaaaattggaaccatttgttcaaatggacggatacatgtatcgttgaagagatccgaagattgatagaaaaagtgaataacatcgagggttctacactaaaattgcaaaaagggctaaatttttgtgattccgtgattacctctttgtcacaggagacgtgagacctagattccgttcttcgggaagacattgaagacctgagatcgcagcttagatctatgaaaatattcttgttttatttttgctctttattttattttttatgttttttaatcgctttatttccgaaattattgtaatttctgttagtatatttatcaagacctaattcgactatccatcattgcttaaccatttcgattctattatcttccttcgttttgatttattcatcctaacgagtaggattagttaattttcagagttacatattttacagaacatgacatgtaatccacttgcactagataattcaagcaacttcaagtagatatcataatctattcgtactttttagacctaatacatcaggttatcacttcaaactgacaccctttacactaatttatctgttggatattactgtttgtgaagctacacatcaagggacccatcgtcaacatgtctatttttccgatgctagtttgtagacatatccactcttatgtttttttccacattttaattatagatttatatggataacaaactaaacaattttcgttatatcaaatgatacaaaattgtcttttaatggataagacttcatgcattggagtttatatgtttacttagatggataacaaacgaaacaatttccaataacgaaaatgagaacatatgattaaatcaaaattggacattagatgtcattgtaaattaacgatcacaatctttactggtttacattcccgttcaacttaatctaatataacaaaaacaaaaacaaaaaacacctagatgttagtatccaacaaaaacaaaaacccatagaaattattattcatgagatccaccttaagcgagacaccttttgcacctttgcccaactttcttgcacctagggcacgtacgcctcaccattcttcctggctggaaaggaagatgcataatgcacattttctcgttattcatgtcaatgaacatgcgtttgtcgtgagtacattccatcggcacctcatctgatagtatcctgttgtcgactcatacgccagtcctttgttcttctctacaaactttgcatacggattatttgcggcaagacacttttggaagaaactgtagtacttagaatgaggcattgaccaccacataaaatgattgtccatgtcaatgcgaacaaaggctagggttttcctcgacataacagcatcctttccctctctcccagctagcaaccagttcttcaaatcatcaacaccatcttcagcaacttttctaacgatgatctccatcaacggctgagaaatgtgtatatccatctttggaatctcctacatattaaatgaagatatttattcacaatcattaaataaattaacattattataaaccttgctttcccgtaaatcgcccaccttatcttcaattaaacgattcatctttttataagaatgtttaaaggttttgttctatttatagattttattaaaccaataacttaaacatcgattatgtggtatagaaccggtttggtcaatgcataaatttgtcgttggttttgatttttctgtataaaatatatttaaaaatttttacattagtttagtaattcaaaaaaaattacaatccgcgtggatatttgtttccgaaaaagttgatatttgatgtgttttggcagcaattttctctctcatccaaattagatttccccatcttcctggttcaaatatttttgatgtaacattttactattttaaccatttctaaacatttgttgtaatccttgtcgttattgaaatgtttgacatgtcatggatcctcaaaaatagtgaattattgtttgtcataatctcttgtttgtggatttgttaccatgggtacaagtataaatacgtatttatccaagttaaaacaagatgatttttttgttgttttggcggcaattttccctcgcttccgaatgagaattccccatcttcccggttcaaatatttggatgtaatattcgactattttaagcaagccaaataaaattgttgttatccacgtggatcttcagacgtttaacatctgatggatttacatatatagtgatgtaatgcatggcaataacccaaattttgtggatttgttactatggatacacgttttaaaaataatttttgatccattatgtcgtgatacctaaacgatatccggttaattcgtgtagttattactagccggttgttattctaaacgattgatttattggttatgtgagatgatatttaaggaagttgcttaacccattaattgaccataaaatcactgaaacgaaaaaaacaaa

SEQ ID NO: 7890 - DNA, 3000 bp, Unknown
  misc_feature (1)..( 3000): cDNA_ID_2165672_gDNA_ID_1621172_Annot_ID_173995 3000 nt of promoter + ATG
gattttggttaggtgatagagcctattaaattcatccaaatggtcgatttgatccataggcagaccatggaacttgttcccctgaatcatcgagatgagacctctcttaatctcgaagttgttgttctggatagcaggaggtgcaattcccatcctcaaacggtgatcccttagtgcatctctagcaccaatgttcgcaggtccattttgttgattttgttcatcagccatttcaagtggttgttggtgttgtacaaggtcgactatgtttctcctttctcttagttcgcgagctatgcgatcaatgttatcgttgaaaagcaggttatggttgccggttgatcgagttcgcatacaggagaggtgtacctggatcaagaagacaacaagaaaaacacacagttagtacttgaagtgaaaattgaaaaagaacttgatgtaagcaagtctgaaatcttaaatataacaaacaaacacccaattgacaacggcgccaaattgataataggtttttagtcaattaatcctaaaacactatcctgtcgttgtagtattttatgttgtcaatctaaatgggtgtgatgctagcaatcaagatgcaatcagagtttacagagtcaagccaagcaataacaggtttgggatattttggtatgggccgaaaaacatttatatattgggccgaataatgttttgtaattgatttagtaatgaattatgtttgtaatgaattatgtttttcttattttggacagataattaaattattgtttgaagacacgttgtcttttggtgcaaacccaaattgttgaacattgtcggtcgatcgacaaatctgtagcaaaattcacagataatccacctattttagtctctgttatactttgtatatactttacagatttagttctataaagaagtatgttttttgttgcatcatatattagttttttttgttttcaaatctgtcgattaaatttataatctttgaaataatttgtttgataatagatcgtccccaagaattgtcaaaaaacaggatctgctatgggtaattattttgaaatctatatatagtcgtagatcaaatgagacggatttgatttcgttttcttttaacactacagctaacaaaatcattatgtgctacaatttcccgtgttccgaactaaaatttcttgataataagctactcgaaacacgatagaaggcttagatgttcaccttggagatttccagaattctaaatgtaaagattcctttgacttgaaaagttttcctcacctaaattatacatcgtcacttgtttctaagaatgttaaatgaaaaagattagtctttggaacttcacagaaagctaaatgaaaaagattagtttgatgttaagtacaataatacctttgtttagttgctaaaaatatatacatatatatatatatatatatatatatatatatactgttattcttaactgttgaagttgctaagtacctactcttcacctattcgaatttgatgaataaacatagttcactttgttttatcattgtatgtcgatggttttgattataataaattgcttgcttccataaactatattatcctattgtttgataagcagtaacaaacctaaatgttgtatatatgaaattgttaacttcataatacttaatctgaagttaattagactgaaaacttttagaaaacaaagttaacctgattagaaaataaagtaacataaaattaacatatgcgatttggctgcaatatcatttcttctcttcattactcatttaataacaccaacgcttgcctaatgcaaagaagagctagacaaataaatcaaaagaagagctagacaaagaaatgttagaccatttgtttcctcaatcaataatttatagtgagaggaatcaaacttgttactaatctttgattaatttggtaaacgttgaaggtgagtgaatcaaacctaatttagtataaattaatttggtatcaattaattttttaaaaaattatgagtgatgagaaacagttgttcaacttttgaaggtgagtgtattgttcttgaaaatattgggcatatatttatactaattactaaatcaatctcgtggagcattaggttaggttgagagaatatttttcagtttattaggatattaccgaataagttatgataaggtatattctttctgcaaaaggatcaatttaattaaatggattagttttggtaagtcagtatattgtcaaatgataattagtttaggagatgaatctatattctgtacaaaggcaagaaatattcggaaagcttaaatatgatatgtagatattcagaaatgttaattagttaagagatatatatatggtatcttttgaaagttacgatttattgttgattgcgttatagaataaatatctgttaatatgaattcgaatgtggtgttgttgctgtatttttgcattggaaaacggatattatgggataagaatatattcgtttagctaagattttattgttgattgccattagtttttgaatctaaatagttgctatttatttgcgtgcaggggagtgtcgtgttattgggtcatatttggaatcattggcccatatagtccagtgtaccaatctttgaatacgactggcccgataatagatcagggattcgaaatagttccgcgtttttttcaatatgttaaatgaccagtatacccatggacgaatacttgatttagtcttagacattataaaaaactactcttcaaaggttgtaaagtttcccaatgatttccaattaataatatagttgatatgacaatccttcactacattattagttacctaagattgcattatctacaaccataacttacccgactattcattgttgtttatttaagagtaggaatttcattatttttgaaatacgtaattctaagatatgtctacaccaaatatacctgacgatttgctagccaagatagccaaaa

SEQ ID NO: 7891 - DNA, 3000 bp, Unknown
  misc_feature (1)..( 3000): cDNA_ID_2165694_gDNA_ID_1621172_Annot_ID_174001 3000 nt of promoter + ATG
tctagggatggtttcaggaaatagataaattgtagatctagctatgaaaatgattgttattgaaccgttattgaactcaaactctaatatcaaaataaccggtggcattccgtgaaactcactattcctagagataagattcccggtgacgtgccgtgaaacctattcctaaacttgcatgctaaacaagtttgattagttcacctaagtagataggccgattcttattacacacctataaaccaggctcatctataatagttctgataacagatacctatggcgggtatatctattgtctaaaatcaagttctaagtgatcaatctaaaactagcagtcagaaccattatagatgaagaactctaagaataatcctaaggggttatcaatctactaatccaattaaatccctagtgagactccctaaacccaataaggtgattactgaaaaattatcaaaatctgattaaattgcattgaattataatatgaagatgagtaaaagggaggtcagaatcctctctgcaaggattagattcttctctccaaaagtgtatctctcaataaaaataagcttaggtctaaacaatgaccataaaattatgtatataggttacttaaaaacgtacagggtctattttgcaaataaggaaaatttatggggcttctcaaacacttagtgaatcatgaaaattccctttgccaaatatgggtgtcgatcgacatagatgtggtgtcgatcgacatagatgtggtgtcgatcgacaccaccgcgtgaaaacgtctcggataatcttcattgctgaaaaagcttccaaagttccttattatgcttcatagctctcaaatgcataattgcacctgtaatgactcaaaacacaagaaaaagattggaaagactaacactattctgaaactatgttagaaatcagtaaaaaccatgatatatcaatcaccatcagtcctagagacattgttcccgagtgccttgacaatttaatgaaagagacaaacaagaggacactaagatccccaccacaaatcaaaaagaacgtatccaagcccatttgattgtcaatgtagacatgagagcgtttactttctatcatcatagacatcttttccgacatccagtaactaattatgggattgcattcggtgtacttcaaactgaaaacttcgcataatatatgcacaaattccgtgtacgtcatgttttccttaacacgtacatagcgaccaaacatgcattcatctggttcaaatttcaattcttgttctttgcatctccactcacccaccatagtaaatacgagaatatccattacccacttgaattataaattcagtagaacctcatttaatgcatctgaaaacatgattatatctactaaaaacaaatagaattttgatatacacacttataaacataaatatatactcatttaccattttcaacaaataaaattggaaataaaaaagttatggggttttatataaaaaaacaatgttaatttcgaacacaatcaaaaatcctagtgtgttataacaaaaaacttcttaaacaacttcattacttacacgatcaatgtttgtcttggctccaaactttgtaaataaaaaagatcaaaactttttcaacatcacattcgttcagaatttgtttgtttcttggttcatctttatctctacaattattcacaagtataagttaatattagaacaagtaatgataatttttgtattaattgtgacgaaagtcatgtctaaacttttttgacattaaatgttgatgtcacattgttttttaatgttagtaatctctttgtttactatacaacgcacaaaacatttaaaaataaaatatgtttgcttaaccggaataatgtacgtaactaaactttataactaaatcatacacagaagagtatgtcgttacgctgacaaagataaaatagttagattttagggaatattaggcagaagggcacttttttgagttctaattaggcaatggagcactcttatgggagtatgtacttttttaagtttttttaccataagcccctcaaaagtaagttaaccatagttaatttcatgtggttgaggaattcaataatattttaaacagttaatcgactatgtttttcttttttcttctaccaattatagttatctgaacgtttaagccattgttattccaaaatttctttaccagttaggtaaatttatattttatccattgttgttctaaaatctcagttgcagatcgataatttcctcttcacaaatcgtccctttgatttcaggcacagttgaggctgatataaatgttctcgacactcgtcttcctcctaggctatttgcaactaaccgttaccctgatgcacgtctcaatatctaatccagacccgacattctgactgtaataagtgaagtattgaaaggtaccaatgagatggaaaccatcttagactcttgttttgggtctctgtttagttgaagggttagcgaatgtccaatatctagcaaactagttcatgctttgttatgtagatagttagttaccaaacagaaatacgaaatgtggactgtttttggtggacagcctcttagattctctttagttgagtttggttctgtaactagtttgccgtgtggtgaatttccgaaggagtatgaacctgactactttcctagacgtgtcaatgggacgaatgattactgggatgttttgattgggaaagataagaatgtaacactagctgatgtttcctctaagttccaagcgttaaaagggattgaggaccctttaaaactcccctggctcttcttttgattgttgatggagtccttattgctaataaccagactcatcgtcaaactttcaagtatattaagatgttagaggacattgactcattcctggctttcccatgggggagagaatcttttttgaagactattcatatcatgaggcttgttagaacaaaccgtca

SEQ ID NO: 7892 - DNA, 3000 bp, Unknown
  misc_feature (1)..( 3000): cDNA_ID_3046856_gDNA_ID_1621172_Annot_ID_174000 3000 nt of promoter + ATG
aatatatgacccatgttaagtacacaaaatatgaatgaacttaataaacaattaccagatgcttttgtggggaacaaactgaatctttgcaggtctccatggatatcccatcctgtgtagtatatcgaagttaaagtagattattgactaatatctacgaaagtatacgaactttaatcaaatgcggcagaccttatcatttttaaactcacgccataactaatcatcaacaatcttttcagaattttctgatactgtttcgtctccatcatgcactgaatcagataaaacattgactcccccttccaatgaagttaatggtggtgaagggggagttgtgatttttgtcgctctacaacagggttgacaggagattgagagactgtggagaggtgtgtttgtgagcgtactttcttggatggatgacgagtacacggtcttgacctgtaagacttgacagattgcagaaccctgatctttttcagaagatttagattctgagatcttaacttcttaacactctccgcaaattcatgccttatagaagacaactgagacttcacccacaattttatgtcttttgcttcatcatcattatcttctgcttcatcatcatcaaccatttcaaaattacgcttcctgcctcgcgtgaatgtactaactttagtttttgatggagttcctttagaagaagaagttggcgaaagtttccttttccagataactatatgtttcttgtgttcaactacaggctccttttcattgacagaaatgagcggtagatcagcataactaccaggccactcctttttggtgaaattatggcattttcttatctattcaatcaaataaagaaccttcttgtctctcacttcatcatcccactcaccccaaccatcctcattagtgtttacaaacagcttcaggataacagtcatctgaagaaacagactcagaaaattagaccaaataaaaaaagtcataagagcacatgaaagaaaagataccacaacaatgtttacaattacttacatcaggaacacgttcaaggagatgaacatcgttgatagtaagattgcttttcggtatcccaattgaatgccattccaaaaacgttctctcatctgcagaaccaggaattttgtccagtagaccagaaatgttcctataagcaagaagttgcagggctaagggaaagccataaatagctatactctgctcttgcatctgatttgtgaattgttggatgggatcttctagcttgattccaggacgagacctttttctcttagaatcagccattgacggtttgttctaacaagcctcatgatatgaatagtcttcaaaaaagattctctcccccatgggaaagccaggaatgagtcaatgtcctctaacatcttaatatacttgaaagtttgacgatgagtctggttattagcaataaggactccatcaacaatcaaaagaagagccaggggagttttaaagggtcctcaatcccttttaacgcttggaacttagaggaaacatcagctagtgttacattcttatctttcccaatcaaaacatcccagtaatcattcgtcccattgacacgtctaggaaagtagtcaggttcatactccttcggaaattcaccacacggcaaactagttacagaaccaaactcaactaaagagaatctaagaggctgtccaccaaaaacagtccacatttcgtatttctgtttggtaactaactatctacataacaaagcatgaactagtttgctagatattggacattcgctaacccttcaactaaacagagacccaaaacaagagtctaagatggtttccatctcattggtacctttcaatacttcacttattacagtcagaatgtcgggtctggattagatattgagacgtgcatcagggtaacggttagttgcaaatagcctaggaggaagacgagtgtcgagaacatttatatcagcctcaactgtgcctgaaatcaaagggacgatttgtgaagaggaaattatcgatctgcaactgagattttagaacaacaatggataaaatataaatttacctaactggtaaagaaattttggaataacaatggcttaaacgttcagataactataattggtagaagaaaaaagaaaaacatagtcgattaactgtttaaaatattattgaattcctcaaccacatgaaattaactatggttaacttacttttgaggggcttatggtaaaaaaacttaaaaaagtacatactcccataagagtgctccattgcctaattagaactcaaaaaagtgcccttctgcctaatattccctaaaatctaactattttatctttgtcagcgtaacgacatactcttctgtgtatgatttagttataaagtttagttacgtacattattccggttaagcaaacatattttatttttaaatgttttgtgcgttgtatagtaaacaaagagattactaacattaaaaaacaatgtgacatcaacatttaatgtcaaaaaagtttagacatgactttcgtcacaattaatacaaaaattatcattacttgttctaatattaacttatacttgtgaataattgtagagataaagatgaaccaagaaacaaacaaattctgaacgaatgtgatgttgaaaaagttttgatcttttttatttacaaagtttggagccaagacaaacattgatcgtgtaagtaatgaagttgtttaagaagttttttgttataacacactaggatttttgattgtgttcgaaattaacattgtttttttatataaaaccccataacttttttatttccaattttatttgttgaaaatggtaaatgagtatatatttatgtttataagtgtgtatatcaaaattctatttgtttttagtagatataatcatgttttcagatgcattaaatgaggttctactgaatttataattcaagtgggtaatggatattctcgtatttactatg

SEQ ID NO: 7893 - DNA, 3000 bp, Unknown
  misc_feature (1)..( 3000): cDNA_ID_2165774_gDNA_ID_1621172_Annot_ID_174023 3000 nt of promoter + ATG
aagtgtccgagtgttgtttagagatttggcgctgacttgatcagtgtcagaaacagagatgatggaacataggtgtgatactacattgttgttataacatatgtgtcgaacagagaacaaaaacatatttgcttaatggtactttattctctgattttcaatgattgtctctgatactttttcagaatgagactacatgaatctgtagaagaagaaaaaaacgtaattgcacccatcaaacccatcgtctcattatgtcctacaattaaaacagaaattgaaatccccaaaccgtgtttgaattattcttcaacattgggtgacaataaatgtatttattgcttttgccctcgtgaagattaattagggcataaattgtatttgtaacttccacttcttcttatttcatagatctgacaattttatttaccctaaaaaaattgcttcgtcgtcttcgttgtcgtcaactcccttaccttcgctgatgaaagacaaaaagttgagaaactgggcggagcttccgtccaagttgacgtcatcgattctacttcgtcttggcgctattgagatacttcaaaacgctcaaaaagtgtgcaaaccgtggcatcgagtctgcaaagacccctcgatgtggcggaagatcgacatagataaccgcaatgatagggcagccttcaagtacgacctcgagtcaatgtgccgtcacgcagttgatcgtagccacggtggtttgattgagatcgagatttggtactacggtactaatgatctcatcatgtacatagctgacaggttctgtttctccctagctctctttccatgttaaagagaatttggtcggtgctaatactagggttagagtgtttgctaactatagggctaagagtgatcggtgctaatccaagggttcgagtgattgctaattctgaagttataagtgattggaggattttgtgtcactctttttaaactagatttatttttatctgttctatatccttctactgaatctctgataaagcaccttggtttgcttagtggttttgtcaacgaagtgttctcaataaggttatgtttttgacttttttagtaacaattatttgcaggtcaagtaatctgaaaagccttggacttgtaaggtgctttccaataacagatgagggagttgccaaagcagtttcgaaagtaccgttgcttgaataccttgaggtttcatactgcttgttttcaggagagtctctgagagatataggccggtcttgtccgaatctgaagacactgaagctaaaccgagcccctgaaatcatgttttcaaatagtgggtttgatgataatgccaaagcaattgcagaaagcatgcctgaactacgccacctccagcttttagggaacgggctaaccaataagggcttgaacgccattcttgatggttgtcctcacctggaacaccttgatttacgccagtgtttcaacatcaaccttgttggggatctcaagaaacgatgttttgagaggatcaaagacttgagatgccccaatgactcagatgacgattcagatgatggctcagataatggtgcggtgacaacatttgggtcacaatttaatgaaaccgactatcattggtactagatattgaatctttctgaatcttgcggaaatacctttgttgttgttgctttgttttttgtttttgacaattgacacctttgttgtttgacttatgaatagtttcagtttcctttcttggtagtttcagtgtctttcctttgaacttttttaagaagttttgagggcgtgattttaagtcgttcgagaacgatgtcatgggtctttatattttttttagttggtacattactttcacgattgtttagttacatactatcaaaagtaataatattataattaattaaatttacttatgaaaaccactaattttagcatcaatccaaagccttgcgattgatagcttaaaaaaaatgttgagtagacccgtagctatagagagaatataatcgtgtaacacttttcccttggtgtttcatcaccaatttcatttgatctttatatcaacaatgtccaaaacacaaggtatggtgtccccatgcaaatcacaacatcatcaataatcactagctagtagactcttaatgattgtttacgtgatcacctaactgtataattgactatcagtagagccggaccataacacatgaagatgaaacattccaatggggctcccattttaaaagggcccaacaaaaattttattttagttaaatatgcatatattaatttttgataataagagaaaatagttagttttatacatataaatcacaaataattgtgtgatccaaaatatttataaatctaatatacaattaaataaataattcaaaattttgtttaaattggttttctatttactctatagtttttaagacaaaaatattttgttttcgtaatttaaatggggccccggatttcattggtccgggactatcacaagaacagaatataaggtgataaaaagaaataagattgtaaataacttttccttttggtaatattttttttttttgttcaatccttttggtaatgtgtaaaaattcacaaattatcaaaagaaaaagagtggatattgattttactctttacttttggtgaatgcacttttggaaattgattttactctttactgtatttgggaatatatgcattgcaagttacaagtcaatttgttaataaaagtgttgaatgttttgtttcatctacattattattcttcacctttgttctaccgggtttaggagtagaaaacaatcaaatggattctcagattgttaatcttctgaggtctaaacagtattgtgggcctaggcccaatacattatttcagtatgcttggcccaaattagtttcgtataaaataagttttaccgtgaggaactaaattgtaaaacagagacggatacggcaattgtatcctttaga

SEQ ID NO: 7894 - DNA, 3000 bp, Unknown
  misc_feature (1)..( 3000): cDNA_ID_2165766_gDNA_ID_1621172_Annot_ID_174021 3000 nt of promoter + ATG
tgccactacttggcgactaagtattggtgactgaattgcgactatttgacgactggttacaggttgaattatcgattatacattctgtttttagttaaaactgtaattaacaaacttgataaagcaactaaaaaactgtatttcacaaacaaaactgtaattaactaacaagctgtattttataaactccgaaccttaattcaaatacacacacattaatacaagttcttaagtttgataagaaaagcaactaaaggaaggggaaatgagatgttcactcctggggtggatcttgtgaagcagtagcagtctggacatcctctgtttgatcttccgaagcagaagcagtagcaccagcagactcgaggaatgcgagaaacttggggtctctttctgtcaagtacttcttaaccatcctcaagtgtttgatctcttcttgttgctcattagcaacacgcttgatatctgcttgctcagctttcaccctcaatgcctctgcctcacgatgtgcctggagagtcgcttgttcttctatcttgcagttggcttcctaaagctgtgactgcaaggtagtgaaagcagaactgcagcctgggtacttccgctttccattgatgtacctccctaagcttcccattccaaagtatacccatctcttgtttgtgacagttgactgcaaacaaaagacaagaggattattgtagaaaagatgaagcaagtgataatataaaaaaaagacaagaggaacaagaccattacctgaaggaagacctcatcatcctcctcctgagatagttctgatcgacgggaagtaccatctgacccttcatcattctcacgggcagccaacttagcttccttgttcctcaaatatgcctcatgaatttcatgcgccttcctatcaacaaaagtcccatcttttttggtatgagtcttaacgaatatctcaccaatagtaggtggtcttcccaactcaatttcctgaaatgttgttcacaaaacaattcagactcttaataaaaatcattctataaataaacaaatgtaacttactatctcttgctcaatctgtaagaaagactttggccccgatacatgtttgtgaggaccaggaccattacggtcagacattcaagctgctgatgtggttgaactcttggcaatggcttcttttgtgtcccaatacgcacacatttccttccacaatgtcttctcaatccatggcggtcgctcatttgcacgttttgcgcaagccttagaaaccatgtccttcatacgcgtttgacatattttaaagaatttttcttcaactacaccagtcagtgatggatgccatgtgtgtgtactctacaaaacaagaggagagtttgatgttagtgatcaaacaaccaaaccaaaccaaatgtaagagattaataagagatagaagttaatttattgcgaattcgaggaagtatatgtgtcttctttcagtaggtacacagctccaactgtaaaatggcccattaaacttgtttgtgaagacctttgtgatcttccgggtcagcttaccattgtcgtgaccaaaccttcaattacataaaccaattagcatatacaaacctaatcaacttagcatatatacacacattactcaatattaacgcttaacctaatcaacttattaaatatattacacacctaatcaactttgaggatacacacacacattactcaatattaactcttattctaatcaacttattaaacacctaatcaacttaataaactaagcttaccatagggtttcacacacttaacacacacatattacacacctaatcaacttagcaactctccctaatattctcagcttaccatacggttagaggctcaaatgtgggagagataaccgttgtatacttctcacggcctggctgggcaagcatgtcatgtagatttgcaagcaaagcttcagggagagttgattccctttcaagatcagccacaaactcagcatcatcatcttcatcttcctccgcgtgtgagttttgagcttgagagctgtgatgagatacataggctcgaggtagaggatttgaggcttgcggaagtagaggattggatgcttctcgttgaaccagcgctatagactgattggaggcattcttgtgaaccgccgctggagattgtctcgccgtagaggctagacgatgaacagatcctccagatctaggttgagtcgagccggatgctcaaaacagagtcgatccagatccacgaggagaacaagatccgcgaggagacccttcgcctgactggaaaagttgcgtcggaggaggatagtccctgacggatggacccgttgaaggctgtgcagtcggatgatgttcaaaatcttgaagcggggctggacgaatcaccagcgtgaactcgtagtggctgggatgaccactgggccttcgatttgatgccctagtcttcggttcaactcgaactggctgggaagaagtgggtcgatttgagggaatgtttgatacacttcctcttcctctcttgcctccaccacatgtcttcatcacttgaagctaagaaacgagagattgagaagattgaagatggattgatgaagtttaggatcgaaaggggattagggttaggttagggttcgtcgagagtgagagagtgaagagaagggggattagggttagggttaggcgtaaaatcgtttatatagtctgggtttagggctaactttactggatcgttactaaatcaagcatgtgaaagcccaattaattgcccaaataaaacatatgagtcgctaaatggtagctgtacttggtgacctattagcgactaaattaatgagtctcacattcaagactgattagcgactattgtataatatagactaattagtcgctaatacgtcactatttagttgccaaaacttacgactacataatcagtcgccgaattaagtagctaacaacgtgatttcttggtgatgacgaattc

SEQ ID NO: 7895 - DNA, 3000 bp, Unknown
  misc_feature (1)..( 3000): cDNA_ID_2165755_gDNA_ID_1621172_Annot_ID_174018 3000 nt of promoter + ATG
tagatcttaaaagaaagatagaaaatagataataattaatttatcaaaaacattttgtgaagaaagtatatttaatttgtagatagtttttaattatgctgggagaagatcaaaaaaacttttaaaaattatttgtgtgaaagcctctattattggactttaaaaaaaagaagagaaatgaagagaaaaaaaagaaggctttaaaaacttaaaaaaagaaagtaaaaagcctaattggcaacaaaaaaaactgaaagagtttagactctttttaaagccttgaaattcacttgccaatcaccccaacaatttggtctaagcaatccaacaaaagtttaagtagaagttaccaccaatctcggaggacgaagttcgacctcgacgacctatataagaaggaaaaaagaactagaaagtgattttataatcccctaagagcacctccattgatagtttgttaattagagactcataatcactcataagcaaataaagaagaaacgagatatagtctttttaaacaagaaaaactattaagaaacccatatctcacttatcttcttataatcaattatatttatttttatagtttaaaacttaatcgaaaaaatttccaaaaaaaactccacataatttttatttgaacatttaataccaaataccttttggttggaacaaatatatcatcattctgagccttgacttcatggctgatttatactagatcccaattgggtttactgttaagtataatcgagttgtgtgattataaaatgcaccataatggtttggcttgctcacgatggagctcagataaaatgcaccatactgttaagtataatcgagttacatttgctctgtttcacgtctcggaaggactaggggccgattgatagcgactgttagttttggctttacaggctttgactttaaaaatccgagctatagagaatttggctgtaaagacttcggctgtagaaactttggctattaaaatctaattggtaaaacaatgctgtagaagctgtacgtgcttgttattaataataataataaataaaatatatttagaaataaatttatctaacaataaattttattaatgatttaaaaaatatgtattattcatttattttttagaaaccaaacattgcatcatgaagttggatttactaaaaatgaaattgttaatttaaaatatttatgttaaagaaatgacaaaggtttagaaataaaataagaaataaaaattcttaaaagatacatttattgttttatgcagagacttaatatccaaagaaattagtaagaagtgggataaacttaataaaacttggatgaaggcgtggagcttgaggatcattataatatatcttgtactacatcttcaaataatctaaactgtttttagatgttgcccctctaaattagctccgagttgattgttaaatttctgaataatattttttattgagtaattgtataagtttgacttatcaaaaaaatcaaaaactttattactgattaaccaaataataaaataattattagtgaaataaaattattagtgaaatggatcttaaaagaaagatagaaaattgataacaattatttttcaaaaatgttttgtgaaaaaaatatatgtaacttgtagagagtttttaattatgttgggaagaagtaggggtgtcaaaatgggtcaaaattcatgggtcaactcaactcaattcaacccatgaaccctaatgggttgaaatttttgactcaaatgagttgatgggtcaaatgagttgatgagtcaattggtttgatgagtaaaatgagttgggttgtaatgggttaatggttttagtggtttacccaattaacccatcaaattttgtaaaattgaattaaaccaactaaaatctctaaaccaatatttaaccaacacatctaaaccaatttaataaaatcatccccaaatttaagaaatcaatcgtttctcgacctccacttcgacctatactctccaccggtctcatccacatcggagactgacaagacgacgaagactgcttcaattgaagacgacgatgatgatgtgcttgtagtgggtcaaaagggtgaggtatgtttccactggacccttctcatttctaagttctttttcgttttcttcattcgaattggcgtgaaagttcagattctgtatgcgttagtgttgtttagctcttaatttgaatcctctaagaacaaattattttaaacaagttaagccttcattcgaaacattgagttcttaagggttttagttagtgtttaagatccttgagttttgttcatttggttgatcaattgagtttaacttgaaggctttggtgattcaatctaagggatactaagttaggattgaattttggttaagataagagagactgttcttgtgtgtgtgctttgactattcttttaggatcaatttagttagactgttcttttggttaattttcactttatttgaatggctctacctttaatagactagtcttcttctagtttgtggtacttgagcgatgaagtttgagttctgggattagttacttctgatagttttgatgtgattgccaaattgttatgtgtttgtttcggtaaagggtttaagctgaaagaagatatttcagcttatgtctagggtcaaagatgatgtctatcacgtctcctcttggtttgggaaatcatgttcatgatctaacttaaccaaatttttaatgtatcatgtctaatcagagttacactcagtgtagaaatatttttagaataacaagagctaacaaaaatcgtatttagtcatatgcttgccgtattgtccaaaacagtcttcttttctctttgttttattgattctttgactgtgtctatgtgattaattcttgtatttggctaataacaggttttattaagcaatctctaacttggccttatttctatgtatagttatttgcagctgatcttttacaaaaa

SEQ ID NO: 7896 - DNA, 3000 bp, Unknown
  misc_feature (1)..( 3000): cDNA_ID_3046844_gDNA_ID_1621172_Annot_ID_174014 3000 nt of promoter + ATG
ccattcaaaaatatgaataagaataaaaaaggtttaagtgctattcagaaaataaataattcttcagaatattaacaattattttggaaataatttgtgttggaaacatgggaaaaatcgtttggatagtttgacgaagcaaaacaacatatatcataataatctcgaaacaccataattttctcagtttatcccacttcttaatgtaatttttggttactaagagaataaatgaatgagtaagacatatgtattttgtttgttgaggatatttatttcgtcatttattttaaaaaatgttgtattttaattttttattattattaaaatatatgttttgtcactatgttacaacataattcaattttgatatcatttatatttataaatatatttaataataataaatataagtaaataaaattcacagcttctacaactttttgttaccataattttctacaacataattttttaaagtcgaagtctctacagccaaactttctacaacataattttttaaagtcgaagtctttacagccacccttattgtattaagtcttaatatagtataaaaataattactttatatatctaaacagaaaataaaacatagaaaatatagtatatctattttattacgtaaaaaagttagaatatgttttgttgtacaataaaaaatgtaatgaaactcatactaaaaatttactcttttacatgtgcaaattgcaggaattatatcgagaatcattgttgcttttaaaatttaataatcaatgatatgtttttaaataaatttaactctcagataaattaacaatttatttttgaaacttatggttttaaatgattggttttgataatttatatgtttgttgtgtttattcattatatgtgaatacttagctaataaaacgggatttgtaaaacaaatatttactaatatatacacgtttataaattcttccatacactaaccgacaacgtatatactaacacatgacgttttacaaacacacaacgtatacaactatacatactataagattcatttatactataagattcaaatttgatatagactttaatactttgtaaattgggaaatatgtcagaaaaatcgccaattttcaaaaataggacgaaaaaatctccaactcctcaaacgtcgttttaatcacaaacttttggttgacttttccagaaaatacaaaagtttggttgacttggccaaattagtcatcacgttaagtctccgttaggacgacgattacagggttaataagccgttaagggcttccgtcttagcaaaacgacatcgtttctataatgacaaaatgagccataatcgatagaaacgtcgtcgttttgattcagagagatttgagaaattcccaaatcgattagaaaccctaaaagagagaaaattctgaaattctctcaatctctttccaattgatcccgatggcgaagacgcggggaggaaactggaatcctcgtcggtcgcggaggctaatggctattgcaggcgaagctaacagagcaaacataacgaatcgaccaccgaaagttgttgagatctcagaagaactggagacaaatcaaaacccagaagaaaccgcgatgaatcagatcccagaagaaactgcgacgaatcgaaacccagaagaaactgcgacgaatcgaaacccagaagacaatgtgggtgggactgttggtgaagacaatgttggtgaagacgatatggatggaggtctagaggaggaaaattgtgatgattttgaagcagattttggtgttggtgcaagagaagatggagatgcaagcaacactgatgctgacagtggaggtaaagattgtgatccccaatccacacacacttcgatggcacatcacattctccggtgactccagatgtaacagagcttgaactcattgttagagagagagagatcgaattgaagaatagaaattttagggattgaaatctgaaatcgatttgggggtttttagagtctcatctgtcattacaaaaacgatgtcgttttgctaacccggaagccgttaacggcttattaacctcataatcatcgtcctaacagagacttaacgcgatgactaatttggccaggtaaccaaactttggtattttctggaaagtcaaccaaaagttttgtgattaaaacgacatttccggagttggaaatttttccatgcaatttttgaaggttgaagatttttctaacattttccctttgtaaattatagaagataacattttatccacactaagaatccatcaaattagtataagatattaccaaaataacagacgaattaaaatgttatctcgtgcaaagcacatggtactgacctatattaatgagaatggtatgaaatttttgttattttaattacttttacatattaattattctacacaatttatgaaatactaactgtttttccttttgtatgtgcaggttgcaagaattattatatgaatactgacctactctataaaatttaacagctacatatgaccgagatatgctgagctgagattttgcagaagtgacgctttttcaagttttcaaatttagtaaaaattaaattaaaataaataaatctggcgagatatcaaatcacagccgttgattgctagcaaaaaatctgacctctttaaactgtaatagcaaaaaaatctagttaattaggctaattatctattagatcgaactttcacgttgtttcaaatttaaagagttacacagcgtgtcggccacttaaaacgatgtcgtaatgttgtttcccctcctcgacaagcgccaagcccgttaaaatccccaatttggatatatatcttttctctgtcgacgctctctctctctctctctctctctctctctctatcttaactcaactattcagtttcaattttcaaatttcagaaaccattttctctctctatctctcttcttcttctttatctcagtaatg

SEQ ID NO: 7897 - DNA, 3000 bp, Unknown
  misc_feature (1)..( 3000): cDNA_ID_2993828_gDNA_ID_1621172_Annot_ID_57807 3000 nt of promoter + ATG
gtccttatatcctccttcatcaacaaggctggaatctcaaaacgttttgatagcaaacgtagagtccgaaggcaatcaacacagacaaatttgttgaagcaatcaaatgtgaagcttccttgtttctcctgcaagaaagttctggcttggcgaagagcttgacgggctacgatcatattcttcacatcgttagacgatagaaaggacttaggcagatgtgtatacaaatccaccatatccttctggatcttcttcattgtttcacttaacccatcaaatttttccattacaaactccccaaatgtaagaatgatttcttcttccttctccggtgtttctttcgagccaagaaacattttcattacaaactctccaaatgctgtcagaatgtttttagtttcttgattctccttcctttcacttagcaacagatatttcttataactagattcagcattttcaagaatatctatgactgcctccaaactccgttcccattcattcgatggcgaaaacagttcacccaatttactaatgcgatcatcaagaaacacgttgaggagatcatcattccccctttcgtctatccccattcggactcggtttccgactaaaacaatattgccaagtccgtaagtagaatgttctgttgaagaagattccttaaatagcgccaagagccttgatgcaactgctactacagccgtgtttgtaggagtgcacacaactgttttgcaacttaggctgagaagagcaaacagaagagtagcgactgtctttgtgttaccggtaccagggggtccccatatcagtttcacactagtcttgtcgcggatttctcttgtctcaaggcaagccaaaattgcagattcttgagaagagttcaaattcgctgatcgtataatatctaacacatgattcccccaattcctagaagaaacagattgctctgtatcctgaaatatttacaagaaaaaccacagttactccacattagacgctaaagccagatcatttcatgtttacttaccgcggtatttgcttgaaggacactcttgatgagactcaagtttccatctccgttgtgcaaagccttccagatacgagtgtttgtggttaagtatataagaaaaaaacccgaacgaaacgaatattgctcatcaatggatatagatttagaggaatgaacagagaaatgtagctcatctccaacagagaacacatacgcaagaatcagtgggtttaagtcatccacgtttccttgtgactccaatgagatctccatgtttcggctcgtagttagttctatttccttgtgcaacactcgtaagtactgatatattaaccttgtttgagcttctactcggtaattttattgccgtagcctccacggaacttatgtaaaagacaggagctttccacaaacagttcaagcttgaggacaactctgtacgtgtttcctctagtagaagaggaacaaagctcttacggtattcatcaacggaacaaaacatgcctggtatcgagtatcgacctaatctcttccttgttgatatctttgttgagaatatagttgagagaagatttgattaatcagacttgtcttctcatttctctccatgtcacagaaactttctgcaacataataacaatgaaaaacttgagttaggttcctaccttatagcaggtcatagctacatagagaagtaacttggcttacaacgcaaactaaataggaagatgataagtaggaaacagtttcttcaaaagcactgatgcaaaggaatcaacaaagccacaaacgaagacaacaggaaaaagctggcttatcagtttggtctacttataaagaaggaagaggaagaggaaaggtccaaatagaataagtaatttcttcaacttccaagaataaattgtgaatatatattagacagacatataaagtgaaaatagcacattgcttgcataaactagaatttaagtcaatatttctttttatttttgaaaactgtcattagtacttttttgtttgttttacgagaaattagttcactaagaagaaatgtcagaaacttaagaacgaagcatttacggtggagaggacaccatttgtctgctatgagtcgtcataatcatcatcatgattatacgaaattagtcacatccgtaagattatattataatttgtaaaaaagtactttaaaataccacacatacaaattttatccaaaactaataaaacatttctttcgtttataaaaaactgattcaaaaagtagtaaaatggagcaaaagaatttaaatagaataataaaaatttacacttgaagatttcacataactccgttgtaaaagacaaaaaaatcgatatggttgactatacattatacaatcgctttatagaaattagaatgggcagcaggtcaagaacaaattgacaaaatgagatatcgttttcacgttttaataattatgttaaaatttagagattttgttatgatgaaacattttataaatttttaagctcattttgagcattttagagggaataagcatttttttttttgaaagttttctacttttttaaaggtacttttttaatttatttcctaatgacgtcagctgttgcgctaatatggttaacaaattttaatcacagctgttcgtttgttttggagaaagaatcaatttggtggctattattaagagttagagaagagttggttgttgtgtggatagaaccgacaatctcgtttttttttgctctccagaaggaaacatgagcgaggaggtaaaatctaaaaatttattgcggttattaaatctgttgatggttgtggattcgtgttgatggttgtgaaatgttattgtatgtaggttccaatagagagttattgtatggtcatctgcggggaatgggaatgctcggatattcaagaatggtattttgaaattaacaaaattctaatgtctagaattgttccaattcctgcagggatg

SEQ ID NO: 7898 - DNA, 3000 bp, Unknown; identical to SEQ ID NO: 7893
  misc_feature (1)..( 3000): cDNA_ID_1989577_gDNA_ID_1621172_Annot_ID_57813 3000 nt of promoter + ATG

SEQ ID NO: 7899 - DNA, 3000 bp, Unknown
  misc_feature (1)..( 3000): cDNA_ID_1809721_gDNA_ID_1621173_Annot_ID_57259 3000 nt of promoter + ATG
ctgatttcaaaaacaattaactcagaaaacagagataatctaattcttaccggtttcaaaggattttgaaagagtttctggggattctaaaaatagaaaaacttttgaagattctttggaagatgacttcacgggaaaagcgtgagtgaatttaatacttggtttcgccggtagggtttcatttgatttccggtgggtccaaattggagtgatgttgttggtgatgtagtgacgtaaataaccatagaggaaaagcagagaagaagatgaagatataagcgagataagtgtgtgttgtttttctgtatcaaaaacggcaagacaacaaccagttttttttttttttttgtcgtcagacaacaaccagtttagacacaccacttgcccctaacttttgaattcactagatgaataattttatcaatattatcaatatataggtatcatatttactcattacgttgcatataagtaccttttgaacttcaaacaacaaatcacaccaagaacaattacattcaaaagaaaaaaaatggcgaaaactctttcaatagtttatgtcgtcctagttatcatttcataaacaaattttaatttcaaattagtatctagcataacatgcaaagaagcatttgattatgtggacccgtgcctcccacacgttatgcggccatattctatcaatcaatcatattgtgaaggttttaagcatgtggaccgtcaagcgacgacaccacaaattcgccaaacctatgtcactgttttcagttaggtataaaatgatttcctcagatgaaggttcttcttgagatgccaaaagtatgtggcatagcttttgcgtttccattcgatttaaaaacaatttgccaaaggtaacgttttatattaaaagtaataatattttaacgttaagtttttttttctctgattttcttcactttttattcaatcatacatttttatgtcaatggttgtcacaacaaaaaattgttttttttttttgtagcggaaaccaattatttgataactagatcatgaccagtgttacaacgcaggttaaatttcatttagtacaaaaatttatatatcatatattttataatatagttttgatatattacgtaagtaagtgaaaaatgttaatcttatgttaacaaccacaaaatgagattgtatatatttcagttagatcaaaaaataaaatatcataaatgagccgcatctaaaaactaacatgtagattattttgagttaatttaagaaatttagtattaatttgtaattctttggttgttgaaatggagatttgtttgagttaattaggaaatttagttattttttgcaattttgcataatccaatatattttaaacatatttttggtatataataatactgaattcaacctatatatggagtttatattttcattttgaaatcccaataaaaaattgcttgtataatcaattttttttccaactatttagaggtgtcaaactctatttatataattttatcatataatattaacccgccgtctcttaaaatatttttagtgagttgaattagtttgctctttaaaattttatttccaatggtatttctaagtaattatttacaaagggtaagggtactttgttaaatatacttcccaaataatagtataagattatttcaagaaacaagtaaatgagtttaaaataaaatacaaattgtgtaccaatcaacccatttattcataatttttaattatatcttacaaaataattttaatcctttttatatatccaattaaaaaaatttaaactaaccacttataatttctaaatattttgcgcagcattaaggtttgaagaaaaaatattgggattatcaaggacattttaaatggaaatctatgtactttaatatttacataatactcaaataaattttaatttcattcatctattatgagaaactttctcaaaattatgagtgtcaattttttacaaaatgaaatcaaaatcctacacctaatcatacaatatatagtcctcggcaaaaaaaaactgattcgaatttaccgaaccaaaaccaaatcgaacaaagaggaaccaaagtcgaactcaaattgatgtactaactcaaattgatgaactcgaattgaaaatagcttggcggaagcatatgattaagactagtgtgaaaaaaataggaaaaaaatatcatttaaaccatcagtttactattttcgttggtctagtatcgtgagttaaatctttaatttatcttaacttttaatttaatcataaattttagttgacaaagccaattaagacacatcatcaaaaattatcataatcaaaaaccctaaatatccaaaatcgatttctgattttttctatatttttcttcagattttctcttcttcaacgaatttaaagtaatctctggtttctagtttttagcacatccctaactgttgtaactccacttaattaaaaaacaaagcttcgaaatcaactcgaagcccaaaacgggctacgctaaaatcgtcatacccccaccaaaagatgacctgtgttattagtttaaaacaagtatttaatcaaatagtatttattttaggacttcttctatactaaggtaggctcaatttttagagaatgcaaattatgaaagattatgtgtttttagtttttaaacaccatattttcttaaaacttgtattgatttcccatatttgttttttcgttaaagagattttcccatataataataaaaaaacaactgtttagtacatatttattaccaatacgtatctaaaaatactttcgttttttgaccgaaagaaaaataggtaataatcaatggttgataagaacttgatcatgtctcatttaccaaaaaagaaaagaaaaagaaacttgatgtctcgtccgttgaattgagagaagaaaaccttagaccacaagctcctttgcggtgacataattctgcctagtgtggtatgaccatg

SEQ ID NO: 7900 - DNA, 3000 bp, Unknown
  misc_feature (1)..( 3000): cDNA_ID_1809713_gDNA_ID_1621173_Annot_ID_57262 3000 nt of promoter + ATG
gtaagctcatggatggctaaaattcaatgacatttcaaaataatatcttggattcagaaacaattaattatatatattcaactcatgacatatataattgagtcagagtgatctttgcatattgataaagatgattatattatttgaaacattctgttgataataaatggccaccttgcccaaaaaaaaaaaagagagtaaaatatgaaacagccatcattacaaattagattaaaacaaaattaaagttgggaaaaattcaaggtggctaatacatataatctagattgtttaaccatcttcggtcggaaaaagtcagatgtgaaactccaacctcaagtatattaattacaaattgaatgatttacgtttgtcctcgatttttatttttcttacgactccttccaattagtctcgccttctatccccatattatataaccacttatttcatcgtaattacatctcaccattaaaaacttcaacataaaattttaccaccatcaacaatagaatagacggatcataattaataacttatggatgatgatccaatccatgataaacacgaacatggcaatatataactctatgtctctatctacaattactacgtacattgtcaggatctccgacaactctataaataagacttactgtaatcagtagtatattccatactaattaagtttcatacataaccatatgagaatgcaaatcatcatgttagaatttcactaatcacgtcaattaatatggcgtgtagctatgaaattattacacttaatcaattggcagatgttaatgataaattgtggtacagatgttaatttttccttgaataaaccttctaaaagttcatattctaaatttcaattaaattatggagaaatgtttttatatagaaactgtcgaatattaccttaggcccctagaaatgtaggaacggcactacatgtaccatgtcaataagatgcatccacaaatgagtaagtaaaaaaaaaaattaagtgaaagattatacacatttttaattagttttattttaaataatattttttctagaagagcctttgcttatatcatcgaaatttccaaaaataattagaagaatgcataagaaggaaaagaaaaagagaaagaacaaaagttgtaatttcttcttcacacgcttttgataaagtggagaaatttgttttcaagcttttgttttatgcccatatattcatcgcgtattcgtgtcagtgcctctattgttttcaagcacattaacaactacatgctccattaattttaatatcgtcaagcatcatatctactacttggacgtgtaatttataagtttctattcgtttgaaagttgaaattaaaaggtggaaaacaaattgaggttcttttttgaagagagtttcctttaaacagtttgttatatataaatctaaaatattagaacttttacaaaacctcatatattatataatttatgtgaatgttgatggttactatattaaatatgaggtttacaatatattttatgtatataatataatgattttaatctgatcatttacgactgaaatcgcaaactctcagaaggaaataatttaaacgttataaagcggtttagctgatttgtgtcataaccaaattaaacaagttctcttattacgcaacttaaagaggcgtgaaagtaatgtctttgctgaatttacctataaaagcaaagcaagtaacacattgtactcttacttttaatcctagtttcactgctcattcgtgtctttcttctatcaaggttactttttttagttgattctagctagctctaatctttgtttcttgcataatgcatgggtctttttgtcttgatcttaaaattttgcttctgcaactacattactcggctcttttgttgtcaatttctgtcaggattttgatttattgacaaagaatctttaaatcaaacatatttacttaatttttgttgatctgaaaagagttagaccacatttttctgatgacatttggaataatgtctgaaatcttcaaaagatgtttggtgatcttcaaagtttcgtacaatgctttactcactttaagtctcctctttggtctcgattaaatattgtctcatttttttttataattttgtgtttgatcccatgttttttaatgatgattatatatatactctggtcattctagctagggttaacccttatttttaagtttcttgaaactgtattaactaaatcttgtttcacttttgcataaattgtctctacaaggtctttctctggttaaatttggtgattatggacatggaaacatcttggagatttctcagaagtgtttgcttactttcatttatccttgggtctttttctgtctaccaaaccctttgtcttgttgacgctcaagaagacgccattgtaacactgcaagtagatgcttctaacgtgacacggcgaccgattcccgaaactctatttgggatcttctttgaggttttttcacaacttcatgacttaattataggatatttctcacccaaattctctctaagcctttattcacattgattaaagaaataatggtgactttgtgaaagtcacactttaagcatgctgcatgcatgagctaaatagaaactattttaatgtaactttactagtcatgatgtttaatgttttaatttagctctaataaaatttatgaattctgatgaaattaattacaggaaataaatcatgctggagcaggtggactatgggctgaacttgttagcaatagaggtttttgtgattttatcttggagttttctataaagcttttcattaaaaagaatggtgaataaaaatctttggttataggatttgaagctggtggacaaatcattccttccaatatctggccttggtccattattggagatgaatcatccatttatgttgttacagaccgttcttcgtgttttgagcgtaacaagattgctcttaga

SEQ ID NO: 7901 - DNA, 3000 bp, Unknown
  misc_feature (1)..( 3000): cDNA_ID_1809710_gDNA_ID_1621173_Annot_ID_57263 3000 nt of promoter + ATG
ctaatgaagaagctttcaacattttcttggttataggcttttgttagcgaatacgctgtaaacaaagcagatgctaaaaatggcaaccttttggccgctcttggtgaagcagctttcctccttggtttggaaaagaacaggttttttttttctcaaacctctatcttcttctttggttttgaaaagaaaagttaaaacactcactgtcatgtttttgttgcagtgacattgtagaaatggttagctatgcacctctctttgtcaacacaaacgatagaaggtatctctcactttagtttcaacggtttttatcggtatatcttgaatgcggtaatcagaaacaagcccgttgcttttgttttgtttttcaggtggatccctgatgcaatagtttttaactcgtctcatctatatggaactcctagctattgggtccaacacttcttcaccgagtcaagcggagcaactcttctcaattctacacttaagggaaagacttcttctgttgaagcatctgccatctctttccaaaccaatggcaaagattacatacagatcaaggtttgcttatctcccatacgcacaaaacaaatgtctagaaccaaatgaatgttctgaccaaatatgaatacacaggctgtaaactttggagaacaatcagtaaatctaaaggtagcagtgacaggattgatggcaaaattttatggatccaaaaagaaagtacttacatctgccagtgtgatggatgagaactctttttcaaacccaaatatggtaaaacatatgaagaatcaatcatacaagagttagggcttagtattgttctgaatcttgaaaacgttgctaagttgttttctctgttcttttctgtagattgtgccacaagaaagtttgctggagatgactgagcaggaagaccttatgtttgttctcccgccgcactcgttctcttccttcgatttgttgacagaatctgaaaatgtcatcaagatgccaatatctgattcatacaagaaaacttcaacaatgtgaagagaaacatcatcttggagactttcatgtcttttgtctttactcttcagtggttattaaacacataaacctatatgttcgtgaataataccaaagttagttgattataatcacgttatgcccttagattacttgatatgcaagattactcttccttggtaaaaaaaaaacaatggtaacacattagaccctaaacagttcagtcaaaggaacttacattgtgtcgtcaaaatgcagctaaaaatagcccaaagtttaattctttattgtttaaaatccttatctaacaaacattgcttctcacagtttcttgtttttttcttttcttcaaactataattagaaagacatcgagaacatatcttaatacttgagaaactaaaatcccctaaattccagcaatttatctgtcctttcaaagcaattttaagattaagagaaccataaaattaaattccattactctcacacaatttttgattatattataacattttgtatgttggagcaagatggctcccttcatcgccttattcaccggcctttgtggcttcaagaaaaacgctcggccattgggaacgattgagacgatgtatcagtcatctcctcgggagaccaaagaaagagaacaaacaaataatgacttgcagatcacgaaaagtgatgacttgtggaacaaggaaagcgatgatcgagatactaatgcatttaatgacgatagtaatgaagcggactctgagcttccgttgcctccaggaagaaaaggaacaatacgtggaacatattcgtgtaacaacatggtgttaagaagatccttgtctactaagaagaaactgagtgcgagcctaacgatccaaataccgagatcattgtccatggtcctcaaacgtgacaaggaggaggataaatctgtgaggaagaagaaactgaacgcagataattcgattctggtactcccaattatacttggagagagatgtagggttcttgatgcggaagaaggagatgaagatcaaagccaaagaatggcagagaacagaatatatcgtcctagatccatgagttcgatctcgatttcgagaaccaagtcgaacatcgatatgaatgctattcccgtagaagtaacatcagaagaacaaaaaatctgatattatgatgtctaaaatgaactagcttcatggtgattaggggttaattacttaattgttaaatctcatgaatctgagtgacatcatcgtgaaatatttcgatggagagtgatatcaccaatttagtttgaaggatcatgataaagaaaagtactcaatgacttggaagcttttttgaaacaagtagagttgtaatataaataccggttcacaaaaatgtaaacgaattgatttggtttcatatatagacatatagctaaagtgcatttggctaaagaatttcactattagacattgtttcaaatcattaaaattcacaagccaacatatttgtctttttttaatacatgtaaaatttattcgaaaaaacgtttttacatcaagtgcaacatttggtaaataaattgcgtacaaatttccaagttttcatggatctatcttctatctcattgttaacgaatagaggagatccagtttcagacttgtttgtcgagttatcgaagcaactgtacgtgctggtggtattggtgtctctccaaattattaaactctctaagatgcattcattgtaatttttattttttttctgatgaagataattttatattcatccaaaaaaaactatctaatttgggtaaaaattgagaatgacttaaggattatttagaaaataactcaaaatgtatcaaatagggttttggaaattttccaaaccgaacgaactaatcataaacaatgctgtttctgtttttcaattcaaatttggataaaccaaacaaaaaccggttcatgttcttataatttcggtttttgattccggt

SEQ ID NO: 7902 - DNA, 3000 bp, Unknown
  misc_feature (1)..( 3000): cDNA_ID_1809699_gDNA_ID_1621173_Annot_ID_57266 3000 nt of promoter + ATG
ttgaacgactagaaaagaaaaagaaggtgagtgagcaaagaaaacaaataagacaagccattgtgctatgatacaaaaaatgtggaaaagaattttgttatttatcgttttgtaaattcataaccacgatttaatttagccatctctaccgtcaaattgatacaatgaatatatctattagttatatgtgagtaacataataaacttattttggtatgtatgaaaacgtgaaaaacttgattaatgtggtgaataatttaaaaaaaaaaaggtgtatgataacgttctaaacttttcaacgtatcaaacctagctatgtgataacaatatcaacgaggatgatgacgaattctggtcaaactttcagaaacagcacattttatttttcaactttttgggatttattctctgttctatctccaaatatagatgaaaatagattctagtacttctaaatttagaagccacatatgtaacggtctaattgccagttaatgcacattatatatcggtcttacgcgtaagcaccaagactcgacgaaatcaagaactaagaaaacattgcgatcatttgatcgaaatgggaagagacctcggctggtgcttcttcgtggcgacggttttgttagcagcggtgttgttacccgcaccaaccatagcgggtcgactagagctaaagaatgaaatctcgggggtcgctagtgtccgtaaagcgaagctagccgtgcggtgctggtcaaacgaggatgacctcgggtggaatatgctaaagccgaagcaatcgcggatatggaagttcacgacaatgaacatgtggccctttcagaaaaccgagttccgttgccagtttcgtagcgggtttggaaccacgaacgaagacgtggtgacagtgttttctgtcaaggacgggtttcgaaagcaatgcggggtgggaggggacgagtgcttttgggtagcgaagagagatgggttctatctaagaaggattgtaaaagatggaggaggggatagtcgcaagaaatatgttgatgttctcaaaagcaaatgggtttggaaatggtgaaatcttcaatttaattctttttatccaacaatctttaattttattttttttgtcaataacatgcaatttatgagtcttcgttacaaccactgatatacttattcattatcttcacccctttgtattagactcacacgacgcatccttgaatattcatggggttataaatacacaaaagtataaaaagtatgtagtaatattattatttcaaatcacaagaaattcctttatccgctttagttttaataagctgaacgtccaagcctttggtccaaattctccaaattctttgttttcttagttagaaaatatccaatcaagaagatgaaacttgtgtattaatcaaattcatagtggtaggttaaaatgttgaatcacggccaccactattcgtgacttcatgtcgcattttggtccgtggactttactcttgtccgagacgaagttataaaataactagttcactccaaaattttagtactaagaatttgaatgggtaccgcggtcgggatggacaaatccatcagcaattgagccgctttatttttaaagtaaacaataaatcaccacggaccaactctatttgtatgtaaaacagatgtgcttgtagagaaagagaagtctgagacaagaggaaagataaatttatatgattaaaatacattcatcctcttaatctagtttactacattagtttaataatattacttggttaaagttaataatactattgaaaaaacagatttttttttgtttatctaatatgatttgaattttaaaaatcggaaacgaattttttaagaaatgaatagtggtatcaagttctatacatatcatcaaataaagatagaatagtatatatttgttcaaatagaaacgtttgttccgatgaatccaaataatcaattaaatactttttgatggaaggatactaaatcctaagataatatatagggaacccaaggcttttaatataaaacactgatcaaatcacttaacatccttaatcaaaacaaacaattcattttaaaacgtatatagtacaagatatacgtaaatagtatattcacaaaatgtaatagtatctctcaaaattttctcaaaatcaaaatagatttattggttcccgatatagttctgatatctcactccaacatttatggattggcatttcgtcgccacacttcatctatccaaatccaaattagagaagaagtaacatccagttgttaaataaggaacccaataaaaacaacaaacgaaaaccccaacgaaatcggaggaagaaaatataatcatgtctctgtaaattaaaaccccaacgaaatcggagtaaaaaaatatgatcatgtctctgtaaactaaaaccccaacggaatcagagtgagtcctacacgacgtgtcggcaatttactcgactatctctcctcgagactttacacggcctgccacaaaaaataagtcaaaaacttaaaatttcgtgacattagcttttctggacaaaaactccaattcatatttttatagcaacaaagagaagaagatgacttaagcaatatgagataatatctgtctttattacataaaatatagataatatctcttttttatgtgttagtttcttaatttataacttttttttggttatagagtcaaatttcccatttaacttttttgtgccaagagaaagtcagtgaaacgcgcttgttccctgcgttttgaaattagtcgtcttcgtcgctaacaaaaatctctgccaacaaaaaaaatatctcaccgcttcagaccaaaaactaatgacacatacccgagtcatctcgacctggaccgagttaactcgcgacttagctatttacttgctcttcacgtttttcgcaatcaaagtcttcaaatttctcttctcctgtaatcgaacctctgaaatatcatcgttttcg

SEQ ID NO: 7903 - DNA, 3000 bp, Unknown
  misc_feature (1)..( 3000): cDNA_ID_1809695_gDNA_ID_1621173_Annot_ID_57267 3000 nt of promoter + ATG
caagtatcacacaaactaacaatgttcattcatagactaagattgtgtgactataaaacttatgaaaaacaacttacttaccattttcataagattcaaaaccttttaaccaattgcgactgcatattaatgcttaaaccgttccagacttttgagtattgccttctcttatttggtttcgatgactttccattgtcctcatcatcatcaacatcatcagctccattgtccccatagtcatcttcttcatcatcatcatcttcgtcttcatcactaatctcaaacactttttttggttttttagatgcttcagcttcagacttttttcttctctctgttttagaggcagaagcttcatcacccttgcctcttctttgggtttttgaagcttctggttcacacacttttttcctctgcgtcataggtgttcctgtttcatctctcacttttcttttcagctctttagatcctcctgcttcatcattagcttgttgttgttcatatctagcttgttccaactcaatgactctccgagattccacatctaatgatctcaaatacccagcatcaacagaatccaacggatcctatcattaacaaaatacaaaaactagtcaagactagcaaatcaatcaaacaaaagtaaaacatctaattgtttatgtgtagtcacaaataacataccattacaagtgttagatgctctgttttgatctgaaatctgaatctaaaaagcttcaatgatcgtaaaaaagaaacttgaagagatagagaatgacttttcagtttccttgttaatcaattgagcgtgaactgctacttctagggtttgaactgcacaagaaactctaatagagagaaaaagtttgaaaggctctatgagaaatgaagggttttaaaagagttggtttttctttcgtgggctacccgcatacccgcagtccgcaacgggcttgtccactagaatccgcagtccgtaatgggcctgcccgcgaggcccgctaatttgtggacaaaaaaatcaacgtccaagctcgctccgccatggactacttggacaaagcccgcgggctagcggcccgcttgacaactctaagaataatgaataaaaaaaactcaaatgattccatttaagttgataatattcttattcaaccttgatctttatgatgaattcacccttattgttgattccctcatgtttggtaaatctactccaaatgatcaatacaataaagaagacatatccaacctaaaattcttggccaataacaaacagtttgtaacgattttagatgtttcaattacgataattcatggtgtggtccccttaatcatgtttaaaatatctaaacaaattattggtaaacgaatttccggtattgtggatataacccgaccggttgagatctggcatgtctcataacatggtcaaattatatttttttcgtatcaaattattttgactagtcaggtggccgctgttcggccacgtagcccaatcccataatcagaaaacaaagccgtgttgtgtgtgtgttttccatcgacatctcttgttaaaccaaatctcacaattattcctaaaaaaaagcttttttcctttcattttaaaatcttttatacaagtgtgtcaatttgatgatgaatctttttttttttttttttttgttttttttggagtttctcggccaaaacccgtaattcccccagacccgaaaccatagcatgtaatattagtttcgttccaagcgtcactcgaaccagagacctctaagtttcgtctaaggtttttaccaattgaactaacgacacttggtagatgatgaatatccaaattagctcataatatcttacattttataattaatgcaaataacactaaaacgaatatcatcaagagttgacattatacatgttcagatcctctagcacaaataacaatgccaccttcggaagatgtttaatcacgagtgatcgactctagagttcgactctatctcccatacataaaactaaaaaaaagttgacactatacttagttaaatctagtgttagttccttttaaatgttatgtttttattttatatatcaatgtctatgataaaatttacgaatgacttatatcacttcaaacttttagatttattttttggattgaggaacttttacaacttttttttaaccacacatttattaaatttgtacaattttaaatacacagatttgtaataatttacatttttcggaaatattgactttaattagtgaacgaaaacaaagtattataatttgtacagctttcatttctaccaatcacaaattttttatcaaaaacgttgcacaaaaatttactctcagctttattgtataactttctcgtacaacttttttttacagttttgcactattctgaaaagcttaccgctccagctaacagataaaatttttatacagttttatgttaccaatcggaaccattagttttggttttgtatctaaacttagtttttttaagttttcagttccgtaagattttcaaattttattttatttggactgacaaaggtattaattctataaattgacaaaaatgtttttatttaatttattatatacataaaaacacagaataggtattggtaatagaccggttcgatttggttctattcgaagaataaaataaccaaccactttgttaacaaaacgcagccgtattaactgtttcgggacccaataaaggaaacgtataaaactttgactccaaaaaaaaaaaaaaaacacacgcctaacctgcttcaatggaaaagtcatacatttacctaaccagaccttcttcgcatcttcgtcttcttccttcgtgatctctcaaattctctcccttttaaagtcctaaatcaaaaccctaaacccataaatccaatccctccattcgaattcttcattctctctctctctctctctcacaattactgatcggttctgaaatttgtagctatg

SEQ ID NO: 7904 - DNA, 3000 bp, Unknown
  misc_feature (1)..( 3000): cDNA_ID_1809691_gDNA_ID_1621173_Annot_ID_57268 3000 nt of promoter + ATG
tttcaaatttgtagatcgtcgatccaatccgattattcaggtttgacttgttgttaatttcctaatatgtaaaacaaaatattaatgaaaaaactaatgacaaaatcaataacaaattatgttttatggtgtatctcttgatttctatgctcgtgaactcttaaaaagatcttcttatcaagtaaagctttagtcctctctttatagatatttgtgttcttgtaggccttttgcattatttcgtcaaggtaattcaactggacgcaccaaccgcctttttgaaacggattttatgtcatcgatcaataattttgtagctcaacaagttttgtgttcaatttcaaccggaaaatggcaagcctttccatagacaagattgaaaggtgcgtagaattgtatacatatgagacatactacaagaatggaaaatccactatccatgagtttttagaatatgtagcttttagattatatgattagttatatgattttgatttggaaattttggttcaggttcagtcggtttggttctttgaacaagaaatcggtatagaacagaaatatttttgagtttttttttttcaattctaaccaaaaatattttgggtattgtcaagttatttggggtattttggatatttttgggtttttcggctatgtttgggtattttggatattttttgtatatttttgcttcagttatttgagtttctttttgtatttgaattttttcggatttttcattttggttctttggatagtttttagctattgatctaaaaataactaatattttatattattgtatttatgatattttagatatctattcagttctcggttcaatataagtttggttatggtttttaagtttaatatccattctgttagtatcttattttcaattcggtttgtgttcctctgttaaatttggtttcagttcattatatgcgaatcagtttttcttttcttttttttgctgaggactatatgtagttttagattgttgtagtattagttgtgtgttttttaattcattttgcaaaattttcataggctcatagtgttcagaaggtcgatcatgagtcgtgataaaggaattgaaatttcaatttattaagtttattgtaaatattaaggttcatatatttccatttataatgtcattgatatgattccaatttttttacttcaaaccataatgctgcacaaattatttggaaattagcagaggtttttgttttgttttgtttaaaaggataaataattatctaattttgatctaatttaaaattagcaaaaataaattgggatgaaatcagtagaaatgtttttctactattttgttcaccagtcacacccaatttggattttatttcaaatttatttacttgtttctgaaatagttatcaaatattttttttatcaacaaaaaataatttttagttgtgacaaccaatgacattaacatatatgattcaacataaaaatgaagaaaaccagagaaagaataatcttaactttaaaatattaataaaatttctaaaatttaaatctaaaactttaccttgggcagtttgttttcaaatggaattaaaacgcaaaagcaatgccacataatttaggcatttcgagaagaaattcatctgaggaataattgtatcgatgtcttgtctcgaaacatttacataggttttggcgaatttgtgttgttgtcgcttgacggtccacatacttaaaaccttcacaacatgattgattaatagattgtggttgtaacgtgtggtaggcacgggtccaggtaatctaatgcttctttgcatgttatgctagatactggtttgacattataatgtgtttgagataaatgttttttataatgtgttacggatcgttgagataaatgatcgttattaagttagagacgttacaactcgactattcaatgatattattaagagagctaggctataaaggagaatgatgttgatcaagaaaatggacaacttttgacagcttagcatcaacaacatattagaccattcatttgtaatttcagttcacatctcatcaagaaaataagtactgtctctttgattcatatttcaatctctttctttgtccattctagttcggttttgtatctaataaacaaaagagttcactccaaaaaaaaaaaatcagggaattttaatagccgagatttaaccgttttgacattgttgtttttgaataaatcagaggtgacaaactagggtttcaataacgacttctaaaatgctagctgtgataaaagatgagttctatacttttattcttgctaggtcatgtgtactttatcacaaaaaatacttgttttgtttttttatgttaagtgggaagtcgatagatcgagttttttggggtcaaaaatcggatttatatcgaaatccggcaccaacaacaaaccttttgcttctatatacagtatagttctcttacaattcacaaatcctgctagctcagcgggggttctcctcaaacaaattgaccctataattcaaataacttcaaagttcctcaataattcttatgtaagatatttaagtatttaattaataaattattctgttgaaaaaacgggatatgatctataagtagaatgccttgtcaaagtagtgcaaggatcagaacttgccctttcaagcaaaacacggacaacataaatgtgtatacattattacatagcatatatgtcaacgtatatacatattatcacataataaattgatttcattgacacttggaattcaagttggtgccacgtaaacagtaataatgtttatatatggaaagacagctttataaaagatatctaagcagaggcttttcatattcaatgtatattataagatctgcgatccgattaacataaggttttatttttgtttataagaattattcttcgaagtcattctctttggtcactttggtgagaatctgatcggaaagagagattat

SEQ ID NO: 7905 - DNA, 3000 bp, Unknown
  misc_feature (1)..( 3000): cDNA_ID_1843238_gDNA_ID_1621173_Annot_ID_57269 3000 nt of promoter + ATG
gtaacatgcgacaatgcgacatgcggatttgattttggtagttagataacaatatcactagacttatttcttatctcacttttgaggtaggaccaaagacacattaatgttgacaatctcaaacaagaaagattcaagcttaattgacatagataattaagatggctcattgagctttattgaacaagaaatgtaaaagaggaaattgtatttagattgtcaccaagaacactaaaactttagatttgatttcaaaaaaatggaaagaggagagttgcaaggttgtcttacattgatgttcttaagacaaattaatatgtatctctacttggtaaaaccctagtaacatgggttaatggacttctcatcttgggcttcatttggatccaccaattattaacaaggagaagtgttataggaacatgagaaagcaagaaggaagctaagatcatcttttcatatgcccaaaattccctagttagtcttgtttagttcatattttcttgtacctaattgctttatttcatgtaagcaatatcgcatgtacgtatacgatgtatttttatataaccctagttcttaaatatttgtaatgcttattaaaaatcacaggttttcatcttaaaacaaattggcaataagtaaaaaaatttaatgttgaatttatcaaacttccaatgtgggacaatttccctatctaataagtctttgagaatttgtgagaaacggtctaacaagaacaatccaaacttaatatattggaaataccataacaagacggatcacttatacgaaccgcagaggtgagaaacccctttatttggaaaagtgtctagtgggtcaatctggctctgataccatattagaaattataggctttcaactcaaaaccaattgacaatgagaggagaatattagtgtagaatttactacaagcattatataatattaatatatatcaaattacaactttaaaatataaagtatcatattttgttttattcctaatatgatctaatttaggaaataaaaactctaatacatgtatagtacgtacactgatatgtgccctcttgggaggaaaattgcggaaccgcatttttgcgggaaaaatattgactcacgtttttgtggaaactatacggaatcacatatttttgcgagaaaaattcattctcttatttttagctggaaattatgaaccgtattgttagcaaagaactatagaattatgttttgacgctaaaaagcgaactcgcattttttgcggaaaaatggtgagatcgtgtatttgacagaaattttgattttgagagagaatgagagatcgatgatgaaagatgtgagaaatttgtgtttgcttctgtttactaaaattggtttaaacattttattcagttatatttggtttacacatttggttattttgtcaatttggttatgggtaatccactaatctatttcaaccaattattccaacccaaatcattacactcattaatccattgattcattaattatcaaatttccaacaactcattagatccatgagttggattggtttgggttgagttgaaaaattaacttcaattcattttgacatacctataatatggtatatcatacgaaccacctaaaatatgtgatgcatgcacttattaaattgcattttacaccatgtttttgtttaagtacgtcaacattgaattagcacaatgtatacgtacaaaaaagactactttcatggtaatttaatattctaactcaacaagatatcatagaatgcaataagaagttgtcattgcaatgaggtactatcaaaattctaaaagtctcaattgtgtaattttccctaagaaatagggaaaataccatttaaatatcaaacatttacaaaatgctaaacaatgttcaaattttctttctatacttcttaagttttaaatacgaaatttctttcacagtaccaaattaaaactttgttaatatcatcggatatttctaaaaaaggaaataatttacatgatcctcaatccccgaaaaaaagtatggaagataacagttctgcatatgataaagcacctccaattttaataacgattaaaaaaaagcaaaagggtggttggtttatatttattgtcttttggatagagagtctctagtttcatgtgataaagtatcgatcgcccaaaatccattcatacgagatatgctgtgctgtgaggtgtgagcggtaaggctcgtgatgaatggcaaacgattcatgtaactattttcttttattatcttaacaaagtcgttgttactctaaatttaacacttgatcatatttctaatatgtatattctgaataatggcatggcgtcaattctaacttatgagactttaaacttataatgttcactttctcggtagcaaaaacgcttctctttgccccttaagtagaaggacaagaaatctattttttgtttcattgctcccgtttcctcacatctgcacttgctaagccaaccttggcttacttatgaccacctcgagaagaacctatttgaaaacagtctaatgccacaaaccaatcttgatgcatggacttctagttttgcgagaacgtttaatacatattatactgtatgactgttgaccaatcaattgaaaatgtgacttagtttgtgctgcaagtcgtgttccgtatgaggataacatgagataacgatagtaattaacagttcacaactgagtaaaagaatgcaacacattaaaatgatcaattgaaaagcaaagcagtccgaaaagtgtaaacaaacatttaaaaataaaaaattgttacattcaggtagagtaagcaatcccacgggattcatgtcaccttaacctcccaaaatatcatgacgctaagacaaggtaatgtatacgtcactcttctctaacaaaggctatataaaccctagattggcactaggcttccatgcaacacaaaaacatacacactactaataaacc

SEQ ID NO: 7906 - DNA, 3000 bp, Unknown
  misc_feature (1)..( 3000): cDNA_ID_1809685_gDNA_ID_1621173_Annot_ID_57271 3000 nt of promoter + ATG
tttccacatggttacgtttacgtggacaagttatcatggagacaaactagcataatttttatcttctctgtcttccatgttttttttttttcatcatttttattttctttttcaaaatcatcaatcatggtggttctctataattcttacaaatcatagaaattctgagattatctcaaaattctctatcataacttaaaaacgaagaatatattaagaatcaacaacagaacattgctgctacaattgatcttcttacacgctttatatacttaaacttgagtacttggacactcatcaatggacaactatgcttcagatgtgagttactagatgaccacttggactagagtgcttggacacttatcaatggacaactatgcttcaaatgtgagttaatagatgaccatttggacttgaatgcttggacactcatcaatggacaactatgcctcagatgaagttacatcgacaatggcctttttgctgctactcgcgttctcaacatcacgaaccgtttcaagcccagattgcttagaaggtaactgatcatggttaacatcctcacttttcattgtaatcgatgacagagattccttaatcaaggagagaaataaatggaaccaaatcaaataattgttgagagacagggaagatgatgataaatcatatgaaattgggtttttagttttgatttggaatattgagattcccgtaaaaaattgattttgattttggaaagagagagaaataaagacgatggagaaaagagttgagagagaaaatgaggagaaagcgttgtggttcagagggcaatttaggaattttgatttggtaaagtgccttctcctttcaaagtgcctatttgtggctaaagtttcaaaatagtgcctatacgtgtaatattctcaaaaaattatgaactccttttggttctgttttatccgcaaaattttcttttttttttgcctctttaacctataaattttccttttatttttgtcaacaaaatattctctaaacatttttagccatagatatgtgtacggtcgcattattaaacaataacaactgaacgtattcgaaccaaaatttttaaaataatcgaatggttagtaaactcccttatccaaactagccaaaactgaaccaaactgaaccgatgcttaaactattaattgacatatccaaaaccctagaaaatacccaaaaataatatccaaactataattttaaactcaaaatactaattatttttagaatcaaaacaatcaagtactttaattaatcaacatattcaaatcttgttaatatttatcaaagtcaaatactctattacaaaactgaaccaaaatttaatattctttataaatttttccttttttgtattttctttccgtatttttttggttaatttcttttagtttcggttaattttggttattttgataaaacctaaccaaatcgaaaagtaaccgaacagaaccaaatcgaaattcctaaaatatctgaatggttattatattaacatatccgaactaaccgatactaaacgcaaacgaaccaaaaccgactggttaatcgaatgccatgcctaccctgacaaaacaacaagattgaaaccctatatatttttttagttaatatatataagaaataaacctatattttcttaatgtatttaaatatgaataaccaataaaaaaatgtaatggtaacgaaaatatgactgttttcagatgaaaagcacctccaattattttgaaacgattaaaaagtgcaaaaaaagtttttccttttcttttggaggacgagtctctggtttcatgtgataaaagcatcgtcgagcggccacaatccataggatatgtgatgtcagcggtgaggttcgtgatgaatttacttgtttttcttaacgaacgcattgtaactctaaattaaacagtcgaaaatatatctataaacgttttcaataactctctggtgttaattcaaaactctatgctcaacattttttttttttggataactaggagataatccggctttttaccatctcacttcatcaagatgagtataaccatcaaatggccaattcaccggattttctaataagcgtaaaacatacgactatttcgactaaccaaatgaactgtacgtccaatttaattaagaggctttgatgagcataatctactacaaggaatctttgcccaaaacacaaaaaaaaacaaacaaaatctactacaaggaatcttgatccatatccttctagttttgcgcaaacctgcgatgcatgccatgctaatccccaatccaacccaaattgacgcggcggcataggcacaagaagagattaggggtggcatttgatcccataaaattattaaaatttcgcgtacatttttgtcaaaaaaaaaaaaaagtggtgtaaattcaattgaccagaaaattagcaaaatttaccttttcccaccaataaatatttgtttgaaaaggtaaatattcatatttatttatttgtatattttaaccatgatgaatgtttttattattattcccgtattccggcactgcttggcatccgtgtggtgttgatttggtagatgtcacacaacccatttctctttaccaaataaactctaaaaatagaaataatcaacggtttttttttctaatttatatatcaagagtatattttaattttatttttaatcaacagttcacagttgagagcttgagataaagaaattttcattatatcaaatataatctaacccattctcaacgtgggaaaaagaattagtatcggtgacactgagatagagtacgtgtacgtgaacccttgaacccacgggattcatgtcacctaaacctccggaaaataataagcacaatgtaatgcataggtcagtactcttctttacaaaggctatataaaccctagattggcacaaggcttccatgcaacacaacacatacatctacatattaaccatg

SEQ ID NO: 7907 - DNA, 3000 bp, Unknown
  misc_feature (1)..( 3000): cDNA_ID_1809681_gDNA_ID_1621173_Annot_ID_57272 3000 nt of promoter + ATG
agtatatatgcaggttctaaaacatgtgccaaaggaaactattgcttcatatttttgatttataacgccaactttgaggcattaaccaaaacacatacgataaaagcaaaaaaaacgaatctaaggactgcctaaatgtgtttaactccgcttaataacataaacacctaactccaatctttacggtctatcaaagcatagacaactacctagactacttttaaaacattggatatgtgtataaggcaaaaatgttaccaagaacatgctcacggtgatgaaatgttgtttttgcgaggtagtcgaaacgggttctattgctgcacccaatgcaaacttagtagttgtttgcacaaaacctgcgcataagaggttgacgcaccccgttttagagtatccatctttctgcaaatccaaatagaaagagaagttatgaactcatggaagagatttaagatgttataaagtcattagtgatttagtgatgttattacttacagtccaatatgtgaaaagacgtgtgcgggagtctccgaaaacacttggattcacctgaaataggttgatagcgatcagtttaaaatttacctcaaatacgagatatagtacttcgatggaagtaaaaatataccgcccaaccagcttctatgctttcaaaagtatctgagaggccaccaagcagccatatctgagcagagctgtagtcgctagcctgaaccctcggagggttccatacatttatatcggattgagctccaataaaattataccctaaggccataaggacagcctcctatatcattaacaaacaataagtgttttctagttaaccatatataggttttagtctaacgatttagcttttgaatggatgtgttgtttttttggttctcttttcatttttattagcaaagagaaggaaaattataaactatgaatgtagatacgaataacaaaataaattatgtttaacgtaccgatcgaagctttgggcgggcatgagttatttttgcagctgttatattgaaactacccttgtgttgaagagccttgtcgagaaagctatatctgtgaggagttttcctcccaaaatgagacggtgaagaggctctgtttgtcttctctactaactctacgtaccggtattgtccctttgggacaatttccggatttagaccaaatttgagacgttatttgttccgaagaaccgttgtttggaatagtagttttctttgtaccaaagtccacgctcggtttcatctgcatgtataaatgtagattaggtaaagatagaaactttcctaggtccaaagcaaaatataaccaaattttgtatatacaaaatctttgatttatatgatcgttatatagtagaatttgtttacctgaatcttgtggttccttaaagcgggatgatcaaaggcatgttgtttgtagatatctatacaatctattatatctccatcttcgctctacaaatcgatttgggagcttagaaaccaaaaaatatacagaaaatgtcatatcttcgcatttagatttagtccataccttgatggtcttcaaggaaggcttattaagagacttcagtttcatatcgatatctaaagaacctttcccataggcttcattgtaaaaaccacacagaatcgcaaatattaagaacaatctcattgcggaattttgttgtgtgtgtttactaggttgaaggaatagaattaggatataggctttgaatcttgaaccttcttcctacttatagagtttacaaaacctaatggtttttcttcttctagttaatatgatactatcacgcataaatattgaaaaaacggatttgtaaaccttttggtcaattcttcgtgctataaaactcagcaagcttaacgtactaaatatgaatgctccggtaattactactccgattctagatttttggtttgcttttaagtcggtgcaaaacgtaattaagttaatcctttgactatctttttaacgcctaaactatctatccttgcctaaaattttatttgctaatactttcttttgataaagccataaaaggattcatctttcacagtaaaaaaaattggaaattaaaaataaacaacaccttttctaattggtttatctatttataaacttattgattaattgtgatttatgcgtaaattgcccattataattgatctaactaaatttaagagtggaaaaaatgaaaacatgttcacacttcacaagcaagaagtaaggaagataatttaaggaagaaacattgtgagtttgaataggcaaaatttgggataagttaaaatatttaataatggttaaaccaatgtttttatttagaaaagatgcaaaaaccttaaacatcaaacattttaaagccaaagcattttaattgttatttacttaaacacaaatcaacaaataataaaacaaactgcatatataaatggctaaaaacgttgaaaatgataaaatttggatgaaaaatgagaacatcatttagttttgaaaaaaaaaaaaaaaaatctttaagatatcatttgttttgaaacagaatgagtaatagaaatatagaattatcttctattgtcgaggcgatagaattgtggtattaccatccccattacatatatattagcttaagaaaattacaaaacttatagcacacaacaaataaacttataaaataattaagagtttgcatattgatatttcttatgttaactaataattaaaaaatatgaattcaaatctctcttcttttttttaaagaacagaaaggaagaagctaaatattatgaaagtcaacccttaatacaggcttttaagttttaacaaaaatgttaggaatcaagtggaccgaactccgaaccaaaccttcttaagaaaccaaacactctagttgccttaaaataggacggctttggatacctaaccttctctgacttatgaagtcttcactttttgaaattttcaaactttctgcaaatg

SEQ ID NO: 7908 - DNA, 3000 bp, Unknown
  misc_feature (1)..( 3000): cDNA_ID_2108769_gDNA_ID_1621173_Annot_ID_57276 3000 nt of promoter + ATG
cgcaatggggagtggacaatgggcatcttacatctgggccgaagcttgtttccacacaaaccttaggatcaaggactattccatgcagctcaaatacccccagtttctatccgagtatgctgatgagtacaactgttattctacactgctccaccggaaaacatatatgtcagagccccacttttacttcggaggacctggccggaactctcgttgtccttaatctcatgttgattttgtcaatgttcattctcctgtttttttgttagttttatcttcggaggacctggccggaattttgtttgtcttctaatttaaactaatcagagaagatcttatattgatcataatcttttaatttttttcattactaacaaagcctaagaaagtggaaaacacaatagggagggtaaaagaaactgagccaaatcaaaaggaagtctctaaactgctaatcacaaattgcatcgagtcttgatgccgcggtggaaagtttcaacctctacatgtagaacaaagagacatgttgaaaaataaaatgtgataaaataatttttccgtgtatacataaaaaataaaataaactagtttcaacctctatataagtatatattaccgtcgacatcaatagtaataaaaaatactcaaatgaataaaaacaattctgtggataataagttccaccaaaaggaaggatcaaccataagttcatgacttttgggattatctttggtagttaatcttagtttcatagcacaaagaatgagccaaatgtacgttaaatatgcatatttttattaatttgtatatatagttttgtgtatgtttcttatcaacttaaaaaagaggaaaagtaaaatcatatatatatatatatatatatattatataattgaattatactataaggagaaggcaaattttaattgtgtctaagttactatatatatatatataattatgtacatataattaattttgtattaaattaaatatttgctaccctttatggagcttatataccaaattttgtattaaataaaaaataaataaatagtctttaacctttataaggtactgaaaacctttaattcgtataaattaatatatatgttttgtttcacaataactaaaaaaataagtaaaagtagaaacaacagatatgtaagctctataagtagtaggaaaaatgtaattaaggatccaaaataataatatttatattttatttgcaaccgaaaattttatagacaactcgcattgaaaatgttctcaacttgtttttataggaggcaatacttcttgcggtagggttcaattatattggtgctcaatcagggaattgtccgatgccattttccagtggaatttgatagaaaatttaaaattaagcatcaaaaagttgtctgatggcattcatcggagttgtcttgaatcaccatttttccgtttcatctcctaacgtctgtttttcacttaaaaagtctccaattccagtataacttcgtaaaacttgtacaaaacaaccgaaaaatacattaaaaacgaacaaaaatgtgacaaacaactcaaaacaaacactagacaaaggacataagacactaaaaacacaatataccacatacaattttggagacacccgcacaccgctcttcacctcttggactgtcagtaacattatgacatgactatagacattacattcactttcatgaaatttacaactactctttggatttgggttgcagaaagatgcatacagtaaaacagctccatcaacctcttatgctcatgtttcatgcacataagtactcaattagccataggtggaagcttagaccctgtttcgactttcgagtagctcggatatatatgcattatatcacatatcccttagcaccatattttctaatttaatttacaatatcactcattgccacaagtgtataaaaaccatagcaatagaagggtatcaaagttcaagtaaccaattaaattagaacactagaaatacattctatcatccaatctaagcaatcaagttaaatcattagaacaatattgaactaccgccgaagtaagatctcgtctaccggagatattgtcagattcttgcctccgttttgtatttgttgttttgatttgtaaaactttggctcaagtccaattcaggtattataatatttttaaaaaaagaatattgaactattaataaaatcttaacattttctgttggtccctagtacttttgatgggctctctatatcttcgcttttgtatgtttgaagcattaaggccgaattcatttaaaactcaacttctataccaaaaattttattttaaattttatgtaattaaaataaactaaccaattttttaaaaattactattttaatcacatataaaattaagttttaatttatctttctatacaaaaatatcatcattaatgaaattaactaatttattatatttttttaatcattttttcacttataaattttatctaaaactgaatcgattaatttcttatatctctaaagatatccgtatggtaacaaaattgactccaaacatttcttaagtcgatttctaaaaccgctccaaaagaccattgtgcattaaaaatactaaaaatctaaaatttaaaatattctcaataacaaacatttacgaaccactgaattttattttattttaaaaataatctataacataataattgttttatctgttttctaacacaaattattctaaatacatgattgaaatacatttctaaattggcgttttatagactatagtattttgacaactttgttttcaatattggcgtttcattattttggtgaaagattcccaacttataaaaaaaaaaaacgaatttttaattttcgtcctaatcatttatttcctaaccaaagaaaaaggcaaatcgcgacccgtctctctctctctctctctccttgaaatcgaaagatcaaaaaagcgacactgaaa

SEQ ID NO: 7909 - DNA, 3000 bp, Unknown
  misc_feature (1)..( 3000): cDNA_ID_1809665_gDNA_ID_1621173_Annot_ID_57277 3000 nt of promoter + ATG
ttaagatcactagtaagttgtaatttattattagaaaaacaaattaaaacctaggttgcctggaaattcgttttgaggtatgttttccgttttcgaaacgtttcggaaatagagactcgtcggaaacacaaaaaatgttacgaaaacacgtttttaaaaaatctatttttggaaatacgatggatccgaactagtcacacgacaaatcctttttattgactttagaaatttaataaactaaattagaaatattaagattactaaagtatataacttattttgaaagactttgagttttaagatcttttgacaaaccaaatttgatgaaactaattaaaatgagaatgaaaatgttggtctaaattaaatatttgaacttaaacattttaatctatatcttttagaattttaattaacttatttaatattaatgtcttggacttgtgttgtttaagccatttttaatataatttcatgctaatatacatatatatatatatatgtaaatatatgtatatatatttccaaaatgtttctaatctctaattttagaaaaaaccgtttctcatatccacataatcgttttctttccatgcaacataaattaaaacaatataaaaaaaacttcttattttcttttggtaaacaagacttttgggcaactggtcttcaacaaacatattccgaagcaggctaattcggagtatatgagtctggagatcctttaaactttagactatgtatgtcctctgcaaaatttactctctggtttgtgaatcacctgttttaactttgtttataagttcgttttatggtttctgtaagattttactattagctacaatacaaaagattttgtaaattagggaaatttgcatttataacctacaaaaatattataattaagtaaataacattctcaaaaaaagcaagcaatattgtttgtattttctgtaataatgccaatactatccctgtttgaaatacacgcttttcatcttctcccttccatagaaaaccaactattttctttcgccaactattaacttttgaacataggtttggctctaacaaattccagtccaccgtttatgaagcttttgattttgccaacgattaacagaggtatattgggcacaaaaacaagacagttaatttttggaaatgacatttaggttttgctcgaaattgaattagaggttttgatttacagaggcacgactttagattttgttggggtctttggtttttttaagagactttggttttggtttttgaaattcaattagtcgagattctcgctaataagcgctgaatttgatcaatctctgttctctgtttccttcatttgatttctttttttcggtctctctaatttattggcgtcgttgtttccttatcctgaaccaataaatcgattttgattttgagaaatttttgagagatactattctattttgtgaatatactatttacgtataccttgtactatatacgttttaaaatgaattgtttgttttgattaaggatgttaagtgatttgattagtgttttatattaaaagtcttgggttccctatatattatcttagggtttagtatccttccatcaaaaagtatttaattgattatttggattcatcggaataaacgtttctatttaaacaaatatatactattctatctttctatgatgatctgtatagaatttgatatcactattcatttttttaaaaaattcgtttccgttttttaaaattcaaatcatattagataaacaaaaaaaaatctgtttttacaataatattattaactttaaccaaataatattgttaaactaataaagtaaacaaaattaagaggggtgaatatatattagtcatatatatttctctttcctcctgctagtggcttctctttctctccaagcgcatccgtgggaaagagttgagtgtattttcacaactgacatgtgctatcaaataaattacatacattatagtactatatatttaataactttttcaaaaaccgtcattttttgcaattcaccctataaattaacactttataaaaactataattaaaaataaaatgaaactacatgttgatatacagagcaacacctcccaatagaggtttggtgagtaattattatataacaatagtatcaatttattagaacaatcgaatcatattctagattctttcatcaatttttttttaaaatcattctagattatagataactttgactttacttccgacttttcaaacggcacatttttcttggcaatatatttcagagaaatggcctattaattactctttgattttttataatgttcgcgtctttgaattgaacaacccaacttttagcatactagctctttaagcacacttttatttttttcacaatttggccaataatgttctagaaggaccgcatatcatatgattagtcattattggtgcttaacggagactctgttttttgccaaattgaaagttttagatttcatgctaatagataagagtgatgttttaaaacatatttgaaaccaaagttccaaactaataccattagtaaaaatcatttacttataagttataagccctcgtcatggcccattttacatggttttggattttagatcgtaaagagaatacaacaaaactgtagacaaaacgaaatcaaaatttcgaatcaaaaagttgtacttgtacagtatataagtaactaatcgtcaaatgtgtatccagttaaaatcgtcacatatgtagatacaatgacgtaatgagtacccaaacatcaaatctctatttttattacaaaaaaaaaaaacacatctcatcgatgacttcacctactcttctctataaagacttgaaaaaaacttgaaaacttcttcaaagtttgtatccatttcacattcacagtcaaactcggttgccgaagaaatttcccggcaaaacctcaacaaacaaaaattagagaatg

SEQ ID NO: 7910 - DNA, 3000 bp, Unknown
  misc_feature (1)..( 3000): cDNA_ID_1809657_gDNA_ID_1621173_Annot_ID_57279 3000 nt of promoter + ATG
agagattatagtcagaaaaactataataataagaagataacattaaacggatagattcatgtctcttttttgaaatccaaaattgggtaaaatccaaaaaccaaaatcttgccaaatgccaataagagcaaaaatccaaactttcctttctcttcactattacacaatgaaatcaacactacattttcacatcaaaatcacattccttccatggccttcttctccatgatctccattctccttggctttgttatctcctccttcatcttcatcttcttcttcaagaaacttctctccttctccagaaagaacatgtctgaagtctccactctcccctctgttccaggttttttttttttttttttccgattttgtaatctgggttttgcgattcataggtttggtgactacttctgtttcaaagtttgaaactttctttgattctagtgatttatggaactaaaaatttgatctttgagaactttaaaagttgggtttttgatgtagtggtaccagggtttcctgttattgggaacttgctgcaactaaaagagaagaaacctcacaagactttcactagatggtcagagatttatggtcctatttactctataaagatgggttcttcttctcttattgtcctcaattctactgagactgccaaagaggttagctttctaggtttgattgatatgtttggaatcgaaaaatcgttcctttttcgatcttgaacacatgactaaagccttacacaacttgatgattgctcttgtttatatgattgtagtctgaacttatgtagaaaagttgagttgatgtcttctcttatcgtttaggttactctttatgtgtttgttttcaggccatggtgacgcggttttcgtctatctcaacgaggaagttgtcaaatgcgttgacagtccttacttgtgacaaatctatggttgctactagtgattatgatgatttccacaagttggtgaaacggtgtctcttgaacggtcttttgggtgctaatgcacaggtgaattcattgttcgtttatcccgcagcttctccttggtatacataatggcaactgaatcaatcttttgtgttgtgttggttttttttgcagaaacgaaaaagacattacagagatgcactcattgaaaatgtgtcttccaagttgcatgcccatgctagggaccatccacaagaacctgtaaacttcagagctatatttgagcatgagcttttcggtgtagcattgaagcaagtgagtgtttcgcttatcctatacatcatttcttcgtcaacataaagtatgaaaatggatttttggttttgttttcataggcttttgggaaagatgtggaatccatttatgttaaagaactcggtgtgactttgtcgaaagacgagatcttcaaggttttagtacatgacatgatggaaggtgcaattgatgttgattggagagacttcttcccatacttgaaatggattccaaataaaagttttgaagcaagaatccagcaaaagcataaacgtagactcgcagtgatgaatgctctgattcaagatcgactgaagcagaatggttcagaatcggttagttttgtttgaatagtctttcatatattgcattacactgctgatctaatctctacttataaacaggatgatgattgctatctcaacttcttgatgtcggaagcgaaaacactaaccaaggagcaaattgctatcttggtttgggagacgattatcgagacagctgacactactttggttacaactgaatgggccatctatgagctcgctaagcatccaagtgtccaagatcgtctgtgcaaagaaatccaaaatgtctgcggaggagaaaagttcaaagaagagcaattgtctcaagttccttatctcaatggagtctttcatgaaacgcttaggaaatacagtcctgctcctctagttcccattcgctacgcccacgaggatacgcaaatcggaggctatcatgtccctgcaggaagtgaggtaaacctacctattactctcaagtcattcacatttgaagttcacttacaaagtctagtttcaaaatcttgatgtgtagattgcaataaacatatatggatgcaacatggataagaagcgttgggagagaccagaggactggtggccggagcggtttcttgatgatggcaaatatgaaacgtcagatcttcacaagacaatggcgtttggagcgggaaagagggtttgtgctggtgctcttcaagcatctctcatggcaggcattgctattggaagattagtgcaagaattcgagtggaagcttagagatggcgaagaagagaatgtggatacatatggcttgacctctcagaagctttatcctcttatggctattatcaatccaaggcgttcttaagacagaaatctcttctttcttttgttagtttttaaccttgtatcaacttttatttgtaacaaatgctgttttgtagtactatttatgttttactgtgttatattttactatcctctgagattgcatcatcttattgattcttataggatgctgatggaacatacctagagcaacaagataactaaaacattgattaaagcaacatattaataggattgatgattgatgacttcgagcaaaaaaaattaaacatgactttttgagtttttagatgtgaaatttggttgttttgctgtgtggatttccaagtgtctatttttttttttttttttgtgtctatgtttttgatttgtcaagatttaagttatttaacccctaacgactaagctaaccacttgatattgtcgcatgtgtacaaacgggtcaacgacgtaacgagtacccaaaattcaaatctcttaatggataactccacctgatagaaactctttaatttcaaagtttgtatacatttcatattcacagtcaaactcggttgccgaaatttcccggcaaaacctctgacaaaccaaaatcccagaatg

SEQ ID NO: 7911 - DNA, 3000 bp, Unknown
  misc_feature (1)..( 3000): cDNA_ID_1809653_gDNA_ID_1621173_Annot_ID_57280 3000 nt of promoter + ATG
tgagaccccacacggctatgaaccatgttaccatatattctaagtgggtttttaatttgataaccacctacctataactctaaattagtctattggatttttctaatgatcatcatataaatttattctctttatataatagtaatcgttgtaaataatatatgtgtgtctcccatcaatccgcatcacattcgtagaatcatacacgtatgtaaacgcatttttgacatacggaaaccatacaagtaggatctgttaggtggttattaattcaaaataaaatctcttttcattagaaaatataaagagactacttttataaaaagattgggattgtagttccttgccaaccacccatataataatactccccaacaccaaaaacacaacacaaacttagaaaaatggaagaagaaaagagattggagctaaggctagctcctccttgtcaccaattcacttccaacaacaacatcaatggatctaaacaaaaaagctcgaccaaagaaacatcattcctttccaataacaggttctcttaatctcttctcatgaatgatttgaatcattcttgttcattgtagatgtcttatatgataataaaataaaaataaaaaacaaaatcctggtaattctacagttttcggagattagtttgggtttcggtatctagttatcaaaaagtatttgtgtatatgttataactagatatggctaaaacagggttgaggtagctccagtggtgggatggccgccggtgagatcatcccggagaaacctaacggcacaactaaaggaggagatgaagaagaaggagagtgatgaagagaaggaattgtacgttaagatcaacatggaaggagttccaataggaagaaaagtcaacctttcagcttataacaactaccaacagctttcacatgccgttgaccaactcttctctaagaaagattcgtgggatctaaacagacaatacactttggtctacgaagacactgaaggagataaagttctggtcggggatgttccttgggagtaagttttaaatcaaacaaaactaattccatttttttttctggaactgaatatgaacttactttatcaaaaattcattttatatctatctacttttgtttttgtcgaatttaacaaatatttttagtatgagttcctaaaaagagtttggccatttctcatcagattattattttcctttaaaggtcatatttttggatatttatctgataataatttgaatcattggacatattaatgatatagtttactttatttgttaggatgtttgtatctactgtaaagaggttgcatgttttaaagacctcccacgccttctcactctcacgtaagattacaattcttacgaaactttttcatacatctcatcacttaattactgccttgaaattaacttatatatttatttattttttcacagctagaaaacatggcaaggaatagagagaggttggccaaaatcatcagttcgatggtttgtttttaatgtaatttttgtggaaactaatggggtttggctttgatttactggttttctttttcacttatgtactaggtttttgcttgctatgttatttcttgttttggttgtaaatatgctgttcgtttaagaaatcgggggttagtatgttatcgtgtgtataaaaatagtgtaagcacgtaagttgattacaatgcctgatatgattcatgccttcgtttcgttttttagtagggaaaatggtatttaattagcgaaatcaaaccgactcattttatgtttttttcagagaggtaaaaatccagagagcctgtttactatgtatgagtaaagattacccgaaataatagagaaatagatacaagaggctatccaagtttggtgggttcgagttttataacaccatccaaaaaaaattgttgttttgtaacacacatgagtaccaattgtttatttcacaaaagacaaaccatttatttcatgaactgtaatcttgttatgttcatgaattatttcggtataacatgtaattaactcgagtaatatcttaaaatagtatttagagtaaagatagtagggagaaagatactttatttttttataactcatataattttaaaaatttcatacacccaaaaattgattatggagtatggaaaaaccatgttaaattacttaaattttggtggctaatactactcgaactcagatggtgaaaacgactttagacttcattaatataaatatatatatatatatatatatatatatatatttatatgagtttttacttattgtcaattggttttggaattagtaatctatgaaacttaacatagtatcagtctatcagaggttgaacattcgctgacccgttaatccaacttggaaaatggtccgattacctctactaattgatgatccaaagaaaaactcaattatgtcgagataggtaaaaaaacattattttaaaagaaataatgaatttaaaattagtaaataaaatttaaaatttaaaaattctcctataaattttgtgtctcacaactttctttcaaactttttttcttcaaaaatataccgtatgctgatgaaatttttatctttaccaattaagaatataatcttttgtttccatctcaaatcatcatcatcacctccaaagcgtttagcaaccccaaaaccaaccacttggcgactacacagtattttactcaaaacatcacaagtttctatgaaacgtaaaacgatgagtttagtaaaaaaaaactagagattatagtcagaaaaactataataataagaagataacattaaacggatagattcatgtctcttttttgaaatccaaaattgggtaaaatccaaaaaccaaaatcttgccaaatgccaataagagcaaaaatccaaactttcctttctcttcactattacacaatgaaatcaacactacattttcacatcaaaatcacattccttccatg

SEQ ID NO: 7912 - DNA, 3000 bp, Unknown
  misc_feature (1)..( 3000): cDNA_ID_4359668_gDNA_ID_1621173_Annot_ID_174066 3000 nt of promoter + ATG
gtatgtttaagggtttagtttaaaatcttgtttattctcaacaattttaactcaccaacaaagatgtacgtacattattatacatgtacgtacataacatttttcaaaagtacgaggaacaactatactctgaccatataattttatttaattattatatatgaatagatttatgatgaaaaccccaaaagatattttatctaatcaaaataatcaaaagtttctaatgtacaaactcaataaatattttgtatgtcgcctttacaataaaacaacatctaacatgtttatttctattttaaataatattttatttattatcatttgaagacaattcacgattagcaatatcatataaacatatgtgcgtaacggtaataatatatacgtacacggtagtaatgtgtacgtacacggtagtaatgtgtacgtacacggtagtaatgtatgtagtaatgtgtgtgtacgtataccgtaaattacatatacgtacaaattttttttttaatgaagggtataattgtaattttgcactcgtcttcaacctctgcaaccctaattttgcagccgcttgttaactcattaacatccgaaactcctcgccgccgactactcttctttatctccgccatttgagtatgaacaataattcaagaaaccagaaaatcctctttttgttatcctttatcacgagctcgatcgaaatttcctcaacttaagcaacgaatagaactcgcacagagcctcaatcgaactttcactttcgatcggagtttgtgtttcgtcggaattgttattcgtcttcgacaaacagtttttgattttctttggttgttagaaagttaataacgtatttttgatttaattttaaatttaaattttggtaatcagaaaaataaagaaacgaaactgaaccgcctcctttcatttctcgttccagggcaaatttgtccatttttggctgaatggctaaaatctggttgggcgagcccactttgtctctttgtgaaagaaaaagtcagaaaggtgtcaacggtgaaaatttcttttttttaaacgggaaaaatgtcgttttatacgtgaactttcaaaaagtggacattcaatacgtgaactttgcggtcggccaaataaaacatgataaaaacgttgacccgccatttaacacaaatcaaaatgttgaccaggccaaaatcccgagacgttaactggcattaacagatctgataaccgccgtaagcagacgttaattgtttctgttaaagtcgaaaacgacgtcgtttcacgaaacaataaaatccccaattcaattttgaaatccctaattctatcatcttcttcactcttcttccatagctaattgaaatcccaaattcttctatcttccatatcttcttctatcattttctttaagtttgatttcgaaatctctaattttatcatcttcttccattgtttgatttcgaaatcctaattcttccatcttcatccatctttctagctccgtcgattaccaagtatctcctccatgtgaatatacttataccaaaagtggtccacgtgaggaagaatcttcacagctcaatcccaaacgttcctcgcatggttgacgtctttgttccatagcttcattaagcaaccatggatgataaaagatgatatgaaagctatggaagtttgattaagttagaagatggacgaattagggattgaagatggaagaagatgatagaattagggattttaaaattgaattggggattttgctgtttcattttatatgaaacgacgtcgttttcgattttaacagaaacaattaacgtaattaacgtctgcttacggcgggtatcagatctgttaatgccagttaacgtttcgggaattttggcctagtcaacattttgatttgtgttaaatagcgggtcaacgtttttatcatattttatttgactaatgtcaaagttcacatattgaatatccactttttaaaagttcatgtataaaacgacatttttataaacttgacgaagaatctatctacctccaagatttgttattaacggaacttgataagacgttggcgtgtaaattttttcataatattgtggtaccgatgaaattcaaaaagctgtcactgaacggtgattaatatcgtaataaataactaataaattgtcgaacgattctttttttctttagtaatgttgataggcttatagctaatcgcctaatcccctacgtgtgaacactagaaatagcctgaagagacaagtttactagtactatgccattgaaatgcgtgacatttacagtgatacaaaattactattgctttcctttgttagtttagcaactaaaatttaattaaatggcttctgacaggagtatatttaaaggcttaaatttgatttgtgacaatttaaagtcctttatgatttgtgaaaaattttggattcttttttaaccaagtgattaaaacttatctatatcaacaatggtcttttataactctcttgcttttgtgtttaggtacatttaacgaaagataaagaaacaaaaagtgacgaagaagggtttaattgcaacacttgatactttatggtttaaaatacatcccaaatttagtgagtgatttgtagtttgacaaatttcgaagaagggtttcattgtaacatttgatagtttagggtttaaatcaaatctcaaatttagtaaggtaggtttacataaacaaaaccaagaagttgtgttttgttttgcaattttctcaaagacaagagtacgagactcgtcgacgtctttcttcctcaacttcgacaaaagaaaataggattatttcagaccataagtcattgtctccgcctacaaaatcggcgattattaatcacattgtcttcttctatgtttgatccactttaatctcttcataaacatcatttttcctctaaaagctttttcctttactcatcttttctcttctgatcaaaattgtgaataatg

SEQ ID NO: 7913 - DNA, 3000 bp, Unknown; identical to SEQ ID NO: 7911
  misc_feature (1)..( 3000): cDNA_ID_1809653_gDNA_ID_1621173_Annot_ID_174063 3000 nt of promoter + ATG

SEQ ID NO: 7914 - DNA, 3000 bp, Unknown; identical to SEQ ID NO: 7909
  misc_feature (1)..( 3000): cDNA_ID_1809665_gDNA_ID_1621173_Annot_ID_174060 3000 nt of promoter + ATG

SEQ ID NO: 7915 - DNA, 3000 bp, Unknown; identical to SEQ ID NO: 7908
  misc_feature (1)..( 3000): cDNA_ID_2108769_gDNA_ID_1621173_Annot_ID_174059 3000 nt of promoter + ATG

SEQ ID NO: 7916 - DNA, 3000 bp, Unknown; identical to SEQ ID NO: 7907
  misc_feature (1)..( 3000): cDNA_ID_1809681_gDNA_ID_1621173_Annot_ID_174055 3000 nt of promoter + ATG

SEQ ID NO: 7917 - DNA, 3000 bp, Unknown; identical to SEQ ID NO: 7905
  misc_feature (1)..( 3000): cDNA_ID_1843238_gDNA_ID_1621173_Annot_ID_174050 3000 nt of promoter + ATG

SEQ ID NO: 7918 - DNA, 3000 bp, Unknown; identical to SEQ ID NO: 7904
  misc_feature (1)..( 3000): cDNA_ID_1809691_gDNA_ID_1621173_Annot_ID_174048 3000 nt of promoter + ATG

SEQ ID NO: 7919 - DNA, 3000 bp, Unknown; identical to SEQ ID NO: 7903
  misc_feature (1)..( 3000): cDNA_ID_1809695_gDNA_ID_1621173_Annot_ID_174044 3000 nt of promoter + ATG

SEQ ID NO: 7920 - DNA, 3000 bp, Unknown
  misc_feature (1)..( 3000): cDNA_ID_3046902_gDNA_ID_1621173_Annot_ID_174033 3000 nt of promoter + ATG
aaaggaaatgcttttagaagcaaatggaacagataatggtgcaagacttcagtttacaactaccaaaaaaggttcaatttggtttgatcaagtctcagccatgcctatggatacttacaaggtttgtttacttcattgagacaacggcttatagagtctagcagcattttcaaggcagagtaattttgatttttcttgatttggtcacagggacatggtttcagaaatgaccttttccaaatgatggtcgatctaaaaccgcggtttatccgattcccgggtaatttctagagagtaaaatagcatttcacttggtaaaatatgtatgaacataaaaaatgagaaaagctaaaagaattagcaatgttttgggagttaggtggttgttttgtggagggtgattggttaggcaatgcattccgctggaaagaaaccgtgagagcttgggaagagagacctggccattatggtgatgtttggaagtactggactgatgatggccttggccactttgaattctttcaagtaagggatttttttcttttcggttctatatccatttaaagtgtttcaataattactaagctcgaaacaaatatttcttgtagcttgcagaagaccttggtgcatccccaatatgggtgtttaacaatggtaattcttaagctctatatctcaagactttgctttatttacatgtattaacctctgagtgactgtttcagggatcagtcacaatgatcaagttgaaacaaaaaatgtcatgccttttgttcaagtatactcatgaaactttctattttaataaagagagtgatagtaattcattagtaagccaaaaattaaactaaaatgtgtatttctctgtctaaggaagcgattgacggtatagagtttgctcgtggagattctaattctacatggggatcggttcgagctgcaatgggacatccagagccttttgaactgaaatatgttgcggttgggaatgaagattgttttaagagttactacagaggtttttgcatttctctctgttatttaaaaccattttgaaagatacaaacaagagagctttggttatactaacttaaatacacaactttttacaggaaactatcttgaattctataatgctatcaaaaaagcttatccagatattaaaatcatctccaactgcgatgcatcggctaaaccgctcgatcacccggccgattactttgattaccacgtaaaaaatacaaaaaacaaaaaaaaactttcaaattttaccattcatatcattgattttgacagaatcttgttattcagatttacactcttgcaagagacttgttttccaagtcccatgattttgacaatacaccgcgaaacggtccaaaggtgcggtaatagatgaaacaaaagagttcattttcgacaatgaaaaactgcggttattcgccttgtatattcttctaatgaagaagctttcaacattttcttggttataggcttttgttagcgaatacgctgtaaacaaagcagatgctaaaaatggcaaccttttggccgctcttggtgaagcagctttcctccttggtttggaaaagaacaggttttttttttctcaaacctctatcttcttctttggttttgaaaagaaaagttaaaacactcactgtcatgtttttgttgcagtgacattgtagaaatggttagctatgcacctctctttgtcaacacaaacgatagaaggtatctctcactttagtttcaacggtttttatcggtatatcttgaatgcggtaatcagaaacaagcccgttgcttttgttttgtttttcaggtggatccctgatgcaatagtttttaactcgtctcatctatatggaactcctagctattgggtccaacacttcttcaccgagtcaagcggagcaactcttctcaattctacacttaagggaaagacttcttctgttgaagcatctgccatctctttccaaaccaatggcaaagattacatacagatcaaggtttgcttatctcccatacgcacaaaacaaatgtctagaaccaaatgaatgttctgaccaaatatgaatacacaggctgtaaactttggagaacaatcagtaaatctaaaggtagcagtgacaggattgatggcaaaattttatggatccaaaaagaaagtacttacatctgccagtgtgatggatgagaactctttttcaaacccaaatatggtaaaacatatgaagaatcaatcatacaagagttagggcttagtattgttctgaatcttgaaaacgttgctaagttgttttctctgttcttttctgtagattgtgccacaagaaagtttgctggagatgactgagcaggaagaccttatgtttgttctcccgccgcactcgttctcttccttcgatttgttgacagaatctgaaaatgtcatcaagatgccaatatctgattcatacaagaaaacttcaacaatgtgaagagaaacatcatcttggagactttcatgtcttttgtctttactcttcagtggttattaaacacataaacctatatgttcgtgaataataccaaagttagttgattataatcacgttatgcccttagattacttgatatgcaagattactcttccttggtaaaaaaaaaacaatggtaacacattagaccctaaacagttcagtcaaaggaacttacattgtgtcgtcaaaatgcagctaaaaatagcccaaagtttaattctttattgtttaaaatccttatctaacaaacattgcttctcacagtttcttgtttttttcttttcttcaaactataattagaaagacatcgagaacatatcttaatacttgagaaactaaaatcccctaaattccagcaatttatctgtcctttcaaagcaattttaagattaagagaaccataaaattaaattccattactctcacacaatttttgattatattataacattttgtatgttggagcaag

SEQ ID NO: 7921 - DNA, 3000 bp, Unknown
  misc_feature (1)..( 3000): cDNA_ID_2147566_gDNA_ID_1621173_Annot_ID_174026 3000 nt of promoter + ATG
ggtcaaaaaacgaaagtatttttagatacgtattggtaataaatatgtactaaacagttgtttttttattattatatgggaaaatctctttaacgaaaaaacaaatatgggaaatcaatacaagttttaagaaaatatggtgtttaaaaactaaaaacacataatctttcataatttgcattctctaaaaattgagcctaccttagtatagaagaagtcctaaaataaatactatttgattaaatacttgttttaaactaataacacaggtcatcttttggtgggggtatgacgattttagcgtagcccgttttgggcttcgagttgatttcgaagctttgttttttaattaagtggagttacaacagttagggatgtgctaaaaactagaaaccagagattactttaaattcgttgaagaagagaaaatctgaagaaaaatatagaaaaaatcagaaatcgattttggatatttagggtttttgattatgataatttttgatgatgtgtcttaattggctttgtcaactaaaatttatgattaaattaaaagttaagataaattaaagatttaactcacgatactagaccaacgaaaatagtaaactgatggtttaaatgatatttttttcctatttttttcacactagtcttaatcatatgcttccgccaagctattttcaattcgagttcatcaatttgagttagtacatcaatttgagttcgactttggttcctctttgttcgatttggttttggttcggtaaattcgaatcagtttttttttgccgaggactatatattgtatgattaggtgtaggattttgatttcattttgtaaaaaattgacactcataattttgagaaagtttctcataatagatgaatgaaattaaaatttatttgagtattatgtaaatattaaagtacatagatttccatttaaaatgtccttgataatcccaatattttttcttcaaaccttaatgctgcgcaaaatatttagaaattataagtggttagtttaaatttttttaattggatatataaaaaggattaaaattattttgtaagatataattaaaaattatgaataaatgggttgattggtacacaatttgtattttattttaaactcatttacttgtttcttgaaataatcttatactattatttgggaagtatatttaacaaagtacccttaccctttgtaaataattacttagaaataccattggaaataaaattttaaagagcaaactaattcaactcactaaaaatattttaagagacggcgggttaatattatatgataaaattatataaatagagtttgacacctctaaatagttggaaaaaaaattgattatacaagcaattttttattgggatttcaaaatgaaaatataaactccatatataggttgaattcagtattattatataccaaaaatatgtttaaaatatattggattatgcaaaattgcaaaaaataactaaatttcctaattaactcaaacaaatctccatttcaacaaccaaagaattacaaattaatactaaatttcttaaattaactcaaaataatctacatgttagtttttagatgcggctcatttatgatattttattttttgatctaactgaaatatatacaatctcattttgtggttgttaacataagattaacatttttcacttacttacgtaatatatcaaaactatattataaaatatatgatatataaatttttgtactaaatgaaatttaacctgcgttgtaacactggtcatgatctagttatcaaataattggtttccgctacaaaaaaaaaaaacaattttttgttgtgacaaccattgacataaaaatgtatgattgaataaaaagtgaagaaaatcagagaaaaaaaaacttaacgttaaaatattattacttttaatataaaacgttacctttggcaaattgtttttaaatcgaatggaaacgcaaaagctatgccacatacttttggcatctcaagaagaaccttcatctgaggaaatcattttatacctaactgaaaacagtgacataggtttggcgaatttgtggtgtcgtcgcttgacggtccacatgcttaaaaccttcacaatatgattgattgatagaatatggccgcataacgtgtgggaggcacgggtccacataatcaaatgcttctttgcatgttatgctagatactaatttgaaattaaaatttgtttatgaaatgataactaggacgacataaactattgaaagagttttcgccattttttttcttttgaatgtaattgttcttggtgtgatttgttgtttgaagttcaaaaggtacttatatgcaacgtaatgagtaaatatgatacctatatattgataatattgataaaattattcatctagtgaattcaaaagttaggggcaagtggtgtgtctaaactggttgttgtctgacgacaaaaaaaaaaaaaaaactggttgttgtcttgccgtttttgatacagaaaaacaacacacacttatctcgcttatatcttcatcttcttctctgcttttcctctatggttatttacgtcactacatcaccaacaacatcactccaatttggacccaccggaaatcaaatgaaaccctaccggcgaaaccaagtattaaattcactcacgcttttcccgtgaagtcatcttccaaagaatcttcaaaagtttttctatttttagaatccccagaaactctttcaaaatcctttgaaaccggtaagaattagattatctctgttttctgagttaattgtttttgaaatcagagacctttaagtattctgattccattagagactaaacccattccaaagttttcgtttttacgttctgggtcgtgttagattcttgtttttgtggttcctgaactaagcaatgattgtttctatgaattcttcagcattgttgatgacttgatcaaagagagtgtaagcaatg

SEQ ID NO: 7922 - DNA, 3000 bp, Unknown; identical to SEQ ID NO: 7912
  misc_feature (1)..( 3000): cDNA_ID_4359668_gDNA_ID_1621173_Annot_ID_57282 3000 nt of promoter + ATG

SEQ ID NO: 7923 - DNA, 3000 bp, Unknown
  misc_feature (1)..( 3000): cDNA_ID_1809783_gDNA_ID_1621174_Annot_ID_57284 3000 nt of promoter + ATG
gtccttgctaggtaatcttctttcttatggtataacatttcttctctcttctttatttgtggtctatgaaagaaataccacaacctggcttacaatgagcgacatattatcaagaaaatagaaatgacttcggatttcatcgactttcagtggaaaggacatgatgcttcctagccaagaagaagcaaagcggcttcacgggttacttaaaaactgttcagttcgatgcttcaaggacaatgggcatacccttttattggtaatttaacatagtaatttacatactaaattactcttgagtttccttttgttccggatggtaggtgaagctattaagtagtattagagtaatttcttacaagaagagaaaaacacagagtagtatgactatttattcattgacatactaccatttattgtcccaggaagatagcatcagtttgctcacagttataaaaggtacaggcaagtaccggcggtcctggagatatgatttggtttctgatttcttgcctccaagtaagggagaacttgcttacgcccttgatgaagtgcttgggtaactttgctaagccttccttgactctatttctcttagaaaaaagttccatctactaaatattcaaaaactttctccaaaacagttgacactacaagttaatgtgtctcgttccttgatctcctcaaatgagcaaaagagaaccaaatgtacttagcttcatgtgatttatctggtctgattttattccttgtgatatgcagattcttgcgaaatgctgttggttctgtgtttttttcaactatggaagacgggaaaatagtgaagggacttgctggtgttccagataaaggtccggtgctacttgttggttaccacatgttgatgggtcttgaacttggtccaatgtccgaggcgtttataaaagagaagaacattctctttcgtggaatggcccatccggttctgtattctgataatgatccagctaaggcgtttgattatggtgactggattaaagtatttggtgcctatcctgtcaccgcaaccaatctatttaagctgttagattctaaatctcatgtccttctcttccctggtggtgcacgagaggctctccataaccgggttagccatctttcaattctttttttttctagtttggtttaagaaaaattagtagccaaaaggagagtggttccacccacttgacggtgaaatcaaagtcttgactatgcagttgaacctgtttaagctcaaataatactaaaatgatttggttatctgagatcttctgtttctttgtcctaatagaagtgtgtacttaatttattaacctggtggtgttgttagaatttctgatgatacatatactactttctatgacattgcagggtgaacaatacaaactaatttggcctgaacagcaagagtttgtaagaatggcagcacggtttggtgcaacaatagtgccgtttggaacagttggtgaagacgacatagctgaagtaagcttcctgtcacagaaaaacttcccaaaaaatttgaatttcgtgtgctcagttattgaaaatagtcatttataaatatatttttcttttgctattgcagttggttcttgattacaacgacctgatgaagatccctattcttaatgactatatcacggaagttactcgcgataccaaacaatttaaattgaggtaacattgtttttcatataactgaaatagatgctaatgagtgtagttgttactagtcaaagattgatgagtactattgtttgtgatgatagggaagagtcagagggagaggtggcaaaccagccactctacctaccaggactcataccgaaagtcccgggtaggttctattacctgtttgggaaaccgatagagacaaagggaagaccagagcttgtaaaagacaaagaagaagcaaatcaagtttacttggaggtaaaggcggaggtagagaatagtatagcctacctgttgaagaaacgagaggaagatccatacagaagtgtcttagacagattaaactacagtttgacgcacactaccgcaactcatgttccatctttcgagccatgattcgaacaaaaaaaaaagggtaagtttagtcttgttacatacacaaaagaaaacaaaaaaattgttgtgtcataatgtctcgtatagaattttttatgtatattccatttcttatatagatgaaaacattatttactcgagtgaaagaacttcataaatttacatttgcttgattcttgctcgaatgtatttcatattacgtgataatttcaaagtaaataattagaaaaaatttaattcgtgagctaaccaaagtctaaaatcaattttagctttgaaaaaattgagagtgtgatttgttaccaaaattaaaaaagctgagaaagagaaggatgagagagagtgtggtgatgtgtgcgaaagaagagactcgatttagggccacgaattggcgcgaattcgtagggaagaaacaccgaactcggcgaagaagaagaacattatgccactctctgaatttttcattcactattctctcttcccgttttttccgttttctacacctctttcgatcgaatctcagttttttggtgactcgatttcgtttaattttgttctgctttaccctaattctcgaggctctgtggacttatgcagttgtttcgtttcgtttttgggtaatttgagtggtgttgaattgtgattttggggtttctcgatgtgtttatttaggaatttacataatcttatagcttccttgtgtaacaagtcagtttctgtgaaatctacccatggatagggtttcattcagctgagcattgcatttgaagcttccaaatggtatgtcattcattcatttatttaaaatattgtttatgcaacattgagattcgaaccggagatttttcaatttctcgattagtagcatgtaggcttgaaatctaagagtggaagaacaatgagatg

SEQ ID NO: 7924 - DNA, 3000 bp, Unknown
  misc_feature (1)..( 3000): cDNA_ID_1809775_gDNA_ID_1621174_Annot_ID_57288 3000 nt of promoter + ATG
aaatttatttttggggtagttagcaaatttattttgatatatactgtaaaatatttttttaagcgccataaaatatgatttatagtaacgctgcgaccgacactacttattggttctcatgtcttctcccagtgtgtaagacacatgattggtgcggtactccaaaaagtttgacttaattagttttacgacaaacactatgaaaagtatgtctttttttttttacatatttggatcgacaaggccagatccataatcaattcctagtacgcggaattacgcgatgtaatagagtcaaactccgacgagaaatgcggagtcaaatgaacttaatcacttgactaaaggcatatatatacctacaaaaagatgtcttttgtcacttattttgtatattttgaattttaccgtctaaagaattaaaaattgcttcactatttacaagataaagataattctcatacaactttatgttttagggccggctttgtggttttatgagatgaaaagtgtgtcaaaaaaatttcattttaaatgattcttacatattttttcattaacacttattttcttcttttcaatccttaatccttatcttttgtggtgaatggagctagatacctaacaaaatttgataaactaaaactccaagtttgttacttcttttacaacatttaatcatttattaaatattcatcgcattctttacaactgttgaatacctttttttaacatatcaactgtttctagtctaatgagtttattgagttttttaataattagaaaatgccacaacgaatttatttattttatctgttaatcaaaaaatatatttaaaatcctaccctcattgatttttttgtgattttctatattttctttaaataaatgttgataaaagtaaaattactctagaattatttcataatattatttatgtgcgatgtcatattttacaaaggacaatcacacattaaaatgtgttactaagtttgaatttgaaaatcataatactcgaatttaacatatcttaataaatgagaagtttagttttgcactttctttgctcacaatcaaattacaaggtcaaacctcggtaaactaagttagcaaactttgcaccctatagaagattttgctataagacattgtaaaaagacttttgacttctataactctaacatgtgaattaaacatagatttgaaaagtctatatatacaaacttagataaaaaaaaataatgtaagaatcaatttactggggtgattgttaatgggatgtgagaatttttacttcactacaaaagtctttacagtttaattttatatttttatatccaatcatacttctaaaagtgttaagaagtgcaactgcctatttctcttttttttttaaaaaaaaaaatacctagaacatttgaataaacaacaattacaatatgtttcactattgacaaaaataacatttcaacaaaaataaagacattccaaaagataatagtggatgttaacccgagtttatttttagtagtctttaaagaaatcattcaaaacaataatagtcaataaaagaaatattatatacaaaacaaattagcacagtagataaaaaactctttctaagaagttatttatagttttttatgtcactataattaaaaaatatattaacatagcgtcactattctatagctttttaatttattgctttgttgaacacattacatataaaatctattgcagaatagatataaagaacatataagatgctttacaatgatattacatgaaacatgttattataaaaaattaaagtttttaatttgtcccaaacatacatgttatgtcttctctctctcaagatgtatacatagatgataattagataacaatttaagcaatgtaaaggacaaaaaagaatccaagtagaaaattgataccagcgcttctatttttgtacatgaagttcttagaatgttatttgtgcattttgtcttgtactatgttccttttgggctgctgcaatacactcatgtggaaggtacacatgcgcgacaagggggttacatatgcatcaaacaattcctacaaaacatgtgtacgaaaaaagagttgaaataacgctgatcactactacttctctagaacatattttacaaacttttaaaaaatcaacaagacccaattatatatatggaagtctgtgtcattttgcaaattttgtgattaggtaaacaatcaagtcactttttatttcggtataatactaattattttatctgttttgaacgattaatgaaattgagaatacgcacataacattaaattttcatccgaaaataagctttcaattccttagttatggatgactattgagatgttaatacattcttcatttttatgtccaattagtcccacttgtatatagctgaagatatatgaccttgaacataaaacctcttagtaattcaaaataaaaaatcaactcataaaaacttttactgttactaatttagttgttaaaaaaaaaaacaattctacatcatttctattttatttatatttaattaattatctgagtttgaccctgaactgaagagagatctgcgttcttcttcttctttctttgtcatcttcattaataagaaaaataaaaaagaattaaaaacagaaggaaattaaattgactgtctcaaccaaatcagtaagacccaaccaaaaaaaaaaaaaaaacgctcgcctacttctcttctctctcaccatagagatagtttcaagctccaaaagttcttcaatcagattctggaaactaggtttttattcgtatttcaacttctacctactttttttctttctttcaatggagttcaagatcattaattagggtttcgttttcttcgattagatcgacttcattttatatagttgtgatggttttcttgtaggttgttggtagaagttatggtgagaaatgaagcttagattgagatttaagttatg

SEQ ID NO: 7925 - DNA, 3000 bp, Unknown
  misc_feature (1)..( 3000): cDNA_ID_1809761_gDNA_ID_1621174_Annot_ID_57294 3000 nt of promoter + ATG
gacagtcctattccttgcatatggtactttcaagtcgagctctagatttgagtaccacctacaaaaaaagaagaatcgacaatcattatggtagtctctccatatataagagttttaaaatgtatatataatctatcttgctagctcataatggcacctgaagacttggcaaagctctttgcggtgcaaaatttgcagaagattgaaatctatcttagcaaattctagcaaggtttggtcgtgcagatcttcttcttcatagtatgagatatattgtcgtgtctctatccttgatatacccctagggtatgcatgtttgagggcatttttaatgcggatggacataggtggactagattgatcagccagtccttccaaatgagacctagagaaagcaagagcttcatcgagaatgtcttcaccatgggtgctccaatgtgcagcttcataaaggcataaaagacctcttgcatcctcagctaggtgctccttgaactttccatccttattcttgaagttgttaaacacatcttacacatataattttttgttagtaatcaagtttaataattaacattgacttggtagatttactaatcattatgcacagagagtacaaagtgagtataccttgcgcttccacagtattaatatgatcgaattaggtgaagttgaaaaagaagaaaaaatacgctcgctatacttatgtcagttttcacattaaccaaaatgtaatatagttcttagaccaaaaacaaaatactactaacaattagcaacattctctttcatgactttttcttagtaatatcaattcaaattttttttaacccaaaaaatatggaaacataaataagaaacttattcatactgataaattaattaacatattacgctcgataattctaacattagagtgacttaccgacaccaagtttatagccaaattgtctaaaaatttggaagacgagggagacggtgtataaatcgaactcattgcctcttatcatctgcataaaaccatgacaccaaacatcgtctctaactgcgtgaagatgtctacttcaaagtggtaggaaacaccaaggcgacaaagagcatcaatgaatttgatgttctctatcggctcttcttttgaagccattaacaatcctcttacggtttcctttagtgaactcagcttctcttcgtttatctcactctcctatatacatcaaaataatggcacgagagaagacatcataatatagagtatattcatagtgttttgtgaacaaatttgcctaattgtgacttcaagtcgtgtgggtacgtaccggatccaaaacagaaaaagagatcaagggatcttcccatatattcaccggaaaatccgctaatggccgatatatttcttcagtcgtaagcgctgacaaagtatttatcagctcctgcatgcttaagttctttttctgaataaaagtgtatctataatcacacttcaaggttttctaaagctttggtaaaactgtggctgcacttgatacatatagaggccatatatagggagatgagcctccctctcttcttttggtgtttctttttttagtaacctttatcttaattttgtttatttctatggtattttcttttaggcgtgtaaaaatgagtcattgattgggactcttagccgacacgatagatatgaacacattggccattttacttttctagtactccctctgttttaatatatttctagtttaaaggtgtttttttttgttacaaaataaatgttgcttttatatttttttatgcaaaaattaaatatatttaatagttttaactaattatatttaatagtatattttcgaattaattttatttgataatattttataaaaaatagatatattaaagaaggtttttatgttttttcttttaatttgtatgaaaaatctttaaactataaatcaaataaaattgagggaataatagacaagtgacagattttcttcggttactaaaagagcaaaatcaattcattttaatattttgacgaaaacaaaacaaaaaaaaaaatcattttaatattttatgtccatcagcccgttgaattaggcttaaatggcggcgacacattaaagcttctttaattgcgccactaatatgatatgcgccactaatatgatatcccctacctcatatcaatcattgtaagtgtcattatagtttcttacatatattaacataacaattaaaaagaaagggttgccttccatgccaagccagcacatggaccgaattgttactcgctacagtgaggtgactggtgagatgggaacaagttgccatgatgtatgcaggtaagtgagggatgaacgcctgtctgtgttgctgcatgcctgcatgtgctatttgtttgtttccaaggtggtgtgatctgcccccgaggaatgtctaggagaagggttttctgctgtgattgctgaaggcaaataataatcaagagtcgaggaacaaaatttgtttcaaataaagtggaaagaaattcatatttgaaactccttcgttttttaaacagttcaacatttgatgtagattttaaaaatgtaaattctatttaataggctgttcttttttttatataatatgtgaaatctataaaaattaaataactatttgaaaaaagcttttaaattgattataattttgtagtgggttaaaatctagaatgtcaataaaaatataataaaaaaaccgaattaaaaatcactaataaaagccttcgaattcataatcccaatgcttttttaatctttttcttctacacaatttccagaagatgattactaattagaacgaaatataaaatacaaaatttgtccaaaaacttggagatgcgggggatcgaaccccgtgcctctcgcatgcaaagcgagcgctctaccatttgagctacatccccagttgttgagttacaatgcttcacgttttataaattcgaatatctaaaccaac

SEQ ID NO: 7926 - DNA, 3000 bp, Unknown
  misc_feature (1)..( 3000): cDNA_ID_1809753_gDNA_ID_1621174_Annot_ID_57297 3000 nt of promoter + ATG
tattagcaagagctccactgctccgccatcaacagctccaagatctgaaatgagatcgaagcagagctcaagttcagctaaagagtcaaagaaagaaaacgacgtcgctcagcttaacaaaggaaaatggttattgggccactcaccaaacaggcccaatgacaacacaaccaacacaacaacgaagcccaacaagtgttcttcctcttctcaacagacaagaccaccacctgtgcaagaaaacaaatcagagtgaagacagagaagaggagcgtctgtacggatccaatcaacacaaagaacagatttggttgtttggtgacctccgaagcttgataagacagagacagctgtcagtttacaatcattgaaaccctagcattgtttagctataaaagggaaccatgttgtaacctaaagattaagtgaaataatacaaagcaaagttcactcaaaacattacctaaagtagccgtcttgctcttactttcagtagcctcttagatctaaactcttttgggctaacatcactaacatttattcaattgttttagaatttattgataatctttagttttcttacattttgtattttaattgtcataataattgagtagtctcattcataggtgatcgttaggctagattagggtgtttaatgtttgattcatgatatatagttgcatagtctcatcacttagagaagagctcaatgctagttaagttgacccctgttgatttagatctttcatttcacgcctagaaggtgttaaataaaatgcttgaacactttctgagtaaactggattcagggtaaccatcttcatttgggtgtttcctttctcttatgctgagactcttcctgagtaaactggcttccatgctcttttgtctctccattgttgttgtttcttttttcttctgatgatcatactctttctttttgtttaagatacagttaaagagagagatagagtaagagacttaagaggatattgtcacttatatttgtgacaagtactaagttcaaaactcttcatacatttatataggatcttgagaagttttagacactttttttttaaaaaggcttgaagatatcgtgggtaattaacaaaggacgaaaaacaaatcaagtaggagtgtaggacaaaaaaacagtagttggcttttatttttaagttttttggtgaaattattggcctttattttaaaagaacatatagttatattaatgaaatggtgttcgtaaaaacgtgcaactctgacaaaatattctttaaataattggagacgggtagacgcaagatttggaactgttctttggtctcaacaaaagtcagttaatcaaagtttactaataagttttggcatagttgccttcgtaaccaagagggtgaaaacatgaaacaaaatagtgaaaacacttacagttatgttttagccttgctgtttgatcgtagggtggttggtatatgcatggtactgtcattttggtgaattttatgaatttgtaaaaccatataaaagaagaataagatatataggagcaacttccttttagagctttttttcatttaatatattactaaaccgtgtgagtggataaatacaagtctaaggaatcattttgattaaactcattgctactgaaagaatgtgtgagttatagggttataacttaagtactatatacagatatagtttctcttgttcgtccatatttatttaatctttttttgtaacttctcaaataatataaggttataacatttttttttttgtcgtctaatataaggttataacttataattatctttacacgggaaccacattttattgtttgttatataatctgtatactaacaacgacgtaataaaactcttacttcaataatctgacaagatttcgaattagtcactctttaagtctttattaatgcatgtaatatagttgagaacacattgactagagggagtacatttttttaaatggtgaacagcaaattcaataataattaaatatattttttaaaaattaggggatagcttctgattagctagaataaagagggtgaatgaaattatagtgtagcaatttctaaaaaatttagggtatataatctgattattcatgttgactaagaaaaaaaaaaatctaacctaaaaaagaaagatatgattcaacatacaaagcaattgattacccaaatcactagtcgttgggcattaactgctttggtgcaaatgggtctaaacatggaaggcttaggcctgagggatgccttgattttctttgagttgtgacgtgcaaactaaaacctatttcaattatacaccaaataagtaacaactagccctaggacctatattatatggaacattaagcttgcacgatctctacatttcttaaacaataaatagatctattgttgattcaattaatcaatttggtgtaatttttgaatgataatatttaaacattcccaaaaaaaaaggtaataatgtgaacatgcacgagataaaaaatacaaaaaattgtttgcttacacagcaatctaaaacacccgtagacgccaaagcactacagtaactctttcttttaggacagtgacttttaagttttactcaaaaaccaaatagacaaaacaaaactaactaaaacttaaagccacaaaggcccaaagaacaaaacaaaaagcaaacccaaaaaaaaaaaaaaaacagaaaccaaaaaaaagcaaagaaccgtttcttctccatcatcatcatcatcttcttcgcttcttcttcttcttccgtgaagaaggtcaaaaaacacaccaccgcttaaccccaattaccaaaaaatggcaaagcttcaaaatttctcaaattaaacaatctctttacttattcttcttcttcgaaatcgccgccggcttatgctgtttccgatcgttgtctcttctccggtgtatctccggtggtatcttccacgaagaattcataattactatg

SEQ ID NO: 7927 - DNA, 3000 bp, Unknown
  misc_feature (1)..( 3000): cDNA_ID_1809749_gDNA_ID_1621174_Annot_ID_57298 3000 nt of promoter + ATG
gcatcacaatggaaaagcattaacagacagtagaaaacttgcactccatatcgaagagatagataagcacataaaaagctaacctgcgaaccgaggccaacagcgacaatccgaggactgcatctaaccatataaacagtagatctaaacctcaaaacatgaacatagttatgcgatctaagcgaataaaatcgcacaaccgtgggagagagtgcaagaggatcctcataaccatttctaacagatccatctctactagtaacaataggacctgaacctttagcttcatcagcaacagctaaaagtataggatgtgatgatctaaacccttcaactccatcacatttagcaggtaatggctgcatctgtaaaaatgtaaccggatcatcccgcctcgacacgaattcggtaacatcatttgaatcatcgatatcaagaacttgaaacccgtttgtataacctagtaatagaacgttcttgaaagatgattcacttgtgtgcaatctatcaaatgaagaccacaacacctgcttcaccaaacacaaggatcacaacaagtcaaacctatctcgataaaaaagactcacactttttcctaatctgatcaaaatcacataaacccaattggaaaatgaatcaaaaacccccaaattccaaaatagagaatcacgaattggggaaaatcaaaattgaggtcaaaacctgatctttaagctcgtgagaatcagaagagagggaagcagcgacggaggcgctagctgagcgaacaccggaggaagcagttctgatgcaagtagagatgaattttaacgaattgggcaaaaagccattagtaccattattcttcgtttgattatgattatctccgttgttgttgatgttgaccttggagttactcttcatagtaattatgaattcttcgtggaagataccaccggagatacaccggagaagagacaacgatcggaaacagcataagccggcggcgatttcgaagaagaagaataagtaaagagattgtttaatttgagaaattttgaagctttgccattttttggtaattggggttaagcggtggtgtgttttttgaccttcttcacggaagaagaagaagaagcgaagaagatgatgatgatgatggagaagaaacggttctttgcttttttttggtttctgttttttttttttttttgggtttgctttttgttttgttctttgggcctttgtggctttaagttttagttagttttgttttgtctatttggtttttgagtaaaacttaaaagtcactgtcctaaaagaaagagttactgtagtgctttggcgtctacgggtgttttagattgctgtgtaagcaaacaattttttgtattttttatctcgtgcatgttcacattattacctttttttttgggaatgtttaaatattatcattcaaaaattacaccaaattgattaattgaatcaacaatagatctatttattgtttaagaaatgtagagatcgtgcaagcttaatgttccatataatataggtcctagggctagttgttacttatttggtgtataattgaaataggttttagtttgcacgtcacaactcaaagaaaatcaaggcatccctcaggcctaagccttccatgtttagacccatttgcaccaaagcagttaatgcccaacgactagtgatttgggtaatcaattgctttgtatgttgaatcatatctttcttttttaggttagatttttttttttcttagtcaacatgaataatcagattatataccctaaattttttagaaattgctacactataatttcattcaccctctttattctagctaatcagaagctatcccctaatttttaaaaaatatatttaattattattgaatttgctgttcaccatttaaaaaaatgtactccctctagtcaatgtgttctcaactatattacatgcattaataaagacttaaagagtgactaattcgaaatcttgtcagattattgaagtaagagttttattacgtcgttgttagtatacagattatataacaaacaataaaatgtggttcccgtgtaaagataattataagttataaccttatattagacgacaaaaaaaaaaatgttataaccttatattatttgagaagttacaaaaaaagattaaataaatatggacgaacaagagaaactatatctgtatatagtacttaagttataaccctataactcacacattctttcagtagcaatgagtttaatcaaaatgattccttagacttgtatttatccactcacacggtttagtaatatattaaatgaaaaaaagctctaaaaggaagttgctcctatatatcttattcttcttttatatggttttacaaattcataaaattcaccaaaatgacagtaccatgcatataccaaccaccctacgatcaaacagcaaggctaaaacataactgtaagtgttttcactattttgtttcatgttttcaccctcttggttacgaaggcaactatgccaaaacttattagtaaactttgattaactgacttttgttgagaccaaagaacagttccaaatcttgcgtctacccgtctccaattatttaaagaatattttgtcagagttgcacgtttttacgaacaccatttcattaatataactatatgttcttttaaaataaaggccaataatttcaccaaaaaacttaaaaataaaagccaactactgtttttttgtcctacactcctacttgatttgtttttcgtcctttgttaattacccacgatatcttcaagcctttttaaaaaaaaagtgtctaaaacttctcaagatcctatataaatgtatgaagagttttgaacttagtacttgtcacaaatataagtgacaatatcctcttaagtctcttactctatctctctctttaactgtatcttaaacaaaaagaaagagtatgatcatcagaagaaaaaagaaacaacaaca

SEQ ID NO: 7928 - DNA, 3000 bp, Unknown
  misc_feature (1)..( 3000): cDNA_ID_4254639_gDNA_ID_1621174_Annot_ID_57302 3000 nt of promoter + ATG
ttactaagtatctcgacaaagtcagtttcttggagagtgctgattacaggcagtttgagaaagagagagacgctagtttgagaagacacgatgagaccgactcctctaacgttcttctacatctgctgtaagtaatcttgttttctgttctgttagagaagtcttctttagtagactttgtagcattttctcaagtgatttggtcacattctttggcagtgtctaaaccgagtccccgttttcttgattgattcggatttatttcttatgtctctctcgagagagagttcaaaactgagaccatcctctctgaaggccatggccaatgaaatgggcttgcaatgcaacgtaagcccaacttgaatcccacgattctaattcgagccgatatctgaaacaacaattcatttgtgactgcaatctacaccaatctacaccttgttcttgtaaatcgtttgttttcttagtttctacctaatgaagctcatttggtctctatacaacataaatttcttcttttggttttgaaatctaaaacctgaagtaaagcttgattgatttggtttatggattgcaggggaaaaagtggctctctctttaacatttacaaaaaaaaaaaaaagtggctctctacagagttgatagtcgtaaacaagcaagctcgtgttaggttttttctattgttggatggttttgtatcaatgttctcaatattgttttactagataatgaagataacttttatattgtaaatatattaaattcattttgtaattattattttttggacaaatataaatgcatatataagtaaaaatgtgataacacgtttcattgagtgtatatttaaaatgtaattatgcaaaaaaaaaattaaaaaatatttaattagcaatttagaagtttaaacatcaattctgttttgagaaaatagtatagtttatagacatgtagtatagctaatgtttatttcacacatatgccaatttttagtaaataaatcgtgaagtgatcatcaccataaaatctgatggccgcaattcaaacccatgtaatcgaattttgtttctaagatagaatctaacacaaaataaattagtatacatacatgatatattaattttttttttgtaacatgatagattaattaatttaaagataagaaaccacacacataaattatttatagatttttaaaagtttcaatatttattacatagaaacccaaaaaatccatcataaaagcggttatcaggaggcgtgtaaaatttcacttgagcaaatttgttttggttgcagagatttttgcaagcaattctcacaaaaaggaagagttgccgttttagaatctttcatgcactgatttgggacacaatgtttaacacatacttctatcgtactcgcgtatgttgaaactatcatcgttaataaaactacaatcatcaaaacactatatatctttttcattgtttcagttgccattatttgaaaatatgagtttgtgaatgtttgaggtaataaaaatattgtttaggttatatagcaaaaaaaaattaacaagataattagtgttgagttggctttttgtagttttgtactttatatagcaaaagtatttttatccacttaaaattattgattttggaagtatatccgtttcttattaattaaaaagttagttttttttttgtttatgttattagctgtccaaacaatcttgcaatgttaaatcgtcatttaccaaaaaaattgccaaattttcaccattgtcaataataagtcaaatattttataatcttaattcaaaaactatcccctaaaacatgattatataaaaaaaaaatcgtattgatgggtcgagatatttagcattaacttataaaccaaaatgaatttacaggttgatttgatctatttaaatttattggattcataggttgacctaattaatttagctaaataatttatctaacactcaactaattaagacaatagatggtacccataatagattaaatttgagtaacttcaaaagtttctattcagttttttttcttacaatttttttgtggtattaattctaaagcattatcaataatattgtcacatttttaaaaatcttatttcagaaattatcccctaaaaaagattataaactagaaccttttttttgtattgatgggtagagatatgtaatcatttaacttacaaaccaaattgaatttacatgttgatttgatctatttaaatttgatggattcatgggttaacaacaacaagaaaaacaaaattagtttaatattataccacatgtcacgctctagtgagaatgttaagagtttatgtaataacactaacaaattttgtatatttttcctatactataaacatttttaatttttttttttgaatatattaacaacaacaaaattaatagaatgaggttaatagtttaatatattagcattttttatataagaagtaaattttatttatttttgaatatttaacaaaaacaaagtttaataaaattagtttaacagtttaaaatagcaataacaaaagtcgaacataaaaacaattttttttcttacttaatatatatatttcttttttcgataggattaagaacttttgtatttctatttttaaaaatattaacaaaattaagtttaacatcttaagttttaaaaatttggcaaatttttaaattacatatatttttattcttttgtttttgaaaatagggagtaatagttaatgtagttatagactatagagatgcattgtcaacaataaaacgccacgtcgcagcataattaaaatcttttgcacaaaaatgtggttggccttagccttggccctggaattaaaacattatccagaaaatcttacatttccaccaatccttcacttcctttcacgatccaaaacaaaacacaagaaaatgcaacaaaatcttctccatctctgaactcaaaaactcattcactgagaaaa

SEQ ID NO: 7929 - DNA, 3000 bp, Unknown
  misc_feature (1)..( 3000): cDNA_ID_2144864_gDNA_ID_1621174_Annot_ID_174101 3000 nt of promoter + ATG
tcgcttatgatttccatgtgattggggtgtggaacaggaagagaaataaaagaaaaagtggaaatttgaaagagaagtgaacattagggaaataaaaagaatcatggctcaaagtttataagtgtagaaagaaaaaaagtgtttatgtgtttatcaccgagaattctctcaatcttttttttgtgaatcagatttttctcaccttttttttttgtttttttcttttctttctgtctgatgaagagaaaagagttaaatatatagagtccaacggttccggcgtacatttgcaacattacatttaataaattaaccataatctcaatagttgcaatggttagagagtaaccgcttataacacttaaatctccaacatgttttgcttgcagtttgtggcactaattgttataagagttagctctctcagtagcaccaaactggtaagtgagtttctgatacaagtgttgttatataaaaatccaatgtgattgatcgttggggatgatttaacaaagagaatgatcagttctgagaagagcatttaaactttccgttaagtggagtgatgaagatgatttattggtgtaaagacaaatgttacgttgctatctattttggggaataatgtaactttttttaccgtgctatctttactatgtagacgtatataatttctgtcaaacatcttacttcgattttccataactctgttgttacactttcaagagatcatctataactctttcaagagatctaccaagttattcaaaggtaggaaatgcctacaatgtgaaacttaaaaatttaacatattccctcttatttagaggtctagttttgattttcatgtgaggagaacgatttagtgtataatggttttaacttactctgtgttagttaacacatatttatgagtaaattaaatatcaaatgttggaagttgctaagcatattggcctcatttactttgctagaaagttaatactctacatgttttcactataaacccttatcatcatgcatattgctgacaatgttattttagtttttatgaaattaaaataatatgtgaaatagtgaattctgtcaactaaaaattatttcagtcaaaaaataaaaattataaataaaaattaattcgaaaaacaaatatgagcatattattaatgtaatttttagcctaaatggcaaatttttccctacacaaattagctcattatttttcttaacattaaaattatttgtctaaaacctgcattcttctaatagagtgaaacggttttgggtttaagacatgtgagattgaacaaacaagacgttgacttgtgagtagaaggaacatgtgaacttatatggaccatgtgaccttcaactacaatcattggaatgttaaactactgtcttctcttatttggcatctaaattttgtttttattactctctaaacaaaaacgaattaacaagatttctgcacaaaaatgtatgcattttgttttacgtacaatcatctaattcgaaacatatggggtgaaattttttactttttaaagacaacaaaccaatcaatcacacgtgaatattgccagaagagatatacacttggagaggataatgaaccattaggtgtccccaagtactaaactagacctctacggtgccaaagaaaggttccggagttatgagtggtcacctctcctacctctttgaaagacatgtatatcgctttaactccttaattattgattcttgtgtgtaagggcaggcaacctatgcaaatagacaaattcatatttttcatcgtgatcatagtaaatactacaattttttttttttttttttttttggtaaaatattacaaatttagcaaaagacatgcaaagattaaagacgctatgataagaaagaaaactaatcggatatataactaaaaagacgttgaaaatggcaaatatcaatcatcaatccaaataatattcatatacctttcatctatgaactaaggttttttaactaatatatatatatatataccgtatgattacactgtcaaactaaagtataaaatgcaacaatagaaaatatgagaaataaaataaaatatattaattatttgcttttcaactactttaatatcttaatttaccatgagaaagaaatgaaaatatgagtcgaaataaaaaaagaaaagaataagtagtttgagaacaattttttaaaaaagggtaaaagactagaacatatagtcaattgatcatctacacatgttgttgttagaagaaaaaaaccaaaagaccaaaaatccaaaaaggaatttctcttcacattatgtgtatggccataaataaaaacttatctatctatctcgcgggaggaaaacaaactgctcgtgttggtgcttttgtaattcgtcttttcttatgtattatctttaagaaaagtcttttgcattgtgcacctacacaacattccgttttactaaaagttaatataccaaattgcaaataattcagctccagtttactcttgtttatttagtttgattttgggtgcatttgatatctttttcatcgaacttatgtaaattttctctaataatcgtaaactttttctaataatcgtaaatttattatcgtcaaatattccaatttgttattgaaatgttttcgtaatatacctcaatttcaaatttaaatattttattttaattttaaaattgcgtaaccgtaattttaattttaaacttgctcaccctaagatgggttttattttctcccgaatttaatatttaatttactaaaaatgatatgataagcctttatgtatgtaaactttttttcttaccattttttttaatacttccattgctctttttttctgacgtcttctttaatttattctactctatacatatctgccatatatgtgtatatagagagaaatatacttcaattcgtttccaaacctatactctcctctctcacaaaaatgaacaacaccaaa

SEQ ID NO: 7930 - DNA, 3000 bp, Unknown; identical to SEQ ID NO: 7928
  misc_feature (1)..( 3000): cDNA_ID_3046942_gDNA_ID_1621174_Annot_ID_174099 3000 nt of promoter + ATG

SEQ ID NO: 7931 - DNA, 3000 bp, Unknown
  misc_feature (1)..( 3000): cDNA_ID_3046948_gDNA_ID_1621174_Annot_ID_174095 3000 nt of promoter + ATG
tgtttagacccatttgcaccaaagcagttaatgcccaacgactagtgatttgggtaatcaattgctttgtatgttgaatcatatctttcttttttaggttagatttttttttttcttagtcaacatgaataatcagattatataccctaaattttttagaaattgctacactataatttcattcaccctctttattctagctaatcagaagctatcccctaatttttaaaaaatatatttaattattattgaatttgctgttcaccatttaaaaaaatgtactccctctagtcaatgtgttctcaactatattacatgcattaataaagacttaaagagtgactaattcgaaatcttgtcagattattgaagtaagagttttattacgtcgttgttagtatacagattatataacaaacaataaaatgtggttcccgtgtaaagataattataagttataaccttatattagacgacaaaaaaaaaaatgttataaccttatattatttgagaagttacaaaaaaagattaaataaatatggacgaacaagagaaactatatctgtatatagtacttaagttataaccctataactcacacattctttcagtagcaatgagtttaatcaaaatgattccttagacttgtatttatccactcacacggtttagtaatatattaaatgaaaaaaagctctaaaaggaagttgctcctatatatcttattcttcttttatatggttttacaaattcataaaattcaccaaaatgacagtaccatgcatataccaaccaccctacgatcaaacagcaaggctaaaacataactgtaagtgttttcactattttgtttcatgttttcaccctcttggttacgaaggcaactatgccaaaacttattagtaaactttgattaactgacttttgttgagaccaaagaacagttccaaatcttgcgtctacccgtctccaattatttaaagaatattttgtcagagttgcacgtttttacgaacaccatttcattaatataactatatgttcttttaaaataaaggccaataatttcaccaaaaaacttaaaaataaaagccaactactgtttttttgtcctacactcctacttgatttgtttttcgtcctttgttaattacccacgatatcttcaagcctttttaaaaaaaaagtgtctaaaacttctcaagatcctatataaatgtatgaagagttttgaacttagtacttgtcacaaatataagtgacaatatcctcttaagtctcttactctatctctctctttaactgtatcttaaacaaaaagaaagagtatgatcatcagaagaaaaaagaaacaacaacaatggagagacaaaagagcatggaagccagtttactcaggaagagtctcagcataagagaaaggaaacacccaaatgaagatggttaccctgaatccagtttactcagaaagtgttcaagcattttatttaacaccttctaggcgtgaaatgaaagatctaaatcaacaggggtcaacttaactagcattgagctcttctctaagtgatgagactatgcaactatatatcatgaatcaaacattaaacaccctaatctagcctaacgatcacctatgaatgagactactcaattattatgacaattaaaatacaaaatgtaagaaaactaaagattatcaataaattctaaaacaattgaataaatgttagtgatgttagcccaaaagagtttagatctaagaggctactgaaagtaagagcaagacggctactttaggtaatgttttgagtgaactttgctttgtattatttcacttaatctttaggttacaacatggttcccttttatagctaaacaatgctagggtttcaatgattgtaaactgacagctgtctctgtcttatcaagcttcggaggtcaccaaacaaccaaatctgttctttgtgttgattggatccgtacagacgctcctcttctctgtcttcactctgatttgttttcttgcacaggtggtggtcttgtctgttgagaagaggaagaacacttgttgggcttcgttgttgtgttggttgtgttgtcattgggcctgtttggtgagtggcccaataaccattttcctttgttaagctgagcgacgtcgttttctttctttgactctttagctgaacttgagctctgcttcgatctcatttcagatcttggagctgttgatggcggagcagtggagctcttgctaatagctactacaactaaccataagtgaaaactatatatgaaaagcttaggattttagttcttatatgatagtatttatatgaaaatataagtgtatccggatcgaccgattcagattgggcaaacccttaaaggagaagtagataaatgattgatcgtctggtcgattaccattataaatctcatgaaatacgtatgtctttcctctttttcgttgaaggactaacttttttcaagagagatttacccgttcgattgctactggtcttagtttcttcttactcgaactcgttattctcttcttggttctttgcttgttcccatctatagagtgtgtgcttcagatagtttcatagacctattaaaagataatatatatttgcaatgcatatgctctaggatcttaaattcaaatcaaaactaaaaatacaaaaaaagaaaagaaaaaacaaaaaaaagaagacataaacctagttgtttaaaccactaaaatacaaacgcataaacttactacacatgaaaatgaaacgactacatacgactgactactttgcatatatatatttgtgaattactcttcactttttctctatatataataacaacttgaagacaaagacaaaataataaaataaccttatctcttctctatatattagttcttgagatctctccaacaactctactttgtctttactcaagtatttcactaagaaagatagaatcacaaaaaggaaagagaaa

SEQ ID NO: 7932 - DNA, 3000 bp, Unknown; identical to SEQ ID NO: 7925
  misc_feature (1)..( 3000): cDNA_ID_3046955_gDNA_ID_1621174_Annot_ID_174089 3000 nt of promoter + ATG

SEQ ID NO: 7933 - DNA, 3000 bp, Unknown; identical to SEQ ID NO: 7924
  misc_feature (1)..( 3000): cDNA_ID_1809775_gDNA_ID_1621174_Annot_ID_174083 3000 nt of promoter + ATG

SEQ ID NO: 7934 - DNA, 3000 bp, Unknown; identical to SEQ ID NO: 7929
  misc_feature (1)..( 3000): cDNA_ID_1809729_gDNA_ID_1621174_Annot_ID_57304 3000 nt of promoter + ATG

SEQ ID NO: 7935 - DNA, 3000 bp, Unknown
  misc_feature (1)..( 3000): cDNA_ID_1809849_gDNA_ID_1621175_Annot_ID_57309 3000 nt of promoter + ATG
aggtgatttacatgacaggatggagagaacattcgtctcacccgcaggccaaacgaagaggttcagccaccgtatccttcacggatctccaaaagcaatttggcggacaatcttgatggaatgattgaagaagagaaacattcaataagcagagactttacaaatgacacttgagagagaaatcagtgacttaagctataaggtacttggaggaactcttgtagatttgtcggagtctttcactgggcgaaagcatcacaattaggacgcctgctttcgcccatgtatttcgtatcgaataatagctgatcagaaacatatttgtattttacaaaaatattacgaatacttaaaaatctcaatcttcaatcacgaaacatgatctcgcgctaggtttcttgaatagatttgtatacaatggaccaaacttcactaaatcagtgaaacaaacattaatcaaaaccttataatgtatattcacaaccatttgattgtttctctgtggtacctaatcttgttttgagtaagattttagcaccacacctgttttgattatggtacaaaatcttactcaaaagaagatcaaacgtgatcatgaccgtcgagataaatcaaacgtgatcgtggccgcccagataatcatacactgaaatattcaacggctccacttgatcagctccattctcgtaatacgtcgtcgtatctccgcatccagagttcacgctggtactgtggacgattccggcgtcaatggccatgccggcgttagaagcagcttgctggatagatctcggagaagttctggaaacgagtgaaggattaagcaaatgagggaaattgagagattctaaagaatcaggttggtgtaaacagaagaaagcaacgtcgtgtgctacggcggcaccttctgctgttgagaatgaacctaaccagagacggtcacgagttcccggaactctaatctctgatacccatttgccccatttccgacgacggattcctttgtactttgactgactttcaccggtggattctctgtaatccattttttgttgttgtatgatgatcgatgtgaagaagaagaagaagaagaagagacttttgagtgttgtttatgtttgaatatgaagatacaaagactatttatacgttgaagtttagtgaaagtcaaaatattatataatattttttaatatgaatcaagaatgagaatgaagttgaccaattataaaactagttaattctcgaggaaaaaatcaactggtcaaagtatgacccatttttttagtggtaccaatttgacatgtgcctgactagtcgatttttttttctttcaagttgtaacttttttttttgctgtgtctaacagtaaattcaatgtatttagaaagtaagagtcatttctataaaacaagtggtatatataccgttctgtttggtttcaaaataaatgatattttttgtttttttaaaatagaaaattaatctttattttttgttgttgttgctttggtatatcatagttaggttaccttaatttataggtttttcatttttttttatatgaaaaagtcttaagtcgaaatctagaattttatactactatatatcctctatttcgtttcataaaaatctgtaaaataggtgatgacataatagtatagagaaaagcagtgaaaaacacaaaagtcgattcaaactccaccgatgaagaatgtgaaaacgtcgtcgtcgatggttaaaccacgtgggataaagaaagactttctttgccttttttggttacaaattgcgtcatgcgtgacatgagcaccgtctaaagggggtcctttatttttggcatttgaccaaagatctgtaatgacttaatgattctccacggacaacacacagacacaacagcccaaactaactggaaaaagttattttttgtcttcttctgtgtctgctgactcatgtacatggttgtcaaattttagttcacacacaaccacatccaaaacacgaatcatccacggagaaacccagtctcataatgtatttaatgtgttttcatccttcggatgcataaccaattctttgtagttgatacttgattaggtttttctcgacactgacatttgggagttgattgtgatgtgatacaccgtcttatcatagtcaccgactcatttagaagaaacctcaaaggtaacttggtaagttacgattagagatgtttttagaaacgtctagcagattattgatatctgacaataaatattcacacctactcggttggtctatgcgattttagacaatttaaatgtttataaaaaccctagtgtatcagtatatataaaatcaatattaatgaaataatgcaattaataaattacttattataagttcttataaaaaaaatactagtgacctcattttgtaatatcaaaaactggtgccaacttcatctaacacgatttatttaaccttggtaatattttgaaaaaaccataaatttataaagttgttacagtcagattttagtgggctaaaatgggttacaattgcaatgggtctggaagtggacaaatctaaacaagcggcccaaatcatctgagcacatgccagaacattgaataaatgtcaaaaaggagtctctttctacataaccttcacgcgcggctactcctactttcgcttcgtccggttccgtcgatactgtctccgaatcactgtcttctttcctttttcttcctacatgacatctgtcttatctcttttatgtttctctagatgtacttatacttccatgtttcgtctgtatacggtatgtttcgctcaccacatgttcgatgaaattcctcaacgaaactttttttttatctttctcacctttcttcctttgactttcagacggagaagcaaaattgcttgaactttcgctttgatggatcaaactagtcttggaacaataatcaaaatccattcgttgccatcatatgcagcttactgtatatg

SEQ ID NO: 7936 - DNA, 3000 bp, Unknown
  misc_feature (1)..( 3000): cDNA_ID_1809837_gDNA_ID_1621175_Annot_ID_57314 3000 nt of promoter + ATG
ttaaaaagtcaacatcagtgctaatttcaaattgaccatacattagcacacaagaagactaacaaaaaaaatgagtgaataaagaagagagtgagtggggttgatacatgtcaccgtccaaaatgtgtctgacccttctcattggagctacaagagccgaccctttgcctcatcatttgttgacttcactctccttttacatatttaaattataacttgctcatatttccattcattgtgttcggttctagattgttccatccactttcttttttctcttactttgaaatttagaaatatatgaatacttgacaaatatttgaatattgtaactgatttgtttgttcgtaatacttgacaaacttttttgaatatacacctttacatatattttgagttgagataaaaagggaattatgttagtttatggattatattatgtaaataccacatctaactatgatcggatgaaaactaaaccagcatatctctaatcagtaatatttactaaatttatatatcattaaagattttttgaatttagcaaaaaaagaagaagatatcattaaagatttttaaatttaaagtataacataatgaataaatcaagtgttgagcttagtttcgcgttgcaaagatgttcatttgatttttttttttttttttccatttgatttttcttatactaaattgattgatgtcacggtccttctgtgaaaaaagtatattgtactgtataaatttataatagtcatacttgaagataactaatatcattttctaaaggttttgttgacaatgaaatgggtaatgatgaacatctcgtttgctaaaccacaaaagaaataattcgttggactataacttaaacttataatatatcaactgaaatgcctacaatttgagaatacgccttttcaaaaagttttagaattttataaaaatttctccaccataatattactttaataaaagcttgttattaaaatgatatattaacaaaaaaaaaagaggtaggcaaagtagcttttattaaaattaatgttttccctaattggtaaatcataaaccaaaaaattgaggtaattcttaatatatttactatgattagaatgatacattaatgtaacattttatcatcttcattaataatagtaagttctcctcaaaattacaatttgatatcaaaaaatatatttgtattacaagcaattactgaaaaattaaaattacaatttagcccagttacataactccacgtaaggtttgagcccatcacatcacatggtacatgaccaaagcccagttatgttaccatggagtattcttcagacaagagccatccagacagaagtggaccacacaatcacgaatcgtatggagatcattacaatatattgctcacatcttattgcgccacgtctcttatttggcgagtgatcaacgtccacagatctcttgctccactctgattggtacacgtcatcattttattgtgctacttgtttatgtggtacagtagagacaagtggtaagattttaaaatatcttaaaagatgtgtgaggcccatttagatattttctcaacgggctgttcctcaaaagctgcccgtttatctacaaccatcgaacggctcgaaactattctgggctagctgcccgaaatctcttaaaggaatttgttgagtgggcttgaatcaacggtggataattcgaaggtgtacgtaacatctcgtagcatctgaacttagctcccctcaaaatatctgtggacatatgtcactagctttttttttgtgtaatgaaactattaattaattaggcaatcacatgagagatgttatatacttaaattaataactcaataatacaatcatgaccaccaaaccttgaaataaaataatctctctgattacttgtacaaattctttaccaatatatgccatactgtgaatgtaatggtttattttaaaacagccaaatattattgatataattatatgtttaagtagattttaaacttagctcatggttaaaaatagacagaattttggagtaaatctgagtttacaaaatttatttattaggattaaaattaattacttaaattggcaaacatttttcttggtgattgtaacatacaatatacgaatttgaattcgcattgtgattccaaaacaacactaacataaactaccagtaaaattttttaaaataaaatttcatatatatatgcttaaaaaatgtaacaaaaatatggtaaattttttaaccatggtatgggtggagatgtatgtgggatgatgatggttatatggtaatggcgcataaaggtggtggcaaaggcaaggaaatatcgatgacacgtaagcagacgggaaatcttaaaccgagtggagaagcctccaaatctcttttttctctctctctctcctaaggccaccacaatctcttcttctgtgtatgtattctttttttctccgatattcgtcgatctctcaaaaatatcctcaaagccaaaaaaaagcaagagtagagataaccaaccaacaaactcataggaagacatatttactttcaggtctttcttctactacctttttcgtggtttttggttgattgattctcagatgagattttttcccgaatcatttgatgtcttttttttttaaataagttcttggtaaatcactgtttctactagcattttttgttttctcagcttagatttgttgtttgatttgacatcttatctgattgagattttgttcttctgaattgttgttacagggtttagctgtttgattcagcttcgatttagtgtacagtgtgttgattagtataaaaaggatttaaaagaatctgggagatgtgtatagtgattgttcttgctggcgaatgttaacactacgtcgtattgattctcgattgatagtagaagaaaggtgttagttagattgttcgttcatctagttggggtttagtttcggttcctggatg

SEQ ID NO: 7937 - DNA, 3000 bp, Unknown
  misc_feature (1)..( 3000): cDNA_ID_1809833_gDNA_ID_1621175_Annot_ID_57315 3000 nt of promoter + ATG
ggaggaagcaaagttaaaagtaaaggctaagttagtgaactctctcatgggtcaatggcagggctggagatatgtacgagcgcactcattctgcggctttgcgcataatgtgaagctttgtcatttcatttttaacattttaccacaaaagttcaaaacatatttttatctacattttaagtttgtatgtttcatagttttcttctgtatatactttctcttatgtgacgacaattacttatgtacttaacttttttgggtcacgacttgaaaaaccacatatggattgagactttttgggctattggatgacatatctaagtttgatcaaatactagaattgatctacctacattggatgcatgttaagttgttgctactcttagctcagattcacacagaaaagtataaacccaaagaattacgttcgaaagaaagatttaaattgattatcaaagcaataactaaatcaaatccgaatatcagagatcgctcgctaaatgtttgctcacgatctacaagtaatcaacattgactactcacttgaacatcttcaggattattggctctctctcaacaactcagataaaaagcctgaatgaaagagaaggcaacaacggctatatatgtttcctcagtcgtaacagcaaagcctccctctggaacaaagtctttctcttccttctcttcttcagcaaagactctaattccttcagtgtctttcgcttccgttgactgaagctgatgtggcattgaccgcttcctataataagcttgatgaaccgtatcaatgccacaattataatcttcataaataaacggatgtgttttacacactactgtaatattttgttactccatcattcaacataccaatcatcatcatttttatattttaattaaaaagattacatttcacaacttatatacaattgaaaatagagaacatcttaacaatatccctatagtaaattttcttttagtcaactatttaaagatttcaaaatggtttattgtaatccatgtgatccggtcaaagaatccaaaatagtttaatatctctatttatagtagaagaaaaataactagctacacaaaatatcggagaatgcatgatcacacatgtcaagcatattagtgtatccctagctatacgaagtagatgtattgtatgaccacatatctgaactatacgacgtcatgtagttaacaccacagacatgcaattccggtacactaataaatttactccgttgaagaccagtgttgaccggcatagttgaggatactatagtataattggcatgggtaaattaactaaaaatcatcaatccatttatcataatccaaattctggtcaaaagaatctaaaaatagtttcataaaaatagtttcatgtttctgtttacagtaataaaattgatatcttagtcatgaccaaatcaatagccgcaagttatgctcccaaaaattagctgttcatcttttactccaatcaaaaacataaaaaaaaaaaaacaattacaatttctattctaagtaaatgttaaataaatttattaaattttacctcctaagacttcagtggttacactattagaaaataattagatttgtgtgcctaaaagccttagaagcatgcattttttatgaataaataaatttagtattgatttcggtatagaaaatgaaattagcaaattcttgatatgtgtaactaaaataaaatcttatgtaaaaaacagaagcgataaaggcaaacataattcaaaactgcgaccaattcttattatcaaagatttatgaaacaccaattagctattaatagtaaaaatcaagtgacactttccctatactaaattgttaattgttcggatttataggcttagctagttaagtataaatattaatccacactcttcacactaattcaattttatccctaataaaaaacttgaatctatatatgtgtatcaatatatgtgtatgatatttaaaggggtttgtagtctattgaaataaataaaagattccattatccatgatttttaataagttacttcgtagcattactaaacctatttacatcatcaacaatacaactgatttaatttcaactaactaaaaaattaccaatttatttatcataaattcataatctaatatctggtcaaaagaatctaaaaatagtttcatgtgtctatttatagtaataagattgatatcttagtaatgaccaaatcaatagccgcaaattttgctctgaaaaattagttgttcgtctttactctaatcaaaaacataaataaaaaatcacaatttttatccaaagtaaatgttaaatcaatttattaaattttagctcttaagacctcattagttatattattagaaattaattagatttgtgtgcttataagccttagaagcatgcatttttttatgaataaataaatttaatgttgctttcgatatagaaaacaaaattagcacatgctcgataagtgtaactaaaataaaacctcatgtaataaaaaaagaaataaaggcaaacataatttaaaactgcgaccaattcttattatcaaagattcatgaaatattcaattagctattaatagtaaaatcaagtgacattttatttatactaaattgttaattgctcggttttataggcttagctagttatgtataaatatgcatccacactcatcacactaattcaattttatccctctttactcttcttgataatcggaggaaactaaaaaaggaaaaaaaaaaatctaaataagaataaaattcctaaaaaataaataaatcaaaaattgtgaagaaacaaatcctcgagtcatgttgtttacagaaaatctctttctcacttaaaacccttacagaaacaaatcatcgaatctttgtttttttagaatcagtgattttgtttcctttcacgagacgaaaataacaaatcgtcttgtaaaaagtaaactcataatcatg

SEQ ID NO: 7938 - DNA, 3000 bp, Unknown
  misc_feature (1)..( 3000): cDNA_ID_1809829_gDNA_ID_1621175_Annot_ID_57316 3000 nt of promoter + ATG
ggtcgtacattgtctagacaccgaattgaatgcatcttcgagtcagctacgcgcaatctttgtcaaatatctgataactctagcaatggacaggaagaaaagagagaaggagatggcttgtgtgctcgtctctactcttggtttccctcccaaagatgtcagaagcgcattctcgatgctcatagaatctgcagacgacactgctttggacaacccagtggttgttgaagaccttgccatgttcttagcaagagctgtggttgacgaggtgttagctccacgggatttggaagaagtgttaaatcagactcccgaggcaggctcaagtgtgggcgagaaagtgattcaaatggcgaaaacattgctgaaagcacgtctttccggtgaaaggatcttacgttgctggggaggaggaggaattgagacaaactcgccgggatccacagtgaaggaagtgaaagagaagatccagattcttctagaagagtatgtctctggtggagacctcagagaagctagtaggtgcgtaaaggaactaggaatgccgttttttcaccacgaagtagtgaagaagtcagtagtgaggatcatagaagagaaggagaacgaggaacggttatggaagctactaaaagtgtgttttgattcaggactagtgacgatatatcagatgactaaagggtttaaaagagttgatgaatcacttgaagatctgtctttggatgtccctgatgctgccaaaaagttttcaagttgcgttgaaagaggcaagcttgaagggttcttggacgaatcattcgcttctgaggattcgcaaagtaagaaacagaacggctcgtcttcttcctctggatgataacatttgagcaccatacctcaaacctcgagacgttggtttcacgcaaaatcaccttttggagttttttttttttttttcttataaacaaactaaaaaagttttggatactttttgatgacgtttcttacagaaaacaaatttatctttatcttagtgacgttttgttatagcacattattactttatgacctgttttttttgttcctttgtcaatgattacattgtcttgctaatattttcatacagaaattttattttatattctatgatattatcctctcttaaaagctggacaaaccccacggaccacgagtcttccagctaagactttttttagttcccaaaagatcgaacttggcgctactttcattttctcatctctgtttttccaacatcctaagaacagagttcgttgctccttttgttttctttaaagaaaaagtcagattcagatacatacatactctgaagaacatgtcgacgcgaagacgaactttactcaaagttataattcttggagacagcgggttagcttatttttctacctaactgtgttttttttttaatgtttgatccgttaatcattctcttgttgttgtttttgtgtacaaatatcacagggttggcaaaacatcgttgatgaatcagtatcctaactaaactttttgatttttctttctttggattttcttcttttcgtaattttgatttttgtagctgtcggtgagaaaaaaaaaacttagctttttttttttttcaatttgtagatatgtgaataacaagtttagtcaacagtacaaagctacgatcggagctgattttgtcactaaggagcttcaaattgatgacaggcttgtcacattgcaagtgagtttctttgtttgtttttttttggtttaaattgttgtcgatcttttaagagaagagtgtatatgaattattattattattgtaattgtgttaagatatgggacactgctgggcaagagaggtttcaaagtcttggtgttgctttctatagaggtgcagattgttgtgttcttgtctatgatgtgaatcacttgaagtcatttgaatctctcgacaattggcacaacgagtttcttacacgggttttttttttttgctttctccatcacattttctcttcatccaaagattctttcttttagtgactgatagttgttttttgtggatttttgggccaggctagtccacgtgacccaatggcattcccttttatacttcttggtaataaggttgatattgatggaggaaatagccgagtggtaagttactattagtcttaagcttttaaatctgaatagtccatttcctttgtttgctatatatttcctttctttgtgttcaggtatctgagaagaaggctagagaatggtgtgctgaaaagggaaacatagtctatttcgagacatcggctaaagaagattacaatgtcgatgactccttcttgtgcatcacaaaacttgcccttgcaaatgaacgcgaccaagatatgtaagtgttattagtctttctttatgtgatcctctcactttgtgaatctcctccatatgatggatccttattaaactcaagatgaaaaaccagaatctctcaattcaaattttcatataatctttttttgcaactcggtgctacagatatttccagccagatactggttcggtgcctgagcaaagaggaggttgtgcttgctgaatgctgaagaaacatttcttactctcttgatttatgcattacttgttgtgtgtgtctataatcttaatgctgagaaggaccaataaaacttgtattgttccctaagtaaggttttgttacctttctggttcttcatctttgacatttggtggttcacgatttgtatgtaacaacagttcaagtgtacatgtaatgggttggttctgtcttctttatgtaatgggaaactaatgatgagtccggttcagccgcgctaaaccgaatccggttcggtttgaaatatcagttagcaatttggcggtgacgtggcgcttccttccccacttgtttcgctccttagaattcagttgaatctctcgaatcgtcgtcgtcaatcttttcgatttctcttcctctcgtctctctctctgttaacaatg

SEQ ID NO: 7939 - DNA, 3000 bp, Unknown
  misc_feature (1)..( 3000): cDNA_ID_1825906_gDNA_ID_1621175_Annot_ID_57317 3000 nt of promoter + ATG
atcactctccggccgagtctttcactttttgtttcgagtacgcgatttttattatttgtttctttgcgattttagactcgatcaatgaaacttatatatatttgacctaaattcagatttggttattgaatccgttgattgttctaaattgaatcctttttttgtatgattgtttagaggaatgcaaaactatggtgattgattaaatcgtgtgacaatcgaaaagttgaggaattgcaaggattcgagatagagtctaaaatggagcaccaagaccttacagattcgagaaaggatcctctttgcatttctcaattgaaaatttcttcttcttctctcgacccattgcctcaggccaacatggcagaggatttaacaaagagtcgtagacattcacctataaaaggtatagctttttgttttttacttcctctggatattgtttgtttaacttgtgttatatgtgtttagagtttttctttctattgcagtggaagggagtgaagaaacttggggagtagaagatgatgatgaccttactgaccctatttttgataccattgaggtcttatttcatcactttatatgtctctctctctttgattttaaaattggcttcttttttctataggtttgagattaacttctctttttcagggcaatggacattcagatccaacaagctgcttcgatgctgatttaagtgagtacaaaaagaaggccacagtaatcgttgaggaatactttggcaccaatgatgttgtctctgttgttaatgaactaaaggagcttggaatggctgagtaccgttattattttgtcaagaagttagtctccatggctatggatagacatgacaaagagaaagaaatggctgcttttctcctctctaccctttatgccgacgtcattgatcccccagaagtttacagaggtttcaacaaactggtcgcttctgctgatgatttatctgttgatattcccgatgcagttgatgttcttgctgtctttgtggctcgggcaattgttgacgacattcttcctcctgcgtttctcaagaagcaaatgaaattgctgccagataactccaaaggtgttgaggttttgagaaaggctgagaagagctatctagcgactccgcttcatgctgaagttgttgagaagagatggggagggactgataattggactgctgaggatgtgaaagctagaattaacgacttgttgaaagagtatgtcatgagtggagacaaaaaagaagcttttagatgcatcaaaggattgaaagttcctttctttcatcatgagattgtcaaacgagcactgatcatggcaatggaaaggcgaaaagctcaagtcaggctgctagatctgttgaaagaaacgattgaggttggtctcataaactccactcaggtgacaaaagggtttagcagaatcattgattcaatcgaagatttgtctcttgacataccagacgcacgccgtattttacagtctttcatctctaaagcggcttctgaaggatggttatgtgcttcttctctgaaatcactctctgctgatgcaggagaaaagttacttgaaaactccagcgccaatgtttttaaagacaaggcgaagtcgatcatccgagagtatttcctttcaggtgacacttcagaggtcgtacattgtctagacaccgaattgaatgcatcttcgagtcagctacgcgcaatctttgtcaaatatctgataactctagcaatggacaggaagaaaagagagaaggagatggcttgtgtgctcgtctctactcttggtttccctcccaaagatgtcagaagcgcattctcgatgctcatagaatctgcagacgacactgctttggacaacccagtggttgttgaagaccttgccatgttcttagcaagagctgtggttgacgaggtgttagctccacgggatttggaagaagtgttaaatcagactcccgaggcaggctcaagtgtgggcgagaaagtgattcaaatggcgaaaacattgctgaaagcacgtctttccggtgaaaggatcttacgttgctggggaggaggaggaattgagacaaactcgccgggatccacagtgaaggaagtgaaagagaagatccagattcttctagaagagtatgtctctggtggagacctcagagaagctagtaggtgcgtaaaggaactaggaatgccgttttttcaccacgaagtagtgaagaagtcagtagtgaggatcatagaagagaaggagaacgaggaacggttatggaagctactaaaagtgtgttttgattcaggactagtgacgatatatcagatgactaaagggtttaaaagagttgatgaatcacttgaagatctgtctttggatgtccctgatgctgccaaaaagttttcaagttgcgttgaaagaggcaagcttgaagggttcttggacgaatcattcgcttctgaggattcgcaaagtaagaaacagaacggctcgtcttcttcctctggatgataacatttgagcaccatacctcaaacctcgagacgttggtttcacgcaaaatcaccttttggagttttttttttttttttcttataaacaaactaaaaaagttttggatactttttgatgacgtttcttacagaaaacaaatttatctttatcttagtgacgttttgttatagcacattattactttatgacctgttttttttgttcctttgtcaatgattacattgtcttgctaatattttcatacagaaattttattttatattctatgatattatcctctcttaaaagctggacaaaccccacggaccacgagtcttccagctaagactttttttagttcccaaaagatcgaacttggcgctactttcattttctcatctctgtttttccaacatcctaagaacagagttcgttgctccttttgttttctttaaagaaaaagtcagattcagatacatacatactctgaagaacatg

SEQ ID NO: 7940 - DNA, 3000 bp, Unknown
  misc_feature (1)..( 3000): cDNA_ID_1809825_gDNA_ID_1621175_Annot_ID_57318 3000 nt of promoter + ATG
gataagaataaattacgtttcagcatcctttcagtattactgtttcgttccatattgtcatgatttgatttgttaatgtaatttttttcttcgattgatatattcctcgttatgttgctcttttttcgaagttaatacattctcaccttcgaacactaagttttttctcgctctttttgttttaattttagaaaatagttttgtgatttgatatctattatgaagttcgaatatatgcttatatatacatcaatataagttatggtgtccagctttaagtgaagcataatgtactcttgtgatgccgttttgttgattaagacagttgattctgatttggtacatgatatagatcaaattaaatttcaagtaacatccctaaataaaaagatcgttgatatatctcaaattaacgttaagtttactctctcaaataaaagatcgtagttagtatttaaagatcgaattccactaaaattttgttgttcacacaataaactattgatgtttgatattaagccaaataaaatagataaaaaatttaagacaagaaatcagttacataaagatgtagatcaaatgattaagacgtcagatatacaaatattctcaggaaatagataaactgtagatctacttatatatgattagagttgttaacacaccgttctataactcaaatcactaatgtaaagttaaccaacgctagtcgcatcaactaactatgcctaataactaaagatcctaatgctagttgcaataaaaaaagctcgatctccagacagcagcccaaaatcttgattacgttcatgtgattaatttgagagagtatgagcacttcgttgatgaagtgctctacttggctactgtctcctagtcgagctttttttattgcaactatgaaattatccgacagtatccctttgtacacttttccctggcctccctggcccaatatcctgctctcatcataactattagttgcttccttcatggcttcctcagtaaatattttaacatcaacatttgatggccctgatcctgagagtcgatgtatcaacatgccaccgccattttgctcgaagaatatttgtcggagctcaatgtctttacggtgcttaattttctgttttatacagctaacgataacaagcaagacgatcaagacgccgatggtggttcttgatcacaacatcataggtgattagagtaaactgatcagggaaacaatcaagtccagaaacagcgaatgaatcttaccaagaagaattatacctcatccaacgtctaaaacataaataaccaaagtaatttctctccgtaacatatcaacaaagattttctaaagaaacaaattaattttaaaactaacttaaataaacaacactttcactatttaaatagtttataattctagttctaaaatactttacattattgtattgtatacatattcacaacttttattcatattcttgtcttatcatataaaagatgttcgtagaaaatttcataattaaaaaaaaaactaaaacaaagtacaccccactcgaagttatacctaatataacataaaattagagagaaagaaaaattagtggttatatttgatagtaatgaataaaatataagcagttttggtttttgttatgcaattattatttttgaaggaatagtttcttattcacaaattcttagtttgttaataaacttttcatctttagttacaaatatattttttataaacatatattaaaatgtataacagtttacagtagtatgctgaattagttatttttgtagacgttacttttgtaaggtcgattttctaacttttaataaattcgaggatggtatacaaaactgaaatttacgtacctacacaaatgaggatcgtctgactctttctgatctcgcaagtcgcatcgatagctttcgggactattttggcaagttccaccgtcggtacaaatattaggacgtccatttgcaagctccttacactcgtcaatatctggatgatcgatcattaatgagatgaatcagatgatgatcttaatatagtattgatgacttggagtacgtactgacctttacagccgtttagaacataagggttacccgtggaatgtgctgatgattttatgatcattgaccgacaattcagcagtggcaaggattatagtaaaagtcgtaaactgtttccattgcattctaagaaattgtttcaactatacgatactacaatatgatagttgaggtcattgatcataaactgtttgatactacaatattttttgatacaatatgaaaaattgtttgaaaactctacctctttgtaacaaatgacagtaagagtgttaaaaattttgtttcatttttctggttaatataattcaactgcctttttttttaagaaataggaaaatagagactgaaatagtaaattacatataattttataatttgtgaaggagcgtaaaagactcaaaagaaatggtaaaaaagcattaaaaaacggggaaatagtttctttaattattgtattaacaaaaaaaagaaagaagtaataaagtcttatttatttccagaaacaaaataaaataaaataaatcccataaaattgaaaaaatcaaattaaataaaatcagttacagaggaggagcacatcatcgtgttcttcttcgactcggcgattccaaaaaaggacgcttgcttcatcgccggcgtcgctgtatcactctccggccgagtctttcactttttgtttcgagtacgcgatttttattatttgtttctttgcgattttagactcgatcaatgaaacttatatatatttgacctaaattcagatttggttattgaatccgttgattgttctaaattgaatcctttttttgtatgattgtttagaggaatgcaaaactatggtgattgattaaatcgtgtgacaatcgaaaagttgaggaattgcaaggattcgagatagagtctaaaatg

SEQ ID NO: 7941 - DNA, 3000 bp, Unknown
  misc_feature (1)..( 3000): cDNA_ID_1808749_gDNA_ID_1621175_Annot_ID_57320 3000 nt of promoter + ATG
gactttgtttgtaaatgtccgaatattttttcaagatatttatgtatttggtacttcaaatctagtacccaagccttagatcattaaaatttagaactcagtatataactaatgccattttttatttttggattcgatatttttttttttagtgtaatattaaattatatttaaaaaaacaaatatacgtttttataatttgtgcttcgtatgtttgaaaaagtaagctctaaagatttctgatgatttttcgaaaatgtttaaagaaaatgtttaaacaagctaagagtcgaggttaactagtcatgggagtgaatccagttttaaataggcatcgtcatactgcttgtcgcctaataatcgtattgctgaaatcagatttcgaatttgtttatcaacccatatggtgataccctttatattatgatcccacgcacctcaaaaatttcggcgttggattcatgtcactcctagctagcaacctcagggctcgcagtatcccattcgtcttaattagttaagattttttttaaaaatttattttgttcagttattattcatttcattcgaacgattaaacaaagattattatggtctcgtgatttatatgttgacccttctaatattctaaatttaaaaataagaaaaaagaggaaaattgaggcaaaacacatgttgccgagtcattatcaactaggggtgcataatgatggaacaaagcacaaatcttttaacgcaaactaactacaaccttcttttggggtccccatccccgaccctaatgttttggaattaataaaactacaatcacttaccaaaaaataaaagttcaaggccactataatttctcatatgaacctacatttataaataaaatctggtttcatattaatttcacacaccaagttactttctattattaactgttataatggaccatgaaatcatttgcatatgaactgcaatgatacataatccactttgttttgtgggagacatttaccagatttcggtaaattggtattcccccttttatgtgattggtcattgatcattgttagtggccagacatttgaactcccgtttttttgtctataagaattcggaaacatatagtatcctttgaaaacggagaaacaaataacaatgtggacaaactagatataatttcaacacaagactatgggaatgattttacccactaattataatccgatcacaaggtttcaacgaactagttttccagatatcaaccaaatttactttggaattaaactaacttaaaactaattggttgttcgtaaatggtgctttttttttttgcggatgttagtaaagggttttatgtattttatattattagttatctgttttcagtgttatgttgtctcatccataaagtttatatgttttttctttgctctataacttatatatatatatgagtttacagttatatttatacatttcagatacttgatcggcattttttttggtaaaaaatatatgcatgaaaaactcaagtgtttcttttttaaggaatttttaaatggtgattatatgaatataatcatatgtatatccgtatatatatgtagccagatagttaattatttgggggatatttgaattattaatgttataatattctttcttttgactcgtctggttaaattaaagaacaaaaaaaacacatacttttactgttttaaaaggttaaattaacataatttattgattacaagtgtcaagtccatgacattgcatgtaggttcgagacttcagagataacggaagagatcgataattgtgatcgtaacatccagatatgtatgtttaattttcatttagatgtggatcagagaagataagtcaaactgtcttcataatttaagacaacctcttttaatattttcccaaaacatgttttatgtaactactttgcttatgtgattgcctgaggatactattattctctgtctttattctcttcacaccacatttaaatagtttaagagcatagaaattaattattttcaaaaaggtgattatatgcatgcaaaatagcacaccatttatgtttatattttcaaattatttaatacatttcaatatttcataagtgtgattttttttttttttgtcaatttcataagtgtgatttgtcatttgtattaaacaattgtatcgcgcagtacaaataaacagtgggagaggtgaaaatgcagttataaaactgtccaataatttactaacacatttaaatatctaaaaagagtgtttcaaaaaaaattcttttgaaataagaaaagtgatagatatttttacgctttcgtctgaaaataaaacaataatagtttattagaaaaatgttatcaccgaaaattattctagtgccactcgctcggatcgaaattcgaaagttatattctttctctttacctaatataaaaatcacaagaaaaatcaatccgaatatatctatcaacatagtatatgcccttacatattgtttctgacttttctctatccgaatttctcgcttcatggtttttttttaacatattctcatttaattttcattactattatataactaaaagatggaaataaaataaagtgtctttgagaatcgaacgtccatatcagtaagatagtttgtgtgaaggtaaaatctaaaagatttaagttccaaaaacagaaaataatatattacgctaaaaaagaagaaaataattaaatacaaaacagaaaaaaataatatacgacagacacgtgtcacgaagataccctacgctatagacacagctctgttttctcttttctatgcctcaaggctctcttaacttcactgtctcctcttcggataatcctatccttctcttcctataaatacctctccactcttcctcttcctccaccactacaaccaccgcaacaaccaccaaaaaccctctcaaagaaatttcttttttttcttactttcttggtttgtcaaat

SEQ ID NO: 7942 - DNA, 3000 bp, Unknown
  misc_feature (1)..( 3000): cDNA_ID_1809791_gDNA_ID_1621175_Annot_ID_174143 3000 nt of promoter + ATG
ataaaagagaaaataactaaataacggtttaagtaatcactaatcagttagtgaataaagtgtttttaacatcatcaaatttacttcttagtttctgtaacgattttgtaaactcgttttaatatcaataaatttgtttagcggaaaattaaaccaattttttttgcattattgaattaaacaattgtttactgcattattaacaaaaaaaagtacttaaacctaattttgggaaaatgttaaaaagaacaaaaaaaaagtagatctgggagaaagtaggtagatagattgggaagatgagtaggtagctgtcttttttcatctctctcttctccaatcactctctccacacgctacttccttcacgtacctccacgtgtcctttcttatgattttatcacattcctctctcctttgtctcttcaattataaaaacatgaatattatttagattagttggataactgaattattgggtttgggcatgtgtacttggtccttcttctactgttgtgtctcttaagtttttttttatattttattttcggatttcacattgtaacgacggtccaattaaagaatacatttttaaaatgaatttactagtaacttgtaaggtacttaaatggtatcaatcaacattgggatgatttttcttggaaattggaataacgtcgctataacaggcgattagataaattagtcgcatagaatcgtataaatgttaaatgtttttgtctcacacgccccatacgtattttagtcctttgcacttttgcagaagttatcagaattcttttcaatatttaaagaggagttgaattttacaacagtgatgtaattctatctaaagcttaatttcataagtttattatagttctgtttttctttctcaatcgtaaacattttttcttatatagaaaaccccgtacaatctaactactattcaacgtaatttaactactgttcaatcttcaatgttttgtcataagctagtaatctatgcttaattaagaaagaaacataagaagagtcatgagcggatgggccttttgttcatagcattgtattggtcatgggccattacttgcaaagcccaacatggctaaccgcaaacaagcttctaatttcatcacgctacgccaaatgccaaacattgttgtacaacacttctaccttctgagtcttcctgactattggctaacatgaactacgacgttcaaagaaaggttcttcggaggtacactgatcgatatggaattggaatcgaaggttccctatgcacaaaagaacatggcgaaaacacgattcaaaaaaacataacgtccgaagcgcaactaaaacttaatatttcgtgttaaaagccaactaaaagttacatttccgttttgtaagcagaaagtgtgactattttatgtgttcttaacaatatatcatttttttttttactttgttaatatcactttctcatttctaaacgctttgtaatattctagcgaaaatataatttattaatgatttttatttttacatgcaaattatacgactgaaatgttataggaatagagacatgtttgtatcacaaaattaacttatgtaggaaaaacaaatagtataagtctatcgttcccctctctgttcaggcgtcaagcctcccttgccacatttaggacaactcttcataccaaatccttgacaatcaaaacatctgcacatattcaaaatcccaaattaactctccttaagtactcattgaactgtaaatttttagattgatatttgagaaccatgtgacattgttagttattacttacttccacctctcaaacatatttccgttcttcttatttttacctgttccctgtagacaacaagagaattttgtctagtatatgcataaatatagagtaagaaagagtaaaatgaataggtatggtctggaaaagattgatcatacactaaaggtattagtttattacatagtatctagtaatgaaaatcaaattagtaccttgcaaccgggacattcaattgctcctttggctccacaagtctcacaacttttgaatatctgtttatataaaccttttgaagaattaacaaaactcttcattgacgatgataacatatcatattgtatatggatgtatagtgaaatcttaccgaaccaagagagaaatttccgatttttcccgcagaaactttgattgtatcgcgtcgccccgaaacaagctgactttcaaaagctagaatcttcggttctaaagataactcactgcaacaaagtggaaatttcaacatttttgtaactcaaattagaactaggaagtaagatatctatgtacatctatatgcatatctatgcatacaagtgatagtgaatatggatggtgtgagaaagctaaagaatttgcttggttgtggtttgtggatattgaaacggatcatgtggagggaatatgttgacaaggattattgacttaaaatacataagtgaaagaagccaaaagaccctacaaatatccattgaaacaaattaaattataatttttacctaactaataaacaatatcaatcacaatttaattctttattttaaaacagtaaaaagcataaacaattaagagcttaacaatcattttttaatcaaaatatctaaacagtatacattcaagtaaatattactttatgcatgcaaaatgtaaatctgaattctgaatatgttaatttttctttttacaatgtatcaaattttataaattaagaataatatattttcttataaatttatccaattttaatttaagagtaagatattagttcaaaaagataaagaaagggacaaaggataattaattcaatgaacacgatcctaaaatagaaaagtacgaaaacaccccttatcttccgaacacttttccgatcgcaaaatgatcgcctgaaaccatcgccggcttcagagtgtttgatcgtttctccagatagatagattgatccaat

SEQ ID NO: 7943 - DNA, 3000 bp, Unknown
  misc_feature (1)..( 3000): cDNA_ID_2137036_gDNA_ID_1621175_Annot_ID_174133 3000 nt of promoter + ATG
gaccacccgttctcaaatgaggaatccaacgtgtttcgtagccaaaaaaaacgaaaaatatctacgatcaacagatgattaaactagacaaaataaacactagtgaacattttcatctacttgcaatacataaattagtttccaactactggtactagtgaacatttttaaatcatataacaccaaagtattgggagaaaacatagtataccaaaatgtgtcaatatccacaaaactttcttgatcattttgatggatttgtcttcgaaagttctcaaatctaaaactttcatgatatcagtttgcaaactgtaacgataactgatttaatttgatgaataacttgattgaaatttccactttcatgaatatttattactatgggtcctccaaacataatttcatgttaactgtgtatgaataatattcacatgagggaatttgaatggtgaatatcaataaattagaatcccatcatttgtaaactttgtctgtcgttggcaatgaaagtttctcatttatgtactcccatcacttccattattcatttaaatatcattttatacgaccgactaaatatataaaagaatactagaaattccagtagttagcttagttaagaaataacaatcgagaaaatatacatttacattgtcttttagagattaaaacccctactattcaagaaaaaaatgataaaattcgcttttcctaattaaaagagtaaaattgaataattgactggcatgatcgacgaaaagtcgattgctcctaaatactatacatgatacatattgttttgatgaaaacatccaagtgctctatagtctatacaaaattaaattgattatgattttaactgaactgtctgtgtagatgatcatatttcttccttaatggtcacatataaaagtgcattgacactctcacaaaaaacgtatgagtattaaccaacttatccattggaattggatctaaccatgcatttgctgtttttcacatcatctctcgattttttttctcacacacacagattctagagaatctaacgcaataatgctcctttttatatgcattaataatagaaaaaacatatttatttacgtattgtataattaattatcttttattcaaatcttattatatttaataaggatgacgaatgtgatcaatcatcggcgacgacgaccacgagtgctgagatgaagatgatcgtaggaagcaatggacttcgggagataaacaatggattcagaaacttcacaagctcttctacaagaagagtaaagattcagtaacccgatgctcctgctcttcctcaagaccttccttgattcgccgccggtatgttctccgtctgtggtagcgcctttggaacactctaccaacgccgccatgaaaggatctctcatggccgcaggggacgtgttcttcttacatctggtgttagggctatggttactccagtgaggagggagaggcaagaggttgcttaatgattcgtttttccggtgatacgagaactctttaggtttaccgggaagcttttcccatgaaaatgggatgccaagtggatggagaggagttgccggagagttgccggagaataggagggaattggaggaggaggaagagagtgatcgccgggttgaaatgttaaccgtcgaggagaatttgaccgagttggatcgtctagtaggtacaattcgggtccttggcgaagtatccattcaaaatagtgtttagttttggacttgagaacttgttgtctctttgatctcttttatataaaactttggacgtgtaggacaaacttgtcaacataagaaacaaaatggttgcaacagagaggatgaatttataagttttcaacaccgcttttcttattagacggacaacaatctatagtggagtaaatttttatttttggtaaaatggttagtgaattcaaatatctaaattttgtgactcactaacattaacaaatatgcataagacataaaaaaaagaaagaataattcttatgaaacaagaaaaaaaacctatacaatcaatctttaggaattgacgatgtagaattgtagatgataaattttctcaaatatagatgggcctaatgaagggtgccgcttattggatctgacccattttgaggacattaatattttcattggttataagccttttaatcaaaattgtcattaaattgatgtctccctctcgggtcattttcctttctccctcacaattaatgtagactttagcaatttgcacgctgtgctttgtctttatatttagtaacacaaacattttgacttgtcttgtagagtttttctcttttatttttctatccaatatgaaaactaaaagtgttctcgtatacatatattaaaattaaagaaacctatgaaaacaccaatacaaatgcgatattgttttcagttcgacgtttcatgtttgttagaaaatttctaatgacgtttgtataaaatagacaattaaacgccaaacactacatctgtgttttcgaacaatattgcgtctgcgtttccttcatctatctctctcagtgtcacaatgtctgaactaagagacagctgtaaactatcattaagacataaactaccaaagtatcaagctaatgtaaaaattactctcatttccacgtaacaaattgagttagcttaagatattagtgaaactaggtttgaattttcttcttcttcttccatgcatcctccgaaaaaagggaaccaatcaaaactgtttgcatatcaaactccaacactttacagcaaatgcaatctataatctgtgatttatccaataaaaacctgtgatttatgtttggctccagcgatgaaagtctatgcatgtgatctctatccaacatgagtaattgttcagaaaataaaaagtagctgaaatgtatctatataaagaatcatccacaagtactattttcacacactacttcaaaatcactactcaagaaatatg

SEQ ID NO: 7944 - DNA, 3000 bp, Unknown; identical to SEQ ID NO: 7940
  misc_feature (1)..( 3000): cDNA_ID_1809825_gDNA_ID_1621175_Annot_ID_174127 3000 nt of promoter + ATG

SEQ ID NO: 7945 - DNA, 3000 bp, Unknown; identical to SEQ ID NO: 7939
  misc_feature (1)..( 3000): cDNA_ID_1825906_gDNA_ID_1621175_Annot_ID_174126 3000 nt of promoter + ATG

SEQ ID NO: 7946 - DNA, 3000 bp, Unknown; identical to SEQ ID NO: 7938
  misc_feature (1)..( 3000): cDNA_ID_1825902_gDNA_ID_1621175_Annot_ID_174125 3000 nt of promoter + ATG

SEQ ID NO: 7947 - DNA, 3000 bp, Unknown
  misc_feature (1)..( 3000): cDNA_ID_3047017_gDNA_ID_1621175_Annot_ID_174122 3000 nt of promoter + ATG
atccgaggctttggatgttctcaggctatctgttgatccaactgatcatgatcttggtttctctaccaccgactgaaatttgcaatgcgtttgctcaactctgttttcttcttttagttttgatatcgactccttttcttttcttttttgggttttagtcttcctttactattttagcagtttttttttgtttacttagtttatggtttttgtgtctttaacttagtttatggtgtttttctttttctttggacaatgatgatttcttaataatctgagtagacttcttcttccgaatccccaaataatccatctctacttgaaatttaagttgttcggtattcatggtcagcaacaagggacaatccttctattatggtagcagccttctattatgaatttattcgaatgtgtctactcataatttgtggtttgtatttcaacttgtagttgatatcaattatatgcacacagactttttctttttgaggggttggaagcaagcgattcaatgattgtaccactcatttcataatagtgtttgatatgacgttaatttgaatggtttatgttgatcgaaaatactctcagtcacaacaagaatctaattcgattaatttatttgaaaaacatatgttggcatggtacatgaaccagctcgttcatatgaaaatattttaaaaagtcaacatcagtgctaatttcaaattgaccatacattagcacacaagaagactaacaaaaaaaatgagtgaataaagaagagagtgagtggggttgatacatgtcaccgtccaaaatgtgtctgacccttctcattggagctacaagagccgaccctttgcctcatcatttgttgacttcactctccttttacatatttaaattataacttgctcatatttccattcattgtgttcggttctagattgttccatccactttcttttttctcttactttgaaatttagaaatatatgaatacttgacaaatatttgaatattgtaactgatttgtttgttcgtaatacttgacaaacttttttgaatatacacctttacatatattttgagttgagataaaaagggaattatgttagtttatggattatattatgtaaataccacatctaactatgatcggatgaaaactaaaccagcatatctctaatcagtaatatttactaaatttatatatcattaaagattttttgaatttagcaaaaaaagaagaagatatcattaaagatttttaaatttaaagtataacataatgaataaatcaagtgttgagcttagtttcgcgttgcaaagatgttcatttgatttttttttttttttttccatttgatttttcttatactaaattgattgatgtcacggtccttctgtgaaaaaagtatattgtactgtataaatttataatagtcatacttgaagataactaatatcattttctaaaggttttgttgacaatgaaatgggtaatgatgaacatctcgtttgctaaaccacaaaagaaataattcgttggactataacttaaacttataatatatcaactgaaatgcctacaatttgagaatacgccttttcaaaaagttttagaattttataaaaatttctccaccataatattactttaataaaagcttgttattaaaatgatatattaacaaaaaaaaaagaggtaggcaaagtagcttttattaaaattaatgttttccctaattggtaaatcataaaccaaaaaattgaggtaattcttaatatatttactatgattagaatgatacattaatgtaacattttatcatcttcattaataatagtaagttctcctcaaaattacaatttgatatcaaaaaatatatttgtattacaagcaattactgaaaaattaaaattacaatttagcccagttacataactccacgtaaggtttgagcccatcacatcacatggtacatgaccaaagcccagttatgttaccatggagtattcttcagacaagagccatccagacagaagtggaccacacaatcacgaatcgtatggagatcattacaatatattgctcacatcttattgcgccacgtctcttatttggcgagtgatcaacgtccacagatctcttgctccactctgattggtacacgtcatcattttattgtgctacttgtttatgtggtacagtagagacaagtggtaagattttaaaatatcttaaaagatgtgtgaggcccatttagatattttctcaacgggctgttcctcaaaagctgcccgtttatctacaaccatcgaacggctcgaaactattctgggctagctgcccgaaatctcttaaaggaatttgttgagtgggcttgaatcaacggtggataattcgaaggtgtacgtaacatctcgtagcatctgaacttagctcccctcaaaatatctgtggacatatgtcactagctttttttttgtgtaatgaaactattaattaattaggcaatcacatgagagatgttatatacttaaattaataactcaataatacaatcatgaccaccaaaccttgaaataaaataatctctctgattacttgtacaaattctttaccaatatatgccatactgtgaatgtaatggtttattttaaaacagccaaatattattgatataattatatgtttaagtagattttaaacttagctcatggttaaaaatagacagaattttggagtaaatctgagtttacaaaatttatttattaggattaaaattaattacttaaattggcaaacatttttcttggtgattgtaacatacaatatacgaatttgaattcgcattgtgattccaaaacaacactaacataaactaccagtaaaattttttaaaataaaatttcatatatatatgcttaaaaaatgtaacaaaaatatggtaaattttttaaccatggtatgggtggagatgtatgtgggatgatgatggttatatggtaatg

SEQ ID NO: 7948 - DNA, 3000 bp, Unknown
  misc_feature (1)..( 3000): cDNA_ID_3047025_gDNA_ID_1621175_Annot_ID_174120 3000 nt of promoter + ATG
ggaatgaatagtccgtcctatcgattcttcaacgccgcctcaatagactggaaagccgatatccaaaactgtttaaactgggaagctcacagcttgctctccacaactatgcctactcagtttctcgacactgcggctcgggaactcggctgtactatatccttgtcccaataacgagcacccacttttgtttttggtaaattttagttctctagacaaaacatttggacgtagaccaagaagaatatatatatagtttgttgtatgtaatgttgtaatgatgagtgactgacgcaatcactcccaccggcgttggatttgctctcgctcggtgtcttatataactcaacctcttctctgtacattttaaatgacgaagtagctcaatctttttttttgtgcgtctggtgtttagtcttcagtggattctaaatcgtaatgtatagaagtgaaaaatttacaaatttacttatttccgaatactcttaaaacagcaaaaattaatattgcaaaagataatttatagtattttaatctttttcctccaaaaaaaacattaaagggtaaattagtaattaactacaggagcttcatattaggttggaaaaccctaaatatgccgcttataacagacctgagcttaagctgtggtggcgcctccagagtctggtaaaagagcttaatcctcctctcgcgatctttctcggcatccaaaaatggtacgattatcgttcttcaactcttgtctggttctccaattgctcgtgcttcattttgcgtatcgctcgtttttcattgctggttttgggattggagttttaagctcaaatgttttttgtattcccttacacgatttgcgactgacggatctgttttttttttttcgtattcgtgtgtgtgtagtctctagttgcgaacgaggagtttcagcatattctgcgtgtgctcaatactaatgtcgatgggaagcaaaaaattatgtttgctttgacctcaatcaagggtattggaaggcgattggctaacattgtgtgcaagaaggctgatgttgacatgaacaagaggtttgtttcttagcttggttcttaatactttcagttacttaggaattctatggataaggattatgaatcttgcgaggttttggatgttagtagaaaatgtagctctttgactagaattgtacctgctcgatctggtttgattgatttctaggaaatcagatatttaggttttctttgcacatagaacttctctagattgatattcttgaagaagtttggtctagtgtgtgtttttaaatgttttttcctttgctggtatattcagggctggagaactaagtgctgctgagattgataacctcatgacaatcgttgctaaccctcgccagttcaagatcccagactggtttcttaacagacaaaaggattacaaggatgggaaatactcccaagttgtttccaatgctcttgacatgaagttgagagatgatcttgagcgtctcaagaagatcaggtaacaaacaacacatacagacactctcctctgtagtttttagataccatgttaatagtataatgatgcccatcataactttctatatggaagaagctaagtacacaactcttgtgttaaatcatgtatacactcattttcggcaacaaaacctaatctgtagtgtaatgatttactgatgcatcctttgtttctctcttgttgttctgataatcgatatagaactttgtttgtactgactgagattgtcactgtaatgtaaacagaaaccatcgtggtctgaggcactactggggtctccgtgtacgtggacagcacaccaaaaccaccggacgccgtggaaagactgttggtgtttccaagaagcgttaaaaagagtttgagcttggttcaatggctttgttttgttttttttgtattgttgttttttgcagaagagatagtttaagagatgttgtttcatcaaaagacggtcttagcttttacaatatataattgaatccaaaaactagtctctatttattacattctcttctctcaaaatctgctttaaacaaagttaataatagcacactcctccatacgcaagaattatataattagagaaaacttttaagtgtcacaagcggctgtctctataatgcgcaaatacatcgttatcagttttaatcactatcagtaactttactgaacttaattgatcattttaatttttcatgttactctctccttcttcttcacttgttctctttctcatcgcctcttgattcacgcgaacgagaaagcgacgatcgtaaccaccggcgctgaccaaaaagtaatcgattctcttcccgagctgatctctcaggtgcgtgaattcacttttttttttttcgatttttcccgagaaaaaaatccagcaaagagtagtagcgatgaagaagacgaggtttgaattgagattcgtattctttcggtggcttgaagtagcttatgcatgtttaaactcttgttcagttgtttgctcatgattcgaaaatggctttgtagatcttctaatataatctcttctctttatcaattcactagtgttctatatctgaagaaatttacggctacagatccaatctcatttcgtttcgttacactatctctactaagattttgttttttgttttttttccctctttttttgcgttttagatctcctccatgattgaagttgatccatgcttttgagtttaagtgatttatttaagatcctctaaacttttttttcttcacttagtggtggttccagtcaatttagcaagtaagatgttgtatgtgtcaatgctataactgtgaattttcagctattgtagtttgatttttgtctttgttagcttcaggtgtcttgaatctgaatctgtggctatatttggtgctcggtggtgagcaggaagggagggggatattgtcagggttttaatgtacgtcagatgaatagagcaactaatg

SEQ ID NO: 7949 - DNA, 3000 bp, Unknown; identical to SEQ ID NO: 7935
  misc_feature (1)..( 3000): cDNA_ID_1809849_gDNA_ID_1621175_Annot_ID_174118 3000 nt of promoter + ATG

SEQ ID NO: 7950 - DNA, 3000 bp, Unknown
  misc_feature (1)..( 3000): cDNA_ID_2137036_gDNA_ID_1621175_Annot_ID_57322 3000 nt of promoter + ATG
gtttgcaaactgtaacgataactgatttaatttgatgaataacttgattgaaatttccactttcatgaatatttattactatgggtcctccaaacataatttcatgttaactgtgtatgaataatattcacatgagggaatttgaatggtgaatatcaataaattagaatcccatcatttgtaaactttgtctgtcgttggcaatgaaagtttctcatttatgtactcccatcacttccattattcatttaaatatcattttatacgaccgactaaatatataaaagaatactagaaattccagtagttagcttagttaagaaataacaatcgagaaaatatacatttacattgtcttttagagattaaaacccctactattcaagaaaaaaatgataaaattcgcttttcctaattaaaagagtaaaattgaataattgactggcatgatcgacgaaaagtcgattgctcctaaatactatacatgatacatattgttttgatgaaaacatccaagtgctctatagtctatacaaaattaaattgattatgattttaactgaactgtctgtgtagatgatcatatttcttccttaatggtcacatataaaagtgcattgacactctcacaaaaaacgtatgagtattaaccaacttatccattggaattggatctaaccatgcatttgctgtttttcacatcatctctcgattttttttctcacacacacagattctagagaatctaacgcaataatgctcctttttatatgcattaataatagaaaaaacatatttatttacgtattgtataattaattatcttttattcaaatcttattatatttaataaggatgacgaatgtgatcaatcatcggcgacgacgaccacgagtgctgagatgaagatgatcgtaggaagcaatggacttcgggagataaacaatggattcagaaacttcacaagctcttctacaagaagagtaaagattcagtaacccgatgctcctgctcttcctcaagaccttccttgattcgccgccggtatgttctccgtctgtggtagcgcctttggaacactctaccaacgccgccatgaaaggatctctcatggccgcaggggacgtgttcttcttacatctggtgttagggctatggttactccagtgaggagggagaggcaagaggttgcttaatgattcgtttttccggtgatacgagaactctttaggtttaccgggaagcttttcccatgaaaatgggatgccaagtggatggagaggagttgccggagagttgccggagaataggagggaattggaggaggaggaagagagtgatcgccgggttgaaatgttaaccgtcgaggagaatttgaccgagttggatcgtctagtaggtacaattcgggtccttggcgaagtatccattcaaaatagtgtttagttttggacttgagaacttgttgtctctttgatctcttttatataaaactttggacgtgtaggacaaacttgtcaacataagaaacaaaatggttgcaacagagaggatgaatttataagttttcaacaccgcttttcttattagacggacaacaatctatagtggagtaaatttttatttttggtaaaatggttagtgaattcaaatatctaaattttgtgactcactaacattaacaaatatgcataagacataaaaaaaagaaagaataattcttatgaaacaagaaaaaaaacctatacaatcaatctttaggaattgacgatgtagaattgtagatgataaattttctcaaatatagatgggcctaatgaagggtgccgcttattggatctgacccattttgaggacattaatattttcattggttataagccttttaatcaaaattgtcattaaattgatgtctccctctcgggtcattttcctttctccctcacaattaatgtagactttagcaatttgcacgctgtgctttgtctttatatttagtaacacaaacattttgacttgtcttgtagagtttttctcttttatttttctatccaatatgaaaactaaaagtgttctcgtatacatatattaaaattaaagaaacctatgaaaacaccaatacaaatgcgatattgttttcagttcgacgtttcatgtttgttagaaaatttctaatgacgtttgtataaaatagacaattaaacgccaaacactacatctgtgttttcgaacaatattgcgtctgcgtttccttcatctatctctctcagtgtcacaatgtctgaactaagagacagctgtaaactatcattaagacataaactaccaaagtatcaagctaatgtaaaaattactctcatttccacgtaacaaattgagttagcttaagatattagtgaaactaggtttgaattttcttcttcttcttccatgcatcctccgaaaaaagggaaccaatcaaaactgtttgcatatcaaactccaacactttacagcaaatgcaatctataatctgtgatttatccaataaaaacctgtgatttatgtttggctccagcgatgaaagtctatgcatgtgatctctatccaacatgagtaattgttcagaaaataaaaagtagctgaaatgtatctatataaagaatcatccacaagtactattttcacacactacttcaaaatcactactcaagaaatatgaagaagatgaatgtggtggcttttgttacgctgatcatctcttttcttctgctttctcaggtaaactgttaaaaccattttcaagactaccttttctctatttcagacaaaccaaagtaaaacaatgaaaaatctctctggtctttcataggtacttgcagagttgtcatcatccagcaacaatgaaacttcctctgtttctcaggtaagagtgatacaaaaacatactaaacaaactttcaagagagtaatatataaggaaatgttggcttcttttttttgttgctaatcagacgaatg

SEQ ID NO: 7951 - DNA, 3000 bp, Unknown
  misc_feature (1)..( 3000): cDNA_ID_1809803_gDNA_ID_1621175_Annot_ID_57325 3000 nt of promoter + ATG
acccactcagggatcgagtcagggataacgttgaacttgttaaccgctgtgtgcgagtactcttctgttttgtaacggtaaatgtcgttgagctgctgaaaatcgagccagaaataacttctcatgtggaagctaagcgcgtgtagccgcttcactatcctctccatgaactctttaccttccgcgtcgtgctttagcatcgacattgctgatctaagagccatgaagaagagagcttggatctctatcggatacccgtaaaccccctacacaagtatcagttcgttaaacactaattctgtaaccaaacctaagtttgtctagagacctatctactagattcctaatgatttataaagagaagaaatagagggattatttattaccattcttcgatcgatcatggagcagccatcagcacaaagtaaggtagggaaagtatcgaaaccttcggagagacaaagagagagaatgagtctcattcccttttgacattcagatgtttcagctagagaagtgtctccggtggattttgtgtaggctctaaggagaatgatccaccagaaacctgagtccaccggagccactcttccaatcgcgctctcgccaaagtcagcattgatagagtcggtttccttgatcgggtcgtgaatgaccttgaaactagccggcattgcgccttcaccgagcttgaatcggtctattcttttctcccttccttggatttgaattgtcttgaggagaaagtttttaactatgtctggttctccgttcatgagaaaagctagtgcacttggaacaaagtctcttacgaaaacctaaccaacattttgaacaaaattgtaataacagagtcattacaaaacagaacaaggtttaattatgaaacacaaaaacaatccaaataaccaaacctgatcataattcaagacttcctcagtagcatggtcataagcagcgatagtaccaaccggttggccacgaaagtaaaccaatgatcgtctcaaagcatcccaagcctctgcaaccataggatgtggctcaaacgagtttctagccgaagacaccggagtttcccatcctccgggagaattaacgttgtcgaagattcccatttcgctgaaggacctctcgtcaaacgatcttttccgttcaatatttaccctcggccggtcaagtaaccgagccaattcgtctaggtcggatatagagcttgaagagtttactccttccatgaggattctttaactttgtgtttctgtgtgtatagatctggaacaatggataattataaatgaattaaaacgtatttgtttggacatgatgattaaggaacattaacgtaaaaaatgtaacggaaatattaagattggacttatctagattaaagtaattaacattagttatcgtcataactactgttcttatggatgtaacaagaaatcgttacaacaaaatgtcgaagctcatctaagaaggtaaggataaacataacggaccttaattacgacggagagataatctccgggcaaacaaatcagccggtgaagaaaaatgtgataaatatagaaagaaggaaaaaaaaaagagagagaaaggaagatgttagatataatatagaggggagattagagacgactacgaacgtggaaagtctctcatttttcttctctcattgactgtggtaatggtggagaagagagagatgaaggcatgaagggtcgtagagagcaggtgattggagcgtggcgttcacgcgaagaaaacgacatcgtttttgagtctgacatgttaatttggcttaatctctgtcgattgggtcattggacttttcgccggttcgatcagctttttctcgagttttgtttcgtttagacgactattatgtttttgtcttcacttttaaatttgactttgtataatgtgataggttgaaattgaccaattggcgtaacttggtggtgaaatcaaatgatttgtttctggagtactatatgtttcctttttggtttatacaaatatggtaaccaaaaccgcatccaaaaccgcaccgcaacagtgctgtaatagtatcaaaatctttacatatacatatgtatctatgtattttcgttactatttaaaccgcaccgtactttttccgtaccgcaaaacgcagtcaccattcggagcctaagttttttatcaaaaaaaaaatgtaaaagaaagtggttttagctatcttgaaaatcaatcataattagtagttgatcattgcataattgaaatattcgaggattagaaaatacgttttcatggcaagttgatgtgtacattaccgtcaaatcaaatataacgtggatttagaaaataaatagaaaccattgtcagtgcatgcggttcacgtggacgatgttaaatccaggattgtgtttttgctttcaagtcaggtcttatagttgatgggaactgaacttagctagctgtaaattgactttttgcatttatgtacaatgcctttacctgtttttttgtttttttggacaaccatgaagttcggagccggtactcgtatctccatgagtcgggatgtgttttaatttgtgctaatacaaatttgtgttgtagtctctctttgtacgtacgggtgatcgctacttttgttggtatacatgatctaacgcatgcgtgtaaatctatttaaagacctatacatagtttcgtaggtttcacgtaaagtcttcaatggttgaactaaatagtgttactcataatcacctatccatttgcaccagatgaaagagacgtattcattttcttttcccgcttaaaattatatattgaattgatctaaataaccgattcaccaattgtatatcttagtaaaggaaattgggccactattgggcctaataaccattctaacttttacggatccgacttagcccaaacacatcgccggttcagaacgctgccgtaaatcgctgcatcggaaaaagcacgatgatactaaaaaccatg

SEQ ID NO: 7952 - DNA, 3000 bp, Unknown; identical to SEQ ID NO: 7942
  misc_feature (1)..( 3000): cDNA_ID_1809791_gDNA_ID_1621175_Annot_ID_57328 3000 nt of promoter + ATG

SEQ ID NO: 7953 - DNA, 3000 bp, Unknown
  misc_feature (1)..( 3000): cDNA_ID_1809897_gDNA_ID_1621176_Annot_ID_57331 3000 nt of promoter + ATG
ctatggtagtgtgagcagagacaaagtttctgtaatattcatctcttccttgctactcattcccttactctaactttgtctgtgtttccgaattgattcttttgggttttgtaagtataatggaagaagcactgcaaatgttgttcttgtcactacctctcttcaacaatctaaacatgagaagatgattattgctgggttaagattgtctatattggagagaatgtcccctggatgcattaactgtaactgggcaaactttgattttcaagaactgaacaaagtttgaagcttttgaaccgctgaaatcatataccttcaggcttcagcccttgatagaccaatagagcgacataaaataatcattcagactttggtaagtgttgggactcactgttacgtgagagccctccaaaaataggcgtatgccacttagcgtggagagcacacggtattctttagtaaaaggcgaaagaatagttcgctttgtgctcaccacatggctgcgtgaatttctttaaggaagagtgaagtctatttatataaaagtttcaactacaaactctttcagctttccgatgtgggatacatgaaactccttgttaaatggttttgtgggatactaaagcccattaccattctttttatacttgtttatccatttacaaaagacttcaccaacaaagtctcattttttttttcttgaacaaaacaaagtctcattttaagtaaggactgtacaatgttgatttcgtataagctaattcactggatatataaccaacatttacaaacagtataattctacatttcctatactctctaatgtgcgtaacaaacctgtcttgtacactaccgctcacccgcctattcgttctagctagctgcttccgatcttctcaccatatccaatggaaacgtagctgcaattttgtttttcttagatgagacattttacgtaatgcatcaattctatgaagtggtcctactgcctatgaatgcagcatgagataagcttcattaggatatacaccaaaaccaaccgtgaagaataagactcaacgtgaaactcatataaggccataagagacattattcacaaatagaatgatataggtaaacattgtttatttctctacttttcactatgttaaatgatatatatctcttactatgttaaatgatatctcttaaaagagttatatggagcattcaaacattgctccaacgattgagagaatcgcgacgatcatgaaaatgtataagacatcttggtatgatgcaaaaagcacaccaaaagtagtaaaatgggatcgttaatttgttgcaagagttttaacatgaattcgtaacattcatcatcattcatgacgttaaaaagaagtataattaatagcgagcctattgaaatctgacaccaaaacctctttatagcttctctcttgtttatagtaaaaagattttggttatggtgatatatatagtaaagcttaacaatcatattgacatttacataaacgctcgggagggtaacccttccaaacaaaacgttgagaacattcgcaacgtacgacaagatcttttggcgcaccaggcatttttttgatgtcgcttatgcatgtatcctttccattagttccacactttcctggaaatggtctgttcatgtcgcatccccattttgttttggattccacctctattgagttatgtcaaccacaaaaagatgtgtcaaattacaaaaccattaagataaaacaattgataatgcgaataaagaaaaacgaaagttacctctaacatggctgagaacaaggaatgtgatcagaagacaagaaatcataaacaaaacaccacatttcataacttagaaaatgattaattgatcgtctcctttagtagcaaatacttatagtttatttttatttattttgacaacaacactcataataaatataactcaacacaagataaaattagatgttctattaattggggaacaaagaaaaaaagaacgatggagccaagtctacgaaatcgatgggatcggtcgtttattgtttacgaagttcgcctatgcaaaattataattttctaatccattcacatcccaaaaaaaactgaaaacttcatattatagaaattcataaatatctcacaatttattctaatacgcaatatattgacataatattttatatataagaaaaattagtgatgagttctaaagaagattcattaaaacaaacacaaaactatgtattaatattatacatttattaataagaccatatatttatatagagattctaaaaaaatattatcgctattgagttttatttaattttatactagccaaaatttaatattattttacagtatattattaagaatttatggtaagtatgctaaaactaacatatcgaataataatatgtaaaattgtaaaatacataataactcttaaattcctatagtaagttcacttttcagttattttaatatcaattttaaaatcatagaatattaatttttcatcgtttttgttcataagccacgtaaaccaaccaatgggacggatcataacaaaactcaacacatatcaaccattttaaatcatccgaacatgaagactacatcctcgaattcgataaatttacacaaattctgggtttgtatctgtttaatccaggaaagtgcaataaaatcgaagaaattgtgtaatttgctcaaaacattgatgcccacaaggtgttcgacacaattcctcaatgggacttcgtaaaaagagctgttcgagaagaagacaccacgaattgggttcccactcactgctcgtctctctagtcacgtggatctcacgtgataaaagcttcatcatctactatcacgtggatcacacgttataaaatcttcttcttctcgttatcatttccgtttattttcccgcctcgcaaaccctagagaccaagaaaacacaagaaagctaacagaatcatg

SEQ ID NO: 7954 - DNA, 3000 bp, Unknown
  misc_feature (1)..( 3000): cDNA_ID_1809893_gDNA_ID_1621176_Annot_ID_57332 3000 nt of promoter + ATG
gaggttagttggtaactttggctttatacaaagatctttcatcttccctttgattttctgttttaacatgttcctttcattataatgtatgtatcttcttctaggaagagttagaagatgcagcaccaccagaacttttatcagagaaaaaacaagagaaggcgaagaagtcagggtcaaagaagagaaaccataaaagcacgaaggtctttgatggtctaaactctatgtttgcttctctgacttttttgattactcagttgtacgaatgaatggtcttcatgccatatcagagaacttcagcgagcatgtctagtcatcttgaccaggatgtcgaacagtaagtactctagatgagaaatttggtttataaattgtttttaggttttctctgagcaaaacgtgttcttaaatatgtccagtgaaatatagtttgtcaagatgagaaatatagtttctcaagattcttttgcaaattgttaaactgtttgtaggttttctctgagcgtagaattcggataattcttcaatatttgttattatctagtctagtaattattttattttaattaggattattcattcaggattttctaggggtttttggttatcttacaaatagttttgtttgtttgatgagaagcctatctcgaaccacattaaacttctgcttcatcacacaaaacgtgatcttacctcaaccttaaacctttcacactaaacagggcaaaagaagattctatggaactagaggacgacactaaaggtgaaaagagtctatttgaaatttcatccaacactaataatcaagaggaagctactaaaggtgattctagttgtaaaagatcttattgattgacaaatattctaaaactctattgtcttgagcttatttctttagcatgtcatcttaaagatatgcaaagcatgcctcgagaagatttggagacagtaaatggcaaagctgcaactagatacaattcagctcttgacatgatgttgaaggtaaagcagtcaacaacaaaaataagattcaaaacctaaactctctttttctgattcaacatattctcagttttcatgtatctctttacttccttacttctttgaatatttttttgctactgcagtccctctgtaacattaaggttcttaaagaggatttagtgaacaatcggaaaccattttctgaaaaccaagttccttgtgcactacgagatttcttttctgcttttgtctcggagaagataaaagaagaggaactctatggtcacctactgagcaacttacttgattccctagaagaacttcattccctggtttgtgtagatatagataagcttctgagtactattattattatcccgaatcggttagaatgttgtctttaatgtcatttgatttttttgttaaactcatttcagtcaagtaatgctgctgaggtacttgttgcaatcctcgagttttgtcattgctggaaaagtccagaaagtgaaagcttggtaactcgcctttttacattggaggaatatgaaagaatgagttgtagaaaatgcagaaggaagccaaattatccagagcaaagttcttatggaattgttatggctgcagattcaatcagagacctagaggtatgtttcatttattcccatattttacttttctacagaaactggtacttaaaatgcttgtttatatatgcagtgtgctttggggaatataatgtttgaggacacccttaaagtaatccgcatgaacaatgaaatgatatgtgatgttggaacaggaggctgtggagagagaaaccttgttcaccacactataagtagatgcccgcctatcttcacaattggtaacttttgaccatgattgtgatcttatactcatatttcatttatttcggtatgataaaacattgttgctacttttttttttggggttttaacattagtgttggaatgggagaagaatgaaactgaaatagaaatatatgaaacaacaaatgctttgcactgggagatagatatcagcaggttatacgaaggcttagaaccaaacactaactaccggcttgtgtcaatggtaaaatctgaaacatcgtgacaaatgtttgtgctattgttcttctgtatttctctactacagtctgagaatttgggaatgcagattggttgtgttgaagaaggagaatacatttgcatggcttatgaaaagaaccggtgggtgagccgcagacatgaagcttcagcagaggaggtgagatgaaacagttgcctttgtctttattgccctgaattgtgaactttgttgggataagacatatattgatgtgtggtgatgccataggttgttggcaactggaagagtgtggtcaaaatttgtggagaaaggaagattcgttcagaggttcttttttatgaagctgttcaatgatagaaatgtattagtatggaactcaagtttgtaatcttttggttcattacttgattttagtaataaagtactaataagataattgcaacaaaatatataaacaattgttaacgacttaaggtttttgttaattcctcttacacaacataaaccaatttcgatcatcccatgaccatctttgatcccgaattcgaaaacttcacacaatttttttgtcttatctgttaattcacacatttctggggtgtttttttctgtttattctggatggcgaaattaaatagaagctgttgtgtaatttactcaaaacaatgaatgcacacaagatgttcgacagaattccccaatggagatatcgaagaagaactgttcgaaaaagaagacacgacgacttgggtttctcttgtcacgtggatttcacgtgataaaagcttcaacaactctgttacgtggatcacacgtgataaatgcttcatctctgttgttattatcatctccctcgcaaacaagtttctatctgaatctcaagaagcttgaagaatcgttcgttactctttccttaacatg

SEQ ID NO: 7955 - DNA, 3000 bp, Unknown
  misc_feature (1)..( 3000): cDNA_ID_1809889_gDNA_ID_1621176_Annot_ID_57333 3000 nt of promoter + ATG
tctgtttttaggatatctaaatatctaccatgccatgtctactactctatgacttacctactctgtttttaggatatctaaatatctaccatgcatgtcttgactattgtatgtttgtatgacttttgatgcggttgtgaatgatcgtagtttattaaagttcttgaaatatttttatgattcaacatttgcattcttttcttctgttaaggtaacatcaaagtttttagagatgtcactcagaaatcaaaaaccattttgaatacatttattgctctccagtcaaaaatcaacatctttctctctttattcactttttggatcaaacctacctaagcaaagaagcaaagatcctagatcaatccagaatgtctcagctagttacactagtcctgtactaaacaagaatgccatatcattgttgaaacccccccaactataatgcctctcgtcctcgtcaaagcatgcagcccaatgatggcaattttgagttttatgcgtttgttaatgatcttttaagttattaaattttaggttgtgtacatcttctactaaagcttcatgtttaagaactttgctttggtttatagggctcccttctgcttctctcatgttcttccaacgttaaaaggatagtatctttatacaagtgttgaacttgataaaatggtatccaagtatctactattcaatgatcataacaatcaaaagcattgttctatacttactcctataaagtttttgacttctacatcaaattcctttcctgcaccatttgaaaagcttcttctattcagtcttcagatccctgctcggaaaacatctggtcctttagaatagcctgcaattcaagtaggtggaattgagaacacacacacataagcaaaataaacatgcatactcagtcaaaggagcttacgttttcaaagaatagaatctcaggtcgaatatgcagttctcgaaaaatgcggagaacaccatcccagtctccaataacctggacaaccagcaatatacatcactcagtcacagatcaacaacatactagcttgtcttttacaaaaatgtctataaagctttacctctatctcagaacaaaaatgtctgacccatctattgttttcataagctacacagttgtatagatttccatgcgaccaaacctgaatattcaacattggtaaacatagtaaacttaaacggaactgaaacaaattaaaaatcaaatacttggacccttaccattgagacaagacggtatttggtaaatgcactgtcacctacatatctatatatagcactaatatctatttcagtcgccagaacagaagctgtatcgaatatctctttttcggtctcattgttctcccactgaagtgctataaaaaataagagaaaacaagctcaaaactactgcattatgttgttaaagctactaaccaattaacaatccaaagcttaccaactataaaagcagatggaaggttacttatcatagtatcaacatagtttcgtttcccacatccttccttgtcacaaagcatctttacattgatcatgctggccttaatgatattctcaaatgtaaactccttgaatgcagactgtgattacccaaaaacgttcaaagacttaaagactctctctttcacatcaaagataagagaaaagagaaatgacttgccttgtatactctgagtgaattagcattgatgatgataccataagacgtttcacctgaatatgccatatccgtcttgcacctaatgcaaatcgttttcgctacttcattcacttcaaagtgatagttccagcgagggataagctccaagatgtttagaaacagtttagaaacaccgtttgcttcctgacaaaaatatgaagcgtgagaaagaagtaatcaacatacataagggtttaaagatcagagctgagaccagaggatgagtgagactgagattgttgagcatgaaaatacgaagaatgtcttgtagaggaacagattcattatctgtgaggctctgattcgcttcttgaacataatccatcgaaagattgcttacgaaaacgctaatgttccacagagactgcacaaaatcaaattcttgaaaacattaatcaaaaaaacaagatcgataacaacagattcgttttggattgttgagttctgcgaaaccttgagtatcatatcaagagctgaaagtgaagtggcgtcgagtatcttctcttcaggctcctctgtatctgagtctgagagatctctgaataaacaccaaggagagaaaattctcagagaaaatcgaacgaaaaaagcataaagatactcgaaaaatgagatttgactacttacgaatcaatttcttcgtctttctccatttctttaacctctgatagatccatctccatgatctcgctgggactgatagtaagaacaacaatggcgattttctatctgaattttctcgagaaaataaaagaaacagagagagagaaaatgaggaagcgtggaagagaaggatttatagggttaggagttagttggtttgttcacgtgagggtcacgtcatctgttaagaattgagcgcgaaaattattccacagagaaatcctaaatcgtgtattatagtattgtgaacttttgtcgaacatttggtgggcacaatccattttttcctgattatatcgattcgtgatatcacttcatgccttctcatacaaaaaaatatatacataaatgtctttagtgtaagaaataaaaacaccaaagacaatcctgaatttttaacctgaagaatgctcacaaggtgttcgacacaattccccaatgagtcttggttgttatttttcttaaaaactcttgtcacatggctctcacgtgataaagtgtgcgtcactgatacatgaccgtcgattttcccgcgtctaccattcagttttctctcgcacaagtaaaacaagaaagcgcaagaagcttgagaatcgtcactcttcccaaacatg

SEQ ID NO: 7956 - DNA, 3000 bp, Unknown
  misc_feature (1)..( 3000): cDNA_ID_1809878_gDNA_ID_1621176_Annot_ID_57336 3000 nt of promoter + ATG
tgaatagaagaagcttttcaaatggtgcaggaaaggaatttgatgtagaagtcaaaaactttataggagtaagtatagaacaatgcttttgattgttatgatcattgaatagtagatacttggataccattttatcaagttcaacacttgtataaagatactatccttttaacgttggaagaacatgagagaagcagaagggagccctataaaccaaagcaaagttcttaaacatgaagctttagtagaagatgtacacaacctaaaatttaataacttaaaagatcattaacaaacgcataaaactcaaaattgccatcattgggctgcatgctttgacgaggacgagaggcattatagttgggggggtttcaacaatgatatggcattcttgtttagtacaggactagtgtaactagctgagacattctggattgatctaggatctttgcttctttgcttaggtaggtttgatccaaaaagtgaataaagagagaaagatgttgatttttgactggagagcaataaatgtattcaaaatggtttttgatttctgagtgacatctctaaaaactttgatgttaccttaacagaagaaaagaatgcaaatgttgaatcataaaaatatttcaagaactttaataaactacgatcattcacaaccgcatcaaaagtcatacaaacatacaatagtcaagacatgcatggtagatatttagatatcctaaaaacagagtaggtaagtcatagagtagtagacatggcatggtagatatttagatatcctaaaaacagagtaggtaagtcatagagtagtagacatggcatggtagatacatagatatcctaaacatagatagagcgttaacttcacattcagtttttacgcttaaaacagagtagtcccagactctagagtagtagacctgacatggttgatatcctaaaagaagggatggtttttatgggagtttttaatttcacattcaatctctacctccaaagtcccttcacgatccaagtaagccccctcatttttatcgaaagacatggattgaggaagaccccacgctttgttcgagttcatgagccaacagttaactacagaaacaagcaatacattagttataaacttaataccactagtttatagtcaaaggagtaggacatttgacattttaaattaagaacgcctattgaaaatgtcatcagctttgacaataaccattgacaaatagtaacatcaaatagtttttgacttacggcttcctgttaggtgattggatccacgcgggtctagaaccttcaggtttactcgcacgaaaatcagctcacccttggctaaagtttcaccgtcagctaaatgcaaatgctgaattaacttgtcatctgcctcagagtccccctttggatacaactttagagtcctttgaaacataaccatccacttgttagcaagttaccactaatgcacacatacaacaatatctatcagaaagaaaaaactcaccaatccttttctcccatgtgaaaggttttggatacgtaatcattctgttccagaagagcgaaatcacgaatagtccaagagaatttgtgaaaagggagatcttcaccaaaagaggcgggtcgtgaaacaatcttcacatgagcaccgaactcatgttcttcaccgtacaagataaatccctttgcacggtctttgagtgtttcaaccggaagagcttttgacaatccccaaaccgtttttgaagaattgaaacgcttcacttcaacatctacatgtataaacacatattagagcttcattcttatatatacacagagaaagagagagataagagcatacgaaccttgaaaagagaggtacttcttctcttcctcgctgaagacaaagaaagtgagataggcaaacacatcaatgggtggtgttgtcgatgagaggcattccacatacatagacacaaacccacttccattgtccgcttcgtttccttttgggtgaacaaccaatctcctgatttttacaaaaaggacaacatttcttacttatatatgtatacagtgaagaaagatgggaactttagtgaagaaaaatgtgaactttagcaaagaaagatgagaactttagtgaagaaaaatgtgaactttttagcgaagaaagatgagaacttgaagtatagaacaagatcacataccagttgtgtgcaccagaagagaaaggaggggactcgtatttctcgttagcaagctgagaaagtctgacaagagtagaggaaggaggattccttctccaagtcttcaacactgcaggatctgacgcatttgaacccattttctctacacaacttacacaagagaagatttttttagaattccccaaacaacagagagatctatagaaatttgtgtgctttattctcttaagagactaaagaagttgaaagcttaaagaaagaaatcgacgaaccttgacggagatggaaagagccttgacggaattctgcgtcaccttgaagcaaagagagagattgaaaaaggagagagcttttaagggattcttcgtcactaacaagtaagaagagattttctagggtttagatattattttcatataacgggcctaaagctacaagactggcccggctcgttttttattttagcttcttctgcttcaaaacgttgacgtttcaatctccaaaaaagtgttttaagattttgataatatgtactcgaagagctatgtaatgttgattaaagcttcataacaatttttggcgcacaattcttaatatatatcacgtgaggatcacgtaaacaaactaacagactctaaccctattaagtcctcgcctaatcgcctttggtcttctcttcaacttttcccattttctttctctgccgtttattttctcgagaaaactcagaaagaaaatctccattgttgtttttcttgggaaaatctgccaaagaaagaaggttttgccttcgatcattgag

SEQ ID NO: 7957 - DNA, 3000 bp, Unknown
  misc_feature (1)..( 3000): cDNA_ID_3047046_gDNA_ID_1621176_Annot_ID_174173 3000 nt of promoter + ATG
gtttcgtctccgatttaatctttctacgtcttggtttatgaggtaagcttgtttcacaatctttcgttaggatttctgatgatgacgaatctaccaattttgtttctcgtggaaatttgattcagatctcatctcttccttcgattttgcattcttctgaatttgtttataatccttatagctattcattgttcttaattgaattagatttgtctcgaatctatgaattacggttgaaacgagacttgtttcgactgctagggtttcgtatgtatattcaggatgatttcgttatcactgctaatctgttttattgctcttttttcttgcagctcaaaggagaagcccactctcgggtatgtgaattttaaagcttttcgacatttatttgttttgtagtttgagcctttttgtctatgttaatttctctgtaattcgtccatggaagttgaaaacttaggttctgatgtttatggttagatttagttctgaatctctgaagttgatgcataataatgtattttgaagtactttgaaatgaattgtgagaagactctcttcccttgatctggctattgactcttctttaagttgtttcatcttttgttagaaattgttaacatgagcattaagtttagaatgattgtaattataagtttgtgtttatttttatgtgtagaggtacgcggattaagacccgcaaaaggaatattgctgctcctctcgaccctgctgctttttctgatgcactagttcagatttatctggataatgctggtgatctggtactttttttttcgtgttttaagtatttatttatctgtttttatttgcttgtaaaatgtcgtgcaccttaacttatgactttgtttttgttttgtcttaggaacttgttgccagaagtttagagtcatctgatcttaatttctcaagatacggtgatattttctttgaggtaaattctccatatatcaatactgtctcagctatcttctattgcctgtgtattttttgttttcttgtagcaaggggctttttgttttgcttgtctttccgagatttaataattgatggatctcttttattatataaggttgttttcattggaggacgtactcaaactggttcagtgaaatctgatgaaggggaacgccacccttactctataatcgactgtgaaccaaagcgtgaagctattttaccatcagttgtatacatacagaaaattttgcggaggaaagccttccttattaagaaccttgagaatgttacacggagattcttacagtcactggagctttttgaggagaatgagaggaagaagcttgcaatattcacagcacttgcattttcacagaagctctcaggattacctgcagagactgtcttccagccattgcttaaggatactcttgttgccaaagggatagttctcaattttgtaacagacttcttcaatgaatatttggttgagaacagtcttgatgacttgatttctattctgaggcgtggcaagatggatgacaaactcttggagttcctgccacccacaaagcggactacagaaagttttgccgagcatttcacgtgagttttaatttcttgaagtttgctgcattcaatagtataatgttggttctttttttacttgttgtagtttccttgctcttctgtttacctgcgtttctctaaattttagtcgcttaatactgatatgattgccatttctcattgataagattaaattagtgaaaatgcttctatataggttaacttttgtcactagtttgttgtgttcaacaattctcagttacttctgattctgtattcgattatcacttgtcttttatctctgctttcttattgtatatgtaaaattgatatatctgctatacttttccttctgattttaagtaaggcaggattgacagctctggtagagtacaatgaaaggaaaatatttgaggtgaagctgaaggaaatcaaagcggtccttacgagccaagtgacagaggaaataaacgtagatgaagtgactgaaatggtgaagcaacaggtgaaagatgcaaagctgccagagactgaggttgtgcatgtgatctgggatgggataatgaatgctgttcaatggtctgggaaaaaccagcagcagaattcgaatgctgtattacgccaagtgagttgattttctattttattttgaagcaagattatgttgttttgttcaaagctaagctaagctagccgctgttttgtggtaggtgaaaacatgggcaccccttctgaacacgctgtgtagcaccgggaacatggagatggaactgatgtataaagtacagatgcaatgctatgaggatgcaaagctgatgaaagtgtttcctgaggtagtgagatctctgtatgaactggatgtgcttgcggaagacaccattctgcactggtatcgcaaagggaccaaccctaagggcaggtactattttcgagtttttcacaaaaacaaggttaataatagtattctcttagtaacatatatgtaataatggtttgtgttggttttgcattgcaggcaaacgtttgtgaagggattggaaccgtttgtgaattggctcgaagaggccgaagaagaggagtgagtgagacgctctgcttcttgttttctctttttactctcttctaataaaagaaagacaatattttacttctcttaacgcaaaattcagatgctctacattgttggtgacttggtgtgatctcttttttgaatgaataagtacttctttagttgattatttgttggttttggttaacctctttgtgaggtaatacaggaatgtcatcttgaaaaatactaaccaaaaaataaaaaatagagaatataaaaccttatccaaaagtagggagattgtgttatttaaaagggaaccacagaaaaaaataggcgaggaaagaccattaagccgttggccacacaatcagatatcataatggaaatacactccg

SEQ ID NO: 7958 - DNA, 3000 bp, Unknown
  misc_feature (1)..( 3000): cDNA_ID_1809866_gDNA_ID_1621176_Annot_ID_57340 3000 nt of promoter + ATG
tgtaatcatacataactccttcaagtggtcctgatgctttagcttgtcgaagataaatcgtgttggttcccgtgcgtagcaaccttccaggtacattgatgctataaagccgatagagtccatggattccatgtcttgctatagcattatctcttccaatatatcccgttgagaaaaatggcctcgtgtattcgttattgaaacgtacttgtagattagcccatgcagccgaggctaaagctagctgcaatgtgtagctacctcgcatgtttacatatggaagatgaaacacagtctgccatgtagttggtgtgtacgttgaatcaccgatttttcttgtgacttgagagtagaaccagtctttgctatagttactaactccaattgtgtagatgaggtcatggtttggatataactctgtgtatcgttgccataatccgtactgcctaaacttgtccgtgtggtttagatataaagggttcattgtgttcttgtatggctccggtacaaagtattctcgagctcgttgatgtggatggagaacattattgactcctttgtatttgatgccagttataagtccttggggactcgagaaactgacactaataatcccgttgtccactatcacctctctagtcccatgtttgtttcttatttgttgaacagttggagctcttccacttggtccatctaagtttcttatcggcctagaaaacgcgattggaagaagaaacaacagaaaagaacagataattagcgaagttatcttcttcttcgaaatcaactttgctttcaagatctttagatcgaaaataatttaagaaaagattgttgcttcaagttcctcctttggatgtggagtcatgacatgcatatttatatgcgtaatgcgtatgtggttatttgttaatcaaagtctaagactcaatgggaataggtgcaccaaaacttaactaggacttactttgacattcatttaatttgtctgataattgtttttctattttaattgttgtctaagataatattgaaatatgccatgaaagaccgaccaagttgttgcgaaagggtatatatcattaacatgataattaggtcttacaattagtaacgagcccaacattttggatccttggcaaaaagaaaaaacaaggattccagttttcatcgcagcaacaaggtcataaaatttcaaaaagattttcctatctattctagcagtggtgtttttacttcactattgatgaacttgaagactgcgagcgtagagaggctattggatgtgcagaccattgttcatttggttccataggtgaaagaccgaccaaaaataaaaataaactattggaaactagcttgcgaatggataacatatttaaacaaatattgatatacttaaaagatggaaatttgatgtatttttattttttttttatttttttttggtctttgctttatcagtagtattataaaaactaaaacgatattttttttgttgataattttcttttataatttggttttggtttaatttgatttttgtattggatcaatttggtattcgatttagattcagtttgatttttgtcaaaaataattttactataacaaaataacgatttcttttccgaaaaattcaaattaattaaccaactgaatacaatggagttatgtgaaaagttagtaagggaaaaactctttacaagtctatcacaactgggataaagtttctttacccttaaatctacacactgcgaatatttttcgggcagactttacttcattaaaggacgttgacgattcacaatacttgatatgcattatatttcttgctatccagtttatctccatatatctcaaaaacaaaacaagaaaaacagagcaataatattgaaaacagagcaacgatcttgaaacgacaagacagagcctacaacaatatcgattttattactattttatgactacttcttttgaatatgtgaatctaacatctaatggacccttagttttgatttttggtgcgttatgtaactattttggattgattttttctgaatttttcatcaagtatcatggcaaataatcttttttgatgaaagcttggtagttttggagttacatattttaatttaactattttatagttaaccgaataaatttaattaaacatcgacatcacaaatgaaattttaacaatatattaatcaaagatacttataatttgtttttggatatttagacaaaattccggttattcagataaaattcggatatttgggtaaaagttttgggtattttgatgaattttcgactatttgcataaattttttgagtgtttgagtaaattacgggaattcgagtatacctgaatttaaaggatacctgatttttaaaagtatttagcagttttgaatttttatacccagattgatccgaacccgatgagatccaaaccgaaacctaaccaatattttagttttaccttcttagctcttaaacttctctacttaaagcaaccgtacccgatcggattttaaccgaacccgacccacaataccgttccaataatcttttcttttgacatacctttgaagctttcaccttctgttgctctttcaaaaccaaagcctattgggatgaccaatttgatcccaaacatgaacacaattccacttataagtcactacacacccaaatttgaatgcttttctatttttctacactcccaaatttactctgggaaggtccaattaaatcgagaaagctatgtcatttactccacacggaggatgcccacaggtgttcgacacaattccacaaagaccctgtcacgtggctcgtacgtgacatcttcttcaataccttactcgttgattttttcccgcttctcctctgttttctcccgtcacgaacaaaacctctctcgataccaagaaaacgcaaagatcagatcactgagaagcgttactagcttctactctcttccccaacatg

SEQ ID NO: 7959 - DNA, 3000 bp, Unknown
  misc_feature (1)..( 3000): cDNA_ID_1809863_gDNA_ID_1621176_Annot_ID_57341 3000 nt of promoter + ATG
cttttcatcagcagctaaaggccagtctttggaccatccattctcatatgcaaactctttcacatcttccaatcgattcttaatcagttcaatggcagctgctgcatccactggttcccaacctccaatggatatcttacgagaccagactttacttatcctttgaggcatatgctttgtctcattaggtataaactttgcacaatgttcttgatcaagatgattcttacactcttcagcgctagtgaacttgttcgaacaagaccgacacatccagaatctccatttcccctcttcccttgcaaaagtgagaacttgctccaacgcatctcgtccttcactaccatataacccctcaacataactcgtaagttccgcagtgcttactttcataaagttccgtttgatctcaacattcaaaccagcccaatacaacatcaatcctttaatgaaatcaggctcactcttccttgtatccacatcttctttttgttcacagttttttacaacaagtcgtgtcttggattcagcaattctcgactctgcaatcttgatcacagacaccattgctttctgttctttcttggtgaattctggatcctgcacattcactgaaagatgatacaaagtttcttttgctttgcgcacagatttcttgtaatacaccactgactgaatctgttgtgccaaagtgaagagtgaaatagccgccatcgatgacaaagcaggagctatggaaacgcattgtacagaacccaacaagtaagcaactttcacatcagtgttctctgtttttttcgctagctccttaaagatttgaccttgtagtgcattaacacacaccctgtcgttcccttggacgaaacgcaaatcttcaattatctccaacgccttgatgtaatctttcgcaaagtaggaatcgtaggcacgtttgaagagattttcgctgttagcatcttctagagtaggacgctccatgttggggaagagagtagaagctagtaacgcttctcagtgatctgatctttgcgttttcttggtatcgagagaggttttgttcgtgacgggagaaaacagaggagaagcgggaaaaaatcaacgagtaaggtattgaagaagatgtcacgtacgagccacgtgacagggtctttgtggaattgtgtcgaacacctgtgggcatcctccgtgtggagtaaatgacatagctttctcgatttaattggaccttcccagagtaaatttgggagtgtagaaaaatagaaaagcattcaaatttgggtgtgtagtgacttataagtggaattgtgttcatgtttgggatcaaattggtcatcccaataggctttggttttgaaagagcaacagaaggtgaaagcttcaaaggtatgtcaaaagaaaagattattggaacggtattgtgggtcgggttcggttaaaatccgatcgggtacggttgctttaagtagagaagtttaagagctaagaaggtaaaactaaaatattggttaggtttcggtttggatctcatcgggttcggatcaatctgggtataaaaattcaaaactgctaaatacttttaaaaatcaggtatcctttaaattcaggtatactcgaattcccgtaatttactcaaacactcaaaaaatttatgcaaatagtcgaaaattcatcaaaatacccaaaacttttacccaaatatccgaattttatctgaataaccggaattttgtctaaatatccaaaaacaaattataagtatctttgattaatatattgttaaaatttcatttgtgatgtcgatgtttaattaaatttattcggttaactataaaatagttaaattaaaatatgtaactccaaaactaccaagctttcatcaaaaaagattatttgccatgatacttgatgaaaaattcagaaaaaatcaatccaaaatagttacataacgcaccaaaaatcaaaactaagggtccattagatgttagattcacatattcaaaagaagtagtcataaaatagtaataaaatcgatattgttgtaggctctgtcttgtcgtttcaagatcgttgctctgttttcaatattattgctctgtttttcttgttttgtttttgagatatatggagataaactggatagcaagaaatataatgcatatcaagtattgtgaatcgtcaacgtcctttaatgaagtaaagtctgcccgaaaaatattcgcagtgtgtagatttaagggtaaagaaactttatcccagttgtgatagacttgtaaagagtttttcccttactaacttttcacataactccattgtattcagttggttaattaatttgaatttttcggaaaagaaatcgttattttgttatagtaaaattatttttgacaaaaatcaaactgaatctaaatcgaataccaaattgatccaatacaaaaatcaaattaaaccaaaaccaaattataaaagaaaattatcaacaaaaaaaatatcgttttagtttttataatactactgataaagcaaagaccaaaaaaaaataaaaaaaaaataaaaatacatcaaatttccatcttttaagtatatcaatatttgtttaaatatgttatccattcgcaagctagtttccaatagtttatttttatttttggtcggtctttcacctatggaaccaaatgaacaatggtctgcacatccaatagcctctctacgctcgcagtcttcaagttcatcaatagtgaagtaaaaacaccactgctagaatagataggaaaatctttttgaaattttatgaccttgttgctgcgatgaaaactggaatccttgttttttctttttgccaaggatccaaaatgttgggctcgttactaattgtaagacctaattatcatgttaatgatatataccctttcgcaacaacttggtcggtctttcatggcatatttcaatattatcttagacaacaattaaaatagaaaaacaattatcagacaaattaaatga

SEQ ID NO: 7960 - DNA, 3000 bp, Unknown
  misc_feature (1)..( 3000): cDNA_ID_3047032_gDNA_ID_1621176_Annot_ID_57343 3000 nt of promoter + ATG
tgttttgtagtttgagcctttttgtctatgttaatttctctgtaattcgtccatggaagttgaaaacttaggttctgatgtttatggttagatttagttctgaatctctgaagttgatgcataataatgtattttgaagtactttgaaatgaattgtgagaagactctcttcccttgatctggctattgactcttctttaagttgtttcatcttttgttagaaattgttaacatgagcattaagtttagaatgattgtaattataagtttgtgtttatttttatgtgtagaggtacgcggattaagacccgcaaaaggaatattgctgctcctctcgaccctgctgctttttctgatgcactagttcagatttatctggataatgctggtgatctggtactttttttttcgtgttttaagtatttatttatctgtttttatttgcttgtaaaatgtcgtgcaccttaacttatgactttgtttttgttttgtcttaggaacttgttgccagaagtttagagtcatctgatcttaatttctcaagatacggtgatattttctttgaggtaaattctccatatatcaatactgtctcagctatcttctattgcctgtgtattttttgttttcttgtagcaaggggctttttgttttgcttgtctttccgagatttaataattgatggatctcttttattatataaggttgttttcattggaggacgtactcaaactggttcagtgaaatctgatgaaggggaacgccacccttactctataatcgactgtgaaccaaagcgtgaagctattttaccatcagttgtatacatacagaaaattttgcggaggaaagccttccttattaagaaccttgagaatgttacacggagattcttacagtcactggagctttttgaggagaatgagaggaagaagcttgcaatattcacagcacttgcattttcacagaagctctcaggattacctgcagagactgtcttccagccattgcttaaggatactcttgttgccaaagggatagttctcaattttgtaacagacttcttcaatgaatatttggttgagaacagtcttgatgacttgatttctattctgaggcgtggcaagatggatgacaaactcttggagttcctgccacccacaaagcggactacagaaagttttgccgagcatttcacgtgagttttaatttcttgaagtttgctgcattcaatagtataatgttggttctttttttacttgttgtagtttccttgctcttctgtttacctgcgtttctctaaattttagtcgcttaatactgatatgattgccatttctcattgataagattaaattagtgaaaatgcttctatataggttaacttttgtcactagtttgttgtgttcaacaattctcagttacttctgattctgtattcgattatcacttgtcttttatctctgctttcttattgtatatgtaaaattgatatatctgctatacttttccttctgattttaagtaaggcaggattgacagctctggtagagtacaatgaaaggaaaatatttgaggtgaagctgaaggaaatcaaagcggtccttacgagccaagtgacagaggaaataaacgtagatgaagtgactgaaatggtgaagcaacaggtgaaagatgcaaagctgccagagactgaggttgtgcatgtgatctgggatgggataatgaatgctgttcaatggtctgggaaaaaccagcagcagaattcgaatgctgtattacgccaagtgagttgattttctattttattttgaagcaagattatgttgttttgttcaaagctaagctaagctagccgctgttttgtggtaggtgaaaacatgggcaccccttctgaacacgctgtgtagcaccgggaacatggagatggaactgatgtataaagtacagatgcaatgctatgaggatgcaaagctgatgaaagtgtttcctgaggtagtgagatctctgtatgaactggatgtgcttgcggaagacaccattctgcactggtatcgcaaagggaccaaccctaagggcaggtactattttcgagtttttcacaaaaacaaggttaataatagtattctcttagtaacatatatgtaataatggtttgtgttggttttgcattgcaggcaaacgtttgtgaagggattggaaccgtttgtgaattggctcgaagaggccgaagaagaggagtgagtgagacgctctgcttcttgttttctctttttactctcttctaataaaagaaagacaatattttacttctcttaacgcaaaattcagatgctctacattgttggtgacttggtgtgatctcttttttgaatgaataagtacttctttagttgattatttgttggttttggttaacctctttgtgaggtaatacaggaatgtcatcttgaaaaatactaaccaaaaaataaaaaatagagaatataaaaccttatccaaaagtagggagattgtgttatttaaaagggaaccacagaaaaaaataggcgaggaaagaccattaagccgttggccacacaatcagatatcataatggaaatacactccgatgactacttcttccttcctcctccctgcttctcctccctcagccgcctttctccggcggcgcttcttccgccactcctggctttcctctaagatccaccaccgtcttccccaaggtacattactactcttctctatttcacctgtcaccacttctctgatctttggattattctggaatcttcgttttatgtgatcttgttacaaaaagtttccattacgattccatgttttaacccttaagttcaaaattgtggtacaattctatctcataggtgttttgagttgaatgataccttctgattttctggagccctattgattgtatatctcccactctactcttatcttactatgcaactatcctgtctttctttacttgcttcagtt

SEQ ID NO: 7961 - DNA, 789 bp, Unknown
  misc_feature (1)..( 789): cDNA_ID_1809853_gDNA_ID_1621176_Annot_ID_57344 3000 nt of promoter + ATG
ctaccttttccaagttacaaaaatatgttctgtcttttttatttttggttaaattcttttttttttcttagttttttagagcttatttatacaagaaaccgtatatcacttccttgtaaagattttcactaaaaactaatggattttttaagaagttgtccatagctttcaaattctttgggagcttctacaagctttggagagcttccaaattcgctcggaacattcataatgaagaaagtagttgcgaccaaactaccttctaagttttatcttatcaaattcattactaatcattaggattgaacctacaagacaaaaacttattccaagtttttaaacattatactataatttatcaccgttttcttatcaaaattatttagcccaacagtttttctaaattatcatttacgttttaagtttataatcagttaatcaccaatcattcttttcattcctatcattttatcttaactccttaaatattgaattcttcaagtttgtcaattgttcccaaaatggattttctttactaatataagcattggtttaaaggaaataaaaacaaaagcattggtttgtaataaatgaaaagtaaaaaaaaaaaattcaaacatcacatttggcacttttctaaatccgtctttgaaaacgcgttctgtgtttttcttttgccgtttctttgtctgattatgaaacaaagaaatcaccagaattcaatacattaattcaaacaaaatctcaaatttttctcctccggagatatctaacatattataggcgatg

SEQ ID NO: 7962 - DNA, 3000 bp, Unknown
  misc_feature (1)..( 3000): cDNA_ID_1809956_gDNA_ID_1621177_Annot_ID_57346 3000 nt of promoter + ATG
ttgtcgctttgaagaccaagatatcaagttgttaccgtgaaaaatgcagtaaccggaagtggaacgccttgttgttgggcagcctgcccaatctgcatctgtgtatgcgattaacccggaagtatctgatggataaagctgcaaaccataattgagtgtaccttttagataacgaaggatatgtttgagggcattaaggtgaggttctcttgggtcgtgcatgaatagacagacttgttgaacagcgaacgagatatctggccgtgtaaatgtcaagtattgaagtgcgccggcaaggctgcggtagagtattggatcttcgactgctggtccatcgttagctgctagcttgactcgtgaatcagctggtgtggtggatggcttacagtttgtcatattggcccggtgtagtatatcggcggcgtagttatgttgattgagaaataatccagaggagtttcttttgatggcgattccgaggaagtagtgaagttctcctgaatctgtcattccaaattcttggcttagagatgaaatgatatcttggagaagcttagttgaagatgcggtgaggccaatgttgtccacatataggagaagataggctgttccattggcgcgatggtagacaaaaagcgatgggtcagccttgctttgcacaaaaccgattcgacacgcgtattgggtaaatcgttgattccaggctcgtggtgactgcttaagaccgtaaagtgaccgtttgagtaagcatgcgtggtcgggtttggtgggatcacggaatcccgaaggttgatgcatatacacgggttcttcgagtgtgccattgaggaaggcattttttacgttgagttggtgaattggccatttgcgagagagggatagttccaatacgaggcggatcgtggccggcttgactacagggctgaaagtctcgtcgcaatcaatgcctatttcttgtgatttcccatttgcaacaagtcgcgccttgtacctatatagtttgccatcgggaccaaacttatgcctaaataaccacatggaacgcacaatgttagtatctcggggccgtggtactaagtcccacgttccctttttaatttgagctgcatattcctcattcatggctgcgttccagttaggatcttctaaggcttttaggtgagaggtaggaagaggagaaataatgtcagtgtgaagagataatggttgtttgggtttggtaataccgtttttacttcgcgttctcatagagtgcgcaacgacggttggaggctgcggaggagctacttgtggagttggttcattgggaattgtttgaggtggatcaatttggcgaaggagaggagaaatagacaccggaagttgtggttcatctatgattgaaggagattctgagatagatttagagaaaggaaatttagattcatcgaaggtaacatgacgtgaaatgattaccttacgggttgcgagttctagacaccgatatcctttatggttagatgggtatccaagaaaaacgcacgcagtggagcgaggatcgagtttatgagacgaaaccggaagaagattggggtaacaaagacatccaaatactcgaagatgattgtatatggccggtttgtggaaaagtttggtgaaaggtacctcgttttgaatggtagatgaggggagaatgttgaagagatgagttgccatcataagtgcctcaacccaataggtggtgggcatgtttgcttggatgagtaaggaacggacagaattattcagtgtccgaagagtgcgttcggctttgccgttttgctgcgaggtgtatgggcaagagaagcgagggataattccatgagtggctaagtgattaaggaattgtctgttttggtattcaccaccattatcacattgtaatgatttaatgctgcagccaaattacacgtaagccataaactttaagaaagtggaaaacacttcagattttttacgaagaggaaaaacccagagaaagtgagtgaaatgatcaagatatataacgtaatattttattccactgatgctaggaaccggtgaggtccatacatcggaatgaataatttcaaaaggtgcagaaatagaagaaataactgaatcaaatggtaatctagtgtgtttccccaattgacatgcatgacaaagagacatgtcaattttagaacaattaattaagggaataagttgagatttagtacgtttatgaaacaaaattatggaagtagtacactcactatttataattaaggaaataatcgggtccactatcgactgtaatacgcgtcgcttgtaatacagaaaaacatgggccatgattcgtttgaggaaattacgtttaggggtcgccgtttgttttgttcgtttgcaggaaaccctttgactgagttcgggggtttgctttacaagatacaacaaacgtcatgggcctagcgtatttctagatgggccttaatcaaagtctgtttacagatttataattcgtagcgaaggcgttgaagtcaacttctttatcgtcggcttattcaatgccggagtgcgagctgagagaaacaactgcatttatgaatgtttcaaatcaacggaattagttaacaagtcggtgaataaaattttataataatcaaattctctttaggtttttctcgaaagtagctaaatttttggggggaatttgagctcgtttttttgaggattaggttatttttaagtaacaaaaggagatgatgattgtcagtttcggttgtgtttctttgttaccgggaaaattcatctttgcgtttctaccatggaaggtggaattctgatcagaaaattgttttgtaaacttgtcctcataatgtttaaaagccttcagactgataaaaagtgaattccttttttgcagtggatgatattgtcgttgtacaggcaggtagatggattttgtatagcactggtgaatgggaattcaagcttgattcttgtcgtcacggtagggcg

SEQ ID NO: 7963 - DNA, 3000 bp, Unknown
  misc_feature (1)..( 3000): cDNA_ID_1809935_gDNA_ID_1621177_Annot_ID_57353 3000 nt of promoter + ATG
tgttttgtattttataaatatataatcctaatttctatatattgtacaatctcttgattttatcatggcgtacaccgtaagtcgatttttaagactttaatttaaaattatatatgttttttttgttaaaattgtttgttttgttatatattttaaattatataactgtatttaaattgttagttatagagtttcacccgttgtatactgtttcgtattactatagactcaaacccgtcttaccatctaattccgttctgtggaattaaacatatttaatggatttcatccgtggtatactgtctcatattactatcgatccaaatccgtcctaccatctaaccccgttcaataaaattaaatattattttattgtgtttgttttaatagtactttaatttaaaatatatatataattcaaatcaatttcaaattttttattttaaatggttatttaatttttataaagttcatatattataatattctaaacccgtcataccatctaatcccgttcggtgaaattaaacattattttttattttttgtttaaataatatttttattaaaagatttataactcaaatcaatttaaaaggtgactttcaaatggttatttaatttttatagatttcacatttcaaatatttatctatatgtaacatatagttatgtattttataaatattataaacgtttttccgttaaatattataaacgtttaataaacattaaataattacaatatttaccttttaataaagtataatattaataatgttgtaaataattatgtgtacctaattttaagggatttgatttaaagtttgttgtttggattaaatttgaatgataacgtgattgatatattaaatcaagaattaaaatcaaatcaaatattaaggaaaaaagatttaatgtcaatggcatgccattgtaaataagtgtcaagtagaagatttatttgctaaagtggctgcaaaaatgtatatgtagatttaaattttttttgccattctgctagtcttggatgttatgttattcattcggttttggttggtatccatttggttatcggttctttttgttttaaagtttagtatctattcggttattttgaaatttcggttctttctttttaaaaatttcgtatgtattcggttattttgctttgaatattttcgaattttttgattatttttgagtattttactattttatatatattttcaattgttttaagggaaattgcactgggtatgctcagtggatacaatatttatgtcctaattttccaaaagtttcgacgctactgttgcataaataaagacgcatgtacccctatgtccattagaaatctaaatgtagctcttatatctctctgtgtcaggcggatagtagaagatcttgctttggatattttagtgggtgaattaaatttttatattattttgatagttttcaatcaaggcgtcgtttcggtccaatctatatttacctcatgttttttcttcgtctctttcatcctaattggtttgttatcagataatttgttaccgtacacgagtttttgcggttcagaattcgtctcacgtgtggcgagtggtgaatatattaactctattatgaatatattaactctattatctgctatcttgttatctcgatatttcatattgtttcactctttgtaatatctcgacacttcattgcgcgtgttgaaatttattgcgcgtgttgaagttttaacctctaacggatttataatcagatactttattatcgacattgcgcttcagaattctacattttatttactctccctacgtgtaataagtcgacatttcattgcgagaggacctatatctatattaactctattatctgctatctcgttatctcgacatttcattgcctgttttgaagttttaactcctaattggtttgttatcagataatttattaccgtacacgagtttttgcggttcagaattcgtctcacgtgttgcgagtggtgaatatattaactctattatgaatatattaactctattatctgctatctcattatctcgacatttcatattgtttattctgtataatctctcgacattttattgctcgtgttgaagttttaacccctaacgaatttattatcggatactttttaccgtatacgaatttttgcggtactctcactacacgtgtaataactcgacattttattgcgagtggtgaagccctacaactatattaactttattatctgctatctggttatcgtctttgtgggttctgaaatccacactagagatttgtatttaagattatgagaaaggagggttagatcttcactgaaacctttagagttatattgctaagaacgaatggactttaattatgacagagcttttacaatatgaaatgagattacaagtgtaaagtgtgtgtgtgccaatgtgaactagattgaatgtgtcttccaagtcgtccttgctcccttatatagatctacgcacgtggtagctccgtccggaatctgcggcgatcctcctggatattcggcaggtcagttccgagatatcaggtccgctccgcgaatatctcctcatcaattcctaggtcattattcgcttatctccctgcatcaggtgactgggcttatctggcccaaatacccattcgcgtatgtgggctcgtcagctgcgtaggtcctctacttggtgggcttggtgggcttttgtgggctggcttggtattttcgcaggtggattcctggaggggaatacagctccaacatttgccccccagcccattgagtgagtaggcgaactcgatgagcggacatataggtcaggtaagattgcaaaaatattcttgatgagaagataaatgtgattagatcagtcggttttgaggataaactcaacaatttcgttttaatttcagattcccttaaccgaaagattttgaggagatacgcgagataagtcgctgctg

SEQ ID NO: 7964 - DNA, 3000 bp, Unknown
  misc_feature (1)..( 3000): cDNA_ID_1809927_gDNA_ID_1621177_Annot_ID_57355 3000 nt of promoter + ATG
acattgttgatgtgatctataaacgagcagaaaatggttataactacggtgtcattcttgttcctgaaggtctaattgattttatccctgaggtatatggttactctcaaatctataatggtcaattcgagtctagtccctatatttgtgttcttcaacgttcatctattatgatccattggcaggtccaacagcttatttccgaactgaatgaagtcttagccgaaggaaacgtcgatgaagaaggccaatggaagaagaatcttaaaaaagagactttagagatttttgagtttcttcctcaaactattcaagaacaactaatgcttgagagagatccacatggaaatgtgcaggtctgcttctatccaccactaactgattcaaacaaattaaaaggctaaaacctcaagcaaactcgaactgaaaacctgtttattttgaacctttatatgaattttctcttcaggttgctaaaatagagacagagaaaatgttgattcaaatggttgaaaccgagctagagaaaaagaagacagagggtacatatgaacgcgagttcatggggaaatcacacttctttgggtaatgaattagcctaaaacatttgttaataactaattagcgtcaacataatcatattctcattctcattgtgttttaggtatgaaggaagatgcggcttacctacaaatttcgatgcaacttactgctacgcattaggttacggtgctggatcacttctccagagcggaaagaccggattaatttcatcggtttagaatttttcttcctttcttgataatatcacaaactgtttctttatttcaagattatttatattcccctttgtgatgttttgcaggttggaaacttggctgctcctgttgaagagtggacagttggtggtactgcactgacttcgttgatggatgttgagagaagacatggtaatataagtcgatactatcgtgaagtgtttgataagattatattcttttccaacattctcttttttttatgttgcaggtaaattcaagcctgttatcaagaaagctatggttgaacttgaaggtaattagtctttagctcaaaacatatattattcttcggtttcttttcttgctaacactataaatttcaggtgcaccgtttaagaaatttgcatcacagcgagaagaatgggctttgaagaatcgatacattagtcctggttagttcacatacacatgtctctgcataaagtagtaaatgatttcgttctttagtgtttttcatgctaactcttattctttctcttgttgccaggtccaattcagtttaagggaccgggatctgatgcgagaaatcacacattaatgctcgaactcggggctcaagcctaaagaattttggtactgtgagattcactcactgactcactttctttgttgttgttcgtttttgctgtaaaatctagttactgtgagtcaagtgaaccaacaagtggtcatcaatgtgtaagtcctgtattgtggtgtcacttgaatatagatgactcatgtgttaataataaagtttcgcaatttcatacactctacatgatgtttttccggaaacttaatttttcgataatcatatacttagtccattgttgaaaatctcttcgtctataagtcgattgatcatttatttttttatttttttaacaatatgcattaagtggatatgaagtggagttgaatttgggatggtaaccttttgatcacattaaaccaggttggtagttcagattttaacgtagtcatgtaactcatgttggtggttcatacttttcatgacctcatttttctccttgttgacctctacacattttcaggagatttagtgttcaaacacattgtcatttttcatagcagaatgaaggtctggacaaataaatcgaaccgaatgtaccaaaccaaaaccgaagcaaaagaaataaaccgaaccgaatatttaaaaataaccaaatggatacaatattttataaccgaaagattagaaaccaaatcaataccgaaccgaaatatttcgggtaaccaaaaaaccgaaatataataatattttcaaaaatattagttatttttagactaattaatttaaaacaagggtgaattaaatttttatgctcagacgaatgcgaaattaggaatgtatgaatgatgatttcatatttagttctctttcctcccgacaataaattctgacatatttgctcctattgagcagagatattgttggatacgtaatgattgtgcagcatttaattctaacacaagtatgaagataattaggttagtcgataatatgttatttgatatggtatcataggttatattagaagatacttgatagaagataagaataaataagactatgcccaatagtagaagactgttggagctggattcctggaatccacctgcgaaaataccaagccagcccacaaaagcccaccaagcccaccaagtagaggacctacgcagctgacgagcccacatacgcgaatgggtatttggaccagataagcccagtcacctgatgcagggagataagcgaataatgacctaggaactgaagaggagatattcgcggagcggacctgatatctcggaactgacctgccgaatatccaggaggatctccgcagatcccggacggagctaccacgtgcgtagatctatataagggagcaaggacgacttgtaagacacattcaatctagttcacattggcacacacacactttacacttgtaatctcatttcacattgtaaaagctctgtcataattaaagtccattcgttcttagcaatataactctcaaggtttcagtgaagatctagcactcctttctcataatcttaaatacaaatctctagtgtggatttcagaacccacatttggcgccgtctgtggggacggaaatagatcattccaacaccgaagctaacacatcaattgtgaccaacgatcatg

SEQ ID NO: 7965 - DNA, 3000 bp, Unknown
  misc_feature (1)..( 3000): cDNA_ID_1809923_gDNA_ID_1621177_Annot_ID_57356 3000 nt of promoter + ATG
atccatataacttttcattttggttatggatttttaattaagctgttaaactaaaaagtgaactattaaaacgaaagactaaataaaaaattgattaaagttgatctaaatacagtcagtaagtaccttatcaacttgttaagctgacagttaaaccacatgttgccattatggtccatactttctagggtttatgattgtctattacatcttccttaccattttatcattaggtctaaacttgttctttcgattaactaagaaaattataatcactttttagtctaacaactccggtccttcaacacaaaaaaaacaagaaaaagtgatgttcgtttcgcagttagtaacgacactaacacaatgtttttccttttcatagttttttttttttttttttggtcaaactagctttttataaatgattctactctccaacaatggagaaatggttcaacaagtacatcaaagaggctacaaaggccaaagaaaccactgctacaaatggcatacggaaagcacgaaagaaaaagatagaagcatacataacagttaagcaactaaagttgaagataccaatagtgctgaaacatgagatgagctttcggaaataagagagcacacatggtgatctgctgtccggagatgcaacatcctctagtggataaaacgcatcatgaaatacggctacgatagcataggcgacaaagcaccaacttcttgagcctacgagatgtgagaaaaacctcaatttcggagaggtgtggggttgcgaaaaccaccacttctcgatgaacaaatctggagtccaagacccaagatcatttcttgttaagacgtcatatgtcttttcctttatcctgcgtgaaatttcaagaaaccaaaccaaagaaacaataacatgaattgctcttaaccaaagtttttgaataacatcctcataatgaggtaagagaagcctaagcttatacagaatcaaaccaacctcatactgaggtaaaagaagctgaattcgaagtccaatcgaaaacaacacatcctcataatgaggtaagaacagcttgagcttaagcaagatcataacagcctcatactgaggtaaaaccagcctaaaactagtagaaatcatcacatcctcatggtgagggaactgaagtataaacgaaggcatgttccaaaagaaggtaaaaaattcaaagaaattactacctttcagagagacaaaaccttttgatagagtgactagaggatgagagaggtgtggaatagagaaccaaagctccaaacaagcgagaggaaatacttggtaccacgaactgcacacagcagtaatagatcgtaaagcaaaacccagatctagagggctcaaagcctgaacaagatctgatcctagatctgaagacctcaacagcaaaatcgagagaaaggagttggaagctccaacgagatagtctggtgggtctggagggtcgggaggttcagaaggagagaccaaactggtcaaatcttgcggtagagcacacggcggcggattcggagaagggaggagcaaaggtggagcaggagcccgagcaagcatcactaaagccatagaagaaaggaagaggagggagaaagaggaagattctcgccggtgggcgagaggccacaccaacggcggcaaggagaagaagaaaccctagtcgtcaagttgagagagaaaaaggggttttggattgacgatgtcccttttcatagttattaacaatatatatttaacatttttttgctcgatttacattcactcagtttttgacaaagattgatgcaacgcctaacaattttcattgctagattgcttttgaaatttgctcgttattattatcaccaacggctaccaaacaaacatgatttagtcattgttgttatcgataaataaaacaaacatgatttagtcattgttgtcagcttcaaaatttgcatcaaaaggagattgatccccggtctctgaaaagggtacagtcgcaagttaagcgagaaagatctcgcatggtccagtactctaacaaaataatagtccaattttgtatccttccaatatttccatcatccaaatatgattaggttgcccttatactagaatcagagagatacccactagatcaatcaaaatattaaagcggtcaaattttcactatttggatatacggttaatcagatcgttaacataaaaagatatagatttatttgactatcctgcttttcgcatagtggaccaaaatatcttgtaacttgagatccaaccaaattgtagtgttcgtttctaaacctatagttatttttagttatgattagcatgtttttttagttaacgctgcggcagtggcaactacggagtaaaacgacgtattatgaaaagtaacatttaagtaaaacgacaccaaaattgaaaataacagatttagatgattcgtagatgacagacgatgagttgcaacagcatcggatgagtcgctcaaatttaatagaagcaccttaatcttcattggcgttcatcatgtacgacagtttttctctcatcactgtacattcttctctctgcttaaatatttttctttttttttgccgctgccgctgcgttaagtaaaagaacttgaccgatgttaatggttaagagcggttttgtcgctataatactcgctacgagaaagaggattttgactgttgatgtgaagtacgatttattccaattgtgtgatacaacatcaatactacaatacaataataatcataaaaaaaggttttaaatttcaatgtttacaaattagaacgaaaattgcagttattgaaattccaataaccatataaaacaataaatgaccaaatttggcatattagaatattcggaaacttgcaagttcattatccacttgaagaagacttatccaaacactttctgacacacacttctgacattcacagatttttgtaggaacaaaataatcctaatactcacaaatg

SEQ ID NO: 7966 - DNA, 3000 bp, Unknown
  misc_feature (1)..( 3000): cDNA_ID_3047087_gDNA_ID_1621177_Annot_ID_174194 3000 nt of promoter + ATG
cattatggtccatactttctagggtttatgattgtctattacatcttccttaccattttatcattaggtctaaacttgttctttcgattaactaagaaaattataatcactttttagtctaacaactccggtccttcaacacaaaaaaaacaagaaaaagtgatgttcgtttcgcagttagtaacgacactaacacaatgtttttccttttcatagttttttttttttttttttggtcaaactagctttttataaatgattctactctccaacaatggagaaatggttcaacaagtacatcaaagaggctacaaaggccaaagaaaccactgctacaaatggcatacggaaagcacgaaagaaaaagatagaagcatacataacagttaagcaactaaagttgaagataccaatagtgctgaaacatgagatgagctttcggaaataagagagcacacatggtgatctgctgtccggagatgcaacatcctctagtggataaaacgcatcatgaaatacggctacgatagcataggcgacaaagcaccaacttcttgagcctacgagatgtgagaaaaacctcaatttcggagaggtgtggggttgcgaaaaccaccacttctcgatgaacaaatctggagtccaagacccaagatcatttcttgttaagacgtcatatgtcttttcctttatcctgcgtgaaatttcaagaaaccaaaccaaagaaacaataacatgaattgctcttaaccaaagtttttgaataacatcctcataatgaggtaagagaagcctaagcttatacagaatcaaaccaacctcatactgaggtaaaagaagctgaattcgaagtccaatcgaaaacaacacatcctcataatgaggtaagaacagcttgagcttaagcaagatcataacagcctcatactgaggtaaaaccagcctaaaactagtagaaatcatcacatcctcatggtgagggaactgaagtataaacgaaggcatgttccaaaagaaggtaaaaaattcaaagaaattactacctttcagagagacaaaaccttttgatagagtgactagaggatgagagaggtgtggaatagagaaccaaagctccaaacaagcgagaggaaatacttggtaccacgaactgcacacagcagtaatagatcgtaaagcaaaacccagatctagagggctcaaagcctgaacaagatctgatcctagatctgaagacctcaacagcaaaatcgagagaaaggagttggaagctccaacgagatagtctggtgggtctggagggtcgggaggttcagaaggagagaccaaactggtcaaatcttgcggtagagcacacggcggcggattcggagaagggaggagcaaaggtggagcaggagcccgagcaagcatcactaaagccatagaagaaaggaagaggagggagaaagaggaagattctcgccggtgggcgagaggccacaccaacggcggcaaggagaagaagaaaccctagtcgtcaagttgagagagaaaaaggggttttggattgacgatgtcccttttcatagttattaacaatatatatttaacatttttttgctcgatttacattcactcagtttttgacaaagattgatgcaacgcctaacaattttcattgctagattgcttttgaaatttgctcgttattattatcaccaacggctaccaaacaaacatgatttagtcattgttgttatcgataaataaaacaaacatgatttagtcattgttgtcagcttcaaaatttgcatcaaaaggagattgatccccggtctctgaaaagggtacagtcgcaagttaagcgagaaagatctcgcatggtccagtactctaacaaaataatagtccaattttgtatccttccaatatttccatcatccaaatatgattaggttgcccttatactagaatcagagagatacccactagatcaatcaaaatattaaagcggtcaaattttcactatttggatatacggttaatcagatcgttaacataaaaagatatagatttatttgactatcctgcttttcgcatagtggaccaaaatatcttgtaacttgagatccaaccaaattgtagtgttcgtttctaaacctatagttatttttagttatgattagcatgtttttttagttaacgctgcggcagtggcaactacggagtaaaacgacgtattatgaaaagtaacatttaagtaaaacgacaccaaaattgaaaataacagatttagatgattcgtagatgacagacgatgagttgcaacagcatcggatgagtcgctcaaatttaatagaagcaccttaatcttcattggcgttcatcatgtacgacagtttttctctcatcactgtacattcttctctctgcttaaatatttttctttttttttgccgctgccgctgcgttaagtaaaagaacttgaccgatgttaatggttaagagcggttttgtcgctataatactcgctacgagaaagaggattttgactgttgatgtgaagtacgatttattccaattgtgtgatacaacatcaatactacaatacaataataatcataaaaaaaggttttaaatttcaatgtttacaaattagaacgaaaattgcagttattgaaattccaataaccatataaaacaataaatgaccaaatttggcatattagaatattcggaaacttgcaagttcattatccacttgaagaagacttatccaaacactttctgacacacacttctgacattcacagatttttgtaggaacaaaataatcctaatactcacaaatggcatcacaattagatttgatcggaggagactacatcgccggaatttcgatcaatcctccgacgaatagccgtgtgacttctgtatacagcgaagtccaagctagtcgtatcgaccacacacttcctcttccttccgtctttaaaacccctttcaagatcatcgatg

SEQ ID NO: 7967 - DNA, 3000 bp, Unknown
  misc_feature (1)..( 3000): cDNA_ID_3047095_gDNA_ID_1621177_Annot_ID_174192 3000 nt of promoter + ATG
ccaggtccccatagatctgacaggtaccgtctccccgaccgatcctactccgagaactcgtctggatttcgcctttttacaggcacctgcgaacgctctcgtcgaaaacctggcaacagaaaacgaaacaagcacaacgcctgccttcccaaggctaccggccccacctttattaccgatgggctgttcgccccctaggtacacgtgtactagaaaccaaacaaccgcatccagtttccgcattcccgggaactcaacgcaacaacggacctctatcgctaatccgccatctgttcctcagataccaggaagcgacttccttaacagtccccaagcaccggtcgatccgcgtaacgtcgtggatatggaaacattccgcaattacgcagctcaaacaaacgcgaacatggctcaaatgcattctcgaatgcacctagctgtgagcgatgctcccgacatagatcgcgtgatcgaagaaaccaggcgcaccccgttcacggataggatcgcttgttttcgcctccgagatgtcgagagactccgtttcccagaatacgacggaacgagcgacccaaaggctcatctgagatccttccgtttcgctataacacgagcgtacctaacagacgaagaaaacgaagcaggtcattgccgtttcttcgcagaaaacctcgtaggtcacgccctcgaatggtttgctagcctcgaagggaactccattgataccttcgaccagctcgccgccgctttcttaaaacaatattcggtacttatcgaacacaggacgtctgaagccgacctctggagtctcactcaacttcagaacgaatccctgcgatcttacgtcaaaaaattcaaagcaatcaaatcgaaaattgcaaatcgaaaactgcaaacctaaacgaagaggtagccattgcagcccttcgtaacggcctttagttctcctctaggttccgtgaggaactcactgttaggcaaccagtctctttagacgatgcccttcacaaagctctccacttcgccaaagccgaagaggagcttagtgtgctggccttacgattcaaagaatctaaaacgcaaaacgctccccttgcaattaagaagcccttcaaaaaggaaaaccaaacgcaggggtagcataccttattcgcaatagacgaggcagctgagaacgagagtccagaacttgacctcggaaaatattgcaagtaccacaagaaaagaggatattccaccgaggagtgtcgcgccgttaaaaaattaatcgcagctgggggaaagactaaaaaaggttcaaaccccaaagttgaaacccctcctcccgacgaacaggaggaggagcaaactcccaagcaaaagaaacgggaacgaacaccggagggaagtgactctcccccaccttctagaggagaacgcatagacctagtctttgcagaactcgatctaggtggtcagtcaccacacctccccccgccccgcataagaaaaacatgaggtttccattacggctcttgaaattctgcagaagcgcaaccgagcacctctccccgaaacgcatcgatttcatcatgggagggtctcagctctgcaacgactcaatcaattcgatcaaaactcatcagaggaaggcagattcttacacaaaaggcaagagcccgatgatgggacctaaccaccagatcacattctgggaaagcgaaaccaccgacctcaataaacctcacgatgacgctctcgttattcgaatcgatgtaggcaactacgaactctcccatataatgatcgacacgggaagctcagttgacgtactcttttacgacgccttcaaaagaatggggcacctcgattccgagctgcaaggcaggaaaacgccacttaccgggttcgccggagatacgaccttttctctaggaaccatccagctcccaaccatcgcacgaggagtgaggcgactcacgagtttcctcgtagtcaacaagaaagctcctttcaacgcaattctgggaagaccatggctacacgccatgaaagccgtcccatcaacctaccaccaatgcattaaattcccctcggacaagggaatagcagtcgtatcggcagccaacgcagctcccgaaaatgctatatgggcagttacgatcttatcaaaaaggctgaccccgtagtactaatgatagaagacaaactcgcggaaatgaaaacagtcagatcctctgatccttctcaacgcggacctcgaaagtcattgataacacaggtctgcatagacgaatcagatcccaaacgatgcgatgggataggtcaagacctcgacctagcgatacaagaggatctcataacctttctcaaagaaaacaaagacagctttgcctggtcaagtgcgaacctccgaggaataagcctcgaagtaacctcacacgaactcaacgtcgatccgatctaccgacctataaagcagaaacgtcgcaagctaggtcccgagagggctaaagctgtgcacgatgaggtcgatcaattgctcaagatcggatcgataagagaagtaaaataccctgactggctcgctaacccggtcgtcgttaaaaagaaaaacgggaagtggagagtatgtatcgactttacggacctgaataaggcatgtcctaaagacagtttcccactcccacatatcgaccgactggttgaagccactgcgggacacgaactattgtccttcatggatgcattctccgggtacaaccaaatacttatgcacccagatgaccaagaaaaacagcttttataactgaccgaggcacctacttttataaagtaatgccctttggtttaaaaaacggtggagctacttaccaaagattggtgaatagaatgtccgccgaccagctaggtaaaacgatggaggtctatattgacgatatgctggtcaagtcagctcgcgaaaaagaccacgtcccgcaattaagagaatgcttcaaaatcctaaacaaattcgaaatg

SEQ ID NO: 7968 - DNA, 3000 bp, Unknown
  misc_feature (1)..( 3000): cDNA_ID_3047103_gDNA_ID_1621177_Annot_ID_174186 3000 nt of promoter + ATG
gttgtagtacaaacttaattcgtacgtttaccaaatccccaaatcacattaggttataaacatttgggttgcaatggcaacacatatagcaacaaacaggttttcgtagatggatttaggaaactctttgaaacacaacaatggcaagcggatgtacggctcaaggcaggagcagtgatgagagtacatacaactgtccccacccacacttgttctggtcttctctacttctttctcttctctcttactattgtaaaggctaaaagcctaaacaatttagcaatggatttgagagtaaaatgctttttatcgttagtggtatttaatggaaatttgaataggcacccaaagtcttttaaaaggtgttgaaatcagacgatcgagttcaatgcttatgtaaacctaaagagataattactctctttgagatgaaacatgataattagtccttttttcccactttgctaatacttatgttttgtttaatataattatcaatagaagagagataataatttaagaattttcgtatattgatttatgtctcattttatttccaaaaacgtcttggaaaacgaaagtaaaagtaaagagtaattttgaccgtctatgctctctctatatatgtataagctacattcgttttctacattagaaccaactaaccaagttatacgatatagctatggggacacaaacaaacaaatatattttctttgatagattactgaaggttataaaagaacaaccagccgatgtacggctagaggcatgggacagtgataaggatgcagctatcatgcagccgacaaatatgagattccttgacaacgacttacgctctctcacccttggcgacctgtctgtgcatgattattgccagaagctcaagacactctccgatctcctcgccaacgttgactctcctgtctctgatcgtgtcgtcgttacgcatatgctcaatggactttctgaaaagtttgacaacatcatcaacatcatcaagcatcgccaaccgttcccatctttctctgttgcccgatccatgctcattgaggaagaacgtcgtctctccaagcaggtcaaaacaggatcctctcactcagccaactcatcgtctcccaatgtgctctatgtaacgtctaatggaaatcaaaactccatgtctcgcgacaacaatcacaacacttatcgtgacaacaacaacaccggctaccgcgacaacaaccacaacaactacaatgggcacaacaacaatggtagaggtcgtggacgtggacgtggcggtaccggcagtaacggcagaggtcgtggacgccaaaactggcaatggaatcctcgcaattggcagacacaacaaccatggctctcaacaccaaccccatatccacactggccacaacaaaactggatgcaaagaccaccgatggcatacttgacagccacgaacccagcagcagggctccttggttcttctccacaagcagctatggttggttcgactaatcaattgacgcaaattcctgcaaaccttgctgcagcttttgggactacaactatgccagatcctacagatgcaagttggtacatggacacgggcgcgacaactcacctcaccgcgcagccaggtaccctccattccctttttaattcgagctcatccccatcggttgtcgtcggtaatggatcttctgttccaactaaagccatcggttattcatttttgccttctaaaatacgacctctccatcttcataatgtgcttgtttgtccttctataatcaaaaatctcgtttctgtacgtcaatttactaaagataattatgtatctgtggaatttgatccatttggtttttctattaaggatttcaatacttggacgaatcttctccgatgtaacagtgatggtcctctctactccatcacgtcgccaccattatcatcatcatcatcgtcatcacctccacaagtcatggtagcaacggttcccgattcttcattgtggcaccgtcgtcttggccatttgggaaacacaactcttcaatctcttatttcttctcgcttaattaagagtttgtttgccaactagtacgtttacagaacataattatgaaactagtacacttactatttacaatatgaaatgtactacaggtggttattgttggcttttttgttaccccggttctgacactacgatttccatgtaattacagagttgccagtgaaaccaaaaaaaagaggtttcttctcgactcttcatatttctggtttcttaaggaagttgagagaagttggtttctgtattatgaagaatatctgcaatgacgaagaagaagtcgagtaaatcgaagacaataagccctccagtggtaatgaaacaagaacccaagcggcgaaactccagagcagatgcacagagaggtaagtcgttatactgatgacggttcctcaagcaattttcgggataatttatgggttaataggggttcataattaggtttctgggttatttgtagatacgcatgcaaaatctccggctaaatctccagcgagtgctcgagggttaagagacgagtctccaatttcaccagcgccggcgaaaattccggcaaaatctggaggattaagaaacgaatctaaacaaggtaaacaaactcttatttgttgtcccttgccggtgaatttgatgaatccgactctatcatcaccgaacattttttttgatttggtttttttctgagatgaataataggagatgagagatgcagagatagtgaatttacaaacccgagcctcccttgccgtttgctgcatccatcggagttcccggatgggggacgccttaacatacactcaaagccggagtatttgggaactctggtggaattactagagggttcagaggcgtgggatgagcttattgcgtcccaattcaaaaaattgtttgaacttccagttgctaggtgtcatcactctgcaaaactcattcatgggatg

SEQ ID NO: 7969 - DNA, 3000 bp, Unknown
  misc_feature (1)..( 3000): cDNA_ID_1809919_gDNA_ID_1621177_Annot_ID_57357 3000 nt of promoter + ATG
ttagctctgaaaaccgaataggaaaccaaacattaaaacacaaaacagagagaagtgagtctcattaatcttaaacaatttcaaaaaattacctaaagtgttcagcaaggagacaagcattagtattggagtcatctccaccaattaccacaagaccatctaaatccatctttgtaacagtctcttcagcttgcttaaactacaaaatgtaccaaactgaatataactaagtccatcgataaaagcatcaatgcgcgccatacaaaacattaagaaaaacatttctacctgctctggagtttcaatcttgtctcttccactacatatcatatcaaatccaccctgcaaagagactcacaacaaaaactactaagaataaacacaaaatgcatatctttaagtaacaaagcttttagttccaactcttcatgatgaaaatttgattactccaacaatacattcttcaattgatccaaacaagcttctatctaatccggttaaagcaatccgaaccaaaccaaaactgaagtgaaagatgaaataaaccgatttggttctttttctatatctgaaatctgaagaaaccgaaaggctaagacaataaactaggcctgggagatcggtttaatcgggttaaacggttcggtttgatcggttttctggttttttcggtttctaaaaatcctgccgaattgaaccgaataaaaattcggttcggatcggttcggtactcgggtttttcggttcggttattaagatatataattcgccgagattaaaccaaatgatggtcatttccattcactttctatctatgttttcatgaacctaaacatctaaaaccgaaaccaaaccaaaccggaacaataaaccgacaaaaatctaaaagacagaacatctcatacctggtttctataagggtacacaaactcagaagtaagctcaatatatttccccttcatgattccagctggaccgccacgaaaaccaaacagactacttcctcttgcatattcttgcaagtaatctatcaaaccaacaacaaaaatacaatcacaaatcaagtttttaaagcctgaaaatgaaaaatttgcacaaaggaacaaatgtctactaaccaaagattccacaaataacattgtgtcctccaggtgcttgaccaccagacaacacaacaccaatcttaagcttttgatccgatgaaacttcattagattggttaggaaccaataaagctgatggttgtccaaataaattagggaataatttctcaatttcctctgcaacaacatccaaaaccaaaattgacccaatcaacaaaaattttaaccggttaagtgaatccggtttagtaagattgtgattgaaccatagaaatcggacctggatgtccggcggaggagcttggaggaccatcgatgatcttgaaaggggttttaaagacggaaggaagaggaagtgtgtggtcgatacgactagcttggacttcgctgtatacagaagtcacacggctattcgtcggaggattgatcgaaattccggcgatgtagtctcctccgatcaaatctaattgtgatgccatttgtgagtattaggattattttgttcctacaaaaatctgtgaatgtcagaagtgtgtgtcagaaagtgtttggataagtcttcttcaagtggataatgaacttgcaagtttccgaatattctaatatgccaaatttggtcatttattgttttatatggttattggaatttcaataactgcaattttcgttctaatttgtaaacattgaaatttaaaacctttttttatgattattattgtattgtagtattgatgttgtatcacacaattggaataaatcgtacttcacatcaacagtcaaaatcctctttctcgtagcgagtattatagcgacaaaaccgctcttaaccattaacatcggtcaagttcttttacttaacgcagcggcagcggcaaaaaaaaagaaaaatatttaagcagagagaagaatgtacagtgatgagagaaaaactgtcgtacatgatgaacgccaatgaagattaaggtgcttctattaaatttgagcgactcatccgatgctgttgcaactcatcgtctgtcatctacgaatcatctaaatctgttattttcaattttggtgtcgttttacttaaatgttacttttcataatacgtcgttttactccgtagttgccactgccgcagcgttaactaaaaaaacatgctaatcataactaaaaataactataggtttagaaacgaacactacaatttggttggatctcaagttacaagatattttggtccactatgcgaaaagcaggatagtcaaataaatctatatctttttatgttaacgatctgattaaccgtatatccaaatagtgaaaatttgaccgctttaatattttgattgatctagtgggtatctctctgattctagtataagggcaacctaatcatatttggatgatggaaatattggaaggatacaaaattggactattattttgttagagtactggaccatgcgagatctttctcgcttaacttgcgactgtacccttttcagagaccggggatcaatctccttttgatgcaaattttgaagctgacaacaatgactaaatcatgtttgttttatttatcgataacaacaatgactaaatcatgtttgtttggtagccgttggtgataataataacgagcaaatttcaaaagcaatctagcaatgaaaattgttaggcgttgcatcaatctttgtcaaaaactgagtgaatgtaaatcgagcaaaaaaatgttaaatatatattgttaataactatgaaaagggacatcgtcaatccaaaacccctttttctctctcaacttgacgactagggtttcttcttctccttgccgccgttggtgtggcctctcgcccaccggcgagaatcttcctctttctccctcctcttcctttcttctatggctttagtg

SEQ ID NO: 7970 - DNA, 3000 bp, Unknown
  misc_feature (1)..( 3000): cDNA_ID_1809911_gDNA_ID_1621177_Annot_ID_57360 3000 nt of promoter + ATG
tccaccacttttctttcttctttctcttcacatttggactgcttcctgatgcatcatccattggaagtcctgttgttatgataaactctctcagggagaatcgcataggttgatcagcaaatacaaaccacaattcgtcattgttggttagtattcttctctggagtaaatgatgaacgatatggcttgaaaatgctaagtccatttcagcgaattccactataggacccaagaatgtgtccattaatgtgttgaactctatcggctctaaagctttcctgacagtcgagacaattttgaaggatgaatgctttgatacccttgtaatattatctacttcgctgcctggttggaacagtcttttagggaagaacagtttttttgtactcatatttctcaaaacctgattaaatacattaacacagtcattaaattaacatagttttgaaatggttttaaaaaccatttttgtaaatctattatgcatttgtagttttcgaaacataaacatagtcattacaagtcgtttaaagaactttaaaaacccttgtaaaaccatttttcaaagtcattacaagtcgttttaagactttaataacccttgtaaaacacagtcattactccataatcctttttaaagaccgttttgaaacaattccaaaaacaaaattttaatccttttcaaagaacacagccgctgaaaatagaaacaaaaaacccttttccaaaccaactccaatcaactggtaacccataaattaagtgaggatctataaattaaaacacaaacccaaacatcaatctatttactgttaaagtttcaaaacgaaaaaactttgaaattgctacaacagagaagttaatcggcattcgaaatcttctttgaaggtttttggaacccaaatatcaaactttaaaacataaatctatcaaaattatataacaatttccaacactccttcaaaatctcaaatatcaatctattttacttgtttcgttttcaaccgaaaaacctagaaatgctagaacaaaaaagagattcggtaaaaatcgaacaaacccaaatgttaaacttcagtttcgtaaattaattaccttcaattgcttcctttttgctggataatcggattttcttcagattgttgaaaggaagaagacgaagacgacagtttctattcttctttttcttttgttgtcttttcacggttcccttccgtttttgtttttgggttatagtgaatttttgggctttagtgttttttgggcttttagtgtttttttactaaaacagtttgtttttctaaataacaggcgtaggcccaattagtaacagatacagtgtttaacattactgtaactttttcaacggttgatattctcttttaaaaacggttgtaaatcattttaaaaacggttgtaaatcttttcaaagtgactgaccctaattcggtaaaaatgtcagcagtcaatccctgtttaatttgtttttaggttatagtgaatttttgggctttagtgtttttgggcttttactgtttttttactaaaacaatttgtttttctaaataacaggtctaggcccaattagtaacagatacagtgtttaccattactgtaactttttcaacggttgatattctcttttaaaaacggttgtaaatcattttaaaaacggttgtaaatcttttcataatagcagctactgcagctttttcaacacatttaaaacgcttttaaaacagcttataaatcgtttaaaacccctgtttaaaagcatgtttaaagttcttttccattcaaatcaaagcacctgttaacccaaacaaccattatacagtaattttgtaaaacaggagttgaactaaataaacttcataaatcttgttccatacagatgttcataaaatattcaaatgacaaagtttataaatctatcttgtactccactactttttgattagaagtctgctacttctacaaagtaactaaccctaattcggtgaagatgtcagcagccaatccctgtttaatttgtttttagattatagtgaatttttgggctttagtgttttttgggcttttagtgtttttttattacctctttgtccatgatacatatttagagtatacaccagagagagatttcgctcccaggcacgacttccgaggaggacaaaagaagaatgttcctttcttttaaccagaactcacccacttttggcctctaaaagtagtaacttccaacggttaatagactggttcggtatgttccggcaagtttcctggttctccggtggttttcccctgctcagaagctttacacctctcgctgctggacatactcactcacgtctcccttaatgaagacccctcccaggtagccttctgctctcccccatcttgcttccaactgaaaaccctgaagaaaactttgtaaccctgttaaacctttgtaaccctggtaaacctgtttcaaaccctaaacaagtctcagcgcatttattgtttctcaaagaaatctcttccaacttaaccccacagctattactcacccacctgaagtaatagagaagagaatcccctatcaccttaaaggcaaagaagtagctagaggttactcccccccccccacctcgtaaaagaatcagagccccggatctggatacatctgagctaatcaaagagaactccctcactcttatgggaagactaactaacccctccgtccaacgcctctggtctatgtttccctttttatcaaacagatgtaatctaagaggcaaagccttaggctcagacttgggaaaaggctgtttccagttcaagttcgactatgaagaggatctactgaaagtcttggataacagaccttaccattatgaccagtggatggttattttgcagcgttgggaacctattatctctgagtcattcccttgtaagatccccttctggatagagcttcaaggacttcccaaacacttttggcaacctgaaatg

SEQ ID NO: 7971 - DNA, 3000 bp, Unknown
  misc_feature (1)..( 3000): cDNA_ID_1809991_gDNA_ID_1621178_Annot_ID_57364 3000 nt of promoter + ATG
cccgaaaccgaccccaaaccaaaaaacccaataaataacggaaccaaagccaaatctgaatttttaaattatccattatcctaaaccacactatccaaaaaaattcgaaccgaacctaaaccaaacctaaactgaatctaatattcctcagtatccgaatacaaatctaaacttaaaaatattagttaagatatattttcgtaataccttaaatatccaaaattaaaattagagaatattgcatactcagacacttttcataactttagacgtgtttcgacactttaaaatcatcaggcactttgccttggcaaagttactctattaccctaaccggttgttttcaaaccaaatccgcattaaccaaagagatcccttaaccaacccactcgtcgaatttgcagttaccttaccctatttgacttttgaagactttttcagtagcgtaaaaacctaatccagtaaaaaactgcaaattactgtttgttgtagaagacgaatccggcgacatcatcctcttcagtttttccggtgactctgttcgctcagacgacgacgcagacgattttccggtgaccctgttcgctcagacgaagacgcagacgacgacgacttctaatttcgctcacaaaccctaaattctctccaacttctccgtcactgtccaccaccattgttgcacacgactttctctcttctgaagactccaccggtatttcccccaaatttctctttgttcttatatcgaattggatttatgtttcatgtaaaatttgaattgtcgaaactctaaaacagttatacttggctgtttgattattattttctagtttctatcttcggttttcgcttctcgtttttcgtatttaagttacaaactcatttgattgacaaaaccatatactctgtttatgaattttgctcactcttgttgcgattactcgtaaagccttaacctttttgggtttctttcacttactagtatttgttaggttattccacttcaccttgatcctatgattattctcccatgtttagctttttacttatagtggttgtgtctgtctgttgtttttttggattttaggttcatttacgggcctaaatactcaccagagtgttctccaagttcaggtaagctaccaccaatatgactcagtgtgttatgatcttacagttaataattagcactcgccctttttgtggacagggcactgaatcaattcacattgtgttatgattttacagtaactaatcttggtttactcactgattgtttggcattttcaactttggcagttatcttaaacatgttggatatggtctgatggtcaactatatttggataacatcaattcacattgtgttttgatttttcagtaactaatctttagttggtttgttaactttgttttgtttactctctgatattttggcatttttaggtacctttctgacttactcgcagagcgtcactagcttactccatatttgactgtgctagacgtgagccatactgttataattagagtttctttctttcatcataagattttataattagagtttctttcgtttcttgcttcagaactaaaatctttattcatttgatatgcattttagtggtgcttctaagttatatgttagcaaaaaacaataatagagtaattgtacaatcccataagtaagatatctttatgtgaattgtttcattgtttagttttcttttcgtatttcagttataaacaagagaatttcttgtttgggaaacgtaattcatttgtaacaaactcatttgattgacaaaaccatatgacctgttgatgaattttgctaactcttgttctcatttctgaagtagccttaattatttttggtttctttcacttactaggctttgttaggttcttagagttgtccttctgctggttcttcagagtgatccttttctaatccgttctattttattttagctgtagtttagtggttacacctaatcttctgctggtttgtgaactttgttttgttcactttgtggtattttgtcagtttcatttgcaacttgattttcttttgtggagatgaaaaagatacttcagattttgacttgtttaaaaaaaataatatctgcatatagttataatttccttttcctatatctattgctgccatatctaagatgagtttatctgtttgtgttacaggatttggaagacagttaaacatctaaatcgatagcattggcagataagtttattctgttacactatggaaggtactcttacactgttaatctaatctaagcaagcaatagagagacgtttgtgaactcgttttcatttggtcatattatctgttaatctaatcttaatcttctgaacttgtttcttgctaatgacagggtcaacgtctcaggaaccatcttctcagtgtgattcaaatcttcctaatagacttttcgccactgatcaatatccgaggggaaagctaaatatatactcaagaccagatattctatcctttctccggaaggtttttcaggggacaaaggaattggatttcattctgcaatcttgctttggacctctattcatttgccggttagtaagtgtgcgatgtctggtaagcttatgcatgccttgctatgtaggcagctggtaacgaagaaaaagtatgagctgtggacagtatttggtggatacccctgagatttgcattacctgaatttgcttgcgtgactggattgccctgtggggagttttctgaggattatgatccagatgatgatccggtttatgttgttggcatgaagagttactgggacgagttaattggtccagataagactgttaccttaggggatgtttcagacatgctaaccaacaaacacaagacattgtcatctgccacagacttaagctcgcgtttctacttattatagatggtgtactcatagcatcgaaccaaatcggtaggcctacatttaaatatgtagagatg

SEQ ID NO: 7972 - DNA, 3000 bp, Unknown
  misc_feature (1)..( 3000): cDNA_ID_1809987_gDNA_ID_1621178_Annot_ID_57365 3000 nt of promoter + ATG
aaattataatttaggcttgtattgttcatttacttacatgtgttataattttaccttttatgtaataaaacttgatttttattacttagttaaactgaaaccatctcttccaaaatgaacacaatttatgatcattcttacaaaatttatgtaagaatttatgatcattcttataattgacatgtggtacactacgggtttataattgtattcaatagtttttttattttgtttttagcatgttttataaatatatgttaatatattttttaatttaaatatattatacattttggaaggatactttataactaaaaaatgaaaattttaagttgtattagttttgttaatattgtttatttttagtactttaaaattgtataactgtaatttgattgttaatataaataatcaagttatattttgaatttatcatattattttttatatctatttacttttgatattatattagtattttctgtaaatttaatttcacaatcaataaatgtaagatcaatatgattattattggttctcaacaaaatatctttaagaatccaaacatgaattttttcacatctaagacatctgtgaaaatagtcggatagatgatatcttttttactgtgtctattgcttttagtaagacagaagccatatttctgaatcttttgattagccaggtcacgatcatatatgttctcctcttctgccaaaatccaaacaacacaaactttagacgtggcagaaatcagcatttatttctaacaataattggaaaaactaaaaaaatagaaaaatatttcgagttttagctagagaatgaaacaaataatcaaaacgaaaactaaaagaaataaggtgtctgtaaacgctaaaatatttcatacctttgtgttgggtgatggtaaatggcgtggtggtgcatagtatttatagggacaactaataggttactaacccgcatctattaaatagaaaatattccctgaagcaagatatttggaagaaaatctatgaattcgatagattttgaggaatatactattgttatgcgtttttaattttttatgcggcattattatgtttctttaaatggtttttgtgtagattatgtagaggataaaatatgaaatccgaattggtgagttattacttgattttagtaaaaaacggaattgatttttatggagaagaaacattagttagtttcttaaaatctgttttgtagggatatattgcaatgtatgaatttcaaaaatggatatgatttgtttggaagaaatcgtggagttaatatggagagattttaggaaataattttgatagagacgattaagatggcaagacgttaaggaaatcataaattgtgattagcaaaagaattaattacgtttattaaagattgactaagattgcctattgttgttggaattaattaagaaaaatataggagaatatatgtgataccaaaaacatattaaaacaaatgaatgttaaatctggcagattttgaatcaaatcatattttatcctctacatagtcccaatcgtaatttctttgaaaacagaatgattctgaatggtttagaataggaatatgcttgagtatcataagtgcaaaataataatcaaaatgccgtatttagattttgatttgattctgaatcaaactgtcgagatatggtaaatgtatttacccttatttttacgcttgtacatgtaaaacagaaagatttgggtggtttataagatggaatattgcgggatttagattatatcttgactggcaagcaaatagtaaaagattttgtagttaaggtgatatacgtaaatcaggatacataattgctatgaatgaggagtggagagaatatatgattcgatcggataaattttttggaaggcaataatcaataacaatttgaataatattatagttggcgaaatttaatttgcgaggtgatatattggaattttgaattgatgatgatttgtagaatgtgtaaaaatatattgactataccatatgtaagattatatgataaatagagggttcttttaaggtttatggaattaatgcatgattaataatcgtttaacttatagaaatgtgatatcgaaatacgaatatttggtaagagtgtagtaaatatttagagattttggaatgaagtaagtaaagatatggttagttatttggttgttcggatttttaagaaatattatttcgtgtaatattgaattagtagagatttaagggattaatgtgtgcaatttatgagggtagtgcaaaataatatttttgtttaggtaattaattagtgcaaaacgtgaatagttcatcaaaaatttggtcattgtcctaacgcagacaatcttgtctgattgattttatagggactaaacatacaatatcgaaattgaaaaagaatttttcgacacaaatctttcccaaaattgtatatgtagataatttataaatttgttatcactatcttctaagaaatctgtcaaccaaaaaagtatgatataaaaaatctgtcgtatttaaaaaattctactgaataagaataaatctggtataactaaatgatagacttttgtaaaatcgctagaaatttttttaaagaatattttgtatttattttatttttaacacatgaaaaaaatattttaaacaaaaaaaacaatttaattccaatattttagaaaatattctaataattaatctcattacttaagttaacccctaaatatgttacgttttaaaactatctaagcacgttctaatacacatcatacatcatacagaaacacatatattcctccgtgctgtaacacgggtctgatcttagtaaaatagtggagagaagaatattcttctggataccttttaatattccccaaaacttctgaatcttcttctcaatttttctcgacattttctcatcgaaagctctcttcctttccctttttggcgctcaatacaatcatg

SEQ ID NO: 7973 - DNA, 3000 bp, Unknown
  misc_feature (1)..( 3000): cDNA_ID_1809983_gDNA_ID_1621178_Annot_ID_57366 3000 nt of promoter + ATG
ttatgagaagaagagaagaatagagaagaagcttcaagcgtaaaagaagagcaaggaacaaagtcaacaaaagagatgttgggctttgtgttttgttaaaatgggctgcagatgaattaggcccaagtatgtttagttaattagtgttgtgttatagaatcaaagatgttatgtagagtgaattaaggagttgggagttccaacatagtagagtagctgatgtaagtcttaagacaatgatgtggtctagggtctaagcaagtggagtaaagccactatatgtatgtgtgtcttgtgtaagattatccaagtttattatcaatgtagacatgcaagtgtttaaacgtgttcttgtattttctgttttaacaagaacaaaaacagagatcgtgagaaaagcagagaacttgtggtgaaaattagaacaaatgcacaatcatcataagttataaaagactaaacaactgcacgcagataaagcaaagaagccgtgtaatctttgtttccaattataaacgtcatgtttctcctctctataatgttagaaacataagaatctcctccagatctttctcctgatttctccattcccttctcaagaccctatcgaaagcacaaacatgcccaacaataagtaaaaaaaaacacacacagaatcaattagtatctgcaattcacgcaacaaatttgtatgcatcttgattcaatatattatcatatttataaaaaaaaataatataaaactcgtaaatttttaaaaatatcaagtttttgtgttatttattttcgtttataaatttaataaaatagaaatttacattttgataagttttatattatttggttacaaaatatttagaaaactttccatattttcttattttggttttttccattttacaaaaataaaattaaaaaaatagaaaatatgaataatttcataaatgttaattaatgagatgacttataatgattggttgtataaaatcctatgtagacgtactaaaaaaaaatagttttgacttttttataatatagattagttgtttttgatttatttaatttctcctagatccattaaaagagatgcccttagatcttagtcaaatagtaacatcatgtatttcaaatctaaggaaggaaatttatcttatgggttgtcatattgctgttaaatcaaaatcaaatatttttcttacctaaataaatggtcaaattatcaaaaaaagaaaacaatgaattgtttgacaaattgctaataaattaaatcatttattatggtacataatctgtaagtatttatttttgaaaaacttttcagcatatataaatctcacgtaaattccaaaacacacaaaacaagaaaaatggttgcttacgtcgataaaaacttttcattggcttgttttttggttttacttctttttgttgactcatcgtatgcaaggtttaatacgttggttacaaaagatcagatccacaccatatgcaccaaacaagatatcaattcttcatattgttttcaagttctaaacgcaaatcctgaaattgctagattagattttcctagtctcttcaaatttgtgcttaattatcaggctcaaaatatttcagataagctgaagcaatttaaattatcaggaggctacacgccgggtgttgaatctaaatataacttatgtatagaattttatgaaaattctttcgaccggcgtgatgaagccctcagatatttggctgccaaagactatggcagcgtaaacactatggtcggtggaacggcgataaatatgttcaactgtgctgatgatttgtcaacaatgaagccagtaccacaattttttgtgacggaaagtaatttgattaaagaattgtctaagattctcttagtgattctagaatgtttcataagtaagaaaaaagaatattgtaatagagatctataataataataatattagtatgattgttgccattatccttttttaatatataaaaaataagaaaaatagaaaacatttctccactccctctgcctaagaatctctcgtttaaagctacattcttttttttttttgtcatccaagctaaattcttctctaaatcgttttaatcaacttgttgactcgtgagttgactcgtgggctgtttctctaattgctaatagaatttttatacgatgatggaagaaactagaggaaactgacaacagataagaatccatttcttctacgcagattggtggttgtttggtagaatttgttctctatgttatgctaaggttataaattctcatattgtttttgcttaggatttgggattaatagttgaaataaatgattgatcgcatcacttttggatttaggaccgaggccttacattctattgtattcatacagaggtatgatatcagaaatggatttttgtttcatttgtgtgatggaccttaacatgatggaccttaaaattgctacatataacaaaaacacaattttatttatatgatgatttatatatccatcattctgtgaacggattagattttctttgccttgtagatcaattgtgtgtccagtatagtatagacaagttcaaacttgcttagctttgcttaaccaatcattaattcgtattttaatttcaatctcacttatcaaaatcactgatacttaacttagctcatggacagtctctacggccaacaagacgtaaatactaaaaagacccatatctagagctctctaatagacacaatcaaaaatcatttacgtaatcaaacataatctcaatttttcttatgttgtcaacctctaatgacccatatttttcctcctctctgccctcacctccttcctaaccctataaaactttctctttgttcctttgtctcttccattttcccaagaaacaaatggatcgttatcttttcttatcaaatcttcaatcaaacccacttagagatcaattgcttacaccaaattctcaaattaagaaccgatg

SEQ ID NO: 7974 - DNA, 3000 bp, Unknown
  misc_feature (1)..( 3000): cDNA_ID_1809975_gDNA_ID_1621178_Annot_ID_57368 3000 nt of promoter + ATG
ttttaaaatcccttgtaaatatttttaaacccttttaaaatcccttgtaaatctttcagaacacttttaaaccctttaaaaatctttaaaaaatctttaaaaaacctttctaaatcttttaaaatcctttaaaatctcttgtaaatcttttaaaatccttttaaaacaattttaaaccctttaaaaatcttttaaaaacctttgcaaatcttttaaaacccttaaaaatcccttgtaaatcttttaaaacctttttaaaatcccttgtaaatctttttaaaacgttttcaaatgccttgtaaatcttttaaaagccttttaaaatcctttgtaaattttttaaaacccttttaaaatctcttgtaaatcttttaaaaccttttaaaatcccttgtaaatcttttaaaaccttttaaaattccttgtaaatcttttaaaacccttttaaaatcccttgtacaacttgtaattcattaacgaccgtggaagttgtactcaagaacagtgatcattttgtctttcattgacaaccacattgacccggctggttggttcccatgggatggcgagtttgcgctctccacattgtattatggagagtatgcgaatactggtcctggagcggatacgagcaagagagtgaattgcaagggatttaaagttattaaagactcaaaagaggccgaacaattcactgtggcgaagcttattcaaggaggattatggttgaaacccataggagttactttccaagagtggctttgattttaatgtctacttgttcttgtactttgtgttgtgtcacctctgttttagtttaatgtattttctgttttgttttgtatgacttacccaataaataacatgctctgtttcgcaagtattaggttaatgcatataatattttgaataactttaacactaactaattgaatattttcaatatataatcatactcgcactcatcagtcataacaccatcaatttaatttttttttatggggttattatatgtactagatgactaaaactttgagaatattttcatgaataatatgaattttgtttaagttgattacattatttatcaggaacagtagttaccaaaaataatagtttcatattaaattttacacgttggtcatataggggatccttgcttattgcattctgcatggcatgtcagcacagtgtatcagcatgtgatataattttactataagtagagcattcatcggtcgtaaattttcggaatattcagtgtatttattttctatttttttccgttttctattatttctgtatttctcaatacaataaaaattcaaactaaccaaaaattcagaaaagatcactatattatatataaaatcaattgccgcccaaaaagaaatctgttttacaatgaatataactgaacaattatacatatatctagcaaatctatcttttggcatttctaaattaataatctccattgaagagctgcaactttgtgcttgctaaaactttttcacctgcaacaaaatgagtattatgggagatttaaaaatcaacataggcatacaaaaatattccagaaagaagagagagacaataaggacaacaaattttgagtcatatcatatttgttgtgatgggctccatcccattgataaataccttaatcaaccgattgtcagctgaattcctcatgctaatacctaactatacaatattataattgccatatactggaaaactagcagattgcacaacaatatagaaaagacacaagcataagaaagaagcctacgcgacaattactacaacatctccatattgaatggtcttctgatatacaataccattccatgcgcgcagactgagactttgtaagtatgtgaagcatctcacgagagttctcagtcaaatgcaactcaacaaagaaatcataagaaagcattaaatattgaaagcattgagaagcaaattagttcatgaaccacatcacatcagcatcctggagaccaaaaaaggaagacaatgaatcactcaatagaagaactgataagtttttgctttcactgccaagagtgtaagaaacataccgcaaaaacagactactaaacccttttcaagaacaatccgaaggaaattgattcttctccacatcatttagcatccaaagcaatgaccaccatctttagttgcagctctacgcagcacatctaaagctttcttgttcttttaccaattctaaaaatctcaaagaagagatcgattccagatacaatagctgcataagattcattcaaagttgtcaaaattacagtaccatttttttacggaggaatgacaagttatgagagtgcttttattatatcttttcgggtaaacattgtaacgtagtgaaagttgagagtgaattgcctaacaaccgatagaatcaaccaaaaagaaaaaaagaacatcttttctaacgaccaaaaaaaaaacctaggggttttctatttattaggtgtatattgtcttttctagtactaaaacaataatggctaagtctcatcctcacacgtaagagattaaggttgagaatatattgtattgttgttagcataacctaaaatggatgaaaccaatttctaccaaattcatttttttttagccatttagagtacagtggaaaacaagtatttcaactaaagtactctaagacaattcttcttctatcttttatgagctgaaaattttggaccacttttcttttctgttctttgtggataataaaaccaaacttcactgaattatagcttcaattcacattgcactgaatttttagattgatctcaaaataaagtttttttcctaaatattgtcatttattgaatacaattaattaaatgtaaattgattaagttgctttgctttgtatataagaccaccatcgctccctcctctttcatcagttaagataatataaattcagtaattaagagagaagaaataaacacaaaaatg

SEQ ID NO: 7975 - DNA, 3000 bp, Unknown
  misc_feature (1)..( 3000): cDNA_ID_1809971_gDNA_ID_1621178_Annot_ID_57369 3000 nt of promoter + ATG
atagcgtagtgttcatacagaaaatagcacatcaatctatgattcatataggatacatgttatactcaaaactatcttcaaaacccaatactaaaacatgcaatttaaaaaagtctgaataaatttgataaacagatgacacttatataatttacttcaaaactcaaattcaaacatgaaaattaaacgcaaagaagtttgaatatatttggaagcttacttttgtctttacgacaaattgattacagaggtcactaaatatgattttcgggtctccattgcacaacttgaaattcgattcacctcttaattgaaatcccgattgacttatctaaatgatcgatagttgggcatattgagtagccgattgagattgtgaatcataaatccagctgtatgaataaaaccaattagctgttccatgtgtgtactacatatctccataaaacgattgaaaacgaaattgatcgaatcaaattataaaaaatcagatcggaggaaaataaactcttacctaatacttgaatcaaattgtgtagcacaaagtattgaattgtaacatgagctacatggttgttaacggatgttgaagaattgctctctgaaattgattaatcgatgtcgggaagcctagaagtgaagacaattggttttgaaaaaaaattgttgacttcccgaatgaaaatgacagattcaaaaatgggcataaatatgggcttttccaaaactcggtattatactggacctttttttttgtttgttgggtgtacatgatatcttattatataaagtacggttttgaaagttactaactcaggagatcatgacatttatataaaaagtacggtaatatcatgccttattgcttaccttttttagatgataagcataatttttagatacataattaaatgtaaacaacaacgaagaatatatatcttttgggtttatataaggttgaccgttgacttctctcccaaaaaggtgaaaagtggtttctttcacggacaatctccagcgtctccaacggcgccgggccctctcttcgtccctctcttcaggccctcccttcctcatggggaagcaaaagcgccgcaaaggctccctagccccggacccgtccccccctcgtagtgttggttcctcttcgctcgcttctgtctcttcagttgctttgccgatctctcagatccagccgtctgcaactctcccagatgcccaagctgccgtccctcagacagccttggccattccttctcctcctgttcctagatctggctcagatctggaaactttgcctataatcgatgtgacctcagcggttacccctgtaccggctggagctccttctgcggctacctctgttccagcggtagctccatcagtaccttgtgaagtgactccctctcggggtccgagtccttctcctgctactgcgccagctacacccgtcaaggttgttgtggcagacccagtaaacaagcctgaatctaacacagctgaggttgacagctggtgtgatatcttcaaaggaacttctaaacggcttcaaaagcaaggcacggcttttcacacttccttctggagaggcctgtgtcaagattcctgattcgattatcgaaaagcataagaaatcttgggagtcttttatcctgggtcaattctattcggatccccctgctcaaggcaccatccacacaattgttaatggaatttggagcaagcaattccgggtatcactgtctcaagaatggagggtaatgccttccttttttgcatccccaacgtccaaaccagaactcgtgtcctcagccagcgtctttggcagatcgacggacagactatgtttgttgcaaagtgggagcccggtcttactcctgtgaagccggagttgactactgccccgatttggcttgaactgaggcacgttccttttcaattctttaatgacaatggccttgagcacattgctagtttggttggcgagcccaaattcctccatcctagtactgccaacaagactaaccttgaagtggcaagggtcttcactataattgatccgaggaaacctcttccggaagcagtcaatgttcactttgcttcaggagatattaggcggatcgaggtctcgagcccttggatgccgccagtctgtgctcactgtaaggaggttggccacagcttgaggaaatgtaaggtggctcctatcacctgcaaggcttgcaactccactttgcacctagctgatgcttgtccccgtgaccagccccaaggggtcaaaaagaggcataggcgcaggcgctccaaaacccctaagccagttgtcgaggaaggcgattggaatactgttgccccccgtaacaggcgctcaactaggagtagcgttgtcctgaccattggcccgcctctttcggtcccagacgccaatgccgctgctatggctggctctagtaaggaagcccagaggcccaatcctatcacgggtaaagctgcttcctttaaaggcaaagggaaaagtattgtcgtggctaagagtaccacagtctcagaggcggactatgattcttctgatgtaccttctgacgatgtggatagtgatctggaaaatgaggagcaattcacagaggtgttgtctaagcgacagcagcgaagtgcgaggggcaaaggccccaaatcacactgatttttatgtcgatagacatcttttgttggaacgtccgcggttttaattcttcctctcaccgcagcggttttaagaagtggtatagaagtagaaaacctcttctcgggagcctcttggagactcatgttcggcttccaaagcagcagaagtttttgaatgctttgatgcatgggtggctttttgataataactatgacttctcggttttgggtaagatttggcttctttggcatccaagtgttaaagttagtattctctttaaatcgctgcagatgatctgttgcgaggttcagatgcctaactgttctgacactatg

SEQ ID NO: 7976 - DNA, 3000 bp, Unknown
  misc_feature (1)..( 3000): cDNA_ID_2139898_gDNA_ID_1621178_Annot_ID_174231 3000 nt of promoter + ATG
gaatactggtcttggtaaataaagaccgatttctttcaaagattgtccttgactcttattaatagtcattgcgaaagcaacaactataggaaattgttttctacgcatgttgaatggtagtttagtatcagatggggtaatgagaatctttgaaatcaacactttatcaccaatcctacctcctgtaataataacagcctgtaaaataggcggagtcatctgtatcatctgaagccttgtgccattgcataatccaccttttgggtctaaattccttaacaacataattggggcaccaatattcaaacgtaaacaatgatttggtagacctgatatcttgatagagtttaagaaatctggagtgaacactggattgtactctgaagtagtgtcggaaagatctattgaatcaatacttaggtactgaatttcttcacctgatatgaaaaagttaaaattaaacattaaatttaacatgcaactaataatacagataatatagtattctaatacatacctggtagcttctctaacagacgctgattaatagtattaacatcctcattggtaggagacaatatagctctctcttggatgaatttgagatctttattttcgagtaaaagagttggatctccacaaatctctaaacttatagctttaataggatcttctccctctgtaattaaaaactcttctggaataccaattaacacttctccatcgtttggtttggcgaagtgatggatttcattaaccatgacttgtaagttagtgaccatttgtttaattctccttttcactaattgtcatcttttaaaaacatttggttttacaaagttctggtgtcgtgtgtttgcgcacggaaaatccacttgaaagcacaaactcagaaggagatttctacttttgtattatgactccaaaggagatgtggccaaaaagtaattcaaaatacggctagctaatggacatggtaaataacttcccattgttagacacatatatgcatggttatgctaaaatctaagttattaagttttggttcatttcagcatatgtgcccaatcatgcatttgctaaggcgaaggtcgttgcagaccccatgtccctatttgagtgataggattgcctttctcgatctgtggtttgtcaaacagttgtgtgatgaagacaagaaatttgattcaattatgaattggtttttctctgaaacctatatcaagggggtaaatggcgagtatccaataactgggaagacatgaaaaacatgggttaaagatgttgacatagtctacttggttcacaacatcaacaacaatcattgacttgggaggtagacttgttaaagcggaggatcaatgttttcgacagcattttaagttgcaacaaggataaggaggtaagtaaagcatgcaagcctttcataagaatgttttctgccttactacaagcggtagcgtcaccagagaagaaaaaagaaatcagtgttgttgcattcagtttctatagggttaaaactgcaccgcaaaacattcaagaaggtgattgtggtgtgtatgctatgaaatacattgagtatttagccataggaattaatttcgttggtctaggtgaccgtgcaatgcgtgatcagaggctaaaactggcagcagagttatttgacgaggttccagaatcagattattggatacaaatgtctgatccaaatccctgaggtgaagaaagatggggagttgagttcctatctgagactaaaaaagctgtctgaaaaatagtggtgtgtcattcctttttgttgaagttttttgccatctaatttttgtaaaacttaatattcgatagttattcggtttggtaaaaacaaaatattgatgtatccttgtttattgaggtttattaatgaagtaaaggctaaagatgaattaatagtcggtaatagagttaaatattacagcttgtgactcataattaaacatcgatgcatcaggtttttaaaatgctcccctaacacaactccttgaaacgacatgaataagtaaatgcaaagcaatcctcacatatgtctacattaagaagtagttaaaatggcaatctggtatatcaaagaaatgccaaaaccctttgaatactttccgaccacctacaccgatatctttgatctgcctttcaaccacattggcaatatctactctttcttgaagagtttcaactcttctaaagaaagctttggtgacgtaaacaccttggtcataagcaccacatcatatcagcatcatagctaaagcaaacgtcgcataaatggaagatgtacacacctctacaagcatgtcaagccgtgcttgcgttggacctaattgagtcaattggcagagagcttcgaggtaccatgctgtcaggtgtccttcagtcgcgcattataacaggaaatgacggtagatggatgtctctcttccaagccgagagttgaaaatgaattcgtctagatcaacatcggctaaaacttcaaatgtgtagacttgaatttgaagccaagggcaatctacaatgaatgggccaaggtaccgaaagccctgtcagccgacgcgacggattatgccagttactagtgcatctagaatgaagttcatattttgtttactaaattatgtccgtcgctacgtatatttatactaatttgaaatatttggttgacctaatcgacagaattgtacacatcggtgacgcataacaatatgcaatcatacaaaactagtgggccacaaattattgaccaaatatcaaactaacctcatataaaagcccacttaatgaaataggcccatttgcaaaataaaagacagttattctattataacgtaacccccgaggagggaaagtgaagggttgcgtctttattcaattatatatatattagagtctaggttaaccctaaaatcggtgagtctctcaactcttctgtttaaccctagcattttatctgcaacttttcaacttctg

SEQ ID NO: 7977 - DNA, 3000 bp, Unknown
  misc_feature (1)..( 3000): cDNA_ID_2139877_gDNA_ID_1621178_Annot_ID_174225 3000 nt of promoter + ATG
tgaaacaatttgatgggagagaaaaaagaagaacaaaaaatcaaataattatattttagcactaatttctcatgccggtaaaccttaaagtaatcaaagtaatcaatcttggtatataaatgtttgtgccatacataatcaaagttatcaatcttgtaccccaatttatggttgtaaaaactcttataacatgctaaaatcttatcatacagaactaaaagctcctaacattaggagattgaagcaaatgaataattgaagagagaatcagaaaatgtaaagtgtggaaagacgagagagattctacgagcaccacatattcgtattattattctaccatcgtttcaagacatgaaagaaagcaaaaaaacaaaagagaaaaaaacaaaaaaaatcagacaatatattggaggaccctagaaaacaatataccaccaaaacaacgactcttgaaataaggtttatataaaataagttactaactcaaactcaggagatcatgatatttatataaaataaagttttgaaagttacttaagatacggttttgaaaattactcactaacaagatcataatatgtgacaagtctaacaataagatgtttatatgtgtcattaaagacttaatatttttattctcttaaaaaaatagaaaacctaaaaaactaaacaaatttacatatactaatttttatgtctatatacatatatataattatttttattaatcaaaaagaaaattaacgaatttgattttacatgtgttattggtcaattaaataaatctaacatctactctattatttgagacgtacgttaagtgattctcggttaaaaaaatttttacctttaaatcatatgtttaaaatgttaatgtcatgaaaaagtttaccttttactaagaatcacttaagttacgttataatcttggccattcgattgaattgtttgtgaccgtccgatctctcgccttcacttaaaaaacacgtggatccttatgacccgggtttacaattattgggtcatacgttataatcttggccattcgattgaattaattgtagccattaatgttttttgaataaattctatagcaagatttttggagagagaatttttatttatttccaattaatatattcccttattcaatactattcataattacgtgggtttaaaattggaaaactaattatactcatatatcaacaatatttattatattctaagagatcattaatccaatcaatatttataaaacatttcataatcaaagctgctttatttatagatataacattataaatatcgaattaatatgtttgaattcgaaattgggttaaatattctaaatttatttaaataactggaaaaataattttaactaaacttttttttatgtttgataattaaaatagaaaaaatatttttaaacatttaaaaataaaattaattacatttttggtttatattaatttttgttaattaaattaatcgaattcctttttcagcaactgaatcatattaatttaaaatatccaatgcgtatattcctttcttaaatttgaatatatcacttctccataattataggtaatcaaatatttagttggatattcatttttgaattaacataaagtttccgaacaatttccataattaaataactacttataagataattgctaaacattctcctataattatgggattcatcataatcattaaacttgacttccacgatttaatattttatgcatattttaaacctaaaaatttatatcttataaatattgtacgtcccatttcaagaacttactcagcagttcctatcttcttttactctctcgtttcttttttattctagcagaagaaaacgagaccatgaagaaattaaaactgaggttgtggatcgacgagaccatggagaaaacaatatatcgaggtatcctctcacactctctgtttttctctatttttttcatgtttttctcacatctgttttttaaaatatttatgcaggtaatgtgggagattaaaatgtagacgcacacatgattttgttaaagtatgtcttgctttctaattatttatcttttatgcaaagtaatatgttaagctttttttacctctctatatatttataagatgagtaattctgattgaattttttttattgggattacggtctttttcctgttaatttgcagaaacatgatgatgatttataatttgactactatcttccaatgaacaacaaaattataaggtatgcaataattttcttaaatctgatcgatagattctctttcactaatatattgagattgtgtaaatatttttgactgtagtttagattttaatatattggtattgttaattaaattaattgaattttaatataagtttaattttgataaaatttatttttgtcttattaatttgtcaaatttgataattaatatatgtattaataaaatacactaaaccccaacacaccatgtatataagtacatatactaaatatacaattatatattcaaagggatacatcaattttgtaatacattcaatagtatccatgtttaaatatgagaatatttaatgaaaacaccaaaaattaggagaataggagaatagggcttagagagattaggagaatagggcttagagagattgattatttgatgaaatgttaatataaaatttgaatgttttatttttaaattttaagtcatttaatgtgaatttggtattatgtaaaactaatttatgagctgactatagtaaaaaaaaaaaaatgtgttcgccctaattattctctcccaagcacggaaaccaaggagccgcttcccttagaaatatgagcttctttctccgacgttcctcttctggtatcttccttgtctgatcggtgctagctgctaaggcgagatctctcaggcggacctcttttttggcggcgttgctgtttttcggtgagactttccacatgagatg

SEQ ID NO: 7978 - DNA, 3000 bp, Unknown
  misc_feature (1)..( 3000): cDNA_ID_3088000_gDNA_ID_1621178_Annot_ID_174223 3000 nt of promoter + ATG
ccttgtaaatctttcagaacacttttaaaccctttaaaaatctttaaaaaatctttaaaaaacctttctaaatcttttaaaatcctttaaaatctcttgtaaatcttttaaaatccttttaaaacaattttaaaccctttaaaaatcttttaaaaacctttgcaaatcttttaaaacccttaaaaatcccttgtaaatcttttaaaacctttttaaaatcccttgtaaatctttttaaaacgttttcaaatgccttgtaaatcttttaaaagccttttaaaatcctttgtaaattttttaaaacccttttaaaatctcttgtaaatcttttaaaaccttttaaaatcccttgtaaatcttttaaaaccttttaaaattccttgtaaatcttttaaaacccttttaaaatcccttgtacaacttgtaattcattaacgaccgtggaagttgtactcaagaacagtgatcattttgtctttcattgacaaccacattgacccggctggttggttcccatgggatggcgagtttgcgctctccacattgtattatggagagtatgcgaatactggtcctggagcggatacgagcaagagagtgaattgcaagggatttaaagttattaaagactcaaaagaggccgaacaattcactgtggcgaagcttattcaaggaggattatggttgaaacccataggagttactttccaagagtggctttgattttaatgtctacttgttcttgtactttgtgttgtgtcacctctgttttagtttaatgtattttctgttttgttttgtatgacttacccaataaataacatgctctgtttcgcaagtattaggttaatgcatataatattttgaataactttaacactaactaattgaatattttcaatatataatcatactcgcactcatcagtcataacaccatcaatttaatttttttttatggggttattatatgtactagatgactaaaactttgagaatattttcatgaataatatgaattttgtttaagttgattacattatttatcaggaacagtagttaccaaaaataatagtttcatattaaattttacacgttggtcatataggggatccttgcttattgcattctgcatggcatgtcagcacagtgtatcagcatgtgatataattttactataagtagagcattcatcggtcgtaaattttcggaatattcagtgtatttattttctatttttttccgttttctattatttctgtatttctcaatacaataaaaattcaaactaaccaaaaattcagaaaagatcactatattatatataaaatcaattgccgcccaaaaagaaatctgttttacaatgaatataactgaacaattatacatatatctagcaaatctatcttttggcatttctaaattaataatctccattgaagagctgcaactttgtgcttgctaaaactttttcacctgcaacaaaatgagtattatgggagatttaaaaatcaacataggcatacaaaaatattccagaaagaagagagagacaataaggacaacaaattttgagtcatatcatatttgttgtgatgggctccatcccattgataaataccttaatcaaccgattgtcagctgaattcctcatgctaatacctaactatacaatattataattgccatatactggaaaactagcagattgcacaacaatatagaaaagacacaagcataagaaagaagcctacgcgacaattactacaacatctccatattgaatggtcttctgatatacaataccattccatgcgcgcagactgagactttgtaagtatgtgaagcatctcacgagagttctcagtcaaatgcaactcaacaaagaaatcataagaaagcattaaatattgaaagcattgagaagcaaattagttcatgaaccacatcacatcagcatcctggagaccaaaaaaggaagacaatgaatcactcaatagaagaactgataagtttttgctttcactgccaagagtgtaagaaacataccgcaaaaacagactactaaacccttttcaagaacaatccgaaggaaattgattcttctccacatcatttagcatccaaagcaatgaccaccatctttagttgcagctctacgcagcacatctaaagctttcttgttcttttaccaattctaaaaatctcaaagaagagatcgattccagatacaatagctgcataagattcattcaaagttgtcaaaattacagtaccatttttttacggaggaatgacaagttatgagagtgcttttattatatcttttcgggtaaacattgtaacgtagtgaaagttgagagtgaattgcctaacaaccgatagaatcaaccaaaaagaaaaaaagaacatcttttctaacgaccaaaaaaaaaacctaggggttttctatttattaggtgtatattgtcttttctagtactaaaacaataatggctaagtctcatcctcacacgtaagagattaaggttgagaatatattgtattgttgttagcataacctaaaatggatgaaaccaatttctaccaaattcatttttttttagccatttagagtacagtggaaaacaagtatttcaactaaagtactctaagacaattcttcttctatcttttatgagctgaaaattttggaccacttttcttttctgttctttgtggataataaaaccaaacttcactgaattatagcttcaattcacattgcactgaatttttagattgatctcaaaataaagtttttttcctaaatattgtcatttattgaatacaattaattaaatgtaaattgattaagttgctttgctttgtatataagaccaccatcgctccctcctctttcatcagttaagataatataaattcagtaattaagagagaagaaataaacacaaaaatgttggttaaagttttctcttttttcatccttatgataacaatg

SEQ ID NO: 7979 - DNA, 3000 bp, Unknown; identical to SEQ ID NO: 7973
  misc_feature (1)..( 3000): cDNA_ID_1809983_gDNA_ID_1621178_Annot_ID_174219 3000 nt of promoter + ATG

SEQ ID NO: 7980 - DNA, 3000 bp, Unknown; identical to SEQ ID NO: 7972
  misc_feature (1)..( 3000): cDNA_ID_3047132_gDNA_ID_1621178_Annot_ID_174217 3000 nt of promoter + ATG

SEQ ID NO: 7981 - DNA, 3000 bp, Unknown
  misc_feature (1)..( 3000): cDNA_ID_2139834_gDNA_ID_1621178_Annot_ID_174212 3000 nt of promoter + ATG
tatagtcttatacgtttgacatccaacataaacaaaaaaccaattgtttccaaccttttttttttttaatgcatgttgctattatccctgaaattcacataccggcaccagtacttgctaaaattgttagctacgttgctgaagaaggcgtggatgctttgaaaccctttgtgaaagctggaccaccatttaaatcggctgtgtatttaaaggaaactctaagttgtgtccgccttgacaaatctcgttattacatgtggtggtccatgacgcactccatctattatcatttcttcacaaaatgtcttgaagccaaaaatccacctgctttgaaggctctattgtacaaaccaatagcttatgagaattttgcagccgaatgctatagagctaccgtatgggcggagctttacggagagtatgaagcatagaaatcaatatgttcataatgttatgtccattattatcttgtcatgtacattgctatacttaatttatcttatatcttttgaagtttaatcctaggtaaattcattcattctcccaactaacttttttggttgacatgaatctgttgagcaagtttgaataagttaaatccccaaaaaatattctcaaatgctaacccttttgggtcatataactcagatcaagaatgtatattacatccaaacggacggttatcggtggatatgttattttggacagaaaaagattatgaacacatataaattgatgatatccgcaacctgcttcaagatgaatttccgaggtcaagctgtatttctgcttagtacaagacacattaaatccccataccgtatttcaaactttattttactttattgaattttcatagaaccaacgttttttaattaaaagttacaacgtttaattccttcgacgaatcaacacgtcattattacagtttacatcgtttcagtttgtataaattcaacttctactcacgatttcatcaagacaaccacatcacaaacgcaaaacaaaactaaagattacaatatttctcagttttcgttactctttacttctcctgttcacgatcgttcaacatcacaatctttacgagttgtctccgatggttactggctggaccatctgtgtcattgtattgagaatttacaaaaaatttctcaacttgtacgctttcgaactacgtcttgtcttggccgatgaatgggtaaacaatttttttcaatttattttgcaatttgtggaatttttatttacccgtgtatccctcacccctaaattgttatttgtaacagggcacccaaatagaagcaaccatcggacctcgtttctctgccttctattttgacaggatccaagagaatcaatggaaaacgataagtacgtttctcgttcgacctaactgcgaaccaataagaacaactcatcatgagtttcgcattttattcatggatcacaccattatcacttattccacacctttagcaatcagtttactcaacaagttcattacatttgactacattgtggatgatgttgttggcaaacataccttggttggtaagtaatggcttcttcataaattccattcacttttttcaaaaaatttatttttttaaacacatatctccgacatatttcttatagatgttattggtgcactcgtgaatgttgggattctcactaataccgcaagtaacgggaaagatacggctggattcaaactgccgttcatgatcatggataaaaagtacatttcttcaacatcaattttcagttttttttcaaacatatcatgtttatacatttttgtagtaaggttagtatataatctcaaatacttactgattttcagcaaagatacattggaatgcgaggcgtatggacaaatagtagtggatttggagaaaagatttcgagcatttcgcaagaacaatgtttttattgcacttgcttggtggaaggtggttagatattatgcaggttgtaactagtttaagattcttagccatgcgccaatatcaaccatgtatcccgaacctgatgttgaggaagttgaagaaatcaaaatggttgtaagatgcttagaactatcaaagtgcttgttgcttacaattgttatctcatcttctttttttttttttttcacatcttatgtttacctccaacaatgttttaatatttttataaatgatattatatattaataaaaagttatttatttattaaaaatttgtcctttttatttattgcaacaaaaacttagattaagcagtacaatagtaatcaagtgtctgaattaagttcacctatggaacattgttgaactgttttaaaactgaagaattacccacatacatgattacaactgtttgtaaaacgtcaaaccataataactttttcaaactgtttaaacttctgtgtctgctgttttgttgttaggttaattcttgtttacattttatctacatttctatataagtgaagtcttttcattttaacaatttttttttgtctttaatgacatcggtctatgaatgtaaaacctattatcttctcatatttacgaaaaacattataaaaaaaaaaacgtaaatccccataaataagttccggctaaattggctgtaacaaatcactgtagcacgtctatataatatattatagaccatgcgtatatatattcatggacgtgagaatatggacatatctactttactatcacgaacaatttttggaatatttgtaggatccactaattatatttagtaacccatcgctccaccaaaccactccctattcatttatccagagaattagggtttccatttcatcacgatctcaaatccgtttcccttcagcctagtttggtcctctttaattatcagtgattcttcaaattccttagatcattatttgttcactttcactattatactaatttgataatccaaaataacaaaaatcgtctgcgagaaaggaaaatgtacccaccctcgaccaatg

SEQ ID NO: 7982 - DNA, 3000 bp, Unknown
  misc_feature (1)..( 3000): cDNA_ID_2139824_gDNA_ID_1621178_Annot_ID_174210 3000 nt of promoter + ATG
gtctttgaatttttttccaataaacaaagaatcagcatcacttagaccagttgaaaacgcagaactagaatactgttgatcaaaaatactagatgtttcagatacacacgcctgaataatcctagaggttaacctcggctgccaaaataaaaagcttaccttaaacatcaatctatctttaataatgattttacaaggatttttaaaaggggtttaaaaacgttaataatgattttacaagattttttaaaaggattagtacctgagtagtagatgtagaatgagaagcaaaatgatttgaagtcgtctaagcctgtaataaacacaatcactgacttaataatgattttacaaggatttttaaaaggggtttaaaaacgttaataatgaatttacaaggatttttaaaaggggtttaaaaacgttaataatgattttacaaggatttttaaaacgattagtacatgagcagtagggagagaatgagaaacaaaaggatttgaagtagtctcagcctgtaataagcacaatcactgacttaataatgattttacaaggatttttaaaattataacacaagaaggttattgaaaaatctgctcaactgtcacagaaatttgctctacagtcaaacataactgaagcaatcctccactctgtgagaatttgtgcataaaagttgcaagctgtctatcgtttctaatataaagaggatgagattgtatggttgtagatgtggagactaacttgtaactaagcttcaaagaattggttgaactatctatttgaaaatcctctacaagaatatccaccaacgcgtgataggtaatgtgctcatcaatgaccattaaagaagctcccaattcaatgtctaattcaaattcccaagtcatattgtttgtcaacttccacaagccacaaacaggatacaattctagcattataacctgataagataaataacaacaatatcaacacccataaaaacactgtcactacagagagaagcatggtttacaaatcgttttaaagcgtaagtaagtagcatagaataatttacaagggattttaaaagctttgaaaagtggttaacatggtttacaaatcgttttaaagcgtaagtaagtagcatagaatcatttacaagggattttaaaagctttgaaaagtggttaacatggtttacaaatcgttttaaagcgtaagtaagtagcataaaataatttacaagggatttaaaaagctttgaaaagtggttaacatggtttacaaatcgttttaaagcgtaagtggcatagatctatcacgaaagcatatgtaaaagaggtaaacactaaatcagaaccaaaatctattacgaaatagtataacgaattcacataagcaaatctatcacgaaacagtataacgaattcaaaaggtattaacgaatttacaaggattttataaacaaattcaatcatcaaatctcaaacaaaattcaaattcgaagctgaagcaaatgtcaaactgtcgattgaatcaggattcaaataacgaattcacataatcaacaacaaaaatcgaataaatcaattcgaaatcgaagatttaagctaacattataaaatcaaaccggggaaacgcaagagattcgacggcgacacacagctctacttccgacggcgaagatgggttttcacggcgagtaaactcactatttccgacggcatgggattcaacggcattcacaatttccgatggaggaagaagagagagagtgaagaaatgaattaggtctgtgggtagctcattaaaggtaatttggagagaaaagtattagaaagggtagaaatgaaaatgggaaaaagggtagagttgcaaaagggcattgagaaaagggcattacagtgaattattcttaaaaataagtatataactgtttgtttagcaagctaacatatataataacgtggtaaatttacatattatatgttaaataaatgtttatctacttaaaattatgaataaatatttttatttatatatatatcaacaaaataaaatacatcatgttacataattaacatgataacgattataacaacattttacatagaataataacatgctaacatactaaatatcgaaataatatttgtctcaacacggtaagataatcgatatatgaataataacatggtaacatactaaaaatcaaaataatatttgtcttaacacggtaagataatcgatatatggataatatttatttgaacgtactaatgttttagttaaggtactaatgtttcatccaactttttatttttagtttaattaatttaggggtataagtgtcataaaattaaaacagtagaagacaacaatgttttttttttgtcagttaattatcagttcttctgggtatagataatcatattacccaaaactataacattagttacttttattccaaatatatatgaattactaaataagtctagtatatttggatttataattttaagggtttgttacactatgaggcactttcggagaaacttaattcactttagacactttaaaaactagaggcactttgccttgcttttggagtgaaataagacatatatacccccactaattcgtttgagatatttctacaaaccggtttatggtttcgtttggtattggtctaaaatatacggttattatggtcggtttagaaaaaacagtttgggcgtgacgacgatcgtcggatttcagtaaattaaacggccgagattaatcattgtaacttcccttgcttttcgactttattcaaactgaaacacgagatccattgaaacacataagattctgggtttcaatcatcgatctttggccaactgtcgtgtccaaggaggtacgattgtagaaaactgatatcatgatattaaaacgaaatttcgtgcattctatttgttacgggaatcagaatataaccaaatttatttttttcgtttatctgtacagggatcg

SEQ ID NO: 7983 - DNA, 3000 bp, Unknown
  misc_feature (1)..( 3000): cDNA_ID_3088102_gDNA_ID_1621178_Annot_ID_174208 3000 nt of promoter + ATG
cttgacgccaaactcctgcagaattgcttcgttcaacgcaaccaatattattccctcatgaattggtacaacccttgagaaaagttggttacatatctccaatttccactctccagtcgaagaacaaaaccactctccacatataaccatgatatagtcgtccatcgatccctgtacagataaacgaaaaaaataaatttggttatattctgattcccgtaacaaatagaatgcacgaaatttcgttttaatatcatgatatcagttttctacaatcgtacctccttggacacgacagttggccaaagatcgatgattgaaacccagaatcttatgtgtttcaatggatctcgtgtttcagtttgaataaagtcgaaaagcaagggaagttacaatgattaatctcggccgtttaatttactgaaatccgacgatcgtcgtcacgcccaaactgttttttctaaaccgaccataataaccgtatattttagaccaataccaaacgaaaccataaaccggtttgtagaaatatctcaaacgaattagtgggggtatatatgtcttatttcactccaaaagcaaggcaaagtgcctctagtttttaaagtgtctaaagtgaattaagtttctccgaaagtgcctcatagtgtaacaaacccttaaaattataaatccaaatatactagacttatttagtaattcatatatatttggaataaaagtaactaatgttatagttttgggtaatatgattatctatacccagaagaactgataattaactgacaaaaaaaaaacattgttgtcttctactgttttaattttatgacacttatacccctaaattaattaaactaaaaataaaaagttggatgaaacattagtaccttaactaaaacattagtacgttcaaataaatattatccatatatcgattatcttaccgtgttaagacaaatattattttgatttttagtatgttaccatgttattattcatatatcgattatcttaccgtgttgagacaaatattatttcgatatttagtatgttagcatgttattattctatgtaaaatgttgttataatcgttatcatgttaattatgtaacatgatgtattttattttgttgatatatatataaataaaaatatttattcataattttaagtagataaacatttatttaacatataatatgtaaatttaccacgttattatatatgttagcttgctaaacaaacagttatatacttatttttaagaataattcactgtaatgcccttttctcaatgcccttttgcaactctaccctttttcccattttcatttctaccctttctaatacttttctctccaaattacctttaatgagctacccacagacctaattcatttcttcactctctctcttcttcctccatcggaaattgtgaatgccgttgaatcccatgccgtcggaaatagtgagtttactcgccgtgaaaacccatcttcgccgtcggaagtagagctgtgtgtcgccgtcgaatctcttgcgtttccccggtttgattttataatgttagcttaaatcttcgatttcgaattgatttattcgatttttgttgttgattatgtgaattcgttatttgaatcctgattcaatcgacagtttgacatttgcttcagcttcgaatttgaattttgtttgagatttgatgattgaatttgtttataaaatccttgtaaattcgttaataccttttgaattcgttatactgtttcgtgatagatttgcttatgtgaattcgttatactatttcgtaatagattttggttctgatttagtgtttacctcttttacatatgctttcgtgatagatctatgccacttacgctttaaaacgatttgtaaaccatgttaaccacttttcaaagctttttaaatcccttgtaaattattttatgctacttacttacgctttaaaacgatttgtaaaccatgttaaccacttttcaaagcttttaaaatcccttgtaaatgattctatgctacttacttacgctttaaaacgatttgtaaaccatgttaaccacttttcaaagcttttaaaatcccttgtaaattattctatgctacttacttacgctttaaaacgatttgtaaaccatgcttctctctgtagtgacagtgtttttatgggtgttgatattgttgttatttatcttatcaggttataatgctagaattgtatcctgtttgtggcttgtggaagttgacaaacaatatgacttgggaatttgaattagacattgaattgggagcttctttaatggtcattgatgagcacattacctatcacgcgttggtggatattcttgtagaggattttcaaatagatagttcaaccaattctttgaagcttagttacaagttagtctccacatctacaaccatacaatctcatcctctttatattagaaacgatagacagcttgcaacttttatgcacaaattctcacagagtggaggattgcttcagttatgtttgactgtagagcaaatttctgtgacagttgagcagatttttcaataaccttcttgtgttataattttaaaaatccttgtaaaatcattattaagtcagtgattgtgcttattacaggctgagactacttcaaatccttttgtttctcattctctccctactgctcatgtactaatcgttttaaaaatccttgtaaaatcattattaacgtttttaaaccccttttaaaaatccttgtaaattcattattaacgtttttaaaccccttttaaaaatccttgtaaaatcattattaagtcagtgattgtgtttattacaggcttagacgacttcaaatcattttgcttctcattctacatctactactcaggtactaatccttttaaaaaatcttgtaaaatcattattaacgtttttaaaccccttttaaaaatccttgtaaaatcattattaaagatagattgatg

SEQ ID NO: 7984 - DNA, 3000 bp, Unknown
  misc_feature (1)..( 3000): cDNA_ID_2144553_gDNA_ID_1621179_Annot_ID_174246 3000 nt of promoter + ATG
atcaagtagctggaagtaaattgggagatattcttatctttgtcatgtaacatttctttcaggataaatggagaggaataccgacgagattgaataacattccacattcgagggatatcagggcttatttttatgaagatgtgctgcaagccacaattagatctatcaaggatggtaacacccgtcttcgggtgaggctaatccacacaatctatttgcaatgtcgcatgttatgtcatctttattttgcaattcctaaagcagctgcttgacgggactgatactgttacaaatgaataggtggacattaatatccctgagctaaatccggaaatggtcagttattcatttcactaactgttttatacgatttctaaagcttcataagttgtaccaaaaagcaagctattgtgataaataggatgtttaccggataggaaccttgatggaacttgttcaagctttagctttatcattcgctgacgatggaaaaagagtgaaggtatacatggtttggaagacttaagtgatgtcacatgaatacagtttcacaaatcttgttcattcagcttttttcctcttccaggtttgtgttcagggatcaatgggggaaggtgcacttgctgggatgccattgcagttggcaggcactcgaaagattttagaatatatggactggggtgatgatgaaactttgggaactttcgtcaagcttggtgcaattggtaaatatccaaaaccaaatacttttcaaagatgtattgacaaaaccatgtttaacactagaaatactcagatacctcttgactttggtgtcttctggctttagtaactagagaatctctcaacttacaaaaactgcaccatcaacagaatattgttgtgtcaataatcaaacttgtgatgcataataaagttggatacattgaattacacattattctgctctttgattatgtgtttgcaatgacaggtggtaaagaagttgatgaagaagatgacatgttcatcttagtggctccacaaaatgccgttggaaactgtattatagatgtgaggagctaggaatgcttgaattcgttattcatttgaacttatcgacctcattttatagaatataccggattcgtttgttaggatctacaagcgatgactactgctgctgggaaaaggccagttgtacttatcaatcctcgcctcaaggtacattttctgcttgcacttttttatatagagacaatgggtaacaatgtgatctatattgtgagttacatgtttcatataccttattatttcaggacttgcccgcttcgagtggcataatgcaagtaagcacacaaagtgattctttacccatccaataagaagattatgttgcttataatttccttggtgtctcagacaatgggcagggagcaaaggctggaatatgctttgacgtttgacaactgctatgtattccggcttctctattatttgggaacacaatacccgattatgggcgctctaaggtacagttgttgggttatgaagtagagaaacaactatcaatgtcaattcattctgaatgtttgacctgaatttggtcaggatgtcttatccataccggtatgagctttataagagagtgaacgaggaaaatggaaaggagaaatatgtcttgctagcaacgtacgctgaaagaccaacccctgaacaaatcgacgatgccttctctggaaaatcgcggtaaattgtttccatggtccttcttaacacattgggcttatgataattttgaacaaaaactgagaatgtcatttcacatcagggatcaaagcaagaaggcgtcaggaatctggtaatgagcactacatagttatttaaatgaggatttttgtgtgtgtgtgtaaagctaaatgtgagggatacttgcagggggttcttgagtagcgtgttttcgtaatggaactaggaagctgaagttgtggaacattcattaaatgctcatctatcagttaccaaacagagagagagtgatgctgctactttttgttcataattttctccttttattatgtctcagattgttgattatcttactttggggcaaataaaactgaaaactgtgattattttattacgtagtgtcacataaccaaaaagtaacctcactctcgtacattttaaagcctaagtcatgaatggccgagaatattgttcactagttactgcaacggcatttataggtcatctcataagtggccttctaataattttgtttttcatcagtttttttaaccacattattttgaatattttgaattattgtattgtgaattgtaactagataaaaattgtttctatgtctatggttggtcaatcaatttcttgcacttagaaatactgattaataggtccaaatagatcaaaattaatattgattgacccgtcttgcaatcagtttcttaaattttaatttttcttattaagataaaaatgtatagtcttagaagaaaaacaaaattagtaaaatgttttaattattttggggttttgctgagggctccgcctctcccatagattgatacacactttttttttttgggttaaatatacacaccctttacatactagaaagtaatttgattatgtcaaaggttacataatcaactaaagcgtattagtgaatttaataaattcttacttttagtaattaattatccctccgtgtcgacttgctcgaaaatgcatgttaaatggctaaatgtttattttaatgcagagtctgaaaatggcaaaacaaaaacattcacttgacgtggatggttttgattggagagcataaattcgtcgcagactaggctcagaatcaatgaacccaccaaactaacaaactccataattgaaacaaacaaagaaaaaagtggattctcaaaattgaatgaagcaacgaacgattcaacatcaaatctagctgaattattgtttcgcgttgattgattgatccggagaaaggcg

SEQ ID NO: 7985 - DNA, 3000 bp, Unknown
  misc_feature (1)..( 3000): cDNA_ID_3047158_gDNA_ID_1621179_Annot_ID_174252 3000 nt of promoter + ATG
acttaactatcttagccttgataccgaagaaaaaaaagccatttatatgaaggattacagaccaatctcctgctgcaatgttctttacaaggttatatcgaagattctggcaaataggctcaagatcattttgccaaaattcattacaccaaatcaatcagcattcatcaaggatagattgctaatggaaaatttactccttgccacagaagtaatcaaagactaccacaaagaatcgatctcccctcggtgcgcaatgaaaatagatatctcaaaggcttttgactcagttcaatgggggtttcttcttaacacgctgcgagctctagacattcctgaacaatacattaagtggatccaaacctgtgtaacaacggcttctttctcagttcaagttaatggagaactagcgggatattttggaagtgaaagaggattaagacaaggctgctctttaagtccatatctgtttgtcatatgtatgaatgttctatcccgcaagatcgacaaggcagcaactgacaagcagataggcttccacccgaaatgtaagctattgaagctaacacatctatgttttgcagatgatttgatggtgtttgttgaaggaaacaagaaatctatccaaggtacacttgcggtcttcgatgattttgctatacattcgggattaaagattagtctagagaagtctacattatatatggctggtattccggaaattcaaagggaagagatactccaacaatttccttttgaacatggaacattaccggttagatatttgggacttccgctactaacaaggaggatgacatcgtcatattatctacctctcatcgaaaaaatcaaatcacagattagttcttggacagttaaagcactctcatttgcggggagactccaattaatacgctcggtgatcttcagtcttacaaatttttggatagctgctttccggctgcccaaagcatgcattcaagaaattgataaactgtgttcaagctttttgtggtcaggaccatctatgaaccctcgaaaggtaaaagtggcatggactgaggtctgcacaccaaagaatgaaggtggactagggctgtggtcgattgaagaagcaaacaaagtaagtgtattaaagttgatatggcgtatacagttttaatctatgggttttttcctatcaagatttaaattaaaaacagtatacactttgatgtaaacatgtttattttttcttgaatataatttaacattaaattcaaaaaaaaaaaaaaatcctaataataataatcatgtttgctcaaataaaaatattgacaatttttttttttttagaaacccacttaaggattccaccaatggaccataaaattttcaaaaactgtacaaaatctcaaaactacaaaactatcaaaactttttaataaaaaatacttagaaactttataaactaatcactgtggttgctctaaggtgccacatgtacaacacgtgttgatacgcgagaaggagagagagatacagtcggtaccgcccaagatccacgattcagtgcaaattctgcccctaacttcacaaatccaccaccaaactccttctacaaagtttgtcgttgcaaattcgattgacttccaccgctttcgtcgttgcaagaagatatcgttaatccttcatcatcttaaccttgattcctagcagaagctacgcctaagacctagttgaggtcctcgtcataataatcgacaaatatattattctagctaaagattggaattaagccaacggtgggacgagaagatcaaatatggcaagcaggattcaaattcagatcttgtagaaatagagagaaatgatcttagcaaagaattaagtcgcaattttattagattcagataagggagagaaaataaaccaacaaagcgaaaaaaatattcgattagaatgggaaaaacaatatttataacaatattccggtatacggcaaatcgtcctctctctaaaagataaggagtgaaagaagaaagacaaagtttttatttgttaatatatatagattatgactacataatatcaaaatagataatttgctgcgatgattcgtaccacaccgattcatatcatttatttaaacaacattctttaaatttgattttttgaactctaattaaaattagatgataaaaaaataattgttactacataatagtctgaaatatatatatctagtaatatgttacaaattagatctacttaatgatcaatctcaatgatttttgttttttcttatttaatttactgacgtcttgacagttcaacattattgtaataattagtatacagaattctggaaggtaattggctaatacaaatagtaacgtggaataattgtcaagatttgacctattttcagacttttaaaattaaagcgatagactttctttttataaaaagaataataattttcgtcggcggccaaaccaaaccaaatcacgttagctcttagctcattttcgctaacaaagactttgttccctttttcctccaacgtacatatcagaaagactctgactttatacctctctccttcttcttcttcttcttcgtcttctctctcttatgtccttgtccaatttccaaatcctttgttgttgaattttgtcttctttcttcctgagatttcccttcttgtcttcaagaaaccttgatcaggtgatttaaagtcttctcctttacggatctcgattcgttgttttctcatgtttctcggactgatttggttattgatgaatctagggcttatgggtattgatcaaacaatgaaaagtttgtgtttttgggtagattttgatgtttatgttcttagctgacataagggttttgtgattcaagagaaaagttttcatctttaggttttgttgatgagtttgtgaaagtcgaagactgtttacaaggttaaatattttcagggtttctattgtttaaggagggagaaacgaaatg

SEQ ID NO: 7986 - DNA, 3000 bp, Unknown
  misc_feature (1)..( 3000): cDNA_ID_3047150_gDNA_ID_1621179_Annot_ID_174256 3000 nt of promoter + ATG
ttgtttctacgtgcacatttgttgcattgtactcattgtttatgatcatctttgtgaattggtagggttggctaagtgtagctatttcaagtggaatggaaactatgcaatacgaagaattaaagactcagtatgagaagacgctaaggtaatttgggagaacatgttatgactttatccctttcccttgtctggttttctgtgggcgctttataactttacgtattatcttttattggtcaggagttgcatgataccatcaaattcttacttgcaatacacattgatccgagacggtggtaatctggaacacctcttaactctcagcaagaattcgcagacccttctgtgtaaggtttgtggatcaccttctttaggtttaataaatgcttgattttgtattcagattttttcttatgattattgtttttcttgttcttctgagtagattactagtattgaacaaacttttctctgtttcttcttatgttcgtttgtggtctccagttgcaagtcgtaatacgtcattgtcttctatagctcttggacaagctgattcatcctaaaatctatttgatcacttcaatttgacaacattggccattgtttctttgtagattggaacaacagatacagaagaaaatctaacagtccgtcaagatctgcgatggaacaaacaagttggcacattactgtttgaatttggtaattcatcctcttaactatttttacctattcacgttcattgtattttattcttctcatcttttccattcatttgtgaattggtggcaggattggctaagcagggccaccgatcgattggtaaatgctctttagagagttttaagcttctggaacaaatgtttgttttgtattgttggcatgattggcatgattttttcctcattttgatcatctgttaaaaaacctaaaatcatactttggcccattttcatgaggcggcaattagtcgtatgtccatgctttatagctttataatattccactagattctaacatcagttaacaagacaacaatttccgatttacggtttaaagagatcaaatccttaattttaacccatttcttagtcgtatttaaacaattaattattagttaatccatattgaataaagagagattatgaaaactaccctgcttttgagttttcatttgaaaaatacatctctctctatttttaataaaataaattgtaatttttaatatgttagatgacaattttatccagatttaaaataaaagctattttcttaataaattaaaacaaaattcgaaatttagaagaaaaaaattaaaataaaataaatttgaattcataattatgttttcaactattttttgagataaagatttatttattttagatatttaaaaatttaaccaaaatagtgtcgaaaaatattctgaagtctatcatttaataaaacttatttgcttttttggacaaaattttgtttaaaactatttaagataagaattaaatttgacttcttaaatattttttcaactatttctgagataaaaaatttatttattaaaatttaataaaataatatttttaaatatttaaaaagtatcacttagtaaagtttattttttactttttagacaaaattttgtttaaaaatatttaagataataattattcttaaaattattaaatacatcaaattttaatttatgatttttttttctgttttaagttaaaaacgtttttcagttattcttaaattttaatgagactattttagtaattttgtatattaaaaattaattgtttaaaaagaaaaaaaagagaaggtatttttcaaatgaaaactcaaaaatagggcatttttccaaatttactctttaataaatctgaaattaataaataaatagaattaattaataaaacaagtcccggctaattgaaaacaaaactaaattccggttaagaattaaagaaagctaaatataattaaaccaaacaagtcccggcttattgaaaacaaagaaccaaacatgttttttaggcatcatcaaaatcactatttaggatcgtaaccgaaccgtttctaaaccgtaactgtaaaatagattagtaggattaaaaagatatacttactgtaacttttaattaacagtaacagtttcaaaccgtatagttaaaacctttaaaatatagttgtatttgtgtatatacaaagataaatatcgaatattccgatttttttatttataataaaagtaaaccataccacatatgaagaaatctatgctagaaaaagatagttttttttccaaagaaatatgtagtaatgctacattgctaaaaatcaagatatttttgcctacaatatactttttcatcttattaaagtactggatacttgaacaatttctcaaagtgagattttaacctcaaataaattgtatgaaaccggtaaagataactcgatgtagacctcaaatactggatacttgaacaaattactttttcatcaaataaatggagattttgcctacaatatactttttcatcttataccctaaccggtatggtctgtgcacgaatctttacgtacagctcttaaaagaaagtccaaaaccaacatgacagtctgatcatacataaaacattccctttatgacttaaccacttgaccatccatcctcgcttggctaagtttcttgattatttcacttagtcatgactcatgacttatccttcgtcattcaaccgattcgaactaaatcacttaaccatttatttgaggtgattgatgattcaatagaccggtatcgatatcgtggaatatatgtgtcaattgtatgaaaccggtaaagataaaccgatatttgaagccaaagatagtaaaccgaaatcaaaatggccaatgaaaccggtacaaaaccggtagaagataatccaatctttaaagcgctcccacataaacgtttcccttatctctctctctctctccactccaatg

SEQ ID NO: 7987 - DNA, 3000 bp, Unknown
  misc_feature (1)..( 3000): cDNA_ID_2144618_gDNA_ID_1621179_Annot_ID_174262 3000 nt of promoter + ATG
tacactatttttaagaaacacatcatttggtttttataatgttaatcatactaataactataaacaattttttaattttgtattaaatattctacaaaatcaaaaatagcaaagattttgtacactaaataattcgtcttattaaatatgattaatcatgataactcaaacaaaacaacctatttctattttttcattgattctcatttttttaattataatatttagtaacacgataagaaataaatgtcatcattattgttctatcctataagaaatcctattggttctagacgattcgtttcctttttacacttcaacttttcatcattgtatcttttcctaattatatgaaatcaaaaaccttaagtctagaacatttaggtttaactctttatctttctaaacaaaaaaaaacttccttcgatacacaagatgtctgtttataaactcaccgatttgagggataactcaacaaactggaagattaacgtcaagatcctatcaatttggaatcatcctccaaacagtcatggtgaaattatgaccatgattcttcatgatgacaaggtttgtattttcacttttttttcttttaatcccaatttactttgttattattgaaacagatcatcacaaactatttaatctttgacttgtttggactttttcagaataaccgtgttgatgcaacaattcctcaaggaaactatcacaatcccttccgtccgtttctcaagccaggcacatggattcacatctctgactttcgggtcattgttcctcaatcaagggttaggtattcgtccttttgttttcacatcaaattcatttgggaaacaagtgtttaccctctcccggaacttgtgaaaagagacttctttgacttcatttttcccattgatcttaagtatccatgtcttgaggattgggattatgtcacgggtaagtttttagtcaatctatgttcttctcattttaagaattaatttatgatagtaatttatgttattatttttgaaatatggtatctactctattattttatacttagatgcaatgagtgaggtgacaaatatctcggctattaagaaatttccatttgtttgtcgccaaggtgaaaccgactatgaatcaagatatgtctcattcgaacttttggacaatatgtaagttgtagtgtttttaagtaagtttagtaatgcaatgcttagtttaatattagcttaataatgtgtgagtagatgtgtcatctgtctgaaaaattagcttaataatgcattgcttagttatattggttaggggagagaaaatgaaatgctatgctgttggaagatgctgtgaactttttgttataaatttctcaaaatgtatcagttcagcctcttataactatcagcccattgttgccattgtgagattttggagaattgctgagattgagggttagttattttgtttctattgtaattctatttacttatgattattatttgtattatataattttaaatgaaactaatggaacaggtgagaatgttttgaagagtgaatttggatgttcaagaatttacctcaatccaaccaattttcctgagatagatattcaaagctacatgtaagaattttatcatttttttattgtattcgttaaccataacatcaattaatcaatatcgattttttattttctcttttacagccgcggtttcgaagattatgatgaacttccagagaacccaaggatggaagtgattgaagagaattaggagtttgacctcccatctcctattcttatttaaattatgttttgaacttattttaatttcctgcaaactttgtcattttatgttattttttttataaatatgcttatgttttgaacttatttaagtaatgtattccctttttattttcatatatcttatgttttgttaaactcctaagaaagtttacaagtaaaacataaaaatctacaaacaaactcatatataaatttgcaacgattacatataaatacaattgtagaatttgtttatttctttaaaaatactatctttttttttttttcacatatcattatttatgattcttttcaaaaggaaataaaaaaattattgggtatcaagaataaaacattaaaaactttgagataaatcattcttggaaacatcaggatcatttattattaagttcattttttttcaactcatgtcattgtcttatacaaaaagtaatcttaaatatttagactctttatatttataaccctacaaaagcattatcttccagtatcatgtctctcatattaaaataatattgattttgaaaacctaggtactgcttttaaagtttctttttggatatagatgaaaatcacatcattacctttgtggcttaaaaataatcgatacatatataaaagttagaatttaatttctaaggaatgtaatatatatatatatatatatgatatcagtttattctaaatatattttgctctcatatatattttttggaataataaagtagattttattgagtagatacaaatattaacatctatattctcttcaatctatttatgagacttgctttctcaattaaatctattgttcacatcttttctttccatcttttccaagattgataacaagattagacaactcatccaagagatatgacaacttatgttacattttgtttcttacaaaatttattaaaattcgcaagtaaccataaaaagcactataatttaccatcgagattccaaattcgattgacaagatttgcatggcatttaactttttctatttaatatacgcgcttattcttttgggcaaaaaaaataaaatacaagtaatattcctaaactgtcaaaggacacataacctgaaaaaaggtaacctcccctcttattttcatctattacttatcttcgccatattccttctaccctattagtttcaaaaaaaaaaaagatgttgagagatgatagag

SEQ ID NO: 7988 - DNA, 3000 bp, Unknown
  misc_feature (1)..( 3000): cDNA_ID_3047154_gDNA_ID_1621179_Annot_ID_174253 3000 nt of promoter + ATG
attgccagatataatgagccatgtaggtacactgtaagctaatagaaaagtattcatatgtaattacttcaattcattcttcaattgttacacttcttgttgactccaaaatagcatatactaattactttttaaaatggcatatttcaatttagtcaaactatattttctattgaattcttttttgaacatatcggaaaatatctttcaagtgatttagtcaatgtttcgagatcattgaccgaattggccggtaggactagtataagagaactttccaacacatgcaaagagtttgatattggtacattttactgcatatcgaattagaaagtttaattttggtcttttagacttcctttaagaacctttgtcgtattcttttagtgtttgagctaattgcaaatcagtcttgtaaattgtaatcttagagctcgactatctgatcttgtcttgtctccataatcttataattttattatataatggcggaccaataaaatagttttagagtaaactaattaaaaatatttttaaaatatatatgttttaaagtatatataaatatatttaaaatatatatgttttaatatatattaaaatatatttaaaatatatatgttttaaaatatactaaatatatatatctaaaaataaattaatatatgaaccataaaatcatactatctatatgtttagcaaaactatgtaaattttcagataattttaaatattcgagatattatttataataattagataaatatatatgaaccataaaatcatactatatatatgtttagcaaaactatttaaattttcaaataattttaatttcgagatattatttataataattagataaatacttaaaccaatgatgaaaactcataaggtttttaagaataacatgtcctaaaactatctaataaatttaaaattatactatttttcttgtatgcagtatttttttggtttaataagtcagtcgctattttgttaatctatactatttttttttttttgtcatccaacatttttattaatattgagcccaatgggctatacaagtgatgaaaagaaaagcccaaactctaacatttacaaccttgattaaagttaaaagttgcttaatttgattggactaagaaagtttaaggactttaattttttggaagtcttaaaagtcaaatatttactaatcacaattttaagactttagttttttcttaaaatttttaaagtctaactgcccacttttttattttttacgttcaattttctaaagtctcaaatatgaggctttcaaacaaataataaaactttaaaataaataataattaaaaacttttgtttttcttctcctcataataattagaagagaatattacgtgattagacacttttttgaaagttagttcctaattaggcactttaaatggagaagacactttagataaattattttacttatttaccttttaattacatttttttcatcggccatctcttctctctccttttcccatctcttctctctcattatcccatctcttttctcttttttttatttttttctcactttatcgaagaaaaaaacttttctcagaatatcttcaattccaaatctgcaattaatctccaaatccactctacacgatagctttctcttctctctagactaattggggagtacgaggtcttgatttctttaagattgtgatttattttgcaatttaaatatttgttttgacataaatttgagattcacttatctaagaaacttcttcttcttcaacaatggcggcttgatttgatttttgttctctctcactgtttggaaaggacaatatacacgtggatcaggaaaaccaacaatcgttttagaggtcgttgcttcccaagatctctggatatggcacgcgttttttggacctccaggtaccttaaactatatcaatattcttgatcgctcaccagtttttgatgatatattacaaggtcgagctccgaaagtgaaatacgtagtcaacgagaagactataatttggcttactacctcacagatggaatttatcctaaatggtttacatttatccaatcaatttcaattccacaaggtgataaagcttctttatttgctataactcaagaagcttgtcgtaaagatgttgagcgtgcttttggagttttgcaagctcggtttgccattgtcaaacatccagctctttttcatgataaggtgaaaattagaaatattatgcgagcatatataatacttcacaatatgatagtagaagacgaacgagatgggtacactcagtttgatgtatctgaattcgtacatccagaatcagccatctcttcacaagtagatttcacctatgctatagatatgcctccaaatctcggtaatatgatggccattagagcccgagttcgtgatcggattaaacatgaagaattgaaagctgatttgttgaacatgtatgaaaacattattatcataatcaatcttaaaatgtaatcgttattttttttcgctttttaatattttttttttttgttatatcaggtatgtttaaaattcctaataaaacactaatttattatagaaaacgctgcgttttgctctgaggcgaaaaaagggcgatctagggtttcaaagcttcttcagcaagttccatgccgccggaggtatctccgccgctggaagttggggatttgagtccgggaatatcagaagggactgtgttaactgtggatgatgataagacgggtggtttgatcagatctgaagatgagaaacagattgcagggaggcttgaaggagatgagaaacagaatgtaggggaggagaaaattgcaggaataactcaagatgtgaataaaaatgttgtaatcactaacacaactacaacacaagattcctgggtagcagtggtgaaaaacgaagttgaaacaaaagtagagttggtagtagaggaaattgatgggatg

SEQ ID NO: 7989 - DNA, 3000 bp, Unknown
  misc_feature (1)..( 3000): cDNA_ID_3087925_gDNA_ID_1621180_Annot_ID_174264 3000 nt of promoter + ATG
aactgttgctggctcagcagaagcagatacactatatcactgatgaagagcatttccaaatgcaagaaggggggaatgatcaaactgaagagcactaatgtagctaacccccaagatcaagtgtatccaccacaacagaatcagtctaagccatttgttcagtacaaccaaggttatgtccctaaatagtagttcaatggaggataccaacagcagaatccaccaccagggttcactcaacaaccacaacaagccccagcagcacaagatcctgaattaagcaacttattcaacagatcattcaaggacaagctactggagctatggcttttgaaaagaagataactgaattacacaacaagatagattgttcttatagtgatctaaatgtcaagtttgaagctctaaattccaagttcaagtatgtggagagttagtttgcatccacctctgctccgaaacatcctcaacaacttccagaaaaggcagttcagaatcctaaggactatgctactgctaatgctataaccattcaacaagaagatgagtctccaccatgtcatcagactcccaatactgaggacagtatgattcaagaaaggggggattcaactcaaattgctgcacctgccatccagcatttcatctggactataaagcacacacctttgctggatactcaccattctgggaaaattttcaaagtagaaaaactcaagaaggatcaaaatcaacagatgattagtagtgtcatcactcaagaaacttacaagaaaaagtcatccaagaaaagctagatgatcctggttcattcactctttcatggtctctaggaccattgacattcaataggtacctctatgatttgggagcatctgttagccttatgcctctctctacagctcaaaggctagggatcatggaatacaagatctgcaacctagctttactcttagttgatggttctattggacccccccccccatggtttaatagaagatcttcctgtcagaattggaaatgttgagatacctacagattttgtagtgttggatacaaatgaagagggaaaggatctcctgatactaggaagaccattcttagcctctacaagaccagtcatagatgtcaataatggaaagatcatcctgaaccttgaaaaaggcatcaagatgaaatttgacatcagcaaagcttcagggacatcaacaacaagaggtcggaattttgggatccaaggcatggatgttgatgaagaaacagaagctcgaatcccatcaagattcaacaacacttctcaattcagcaagctaaagaaaaattttgacctcaagaagagagccatagaagggttagctcagactgaagaccctttagaggatgactagcaggagatgagaaaaaaaaataaatggcaaagcagagtcatagaggggttatcgtcaagggtgatgaagctgaaagatcaaatatgggtttttgaaaaggagttaataagtattcaatgggtattgatccagagaagatggaaactgcactagctatcaaagagaaaaatgatttcacaacataatggtttgcaccagaagatcataaaggagttcattcagaggaagaaagcttagaggatgacttgttgagtgagaaagaaatccctattccgacttattttccaagagtgcctaaaatgcctagtaaaccttcttctaaggaagaacatttgacacttgactctattactggagaacttctggaactcaggatagaatgcaaagctcaggaagataccattgggtagctaacctacaagatggaagaactaaaccatgcaatcttggaacttcaagaaatggttaaaagttaccccagttttgaaattgaggattggttagaggaacctggttcagaagaggaagactactctgctgatcaaaaggaagcttattttgaagaaaagtcaaatgaatactcatcctaccatatgtcaaggaggatgcagagtatgactcaaccactgaagatgaggacttctatgttcctctcttcaaccttttttctgactaagctctgtaagagtcaacctcagtgacttaaaacaagctcactttggaggaagttacatgtttatccatgtatataactttctattttccttgttatttttgatgttttgtttaagtgtttcaggtttatttcattgaccatgaggaagtcaacggtcgagtaaactcaaaccaagtcaaaagatgatctccaccgttgatcgagtaaaatgaggaggagtgttctgagccgcgcgattgaatgaccaaatgagagaaatcatccccaccgtttgatcgagtgacttcttgaggtttattctagtccgtttgatcgagcgttttaaagagtgaaacattccccaccatctaatcgagtattacgcacttcatgggatgctcgatcctttactcgattgtgaatgattcggcgaccaaagagtaaggtcgagtggcccacttgtctcccttcacttcattactcggtggacaaaccaattacccataccctcactgttgtttccaactcacttttctatcccttccaaaagaaaccaaagaccatcctcctccacccattgaaatcgccaaaccacctttgaaaccttctctctttcatcctttcattttcgcaaattctctatctctcataaagcttcaaaattaagtttcattccaaactctccctatcaatcctcaagaatctgttctcaccttcaccatacctcaccaaacttactcgatcattcccaagtccatcttcaaatattcaatcggtttttaagctcaaaactccatcaccaaaaaccaaatcctttccactttgatacctcttggagaattgttcctgattgtcctatagaagctcatcaccaaactccatggattcaagaagaaaggatttatctcgggctagaagatcctttgttgatagcgaagaagttcagtgatcgacatg

SEQ ID NO: 7990 - DNA, 3000 bp, Unknown
  misc_feature (1)..( 3000): cDNA_ID_3047176_gDNA_ID_1621180_Annot_ID_174266 3000 nt of promoter + ATG
ttctgtatatctcaataatctgcaagtattttccaatgttactagtcctttccacaattcacaattgtagtattacccacttccgacaatatttcttagatatcaacctagtatttcagttttgttactagtactttccacagttcacaattatattattacccaattcaagggattttacttggaatacttacaatatccatgagattcgccattgggatgtccttgtttacggtcctctcctccacgagcttttcccctatgacgttcgtgcctctctcatcctctagggatttattcactatgacttcatcgtctctctcatcctcctcgtccacaggattagcaaacgagaggtcatcgtttgcattcgtctcctctgaattggaatcagagcccacggttcggctactactcaatgattcttctttttcacatgcttctctttcattctcatccaccattcaagttagaacattcttttaaatttcttctgggaattttctctaaagcatcataaaacgtatcatcctcaagcatcacgtcttatgaggcatcgttggagccgtcgcgtctatcgctgtcgttggagccgtagtaaccgtcgtcgtcgaagtcgttcgagccggcggagccggcaacaacattaccgccggttgagtcggtgactgctcctcagccattaccttatctctctcattcttagctggcggtactctctttctttttcgtgccaatccactggtcttaggcggcatctctaatctgagatatcttaaaggttacaagaatgaaagaagaacaaaatcgattaattgattttaaattgggaatgatgtttgaggctaatttctttggtttctaaggagaaggggagagatatcgcaaaatcttaacgggtacaaaaaacaatcggtcgaaaatatctcaaaatattagggtttaatttttttgattttctaaaaaagagtaaaggtggtttgggtgctcctgttcggaaacgaaccatggttataggggtaattattagtttcggatggggaaatactagtaatatcaaacaaagctctaaaaaaaaccacttactaaaagcggcccatttacaaaataataaaagtcagttgttatattataacgtaacttccgagggggatattgaagggttgcgtctttactcaagtatatatatgagagtctgggttaaccctcacatcgttgtgtcgaacaatgacaacactgtattttactcattttaggcatgtatttatcatcatttagcttagtgatcactcattttttcatatcattttgcatcacatgtagcttattttgcacacttaggcatttaggatcatcttgcatacatattgcatgttttggtgtgttttcagatgcaaaaagagcttacaaggaatctactcgaccctcaactctatcaaaccaggagggaagcagcagagcaatctactcgaccagtttactcgatcaaggcagctacaggggaggcaacagaatctactcgatcccctactcgatcctctacccgaccagttactcgatcaagggcaatctactctacaagacttgttgatcgttcaaagcgtcttcagatcctcttcattccccacccaaccagacaactgagcataagaacaggagaggaagaagcaactactcgaccaattgatcactcggagcatgtaggcaaaggcgcagactttgcagcaccctctttattcgatccccaagatcgagcatccatccaaaccgcctcaagtctcttgtcttctagtgaatctagggttttcgagattttagtataaataggttctttgggctttgtccacaggatcaagcttttattctgtagttttatttgtgttttagaatcttgaaaccttaattactcttaatctatttcgtttttgcatttagttctttgagcaaagttgtttatcttgtttagatctacattttgatatgtttagagtaatttttgggtttgtgttcttcattatgttgcttgagtagtgattagggttcttgaggatggatcagattagggtaatctctaggttagtcaggtggttaagattaggttagatcccttctggattcgttggctcctatgcggttttcactggctaatgtgggaattcgaccctacgtatccaacatcccaaagacattcaaatggatgcatgatctacgaattccaagagatttgtagattctaccccaagagattggatgtttagactgcgtattgactttggtagattgttacttaaagcttgccttgctatgtttgatcatcgagagttgagattaggaagtggtgaggttatgaggatctctgtcacgagagtggattgatctggttttgaatctatcgtctagggtatttgaatttcgtatgttagccacgtgatgaaccctagagttgcccttaccaatgaatccatccttaggacttctattcctcttagatttatttgtattcaccccctgattgcacttttatttacctgttatttgtgtcatcttgctgagttaccttttattgcattttggttcttaaatttgtcacctgttggttctactcgacccaatgatcgagtagggctcttaagttctcattttgttgtttgaatcctgatttaggattgttactagaaacccaccatcattataatctggcgtggcttagttgcttatgttcacatcttgactgctaggaatacgtggactggattgacaccccctatagctgcatcgacatgttagtgtttaaggggaattgaaccgaaccacacttcagcatataagtaggcgtaaaaatctacttatcaatttggcgccgttgccaattcattgttgcattgttacatttaagatataagaaaaaacttaagatcaaattcttttacattactcaagttactaactcatcttttcgtttgcttgtttttgtggtacaggtactaatctttgtgcatg

SEQ ID NO: 7991 - DNA, 3000 bp, Unknown
  misc_feature (1)..( 3000): cDNA_ID_1810061_gDNA_ID_1621181_Annot_ID_57377 3000 nt of promoter + ATG
tattagagggttatgatttgttctgccgcttttgatatagccttctttgatttgagcaacacacgcatcattatcttcatataatcttgttgctcctttttgatgatgaatctacttgctttttgaatatggttagtcatggatctaagccaaacagattctctacacgcttcatgaagagcaataatttatgggtggtttgatgaagtggcgactaaaatctgcttttgagaacgccacaagttgcagttcctccaatggtaaaaacatatctggtatgtgatctagacttatgagggttcgataaatacactgcatctgcaaaaccaactttccaaaactcaaagtttctaagataatataatcctaaatcaatagtactttgaagataattgaagatgtgttttattgtaagaatatggagctttaggttgcaagaatgggactcttgattaagagggttgagagtgagaaatgaacataaggaagagatagtattgcggaaatagaagagagattgtgagaaaagagattttctctatttctttattaaaaacatacataagatacaagctatatatggacattaggtaagtaaagatctcctaagaatatgctaaacacgtcgcactctatacaagtccacatcgtgtagacaagtcactatcgtactaagaaagagacatgacctaacgttcagtttgctttaaacacatgcgatcttcttttgacttgggcgcttaagcttcaacggctacatgaggagtcttctaggtcttctagaagagcttaaggtgaagaagagtttatatgggcttctctcattgtgatgttgtacggatgggcttctcttcctccgtatggtcgtctagtttaacttgcggaaggggtttccttcattaggttcaatactccccctcaagcttaaccggagatgagtcgagattaagcttggaaccaaattcaaccacctcattaaaaaccttggtgtagaaaaacctctttggataaaactacacacaagggaaaaagagtatgggatatttgataagaggatcatggcctggttagatcaactacgccaagtttgttgtgaatatattcacacaccttggtgctcgctcctttggtgaagacgtcgactaattgttcctcactctcagtgtaatgtggtaggatcactccgagttgtacttgttctcgtactttgtggcagtctacttcaatatgctttgttctctcgtgaaacaccgagttagaggcaatgtgaattgcagcttgattgtcgcaatgcattggaatggggtttggtgtatcaatgccaaagtctttaaggagagctttcaaccacatgagttcagtagtgagctttctcatggctctatattcggcttcagcacttgagagagacactactttttgtttcttgcttctccatgttactaggtttcctccaatgaaggtgcaatagcccgttgtagaacgcctatcttgttgatctccggcataatccgcatcacaatatccaacaatctccgtgtttctattcatcccatccaaatgccttgacccggagctcctttgagatatttgagaatgtgattcaccatgttccaatgatgtattgtgggagcttgcatgtgttaacttactacattaacagcaaacaaatgtcaggtcaggttatggttaagtagataagtttaccaacaagtcttctatatctcgtagcatcttcaaatggtttgttatcatgctccccctttcgtttggccttgtaatcgtcctctagtggagtcttggccggttttaccccgagtttacctacttgggcaagaagatcaagtgtatatttcctttgggataagaagagaccttcctttgatctacaaacttctatcccaaggaaatattttaactcaccaaggtctttaatatcaaaaacacttttaagaaaagtttttgtatcttgaatacctaccttgtcattcccggagatgataatatcatctacatatacgagaatgactactatacctttttggcttggtaaagtgaagagagtgttatcggcttcagacgttttgaaccctcttcccatcaatgtggtgctgagtttgtggtaccacgctctcggagattgctttaaaccgtagatggctttcttaagcttaaagactttattgggagcattaatgacttctagacccggtggtggcttcatgtacacttcttcttcgagttctccttgaagaaacgcattcttaacatccatttgccaaagatcccactcgagattggtcgccaaggagagtactactcggaatgtatgtaactttgcgaccggagcaaacgtatctagatagtcctccccatacgtttgagtaaatcctcttgccacaagtcttgccttgtatctttcaatctccccatcactcttatatttaatggtgaagacccacttcgaggtgacagttttcttacctctaggaagctcatctcggctgcaatagcgtccctccatacttgatgagttatagcttcttcataagtgtgagggatccaatgttggtctacttttccaagaaagacttgatgttcttcgggtagatgagctagggtgcacacagcttgaattgggtgttccacggcattgtcaacgtagaattgggtctacttttccaagaaagacttgatgttcttcttcttcttcttcttcttcttcttcttcttcttcttcttcaagctctttgagcagattcttcttctttgtgttagtggattaccggatcgaatctggtcccagacgtaggcttaatcatatcgattagctgaactgggtaacaaatttacgtttttcgtttattgcttttgattttgttcttgagttgagattcaacgagtttaaagagagaattgaatcagagtgattgtgagcacgaaccgtaacaaagtggtatcggaacgttggttcgaaagattcgctcgatggtaatgacg

SEQ ID NO: 7992 - DNA, 3000 bp, Unknown
  misc_feature (1)..( 3000): cDNA_ID_3047189_gDNA_ID_1621181_Annot_ID_174299 3000 nt of promoter + ATG
ctgaatcgccaaattcgtctgattgttcttcttcttcggaaccgtcagtgatgatgtcttataattctctgttttgtaggtcaatgtggataacatcttctgtggttatgtctcgtatgaaaacttctctaacactttcttgttgcatcacaacatcatcaactagaccgactatacggcctctgggattaactttaataaccgataacgacacttcacgtttaggcctcacacgcggataagatagaaatcttacttgccctgcttgtgatgttaggatatatggttcaaactttgaataagtcttgtttgcattgacatcgaccacgcctaagttatttacccgtacccctcgaccacacctaagttatttacccgtacccctcgtccgataacaagatcaaaccaatcacacttgaaaaggacgcatttctaattcaaaagtctcggatattcgacttcaagaatttgttgcagaatctcattaaactctgtttcaccttcgacatggattccataatctgcagttgcccttcgactttcatttggatatgtatgaaaggtatagccgcgagtgaagtacatcggtgtggttgtgatcttagatcttggtttttgaacgatctcatgcaaccaaagtggtaaagcttcacttccacatccgttagtaacctacataaagtaaatattatgtaagtttatcatttcaacataagtaattaagatatcaaattttcgaaatattacttacatagaattttaaccatctggcaaaatcatgatctttgtaaatttcatattctttatcttctaatccaggatatgcttcacggatttgtgaatcaaacaacctacaaattaaaatgtagatgcttagcttctttaattagtccttaattagtatcacactaattattaaatataaaaaattatgaataaaatttgtctggctttgtacctctcaaattttttaatgtaatcaacatttcggagtatgtaattgtgagctgctctagaaatcgcatggtcatcccaccaaacttctttcgacttctctgcaagtctacctatttgggcaaagctatctggaacatcaggaacgttatatgtaggtgcaacacctccatcgtcatatcgtcgaggatgagtctttttggttctaacgtttggactaaagtaatacgatgtgaagtgagacgtttcctcggttaaacttcctgcgactatcgacccctcaactctcgcaagattttttgccttttctttaagagatttcatgaatctttcaaaaggatacatccatcggaattgcattggcccaccaagagcagtttcatgtagaagatgaatcggcaaatgttctatcacgtcaaaaaaggcaggagggaataatttctccaagttacagagtaacactgggatattcttgtctaattgttctatgacatcagttgtcaatgttcttgtacataggtccctgaaaaatgatctgatgcctatcatatatcgaattaatgtaagttaatagtcgtctattaataactgagttaaagaatagaaatagaatctatatatatatttattacctgcaattgcttcatgaatatttgcaggtagcaactctattaacacaaatggcaataatcgttgcatgaatacatgacaatcatgactcttcatacaagaaaacgtttgaccttgctctacgcattgtgagagtcgaaactcgcacaagagaaattgtattaagggtttcttcaaagaacggatctttttgagtttctcaaagaacaacagaattgttgattaccgcggacggtgttcttggttatattattgaaataatgaggattcgatcgtacaagtgtttagaaatatgaaaataagtgttttgccttcaaaatcagagcgtttttgatatcctgaaattaagagcgtttttgtgcgtgtctttttctttgtcctcagaagttctttatatagggctttatcagatcgcttctcgcgatattctcggaagatttctccttatcttagagctagcgaaggagatttgtctttatcttccgaagattctggaaactcctatatttggtgatatcgtcggagattctctaatatctcttccgggtttttcggaaatggtatgttcgatctcatattggttaagtcatttcttgaaggttctgtcccgacctgatgttcctccgagccgggttgagttgaccctcaggttgtggttgagcggctcggaccttgttagtcaaatgatgcgctcccgaggcgtcttaagacccacctcgggatgactttccgggttgccatccgaggcgcttcaagaccgggtcggggaatcctttgtggtgatgctctgaggcgttcttgatgtcgcctcgagatggttccttgacatgatccccgaggtgttttgagtcccggctcaggatggttcttcgacaagatctccgaggcgttaatcagggtcggctcggttacctaggtggaatccgaccccaacagtttgccccccagctcattgtcttgacggaaagccgatgagtttcacggatgggttcccgagccgactgttcatcttcttagatctaactttgtcgcttcatcttcccggacggtcaaacttccgttgcgtgccgacgactatttttgagaagtggaaaacgtttctcgcttattcccgaggatcacgcgggtgtttccttctgtcgagcccacgcgcttaaacgcgttttaattgtttgttgcggacccgacgcgcctccaaaaactctatatatacgacgagccattccttcgggagttcatttgaagttttcgaagaaaataaacgaggtttgcttccttctctctgatcttgatatttctatcgttctttcttttccggtgaagctccgccgttcttttgttatttttgattttttcggtttagaaattcttgttttctggtcgtttctcatctcatcgatcgtccctgagccaaaa

SEQ ID NO: 7993 - DNA, 3000 bp, Unknown
  misc_feature (1)..( 3000): cDNA_ID_1810046_gDNA_ID_1621181_Annot_ID_57381 3000 nt of promoter + ATG
ccgaattacgagatagactcggttttagtgttagccggaaaataactaagtggaggcttggtcgccggaactttggttgtcgctggtgctcatggtgatttaaccgaagctatgaagtaaaagatttaatctctcctccttttagcactaaattgtggatgtcagaatccgcaattaggaatttgtggatgttacgaggacctttaaccttgttagccgagctaagattaaatcggacaatatttcagttaattggaattctattgtatagtaattttttctgtcccccttataaatgatgatcgagttctatttatacaatcaaatcgaatatctacgaagtaactgaacgcttgaattacgccacaaatcatgcctcattaatgtttacgtttcaaactgccacttcccatattaacgcatcctcatttagtccggtgattttctgttacgtaacacgcagatactcttacgcgtactgggcctcaaatgggccctcgatgcccacttcgtcacgggtggtttcaggcccaccgttttgagcccactgattgatgatgatggatcttgggtcggggcaaactgacgagatccgacatccacaacactaaggaacattggtcttaggtatgccgaactccagcacatctgtgtgctctatacaaagaatccgccaagggaaaaggaaaggaagtgaacctcgcagaacatattgaggaaatggatcacattacaaatggaacaatatccaaggcaaaccttggagatatttgcataccagatagtagaacaacgcacactattctaaaacataaaaaatatttctctgatttgaaatcaacaaaagttggagttaacatatcaggtcccacagacttaattgaagggacgagtaaagcaaattttggattacctgttaagacaaagttctcgataaataatgcattattttctccaaattcaaaaaaacttttgttgagtttcaaaaatatataccttcatggatatccttcgtggatatgacactcagtctgcaactgagaatggaagaagtacatgtgtatcacttctgaaaaatttggggaaaaaaacacattttggagaaattaacaagactcccatcaggattgcatcatacatagaatcacatcatgttatcaaaagagatcatgacgatttcacattgtggcacgatcagcttggtcacccaggcaccacgatgatgcaaacaattatagagagctcatatggacattcaatgaaatcccaagagatttatcaagggaataaaagaacatgtgttgtgtgttctctaggaaaattgattataaggctatcgccaagtaaaattactaaacaattaccagaattccttgaacgagcccaagacgacatttgtggacctatacacccaccatgtggaccattctattatttcatggttgatgcggacatcaaccttacttcacaaaccgttgaactacatcctgtaccacatcttatactacatcctgtaccagaagtcccggagggtatcatgacacgttcaaaggctaaacaattgaagaaaaggttcaacttagttgtgcaagatattttgagctccctagagctaggagtaaactggttcgtagcaccccataccggatatgatctaataggcgaacaagagcttgttgaagcattcacccaaatgagtcttgaacgaactactcccccaagtatgaaatatcatttgacaggttcaaggacctctagaaaccaagagaagactttggagcttcaagagacgaacgattcaagtgtcacatctgcaagtgatcgagagagtcaagatcaagaacaagacataaaggacatggaagagctcgaagacgttgattaagctactcaagaggaactccagaaagacccctacttcaaggaaccaaccaacaaacgagcacaagacttgactccagaagtacctcaagaagtactacaggaagtgactcaggcgacatgggcctaaaacgcatctaggtaaggtttattcagtttatattatctttgcaggtccacacagcccagacaacggctagaatcgttctcaatcgtgctcctcaagagaacttaattagtttccttattttagcttatttctttcttaaaacaatggtttttgtgttttgatttaaatttgtttccttttgcgtttttacatttaattttggccttagggatagctgatagactcttataaagtccccctgcaacagttgaacgatttttcacctttgattatcaataaagaaccgcattttctcacttcttctctttaaatgttcttaagagaataagcttgttctttgtcttgtgtgtgcaattcaccaaggccaagttcgtgtactgtatcagagacttatcacatctctgtggtgtacttcaatccgccagcacttcccctctaatagatcccacacaagagaaccgatcgccatcatgttagatctccatcttcgaccatctttccttcacaagagagaagcgaccgccagcttgtgaagccaccatctctatcagatacaagctcaccaccgagtcttgtatcatcttggtatcagagcgcagttgcacttcctttgccaggtttcatcgtttcttatagcctggcttactttctgaatcagtttctacattagtctagtttctgttttatttaaattaaaaaaacaaaaaacaagtatttcagtttcattttatttcgtgttaagtatttgtttttgagtttcgtaatattaatcaaaaaaaaatatatatatatatattgttaactttgtactacatcagcaagtgtgtcagaaagtgattcaacaagttttaggtttcttggttttgatctttcttttctattgttgtggtacgttgatttctttgttgtttttgtctaagcacatgtcagttttaggtaatactatgggagaggcagcagaaattccccaaaacaccgtaatgcaaatg

SEQ ID NO: 7994 - DNA, 3000 bp, Unknown
  misc_feature (1)..( 3000): cDNA_ID_1810038_gDNA_ID_1621181_Annot_ID_57383 3000 nt of promoter + ATG
agtcgtggtggaatccgaactctttccgatcttaaccgtaggtctggtcctgactccgacagtgattccgatggtccacaagaatactacacaggtggtgagaaaaggtcagtcttgtttctatttcgcaagtgatactaatggtgatgtggatcgtcttttgctatgattggatctagatattaattgtgaggtttagggtttcatgtctaaataatgtttttattggtcttgtgttgcagtggtatgttagttcaagatccatcgaaaaaagatgatgttgatgagatatttaatcaagctagacaactaggagctgtagaaggacctcttgagccacctccgagttccaggagtttcactggaactggtagattgctttctggtgaaaatgtgcctactggtaatcaacagcctgagcctgttgttcacaacattgttttctggtctaatggtttcactattgatgatggtcctttgaggaaattggatgatcctgagaatgcatcgtttctcgaggtgaatgactttcatgtgaaactgttttgatcttttgtttttggttattgatttagttattgtgttcttatagagcattcgaaagtctgagtgcccgaaagagcttgagcctgccgatagaagagctccggttcatgtcaacttgatgcgaaaggaagagaaatgccctgtgagtcccctctctgctttatccatattgggttactagtctctcaaagttgtgttagcaaaactagcattttggtcatacattacaaaaatcttggtagattttatatgcgataaccggtcttatttaatcgacttaccggtcttgtttgttattgtaggaaagacagaaacgtagggtttcatttcagggtgttggaagaactctaggtggtagcaatgaaggtagcggaagtagctcacctgtggctccagactccgctcccattcccatccaaaccgaaccagcaccatctcaaagtcttgtaatagatgaaaccgttccaaccacatcgatacagcttagactagcggatgggacacgtctggtggctaagttcaatcaccatcacacggtcaacgacattcgcggtttcattgactcatctcgacctggagcctcgttgaactaccagcttcagacaatggggttcccacctaagcctttgactgatctcactcagaccattgaagaagctggtctcgccaactctgttgttcttcagaaattctagaaaattctacaaggtgtggttctttttgtctatctatatgcattataatgagattttcataactgttgtagtaaccaggtctttaaaatgtaagttacttcttcactctgtatactcagcataagccggcggggacttgtggtatagtttttcttaatttattgaaattttatagtttcattatgcgtttatgggttaaatacagtgtttcaagaacaactatatatagttatatattattagtttggtaagagtataatcaagtgtcatatatgcatgtatatcattgttgtgttattcatcaaccaatagttactgggaagagtattaataagcttattgagaatttgaaatgtatatgactagttttcatgaaattacaacattttgaaactaatgtttgtgaaaggaagaactagaatcttttcatattattttcagtagggaaaatgtcataaaagtcatcagttaaacaaagcaccaactttgcttatggtgaacgggtcaagacccatttttatcttttatttgtgatttttttaaaaacataaaacgacgtcgttttgcagtttaacgaaagatgggaatgttgacttaacaccgttaattttttcaattagttgacatcacgatatgctttttttggcaaagttaatacaagttaatgatttaattgaaaaatcaattgaaattagtgatttaattcactagaagcaaagtttgtgctttgtttcaccatttttcgtaaagtgatcatttttatgacatttttcctatttttaataactttacttcttcctttttttttggtagggtctataactttacttcttacaatgatgttatgttcaaaataaaaaggttcaaacttcttatgtatattttcaattaagaaaaaaaaaacactttcaaatttattaaaatctaaaagaaagattaattcttcgttaaaatatttttataagaaaattacaaagtaattaagatacataacacaaatgtgtaatcaatgctttcaattttcaagtcaacatgatgaaatttcaacaatttattcgagaatggagacatgtagacatgtgttgtttcaacaattcaatatgactaactttgttaaaggacaacatttaagtttgttgaaatgaagaatgagcattcttgcaactatttacaacaagtttattttttacaataaggctaggttcaaaataacaaggtttctaaatcattgcacttaaagcatgtacaatggttgggactgtcaaagtccctaaaaaagtaaaaagtaataatattttattattttaattatattttagttttttaatataaattggacattgataagattacacttgcaaatatgtttgtgggaacgtcctttaaatgaggactttcagagactctctttcatccctcttttactttttaaatatttttgttatttttaagtggatgagcctgtataaagagacccacgttggacgtgctcttagagttcgaacactttcaaatttacgaaaatctaatacaaaattaatactccgatttttttagctagtattaaatacttccggacttgtaaagtagttggagtcaatggtttcaagtcaacaatgatgaaatttcaacaatttacttaaacgctacgagagtgagagaccctaccagagtcaactttgttgatttgttcggatttggtttttaaccaaaaacttggatgacaaaagaagaacagtaaggggcaaaaagcaaaatg

SEQ ID NO: 7995 - DNA, 3000 bp, Unknown
  misc_feature (1)..( 3000): cDNA_ID_1810033_gDNA_ID_1621181_Annot_ID_57385 3000 nt of promoter + ATG
ttactatgcatttaaactatagatatgtttggatacccgttcggatatcggtttggatctgattcggtttcagattttagggttttgaagtataaacctgttcggatattttaaaatttcagattcaaattccgatcgggagctcggattcgaatattatggccagccctaaacgacgtcgtgtttgaagatttagacttgaaagcgaagaaacaaaatatacctcttttaaacaacactatatgtaagaaacccaactggaacatggtgggacctactagagacaatactcgtgttactaccgtcagatgcttttagatattgtcgtctatcctgcggtcgagatttcgtgtaatttcaaagctaataccgtgatccatgatctagtagtaacactgagaagagggactgtgtttttaatcggctgcgtcggatcatttcctgttgttatcaaatttttctaatccgtattcgctagttgctttctgcttgttcacgcgttgaatctcctcgtactttgcggaattcagatttctcgaacgggtatgtacttgttatgcctagaaactgttcgatgaaatgcctaactgagaatgtttttacaatttctctctgtttgatgtatctttttttataaatgaatgttcagggtttacaagtttggtttgttcttcagttcttgaagtgatttgatacggagcagtcatggatggtgagtgaatgattcttgtgcaattgtgattttgtttttgcttcaaggaaggccctttcttcacttatctttgggaattggtgaattagatgtagaaacttaggaaaatgctataaagctttgttctttgctattgttttgtatgatgtaaaacttcttagtataacttgttaaaatcccaatctgcattaccatcaatgcgtagaaattgcttggaaaatttaaattgaggttgcatggtttttgaatcctaagaccattttttgagaactgtaacattggtgatttcaaaatattcagttgattcacaaccaatgatggaggagactatactggtcggtgatgacctaatgacgggtcctccatctcctgttatccctcctgaaattgcttcacatgtgcttgaaggtgttgatttgtgcgatgggattttgaggaatctattcctgtgtatgtctatgtatcctcggtttggtttataattctacccttacttctgtcagtgagtagaattgttttttttttttttcttgttttaggtttgcaaatcaatgatattgaaccattttgccaagatgagcttgcattgtatcgacaatgtgctgaaaagagggtaattgttgtttagccatcggctcggattatagttatataaagcttttcattctcatatcatatccacatccatttccttgacttttcttgttcttctatcctttttgtaggacaaaatattgagagttagacttcaagagagcgaacacaagttaggattgtctatgcccattgaactcgctaaggaaaggattacgcagcttgaagctgaagccacatcttttgagaggtactctttcttaacaatgcagttatattttgttttggattttctttacatgaagagtttgtgctaccatgtaatcatgtatatctacagatgttcacaaatcgaaactatgttcttaaatccaaatgttcactaaaacagttcatttgttttataatcaggcacttgattctagcaagtggagctgaaggaatagaaggatttcgccggagatggagtttacacggtcggatgacggataccaagtactgtaacaaaacctaaccttataaaacaaccaatgctcataatataatatcatggaattaatatgctgcatgatagtagatgaacccatcatagtccttcccaaatgctgcgtacataaatctgatttttagcattatcgaaagtgaagcctataaaccctttgtgctacagtctgtattactttggtttgtttcttagcttaaagctaattgtttttattgtgtgtggatgtcacagaaaaagactggagtcactgaagcagggaatggagaacaggaacaaggttgaacatgaacataaccaacaccatgatcagtccccaaaaccttctgctccaaaaagatggttcttttggtgatttccatattgaatcatgttttggatcataaaaggttcataatcattacacttatggtgcagcaatgtaaccacttttagctattaaaagtaacattaaaaatctaaaaagttttatcttctccattaaattcgctcttagtctttacaaatgtcaaattgagtaatcaatttctttcggtaataatagggatgtgcattttaactaaaccaaaccgatccaaaccaaacccaagtttagattcaaaccattcggttatgtttcttctcaacccaaatggttcggttcggtttggtattaaacaaaccgaattgacaacccaatatatttatttaattaattaattaataatattgtatattactaaatatgaaatagtttgcacttttaatttcttttcatggtttttttgaattattaaaacttttgcttaagttaactattatcaaattcaaagttcaaacaataatgtacggttacaatgattagttttttaaaaccgaattaaaaccaaaccgaagaagccaaacggaaccaaacccgaacatagattgatccaaacccaaaccaaaccatactaacctcggttgagtttgattagaattttacaaaacccaaataaatcgaaccgaatcgaacacaaacgggaccagaaattaaacagaaatgccgaaccgaacttaataatttcttgttttttctgaagcccatttgaggcccaatatctccctctacgaaacgacatcgttcttaccgaaaacgtctgctatatctgacagtatctagcactctgcaagagaaacttcgaagattttgatattgtaacgatccgccatg

SEQ ID NO: 7996 - DNA, 3000 bp, Unknown
  misc_feature (1)..( 3000): cDNA_ID_1030333_gDNA_ID_1621181_Annot_ID_174293 3000 nt of promoter + ATG
tttctgttaggagggattataatcgtggttgctcttgttgctcaattctacaacaagaagtttcctgagaacagagactttttgatctgctgcatcggattatatccttttgattcccatttgatttgctagggttaagatgaaattgaattgaatttgataattgtttccttgtgtatggcttgattggtttgtgttgtgtgcattagattttgagatactataatgtctattaggtatgaatgttatgtataatcagagaaatttctcaaagtctttatcttttggatataatttttgaataagatgtgggatttgtttgcttcttgactttggcaagtatgtggtgttgactgcggtaatgcagctgattctgtacattaaggagaagaacgctatcttgttcacctatcctcttgaggtttgttctcttgactgcttagaaaatgtggttaggttgtgtgcttttgggctacattcttgtttttgcttgtatcataaccagggactgttgtttctgtgattcggtgcatattttctcttcataactagaactatattttgatgtccttctgttttgtaaccacttagaattgttcttctgctagcttcacatgtgttgtagagttctcatatcttaggtgatcttggtgtttggcatttgagctatagcaggtgctacatctccctttcactccactcattctaaaccaactttttctcaatgtgttacttgattcgtcgatatcttgattattcggggtgtggaagttcgtgtaactcttggtatttgtgattctggcgatgtcttgttatatgagacacacttgttcaaaatgattctggaatttaatgttggtgtttgtggcttttgttatttgtctcatcagctggaaaaagtttcccatctcaattaatttgtatacgaaaaaatgcgatctttcaaaacatttgattagttctcattatggttaaggtcagaataggcaacaaagctagagaactccatttgttttgccatttcagtttctatgataatttggtttgcagattattcatatattttgctactgttaggacatgtatatttggttgttttgctgacttgaaattcggatggttaataatatgcagggatcattcaccagcactggtttggtggtatcttccaagttacctagattctctgatcagtacactctaaccatcgacagtgctgatccgcaatcaatctcagctgggaagtcggttcagttcaccaaaagtgtcactcaatggtctctttctttctgcatttttcatacacgtgctcacaccatatcctttgcattgcgtaagctgttgattttgtttttgtatgtgtattctaggctcacaaaagatggagttcttgtcgagggtttattctggaaagatgttgaagccctagtcaaagagtacacagaagcaggagaaccaaagaagaagagatgatcatctataatgggaaaagtatgttgctccttattagttctaaatgttacattttttttatgactaaaatcgatggtgacttggtttaaaagacgacagagtttttgcctcctaacagaagattcattcttataaattggaaccaaattttcaaatcattccgagatttttacaaccatcgatcttatcatgttctcttatttggaaatgttgccgtaagctagacttgttcggtcttgtctggcctaattcagttattttgttgttattgatcacttaagaaaatgttatgttgggctggtctggtccaacccaatcagtaataaacaacttaaaatattagttttcaaaaaatccgatctgaactgaatttgtgtctgtccgacattagcttttaaccagagtaacacttctactctaactaggtatgaccaaaatttaaccataaacatattttgaaccataattgtattgtttttaaactggaaccgaatcgtaacctgtcaattatgattaaaaccgaatcgtaacctgtcaatcgtaatcgtaaaatggttaaaaaccataatcgttaaccgtaaaaaatagaataattaccgttaaaatatatattaattgtaactgtcaattaaccataatcgtattaaaaccatagttaaccgtacggttaaccgcatagttaaaaccttaaaaatacaattttaactatttataatgcaaagataaatatcaaatgttcgaataaagattttcaaaaagtaactaaagttgcttataaaaaaatctacaacatacttttcattttcttaaaagcaattaaaaaaaagtcggatgatacgtaagattttgccttcagtattaaatgtatcgtaaccatcaaataaccataagcatatttaaccataattgtattcattcgtaattttatataatcgtaaccgttttaaccgtatatataataattaaagttatgtttacaaaaaatttgtaactataattattagttaataaatcgtaaccgtaataaccgtaaccttagtgatgcctaaattctctcattaaagcgtagataaaccggtgttaaaccatgaaaccatgagattttttccccctctcatttgtgaagttgattctaaaatttaatgaaaaaataatactacagtaaggtattaatgggggtggaatatgaagatattataagcttaggaatattaaaatagaacaagaacaaaacgtcactccacaaggaaagttactaaaattgacaaaaccacaagtaccaacaaatctaagttttgtattcctcctttttaagttacataattccccaattcctccaccatatcacgcgcccacgtgaattaaccagacaccacaaaccacacacattagttataacctccacgcgcttaatcagcgcgtataacaaatgaacgtctctctagcgttgttcgttttgatatcttctcgacttctccacttctttagatttgattcttcttctctgatctctgaaaaaacacaatg

SEQ ID NO: 7997 - DNA, 191 bp, Unknown
  misc_feature (1)..( 191): cDNA_ID_1810014_gDNA_ID_1621181_Annot_ID_57390 3000 nt of promoter + ATG
gagacacgaatcgaacagaaggaaacgatccgcagctccctcctccctgagcagaaaatgtcgaggccaatcagatcggggtctcggacgatgaagattcaaaagagaacgttcgatgggctgaggagtacgccagagaacaggaaataagcgctatcaagctctccctagccaaggcagaaaacgagatg

SEQ ID NO: 7998 - DNA, 3000 bp, Unknown
  misc_feature (1)..( 3000): cDNA_ID_1810092_gDNA_ID_1621182_Annot_ID_57394 3000 nt of promoter + ATG
atgattagaacaaatccaataaacccatacatttaccaagaaaatattaaaacataagatacatgacaaagtcatatatgcaacatgaaatataagataaagaaaacaaactcttagatcattttgcagacaacgttatacgacgaataatcaaacaaacgaaaaatgattctccaagaacatgttaaatttcatgttcatcagaagatcataattagtagtaagtaggttcagacgtgtagaagaaaggaccagcccagtaaagcttgaagctcttgtcttgaagaatacggtacgtgctcaatggctgtcctctaacacctttgttcacatcggtcggaaaatcgcaatcagcgagtggagatttgtaaaggtaagttttgcatttggtcactgtccttcctgcacgaagctgcgaagggaatatcgtggcgatgaagtaacctttagcatcagttttgctgctcaatatcgatattggaactaactcattcccatatgcatcgaccttcacacacgcaattcttgccgttgcacctgtcgcaaacaaacaacaatacgatattcgtttggttagaccttactatgctctaattttctcctaccattagaccaattcgtcttggtatatataattaaagaagttatgttaccttgaattgggtaagttttgccaccggacttgcacttgatgatcccttcaacggcgatgggaatcaattttccggtctccgggtcagcttcattgccgtaataagcaactgaagatatgattagagatgagaagacgatgagagaagctgcaaatgagaggcgtgagaaagccattttttttttttgcttgctttgtttatatgttgcttaagcaagtgaagttttttgaaaactaactattgggttttatagattaattgcgttgaaaaagaaggttaattttctaattaaattatttggtttagtgtacattaactaataagaaaacgagcaacttgtaatagtaaaaccaaacaaaacttgaaataagaacaacgtgtatgcacggtagacaatagtgttattgtcccgacgtgagtcgcattatagtgtgtggattaccaattccaaagacggttctaacattatggatggacaagcatatcagttttaacttttaaaagttcggatgtctctaacaaataagggcctgactggtttaaacgcagcggatgcggttgcggttgcgggagtttgcggaaacaggcggttgcggtttcaagcgttatcaagtgttttgaacgactggttgagcgtttgataatgagtgcgtttgcgggagttttatgattggtaaaccagcgggtgcgatagtaattaaataaaaaataaccaaaataaatataatatattactagtaaaagaaaaaaatacaatatattattatgataaattgataatattagaaaaattaaacatgcttaataattaaaaccataaataaaacattaaattcaaaaataaataaattttgtaagaaaaagcttagtactttatgcatttggtacatcaccaaaaattgcatcaagtagtgtaataaactgtaaataacgttgaactcgtgggttttccggattgcctctatacatatgataaagttctaacaagaaacgggtcatctcgtctgaccaaataattttctaatcgagaaaacaaatcaaaacatgtattcaatcaaaaaactcaaaaaaatacaaaataaataaaatgacgatgccataaaatactcagagaattacactagctaatgaatggatgaaaggatagatcatacttacgtttgattcttgattttgattttgattttcgttagtttgggtagatgccataattgagagaatagggtttcaatatattgattaggattttctgataagaataagatatatagggtttgggtggaagacataattattttagttaattaaaaaaaaaaattaacctaaccgctaccgcccgcaaccgcaaacgcttgcgggaaggaacttttaaaatatggcgatttcgagcggtccaaagcggtatctaacggtttttatgattggtgtcaaacgctaacaactgctaccacccgcaaacgcagcgtttgcgggtgacagagggagaaccaatcaagctctaagactaatcggaccaatttagcaacttgtgtgcttcgatgtgttggactgggctagattgggcccaaatagcctgttttaacattcccaaagatccaaacaattccttcttctttcttccgaacaattcaatgtagatccgagcgaatctcctaaattactaaaatgcacaattgtgctcagcttaccaaaaaggcccaaaagaccaaaacatattctgattttttctctttagatacaataaaagtaatttatatagattagaggcccaataaggttcacgtaggcccaaacatattaaaagtaactcagaagagatccatcaaaattttgattcacacatctgtttaggaattaaaaatattatttgatcggttattcattccttttcatgaaatcatgcaaaaaatcaaaaatcatttttttctctagaaactacgtggcgagaaagcagagcaccagttgtcttcttgctctgattatctcgttgaaaccgctttcaaagcagagcaaaagagacgacaccggagcctccactgctttacttttcctttaaactgtgactgctttcatttatataataaaatacatacactctcagagtcacatgtactctcctctaacataaacacgtcacttgtagcgaaaacagtatcaagaaaaagagaagatcaaacacgtcttcttttctctctctctctttgtcgcctaaaattccagaatcactctgctttttacccttttaatcaatgatttttccttttagtagcaatcgttggtgattcgaaaaaccaaacttttctcggactaggattctagggttttagtgatcatctgaatattcatg

SEQ ID NO: 7999 - DNA, 3000 bp, Unknown
  misc_feature (1)..( 3000): cDNA_ID_1810090_gDNA_ID_1621182_Annot_ID_57395 3000 nt of promoter + ATG
aacatcaacggctgcgaacaaagtgaaaaacttacaattttcagcagtttcataacatctttaattagcaactaaagaggttttataggaaacttacatgacctttgtacttatgaactctaaggaaatcaagcagaggctccaagcaatctttgttacggaacataacagaagacaagtgacgattcagaaactgaactccattaccaatcgaagacgaacgagaaggacgtggcacgtttgcgttaaagggctcgaaatcaagctcaagacaaaaagggtcactattaggtccatcaacgagttcttctttgaaacgaagatactcagagactgttaattgttcaacacttagctcgaagacattaacacgaacatattcccaaacaccaggtcttggtctaacggctaacgcaacaaaaggtggtacaactatagcttcctacaccaaaattaacaatctattattagtttcaagatgaattttgaagaagaggaaaagttttttttaccattgctgatttaaggatctctccaaaaggaccatcagagagactcttctttgtttcatcgtctccgataacagattcgagttcgtcaattaagttatgtggttgaagaatccctttcccctgatccacataccttcacaaaaccaataagaaactaaattaaaaagaaacgagctttgccgggagaaagaaacaggggaataaggatcttgacgacgaacctggagagaagagcaacgagttcgttgcggtgagcggaaagcgtgtcttgcacgcgatcccttgtgcttagaaccctagtgagcttagggtttgccatgaatattcagatgatcactaaaaccctagaatcctagtccgagaaaagtttggtttttcgaatcaccaacgattgctactaaaaggaaaaatcattgattaaaagggtaaaaagcagagtgattctggaattttaggcgacaaagagagagagagaaaagaagacgtgtttgatcttctctttttcttgatactgttttcgctacaagtgacgtgtttatgttagaggagagtacatgtgactctgagagtgtatgtattttattatataaatgaaagcagtcacagtttaaaggaaaagtaaagcagtggaggctccggtgtcgtctcttttgctctgctttgaaagcggtttcaacgagataatcagagcaagaagacaactggtgctctgctttctcgccacgtagtttctagagaaaaaaatgatttttgattttttgcatgatttcatgaaaaggaatgaataaccgatcaaataatatttttaattcctaaacagatgtgtgaatcaaaattttgatggatctcttctgagttacttttaatatgtttgggcctacgtgaaccttattgggcctctaatctatataaattacttttattgtatctaaagagaaaaaatcagaatatgttttggtcttttgggcctttttggtaagctgagcacaattgtgcattttagtaatttaggagattcgctcggatctacattgaattgttcggaagaaagaagaaggaattgtttggatctttgggaatgttaaaacaggctatttgggcccaatctagcccagtccaacacatcgaagcacacaagttgctaaattggtccgattagtcttagagcttgattggttctccctctgtcacccgcaaacgctgcgtttgcgggtggtagcagttgttagcgtttgacaccaatcataaaaaccgttagataccgctttggaccgctcgaaatcgccatattttaaaagttccttcccgcaagcgtttgcggttgcgggcggtagcggttaggttaatttttttttttaattaactaaaataattatgtcttccacccaaaccctatatatcttattcttatcagaaaatcctaatcaatatattgaaaccctattctctcaattatggcatctacccaaactaacgaaaatcaaaatcaaaatcaagaatcaaacgtaagtatgatctatcctttcatccattcattagctagtgtaattctctgagtattttatggcatcgtcattttatttattttgtatttttttgagttttttgattgaatacatgttttgatttgttttctcgattagaaaattatttggtcagacgagatgacccgtttcttgttagaactttatcatatgtatagaggcaatccggaaaacccacgagttcaacgttatttacagtttattacactacttgatgcaatttttggtgatgtaccaaatgcataaagtactaagctttttcttacaaaatttatttatttttgaatttaatgttttatttatggttttaattattaagcatgtttaatttttctaatattatcaatttatcataataatatattgtatttttttcttttactagtaatatattatatttattttggttattttttatttaattactatcgcacccgctggtttaccaatcataaaactcccgcaaacgcactcattatcaaacgctcaaccagtcgttcaaaacacttgataacgcttgaaaccgcaaccgcctgtttccgcaaactcccgcaaccgcaaccgcatccgctgcgtttaaaccagtcaggcccttatttgttagagacatccgaacttttaaaagttaaaactgatatgcttgtccatccataatgttagaaccgtctttggaattggtaatccacacactataatgcgactcacgtcgggacaataacactattgtctaccgtgcatacacgttgttcttatttcaagttttgtttggttttactattacaagttgctcgttttcttattagttaatgtacactaaaccaaataatttaattagaaaattaaccttctttttcaacgcaattaatctataaaacccaatagttagttttcaaaaaacttcacttgcttaagcaacatataaacaaagcaagcaaaaaaaaaaa

SEQ ID NO: 8000 - DNA, 3000 bp, Unknown
  misc_feature (1)..( 3000): cDNA_ID_1810086_gDNA_ID_1621182_Annot_ID_57396 3000 nt of promoter + ATG
caattctctccgaacccaccaaattaagaaacatggcaaaaactaggaataacctaaaaatagaatgaaagaggaagaaaagaacttaaaaatagaataacagatgtaaaagaagagttggataaaaaatagaatcaacccaaaaatacatttctcaaagctctttaaataaccaattttcaatttgtttgtaacaattaataaccacgagaagagaagttgagaaagaaaaaatagtaacgatgaaaatggccggaaggatctttctccttttcctctccgtctacgtcacggtggccatcgccggtaaagctccaccgccaacattcaccgagaaaggcaaagcctagcggagaaactctgcgagaaatccgaagacaaagcgttttgcgttgcaagcctaacgtcccgtcctgaggcagcaaccgcaaccgcaccaaaactaggcgtgatcgcgttaagcatcgcgtcctcaaatgcttcggacacatctttctacatcaaagccaaactaaagcaaaagaacctcgagccggctttagaagacaccctcgacgattgctctaagaattacttagatgcggtcgcgcagctcgacgattctctagccgctttgatgcaaaactcgttcatcgacgtcgatatttggctcaacaccgcgataagcgacggtgaggcttgtgaaaacgctttgaacgatcgtgccggtaatgatgctgagcttgctcgtaggaacacaaacttgttgaagctttgcaaggatgctcttctcattaacactattttaactccctaaatttaaagttattgcccattaattattttatatttgttcacattgttataatttttttttaaatggctcgttgatttgtcccgggggtaaattgtaacgatatttgaaatacttgtttttgggaatttttgaatgagcttattaaattatatataaagtatatacaaccaatatgcatattttcttgtttatattcacctaataataaccaatgaaataataaaatacaaatgtatattattttccttttggtcacaaatgtattttcttttcccttcttatattatatacacaataaaataaaataaaaatatgaaattatcctttttttgtgtggacattttatcatttaagaaaatgaaattaataattctaaattactatcttattacaaatgaaaattgtaaattaattaaatatttacaagcatccatataattttggtcattcaatataattcctaaatactaaaaactattgactttttttttttttttttttttttttttgtaaaccctaaaaactattgactaaaaaaaagtattttaacagaaaaagaagagaatatataattttaatgtttgaccacaaagggaaaaaaatatctcaaagttttttctttctttggtatatcggacggtatttgtgtggccagggagggctacctgagactccatatctgtctctcttcttcttcttcttcctcttcttcctctgcttcttcttcttcacatcactgtgtgcgtctctctatctctctattctatcatttcgaaatcctctctatccgaatttgaactcgtctcttcttcgtaaagagttcttaatctccgtctctgtgatttcggaatctggaggttttgaatttcttgttcgtatcaatcaaatggtggatcgatttagtgagattgctttacctcattagcaatgacttctgcttcttccatgtccggtgcgttttcttcgttcgtctctctgatttttttttttttttcatgttcgtttcaaaggcagagtttaggggaagctttgtgacgattcttctgttcttctctctgtttgtttgaattcagtagcaattgtgtattgcgtcttaacgtcttaagctaatatacccttaagactgtgtgatttttcttagttatgagtcgtattaagaatccaattgcttcgttttctgaattggattccgagagagagagagagagagagagagagagagagagttcacgtcccattgaatttgaaagctactttagttattgttcttgttttgtgtatgtgtgcgacggaaaatgaaaatccacttggttgataatttctattactttctggtgtttgttggatcagtgagtaaatgcagcaaagttagaattctgagctgattaggttattcactagttcttctttaagcaagttcatgtgccaactaaacacttcctaccattcttgttgtggaccacagttttctattactggttaacaattaatttcttttgaattcatgcatatacgtttaccctttttggttggttctgttttggttttattgaaattgattatgtgtgtacaatgcagtgtctgtggaatgtgtgaacatatgtaatctaacgaaaggagatgggaatgcaagaagcgattgcagtgctctctcctgtgcttggaaagctccaagagcgttaactgggtttctagctagcactgctcatccacctgtgtgttctgtgtattcatgtggcagaaatggaagaaagagcagaatgaaagctgtaagtatcctttattgcgtctgtttatgtagtccggtgttaagatattaatatgtggcttgaatggatatatcaagctccagaattgtgtttctactatttttgtacatgatcaccttgttcatattgccatggtggcagtatttgcaatctattcttatggtaactcctttggataatgtagtgcgcctggcagaggtatgaatatgaagtaggcttttctgaggctccttactttgtaaatgtgagaaatatcttgaagtccagattatcttgtggtggtcataaaagatgggaactgtattgcgtatcagctgaatcttcttctggtgcatccagtgatgttaccgtcgaaacattgtgggaggtacgatacactggtctcttctttttctttggaactctactagctcgacattctcaaccaatttgatg

SEQ ID NO: 8001 - DNA, 3000 bp, Unknown
  misc_feature (1)..( 3000): cDNA_ID_2139462_gDNA_ID_1621182_Annot_ID_174321 3000 nt of promoter + ATG
acacggtgcaggactacttggcatcctccaatggaccggtatttcattgatctgatgttggaccaagcgaggagaggaaaccagattgaaggtgttttcaggaaacaagcatggactgagatggttaatctcttcaatgcgaaatttgagtctaactttgatgttgatgtgttgaagaaccggtataagtctctgagaagacagttcaacgcgatcaagagtattcttcgatcagatgggtttgcttgggataatgagcgtcaaatggttacagctgataataatgtatggcaagactatataaaggtaacttaatcgctctgatctatgctgtgtggttagttacagtgttttcgtctctgttttgatgtgtgttcttgtctgaattaatcacaggctcatagagatgcaaggcaatttatgactcggccaattccgtactataaagatctgtgtgtgctctgtggcgattctgggatcgaagaaaacgaatgctttgtagctatggattggtttgaccctgaaactgaattccaagaatttaagtccagtggtactacagatttgtctatttcagctgaggaagaagatagcaactctcttttgtttgaccccaagaacaaaagagatcaacttgctaatactgatacaagccctataaacccgaaaaagcctcgagttgatgaaacccaaaccatgtcaatagaggacacggttgaggctattcaagcgttaccagacatggacgatgaacttatattggatgcttgtgatctgcttgaagataaactcaaggcgaaaactttcttggctctagatgtgaaactacgcaagaagtggttgttaaggaaactccgacctcaagtgacttgaggattatgagctgtaaagaagcaaagtagaagtttgacgataaacagaagctcattggcttatactacagagtacagactactttgcgagagtttcatatacaaagacttatgctcttagaagttgtaaatgtgatcaaatatggctgatgatattaaaccttgtacaaactctctcttctttgccttctctagtagctctgtatctgacaagggagacggcgattcccagtctctgagcacacagaaatacgaaatgtatctttagacaaggtttaagaagatgagataaagcaagcagaatcaagaaaatgtcaaagaattacttacttttctgttgaatcccttattaagctattgtcttccatgcttgcttcactagatgaatcaggttgtacaagcttggacttctttggtgacggcggattgtatataaatgataataatgggtccagaacacttttagatgtatgattagtagacaacggctcatcgattagagactgtaagtatttcctagtccctggagaaaatgctgaatatgactcatccttgtaaagtctctgcttttgttcaaggtaagtattcgtcaaggaacacaaatgtcagataaccgatataaaacataccaagatatagaataagcacaaaaagacttacaagttttctactaaatggtaacgaaagcaagaagagtaaataaaaaaggataccttgaagacatctctatgctgagtggtaatgtgatcaaccatatgcatcttcactcgtctgctacaaaccggacatatctacatcacaaccaaagctgaatttgtgagaagttattacattcatcatcaccaaaagactgttttcatttctcacaccaaacacttcacaactacaaaatggttcctcatagcatcaagcaaataatccaagtgaactaaaatccaagaagtccctaccaactctccttacagaatcacaatcctgcctactaaagtaaccattagagtacaacaatgaacatcacacgataaatagtctaaatttacaactaactgcttcatgtaaaaactcaaatgtatagtttaaagaacagtaactgatttgggagatggatacgagttgcaattaccccattgttggcgtctagttgatgctcctcatcgatatggtgacacaattcaactaaatcataatcatctgagcaaaacgggcatggataatccactgccatttcatcatcatcttcaaactcaatacatgaacctaaacaaaaatttcaccatcacaaaacttttatcaattacataacataaagtttacccataaagtgacaaaatttaaactcactagaccttaagggccaaaagaattgaaatttgataaagaaattaaaaccacctgcatataaagcataaaccctaaaacaaagctaaatgcaattgggaaaaagaatggatctttacactaacccgactgatacttggcaagttcttctaatcgatatttcttcgacgaatcaaacccacaaatgcccaacaaatcttcttccattttgattctgaatccacacgaacttgaattgaaaaatctcagataataattaaaggagcatattcttcctccgtgtatttattagcatctgtcagtactttgttcagcctgaaagtgcgaggaaacacaccaaaaaggcaagacctttaaatgtggtctttttctctggcgacatgagggaatccatggacacgaatctattgagctaaatccaatgaccaaactacccctaaccggtcactatagcctcttttaccctgaaccaccaacgtccctctgttgacttttagccgccacgaatctacgggcattttcgtctttgcgccaccgtcttaaaacgtgtgctccacacacttatattgaccctatcgcgcaagtggactataagcccaatatataaatgggcctaaaaaggcccaaatacttctccttcgttgctaagtctgtaacacgcgctaatgagaaacgattttgcgattcagattcgtttgcttttgccgacgacaaaagctccgattttgtttattttctccgggaaattttactttcgagattctgttgagaatcaattgatttggtattg

SEQ ID NO: 8002 - DNA, 3000 bp, Unknown
  misc_feature (1)..( 3000): cDNA_ID_1813843_gDNA_ID_1621182_Annot_ID_174317 3000 nt of promoter + ATG
acgaatacttaccttgaacaaaagcagagactttacaaggatgagtcatattcagcattttctccagggactaggaaatacttacagtctctaatcgatgagccgttgtctactaatcatacatctaaaagtgttctggacccattattatcatttatatacaatccgccgtcaccaaagaagtccaagcttgtacaacctgattcatctagtgaagcaagcatggaagacaatagcttaataagggattcaacagaaaagtaagtaattctttgacattttcttgattctgcttgctttatctcatcttcttaaaccttgtctaaagatacatttcgtatttctgtgtgctcagagactgggaatcgccgtctcccttgtcagatacagagctactagagaaggcaaagaagagagagtttgtacaaggtttaatatcatcagccatatttgatcacatttacaacttctaagagcataagtctttgtatatgaaactctcgcaaagtagtctgtactctgtagtataagccaatgagcttctgtttatcgtcaaacttctactttgcttctttacagctcataatcctcaagtcacttgaggtcggagtttccttaacaaccacttcttgcgtagtttcacatctagagccaagaaagttttcgccttgagtttatcttcaagcagatcacaagcatccaatataagttcatcgtccatgtctggtaacgcttgaatagcctcaaccgtgtcctctattgacatggtttgggtttcatcaactcgaggctttttcgggtttatagggcttgtatcagtattagcaagttgatctcttttgttcttggggtcaaacaaaagagagttgctatcttcttcctcagctgaaatagacaaatctgtagtaccactggacttaaattcttggaattcagtttcagggtcaaaccaatccatagctacaaagcattcgttttcttcgatcccagaatcgccacagagcacacacagatctttatagtacggaattggccgagtcataaattgccttgcatctctatgagcctgtgattaattcagacaagaacacacatcaaaacagagacgaaaacactgtaactaaccacacagcatagatcagagcgattaagttacctttatatagtcttgccatacattattatcagctgtaaccatttgacgctcattatcccaagcaaacccatctgatcgaagaatactcttgatcgcgttgaactgtcttctcagagacttataccggttcttcaacacatcaacatcaaagttagactcaaatttcgcattgaagagattaaccatctcagtccatgcttgtttcctgaaaacaccttcaatctggtttcctctcctcgcttggtccaacatcagatcaatgaaataccggtccattggaggatgccaagtagtcctgcaccgtgtgacactgcttccttttgagttagacctgactgttgacgattcacatattctgttgtacccatcatcttcctgaatcagtgtcttggattctccctcactaatactctcctcagctgaaacatacatattcattcacaggttacttaagaatctttgatctttggtgacaagaatgtacaatgaaggattcaagtaacaatcaatagattaaagattgtacctttgtgctcagacattccatctgagtaaaccaagcacagatctttgtaacaaggtatagactttatccgaaaagatctcgaatcaggatgaatcttcaataacccaaaagcaaaaacaaatcaatccctgagaagaagacacaaaatcacaagtaaacaaaacgcaaaacgcaccttaagatactcatcccaaacgcagttatcagcaacaaccatctgtctagtatcatcccaactaaaaccatcttctatcaaaagattattcacagatttaaacaagttcctcaatgtcttatgcctgtttttcaaaacatctttgccataaagaaacttgaacttggcagtgaaggaacaagacatgaacttccaagctcgtttactaaacaaatgatcttcaaatctgttgccttttctaacttgttccaccataagctcgatgaaatactgatccatttcaggtgtccacactgttcttaatctctcattgccgtttctactgctcattatctatttctcccttcttctttacctgcaaaaaaatcgattgcaagaacacaaatttgaaatcgagaaatcaagttataaaatcagaaatcagattctcgtaagaaactggatcagacccataatagagattcgactaaattagctaaagagcagagaatcttcgcttacagagagtcagagctccggtgaacgggagttggagtaccggtgagattttaaggataaggttgtccgggataaggttatacttttattcgtaaccaatttagaaacctttatgggcttatattactttattgggcttagtctattataggcctatgttaaacgacatcgtctattctagggtttgtttttgggccagagtgacgtttgttttcctttcgtcgtcgtcgtcgtcgtcgtcttcgtcttcgtcttcgtgaaagatgtttacaaaattttgctgtttaaattgatagaagaagattcgacctttaaaggctatctgaagaacatctccatcatcgcctggtgttgtaagtttcttttggattttgattcttgttgatactgactagtgagctcatttttaacatttgttcgtaccaattctgggatttgtaattagctgagtattgagctctaaatcttgaaaaattagtgagtttagtattttgcgaaagacccattaacagattatgatttgtgcgttgtttcttgccaaatacttttgagaggtttatgaaacagagtaaaaccctagaattcaattcctttgctctgttatgcagtcttcatttcatcaaattcaacacagaagattcgatg

SEQ ID NO: 8003 - DNA, 3000 bp, Unknown
  misc_feature (1)..( 3000): cDNA_ID_2990278_gDNA_ID_1621182_Annot_ID_174316 3000 nt of promoter + ATG
ctaaatcacaatgggtaaaaatactaaaaattgttgtatgtttgggtctaaaataattatatattttagtctaaataatttattattttatggatgattttttggatgttgtgatatgaagctttttgatggttcatccatgaacaatcataatggtgaatttgattgcaattgcgctggggcttgcaaagactatgtattgttagaccatctacattggtaatctctcaagagagtttttcactattaaaataacagaaataataaaaagagaagagagagtgtagaaagtttctcaagtgagaaactatgagatactctctacaagccatcattacatttctcttcttttaattgattcaatttttacactaaaataaaaatttaatcatataataaaattataataaaatactaatatttttcttgttcgagaaactttttgggtttctccttgatggagatactcttaggttttgttaaactctacaacacatcaagcttaaacctttgccatccacaccaactcacggaaacagagtaagcaagatataaagaagtagaggaaataacagagcagaataggaagaagaggagcacacaagtatttgttcacaacgaaggagaaagagggtgattacaggataatactagtgaacgtctaaaacttttctctagctaaagactcactctccatcatgtactacttgaaaaactaccccaaagcatatacagttatactttacagtttctctcaccccttatgatctaatctccttagatctacattgcttgttctttctctgctccctagtgcagcttccagacgttccttttgaatttacaaacggacaaattctccttattggccaacaatgcagaggctatagttatcgttgcctttaccttgtatactagaaaatgtgaacatcaagttctcatcttcatatgtacagtccgttttctgcattcgagtaagcttgttggaggagtgttcttcagcttttgggtgatttgtcatctttatctgtttgctaaaggattgattgtgtttgtggtcgattattgtgtctctgctttgggtgtatgataatcctccttctggtaaacaagactacgcagtttcagtttccttgatttaggggttttctttgtttgtggtacaagccttgtttgtacgaactcagagctaatctccatctccttgtatcagctgattcagacaagacggatactaagttgcaagtttcttagatgcaagagttatataatttgactttgcagcttgtatcaacttatagcaattgaaacagtcttgtcaccatcaatgtttttagattataatttgtttcatgcaagtttttgtgaaagatttttatggaagttcatatatatatgaatactactgaaaaaaaaatcaacttaaaattcaaagcaaaatctccacaaatagatctgtttcattatagaaatacttaaaaaaacaagaaaaaaaacgtggcagaaggaatttagaagcaaaaacagcttcaatctctctctgatccgcttgctacttcacaattgactgactcttaaggaagcttcaatgttttttcttttagacagatttgttagcagagaagtcttgagttgtcagaaaaacaataactgttagaattgttgtggagaggtggcagagaagatgtgtgaagcagactgctcggatcatagcttgaaaacatgtcttgagagaagctagtgttaccgacagcattaccataagtgttctggttgaaaccagaagagaattcatgtggaaccgtgtttgagagattaggatattgtagaacgttgtttttgttgatgatttcactcatcatacacatgttctgatcaaaaccatgaagctgatcctgtcgctgcatcaagtgattattcaacccgtagttattcactgcagatgcttgtaccgaaagaaacggtgagtattcttgtgtgtttgacacgccaggatgttgaaagttgttgttgttggtgatgttgtccaaacacatgttctgaccaaaaccatgccgcatcaagtgattcaggtaattggagttgattggagagtgaagcagacagtgggagttgtgagagagtagcagcatctccatggttgtacatatacggcgagaagttgctaggattcaagtgttggatctggttcagatacgatggtgttaaactctgatgcaccaagtttttgttttgttgtttctgcgactcaacaatacgaagcctttcttgcagagtagaaagagtccgttctaaggaatgaatcaattgagagagttgttgaggagagtaatgatcaaagtcaggataccaattcttcacataattcttctttttcgaattcgtcttccccttgtcatttgtctttgtctttgtccttgtccttctccttctcgatgaagtcatgaagattgagactcttcttgcgttttgtggcctctttatatctcgaagccatgtctttcactgtatttctctccttaggccatgttctcagttcaccgtctggtccgtaatagatgacgcaaacgtcaatagcacagagaatcgaaagctcttcagcttttttgaagatggttttgagtctgtttgttaaactagttgaattacgtgacgaagaagaagaagaaaaagaagattgcttcatcgtgattttgccttgattcggcaagaaactagggttttttcttccgagagagagagaacacacaaagaagaaaaattatggaaatgagggtgaaacattgtgaactcaatacgtttctatagatgccttgatgcctacggaacaacgtgtacgcatctgtgttaaattcaaaactaggcctataatgggcttagcagaaagcccaattagaaaacgattggtttttgtggaagagtaaccctagaaaatatcatatataaagatattgtcttcttcgattaactcttcttcgccaaaatcagggagaggctaaa

SEQ ID NO: 8004 - DNA, 3000 bp, Unknown
  misc_feature (1)..( 3000): cDNA_ID_1810077_gDNA_ID_1621182_Annot_ID_174315 3000 nt of promoter + ATG
caaacttttcctagccctgaaactttgtataactagtgatatgaatttttcggtttgtgcagttgcgagtaagagtttatggaaagaatttgtattgatcaatgaggatgaaagtgagtatgatactgagatgtcaggagatgatgaagtagctaaacctttggtctcaaagagagaagttgacgaccaaatgaaatcgctaatgaacgattttgaggtaaacagttcacttgtcatggccatttttgcaaacttcaaaaggcctcaaatgattctcattttccatgcttgtacagggagatgctgataaaaagaattgggttaatttccagcaacgcgtagacaaagcccctgaacaagttctgaggtgtgattcaaacgcttatgattttctgcatacttttgatcttgattctcccataacatcgatttgtgaaatacgtattgatacagatattcccggagctctggtgctaaacccctttggccaatagcaagcggacgagtctctaaatctgagcttcccagttgcaaatcttgtggtggtcctcgttgttttgaatttcaggtaattctttcttctcttctttataaacttgtattagcttggtcttagtcacttcttttgcttattttataaaccagtcaagaattggccaacaattttagctgaatcaaatcaactttaaaccaataaaacacacaattttccccatttcatttctctgttcttgcatattggaagcttggctctgttcttgatcatttcgatggcggttttatcaggtgatgccgcagctactgttcttcttcggtgggaagaacgagagggaatctctcgattgggcaacaatcgtggtgtacacttgtgagaactcgtgtgactcgagcttaagttacaaggaagagtttgtctgggttcaactatacagtcagacaacttaggatcctctatttccttcctggctgttgcctccaaagttttgttcttaaccggatcgtaccggacttaaatatatttgtaaacttgggtatgttacttggtttgtttaaagattttgttgtgtccatagtaaactttatatacaagatcttatatcttgtgatttactagaacaaacatactatattcctattatgattttgactcatactatattattgacttttatggataaagctgtttgatttctcttctaattcgcttatgatcgaatcttaaccataattatgtgctaaaaattatagatagtgtattactaagatggtcgagagagaaaaggacttgaagatagaattaagtctcctgaaacagtacgaactactgacaaaggttctcatatttgtgacaaataaagagttttcacaaagctatatcacataaaccattcaaaatcactgcttataagagaattcactaccgagcaagcttctcacttcttagactttttcgcaggtaccctgcaaatttaacagcaagtttagaatgttgccacacaacacattaacaattttgtttcacatacgatagagatgaaaacttactcagcggtttgtgcaggtggtgcagcggcaggtatgtctcctccaggacccttggcaagacgctcctctcgtcgagcatgtttcctctctcggctagccttgttcttagccctcttagcctcaaactggtcagacaatgtcttctctctagccttctcagccttggatttgtgaatactttccatcaacacacgcttgttcttgaagacgtttcccttgactttcatgtacatgtcatggtacatatgtctgtcaatcttcttggtctccctatacttcttcaacagacgcctcagcactctcatcctcctcatccacaaaacttttgttggcaaccttgcctctcgggtacccttcctcttaccttaaccattatacaacagccacataaatcatctgtggagatgtttcaagaatgtggatcaaatgttacatgtcacataccataaccagagtgacgtccctttctcttggctatattcaattgacgtgccctggatcgtgagtggatcttcgttggcttcctgatgatgaatccatccttcacaagcttcctgatgttttgacctgaagttccataacaatccaaaatacttaatcagaattacactcaaatctcaaatgcacatagatgcatcaccatttcgtatagaaaacaaacaagaatcatgatccaacagagtgctatgatggcatgttgatttggtaacaatcagaaaccatagaccatgaatccgagaagaacatagtcaatccaaagctactaaacctacgataacatctgaacaagtccaaactaaacaaaattttacagaatttcaaaaatcagattcatagcaacaccatttccaagctcaacttcatcagactgaattcaaatcattcaacgtcacctacgaagtaagctacagtatcctttttttctactatcattatcaacaagcttcgatcgcagaccaaaacaagcacgagaccgagaaagttaaatctgatcaacaacatttgagagtatgaagaacaacgtacgcgaattggccatggagatatcacttccttcgttcgggtcgagccatacttttctcttcccgcacttgagtactgaggatgcgagacgcttctggagcttcaacgaaaccattttagcctctccctgattttggcgaagaagagttaatcgaagaagacaatatctttatatatgatattttctagggttactcttccacaaaaaccaatcgttttctaattgggctttctgctaagcccattataggcctagttttgaatttaacacagatgcgtacacgttgttccgtaggcatcaaggcatctatagaaacgtattgagttcacaatgtttcaccctcatttccataatttttcttctttgtgtgttctctctctctcggaagaaaaaaccctagtttcttgccgaatcaaggcaaaatcacgatg

SEQ ID NO: 8005 - DNA, 3000 bp, Unknown
  misc_feature (1)..( 3000): cDNA_ID_2993690_gDNA_ID_1621182_Annot_ID_174312 3000 nt of promoter + ATG
ctgagttcgtacaaacaaggcttgtaccacaaacaaagaaaacccctaaatcaaggaaactgaaactgcgtagtcttgtttaccagaaggaggattatcatacacccaaagcagagacacaataatcgaccacaaacacaatcaatcctttagcaaacagataaagatgacaaatcacccaaaagctgaagaacactcctccaacaagcttactcgaatgcagaaaacggactgtacatatgaagatgagaacttgatgttcacattttctagtatacaaggtaaaggcaacgataactatagcctctgcattgttggccaataaggagaatttgtccgtttgtaaattcaaaaggaacgtctggaagctgcactagggagcagagaaagaacaagcaatgtagatctaaggagattagatcataaggggtgagagaaactgtaaagtataactgtatatgctttggggtagtttttcaagtagtacatgatggagagtgagtctttagctagagaaaagttttagacgttcactagtattatcctgtaatcaccctctttctccttcgttgtgaacaaatacttgtgtgctcctcttcttcctattctgctctgttatttcctctacttctttatatcttgcttactctgtttccgtgagttggtgtggatggcaaaggtttaagcttgatgtgttgtagagtttaacaaaacctaagagtatctccatcaaggagaaacccaaaaagtttctcgaacaagaaaaatattagtattttattataattttattatatgattaaatttttattttagtgtaaaaattgaatcaattaaaagaagagaaatgtaatgatggcttgtagagagtatctcatagtttctcacttgagaaactttctacactctctcttctctttttattatttctgttattttaatagtgaaaaactctcttgagagattaccaatgtagatggtctaacaatacatagtctttgcaagccccagcgcaattgcaatcaaattcaccattatgattgttcatggatgaaccatcaaaaagcttcatatcacaacatccaaaaaatcatccataaaataataaattatttagactaaaatatataattattttagacccaaacatacaacaatttttagtatttttacccattgtgatttagatcaaaactacacatcccaaaataaaaccatggtaggcccatcattgactatgtacaaatgtgcgttgacctttttctcgtatcacacaattctctccgaacccaccaaattaagaaacatggcaaaaactaggaataacctaaaaatagaatgaaagaggaagaaaagaacttaaaaatagaataacagatgtaaaagaagagttggataaaaaatagaatcaacccaaaaatacatttctcaaagctctttaaataaccaattttcaatttgtttgtaacaattaataaccacgagaagagaagttgagaaagaaaaaatagtaacgatgaaaatggccggaaggatctttctccttttcctctccgtctacgtcacggtggccatcgccggtaaagctccaccgccaacattcaccgagaaaggcaaagcctagcggagaaactctgcgagaaatccgaagacaaagcgttttgcgttgcaagcctaacgtcccgtcctgaggcagcaaccgcaaccgcaccaaaactaggcgtgatcgcgttaagcatcgcgtcctcaaatgcttcggacacatctttctacatcaaagccaaactaaagcaaaagaacctcgagccggctttagaagacaccctcgacgattgctctaagaattacttagatgcggtcgcgcagctcgacgattctctagccgctttgatgcaaaactcgttcatcgacgtcgatatttggctcaacaccgcgataagcgacggtgaggcttgtgaaaacgctttgaacgatcgtgccggtaatgatgctgagcttgctcgtaggaacacaaacttgttgaagctttgcaaggatgctcttctcattaacactattttaactccctaaatttaaagttattgcccattaattattttatatttgttcacattgttataatttttttttaaatggctcgttgatttgtcccgggggtaaattgtaacgatatttgaaatacttgtttttgggaatttttgaatgagcttattaaattatatataaagtatatacaaccaatatgcatattttcttgtttatattcacctaataataaccaatgaaataataaaatacaaatgtatattattttccttttggtcacaaatgtattttcttttcccttcttatattatatacacaataaaataaaataaaaatatgaaattatcctttttttgtgtggacattttatcatttaagaaaatgaaattaataattctaaattactatcttattacaaatgaaaattgtaaattaattaaatatttacaagcatccatataattttggtcattcaatataattcctaaatactaaaaactattgactttttttttttttttttttttttttttgtaaaccctaaaaactattgactaaaaaaaagtattttaacagaaaaagaagagaatatataattttaatgtttgaccacaaagggaaaaaaatatctcaaagttttttctttctttggtatatcggacggtatttgtgtggccagggagggctacctgagactccatatctgtctctcttcttcttcttcttcctcttcttcctctgcttcttcttcttcacatcactgtgtgcgtctctctatctctctattctatcatttcgaaatcctctctatccgaatttgaactcgtctcttcttcgtaaagagttcttaatctccgtctctgtgatttcggaatctggaggttttgaatttcttgttcgtatcaatcaaatggtggatcgatttagtgagattgctttacctcattagcaatg

SEQ ID NO: 8006 - DNA, 3000 bp, Unknown; identical to SEQ ID NO: 7999
  misc_feature (1)..( 3000): cDNA_ID_1810090_gDNA_ID_1621182_Annot_ID_174311 3000 nt of promoter + ATG

SEQ ID NO: 8007 - DNA, 3000 bp, Unknown; identical to SEQ ID NO: 7998
  misc_feature (1)..( 3000): cDNA_ID_3047229_gDNA_ID_1621182_Annot_ID_174309 3000 nt of promoter + ATG

SEQ ID NO: 8008 - DNA, 3000 bp, Unknown
  misc_feature (1)..( 3000): cDNA_ID_1810080_gDNA_ID_1621182_Annot_ID_57398 3000 nt of promoter + ATG
tcttcttcttcttcgtcacgtaattcaactagtttaacaaacagactcaaaaccatcttcaaaaaagctgaagagctttcgattctctgtgctattgacgtttgcgtcatctattacggaccagacggtgaactgagaacatggcctaaggagagaaatacagtgaaagacatggcttcgagatataaagaggccacaaaacgcaagaagagtctcaatcttcatgacttcatcgagaaggagaaggacaaggacaaagacaaagacaaatgacaaggggaagacgaattcgaaaaagaagaattatgtgaagaattggtatcctgactttgatcattactctcctcaacaactctctcaattgattcattccttagaacggactctttctactctgcaagaaaggcttcgtattgttgagtcgcagaaacaacaaaacaaaaacttggtgcatcagagtttaacaccatcgtatctgaaccagatccaacacttgaatcctagcaacttctcgccgtatatgtacaaccatggagatgctgctactctctcacaactcccactgtctgcttcactctccaatcaactccaattacctgaatcacttgatgcggcatggttttggtcagaacatgtgtttggacaacatcaccaacaacaacaactttcaacatcctggcgtgtcaaacacacaagaatactcaccgtttctttcggtacaagcatctgcagtgaataactacgggttgaataatcacttgatgcagcgacaggatcagcttcatggttttgatcagaacatgtgtatgatgagtgaaatcatcaacaaaaacaacgttctacaatatcctaatctctcaaacacggttccacatgaattctcttctggtttcaaccagaacacttatggtaatgctgtcggtaacactagcttctctcaagacatgttttcaagctatgatccgagcagtctgcttcacacatcttctctgccacctctccacaacaattctaacagttattgtttttctgacaactcaagacttctctgctaacaaatctgtctaaaagaaaaaacattgaagcttccttaagagtcagtcaattgtgaagtagcaagcggatcagagagagattgaagctgtttttgcttctaaattccttctgccacgttttttttcttgtttttttaagtatttctataatgaaacagatctatttgtggagattttgctttgaattttaagttgatttttttttcagtagtattcatatatatatgaacttccataaaaatctttcacaaaaacttgcatgaaacaaattataatctaaaaacattgatggtgacaagactgtttcaattgctataagttgatacaagctgcaaagtcaaattatataactcttgcatctaagaaacttgcaacttagtatccgtcttgtctgaatcagctgatacaaggagatggagattagctctgagttcgtacaaacaaggcttgtaccacaaacaaagaaaacccctaaatcaaggaaactgaaactgcgtagtcttgtttaccagaaggaggattatcatacacccaaagcagagacacaataatcgaccacaaacacaatcaatcctttagcaaacagataaagatgacaaatcacccaaaagctgaagaacactcctccaacaagcttactcgaatgcagaaaacggactgtacatatgaagatgagaacttgatgttcacattttctagtatacaaggtaaaggcaacgataactatagcctctgcattgttggccaataaggagaatttgtccgtttgtaaattcaaaaggaacgtctggaagctgcactagggagcagagaaagaacaagcaatgtagatctaaggagattagatcataaggggtgagagaaactgtaaagtataactgtatatgctttggggtagtttttcaagtagtacatgatggagagtgagtctttagctagagaaaagttttagacgttcactagtattatcctgtaatcaccctctttctccttcgttgtgaacaaatacttgtgtgctcctcttcttcctattctgctctgttatttcctctacttctttatatcttgcttactctgtttccgtgagttggtgtggatggcaaaggtttaagcttgatgtgttgtagagtttaacaaaacctaagagtatctccatcaaggagaaacccaaaaagtttctcgaacaagaaaaatattagtattttattataattttattatatgattaaatttttattttagtgtaaaaattgaatcaattaaaagaagagaaatgtaatgatggcttgtagagagtatctcatagtttctcacttgagaaactttctacactctctcttctctttttattatttctgttattttaatagtgaaaaactctcttgagagattaccaatgtagatggtctaacaatacatagtctttgcaagccccagcgcaattgcaatcaaattcaccattatgattgttcatggatgaaccatcaaaaagcttcatatcacaacatccaaaaaatcatccataaaataataaattatttagactaaaatatataattattttagacccaaacatacaacaatttttagtatttttacccattgtgatttagatcaaaactacacatcccaaaataaaaccatggtaggcccatcattgactatgtacaaatgtgcgttgacctttttctcgtatcacacaattctctccgaacccaccaaattaagaaacatggcaaaaactaggaataacctaaaaatagaatgaaagaggaagaaaagaacttaaaaatagaataacagatgtaaaagaagagttggataaaaaatagaatcaacccaaaaatacatttctcaaagctctttaaataaccaattttcaatttgtttgtaacaattaataaccacgagaagagaagttgagaaagaaaaaatagtaacgatg

SEQ ID NO: 8009 - DNA, 3000 bp, Unknown; identical to SEQ ID NO: 8004
  misc_feature (1)..( 3000): cDNA_ID_1810077_gDNA_ID_1621182_Annot_ID_57399 3000 nt of promoter + ATG

SEQ ID NO: 8010 - DNA, 3000 bp, Unknown; identical to SEQ ID NO: 8003
  misc_feature (1)..( 3000): cDNA_ID_3000117_gDNA_ID_1621182_Annot_ID_57400 3000 nt of promoter + ATG

SEQ ID NO: 8011 - DNA, 3000 bp, Unknown
  misc_feature (1)..( 3000): cDNA_ID_1813843_gDNA_ID_1621182_Annot_ID_57401 3000 nt of promoter + ATG
ttagtagaaaacttgtaagtctttttgtgcttattctatatcttggtatgttttatatcggttatctgacatttgtgttccttgacgaatacttaccttgaacaaaagcagagactttacaaggatgagtcatattcagcattttctccagggactaggaaatacttacagtctctaatcgatgagccgttgtctactaatcatacatctaaaagtgttctggacccattattatcatttatatacaatccgccgtcaccaaagaagtccaagcttgtacaacctgattcatctagtgaagcaagcatggaagacaatagcttaataagggattcaacagaaaagtaagtaattctttgacattttcttgattctgcttgctttatctcatcttcttaaaccttgtctaaagatacatttcgtatttctgtgtgctcagagactgggaatcgccgtctcccttgtcagatacagagctactagagaaggcaaagaagagagagtttgtacaaggtttaatatcatcagccatatttgatcacatttacaacttctaagagcataagtctttgtatatgaaactctcgcaaagtagtctgtactctgtagtataagccaatgagcttctgtttatcgtcaaacttctactttgcttctttacagctcataatcctcaagtcacttgaggtcggagtttccttaacaaccacttcttgcgtagtttcacatctagagccaagaaagttttcgccttgagtttatcttcaagcagatcacaagcatccaatataagttcatcgtccatgtctggtaacgcttgaatagcctcaaccgtgtcctctattgacatggtttgggtttcatcaactcgaggctttttcgggtttatagggcttgtatcagtattagcaagttgatctcttttgttcttggggtcaaacaaaagagagttgctatcttcttcctcagctgaaatagacaaatctgtagtaccactggacttaaattcttggaattcagtttcagggtcaaaccaatccatagctacaaagcattcgttttcttcgatcccagaatcgccacagagcacacacagatctttatagtacggaattggccgagtcataaattgccttgcatctctatgagcctgtgattaattcagacaagaacacacatcaaaacagagacgaaaacactgtaactaaccacacagcatagatcagagcgattaagttacctttatatagtcttgccatacattattatcagctgtaaccatttgacgctcattatcccaagcaaacccatctgatcgaagaatactcttgatcgcgttgaactgtcttctcagagacttataccggttcttcaacacatcaacatcaaagttagactcaaatttcgcattgaagagattaaccatctcagtccatgcttgtttcctgaaaacaccttcaatctggtttcctctcctcgcttggtccaacatcagatcaatgaaataccggtccattggaggatgccaagtagtcctgcaccgtgtgacactgcttccttttgagttagacctgactgttgacgattcacatattctgttgtacccatcatcttcctgaatcagtgtcttggattctccctcactaatactctcctcagctgaaacatacatattcattcacaggttacttaagaatctttgatctttggtgacaagaatgtacaatgaaggattcaagtaacaatcaatagattaaagattgtacctttgtgctcagacattccatctgagtaaaccaagcacagatctttgtaacaaggtatagactttatccgaaaagatctcgaatcaggatgaatcttcaataacccaaaagcaaaaacaaatcaatccctgagaagaagacacaaaatcacaagtaaacaaaacgcaaaacgcaccttaagatactcatcccaaacgcagttatcagcaacaaccatctgtctagtatcatcccaactaaaaccatcttctatcaaaagattattcacagatttaaacaagttcctcaatgtcttatgcctgtttttcaaaacatctttgccataaagaaacttgaacttggcagtgaaggaacaagacatgaacttccaagctcgtttactaaacaaatgatcttcaaatctgttgccttttctaacttgttccaccataagctcgatgaaatactgatccatttcaggtgtccacactgttcttaatctctcattgccgtttctactgctcattatctatttctcccttcttctttacctgcaaaaaaatcgattgcaagaacacaaatttgaaatcgagaaatcaagttataaaatcagaaatcagattctcgtaagaaactggatcagacccataatagagattcgactaaattagctaaagagcagagaatcttcgcttacagagagtcagagctccggtgaacgggagttggagtaccggtgagattttaaggataaggttgtccgggataaggttatacttttattcgtaaccaatttagaaacctttatgggcttatattactttattgggcttagtctattataggcctatgttaaacgacatcgtctattctagggtttgtttttgggccagagtgacgtttgttttcctttcgtcgtcgtcgtcgtcgtcgtcttcgtcttcgtcttcgtgaaagatgtttacaaaattttgctgtttaaattgatagaagaagattcgacctttaaaggctatctgaagaacatctccatcatcgcctggtgttgtaagtttcttttggattttgattcttgttgatactgactagtgagctcatttttaacatttgttcgtaccaattctgggatttgtaattagctgagtattgagctctaaatcttgaaaaattagtgagtttagtattttgcgaaagacccattaacagattatgatttgtgcgttgtttcttgccaaatacttttgagaggtttatg

SEQ ID NO: 8012 - DNA, 3000 bp, Unknown
  misc_feature (1)..( 3000): cDNA_ID_1810073_gDNA_ID_1621182_Annot_ID_57402 3000 nt of promoter + ATG
aggaaatagaggatcctaagttgtctgactgtatagttgaacccagacaaactcttccttgtaacttaagctcgagtcacacgagttctcacaagtgtacaccacgattgttgcccaatcgagagattccctctcgttcttcccaccgaagaagaacagtagctgcggcatcacctgataaaaccgccatcgaaatgatcaagaacagagccaagcttccaatatgcaagaacagagaaatgaaatggggaaaattgtgtgttttattggtttaaagttgatttgattcagctaaaattgttggccaattcttgactggtttataaaataagcaaaagaagtgactaagaccaagctaatacaagtttataaagaagagaagaaagaattacctgaaattcaaaacaacgaggaccaccacaagatttgcaactgggaagctcagatttagagactcgtccgcttgctattggccaaaggggtttagcaccagagctccgggaatatctgtatcaatacgtatttcacaaatcgatgttatgggagaatcaagatcaaaagtatgcagaaaatcataagcgtttgaatcacacctcagaacttgttcaggggctttgtctacgcgttgctggaaattaacccaattctttttatcagcatctccctgtacaagcatggaaaatgagaatcatttgaggccttttgaagtttgcaaaaatggccatgacaagtgaactgtttacctcaaaatcgttcattagcgatttcatttggtcgtcaacttctctctttgagaccaaaggtttagctacttcatcatctcctgacatctcagtatcatactcactttcatcctcattgatcaatacaaattctttccataaactcttactcgcaactgcacaaaccgaaaaattcatatcactagttatacaaagtttcagggctaggaaaagtttgtgaattcagctaacctttctgcttttcagttggagcaaccccattattgacagggcctgagtcagatgtttcgctaaccgttcgaagctgttggcattcggttttatgacccaagcgccaatgcagggcctggaaattagaaacaacacagattgttcaaatttgctcaaaagagcagaatctagcggaacaaaagaaactacgatgcacatatgcacacacctggtgtttcggtgaacagtatcgagcatttttgcagccgctacatagtttatctcctttccatgttccacaccaagtgcaaagcggagctaaagtgaaacaaacaatatcaagaattgacaattaaaagagaattctcggcattcagtcaaacccatcaatcagttcataatacctccatgacccaatggcttgtctgttccatcgtgctttggagcctcactcgagtaaaaaggattagctcgaggcaattggcaacggaaaaccttcgtacttcaggaacaaaaaaaacagtactttagtgtaacaacccacttggagaggagacaaacaatacaaagatgcaatatatagtaagaggtttctttctacctccgcatagccttctctggggcacgtttccattgttcatgttgatcacgaaggagacaagacatagatggacacatgaagagaaacaatgtccgatgaaaagctgattccttgtctgttaaaggagcataaagctgccaaatttccacaacaaatttcataaataaaccgacaaaaaacatgcaagaaacaacaaaatagtttgtatgaaacttacttgaagtacaaattgcataggttcttcacatagatcacatagaattgacttccctgatggtaaattaactggatccaaccatgcctatattgacaaatatcaacccaaagaatcaatacctaagaacataaagaagaaacagtttttgattgcacaaattgaaagatgttttaacttagtaccggaacaccaccagctaaattagggaacagttgacgaagatttgaccatgcgaatttaggactctcaacgaaacctaacatcacaggttcataatcttcatcatcttcctcatcatcatcatcaaattcatccatatttataggttccaccgcagtttcatcatcgtcatcatcatcaagctgagttattcggaggcctttgaaatcatccatggagtctccgttgaagctactcatcgaatcttctgtgttgaatttgatgaaatgaagactgcataacagagcaaaggaattgaattctagggttttactctgtttcataaacctctcaaaagtatttggcaagaaacaacgcacaaatcataatctgttaatgggtctttcgcaaaatactaaactcactaatttttcaagatttagagctcaatactcagctaattacaaatcccagaattggtacgaacaaatgttaaaaatgagctcactagtcagtatcaacaagaatcaaaatccaaaagaaacttacaacaccaggcgatgatggagatgttcttcagatagcctttaaaggtcgaatcttcttctatcaatttaaacagcaaaattttgtaaacatctttcacgaagacgaagacgaagacgacgacgacgacgacgacgaaaggaaaacaaacgtcactctggcccaaaaacaaaccctagaatagacgatgtcgtttaacataggcctataatagactaagcccaataaagtaatataagcccataaaggtttctaaattggttacgaataaaagtataaccttatcccggacaaccttatccttaaaatctcaccggtactccaactcccgttcaccggagctctgactctctgtaagcgaagattctctgctctttagctaatttagtcgaatctctattatgggtctgatccagtttcttacgagaatctgatttctgattttataacttgatttctcgatttcaaatttgtgttcttgcaatcgatttttttgcaggtaaagaagaagggagaaatagata

SEQ ID NO: 8013 - DNA, 3000 bp, Unknown; identical to SEQ ID NO: 8001
  misc_feature (1)..( 3000): cDNA_ID_1810069_gDNA_ID_1621182_Annot_ID_57404 3000 nt of promoter + ATG

SEQ ID NO: 8014 - DNA, 3000 bp, Unknown
  misc_feature (1)..( 3000): cDNA_ID_1810137_gDNA_ID_1621183_Annot_ID_57408 3000 nt of promoter + ATG
gagttaccagtaattagaaaactttgcaaaaaccaaaaaagaaaaagagtgattagccaaatgcactttcaaatagaaaatcaacaaaatacgcaaatatagaggtttaccatatatgtaaaaaaacatctgaaaaaagttcgtcacaataaagagaaaattttggacaatagagatattgacggagtacatgtatgtgatattgttgcaaaaggatagcctcaaactcatattcataggaaaagaccacaaactttatttgttatgaatccatttagttacaacgtcatgttaagtagattcttaaaaaactatagaagtaattattatcctaaatagtatcaacataagacaacatattcgattgagataatagttggggcagtccgtagtcgtcagagaaagattaacatcacatacttttttggcttatcgttcacttttcattttaagtggtagttgggttttacactttatatattgaacctagataacaactgttgtgaattctctgtttttgattcgaccctcttttgaaccatggttatataattgttctcgacagacctcaagatttttttgttttaaactgattacaaaaatcttatatacacatgcacatagtaaagtctaaaccaaagcaatataatagatataaatgttcagtcagagtttctattatcaatcttgcaaagaaatgaaaatatctttcgatagatgaagattaagattcagacaataacatgcaacctttttctttccccccaaaaacacatcgatcacccaccatcaatccatcatggatcgatcatccatttagggacctatttacgtttgattttttttttcctataactttctttaataaggacaacaaggccaagatcttcatcgtgtgtttcgtgtgtctcaaaatccctctaaactttttattgtagtttggtgagacttgtttggtggtgctgatgatgatgagagagagagagagagagagcgcgcgaggaaatcatggctggtaaacagaagaagagacatgatgattactgattgaaatattatatatgtacaccattgaaataagttataaaagtgtcgtaaatcgtcaaaagaatcagtagtatatatctactctatatgatctatatacaccattcatatataaaagaatcacaagtatgttattgaggatgtgtgtcaatgaagccctacgagaaaggtctgtgcactaccaaaaaagagacacatagtttgtttgagtttttttattgggttcatttgttaaatttatatccataaatacctccttgaggtatagccgtacagggtttttttgcagttcaagatatggcatttgtatgaaacttatatacccgccaaaaaaaacatacctaggtcacccgtgggtattttttgattgggacaaactggctgtagggaaagaaaaaacagacaacgttaggtgccttgtctctcaaatcacttatcaggactcaggagcaataatttgttcgaaccaattgtacgttgtaacatctaaatgggtccataacaatcagataataaaattttatcatctttcttaatttatttatttccaaataactttctttatcatgtttcttaattacgttgatgcatgtttagatagccgaaacaaatcactattactttgattcttattatttatttatcaatttctggattcatgacatttgaaaaactaaatgatgtattactgtgcatttgcaattcaatcgatcttaaagtcttaaaatcaactagacgataaaacggtctatttccctatagaactagatatatatactatgcattgtgatatagaattaagagattactgtttctttggatgtatgatcttttatcagaataaacttcttattttgtcttcagaaataatcttgacttcgatcaatcattatttcgtaagcgataaaaacttctgattatctaccaaaaaatgatttcaatatattgtgacattgttgcaatacgataaccacaaactcatattcatagggaaatgttttaacaaactttgttacaaattcatctacttacaacgtgatgctcaatcattgatatacattataaaaagaattattatcttaaaatagtatcaacataagacaacatgctcgatcgagataatacatgtgccagcgcagtccatagtcgtcagaaaaagatcaacatcaaatactttttaggcttatcgcgcacttttcactttaagaggttattgtgattacactttacgtattgaacctaaatatcaatttcacagttggaagtttacaaaaataatgccagtgtcgatcctaggatgatgcgaaaccaaaagatgatgttacatatatatacacatgcacatttagtattctggttatcaagataaggatgaaaagactaattaaaccaaagcagtgtctatgacattgcaagcattctccaacccataagacaaaattgattctacaaactttcatatcatcagaatctatgaaatgaatcaacaactatcacatctcagcagcaaagttaaaggactttccacatgatctatatttataagggtatcgttaagatcttctcacatgtgtggcacgtgacatatttaatattcttgatgggcttttctgttttttatgggccttttcgaatttcagggttttaaataagttagaaattagataaataaaaaacaaattagcaaaaaataacgaagtgtctcgtctcttctctcttgtcttctccagatcagtgtttgtggggttttcccaatggagcttcttctctcattgtctctcctcctggggttttggtgtaacaacaatcctcaattcacgaggcatgaatcattattctccccatttgcttattctctggctagaatccccagattttactgtatcgactttgggaatttaactggagaaccatttccactcaaactgggaaacaaaaacctgttattgaaca

SEQ ID NO: 8015 - DNA, 3000 bp, Unknown
  misc_feature (1)..( 3000): cDNA_ID_1807326_gDNA_ID_1621183_Annot_ID_174344 3000 nt of promoter + ATG
gatatcataaaagagaaaaaatcttgttttgttatttaaaagattgagtttgattcatacaatgaaaagatacacccatgtatgagtagaaatccgggtttccggacagagaaggtttggatttgatgttagtgacagaagccgcatgatagtgtatgactcctacaaagtcacatgagcctttaacttgttctgattctttctcagagaaaactggcagtcttgatccaatggttcttttcattgtatcaggatagtctccaaataaaagaggtctaaggaacctgagttttaaagagtaaatcttttttattgagatatgttgaacaatattttggaacagtttgtgcctgactcaccagccgacgtagaaatcttgggctctttgggttgcagtggcatcatccttggagcttgtagtaggaataagccctaatatgaataagctaaatcctatggaacctccctgcttatcctgcatattatatatactttatagtgtgtttcttctcacacattcaagagagggttatgtaatatataccttgtatttttgtttgtatcgtcttgaaacagaggcgtgcgcaagcaacaaattatggcctacaatatatggttcaatggaagagttccctgaagaacagtttttgctcggtttggaacaacgaccaggcggtgtatccccatcgttgtaacctcctatagagaatatattagcctcgttgatcgtggtccatagtttgacatggttcccaaactctctgaagcaaacatctgcataagtagtaaagtctttgctgcaatggcaaataacatcaacttttgttattttatcttaaactacaaaatctgtaagagaaaataagtaacgcctacatcattctgtggttgagccatcctccatattcatcctccagagactgaggatgatcatagtggtagagtgtaacatgtggttcaattcctgtagtaagtctacttaaactctagttaatacgaactaaacctaactcttgagtcctaccgtggatatgaagataggtcttaccgtggcttactaactcttggatgaggttcttgtagaactgtagacccttttggttaacaggccctcttccatctaatcagataataaattacgaactgatcataaatttgatcccttcactgagctataacatgtttaagaaaacttactaggtattagcctagaccaagagatggagaatctgaaagcatctaagttagtgtccaccatcaacttcacatcatcctgtataaattcataatgaaactcaggcttgatgaataaaacctcatgatgtagtcagagaaacagagaagctaaagaaccttgtacttgtgatacccatcacatgctatatctccgttaccttggtcacctgcaatgttagaaacaagaatcaaagcacaagagtgacaaactctaatactaataatagtttgtgttaaaatgaaaagcttacgagagtgacaaagagtgtcccacaggctaggtttccttccgtcttctgcagcagctccttcccactagtagagaccaaacatttggttcagttttgttcaaaagttaagaaaaaagaagctcataaattggttccaaacctgataagcagaagtgccggctccaaagacgaatccctcagggtagtcagatctgctgaaaacgtcgctgcatttcccggagaaagcaaaagcaagaaaaatggcaaacagagccaaaatctgttccatttctcacacacacacacactcttttcttcgttccatgttagaataagtaagtccagtagccatttgcgtacccgctagatatagttgtgacgtagacattaatgatgatgcaatttagataagaaacatattgggaagtgtgttgaaatgaattatggtctttatttactatgataagaaacagattacgctggatcggagcccaggtctgaccaacccaaataacgaaagaaactaggggaccggaaaaccatgcggctatgcagccccagccccacatatatgagggcttttgggccaaaaaaatatttttggactttttgttacatttcaattttttttgggtattcctaaatttttgttaatagtatggactatgatataataacttttgaggtattaaagtaaaaatatttggtcctcttataaagaaaaaaatattttatttcataaaacttaataattattacaaagcataaaatattaaacatacattatcttaaaattttaaaatagatgtgaaaaaaacggaataacgataagtttttctgttgattgttgcaaatttcaatatacgaatacttataacgatgttttgaattgaaattttctacgaatacttataacgatatatatagtaaaagagaaatttcttaacttataattaaacaccattaagtaatgtatggaggattaacaaaattggatataaaacaagaatgtataatgttcattttgacgccatttcttcttcttcatattttacaatttacactaaacattttcccaaattcagctcataatcaagtgcgcctcatattttcgccaaattcatctaattgaaaacccaaatttcaatatactcatgtcttgtgaagcaaacaaatctcttatttcgcatttctttgggcttcgcaacattattgggctttgtttggggcccatttagaatgaagaagtactttagttaaaaactcagataaacctagccgtcgtcaccgtcaccgtctccgtcgaaatccccattacttacgacaccgcgagctctcaatcttcttcttacactctattgcttgtgtttcctcttcactacaacagtttcgtgtaccaaaggcagttctttcttttgtcccaaggtaagctttgtgattccttgagactgtgttgatgaagcacagactcagagacttttggtttatgattctctttatctttgtgacatgaagcagagctaaagaaaacatg

SEQ ID NO: 8016 - DNA, 3000 bp, Unknown
  misc_feature (1)..( 3000): cDNA_ID_1380539_gDNA_ID_1621183_Annot_ID_174340 3000 nt of promoter + ATG
cctccaatctatttccgtttttattttcttattattcttaccatttacacatttttaattgtttttttctatccgtatagagagagatgtatgataaattaaatgaagcatctattattatttctacttctagtccctaaacctatctacgtgggcacacaatcttcgtaccaaaatgataaaagttttccaacgtacactttttgttgttgttggcttcaatgtatgcctatgtggaccattatgcttcatggagaagtaattatattttaaaactggatatattgaacaaattaaatagaaatctaaatgttttaagagaaatctaaaaggggaatgtttcaaagctagttgttaaggtaccgtgaattatctagtattttaagagaaatcaaagtctgcatggatgatggatagagtagaaacattatgatcaagtctttgttatgattctcgattataactctagataaacaaacttggatgtctgcgagaattggaagattatgttcattttttgtagctatttggcttttaagttccgatcgaaaagtgatttatctaaatgcaagttgctaacctttttgatttacgattttaaacaaaatatttggatttgtatttgtatttctgtttagtaattttttttcttgtgcaatatttattttagcaattgaaatattaattttcatctttatatgaaaacaaaacatgttattattcactaaacatcacataacaatattggcgcaaatatgaaaaagttagaaatatgtatcaagcacttgttttataaagccttagttagatattctatatatatatatgcaaaagtaacaaatagtttaaatgatcgaataatgaaaatattttatctgaaaatagcttacgcatgataattatatttataataaaaacaaatgagcttttaagattaatgaagtctaattcatttcttaagttaatttttaaaaatattaaacaaaaaataacggcattacgtggtgagataaaaaaatattgatatatcattcaccattgacgcttattagctcttattctccaaaatcattaaagatgaatttaaagtcgaaaatcacattacgaggcctctcgggtgaaattgatgttgcagatgatacaacagtaataaattaaaaatcgtagctagctttgaccaacataagagaataatcattggacttacatcttagtatattttattaatatgcttaagtagatatataaagttcgattatatgtttcaatatccttgtccaaaaaagaatcatttaattcgtcaatactatcataaggatccatgtgacacatttgaattagttctaccgcaaactgtgggtcctttaagtactataattttcacaaacgtaacatctccttatgtagagatgtcttgttaaattcctaggtgtataatgatttggattttgatttgacttaaatatcatgtgacctaaatacctgtataatgtcgttgattaaatccttagcatcatcaatgagattttgattcctaagaccatgacatgtgcataaatcgatacacacatgcctatacatgtatatttttgactttttgtgcaagtaaaagttttcgatttttttttatgtattgaagtatgaattctcgtggatgtaacatcaattttctaactagtaaagtaatatggtacatgcacgagagttcatactttcgagtttcaatacatacaaaaaatttagcaaactttattagtagactgaatttaacttttttttacaagagaattaggaaagaaaagaatagaggtgagagagagaaattaaaacacatgtacaaaagaatcaaaaaaagaggtacagttttcgttaactgactactgaactgaaaataaatgaatgtgttgttggtaaaggaaaaccccaaacctttatttcataggatttgaaattaaatcaatttggcagttttgtcagaaaaataaaacacttatttgaaaatgtattcattaactacatatgattttcaggtaaatagacagtttctcatttagtgtaaaacccaataatgatgaatatggtatctctacattataattagagttcaaggttgacatagtcataaaacttgcaaatttggtattcttggtaaagtatatatctggtccggactatcaatagatttaatgtgtatattcatgttaaaagatcatgtgtagctgaaaagatatcaagtttacatgaggataatctaattgtattttgttaaatataatctagttgttgattgatctgccaatccaaaaatatggcgaacttgatatacagaatatatagagactacgcgatggataacacataacatgtatttatgtctacccatactacaatattgtacatgttgttctattgatttctccttgtaaatacatgcacaaacatgaatctgaaaattgttcttaataatattatttaaattttaactcactagagacaaacaacaaggactatactatagtatactattggagaagttacacacttaaaatggtttataaacaaactaaaaaagtgtcatcaaataagcaatatttgaaatgctattttaaatatttatttagtaagtatcaggacgtctacttagagtttttcatgcgtcataaattatgtgacatttacttacatgcgaaagaaaaaggagtaaataaaacacgaaaaaagtaacgttaggtaaatggctaaacacgaggaaaagccaaaaatataaataattcaatttcttatctccatcaagatttaataaaagtaaataaaaattaagaaataaataatgaaaagatgctttggggagtggatctataaatcttgttatataaaggaggatagatagtgagggttttctaccttcttctatctaaaggaagtctttactcagagaaccaaaagaaaaataaagagaaaagaacccaaaaaaaaaaagccattgtaaattcagaataa

SEQ ID NO: 8017 - DNA, 3000 bp, Unknown
  misc_feature (1)..( 3000): cDNA_ID_1810125_gDNA_ID_1621183_Annot_ID_174334 3000 nt of promoter + ATG
caatgacttccctcatcatctcaagggtttgtctcgtgaggagttaaggaagcatctccttcaccttgactctcaattacttggagtcagggaacaaaagatagaaattcttaagaagacgctcacgggttcttccgaaaaagatggtgcaagggtttcagagaactcggccatctccgatcacaagttgaagatagagcctaatttgacggatatattgtcagaagatcatctaattagggtttcagataagaagctgggttcgtgtgatgtatttgacgagttggcttacgtggtccgcgggtcaaggaatttgaacgagaatgtttccaattacgaatcaaaagatgcagcttacacgggaatggatcatcttggcactttcggcggtaattatcttcaggaggcggcggcagaactttaccaaacttacaatctagggaatttttgtgatgatcatgtttgggatctggagtttgcctcaagactaccaccacttcatacatttagcgatcctctcatgaccaccaatacttgccaaacgatgagctccgatatgatttcaatttgataacttgatgactacgttagtgaaatcatgtttctttcaccttttctcggtgattgatcattttttagtatctcttaacttgtatgtttgctccaacacaaatccatgtttgtaaagttggtagttttttttcttgtttattattgattaatcaaacttttcctttctttctgttattctttctctgtaaccctattttgactgcaacaccaacttatcagataaacaaaacgttgtaaaccatgcaagaaacaaagagttcataacctaaattgcacaactcgttaaagcttctagagcagggaatgaaagttatacatacttgttcagatgttaattcactgtcaagtcttggagatgccttgtttttaatgacggatgacacgttctttatgtcaatctagtgtttgcttcagcaagtctttctgtccctcgacctcgtgtttaccaagtcaacattcctaatcagcattctcataattagaacgaacttcagtggagtaactcaactgatcaacttgtgacgtaaacacaaaataaagtacccatgaaactacatataagctttgttcacgatcaaattcataagcatatccatgaatcaaatccccaaaacttcaattctacaaggcttgcgatgcaatataattattactctatatgctatttatttgattgccactgatttggccactaccacaagttttaaaaaatttgagataaaaattggcacatgttctccctaaagtaactgttagaacgtgacgactagtagttaccaatgaaaagttggcagacgttcttgcaaaaatattagctaatggtgagtgactagcagctgccaatgacaaagctaacagtttttttttttttttctaaattatctaaagacaaaactaacagtaagtccccaaaaaataacagttagttgtgaaactatatacagtatactatcaattagcgactgctagtactgtcgaaccgacgactaacgtcagctagttgaagaacttgccgtctcttctggaactccgttggtctatttttcagccaaaacacaaaaactaaaaagttttaagtactgatgttcacagagcaatgatttgtcaaatttttcaagtgaaaagtcctcccttaataatactgttacttgtaaagtttcaaaagtcaaagtggttgtaacttgtggtgtagtaaggtagagttttacgctaaataaaaacatcccaaaactgattataaccccattcaatatggttccaatttagaaaagtatatagtattaatagagtaaagtgtggggatggagtcattaaaggtagaagagaagtatgcatgtctacggattgcttcgactttacgttatgctaaagtatataaaggtgaaagaagcgactgttgaatttatttcatttttcctcaattacaattttttgattaactaggttctaaattgacggtcatacaatttctaaacacataatattttttgaatattttatccgtaccaacaactatcactcgattctgtcaactcttgaaatattttcaagtttctttaccgtcgagttatcgatctctagttccctctattacattttatttgtaacgtccagactttcttaacttttgtctttcaaagtgttcttgcattatttctcctaaaaactttgtcaagcttctgtatttaacgtgattttagcgattaaatgtgaatttctatcttgatatttgtgattaatggaagagagttgagcaaagaagatattcatttttgtgtttcattctgtctgaatcagtatacatactatttatgcgtgtttccaaaatctcttgttttattgatatcaaatacgatttataatatactttaaatgtggtccttaagttaggtgatgttgctataaatatacaaactctatattaaaactaaaatttaatacttttgtttgtatttgtaaatttatttacctatttctttgtttcacaatttatgctgttctatattatattcactagaatttaaaagtaatttataaaaatagctcttttcctcttcctcttcacattgaagcttttatttttcttataggtttcgtgtcctccaagtggttctttcttctcaaaggtctttaaacgaaaacgcgcaaaatcaactttttgacgttcttgctttatattgacggtttcttacttaaattccccgacaaatgtctttctctttttctagcttcatcttcgtcttctttcactttctcactctcatttcttaaaccctttttcactttcggtgtctaggtttggattttatcttccaagctcctacaaacttaactcgttcttcaagattccagcataaagactcaacctatctctgttttttcttctcttgaattgcttttgggtttcatcagaagttaaaggaaatg

SEQ ID NO: 8018 - DNA, 3000 bp, Unknown
  misc_feature (1)..( 3000): cDNA_ID_2152445_gDNA_ID_1621183_Annot_ID_174332 3000 nt of promoter + ATG
acgagcccagtagattccacaagcaacaacttattggatcctaggagtctccatggtcctttccatagcgctaattgtcttctttgttgacaagaccaaccatttgcggtatgaaagtaacaagcaaaccaagagtttaagtccaagtaacaagtgagaattcttcacaaacggatgatggtgttgtttctttcctctatatatttttatttatttatttaatgcttattttttcttattgttttctctcttattcttaacttttcttctttttcaagaacaatgaagttttttttcttcttatgtgattttcatctcttacaaaatttaaatctggttttgaaatatatttgatcaattgtatgtcttttggtccacgacgttaaatcggctacacgtcattatgattttggtccacaatcttctattcgatctaatttattactcattcgctttgaatttgttctcaatctaatttgactacttattcgatttgaacgtatcccctatctaattctattagtcattcgatatgaattttttctcggtctaattgtattagtcattcgatatgaaattttcttcaatataattgtattacccattcaatataaacttatcctcgagttaaattctatcattcatttgatatgaatttgtctcgagtttaattttattttttcctcatatgtccttcggttatttcaaatcgtcatgtggacaagtattctagtactacccgtaaggacaaatttccaaaaattgtcccccctccccctccccctcccgatatatgattttgtcccccaacgatgataaagataaatagctaatcgtctattctaactgatccattgcatattccaactggttgtccatcctaatcattcgatttaaacttgttgatgcttcactcttttctctatcatcacttttgtccctttatctgataaacagaaatcatgctctactagcaagggtaaatcatcatcaaactatcacattactacaaaatgtgatagattcataaaagaacaaaagaaattgatagatttggaaagtttccacgagaagtggtacatctgactaaaatcacatttgttaacatgcttaggcataaagcaaattaaacattaaccaaacaatctcatcggagtcatcatgcatagataaaaacacctttgatgtggaaaacaaagaaaaatgattacacatcacatgaacttttgacatctcgaatgattaattctttctcggtcaaacccccaagaaatttataaaattttacatattaatatctaataagcaaaatgattgatagtggatggatgaaattcatgatgatgatatcccgagtcgaatcacagtcaataccctagtttagtcgcatgcccagctatctttattagagtttagatcataattattctcagccctttcatatttagtctatataaatagacaaaaccagattgtatataagtaggggtgttaaaatgggtcaaaattcatgggtcaactcaactaatgaaccctaatgagttgaaaattttgactcaaatgagttgatgggtcaaatgagttgatgagtcaattggtttgatgagtaaaataagttgggttgtaatggttaatggtttcaatggtttacccaattaacccatcaaattttgtaaaattgaataaaaccaactaaaatctcaaaaccaataccaatttaagtttaaccaacacatctaaaccaatttaataaaattaatatttttccaaatttcttaaatatacaagcgatgaaattgagaaaaagtaaactcgtaatttttccaccaaaaaacataaatccgtgattttcccgctaaaaacgtaaacccgttattttctcgcaaaaaacgaaaacccaagattttcccgccaaaaacgtaaacccgagattttcccgccaaaaacgtaaatccataattttcccgccaaaaacgtaaacccgtgattttcccgccaaaaacgtaaacccgtaattttccagccaaaaatgtaaatcccgtgattttcccgccaaaaacgtaaactcgtaattttcccgccaaaaaacgtaaactcgtaattttcccgccaaaaatgtaaaactcgtaattttcacgccaaaaaacgaaaacccgtgattttccggccaaaaacgtaaacccgtgattttcccgccaaaaacgtaaatccgttattttcccgccaaaaacgtaaatccgtgattttcccgccaaaaacgtaaacccgagatttcccgccaaaaccttaaacccgtaattttcccgccagaaacgtaaatatgtaattttcccgccaaaaacgtaaatctgtaattttcccgccaaaaacgtaaacccgtgattttctccccaaaaacgtaaacccgttattttcccgccagaaatgtaaatccgtaatttttccgccaaaaacgtaaacccatgattttatcgtcaaaaacgtaaatccgtaaaaagtggaatccgtaaatatcataagtttgatgataatgaattaataatgataattatttattattgttttataataataattaattaaattattacttcaataggttaatccatttaacaactcaacccatcaaattaaatgagttatgggttgacccaactcattttgttaaatgggttggatcaacccataactcatttaaccctaaactcatttgattatgagttgagttgagttgggttacccattttgacacccctatatataggttttcatttttttttaggcatatcctatagaggttatgtatagttagggtataattgtaattagtattaccctaatctctcgtgtatatatattgtaatcacaacctctaatgataattaagcttcacactctatatggtatcagagcattacgactctcagacctaaacttttttttttaacgccgcctcttcttcatacactcttcttcaagtctgtttcatttttcacgatg

SEQ ID NO: 8019 - DNA, 3000 bp, Unknown
  misc_feature (1)..( 3000): cDNA_ID_1011951_gDNA_ID_1621183_Annot_ID_174330 3000 nt of promoter + ATG
atttggtacccattgttataatttcagtgttaaacgttatctatacaaatgagcaaaagggaaatatacacacaaaaaatcagtactaactatctttaacatcattttttcaagtatatgcatgatgtttatatcgaattatgggtagttggacaaaaataaacctctgtaagaaaatatcgaaaaaatattagttacctatcgttacgaaattgaaacgttacaacttacaagtgaaaaacgactcgaaaaatattactttgaaaatctgccgtttcaaactaatatttttctccattcttacaaacgttacaaacatattaaattataaattaaacaaaagaagacaacaccttacgtttctttttcagaaagtgcaatttatgtaactgatattttttatttgattacacaaaaagaaacttattaacttcggaacgataagttattctttgacagtagtagtataatcaagtcctaaataaaagtcaaacgctacaacattcgatgattaactgctaaaaactatggtttattggcttatcacatgatctaaaacgagtaagaaaattaaatgcaacttaaattatatgaatcagtaagaacaaaaacaatgtcaaaatcatcggtccctgatctccggtgccggcacccacccgttcaaatcaactatttaatttccgaccatcctattactctattccattaaatttttaaactccaaaaataacaaaaattaaataaagtaaacgtcagagatgccccaggcaaccacagtcaaatttgcaacaatatggttacaaatctttaaataatattattattcttatcattaatcaactcccaaatgacagtccaattaaataatcacaaaacatcataaaagtgaccaaaattaaataataacaattgttttttgggtttcacatgttttataagcaaagccagtgtggtggacctaactcttcacgctgtcccgaaaaagactcttctcttctctcttcctctttccttcacacaactctctcattctactctctgttttttttctttaatcataacatttttttgaagaacagagattctttttgtttgtgtaagagatgggaaattgtcaagcggttgatgcggctgcgttggttctacaacatcctgatggcaagatcgatagatattacggtcctgtatccgttagtgagatcatgcgtatgtatcctggtcactacgtttctcttattattcctttgccggagaagaatattccggcgacaacaacaacaacagatgataagagtgagagaaaggttgtgaggttcacgcgcgtgaaacttctccgaccaacggagaatcttgtacttggtcatgcttatcgtctcatcacttcacaaggtttgttcttgtatatttgtttttgtttagcttgtgtctgtttgtgttcttgtaatgggtttctgattaaattagcgtttgatttgttttcagaggttatgaaggttttaagagccaagaagtacgcgaaaacaaagaaacaccaaagtgaaacgagtaaggagaagaagaagccatcatcggagaagaagattgatgaagaatccgacaagaatcagaatctggtacggaatctttacttagaatttaagatatggtttagcttcaagaatcaattttcactcgaataattaaagtaattagtttaaagattttactctatttctttccccaaattaatataaaattatgaaaattaatgggtttgtgtttttctttgtataggaaacgaaagatgagaagcaacgttcagtgttaacgaattcagcttcatcgagatcaaaaacatggaggccatcattgcagagcatctctgaagctacgagttgatgtttgggttttacgtgagggacaagaaacgtagtctctgtgtgtgaatcattcagaagatggaatctgaagaagaaagagatataaacattattgaataaactcttctcttatgttcctttctggttataatttacataggagatgaaaattttatagattaagatgtaaaaagaactatgcagagattaagaactaagtcccttttttgtcctgttaatgtatatatgtgctccatgtgaagaaatcaatcaaaaaatagattgtaaaaacatacgtttttgttggtgtttactggtttacacaaattcttggaataaagttcaaaaaactttagttaaatgagtccaaaaacatttgatttagatggttatgtgaggtataaatggttgtaagaattgcattgagttggattgatcattggtaggtacacatcctttcatgcatttatgggatggttttttaagaaaataaccaattttatttgagattattagttatttttcttcagagaagtagtagactttctcaaaatttatatttctttgaatggaaaatcaaattgaatttacattgtcttttttttttataactacttttttcatttttttagcaaatagtataacatagatgagctaagtaaaccaacaaggatgggcatttgcatcaaacccataccaaaccaaaaaattgaaccgatattatgaatcaagaatttaagatatccttgaaataaaaaatctgaaaatccaactgaagccagccaatgtttttagactctataaaaagatatctgattaataaattgttacttttaattttaatttttttttaatccagaaaacaaaaaatcaatggtcaaaacatacatagaaatctcaataccaatctcaatttattctgaaatattcttctgaaaccagaaaccaaagaaatccagaccaaaccgaaataactaaaccggaataaaccccctatccagtcatagaaacacttgattctaaagattgcgatagccgccgataggccaatcactcttttggccttatccgaaatctttttgtgggcagaaacgtttgtgtcttaggccaatctctgtgtctctctgtccagagagaaatg

SEQ ID NO: 8020 - DNA, 1282 bp, Unknown
  misc_feature (1)..( 1282): cDNA_ID_2053649_gDNA_ID_1621183_Annot_ID_174325 3000 nt of promoter + ATG
aagcttcttacatgaaaaattgcttactcctatgcattttgcgagcccaagtctctgacactcctccatttcagaccacactacttcgaaatccattggcataaaatcatcttcatcaataggaaacttgtatttaccaggtttcgagctaaccggccaatgaattatataaagatcaagatagtccagtttaaggtttctgcaaaaccatatttgttacacaggtggtttacattaagttatgtcactcccaaaataatattcaatcatgaaacataattgacacggtgactgatagagaacctgatccatagagatatgtgaaatagttttctgtatttctcaatcggaaaagtgtttacaagtatgtttgtatacatctacactaaaccaactaaaccatatacaatcacaatttaacttaaccggaatcactaaaccggactatcatatatacagttcgaatagtgacacctactctcagtgattgaaaccgtgcattctaatttcatgtgaaaatcattaaggaatctaaatcttacttcaaactccgtttgatcgccggtacgacgagaccaccatgagcatcagcacaccaaagtttggtagtgacaaagaattcagatcgagatcgaactaagccgagtgaaaccgcctccgctaaagcttcgccgatcggctcctccgtttggtaccttggagaggtgtcgaaatggcgataaccaagcttaatagcctcaatcaccgtctctttcagcatcgttggttccggtagcggagaagcggcggttccaaaaccaagaaccggcatcgagtgatgaccggatggtccggatctgatggcgagcgtagggactgtggttaaagacattggttaaagagaagtcaacgaaagtgtgctctcagaaaatggtttctctcggtggcccaaagctttactcagtagccactgactaatgctagtgcctgataatattatattaatatactctctttgattagaaaagtacgtaagtcttcatattataagtttataacgctatataatttgactataaattgttaatagaaagtagtcatgatattatatacgaaaaatatttgaattagtattctttaatattgtttatttggaaaacttttaaagaataatatgttatgtaatttgtgctaaaatttcaaaattttaatatgtaaatcaataatgaattaatataagttgttttcagctttttctcaaaagcatgtcacgtatgagcattaacacccgtgtggaaaaatg

SEQ ID NO: 8021 - DNA, 3000 bp, Unknown; identical to SEQ ID NO: 8019
  misc_feature (1)..( 3000): cDNA_ID_1011951_gDNA_ID_1621183_Annot_ID_57410 3000 nt of promoter + ATG

SEQ ID NO: 8022 - DNA, 3000 bp, Unknown; identical to SEQ ID NO: 8018
  misc_feature (1)..( 3000): cDNA_ID_1810129_gDNA_ID_1621183_Annot_ID_57412 3000 nt of promoter + ATG

SEQ ID NO: 8023 - DNA, 3000 bp, Unknown; identical to SEQ ID NO: 8017
  misc_feature (1)..( 3000): cDNA_ID_1810125_gDNA_ID_1621183_Annot_ID_57413 3000 nt of promoter + ATG

SEQ ID NO: 8024 - DNA, 3000 bp, Unknown; identical to SEQ ID NO: 8016
  misc_feature (1)..( 3000): cDNA_ID_1380539_gDNA_ID_1621183_Annot_ID_57416 3000 nt of promoter + ATG

SEQ ID NO: 8025 - DNA, 3000 bp, Unknown
  misc_feature (1)..( 3000): cDNA_ID_1810115_gDNA_ID_1621183_Annot_ID_57417 3000 nt of promoter + ATG
aatttttttatgttataatgtaagggtatgttaaaatattattccatttaaaagaggcattgtaacaagaaccattctgaatctgtgaaagaaatattccatactagacgaggaaagtcctcgagagactaattaaatactaaataacataaaatcattctgaatctgtggaagaatcatatgctaagcgaggaacttcctccaaagacatgagactctcagtgtgattatgataatagcggacctctcttacatttttatgattaagcttccagaattcttcgtcaccaattccttcatataatcatatttgaccctccttactagggttctttttggatcataatataagacataaattgcttcagatgttgttgcagctgtataaataaactcaccagtggatcatgagtaatacctctcagcccccaagaaactttccagatcgggtcacgttgaggaaattttctaagtgaccgttcttgtttctcttcatcctccaaaacccaaaatcatttaccagagacgtcgtcagagcaaacccatgcaaattttccttcgtagttgaggaaaaatttgcaaagtaaattatcagccgctgattttcttattgtgttgaacttttcgtacctcacatcgaagctcataaggactttctcaacttcagaactatcatcgactccaaaaggtatactcgcttcataatacacttccccgttgatacatatactttgtattagtccctcggcggatagagggacatgtttaggggtattttgtgtcactctccatgattcttgaggtcccaaagtaaaaacaagaggatcttggtatctagagcatgagatgcacaagactttatacttaccctcgaccggatcatatcctaaagagctacattcaaatgcgacttttggtaaggtaacatgttgtctcatgattggattccaaactacaatatgccccaagaatctcccaaacatatcaagccatggaccgactgggaccattcgtgataatcaaatatgagagtgtctttcagataacgctccacatgtggataacatgatctgtccggattttcatgttggggcattgcgcagaaaatacgcttgtcacttgttttcacgcagaccaaaagacacaacctagttgaagactgactcgcgaacgacctgatgaaatctggatgagtggtgattgatgaccatagctaagagacccagtggaacctcgcagcagatttagcaggaagtctcaagagtatatcaggaattagatcaagaggaatcatctcgagaaacttacaaaaactctcatcttctttagattgtatacttacttccctatcttccgcctcttcctctactctatccattggcgtcgatccactagtttttttttttaaccctaatttttcaaccctaagtttttcaaaccattatagtagttgtcatctctggacaaaaggaacaagtcaatgcatcgatcaccgaaaaggaagcatcgtacaaagagaagaaaactgaagattaagaacatctctttctctttaacttgcatacatcatgttcaagaactacatcttagcaaatccaacgaccgaagacgaattgatcatggacactctagctagtgaccattgttttaaaaaccatactcaaaatgtattaaaaaaacaaataaaagaattttacatttggttgtatttgacaaaacatatcaacactttagattcttgcggtaagtcagaattcttaccagaagaatctaaaactttggttcactgattcatgagaactttgatccgaacaatatttacctagaaaactgatctcaccctcatcaatactgatcttgatgaaagtgaatcttacaaaaacaaaaaaataatgatagatttgcacttaattactgataagtagactaaaagaagaacgatgaaattatagcaaatcagcaacatgaccatcacggaactagttaatactaaaaagcatcaaagttggatttctaagtgatctaacaaacgcttttttaaagattaaattcgagatgaaaatatggatgaaaaagaattaaattgctaacataaattgaccaaaatcgtaagcattgatcatcacccatatcttcatctcaaatgaatccatataatcaacactctaacgtaaccagaaaacttgttatacttatttttgggtaaaagattataaaatttagatttccaagcaatctacgagcaaatttttaacggattaaatttgagatggccatatgggtaaccaatatataaattggtaacttaaattgaccaaaatcttaaatattagttacccaaacagccatctgaaatgaatccatgcatatgatcaactctctaatgtaacaagacaagtttatccactctaacgatagatagctccacaacgtcatcaacataattaacgaaagatagacgtcgatatctatctactgtgaaaccaaacatgagtattatgaatcaaaaagatccattaatgttaattcatactcatgtttgacttcacaacagagagatttcgacatctacctttatccatcggcgactcacttttgtttttctaaaccctaattttctgtctgggtctctctgtctttgacgtatttatagtacaaaaaaaattgttgcccaagaaaaaaaaaaaaaagaaaaacaaaccttctgaatccgacagaggctttaatctgttaccgttaaagtgttgtatgattccgttagaatctgcaactccgttaatattttttccgttttctttcagggaagagaaaaaaaaaacacagacctctcttttctctcttcatgttttcatcgatagtggaagagatcaagtgaaagaaaaacactcagatctggaaattcagcttcttagatctatgaattttcaaattcgttgatccatttttccgcttcaatcgtctccgatctgatttcatcagcttcgtaccgctccggtcatg

SEQ ID NO: 8026 - DNA, 3000 bp, Unknown
  misc_feature (1)..( 3000): cDNA_ID_1810111_gDNA_ID_1621183_Annot_ID_57418 3000 nt of promoter + ATG
aaactagaacatataaggcatcctaatattcgtttaaccacatagataggatatcagcagattaccttccggaaatattcaagggcttcggaactgactttacagatttctgtgcaaaggtgaactcccgtaatgagaacaccatgatgcttttctttgagtaaagcagcaccaggattaataaagttctcagaaagatccggaacttttctgatgatccttatcgcgcaaagagctgcctaaataaagaaaaaaaaaactagttcactataatgtattagtctatgcatacaaaaaaatgacagaagtaaagtgtaaattcgtgaaaatgatacatagctcgtaaattaaagccttcacgtggttaatacatgcacgttaacctagcatctaaggttttccaacatttccaccactgaccctcacaacaaagacacctgttatctgaacgggtacaatgacagtacaagaaaacactcactttcttgcgtatatttggatcacgaaactgaagtaatcgttcaacttcaggggcgagatcacgagccatttctgctgaacaaatatttcctaaagcacagagagcaagccccacaatgtactggttcgtgtgattcagatctctagacgtaagtcaaggttctcacaagatgaacttaaaaatttgtgcgaagatgccagcaaaaagttaaaacactactagggaatcaaaatcaaaaattaacaccataaaggatactgcttcagcgagttggtgacaagcattaatacttcttgcctttcatcaagaagcaacattaatccaagataaccaatcctcttctcaggaaatccaggagaagcaattaacttcaagcattccatttgcccaaaatgagtagggtaaccaagcatatgaatgaacataagcttcgctagatcccgatgtctatagtcctggtcattttcattaatcgaagcacggatcgcagcacattctttcctcacaacagcacgttcctcagcagcggttttactcgcacgtatagctcgaatcatgtcgctgcaacacaaattgtcattaaaatgatgaattcatttacatttacatactctcaatttataaagaatcgaagcttcatcaaaaatgctaagaggattctatcatacaacatgcctaatctcacacaatcagccaaaacatttttctgataatcgtcaatttccgattgaatttgccgattactagaagaatcaagctacattatggatttagacactagaaaacgcacgaaaatggaagtatcgcaaagtcgcaatagagaaaaagcagattactagttggagatcggagtaaagtgattcctaacctgagacgcgtgccggaagagaatggattcatgaccggagcggtacgaagctgatgaaatcagatcggagacgattgaagcggaaaaatggatcaacgaatttgaaaattcatagatctaagaagctgaatttccagatctgagtgtttttctttcacttgatctcttccactatcgatgaaaacatgaagagagaaaagagaggtctgtgttttttttttctcttccctgaaagaaaacggaaaaaatattaacggagttgcagattctaacggaatcatacaacactttaacggtaacagattaaagcctctgtcggattcagaaggtttgtttttcttttttttttttttcttgggcaacaattttttttgtactataaatacgtcaaagacagagagacccagacagaaaattagggtttagaaaaacaaaagtgagtcgccgatggataaaggtagatgtcgaaatctctctgttgtgaagtcaaacatgagtatgaattaacattaatggatctttttgattcataatactcatgtttggtttcacagtagatagatatcgacgtctatctttcgttaattatgttgatgacgttgtggagctatctatcgttagagtggataaacttgtcttgttacattagagagttgatcatatgcatggattcatttcagatggctgtttgggtaactaatatttaagattttggtcaatttaagttaccaatttatatattggttacccatatggccatctcaaatttaatccgttaaaaatttgctcgtagattgcttggaaatctaaattttataatcttttacccaaaaataagtataacaagttttctggttacgttagagtgttgattatatggattcatttgagatgaagatatgggtgatgatcaatgcttacgattttggtcaatttatgttagcaatttaattctttttcatccatattttcatctcgaatttaatctttaaaaaagcgtttgttagatcacttagaaatccaactttgatgctttttagtattaactagttccgtgatggtcatgttgctgatttgctataatttcatcgttcttcttttagtctacttatcagtaattaagtgcaaatctatcattatttttttgtttttgtaagattcactttcatcaagatcagtattgatgagggtgagatcagttttctaggtaaatattgttcggatcaaagttctcatgaatcagtgaaccaaagttttagattcttctggtaagaattctgacttaccgcaagaatctaaagtgttgatatgttttgtcaaatacaaccaaatgtaaaattcttttatttgtttttttaatacattttgagtatggtttttaaaacaatggtcactagctagagtgtccatgatcaattcgtcttcggtcgttggatttgctaagatgtagttcttgaacatgatgtatgcaagttaaagagaaagagatgttcttaatcttcagttttcttctctttgtacgatgcttccttttcggtgatcgatgcattgacttgttccttttgtccagagatgacaactactataatggtttgaaaaacttagggttgaaaaattagggttaaaaaaaaaaactagtggatcgacgcca

SEQ ID NO: 8027 - DNA, 3000 bp, Unknown; identical to SEQ ID NO: 8015
  misc_feature (1)..( 3000): cDNA_ID_1807326_gDNA_ID_1621183_Annot_ID_57419 3000 nt of promoter + ATG

SEQ ID NO: 8028 - DNA, 3000 bp, Unknown
  misc_feature (1)..( 3000): cDNA_ID_1810155_gDNA_ID_1621184_Annot_ID_57424 3000 nt of promoter + ATG
aaagacttttgtcacaaaataaagtttcaggaggccgtgtcactctttgattcaatggcctacatgggattcaaacctaagattgtcatatgcaacattgtgactaatggtgtttgcaaaaacagagatctggataacactagattgctttttcatttttttataaatgattttattttgcttttcgttattaaaactatctaaatttaaagacgtttaatataaatggtttagtaactgtttaaatagtctttttattgggtttagttcaaaaaccgattaaaccaagtttatggagaaataagttccgaactatcgatttggggagatataagttgggaaatttagtttccgggaggggggggggagggataatggcctatttggtacgttgtaatactttttgtggagaaatatactatgttgtttttctatttcttcactaaagtttttacttttttattctctggattttttttctgtttttatttccttcacgttgtccccatgaaaaaaacaattattttttccacacaaattaattttgagtgaagtttctagctactctcaacagcatttctcttgatatttgatagttctactcttttttttatcttgatcaagaattggaagaaaaatgctcagtggtaatggttcgatccatatcgaacaataatatgattaataaaattacaatttctttttaaatcaaatgagctttttctaaaattctatattttattccaaaatcaaataattttttttccaggaattgattaattgcttaacccatacaagagcaaattgaggagaaagatgagaagatgatgaagagaaaagatagttgagcaatggaggaagaagaagttgttctatgaagaagaagaggaagtgttgtgaagaagaagaattatgactttagtcacaattggattaagaggctattggggtagaagataagtaaagcccaaatagaagttggtttgttttgtttaatagaaagttgaagcaccagtgatgtagattggagagaagaagcgtctaatgtattgagcttatatttttctaatttgttttttttggcccatctctaacttaacctccctttatataataaacgtaaaagttaaattaaaacctaataaaaaacgagataaaaggtattgttatcgtaattatgatttttttttccaaaataaaaaactagaagaaatagtaattaatgtgtatctacatatatatttttgcagccattttgtgaaataaatcctatagttggaacttatttacaataggtgccactggattttaatgtttgtttttgataattagaaaaaaatcttcaaattaaatatttgacatttaacaatcttccctaaatctctccacattaactacacgattagttactaaaataaaacttccaaaatatttaatatcatttaattactacaaaataaatggtttttttacgggacggattggtgggacgggtttgacaggacgttacttaataacaattgtaaactataaaataaaaatattttatagatagatacaatttgcaaactttatgtatactaactttagaaaataaattgtttccgcggtgtaccgcgggttaaaatctagttttgtaatacaaccgtagtttgttgtttccaaaatgttgttcgcattgtgtataatgatagcttattgtctaattgttgtgatctgcttcttttttcatgtttttatttttacttttgagttatacatatagattaacatatatgtcaatgttttttaacccgactcgcacgatgaaccggactactttcgtgatcaccggttcattgagtcaatccagttcgatgacgggtcaatttcttaaagttttttttaatgttacagagattatatagtttttatatataaaagatatatcatatttaacaaagtaatatatttaacaataataataaagtgattaattttttaagtccaactaaagtataaagccgtaacaaatatgaaaatagtggagatcaccgatgacataaataaactaataaaacatcgcggatttaaaacaacgaatctcgattttctctctcatcatttcattcactcttaaggcgggattgtgaagtcttcatcaatttaaaacatcaaatgagtatatgaactagaaaaagttataaaaataatataatatagtctaaaatcttttattttagactttttttccgagatatcctatgtatttttttttttcttcattaaagtttctaattttctatcctcttggtttttgttctgttttcattttcttcccgttgtctccatgaatttttttttactttttcctcataaattaattttaagctgtgttctaaaaagcggtttaggcggcactacgctcttaagtgactcgtagacaaccgctttgaccgcctaaatttgcataagttccggtttactgtattgttttttatttttaactatataaaactttcttataagtcttaactcaatatatattctttgatatgaatttaactaatttttgtttatgatttaacattttaatttttctaatagatagttatatataatttattatctataatattatattcaatatgtattatattataaacttttaaactgtataaaatcgtctaaactcctattaagcattgtaggcgttaggcgctatgttaccgcctgcctagcgttttcttcgacactgattttaagtaacatttcgagctagtctcattaacgcctctatttatatttgataattttactaattcatttttttatcttgatttgaaagaaaaatgttcagtggtaatatgattagtaaaattataaaaaaatttctttcttttattaaatacaaaagttcttaaaacgtgcagacttgaagatctccacaaacctccaaaagtctattcaaatggcagagacagttgaatccatcatcatcatcatcatcgtcttctccaa

SEQ ID NO: 8029 - DNA, 3000 bp, Unknown
  misc_feature (1)..( 3000): cDNA_ID_2145183_gDNA_ID_1621184_Annot_ID_174379 3000 nt of promoter + ATG
ccactgaaatgggtccccaaaggtctatatgtaataactcaaaagttgaattacaaatattgtttgaagactgaaaagacaacttcttctgcttagccaaatgacaaatgtgacaataagcagatcctttattcttgtgtttagtagtcctcaaaatgtctgaaatagcatccagtcttgagtaagctggatgtcccatcctcatgtgccataaactaacatccaccaccgcattaacagagactgaatccaatggaggtgtagtatccaacacatagaggttgccaatgcgtctacctctgccaattctcaggtccttggtaagatcctgtatttcacaacatgacggatcaaagatcactcttgaaccaatatctgaagtcaaactactgatgctgatcagattcaaacgaaactcagggagaaataaaacatttcgaagaagaatgttttcatttatctgtactgaacccactccactgattttaacacgtgatcctgttgggagattcacataactcaccacagaatgatccaaagaaacaaataggctcttatcatggcaaacatgatgagttgcaccagagtctatcacccaagtttcagtggaaagagtatgttgggatacattcaatataccaacaaagtagtatgtagagttagagaatgagataccagtgtaatcaataggagaacgtgaaattccagcatctgaagaagaagcagttggttgtgacttcagttgagaactgaacaaggctatgaagttctgaagttgatcattggagagattaccaagcagaccatctagagtagcctgagttggaaccatcggaggcaataaagagacctgagcagcaaccggttgaggtttggtacccttctctggtagtttgcctttaaaaccaggagggtaaccatgctttttgtaacatttctctgcaatatgtcccaccttgttgcagaatgaacagattggacgccctttattaggtccattctgaacatagcaaatcttaggagtcaaagcagtagaagatatcttagagacctgaaaagcagcaggaggagaaacattggtagagaaacctttctgactgtaatcctggtcaagaatattgtaaacttcaaccagagaaggcaaggctttctttgcaatgatctgtctcctgactatagagtaggactcattcaaacctgccaagaatttgacagttttagctctctctgccttctgttgcagacgaagaactttaccacaagtacaaggatcatcaggttcctctgtactgtccaacaaatcccaaagaatacgcaactgagtatagtactcagatagagaaagagaaccctggcgaaaatcctggatctcctgtgtcagattgtacgtacgaggaagattagtcatatgaaaacgtccataaatgtcacgccagatatctgtagcatcattcatgcgtagaatgctacgataaatctgcggagacacagagttcaacaaccatgatttcaccatactattacatctggaccaaaggcgaaagttcccatccgattcaagtggacgaggcaaagaaccatcaacaaaaccaatcttattcttagcatctaacgagatccgcaacgctgcactccaatcatcatagttagtctcatctaagcggatagagacgagattcaaacctggatgatcaccactgtgcataaaaaacggagactgagtcggatccatggaatctgaagtcacaacagctcgcgatgcgccagcagagagcagatctacagctggaggagagatcggaggagagactgtgagaccagtggatcgcgacgatttccatggaacggagcttatcgacgcctttgaacgagtggatttccgagttactcgagcaacagccaccatctttacagaaaaacgagtagtgaacaagaaaaaaacgagatcggagaagaagaaatctgatcggaaacaacaaaaacttagctcgttggctctgataccatattacaagataaggattgagctgagctagggagaaaacttgttaagattttcgattcttatttcttaaagagtaaagtgtacaacaatttccttatatacaattggtctaacttaaccagtcaattaaaccggagaataatctattctaactaaatcggatggtatatatactccaagagagttgttattatacctcaagagcgtaaaggtttagaacgaacacaagattcttgagctgcgaaggctgaatgaagaggtggacaaagagattgctctgagtaagtcatgtgcagcgaagattgttcaacagcttgaaaatgtgaagcatcacagttgcagataagtaagttgttgtctcagagataggcaagcaaagaaaatggtgtaacttgaaggtgctgagaaagtgactgcagaaaaagagagcacaaagagttaacggcgattccattatctgcaacattaaacaaagataaaaaaaagaagaaattttcacagaagtggacgaaaaaagatttgccctcaccgtttgtcaaagtgagaactggttttcacggtttctcttttcattcaatttcggaccaaattaccctgggaaaacttaataatggcacaaaccaaaccgtgcaacagttcgtatcggttcagttgacggcgtaaaccaaaccctacagcagttggttttggtttagttgatgcggttcagttttgaaaaagacaaaaaaaaaaaaaactgaaacgaagaaacccgagaaaacgaaaaagagaagagagtaacggagagatttgagagagaatcagaaagcgaaacgaaattcagtatccattgcttcaaaattcgacataacttcgaattgttgggtagttgaattgagccactgaactcccacatccggggaagtgaaagttactgtttttcccggcgaagccaagagaaagttactttttattccggcgaaatttgaacctccggcgagatagcatctttagct

SEQ ID NO: 8030 - DNA, 3000 bp, Unknown
  misc_feature (1)..( 3000): cDNA_ID_3047279_gDNA_ID_1621184_Annot_ID_174376 3000 nt of promoter + ATG
gtcaatactcagctgctccacggacttcacatctgactacagtctacaaagttttacaatatattaagggtacagttggacagggacttttctactcttctgatcctgaccttacccttaaaggctttgcagactctgattggggaacctgtcctgacactcgtcgttcaactacagggttaactatgttccttggttcttctttgatcacgtggaggtccaagaaacagcccactgtttcaagatcttctgctgaagcagagtatcgagcattagccttggcttcctgtgaaatggtatggcttgcttctttactcttagacttgaagatcatcacagggtcagtccccatagtcttctctgatagtaccgctgcaatttacatcgctaccaaccctgtttttcatgagcgaacgaagcacatcgagatcgattgccatttagttcgagaacgcttggataaaggtctcatcagaatgttgcatgttcggacagaggatcaggttgcagacatcttgactaaaccattatttccgcatcagttctcttaccttatgtccaagatgagtcttcataatatttttgcctcatcttgagggggactcttggagtatatataccatccggtttagttagaatagactttaattgactggttaagttagaacaattgtatataaggaaattgttgtacactttactctttaagaaataagaatcaaaaatcttaacaagttttctctctagctcagctcaatccttatcttgtaataaactcatttgccaaacgtgaacagagatagagttcttagattatagcacaactgattattgtttcctttatgcttttagggtctcttgcaccatgttacaaataaatgtggggatgcttgtgactgcgtttctcgagaggacaaaggtcgttcactcacatcttgtccagtaaaagtgttagagattgatgaatttcaaggaacaatgaaagagatgcacatgataaagcatttcttatactatttttcatgtttgaaggatataaagatctatatagaagagaatgctcctacacaactcagagtccatgatgtgtctgaagttattgcggagatgatgaaactctaaaacaagttatcgacttgcaatgtgcaggtcctagtgagtggttacttgtataaggagtggaatgcacaatgaagtcttcgaagaacaaaagtttcccataattttgctaaagtctctttaaaattttacttcggttcgattttgtttagttcgcttgaaaacatttttaaaccaaaccaattgcaaaacaaattcgattttattttgtaatttggtcttagttctttgttggtgtgtttaatagaagtgccaaatgtgactaaggtagaacaaaagcctaacttaagcttactaaggtggaaaacaaagtaacaaacttctttagtctcagaaaatcgaattacattaacttgtaaaaaagtttattccatctaggaacgtaacgcggaacaaaaaaaaaattatttggaaaaataaagcttcgcatctagaggaataatactctcaaactcgctgttgattagtagaaaaatagacccatagtttttttttagaagaagcgttataaaagcttataagaatggcaggatcaaaacaaatgtttataagcttttataagatgtttataagattttctcatataacctttttatgataaaatttaataacataagatttttttattagatgtaaagaagtgcttttgtattacttaataagttttataaaccttaatatttttaatagatggttataagcttttatgagatgttataaatattttatcggatgtatatatgttttttataagatgtttataagcttttataatatgtctataagatgtcttttatcagatgtttataagctttttataagatgtttgtattttataagcttttattatctgcatatacttttttggggacgatttgtgccgaaaaatcctttttcaatttcgatattgtatgtttagtccctacaaaatcaatcagacaagatatttctttaggacaataaccaaatttttgctcaactattcacgtattgcactaattacttgcctaaacatataaattgttaagtactaccctcataaattgcacacattaatcccttgaaactctactaattcaatattacacgaaataatatttcctaaaaaatccgaacaaccaaataactaaccatatctttacttacttcattccaaaatcttgaaatatttactacactcttaccaaatattcatatttcgatatcacatttctataagttaaacgattattaatcatgcattaattcctcaatatatcatataatcttacatatggtatagtcaatatatttttacacattctaaaaatcatcatcaattccaaattccaatatatcacctcgaaaattaaatttcgccaactataatattatccaaattgttatggattattgccttcccaaaattctatccgattcaatcatctattttctccattcctcattcatagcaattctgtttcctgatttacatatatcaccttaactacaaaatcttttaacattcgcttgccagtcaagacataatctaaatcacgcaatattccatcttctaaaccatccaaatcattctgttttgaatgtacaagcgtaaaaataagggcaaatgcatctaccatatctcgacagtttgattcagaatcaaatcaaaatctaaatacggcatttcgattattattttgcacttatgatactcaagcatattcctattctaaaccattcagaatcattatgtttctaaagaatttacgctctaaatctttgcaaataaatgtttaaagattcactcggctactataaatacgcttctcatatcatttcatttcatcatcactcacaccgcaaacgagagatcaaagcaattatacattttgagaaatg

SEQ ID NO: 8031 - DNA, 3000 bp, Unknown
  misc_feature (1)..( 3000): cDNA_ID_3047286_gDNA_ID_1621184_Annot_ID_174371 3000 nt of promoter + ATG
tatttaaatatgcgatatagagcaacaaaagaagtatataaataaagaaaattaactttgaatacagtaaatttagagtttttgaatgtaatgtccaatgaaaaatttaatattacctatggtatatattttaaatatatttctttaaatataaaattggaaaaagaaagattcattattttccataaaaaagagcatttatagtaaaaaaaatgtaactagtcaataaagaaaaataaataaatggaaatcttttatttataaaaacagaaacgtattcttaagaaaactgaaataaatattttccttttgaatttaacagatacaaatgaaataaatccaaaatatgtaaaatacatattatatatttcaaaacaattaagggtttaaaggcttttacataatgtacgaaattttatcctagataatgtaatttcttgcagtttaccggtgaagcttacctgaggttccaaaatattgtatacagaaccgttcatcgtggtctcctgtcgtacggagagagcatattcatcgcatactgcagaaccgtaacatcttgatatctcatttgaaaattctttctatagcttcgagagatacatcacattgatgattttgatatttttctcttgaatatcttccttttggtttcgttgttggaagtcgatccgttcaaaagcttcaaactttctcctgaacttgctttcagatttgttaagatcctcataggtttttttacttcaaacttttcctaagtcttaggtgttaagaggcccgtctcaatatatttataagcctttggtaaaatccaaaataaatctaagacctcttagtaatttttttttgaaataaaaatggaccttttttctttaagaatttttttgaattttgtaatggacccatggcatttgccctactctgccatgggtcagagacgggcctgggtgttaagaagggttttcaaagccaaatccattcaaaagcttcaaagtttaacctgaacttgctttcaaatttgttaagattctcatagtttttttttacttcaaacctttccaaagccttaaggaattgatgcataagatcatggacctttttgtcagcataagtgcacattgcatttaaaattatgaggttgattagtgtcctccattattcggtgatggttgatgatatatggtagtgaatgacgatatactagtctgttggtgatatggtatcgatcgatctgatccattagctaaacagaaggatttatttcaccaacattaatgacctgcatattttctacaaagctataccgttcacgtcaacaccatgtcacaagataaacatagttttttgtttgttagttactaataattgaaaggatgtcgttgaatagtcttctgagttcttaattacgtttcaatacaaaagccatgtatcttcactagttttgatattctattattctgagttcttaattatgtttcaatacaatttgttcaatgtataggtattctaaaaaactagaacaccacgtacatgaaatctaaccagtctagtgtcagtatcaacaactttgttttcgttcacctaatatgctcatgttaaacaattggagattctaattgcaaatcaagataatcattatctaaaaaaaccaagaattttgaaatatatgttatattattgttatagtcagttgtgtttttatctttctgttatataaaaaataggtgacatttgtccatatgcgttgctactgatgtttactaactatatgatatcgagttgaataagtattccaataactttgtttttaagtttcgaagctaagatatatatctatagaggaataactaaccggagcattgactacctaattctgctcatggttgtgcacctgccccggcccacccccacaaattgctacctaagttcgttagtgtatataacttacgaaattaaaaataaaatagcttcatctatattatataatttgttatactttttttataatttaggggaaaaacccccaaaaaaaaccatcgtctaatttaaatttgtccatttaataccaatttattgaactctcacataaccacctgactacgacaatatattcgtaacaattaaaaaagaaattgtatatatagtaaacaccatatggttaagttttaactacagctagtgattccgttacggtcgttaattcagatatctaattttgccaaaatttaaaaaacaaaagtttttaaaagacataaaaattaacttagatattttcggacaaatttcataattcagatattaaacggggaaatttaaattagaccgtgttttttgggttttttcctaatcatttataagtgattttttctgtcttgttatttcttatattattagtttattacatgcataataaaattattcatgacaatataaacacttggatagcaaatactttcatgaaatactcaagtctcaacaactgacaattctcctaacaattataagtatccacgagagactttttacctagatcacgttcttgatagatagctttattctaatttagtgatcattactgaaatttgctacatatttaaatattttaatatatatagaaattatagtatattattttttaaagacatttttttattttatattaccaaaatttgaattttcaaaaaaaatccttataaggagatatataatgagaattaagaaaagttgaccaaaaaataaattaataaccatataaatgtatattatataaaagtttctttcaaagaaaaaaacaaaaacaataatatatagaagttgtgcaggtaaagagatgtacaacactttttattaaaggtcaagtaacaactcaaacaagtgaaaaaaaaagaaaacaatttcactttttttggaatgtgtgtctctcttccatttccatatattatataaacaccaaatgagatctcatttttctaataaataagaagaaagaagagagaaacaatg

SEQ ID NO: 8032 - DNA, 3000 bp, Unknown; identical to SEQ ID NO: 8028
  misc_feature (1)..( 3000): cDNA_ID_1810155_gDNA_ID_1621184_Annot_ID_174370 3000 nt of promoter + ATG

SEQ ID NO: 8033 - DNA, 3000 bp, Unknown
  misc_feature (1)..( 3000): cDNA_ID_3047302_gDNA_ID_1621184_Annot_ID_174365 3000 nt of promoter + ATG
taccccacggttgggctgtgtacatctcaaaatcagaagcatgccgcaatcttggcaaaggtatcttctcttttccatatggtgtcaagagaattccttcagtcaacactactgcagcaagacacaacttttcttcatcttcaacagcaggttcaccttccttaggttttaaaaacaatcgatcttcgagatcaccaagagtataagatcctttactagcccaaaagtatggttcttttacaggatctttcccctttcgtcgaagttccctatgaacaggttcacattgaattcctgtatgaacaaaagacagtgtagagactattattacaggttttatagtaaatactttaaaaacgattgtaaatcatgtttaacacttttaaaagcttttaaaatcccttataaatcattcaatgccacttacttatgctttaaaaacgattgtaaaccatgcagacacttttaaaatcccttgtaaatcattatatgacacttacttatgctttaaaaacgattgtaaatcatgtttaacctttctaaaagcttttaaaatctcttgtaagtcattctattcaacttacttatgcttaaaaaacgattgtaaatcatgtttaacccttagaaaaggttttaaaatcccttgtaaatattctatgccacttacttatgttttaaaatcgattgtaaactatgcaaacacttctaaaatcccttgtaaatcgttttaagacacttacttatgcttttaaaatcccttgtaaacgtgtttaacacttctttaagcttttaaaatcccttgtaaattattctatgctagttacttatgcctaaaaacggttgtaaaccatgcataccctttttaaaatcccttgtaaatcattatctgccactaacttatgcttcttaaacgattgttaatgaagtaaaccccttttaaaagcttttaaaatcccttgtaaattatctatgacacttacttatgttttaaaaacgattgtaaactacgcaaacagttatgcaaatgccttgtaaatcattctacgacagttaattaagctttaaaaacgattgtaaaactttattacctgttgtgagatagaactctctcaaggagaaacggataggttgagaatcaactctaaaccaaagagttgatccttttgttttcactctctgctgcatgagatagtgaaagatttttccagaaaatctgattcccttcttagccttcatttttggtcccaattcaactagaagaccaagaaacgaacttctaatcttctgaaataaacactcgcctaaagcttcctctactttactaactaaattccaatccgagtattgttgaacggttcccagtgcaatagattcttcaccttctatgtatatctgttcaggcaatgtaaggatttcactctctgaatccatctgcaaaacatgttatgaaacatcgtcagatctactataaaatcgactataaaatcgactataaaatcgattataaaaacggttaccgtcggatctatcgatatctctggggattgtttgcgtcgtagagaaatgatctgaatccttcagcgaatccttcggagaggaaattcgtcggcgattttggggtttctcagagagaaaattcgtcggcaattttgagtgaaatcggagaggaaattcgttggcgattttgagtgaaatcggagaggaaattcgtcggcgattttgagtcaaaacggagaggaaattcgccggcgattttgagtgaaatcggagaggaaaatcggagaggaaaacgaagaagtttgtgaaacgaatgtgaaacctaatcattcagtaagggtaagacagtcatttgccatattagaaggggtagttttaaaaatagccttcaggaaaaggcatttttacaaaaggttattagaataagggaaattttgcaaatctcccttcttatattgaagggagatttgcaaaaccaccttttttttactacccttttgcaacaatatcctttcatgttgtccatttttaaaaatactcattcccttgaacaaaatgaccaaattaccctcatctaatagaaaaaaggagttgaaaactgaacttttcccgccaattttttggcgccaaaagttttatttcccgccaaaaaaaaagtttccgccaaacttttttcccgccaaaaaaaaaaatattctcgccaaaaaaaaatttcccgccaatttttttttttcgtaacaaatttttctcaaccaaaaaaatgattttaaaaatccttgtaaatatttttttgcggcaaatagatttacaagagattttaaaagagttttaaaagatttacaagagattttaaaatcctttgaaaatctttgaaaacacttttaaaccctttaaaaatctttataaatcctttgtaaatcttttaaagccctttaaaatcccatggaaatattgtaaaactcttttaaaatcccttgtaaatattttaaaatcttttcaaaacaattttaaaccttttaaaaatctttaaaatacctttgtaaatcttttaaatccctataaaatctcttgtaaatcttttaaaacccttttaaaatcccttgtaaatctttttaaaaccttttaaaatcccttgtaaatcacccttttaaaatcccttgtaaatattataaaagccctttaaaatcccttgtaaatctatttcccgcaaaaaaaaaaaattggcgagaaaaatatttttgaaaacaaaatttggtgggaatttttttttcgaaactttttggcgggaatattcattttggaatattttaggtgaaaaaatattaatatttcattttgttaacctaaaacaatttccaaataagggtaaaatggtcattaaaaaattaaagagggtagaaataaaaatggataaaacaaaatggtaaagttgaaaaggggcatcatgaaaagggcatttgaaagaatttttctatattgaattggatattgttacttgtattt

SEQ ID NO: 8034 - DNA, 3000 bp, Unknown
  misc_feature (1)..( 3000): cDNA_ID_2145113_gDNA_ID_1621184_Annot_ID_174352 3000 nt of promoter + ATG
ggtattgaagcttaaaattgcttaaaagtcattccatttagccaaaagaacctttaagtttaggatctcaccaaaacatacaaagatccaaccatcctatatagataattaaacaacatcctacataaaataagcattcttaaaagacataatcttaaatcctagttcttgtcaggctgcaaaaacatcaaacactttgttagtccatggagacatcatgaaaacagtctgcttgggtgcttcctctttgcctttgccacgacccttgccacgagctttagaaggatctttgccttcaccatttttggttcctagaggacgccttcgagcacgtcatgttcccttttgattagctgttggagcacttgaatgttgcaaaatttgagtggactgactttgagaacaagttggtgtggactgactttgagcttgctgccacctccttggtgcattgtgtatgctccatggatcatcattatcctatgacaagtcaacaacgcaaatcaaacatagctaagagtagacaaattatagggaaaattctagagtaattaccttactcttccttggtctccctcttttgcgtggaggagctgacttatactgtggcatttttgcaggttcctttattatgtcctgattacttgcagttagtacaagtcacagtacctccttctcttgattcctttgtcagataagtcgttgattcacctggttcaagtatcctagcaaagttcttaggacgccctcttcttccttttatcaggcacttgaattgttccttttcctgtcttcttccacaacatttttccattcaatggttctatgtttttcttgtagttggattgccagacagttgtcagaaagcggctatcaacatagctgcatagaagaacaaagtatatcagcaagcatatttacaactcaatgagaggcgagttgattaaaacttatgcttggatctcggttatgttcattgatgacaaagattgcatgtggacaaggtattcatgtgagattccatttgttgcaagcacaagtcatgtggaggatgttaactctaaagcttccaataccttccaacacctcataaacgtgctcactacttttgaggacataaccgaatttggctgacttgcagtttgcttctagtatctccattatatgaggtggaaactttgtcttgcatgtagcagtcttatcccgtctcttggaaagacgctttattgcttgtcttcttacatcttcaagcatatttatcacaggtttcttcctcgcttctctgattgttctgttgaaactctcacataagttgttgctaacatcctcacaacttgagcttgaggaaacatgtctttaactgcattgagcaatcctttttgcttatctgaaatcactgtcaaatctccacctaaagctaaacccaaacccttcttgagatggtccacaaaccaagcccatgactcattatcctccactctaactacagcccaagctataaggtagattatattatctacatccctccccacagctgctagaatctcacccttcaatttccatttcaaaaatgaacccatctaggccaaaagcaatttttccaagttgttcttaacgcattaaaacatatataaaacttgtcaaattgctgcttactatcagctttgggaatggtcatgatgtctatgtggatacgctcattagatatgtgcagttcagcctcataattgtatagctttgcaaattgttgtttctgcgtttctatcaccaaatttaaagccatcctgcttgctttctggcatatccacttagagacagagattgtgtacctcatcattatctcatcttcgatgtcagtccaccacaaagaagggcgccttcttgcttcttctctgaacatccgagcaatgaccctatagtgacccgcataagggcatcgggtacggcaaaggaccgaatgagaaaaagttgctcgaatgcatggccaatggaccgcatgtgcccaaaaaatgctaaactgtcaaagggcaaacatgggcaagaatgggcacgaatgggcaaagatgggaaaagtttggcatgccgcgggcgaagtttgccacgctggccgcggaaccgacatgtgtggacacctcacttgcggtgccatgcgactcaagtcaccaaccttggagtcgaattcggctgagtcttggagccgaagctgatggggcaatggaatgacacccgtagacacctgtcgccacgccatcgcccgagacacctgtcgcatgtgggtgcggcaactgtctagacatgtggcagcgggcggtgctacatggccgaccttgggcggactataaaatgatgctattctcagcccattttcatttttgaaggcgagagagactgtaaggctgtctgaccgataactcgtccgaaaccaagaaaacttgcccgaattcagtaaatcttgcccgtggtctaggaaagtctgatcgtaagtgcaaaataatcgtatgtggtcaagagaactcgtcctagtgagaagtcgtcgaccgtgattaagagattctgcccgcgactaaaaaacttaccgaatctgtcagttgtggtcgaattgtgtttttgtttgcatgttttctagagctagtctttagattatatgcatgcttactcacttaaacttaactaatcagaatttggcttaagttagaacttgactcttaaaataatatgagcatttgacgaacttgatagttaatatcattaaggaatgaaatgaactagtgcatggctaggcttagtgaatatggactcaactaagtttacttgatgatttattattttattcgagggcgttagaattcttggtatcagagcagggttatgcgatgctcgtggacactcgggttttcaataattttaccaagtaaatttgagtcgcagaatgcaacataagattttggttgttcttcttttagatgactaagtgggggataggtttacctcgttttgcag

SEQ ID NO: 8035 - DNA, 3000 bp, Unknown
  misc_feature (1)..( 3000): cDNA_ID_3047286_gDNA_ID_1621184_Annot_ID_57425 3000 nt of promoter + ATG
ttaaatttgtccatttaataccaatttattgaactctcacataaccacctgactacgacaatatattcgtaacaattaaaaaagaaattgtatatatagtaaacaccatatggttaagttttaactacagctagtgattccgttacggtcgttaattcagatatctaattttgccaaaatttaaaaaacaaaagtttttaaaagacataaaaattaacttagatattttcggacaaatttcataattcagatattaaacggggaaatttaaattagaccgtgttttttgggttttttcctaatcatttataagtgattttttctgtcttgttatttcttatattattagtttattacatgcataataaaattattcatgacaatataaacacttggatagcaaatactttcatgaaatactcaagtctcaacaactgacaattctcctaacaattataagtatccacgagagactttttacctagatcacgttcttgatagatagctttattctaatttagtgatcattactgaaatttgctacatatttaaatattttaatatatatagaaattatagtatattattttttaaagacatttttttattttatattaccaaaatttgaattttcaaaaaaaatccttataaggagatatataatgagaattaagaaaagttgaccaaaaaataaattaataaccatataaatgtatattatataaaagtttctttcaaagaaaaaaacaaaaacaataatatatagaagttgtgcaggtaaagagatgtacaacactttttattaaaggtcaagtaacaactcaaacaagtgaaaaaaaaagaaaacaatttcactttttttggaatgtgtgtctctcttccatttccatatattatataaacaccaaatgagatctcatttttctaataaataagaagaaagaagagagaaacaatggcttatcgtcaaattttggccatagttttgtttctttgtgtgtttcaattcttggactgcactgttagctccgccgtagaagagaatgggactgtgtttgtgtacggaagagccgccgttggaacaatagatgaagacttcatttgcgccaccttagactggtggccaccggagaaatgtgactacggcagttgtagttgggaccatgcttcaattctcaatctggtttgttttttctttttttttttttttttttttgatcaaattttgtttcattttcatgtttttccgtcgaaaacaatgcaacttgcatttttgatagaaccaaaataaaaaaggttgtgtatttatttcgggttggttaggtagcaggaatccattgaaagatttcttaggtactactactcttcattaagcaaatagaatttactaattgtagaaaatgtagagataaaaaaaaaaaatcatttttaccatttatggaatgtgaaagtcaaaaatcaagattcggcaagtaaaagtattcctttgttttgtcatcatatgccattttaacaatagattacaaacaaaatttggtcatgttaatatgaagtaatttattcgaagagttgattagagaaatatgaaatctaatgaaaaatttggtcgatcatcttgcaggatttgaacaacgttattcttcaaaatgcaatcaaaggtaatcacatgattcttgatttatattggttaatgttaggatttgaccattgttgttccaatttccaaaaacacagcatttgctccgttgaaaataagaataggaggaacattacaagacatagtgatatatgagacaccagattcgaagcaaccatgtcttccttttaccaaaaactcttcaattctttttggttacacacaaggatgtctacctatgcgtcgatgggacgagctcaatgccttctttcgcaaaaccgggtaccttcaaattctcttctatctgtctctttccttatctacttgtggtttgagtcggagctaaagtcatcttcaaattctcttcttacttttcttctctctgtctcttttcttacttacttgtggtttgaatcagagctaaagatatcttcaaattatcttctttcttttcttctctctgtctctgtccttacctacttgtcgtttgaatcagaactaaagtcatcttcgggctgaatgcactttctggacgttccataaaatctaacggtgaagccataggagcctggaattacaccaatgctgaatcgttcatccggtttacagcagagaacaattacaccatcgacgggtgggagctcggtaagtcactttacaacataacaaagaatgcataagcctgattgaattctctactcatctccaagctggttttgcttcttttctcaataggcaatgagctgtgtggaagtggtgttggtgcacgagttggtgcaaatcaatatgctatagacaccataaatctgcgaaacattgtgaaccgggtttacaagaatgtgagtcccatgccgttggtgataggtccgggtggcttctttgaagttgattggttcacagaatacctgaacaaagcagaaaactctctcaatgctactactcgacatatctacgatctcggtccaggtaacccgaatactcaactatctttcgtttcagatcctgcaggttcatcatttcccttacctgaatggaaagaaaacaatattttgattgattaggagtcgatgaacatctgatagaaaagattctaaacccttcatatctggaccaagaggcaaaaagttttcgcagtctcaagaacataatcaaaaactcctcaacaaaggctgtggcatgggttggtgagtccggtggtgcctacaacagtgggcggaatcttgtctctaatgctttcgtgtatagtttctggtaagagtagatatcatgacagcaaaaactaaggttatcataagtaatacattaaaagcatttctaatgagattaaactgtgtgatggtaggtacctggaccagcttggtatg

SEQ ID NO: 8036 - DNA, 3000 bp, Unknown
  misc_feature (1)..( 3000): cDNA_ID_1989594_gDNA_ID_1621185_Annot_ID_57867 3000 nt of promoter + ATG
agagggcaaggaagagagcgttgatggaggattgggagatggagtattggcctcatcggattccgtatgaggagattgaatccggcactaaggggtttgatgagaagaatgtgattgggattggcgggaatgggaaagtttataaaggtttgttacaaggaggggttgtggaagttgcggttaagcggatttcgcaggagagtagcgacgggatgagagagtttgtggctgagatatcgagtcttgggcggttaaagcaccggaatttagtttctttaagaggatggtgcaagaaggaggttggtagtttcatgttggtttatgattacatggagaatggaagtttagatcgatggatattcgaaaacgatgagaagattactacccttagttgcgaagagagaattcgtattttgaaaggtgtagcttcaggaatattgtatttgcatgaaggatgggagtctaaggttttacatagagatattaaagctagtaatgttttacttgaccgagatatgataccgaggcttagtgattttgggttagctcgggttcatggacacgagcaaccggttaggaccacgagggtggttggtacagctggctatttggctcctgaagtggttaagacggggcgtgcatcgacacagaccgatgtttttgcttacgggatattggttcttgaagtaatgtgtgggagaagacctattgaagaagggaagaaaccgttgatggattgggtttggggattaatggaaagaggtgagattctaaatgggcttgatccacagatgatgatgacacaaggcgtaacagaagtcattgatgaagctgaaagagttttgcagcttggattgctttgtgcacatcctgatccggccaaaagaccgtcgatgagacaagtggttcaagtgtttgaaggtgataaggctgagatctttgaagcagaaagtagtgaagatgtcgagtcatggatgttgatgaagatgggatctcgtggaagctcgcgagagttttggtatggaagctcatcacatccgacgatagagcagattagacttcagtctttgtctgtgtctctttcgtcttggaacagctcaattttagaagggaggtgatgatgatgaagaaatggcttgaggaacctaaagaatgtagttatttttgtggctttactttgttacttgttttgtacatatacgtatttgtaaacgcatttcattatacatgtatttttttattttaatttttttgttgtgaattgaaactagttttcaatttattatattttgatgtgtatataaacaagttttgcatccgaagttaaatgataaataatttaagagaagtacttataataatgctaacaaagtaaatgtgtagattactataaaacatacttttttactaaaataggatttatgttcttaagtattgaacatgagaaacatgttttatggtttttttttttttttttttttgtcatcatgttttatgttcttaagtattgaaaaaagtagtactagtatctggttgatgaataaaagattactctaaaacatgtttttactaaaagaggatttatatcaataaagcttggttatatatatatgaaaatatatatatatttttttaaaaaccttattcctaactacacccttatttatttatctaaatttttatttatttcaaaaaagaaaaatacaatacaaggctttgtacatcattctcttattaaaaagtttagatctcacataagaagttctatcgaaatttacaattttaatatacaagattacaataaaaactaccaggtttccgatcataaatttcagataatactaacagaaagaacgacaatcacatccgtcgatcaaagtttttgtaaaagatccttcgatttttttgtatacataatgatattatttaaaattcaaatatcatatacatatttacaatttttgtatgtccgcctatctatggggatcttatctagttaatcaatgaaatttggttttatatataccaaaaaacaaacattctgacaaggtctaatttgcatattaatgtaaacacatcatataaaaattcctaattgtcacgagttccaggtaatcattcatatactataatgcatatggttgccagagaggtatatttaaaaagcttttcatctttggaaaaagcataaagttatgttcatgaatcttataaaatgttttaaagatagtccttcacaaaacaagacaaatcaaacgacacaaagattcgatgctgcggtgtcctaaaaagttctctttatttggagtctcaaaatctaattcttatttgttttcctcaaaacactttctgtgaaaatttcgaaatgtcactacactgtgagtttagcaaaagagtttttgttcattacgttctaattctatgattatctaatagattaagtgccatcactttcattcatgagcacaccatcactagttaaaaagatcaagtgcctttctcagttaatcctaaatcctagttaatgtggtgtcgttttgaccaatccattaatacgttgccgttttaaaatcccaccacgagcataatataacggatataatgctatcttgtcttgtttctctctagatttcagagattctctcgagtttctgacacgcgcgtactcgcacgtgtctcatcactacactaaccctacacgtctccctttcgtggacgctccgtttacttaatctccaccatcagatcacatcttagataaaagcctaaaatcaatctaacggtcactagctcaaggagtatgtattattgtacgacgagacacacatcgttatctctctttattatttggtaatatcataattattatctctatgcacagtttttgtttcgtcactgtctttgaaacttaaaagaaaagagaagaaatagaaagaaagaaaaaaagatgaaataattttgaaaaaaaaagattcgaagcaaagaaaccgttagccggcg

SEQ ID NO: 8037 - DNA, 3000 bp, Unknown
  misc_feature (1)..( 3000): cDNA_ID_1989587_gDNA_ID_1621185_Annot_ID_57876 3000 nt of promoter + ATG
acccaacacctccatatgggaaatttactactagactaccaccacgttgtttacaatacaagaaaatgacatgaaaacgattgtagtttataacattgaaccctaataggaaccatgaatccgagagagaacatggcaaaaactcaatttctcattaatgaatcagaaagtttgttacatcaatgtatagacaacaaaccaactaaaccaaaaataaaccagagattcactttaattagaatgaataaaccgggactataccgaacccttaatgacttctattatgtacaaatatacttagtatagaaactatacacaatctaataaaccctaacactttcgagatgatttagaattgaaaaattagtataaaatgcacgttgaagaaaaagcacgattgacatatttttataaatagtaaaaaaatcttggtcaaattcgagtagacaaccttatcaaaaaaagaatttataaattagacgacaaagtgaagcaaaaacagaaaacgttatctagaaaacgattaaatgaaacatcacaacctaatttcttcgtcaaagtaaaaaacatcttatgattcataattatccaacggaaaacgacacagatattataaataacttttccaaataaacaaaaatgaattaaagtaataaaatatccattcctcttcgatcatatccacagttcccacaccaacatgtcgcgaaagttcctaaaaccgccacgtgtcagtcacttatccaacagtaatccaattattcgtcaagcctccggtttattaccgtctaaaccggtagctcctcccaaatcatatggctcactcacttctccgtctatataaacaaaacatctcttactcttcacaaaagaaaaaactctcttcggaatctgaaaagccataaatcagcagaaaaaaatcttaaggatcggaaattttataatcggatgaatagagtgattagtcagttttccggtaagttgatgaaggagaagagtgttaccggtgtaagcggcggagatacgactttaagatctgccgtcaaagaatcggtctcgtctccacagagtgcgtcgtcgtcgtcgtcggtgaggaggcttaaaggagatctggaatcgagtcgatttggtgcggcggcgagtgagaggctgaggcaagcggaggaatctttgaggacggtgatgtttctgagctgttggggatcttgttagatctggttgagaaaataatagatgagaaaacgaaaccaaaacgtttctgtttgtgtttttgagttttggatttttgttttctctgtgaatagttttttttttttttcgttttctttgtactttgtgttttatgtaaatcatgtataaaatgaaaagtaaatcaatgaagataatggtttgtcttcaccaaatcatgtatttacatgtggatttgaactatagattatacaaaaaaattagtttgataaagacgatgactcaaaatgtaataagtatgttattttggattttaataagtcgatttttagataatgtataattggtaaatcgttaaataaatcgatatataaaagttgtattctaaactcagcaaattgtcataccatgcctaaataaaaatgctgaaataggtagatttggtccattttggttgatactagaattgtttgaagtctacatttacgattataataatggataacaagatattttgtaagatgtgagatggtcatatagtttggagttgtcaagctataacgttaaaatggtacaattatttatcaagctaagcgaagatttacagcggatttttgacgcatttttaatcgtttttgataggtctgggcaaaatatctaaatctgaagaaccgaatcaaattcgataaaaatttttgatccaaacttgaattcaaaactttaaaatatccgaacggatcacaaatttcaaaactcaaaaatccgaattcgaaaccgatccgaatatgaacccgatcaagtatccgaacatatccaaaatatatacataaaaataatttaataatatttacacaacttaagttcctaaaatatttgaattttaaaatattttgtatattttggatacttaacctacttttcaatagatttggatagaaaatactcaaattttgttagaaaattttatatatttttaagtaatttaaatattttgatacaaaattttgattttggatactcgggtgaatccgaaaaacagatccgaatctaacttagagtcttaggtggtgttattcaattatggtgttaaagtcaattatttaagctttagatttgttttctgatattgcttttaagaatatgtttgtatgaatttcaaaatctctgcaatatgtcttggattttgattttaatgatttactcatgaaactccaaagagctttcatttcaaatcaattaatatacaaagattttaaaagtcttttagttttgaataacattggattttaatgaaatatttcaaatcttaattgaataacaccaaactttagaatctattaagcatgatttacaaatatgagttccaataacactagattttaaagctggatttagaatcattagttaaataacagtggattagtgtggatttcaattctattaaaatccattaacgaataacacccccttacaatatccgaatggatcttagatttctaaatttggaatacccgaacccaaaaaactcgactcgaacctgatccgaccccaatccgaatacccaaaaacccaagccttattttttgagtgtaactcaaccgtttttattgcttttcagaacgcaatcactacaacaaccaaaaagtaagctttaagcgaatccaaacgctatcgtattaaacgctattactatctgcgttttagctcttcatcttcttctccacttcagatgactttctcgcttaataaaaaaacactaacccaatcaaatccactttaatccttccctctctcgcgtccgattctccgatg

SEQ ID NO: 8038 - DNA, 3000 bp, Unknown
  misc_feature (1)..( 3000): cDNA_ID_2034963_gDNA_ID_1621185_Annot_ID_174407 3000 nt of promoter + ATG
gtatacaatgaccattttttgaaaattggggaattaaatgacatttttcccttagtaaaatacttaaataaactggatatttacttaatcgagaagaagaagatgttgttttgttttgagaaatttatttttattgggataaagaagaaatttatgcagctggagaagaactttttgtaaatcatgcctaaattaatgaaatgaaggaagtctaaaagtaatatgcatcttcgacatcactttatatgatatatatgtttgatcttcaatcatcaatttgtttatttgctgaaatcagagaacaccattagtctcaaaatatgttgacttttgcggtgaaattgaagctaaagagcaaagaagtattctaataaaattgctgacctgctaaaaatgtttgtttcaacaaaaagtgtcaaataataatcaagtagatagtactctaagaaaaaacgaatgagaagcgatagtcttcttgtttccttttgagtggtagtgatgattacaccttgttgttggtggttcccttcctcttcttctcttttcgtttgctgttcctctctcttcttctgcgtcttgcaatgggatcatcaatttgcactaaacttgaaacgtaacagctagataacataattgcggtataagatcttgcagtgtttccaagactattcatttttttcaagtagccatcatctccaatgatgtaagaattgatgtgagaattagatcttttgcagtcttcagattcgactttatcaataaccaccgcgagtttcttctcctcgtcaatgaagaaattgttgtaatctatatcaaaccaaaaatcaagagcaatgagttgctcaatataacattttaagaaggaggtccacgatagtgcattgggctctatcttagtagtaatccaaatctctatcatagatgtatccaagtgctgatataaggctacgagtttctcttctctaacccaggatagactcatccaaccatgctgaaaaggtggatcaagaagctttccaaatctttctgccgtaaaatcaaaacagattagtaaatttggggtttcatctatcgtcctaaagtaagtatttccctttaccgatgcactctgcccatcatcatctatatcccacttgggaatgacatcaaaagccctccatgaataagacttcaaatcgtaaatttcgtatgagccctgtttattatcgagaaacctcaatatcttgtggtttttgttgttgtcatatctgagacaaaacgtggaatacatagtttctgttttgagttggatccacctgatttgccccaaatacgggttccaaatcacgagcctagtatccgtggtgacacataacaatataccgccgcagtaatacatatgagatatctcaactttattaagaaaattaccaatctcctttactgataagttaacgaattcttcaccattttccttgaaggttccagagatattgaacctcattgaacgaagcctataatcagacagcatgaacccttgatgaaactgctgttttggttttgctttacatagaatccgatctttggataaagcgttccatcctttgcaagtggatctcactgctcctagggaagttatcggaaccctagacaatatctctttcaccaaatcctgcgtaagatcgaacatcatcgtcattattttcttagtatgtagaaattagggttttcaactctttagctagcccactcttttctacgattattaatataggtttctacaagttattattttattttttttggtagtaattaacgtaaacaagtgtcgggccctttttaataactttcactaagataaataatatgcggtttctaatcttcgggaaatgttaaatatacaaaaaaataaaaaggacatgtttcctcactaatggaaattccgtatgtgaaagtattctctttctgtatttagttttttattttggatcaaaacctgctctatatttctattattaactttctacgacacaactaccacatgaacaaagtctaaaacataaaaattaaggaggtaaaaccgctgtaactgtcagtgaaactgcttcaagtccctgcggaaacattaatacataccgataccgccgaatgggattagggcatatggttatcacacgaccactcttaaattttaaatactcatttttgacatggttaacgacacgaaaccggttaacgacggggaacagaatgatcaaatgacaagttggagtagacatatcttgtattttctgtagtgagcaggtagaagaccgagaacacctattctttacatgtggatatgctaacgagatttggttagggctaagcaagaaggttatgggtcataattaaattctcaacaagatggaatgatattcaaacagtcctcatagacatgtctttggggatgcattgcctattcttaacatggtacaactttcagctctattcaatttggagagaacgaaacagttagagtgaagaagtattgatctatatgctaagtataagagactctctaagtgtttcagaaggtttcagggtcaactggttgacgagctaaggagatcgtgacacgtggagcgatccaatccgtttactctcaacggcattttcttatcctttactcgtcttattctgtttcctttcagtattgttgtttctctgtagatttgattgatttagaaatttgttgaataagagaagtgagagagagaaaacagaacgattgtagagagagaaagctcgttttgagctaagtgcttttagtgaattccggagacatctccggtgagacgtagggttcctcatcggagcctgaactcgtaaaatcttgtgtgtctcttttaaaggttctttgtgttcaatctcacacgagtgtccgatcgatttcgttagtgttcttgagggttcgaggatcacaaattggtatcagagcccaggttctgagctcaagaatttcagatcgattcaaggatg

SEQ ID NO: 8039 - DNA, 3000 bp, Unknown; identical to SEQ ID NO: 8037
  misc_feature (1)..( 3000): cDNA_ID_2025014_gDNA_ID_1621185_Annot_ID_174404 3000 nt of promoter + ATG

SEQ ID NO: 8040 - DNA, 3000 bp, Unknown
  misc_feature (1)..( 3000): cDNA_ID_1989590_gDNA_ID_1621185_Annot_ID_174396 3000 nt of promoter + ATG
taccgtcgtttcaccttatctatcatgttttgatatgggggaatgtctcttttatttgcattttaaactttataatctttgtgttattttttatatatttggtttgatttaaatgaataaaaacaagtctttatctaaacacaaaaggacccaaaaatggtcaaatttgggtaggtctaagagtgggttgtcaatctccaactaaccatgttttgatgtcccaacaagctcttgccttcagatttgctagtcctaattattctttgaaattataattcataataactaatgacctaccaacttcatcatcttccactaatctaccgagtaacatgttaggatttagccaaatgtcatttccttagttttggttacaaccacaataaaaattattatagtaccctatatatatattatcattcaaccgtagaacatgcacaacgttgacaaaataccccaaaaatgtcatttcctttgttttactcttattttctaaacaggtgattttggattaaaggttacttaattttggattttattataatcgtcatgtaaattttctaatggtcaagagaagaagacttcaacgagaaacgacttttttggcattgaccaacaaaaaagtgccactaaactaccatcatgggagtaattacaaaagctttgcgtagtcaaacattcggacatcaaagacaaaaagtacacaatataacaattttaggtggaaaaaacaaccaaaaacaaaaatttgacgcgttttcttgttaacaggagtattggttaatacttaatagctttaactatgcattgtaaaaataaatcataaaaggatcaatgacgatcttgattgtttagaaaaaaaaattatttcaaaaagatttattttttaggttttcaatgcaatagttattagttataattgataaattgtaaactttaatacaaattattgaatatcattggtttagagttattgaaaattgtaaatcacaaagaacaatacatttaaaaacaacatttaatatgttttcttaatatttgtgtttttcctaaaagattaaacaaaaaagaacagaaagaatatgaaataagaaaaaatgcactagctttttttgtttgagttaaaaaggactatatttattaagaggtaaatagtatatcatttttacatgttttaacgctatgtaaacgtgattaagttacttgttatcaaataatcaaaattttatgattttcatgtttttgaaaaatgatattgccgtatactgtgaatgtgtaaaaatataggtgaaaaaaacaaacgccaacaatctattatgcttaataatgactcatatataagaatagtttgctcatttcttatgctttgttaattgttgttgtatgctaagagaggattgatgtttctagtgatgtgctaggaatgttctcatgtataggatgtatcggatcttgaggttaagaaatagagattcacatttccattcttaacacaacataaataaggattaaggctaatgaaaaagagttcacatattacacattttactaattaatcatggtgattagataaaggtaacaactaaaagtcattttaaccgcactcaatattacgagcttgttagaacactgtaacacaagtgttctcttccagtttatcaatggaggaaactggtaaaatcccatggacgatcttcttctctcatcctctgttctcttgtttcatttcactctacactatatttcttctttatttccctcaagattctcttcgaattcttatttcccatgtccctctcctcatcggagctttcttaatctcctgcctccatctcgggtcgacccggaaatccattgcccgacccggaagcaatgaggattcgataggacctgaactcaaaacgggtctcggtttaaacccggattttatggaatggaactttaaattgggagctccattggaagttattcacaaagaagaagaagaacagtcgatgacgggtgtaaaagatccgacccggttcgtgatgatcaagaggtttccatcgttatcgatgtttaacccggaatctgattccgaattggaccgcgatttcccggttatgagtgaaaatgatccaacccggttcgtgaggctggaaaggtcaattaaaccggaatctgatatggattacgactccgaattggacaacaatttggttattgatgtaaaagatcgaactcggttcgtgaaggtggagatattcccatcgttgtcaatctttaaaccggattcgaattccggttcgccggagaaattgcgttgtatatacgaaatcaaaacggaaacgctttttgtagttttatattcctggagaacaatattctaacaacttgttttggcagcaatattctgatttctgagtataatttgattcgtcaagtaaaatctaattttataattctcaacaaacaaactcgaatttgatttctctaatgtgtaatgtcgtcacgatttacgtataacatattaaaagttgtcgacaaagaaaatgaaatacatttccaccaaatataataagtaacaacatggtcagattcagagaggacgatctggcttggccaccaagattgtttgacaagtatttatttaactactatactttctcttccacaatattaataatgttttaaatgtcattattaatacgtgacgaaactgtagctctgaaataaatatattaacaaaacaaataaatattctcaaccaatcataacctcgtatttgtttttgtttccatttaaattttattttgactcgacttttacacgcatgccacgtggtcaaccaaaacgtatgacaaactctacttctccaccgtcacaatcatctcctggccccctctagatctctctctcttttcctccttagattaaaatttctccaggtttcttggcgttactgtgtgaaaaattcttcttcttcttcttctcagcgattgaatcgaaccaagagcgaaa

SEQ ID NO: 8041 - DNA, 3000 bp, Unknown
  misc_feature (1)..( 3000): cDNA_ID_3041167_gDNA_ID_1621185_Annot_ID_174384 3000 nt of promoter + ATG
ccgagctgagaatgaggatggaatttccaccctattctaccttcaaagaatttatgaagatgaatgggtgaattttctggagcggatgcgtagagagggagcagagaatgagaatgatatctggtcaaagaaggttagagatcttcgcctctgggcttcatataggggacaaacattgtccagaacagtgcgagggatgatgtattattatagtgccttgaagaaacttgcctttcttgattctgcttctgaaatggacatcaggatgggaactcagattgcccctgaggcacgccgttcgtactacacaaatgatggtggggataacacactgcaaccaacaccttctcaggaaattagcagaatggctagtggtataacccacttgcttaaagggtctgagtatgggagtgcaatgatgaaattcacatatgttgtggcatgccaagtttatgggcaacataaagcaagaggggaccatagagctgaggagattctgttcctgatgaagaatcatgacgcccttcgtattgcatatgttgatgaggttgacctgggaaggggtgaggtcgagtactattcagttcttgtgaaatttgatcaacaacttcagagagaggtggagatctatcgtatcagactgccaggccccttgaagcttggtgagggaaaaccagaaaaccaaaaccatgctctaatctttacacgaggagatgcgattcagaccattgatatgaatcaagataaccattttgaggaggctcttaagatgaggaacttgttggaatcattcaagacttactatggcattaggaagcctactattcttggagtccgtgagaaagttttcactggttcagtatcttcactcgcatggtttatgtccgctcaggaaacaagttttgtaaccttaggacagcgtgttcttgccaacccactgaaagtgaggatgcattatggtcatccggatgtatttgatcggttttggtttgtgcctcggggtggaattagcaaagcctcaagagttataaacatcagtgaggatatatttgctggattcaattgtactttaagaggtgggaacgttacacaccatgaatacattcaggtaggcaaaggaagggatgtgggtttgaatcagatctctatgtttgaagccaaggtagcgagtggtaacggtgagcaagcattgagcagagacgtttacaggttaggtcacaggctggacttctttagaatgctctctttcttctacacaacggttggctactatttcaacacaatgttgatagtatttactgtttatgcattcttgtggggtcggctttatctagcacttagtggtgttgagaaaatagcaaaggataggagtagcagcaatgaagctcttggtgcaatcttgaatcagcaatttattattcagctaggacttttcactgcacttccaatgattcttgaaaattctctcgagcgtgggtttcttccagcggtttgggacttcataacaatgcagctgcaacttgcatcgtttttctacactttctccatgggaactcgaacccattactttggccggactatactccatggtggagccaagtatcgtgccactggaagagggttcgtggtggagcataagaaatttgctgagaactacagattgtatgctcgaactcatttcattaaagctattgagctcgcgattattctgttggtatatgcggcttatagcccgttggctaagagttcgtttgtttacatactgatgacgatttcgagctggttccttattacatcttggattatttctccatttctgtttaacccttctggcttcgattggctcaaaacagtaaatgattttgatgatttcattgcatggctatggtctagaggcgggttgtttacgaaagcagatcagagttggtttacgtggtggaatgaggaacaagagcatctgaaaacaaccggagtgtggggaaaactgcttgagattatacttgatcttcggttcttctttttccagtacagtattgtgtaccatcttcgcattgcagagaatcgaaccagcattggtgtatacttaatttcttggggatgcatcatcgggattgttgcgatatacatcacaacaatctatgctcagaaaagatattctgtcaaggagcatataaaatatcgattcattcagttcttagtaattctccttacggttcttgtggtcgtgatgatgctgcagttcactaaacttacagtagttgatttgttgataagtctcttggcttttgttcccacaggctggggattgatttctatagctcaagtactgaaaccgtttctgttatcaacagtggtttgggacacagtaatctctgtggctcgcttttacgaccttttctttgggctgatagttatggctccagttgcattgctttcatggttgcccggttttcagaatatgcaaacacggattttgttcaatgaagcttttagcagagggttacagatttctatcattctcgctggcaaaaaatccacttgaagcaaatattgggtatggttcagaataagatcttctttatatgttacactgattactattaactaaacatccattaataagactgatttcatcatatttgcagggttcttaaagtttttgaaatgagttggtctgagaaggttgggcgatatccttttctctagcaaaaaaagttttgcttgaagcagcttatggtagcctggtttaatatcatcctccaccgttttgtggcattgctccaggttaagcctggtttttcctcatggtggttagcattttggagttgattgtttgaccttggtttggcttgtttataaacatataaggtatgtatctatcttcatttgctttggtgactgattttatttgtcaagaccttacgattaaatacataattttgtcatatttgcagggttcttgatttgttgagagatggtaatatgagggagcttagaaaa

SEQ ID NO: 8042 - DNA, 3000 bp, Unknown
  misc_feature (1)..( 3000): cDNA_ID_1989588_gDNA_ID_1621185_Annot_ID_57874 3000 nt of promoter + ATG
tttaacttgttatttattaaagatatggagtgactaaaaaattttcaattgttttatttatattaaagtggctaggaaaacagagaaattacataatcaattgttgaaaagttgaatttgaaaaagtgaatctagaataagacttgtttttttaagtgtcgtcaacatctgtgacgctgataatatcagcgaaaccaactttcttgcgaagccggacaactaaacatgcggcgtcgacaccttctccgatcaccaccactttgtctttctcttctccttctattcccacaaacgtcactcctgctccgttatttaaacatgagaatatgagatcattccatcaagcgaattagaacgaatataatttgctatccatagcatcagtgccggctctaggggggtgccagaggagcaaaagcacagggtcattaaatttttttccaattttacttgaggttttagggtccaaaattttcagtaattaaaaaacagtattaactaaagccaatttctataaatcagcacaaggtctttaagaagtttgagccggccctgcatagcatagtcaaatgccggttcgatatatatatttggattctaattgatatcttaccagtggttttggctccgatcttgagggcttctgaacgacatttgtcgcacctcatacttaccgacatcaagattttctgctcatgaaaattccaatattacaaataataatactgctacgtatatacttcatcctaaaaccttccgtatatatgttagacttttagaatacaaatgtttttagcgtaccttggccattttggaacctcttggagaaaatgaaaccttattttttttgtccttttggtataaatgattactataatttacgtgtgtaaatatagaagtgcttctgtctttgtctcattttcttatggcacattgcttaacatgtattaatatgcatattttatttgtactattatttgctacgaaatcgcagagtaattttcatgcaactgcttcgtagttaatattagtataaatgttgacgtttaagtggacaatataaggtattgcttgactcataagggttagatttggttaggtaaaggttagatttttatcatgcacatctaaaaagtcagtaccgtgaggaccacgaccggtcctgaattataaaaggcccgaaaggaaactagtcccttatttcgtgtttctgaataaaacaaattattaaccttaaaaccaaataaaatttagcaaactgaaaattgtaaacaaagaaacggcactacatcctacttgcaaagaggtgtcgaacggaccggcccacaatggccattagttttagatggactgcaacggagcagtccgctaggaccgcagacaaaataactttctccaggttcgccctgctaaacccaacaagtttatggaccgatccgtaggcttagtttttatatttaaaaaataataaatatatatattttaaatattaattttagttatttttaatttaatttaatttttaataaatactttttgtaaatattacaatttaaaaaatttaatttcttcatattgttacatattttacatattataataggattcataattaagtaaaattaattattcttacaaattatttatttatttttattgaatatttgtagtctgcaggtcaatccgccaaaccgtgggtcaagtccactaaaatccgtaatccgttttggccgatccgcaagacccgttatttttcggatatataatatagtgtccaaacccgctccatcatggtactagcccgtgagtctttggcccgcttgacactgatacatacatagtttaaaaaaaaaaaagtatattcgggtaggtccaaaaacgggttgatcagttcgcgggtaaaaccggttcaaccaccggttaatggtttaaccgtcgttttaagttggttttgtttttcctcctgaaacgacgtcgtgtctctctctctccctctatcttttgcgactctcctcgtcttctctgttcgtctgccatatgagtccttcccaagcccaacttttctgaaattgaagtgagtttcttcccgaatcccttaaagtttcaaacttttcaattaacttattcctctttctcttgtttctatccgaatcgtgtgagggttttcattttctatgctctgatttggtctcaatcgatgtacgtttataatgaatgtgtgttctaaattgtaataaaaaatgactagtaggtactagttgacagctctccacagttgaaaatctctcttttgtatgaggtaccaattgacagtctttgagtctttccttgttgttttgttatcaagggttctgagctttgtgtctttaggttaattttctatgttgtgttatggaaaattggtcagtgaatagccaaaccaaagattgtgaaatctgcattttgattttggtgaaaaaaactgtatagaaatgtcttaccctcaagaaacttttatattgcataaatgaatagcttagttgttatagggtttggttgtttcaataacaaagaatagaatttggtttcttatactttataaacttccttctttcagtcttttgggacagagatggcattaattcagaaaccagtggtgtgcaaagacactaataagatcttcatgaagcaaatacttgcgtttactgaacaggtataatatagaagtgttcatgtatatctttctaatagtgtgctttataacttgtaaatcaggtcttttctgaatctctcgctttccatatgaaacctctttgtgaattacatttctagtttgagacaatgtcatgtttgaggtggttaagacgataagaacgttgacattttctgattgaaaataaaagacctggcttccattaactctgcattggatgcttactctaattattttctgattaaagaaagacattcccttaatttataggtgaccattacacagaacagtaagctctcgccacgcac

SEQ ID NO: 8043 - DNA, 3000 bp, Unknown; identical to SEQ ID NO: 8040
  misc_feature (1)..( 3000): cDNA_ID_1989590_gDNA_ID_1621185_Annot_ID_57872 3000 nt of promoter + ATG

SEQ ID NO: 8044 - DNA, 3000 bp, Unknown
  misc_feature (1)..( 3000): cDNA_ID_1810169_gDNA_ID_1621186_Annot_ID_57435 3000 nt of promoter + ATG
ttgtgcattccctccaccgcatacaggaatgaacttagcgatgaagatacttgggaaattgaaggactggggaattgagaagaaagttttctccattacggtagacaacgcgggtaacaatgacacaatgcaagaaattgtaaaatctcagcttgtactccgagatgatttgttgtgtaaaggagagtttttccatgttagatgtgcaactcacattctcaacatcattgttcaaattgggctgaaagggattggtgatacattagaaaaaattagagagagtatcaagtacgttaaaggatcagaacatcgtgagatcttatttgcaaagtgtatggaaaacgttggtattaatctgaaagctggtttgttgttggatgtggcaaataggtggaattcaacattcaagatgcttgatagggctctgaagtatcgagctgcatttggtaatctcaaagtcattgatgccaaaaactacaaatttcatcctacagatgctgaatggcatcgactacagcaaatgagtgattttttagagtcgtttgatcaaataaccaatcttatatcaggttcgatatatccaacttcgaatttatattttatgcaagtttggaagttccaaaactggttaacagtgaatgagtccaaccaagatgaagttatcagaaacatgattgtcctaatgaaagagaggtttgataagtattgggcagaagtaagtaatatctttgcaatcgctacagtatttgatccgaggttgaagcttacacttgcagattattgttttgcaaaactagatatcagtactcgtgagaaaggaatgaaacatttgcgtgctcaactacgtaaactttttgaagtttatgagaacaagtccaatgcggtatcacctacaactgagtctcgtgaagatgttacacctgatgatgaaactgcaaaagggaattttagcaattacgatgtaagtttcttatgttttgtttttgttagttaatatgcagttttttttatgaaaaacagcaagtcattagtttttgtgttatgttattttaatttcttatctttgttataggatttctttgcttttcgcaaagcaaacgttgttgccaatggaaagtcgacgttggatatgtacttggatgaaccggcaatgaacgtaaaagggtttgagagtttagatattcttaattattgataagataacggtccacggtttggaaaattggcttccatggcttgtgacattctaagcattcctattacaacagttgcgtccgaatcatcgtttagcatcggaactcgagttctaagcaagtatagaaatcgtcttttaccgagaaatgttcaagcattaatatgcagtcgcaattggttaaaaggttttgaatcttatgaaaatggtaagtaagttgttttcaagttttatagtcacacaatcttagtctatgaattaacattgttagtttgtatgatatttgtagaggagtatgaaaaatttgatgctgaagatgagactctaccttccttccagtcgcttgtggatgatgcagatggatgttgagttggagattttattttaagtttgatattcatgtttggatttgagtttaagttcatgtttcagttatcatgtttgcgtttaagaagttgcaggtctttctcttgacttaagttcattttttgtttcacatttgagtttaacttgttacaattaaggtttgaatatgagtttaagttcagattaaggtttacaaatgagttgcaagatgagacacgacattgttccttttgggatattttggatttgagtttaagttaaggttctgatagcacgatttcgcagcttagagctatctcagattattttgcttcagccaagcaggctgcagttcttcaggttcttttacctgcaaatgtacaaactgaaattgatcagatcggagcgaaactggatttttctgtagctactatcactgagaaatcgactagtaactccaatcacataagacatttcctggattctgtgtaacaaactccgctgcgtaacccatgtaattctcgtaacccatgtaatttgcgtaacccatacattcttattcaaaactatctttagattgattgtagaatctttggattttgaaaaacaaatgtataatagtcatttctatactcgcaggagagtggcgcttatcgtagtttcaatcgtcatgcttgtggtgacttttcttggtctcggtaatgttttcatctttgagtacatgttactcaactatcaactaatgtattgactttagtgatcttgttatcatttcttttcctgcagtttcttcgatttgtactacagacacatgtgtggcaatgagcgaatgggttgagagaccatcaagcaatacggctctggacgagatattgccttgtacagacaatgccacagctcaagaatccttgatgcgtagtagagaaatgcccgcgggccgacccgtatatccgatgggctttgcgggccgggcttggacactgataattttgtctgcggtcctaaacgggccaacccgtcgcggcccgaaaaaagaaagcccactgcgaggcgggctagatgggcgcgggccggcccgtctgacacctctactcatcagttcctaggtcattattcgcttatctcccttcatcaggtgactgggcttatctggcccaagtacccattcgcgtatgtgggctcgtcagctgcgtaggtcctctacttggtgggcttggtgggcttttgtgggctggcttggtatttttgcaggtggattcctggaggggaatccagccccaacatttgccccccagcccattgagtgagtagaggaactcgatgagcggacatataggtcaggtaagatgataaatgtgataagatcagtcggttttgaggataaactcaacaatttcgatttaatttcagattccttaaccgaaagatttcgagtagatacgcgagataagtcgctgctgatg

SEQ ID NO: 8045 - DNA, 3000 bp, Unknown
  misc_feature (1)..( 3000): cDNA_ID_2165889_gDNA_ID_1621186_Annot_ID_174441 3000 nt of promoter + ATG
agaaattttgttctcggccaggcttacatattgatagtaatggtaaagctccatttccaacgtattcattgacagacgaagcgaaacagagtttatttcaatgtgtgaaacatgatgttagatttccagatggttattctagcgatttggctagttgtgtagatctagagaatggaaagttttcaggcatgaagagtcatgattgtcatgtttttatggagcgactacttccatttatctttgctgaactccttgatcggaatgtccaccttgccttatcaggtacagtacttactattttatttgccaacatttttttatctaattatttaacttgcacatatattttaggaatttgagcatttttccgggacctatgttcgagaactttacagacgagtcgcgttcaaattctcaaagagaacatagttttaatcatctgtaacttggaaaagatttttccaccatcattttttgatgttatggaacacttacctatccatctcccatacgaagctgaattgggtggccctgtccaatataggtggatgtatccatttgagaggtttttcaaaaagttgaaaggaaaagcaaagaacaaaagatatgatgcaggctcaattgttgagtcatatatcaatgacgagattgcttactgttcagagcattactttcccgatcatatacaaataaaatcaaggtaaatacatttatttatttagctattttctatacttcgatcttcattcaattacatgaatcaggttaacaagattcgatgaaggtgaagttcctgtatatcatgtccctggagtacctatcatatttatgcacgtcggccgtccaagtggtgaaatgcatgtagaatggcttccagagaaagactaccaaagcgcacatgcatatgttttaagaaattgtgactattttaaaccatttgagaggtatttttaatcactattcgtttgtaaattttcactaagatcacttcgatttatttttctttgtttgtaaatatagtacgttcgaggattgtctttctgcgaaatatccatgcttgtccgaacaagaactctacgcgagaagagctgaagaatatcattatgtgttaaagaatatgtaagtctacataaatttcttgcattcgaaaagtgagaatcatatttatatgtattaatattatttatctattatctaggtaacatattggaacactacttctccattttctacttgggttcaagaaattgtgcaaggacctttgaacaaggtcaaaacttggcaaatgtatttcacaagaggatatatgtttcatacgcaaaattacggccctggacgaaagacatgtaactatgggatatgtgttaaaggtgaaaattacgctgattcatctaatgaagcggatttctacggtaccttaactgatatcatagaactcgaatatgagggcatcgtcaatttgaggatcacactttttaagtgtaagtggtatgacccaaagattgggagaggcactcgacgaagccacggtggcgttgtagacgttatatctacgagaaaatacaataaatacgagccatttattcttggtacgtaattttgaagaggtcaaatatgtttctctgttaattattaatattgttgtttgatatatgtataacttgtgtatacaagatctaaagcagatcaggtttgttatattccgtatccatatacaaagaaaccgaagaacatttggctcaatgttttaaaagtcaatccgaggagaaacatttctggagaatatgaaaacaataatccgactcttttgcaaacagaaatgatgatgctgttttactcactacaattgaagatcttgtattagaaaatccggtagaaagcttaaacctaataatccttgattacgatgtcggggattctgaactagaagacgaattccgatgtaatttatcgtcctcggacgaagatgaagtagaatatgaagaataataaatgtgtgaagtatatgtttaattatttgataaaacatttgaataaattatgctttataatatatcattgaacatttaatttgttcatgaatattaaatatgtaaaattatttcaatttcaaaagtataaggtgactattatgctactacttggcgactaaattataatttggtgggcttccaaataacgaagcccaaaaccgatagagatgtaacaataatacgactactcaacgactaccctttgctttgttgggtttctaaatatcgaagcccaaacccaataaaaacagtgacgcttatgcgattaattagcgactacagcttaatttgttgggctaccatatatcaaagcccaaatccaatatactatgtgacaattatgcgactattacatgactacgttttaaattgttgggctccgaaatattgaagcccaaacccaaatcatttaggtgacagatttgcgactactttgcgaccacaaacgaagttgttgggcttctaattctcgaagccaaaacctaataaaaacggtgacagatttgctactcttttgcgactacagacgaagttgttgggcttttgaatttcgaggcccaaacccaaatcatttagtgacaataatacgactacaatgcgactactacaatgttgaaaaccctaaatcgaatcatttctcattcctaacacttagccaaattcttcttcatctctcgatctctcttcttcttcttcttcctctgaaaccctaaacttcttcgatctgttcatcttcttcttcaatcttcttcaaacttcttcaatcttcttcaatcttcttcatctctcgatcttcggatcttcttcttcttgttcgatctctcgatcttcttcttcttcgatccctactcttcttctttgatcttattcctcttcttcatttcttcgatctgcaacttcttcatattctcttaatcgatctcgacagatctctcttcttccaagcagatctctccgtcgatctaac

SEQ ID NO: 8046 - DNA, 3000 bp, Unknown
  misc_feature (1)..( 3000): cDNA_ID_3088544_gDNA_ID_1621186_Annot_ID_174432 3000 nt of promoter + ATG
gtctaacaagtctaatcgaatcctaaccaacatgtacttctctacaagcttacacaacattctagattacatacctaagttccacaactaaatccaccaggctttgatcgctgggtctcatcaaacaagctaacattcaagatccttctagactcattcctgtactatataccatgataaatcgaccattccttataattttttttttctttggtgttctttctctcccctagacttattctttttgagagaaaacacaggggaactcgcatactggatcgacaccctcaacatttttccaacctttgtaattgatcattccaaataatgtataatagtggggtcataggaaacatttttttccctatacactgtctgaaaatcctatcaatctctcattatctttttcttcttataaggggagaggaacacattcttttttatcaaattggtctcaatatcaggtatgaacaaggagtcaagatctatgaatactaaccgtttgaagaggtaaaatgaagagcagtgagattagctccagccttagtggttgtgttggaaactaggatatcctcaagtctgttagtttgccatctagattttccaatagtcggtatgaacaaggagtcaagatctatgaatacaaaacgttttttttttttaaagactcaataaacttaaaaacgaaaaataataagaatcaaaaataaaagcaatgttagtaagaacctccccagacttaaacgacactgtccccaatggcattcaaatccgaagaaggcgggaaaaagaaataaaaaataaaagaaaataaaacaaggggaaaagaaaaatcaaaccagtgggttgccttcaactaagcgcttgttttgagtcaatagcttgacttggcggagttcaagatgtggtgtagtggtggaggattgttgctgcctcctggccttctcaggcggtctgtagacagatctggtcggagcagctgcaggtgtcgatcgacactcagtggtgtgtcgatcgacactcttctcgtcacctgcaagaacaacaggagaaacaagctttcaaagaactctaggcttgttatcttgtgaagcagacttcgaagaatctaaagaattagtcgaaggtaaagcaggagaagagatagatgagaacttatcacaaagggcctgaagtggtgtgggctgaagaggttgtgcagaaccctctgtctgtgaatcccgagggtgtcgatcgacatgagtggtggtgtcgatcgaccctgttgcattacaactctcattggcgagctgagctgattggagcgttgtgtgtggctctgttgtgggattctgagcagtcttagaaggtgtgtatgtgctagagtcaatactactgatagtcttcgtaagctctgaaccatccatgccaaatttcatctccaaatcataaacctttagagagatccgacctctcttcacatcaaacctagcatcagctgtagctaggaacgctctttcaaggataagaggatcctttggttccttctcatagtcgaggaccacaaaatcagcagggataacagagttaccaaccttaacaggaacatcttcaaaaattccttcagggattcttttggaacgatccgcgaagaggagagtgattctagtcggcatgtagttagtcatgcctagtctctcagcaacagactaaggcatgaggttgatacttgatcccagatcacacaaagagcgactgaacttgcttgtggaaattgagcaatcaagaacgaagctacctggatctggaagcttctcagtggtctaatcaggagtgatggtgcagatgtactcaacaatgtccactctctgtgccttaggcagcatgattgcaccaatgtcccgtgtcagcagtgaggcttcatctaagctaataccattgtcaacaagtcgcttgacatacatgttgagtggagcagaagatgtctcagatgcatccttaggaagagaatggaggatcttctccattatggatgtgcacttagcagcatgaatctccttcttagaacgacgcttcctcggataagggacacgaggagtgtaaatagactaaggctgcattggtattcgcacctcacaaggtgcagtccggatccagtgtcgatcgacattagaggggtatcaatcgacaccttcataaggaatcgtctcagagaagagcgttccagggtgtcaatcgaaactggaaggtgtcggtcgacaccaactctacagctgcgagcttgatatgtcctggtttttattaatttctaacatagttttaaaattgtttttagggtatttctagtctttttcgtatgttttgagtcatttcaggtacatttacacatctgggagctatggagcataataaggaattttggaagcttttcagcaatgaagattatcaaagacgtttttcgcgtgatggtgtcgatcgacaccacacctatgtcgatcgacacccccccccccactctctcgcgagcagaggaacatcatgattgcattaactagaacaaggttcacgaaccaattggactgatacaaagaatgcattcatgaatcacttattcgatgaatccgtgaaagaggcacttcgtttgcaaatctcttcattcactcaggctccagccgagtcccttagagcagcttggctccgcttcaggtcttattagcgagaatatccccaacatggcttccaagataggcacctcatcaatctattctacaaaggaatagccaagccataccagagtcaactcgatgcagcaagctattgtaacttcatgacaagaaccactagtgaagcattactcctcatcaccaatgctttaactagtctttcgacacaggaagttgacagagaacgaagaatttcagctgagattgccaccgcaagcaaagagactcttgtttcagcaaattctgctcctatccaagcccccctccaccctccttagacaatagactcgattccatg

SEQ ID NO: 8047 - DNA, 3000 bp, Unknown
  misc_feature (1)..( 3000): cDNA_ID_2165947_gDNA_ID_1621186_Annot_ID_174457 3000 nt of promoter + ATG
ataaagtctagctcttttggataaacctcaatgatctatttatactaaagtgttggaaaccctagattcactagaagacaagagatttaaggcggtttgggcgaatactcgaccttagggatcgagtaaagagggtgctgcaaagtcgacgcctttgtgtctatgctccgactgatcaattggtcgagtagatgcttcatcctctcctatttgtatgctcagatgtctggttgagtggggaatgaggaggatccgaagacgctttgatagctcaacaagtcttgtagagatggtcacccttggtcgagtaaatgcttcgagtagtggatcgagtaggaggggcgagtagttgaatctgctgcttcatctgaggttgccttaatcgagtaggagggtcgagtaaactgcagcctcctttgtagcatcctggaccgagtaaagaggtcgagtaggatgatgcctcttctgtagctgccaggaccgagtgaatggatcgagtagagtctttttaagctccttttgcacctgaaaacacaccaaaacatgcaatgcgaatgcaagatgatccgaaatgcctaagtatgcaaaacaagctaaaatggtgcaaaatgatattatacaatgagcaaatgcaaagctaaatgatgataaacatacacctaaaatgagtaaaatacagtgttatcagtgatgccccaaggaatcatcaccaaagacaagggatagtgtcaccaccagttcagaacaacaactttgagatcaagagtggtctcatctcaatgatccaaggaaacaagtttcatggtctacctatggaagatcccctggaccatcttgacagctttgataggctctgtggccttactaagatcaatggtgtcactgaagatatgtttaagctcagactatttcccttctctttgggagccaagacacaccactgggagaagactctgcccccagactccatcaactcatgggacgattgtaagaaagcttttcttgccaagttcttctctaacgcttgcaccgctagattgaggaacgagatctgaggtttcacacagaaaaacaatgaaacattctgtgaagcttgggagaggtttaaaagctacaccactcagtgcccccatcacggttttaagaaggcttcattatttgagcacactctacagaggagctttaccaaagatcataatgcttctcgacacaacctccaatggaaacttcctgaacaaggatgtagaaaaaggatgggagttggtcgaaaatctagcacaatctgatgggtgatacaatgaagactatgatcgcttagtgagaggaactggaggtagtgaggataatcaaagcaaagatatcaaggctctaaatgaaaagttagacaagttgttgctggctcagcagaagcacatacactacataactgatgaagagcacttccaaatgcaagaaggggggaatgatcaaactgaagagctgtgctacatccagaaccaaggagggttcaacaaggagtacaacaactacaagcccaacccaaacctctcctacaaaatcactaatgtagctaacccccaagatcaagtgtatccacgacaatagaatcagtccaagccttttgttcagtacaaccaaggttatgcccctaaacaacagtttaatggaggctaccaacagcagaatccaccaccagggttcactcaacaaccacaacaagccccaacagctaaagatcccgaaattaagcaactcattcaacaaatcattcatggataagcgagtggcccgatggcttttgacaagaagatagctgaattacacaacaagatcgattgttcttacaacgatctaaatgtcaagttcgaagctctgaattccaaaatcaagtatgtggagagtcaatttgcatcaacctctgctccgaagcatcctcagcaacttctagggaaagcagtccagaatcctaaggactatgctactgcgaatgctatcaccatccaccatgaagatgagtctccaccaagtaatcaaaccctccatactgaggacagtatgattcaagaatgggggggggggattcaactcaaattgctgcacctgccaccaagcaattcatctggactatagagcacacaactttgctaaatactcaccattcttgaaaaaagttcaaaactgaaaaactcaggaaagatcagaatcaagagatgattagcagtgcctctacccaagaaacatacaagaagaaagtcatccaagaaaagcttgatgatcctggttcattcactctgccatgctctctaggaccattgacattcaataggtgcctttgtgatttgggagcatctgttagccttttgcctctctctacagctaaaaggctaaggatcatggaatacaagttctgcaacttagctttactcttagctgatgattctgttgcacatactaatggtctaatagaaaatctgcctgtcaagattgtaaatgttgagatacctacagattttgtggtattggacgtagatgaagaaggcaaggatccccttatcctaggcagaccattcttagcttcagctggagcagtcatagatgtcaggaatggaaaaattgatctaaaccttgaaaaaggtatcaagatgagatttgacatcagcaaggcttcacggaaatcaacaaccggagttcagaattttgggatttaggacatggatgttgatgaaaaaacagaagtaggaacctcaccaaaagtcaactatacttcccaactcagcaagctgaagcgaacttttgaccacaagaagagggcaatggaagagttagctcagactgaagatcctacagaagatgactagtatgcgatgggaaaaaaatttaaatggcaaagcagagtcatagaaggattgtcttcaagggtgatgaagctgaaagattaactatggatgtataaaaaaaagagttaaaaagttttcaaatggtattgatccagagaagatg

SEQ ID NO: 8048 - DNA, 3000 bp, Unknown
  misc_feature (1)..( 3000): cDNA_ID_2165930_gDNA_ID_1621186_Annot_ID_174452 3000 nt of promoter + ATG
ggagataacccggccaacccgtctaatcaggtccctccgcgacctgccagcgaattggccgagctccacgcaatgatcatgaacttgatcaacttaaccaaaaaccaagaaattgcgcatcgcaacctcgccgcaattgtgggtcagcagagacgcgactccactcgcatggtacatgaggtagagcgcgataccgcgggtaaggaggttccccccccctcgcgaaactaggattcctgcccaggtccccatagatctgacaggtaccgtctcccttgccgatcctactccgagaactcgtctggatttcgcttcgatagacgtctcacatcctatcaaccggtaggtcgcctttttacaggcacctgcgaatgctctcgtcaaaaacctggcaacaggaaacgaaacaagcacaacgcctgccttcccaaggctaccggtcccaactttactatcgatgggctgttcgccccctaggtacacgtggacgagaaaccaaacaaccgcatccagttcccgcattcccgggagctcaacgcaacaacagacctctatcgctaatccgccatccgtttcccggataccaggaagcgacctccttaacagtccaaccgatccccaagcaccggtcgatccgcataacgtcgtggatatggaaacattccgcaattacgcagctcaaacaaatgcgaacatggctcaaatgcattcgcgaatgcacctagcagtgagtgatgctcccgacatagatcgcgtgatcgaagataccatgcgcaccctgttcacgaataggatcgctcgtttttgcctccgagacgtcgggagactccgtttcccggagtacgacggaacgagcgacccaaaggctcatctgagatccttccgtttcgctataacatgagcgtacctgacagacgaagaaaatgaagcaggtcattgccgtttcttcgtagaaaacctcgtaggtcacgccctcgaatggtttgctagcctcgaagggaactccattgataccttcgaccagctcgccaccgctttcttaaaacagtattcggtacttatcgaacacaggacgtctgaagccgacctctggagtctcactcaacttcagaacgaatccctgcgatcttacgtcaaaaaattcaaagcaatcaaatcgaaaattgcgaacctaaacaaagaggtagccatagcagcccttcgtaacggtctgtgcactacaacaaatatccacattcttatcacgagagaaacgctataaaatgtcattaatagcgttttcataaacgctgtcttatgcccctgttatggtaaaccctccatatacgatagcattttttccgtatgctatgatatagtattctaccatagcattagtaaaatgctttcatttatcgactataatagcgatatatataggctatgatctataatgtttttgatgctgtaatattcagtgtcatgactctaattttatgcggttgtttgaatctatttgcatttggtggaacctgtttagttttcaaaatatccaatacatatataataataaacatccaaaaagtatacaccatttcataaaccaaaaatcaattcatacttaacacaagtctcaatccaacacttaaactaatatgctaacttctatatactacttttgccaatgaagttattgatgagatcatgcaaattccttacttcgttttttagatattggactccgttcttcaagtaagttagctcagcttcataggttgttgtagtctcttcctttctcttaggttttcgaaaaaattgctaccttttctcttaggttttccccaaagactgttgtcttcatctatctcactgtcctcaacgacgagattcattatatcttctgttagaacatgaaataaaacaagtaagatttcggcttcttgaacacaaacttattaagtcacattattagtaaacaaatctttttactcacctgaaaactcaatctgcgaatgagacataactttagcctgagaagagactaattccatttcctttctacctttactttctccaagaaacgcaaactcaagaccatcacttgtatccatcatcggtgactcatagacacaactcgaacaccattgacttagatcaggaacttctgagaattctgaaaacaaaaatgacaaacgacataagtgaaatcaatccagctaatctagctaaccactaacaatccacaaaatgatgtttttgaaaccaaaccaataaagcaagtctgatgctaccttgactatcacccatctctcaattctctatattcgaaagtcaagtctttttctctgtctccttggtcttaaccaaaactcagtctcctagtagcttaattgaagctaagtatattgtcaatattgaagcaagaaagaatatgtatagaggaaaagaaacttaggaaggaatcttgatactcacataaagccataatcttcaagtattacctgaaacaagttaaccaagtaagcaccaaacaacataaaaaacaaaacgaaatcctttttatgctacatatgctaacaaagagaccttgcttaatgacctaagatactacaatatccacggctgaatgcaatgtcgaaccatacacacaacataattcaacatgaggaagaacacttaagatgttatagataaagtatttgtaattagatttatgaatcatagtgatttgagatagaccacaaccttggagaagagagaaacgaacccagagaaagagatgttgagtcgtttcttggtttttgtctcacagtcaattcgtcgaacatcttgtgtgcacaaaaacacttcaaaaacgttacccttttgagctgcagattcaaagaaagaggagagacaaaaccaacagaggagagacacaaccaacaaacaaggattagaagctatagattcaaagggaaaagagagacaaatcaacaaaccttttccaactaaagcaatctctaactgaaacgtgagagg

SEQ ID NO: 8049 - DNA, 3000 bp, Unknown
  misc_feature (1)..( 3000): cDNA_ID_2165821_gDNA_ID_1621186_Annot_ID_174425 3000 nt of promoter + ATG
tcatcttcttggtggatggtgatagcatttgcagtagcatagtccttaggattctagactgcttttcctgggagttgttgaggatgcttcagagcagaggttgatgcaaattgactctccacatacttgattttggaattcagagcttcgaaattgaaatttagatcgttgtaaaaacaaacgatcttgttatgtaattcagctatcttcttgtcaaaagccatagcgccagtagcttgtccttgaatgatctgttgaataagttgtttaatttcaggatcttgagctgctagggcttgttgtggttgttgagtgaacgctggtggtggattctgctgttggtagcctccattaaactgttgtttagggacataaccttggttgtactgaacaaaaagcttagactgattttcttgtggtggatacacttgatcttgggggttagctacattagtgcttatgtaggagaagtttgggttgggcttgtagttgttgtagcccttgttgagccctccttggttctggatgtagcacaactgttcagtttgatcattccccacttcttgcatttggaagtgctcttcatcggtgatgtagtgtacctacttctgtcgagtcagcaacaacttgtctagcttttcattcagagccttgatatccttgctctgtttatcctcagttcctccagtttctctcaccgagcgatcatagtcttcattgtagcacccatcagattgtgctagattttcgaccaactcccatccttctgctacttccttgttcaagaagttttcatttgaggcagtgtcgagtagcattctgatctttagtaaagctcctctgtagagtgtgctcaataatgaagccttcttgaagccgtgatggggacattgagtggtgtagcttttaaccctctcccaagcttcacagaaagttttattgtttttttgtgtgaagcctgggatctcgttcctcaatctagttgtgcgagcattagagaagaacttggcaagaaaagcttttttacaatcatcccacgaggtgatgaagtctgggggtagagtcttttcccagtggtgtgccttgtctcccaaagataagggaaatagtctgagcttaaacatatcttcagtgacaccattgatcttggtaaggccacagaaccgatcaaatctgtcaagatggtccagggggtcttccataggtaaaccatgaaacttgtttccttggatcattgagatgagaccactcttgatctcaaagttgttgttttgaactggtggaggcagtatcacttgtctttggtgatgattccttggggcatcaccagcaccaatgtttcttggttgatcaacattaggtgggtcttgaacatcaactggtctgtttctgttgatccataggagctggtttttgctgatcacagggtgcctttgctttggtttcttgtaattcatgagctattctgtctattctgtctttgaaaagtagtaggtgtgtagaacctttggatcgagtttgcatgcacaaagattagtacctataccacaaaaacaagcagacgaaatgatgaagcatctctacaagacttgttgagctatcaaagcgtcttcggatcctcctcattccccactcaaccagacatctgagcatacgaataggagaggacgaagcatctactcgaccaattgatcagtcggagcatagacacaaaggcgcagactttgcagcaccctctttactcgatccccaaggtcgagtattcgcccaaaccgcctcaagtctcttgtcttctagtgaatctagggtttccaacattttagtataaatagatcatttggggtttgtccaaaggatttatgctttatctttcagtttttctttgtgtttatgaattttgaaactttaattactcttaatctatttcgtttttgcatttgattgtttaagtaaagttgtttagcttgtttagatctacattttggtatgattttagtaatttctgggtttgtgttcttgagaatgttgcttgagtagtgattagggttcttgaggacggattagattagggtaatctcttggttagttaggtggttagtgtttaggtttatacccttctggattcgcttggcccctatgcggttttcgctggctaatgtggagattcgatcaaagacgtccagcgtccaaaagacgttcaagtggatgtctgacttacgaattctagagatatgtagactcggccaagggattggtttgtctgcctattggctttggtagattttttcttaaaccctgctctgctatgtttcatcaacaagagttgagattaggaagtggtagagttatgggggtctctgtcacgagagtggattgacccagtttttgaatctatcgtcatgaaaatctacctttcgcctattagccatttgatgaacactagagttacccttatcaatgaatccatccttagaacttctattagattgattttcatcccctgttgattgtatttttatttacctattatttgtatcctctatttgcatcccctgttgattgcattttagttcttaattttgtcacctgttagttctactcgacccaatgatcgagtagggctgttaagttctcatttttacttgtttgaatcctgacctaggattgttactagaaacccacaatctttataatctggcttgacttagtagtttttgtacacatcatgattgctagcaatacagtggactggattgacaccctctataactgcatcgacatgtttgtgttttagaggaattgaactgaacacagcattcagcacataagcagacctgaaaaacctgcttatcaatttggcgctgttgccaattcattgttgcattgttacattcaagatatcagaaacttttaagatcaagttcttttacatttatcaaaatactaactcatcatttcgtctgcttgtttttgtggtataggtactaatctttgtgcatg

SEQ ID NO: 8050 - DNA, 3000 bp, Unknown
  misc_feature (1)..( 3000): cDNA_ID_3088548_gDNA_ID_1621186_Annot_ID_174429 3000 nt of promoter + ATG
gttgttgctgactcgacagaagtaggtacactacatcaccgatgaagagcacttccaaatgcaagaagtggggaatgatcaaactgaacagttgtgctacatccagaaccaaggagggctcaacaagggctacaacaactacaagcccaacccaaacttctcctacataagcactaatgtagctaacccccaagatcaagtgtatccaccacaagaaaatcagtctaagctttttgttcagtacaaccaaggttatgtccctaaacaacagtttaatggaggctaccaacagcagaatccaccaccagcgttcactcaacaaccacaacaagccctagcagctcaagatcctgaaattaaacaacttattcaacagatcattcaaggacaagctactggcgctatggcttttgacaagaagatagctgaattacataacaagatcgtttgtttttacaacgatctaaatttcaatttcgaagctctgaattccaaaatcaagtatgtggagagtcaatttgcatcaacctctgctctgaagcatcctcaacaactcccaggaaaagcagtctagaatcctaaggactatgctactgcaaatgctatcaccatccaccaagaagatgagtctccaccaagtcatcagactccgaatactgaagacaatatgattcaagaagggggggggattcaactcaaattgttgcacctgccacccatcaattcatctagactatagagcaaacacctttgctgaatactcaccattctggaaaaaaattcaaaattgaaaaactcaagaaggatcagaatcaagagatgattagtagtgcctccaccaaagaaacatataaaaagaaagtcatccaagaaaagcttgatgatcccggttcattcactctaccatgttctctaggactattgacattcaatagatgccttaagaatggaaagattaatctgaaccttgaaaaaggcattaagatgaaatttgacatcagaaaagcttcagggaaatcaacaacaggaggttagagttttgggattcaggacatggatattgacgaagaaacagaagctgaaaccccaccaagagttaactatacttctcaactcagcaagctgaagagaacttttgaccacaagaagagatcaacagaagggttagttcagactgaagatcctacagaagatgactggtatgagatgagaaaaaaaattaaatgacaaagcagagtcatagagggattatcttcaagggtgatgaagctgaaagatcaactgtggatgtttgaaaaaagagtcaataaattttcagtgagtattgatccagagaagatggaaactgcactagctattaaagaggacgaagatttctcaacagaatggtttgcacaagaagatcagaaaggagttcacttagagaaaagaagcttggagagcaagttgttgagtgagtaggaaatccctattctgacttattctccaggagtgcctaaaccgcccaccaacccctctactgaagaagaacacttgattattaattctgctgctgaagaactcctggagctttgggttggatataaagctcaggaggatacaattggaaaattaactcataagatggaagagttaaatagcaccattctggaacttcaagaaatggttaaaggctaccccagttttgaaattgaggattggtcaaaggagcctggtttagaagaagaagactactctgttgatcagaaagaagcttattttgaagaaaaatcaaatgagtactcatcttaccatatgtcaagagaggatgcaaagtatgattcaggcactgaaaattcaaccattgaaaatgaggacttctctgttcccctcttcaaccttttttctgactaagctctgtaagagtcaagcttaatgacttaaaacaagctcacttggaaggaagtcccatgtctatccatgtatataactttctattttccttgttaattttgatgtttttgtttaagtgtttcaggtttattttattgaccctgaggaagtcaacggtcgagtaaattcaaaacaagtaaagaatcatctcaaccgttgatcgagtaaagtgaggaggagagctttaagccgttgatatgaatgaccaaatgagagaagcatcacaaccgtttgatcgagtggcttcttgaggtttattctggtccgtttgatcgagtgattaaaagcaaagctttctccaccgtccgatcgagtgaagaaaccaaagagaccaccttgtggactccgactttctcgtgacccgcctccattgaaacgctgctgtctctttgtcttcttgtccccccccataatcgctttggtcccccattgcaattcttgaactcaacaacctcatctctccacctcccataccaaagcaatctcaaattcttatatctctctctatctctttctcttgcatttcctctttctatcaaaaactcaacaaaatccatctattttcttcatcactcaatgacaaacaggcgcacgctcctgtcaaggatccggaatagagctctctccccattgaagaggtacccaacaccttcttcgtatgtagcagctcgaggactttctgaaccatcacccatggggtcgagcaggagagaacaagcaagtttcaagatcgatcacagcgaatcaagccaagaggaggaagtgatgcaagaagaagaaacttttagctctcccgttggaaatactcgatcccgaagtaagtcctctgcaaggaaattctccaggaacaaggcagacatcactcgaggaaagaagcccgtggggaggaggttggaactggtagatgaagattctaaggaagaaatggcttcaccaaaggaagctgatcaaacagagagaggaggtgatgatgatttggaatcagagaagtctgcaactcgaaacgagtcctacaagctgctgaagcacaatgattttttaggaactcgatagcctcatcccgagacc

SEQ ID NO: 8051 - DNA, 3000 bp, Unknown
  misc_feature (1)..( 3000): cDNA_ID_1810214_gDNA_ID_1621187_Annot_ID_57441 3000 nt of promoter + ATG
tggtaaaatagagaacaatgaattatatttcacaagatcttccttttcaaattatttaatttaatctttgcatatttagacttgcagcaactgtcaacaagtcggacacaacaaacgttcatgcaagcgtaaagcagtgccaaaaccacccaagaaacctcaaggacgaccaaggaaaaaacagaaaacaatggatgaagagaaccttatcactcagccaatacaatcttctcttcaaagttaatgtttgacaagtctttactttagaatatcttgtccctctgaaacaattgtttttttttgtgacaaatattgttgtgttgcaacagcttcgatagttatgttggttggatttatttaagcatgactctttggattattttaagttgttgtgtctttctttcagcttctaaaatccaaactaattaagcaattcaaaatcatttagaacgtttttttgtaataaattcaaaacagttttaaagaacataatgtggtttttgcgctaaatacaaatgtctcgttgttgttttttttggaaattaatatcccattaatatttaatttttgtggggttaagtttattaacaggttttagttcagggtttgttttactaaaaacatagtttagggtttaaaaatggatctggccaaagttgagggtttttttcattaaattctcatatataaactctaacaatcaaatcttctattcttttttttcggatctaaatcatctctttatatttactttctaaacatactaactaatacatatatttctttgcaatgatcatcaattgtttcaacacgaaaactaatctgttcgattgaccatgtcatgaaagaaaccatggcatattctttctctgttatatatcacttttgtcgtaattgtttcagtataattctcgaatccccaattttttagaatagtttgttgataaaattttatttactacagtacaaacaaaatattatttctagttccaatccttattcaaactagaattggtttcttttttttgttacaacaactttctctatatatattgtaaacatttcttttcacttgttttgcttccagagtgaagagaacagaaaaatatcgagatggctaaccaagaagaaggaagcatcttgaaagctcttgacgttgctaagactcaatggtaccatttcacggcggttgtagtcgccggtatgggtttttcacagactcatatgatctcttcgtgatatctctcatcacgaagctacttggccggatctactatcaggttcctggctcctcctctcctggaagcctccccgacggcatctctgtagccgtgagtggtgtggccttcgccggaacgtttctcggacagatattcttcggatgtcttggtgacaagctcggacgtaagagagtctatggtttaacactcttgatcatgactatttgctccattgcttctagtctttcctttgggaaggacccgaaaaccgtcatggtaactctctgcttcttccgtttctggctcgggtttggcattggtggtgactatcctctctcggctacgatcatgttcgagtacgctaacaaacgtactcgcggcgcgttcatagcatcggtttttgctatgcaaggagttgggatacttgccgcaggaggggtttctttacttgtctcgtatcttttcgagattgagtttccgtctcgggcctacatattggacggcgcagcctccaccgtcccacaggcggattacgtgtggaggatcatcctaatggtcggagccttaccggctctcttgacatactattggcgtatgaagatgcctgaaaccgctcgttacaccgctctagtcgccaagaacgcggagcaagcggctttggatatgaataaagaaattttcacagaagtggacgaaaaaagatttgctctcaccatttgtcaaagtgagaactggttttcacggtttgtcttttcattcaatttcggaccaaattaccctgggaaaacttaataatggcacaaaccaaaccgtgcagcagttcgtatcggttcagttaacggcgtaaaccaaaccctacagcagttggtttcggtttagttgatgcggttcagttttgaaaaagacaaaaaaaaaaaaaactgaaacgaagaaacccgagaaaacgaaaaagagaagagagtaacggagagatttgagagagaatcagaaagcgaaacgaaattcagtatccattgcttcaaaattcgacataacttcgaattgttgggtagttgaattgagccactgaactcccacatccggggaagtgaaagttactgtttttcccggcgaagccaagagaaagttactgtttattccggcgaaatttgaacctccggcgagatagcatctttagctatagctgggaataaagctaacgacgaagtcccgaggaagcagcatggtccagggaaggagaagcgggtattaagagtttccccgcggagaaaacgctctgcgacaaaggcaacggaggaactgggttagaatctctaatttaccgtttgttgtctttgggtgtatcagaattgtaaagcttgtttgattaaagggttagaacttgtcggaatttagcatatctttaggatgaaaaattgagaagtagaattggaaatgtctgtttccgccaaaaatatgattttgagttataatctggaaaatgtctgtgtacgtacactacttcggtttgcttaacagtatatgacttttaattgcaggtagtccaagtgttgctccgactgaagatcttacagttgaagagttaccaccaagactctttgctctagaccggtacccttccgagacgaagatgaacgcgtactctaaaccagagatgtagtttcttctcgattctccatttggggaactttttaaaatacccaaaaacaaggcatctttcaatgctaagcttgtccttggactaatatgccgtcagttagtgacaaagaaggtgaatgag

SEQ ID NO: 8052 - DNA, 3000 bp, Unknown
  misc_feature (1)..( 3000): cDNA_ID_1810210_gDNA_ID_1621187_Annot_ID_57442 3000 nt of promoter + ATG
atatttgagtgttgtttcaacgaaacaacttactcatctaattggtaacatttcaatcaaaaacggcaattggttaaacgtaagaaaggcgataaatttaattgatgagaattttttttgaattataaacaattgacatcgtaatctagataacaacaatagttgcttttcatgtaaaaaataaaggaaacgagagaaacacggatagacgcgcgataatcaaaagatagataaagggagagggtcattgttgtgagcgagaagaggtttgattatgacacaataagacaaacttggattatatgataagaaaaaataaaggtgagaaaacagttttcacatgacctcgacaatatttggtttatatgtagctcaaatttgatatcgaagtttctggtattattgtcttgaggtggaatggtgagaagtattatggtgacgtggaactaagttctggtagaaagacatcgaatttcaaattagaagatcaaacgaatgatgttgtttcggataatcaattcaaaggcttatggagctatatgattaggtaaggttagtaaatttaattttgtttctctgtttttaactaaaattttacatagaagaaagtagaatgtatggaagaggaagaaactaacgatgacaatagtcataaatatttgacaattaagatgacgagaaggaatacaagagtacgaaaacgatgaatgtgaagagaaatacgaaaatgtatgtattggctgctaattgaatatgagaaaacaaaattgatttatgattttttatatcaaatttgattttagacaccatagaaaataaaataaaaaactcaaactttggatccaaaacctaagaaattcatattcatgtggttaaagctctaaaccaaccaagtttgttgcaatgggttagagaccgaaaataaatcagtgagtgctcaagtagcgagaagtaagataaaaacagctctaacctgagttcattagcggaagactaaaacagatccaagagagtcaaagtgggatttagaggaagtttgtgaagaaaatgtaatttgtgttgtttttgtttttgttttttgaatacaaggaagttttgagaatctgatataaagcccgtaattatcccatgctcaaaatcaaagcatgtcatattagttttgtaccaagcgtcaaattaaactgtaaaatactctttgacatgtgttttcaattttataatttaactgttctatttttaattttaacaaatattaataaacccacacgtagcgtgggttcaagacctaatattatctaaaagagtgaaagatctaaaaatctgacaaatcctaacaaaaggcgagaatgaagcaaaacaaaaacgaaaataaaaatctaaacaccaatcttctccttaactctctccggtttagtttctccggtaagctcctcaagcgatatccccttaggctccagaattgcaaatttcgtgatcagcaagccagcaaaatgtataacgtcttactcatacctaaagccttaaccaaagcagcaaacccgaaagaaccgaccattgcaccggctttacctgacgccgcggagataccgtgacaagtcgacctaatcctcgccggaaaaatctcagccgggacaatgaacgtagttgcattaggtccaaaattggaaaagaaaaaggtgaaagagtagaaaatcacaaaaccaatccggttagctggtaaagtccaatggtggtacggtacggctaaaaccaacatgaaaacagtcatcatgccgaatccaatgatctgaatccagtaacgtcccagtctgtcgattaaactatagtggcaatgtaaccaggaactgtactgcaacaagcgattatggtttgagccctgacgatcatgaagagctcctggagtgcgttcatggttttagccgaaggtaaccatccaaaggtggtgaagctatccttctggaactagttttggctgtagaaaacgatgtcgaggaggaaccatgtggtagctgttccgaataggttaagaccgtgacgacaaaggaatttcttggagaacaagccaatctcgtctttggaaaccctagcttggtcatgttttgcggaagaggcttcaatgtctacgttgagtaccttattcatatgggtaaattgcaggccacacccattgaccatgttttattttcatggattgtcaaagtcaaatgtggttttcaccatttgtcttttcgcctgcaaaatgacgcttctgcccttgcgcttctctcttagtaactgttgaaatgtacggtttagtttagcaggtttagttacgtatactgttccggttcagttgaagattttttgtttcacgttgacgcgattcggttccgttacaagtgagattatttccattattccgaagtgacatcaacatttaatgccctcaaaaagtttagatgtgactattgtaacaattaatgcaaaatcatcattacatcaaataatattaaaaaaattattgataataattaataaaaaaattgttgagataaagaagatgaacccaggaacaaagaattattgagaacgtacattgctgctgaagaagtgttgatcttgtttttgtaccaagtttggagccaaaataagcattgctcgtgtaagtaatgaagttcttttaagaagttttttgttatgtcatattagggtcttgattgtgttcgaactccatttttttatcagaaaatttgcaaaatctatatttgtttgtttaaaatagtcaaatgataattggtatttaggtttataaatgtgtagtatcgatattccatttgttttttatatgtatagtatttttcagttgcatttaatgtgtgtctcctgaatttatgatgcaggtgggttatggatattcccgtatttactatggtcggtgagtggaaatgcaaagaaggagaatggaaatttgaacctgaggaaggcatctttggtcgttgtgtacgcgtttaggaaaccatg

SEQ ID NO: 8053 - DNA, 3000 bp, Unknown
  misc_feature (1)..( 3000): cDNA_ID_1807395_gDNA_ID_1621187_Annot_ID_57443 3000 nt of promoter + ATG
tgttatgttgctttcacagttatattgttacccggctactcttaacaaaactgatcatatttaatttttatttttttttgtaattctttttatccatcaattttccgtaaaagatatttcgttgatgctttgtgtcactgacctattgctcccaattttgttattcaataccgtgatagatacacaatcattgtgaatttgtgattactcttcacaaccacgaaggagaagagaggagaaaaatatgatacataccaaaataataagcatatacaaaaatacttcatatatcaaaaaactcgcaaaacgataagacattaatcaccttagatatgcttgttctctaaatctgttacgtaagagattaaattcaaactaaacgataagacattcccaattttcttttactcttcttctttcttctctaattcttttcccatatctcttcctctccacctctgtctatcacttcatcgatggaagtgaaacaaacaacggcaacgttgactcgttgagtccttgacatagtgatcaaaacagtggcgatgaaaccgaatatggcttgagtgcacgatggatatgacacgttgacggaggattcacttctctctcgaagctatcatggctatggatttccatcacgtatgcaacgcatacaacctaaaacgtaacgatgacttaatattttacgtcagtcatcactaccaccatcatcgccagcataatcacactttcgacgacaaacacaaatctatcacttctattatggaggaaataaccaactttttgcaatgacggtgattttgtttttcatcctccagtcctttagaattgggttaaatagcatatttataagagattgttaccgaaaattacgaaaccgacttccttatatttatagcagtttgtaacatagctaggtattaagattttacatatgaccgcatattctaaccgggctaaatttccttttccaaaaaaagaataattaattttgttacctattctcgccatgatttttcttttaagtttatggtagatatcaatttttgtttttctttttgttaagttattttgagaatttatgctaaatattgatgtggaccaataatatcatgtttttaaaatcctatgtggacacctttaaaaccaaataacctcaacttttatatagtatagattgttgctgggtgagttttttcctaaaatgtgacagtttagtcgcaccaaccgttgaaggtagttccagtggtgcaaataaggaaacaactataaatggttttttacaaatatctgatttcagtagtagaagactattgttagttgttacctcgactattattctccttcaacttttttggtcatttcaatagctttacctttttactttaatattctattttgtgttttctgtgaatatgattttagttttcaaggattcccttatttttcgccggcttttgtatttcaaaactgcattttaagtgggtgattggttcgtctgtagctgtaaaaattttgcggtaggtgtgatgactttagctttaggttttattgttgtagaaattaggctgtaaattttattaatataatattattacttaaataaattgattgtagaaataaaattttggttgtatgtatttttaaacaagaaaatattattggtaaattgtacttatatgttatattatattatttacaaatatcaatttaatatatatattaaaaaacaatgtgagttatatatatgtcctaaagtagatatttacctactatttatattcataaaactaaatttaatatatatatatatatatgaaaactataaaaaaaaattttaaatgaaaaataaagtgaaaagaaatgaaaaagatatcgaccttttaaagaccactttaaaaaaacttgatttaggctgtaagaaaaaataggaaagctacgacataaaatagaaactctataaattaatactcgataaattaataaacacgatatattaataaattttgccggtcccaagtcgggacaatgtaaaaattaaccaaaatcgataagataataagataataaattttttgaaatccctatgtaaagttatagtcccactaatattataaattaataatcataaatcttaagtatatattttaagactaatttttatatgaattttttgttcaagctacaattacaattcgttttaaaatacaactagtatgatatctgttgtagtcacataactatttgcgtatttgatccgttatagttgattttgtaaaatcttttatttgagaaagcattgctaagaattgtgtaaagagaaattggattaagcttcatgtttacgtttacgttcacgttcacgttaatattgtagatatacatacacaatatcttgccaaaaaataaattaaagaagtcaaagaaaaataaaaacctaacataattatatatgcaaacaacaaagcatatagataattaaattaataaacattttcaaaagaatatagtattgtattttacacaaacatttctataaattaatatttattaacttatacgataaattaatatttattaacttatacgataaattaataaatattaatttataagataaattaatatcactataaattaataaaatttcatggtcctaacattattaatttatagagtttctactgtaattgtttcaattctgaagctatagtttttaatggttttacaaattttcaacaatctaaccaatcatgtccaaaagtcgtatcatatccttatattttttcattgtattatttttaaaaatttgtaaattttaagaccaaaaaacaatttttttttgttttatcagaaaagcaaataatcaattgcctgattcattttcgtagctccaccgagaaaactccgagtggccgaaacagagatttcgcagaggaaccatcactgattgtgtcaccgaaccattgatcttcaagttccgatccaatttcagat

SEQ ID NO: 8054 - DNA, 3000 bp, Unknown
  misc_feature (1)..( 3000): cDNA_ID_1810195_gDNA_ID_1621187_Annot_ID_57450 3000 nt of promoter + ATG
caaacaacaagaacaaagcaacaacagtaaaaaaaaacgcagcagagtaaattctatgacaacaaaagggtccctccaataagaaatcaattatttacttactttaattcttcaacaagtaaaaaaaaagagaataccttttacacaattctgatcagagaatctacaaaacttttatgtaaaaattcttcaacgaaaaagaaaaaagttttgttttttctcttcttacgactctcgggaaagagttaaaagtattaattgtgaaaactaataaagttttttattgtttgttcgatggcaaataggtgccgtggaaattgggtattactatgactaagtgtgtgtgtgacatttttgacattattgaagataatggagagagttttacttgtaggtgaaagaaccgacacgtgtcggtgaaaaagtgagagatagtgtacacgtgtctgtgtagatgttgttgtgggatctcttaccgacgttgacttgttgactgtgtcctagaattcagagacatatagatgagagaaagtctttaggaccaaagttaaaagcccatttcgaaagcacaagtgtgaattgagaaatgtgaaatgtggacttttcacgaatcatcttcggtccggtgaagtgaaagacttttcacgaatcaaaatacaaaagcccgattcagaacatacagtaggataaagatttaagggattttaattatgtgacgtttaatatataattttgcgtaaaagtaaaatttatataataaaaacagttaatatattattattttattttttcatttttccacttttctattttactcaaaaaaatgcagatccatgcgaaaagtttattattatctcgtcaagctagatttcatcattttatattatctggtcaaacttttgttcaaaaaatcgttaggcgctagtcgggcagtaagagtggacctagcgcctaacaaaaaaatcagagattatacaaaaattaatcagggattagttttagggttgtttaatatttttaaaacatattaattcattataattaagaaatttatataatattgtttttaaaattatattaaacatatgaaaataagattgtaggttcaaatatatgatttttcatacaaattacgaacataagttggatattttaaattttaaattttctttttagaaaaaaaaaatttgggataggcgccctctagacggatttaggcgggtctatacggataaaaatcggatcaacgattaatcttctcgatttgaaaaaaattgtcgtggatcccatctgattagcgcctaggcgcccggctaggcggccgattttttgaacaaagggtcagactagggttccgaatagagaacagaccacacagtatcgtatacttctaatagtaacaaaaatatctacatatatacatacaagactagtctttaagggagccacatgaaacatttgaatatgaccccatttttctttcaaaaatttacaccaaaacttatttgcaaataggcctccaaaaatattcagttctaagaaaaaggcctccaaaatttaaaatattttataataatcccaaaatatataacttgttgctttggtctccgaatagtcgggaccagccatgtatgtatatgtatatatttttgttactattaaaaccacaccgcactttatccgtagttgaatcgcacgtcatcattcggagcctagatgtgataattttacaatacagagtagaactcgaatccgttttatcataaaattatggtatttattttagtagattcttatattttataaatattgatttactagtgtttacactttacgtctaatgatttgctagacattcatgtatatcacaaatgtttaaacctaacatatgggaagaaaacaattgtagagttatattgttctaattattttcctttgatacatgaaataaagtatttagagtatgtttttagtaattttatggaggcatttattttcttaaaaatatcacgcagtagtttcatctataactaaatttatggaagtgtttctgaatcatgttatttaatctttttttagtaagcttattattttattttaatgtatttttgcttatattttaaatattgtgacaggagaaaacatatcacaaagtcctcaaaaagcttgaattataggggcttttgtacgggagggtacaattcagcccaaaaactaatggtaagacacatttcggtgggcttgtgagagtaggtacttataaggccgggaaatgatgagcgtacccttgagttggatggcgaaattgtttggcgggataagttatgtttcgaaatgtctgcccgctgacttgaccggcggtactattttgcactgttcgtggctatgtggacgccgaagatgcacgagggcaacccaacttgtgaacgacgattaagggccttatattgctggatatatttaagggttgttgtgtgcgtgtacattattgtgatgatttttccaaaccctagagaaatcgtcgacggcagaaggtgattgcacagaagaagtcagtagacgacgaatagtaaagattccgacgaccaaacgctgctgctatgagcccacatgtaagtaatttggaatcagatttgtcattgtagtatagtgtgtgacatgtaatttatggcttctattatagtttgtgccttatagtttgtgccttactgactagtttgtgacttgtaatttgtggcttgtagtatagtttgtggctggtagtatagtgtgtggcatgtaatttggtgcttctagtatagtttgtggcttgtagtatagtttgtgacttgtactttggtacaagtgatctgatttacagtttgtgaaacaattgaacaggggggagacgtagcggtctgtgttatagctggaggttgggactgttcagagaagggagtgtggaaatttgttgttgctaaagattgttacgctcggaccgtatgtatgaatgtggcaatg

SEQ ID NO: 8055 - DNA, 3000 bp, Unknown; identical to SEQ ID NO: 5304
  misc_feature (1)..( 3000): cDNA_ID_2106101_gDNA_ID_1621187_Annot_ID_57451 3000 nt of promoter + ATG

SEQ ID NO: 8056 - DNA, 3000 bp, Unknown; identical to SEQ ID NO: 5304
  misc_feature (1)..( 3000): cDNA_ID_2106101_gDNA_ID_1621187_Annot_ID_174502 3000 nt of promoter + ATG

SEQ ID NO: 8057 - DNA, 3000 bp, Unknown
  misc_feature (1)..( 3000): cDNA_ID_3047390_gDNA_ID_1621187_Annot_ID_174498 3000 nt of promoter + ATG
agagggcaaaagagatggctcttaacgatgtcgcatctctcaccggcttaaccacaataaacctttcaagacacctagagaatttaagtaaaaaattgttcactattggaaacagtatacacaatactccggtgaaacgagtagacatggttttgggagatacacgtgtaagttttcatattatagcgtattatatttacaaatattaaaacgctagtagattgtcaactatctgaagtatagtagaatacatggtcacacatgtcaagtaaactaaaagatatttagctacctcacgtatatggattgcatgaccacatatacgaagtataggggtgtcaaaatgggtcaaaattcatgggtcaactcaactcaactcaacccatgaacgtaatgagttgaaaatattgactcaaatgagttgatgggtcaaattagttattgggtcaattggtttgatgaataaaataaattgggttgtaatggttaatggtttcaatggtttacccaattaaccattaagttttgtaaaattgaattaaaccaactaaaatctctaaatcaatgtccatttaagttgaaccaacacatctaaaccaatttaataaaatcaatatttttccaaatttcttaaatatacaagcgatgaaattgagaagaagtaaactcgtaatttttccaccaaaaaacacaaaaccgtaattttctctccaaaaacgaaaacccgtgattttcccaccaaaaatgtaaacccgtaatttttccgccaaaaaaaacataaacccgtgattttcccgcaaaaaacgtaaacccgtaattttcccgcaaaaaacgtaaacccatgttttttccgccaaaaacgtaaacccgtaattttccgccaaaaaaacgtaaacccgtgattttcccaccaaaacataaacccgtaattttcccgccaaaaacgtaaacctgtaattttcccgccaaaaacgtaaacccgtaattttcctggcaaaaaaatgtaaacccgtgattttccgccaaaaacgtaaacccgtaatttccccccaaaaaaacgtaaacccgtgattttcttgctaaaaacgtaaatctgtaattttttcgcaaataaagtaaacccgtaattttcccgccaaaaacgtaaaccattgattttttcgccaaaaacgtaaacccgtaacaagtggaatccgtaaatatcctaagtttgatgataatgaattaataattattaataattatttattattattttataataattattaattaaattgttacttaaatggacccatttaacaactcaacccatcaaatgaaatgagttatgggttgaccttacccatttaacccatttaacccattaatcatttaactttaaactcatttgattatgagttgagttgagttgggttacccattttgacatccctaacgaagtatatgacgtcatgtagttaacatcaaaaggataacatcgctggacaatgggtcattattgaaaaattttctgtgtctcagaccatgggagaatttatggcgatgaagcaataattaccgaataaaaatcatttactccatgatttataataccaattaaatagtttataagttattcttttttattttttatttaaatttatctgtatatcaaatttcatttttcgtgcataaaattttgtaccaaactacatcatttcacatatgtaaaaaatatccctcgggattagttcttttgagtttaattgattttggttgataatatatatattatatatatatatatcaatctccattataccaaagttaaaactatatattaatattattttagttgatattagtaaaggttaatataaatacaaattaatatttttagttaataaaatactatattagcaaaaatctgggataaataatttgatatcttgtcaacattttgatacttcgataaataatgtattaatgtgttatttctttttgtcattatctacaaaatgtctaatgtaactaaaatctatttgataaaatgatgtgtaattttaatcataatgttttacaaaatgtctaatttaattagatatgtttaaaattaaatataaattttattaaaataatattaaaatattaattttatgtggatgagataatcattggggctcactaatggaggtaaaattgaagtatgagtttttctaaataaaacattcaaaaaatatagtctaatataattgagatatcatgtgggtatctcaccaataaagatgatctaagcgttgtctaacaaaacattataaccacctaatattaaacaaatgtcaaacttcgacattacaacatttagaatattcccaacatttttatgcattaaattttatatgtatatttaatccgggtcaaatggcacccctttctccttagtggatctgccacttaacatcattcattttcaataggtttgtgaaggcaagacttgtccccttaacggcaaataagattgaaaacgactatctcttgtcacacacttcgttatgtcacgagctatacggttactttgactttgaggcatcactaccttgaacttatacaccactagaaacttcgaactaggttgtgtatatggccaaagtatgtccgagaacgggcgcagggttattcagagtttcaatagatcatgtcagcttcgaaagaatccacaaaatataacacaatattgccgtaatcttgttaagggtatgtagaaaagcatcgtagcccacgcagcaacaccacatacaataaaacttgaattagtccatgaagaactcactatttacattctttgggcttattattgggttacaaaaccatctttgggcttattattgggtcacaaaaccatctttgggcttattatcagtgatccataattattcctttggaacttttttttattaaccctttatttctcatttgctctcactatcgttcgttacgtctctgtaaatcactgagaaa

SEQ ID NO: 8058 - DNA, 3000 bp, Unknown; identical to SEQ ID NO: 8053
  misc_feature (1)..( 3000): cDNA_ID_1807395_gDNA_ID_1621187_Annot_ID_174480 3000 nt of promoter + ATG

SEQ ID NO: 8059 - DNA, 3000 bp, Unknown; identical to SEQ ID NO: 8052
  misc_feature (1)..( 3000): cDNA_ID_3047399_gDNA_ID_1621187_Annot_ID_174477 3000 nt of promoter + ATG

SEQ ID NO: 8060 - DNA, 3000 bp, Unknown
  misc_feature (1)..( 3000): cDNA_ID_2154966_gDNA_ID_1621187_Annot_ID_174465 3000 nt of promoter + ATG
gacgaaagaataaagaaacaaccggaatgatgatttttaatgagataaaagaaaaaagaaacaaattaaatctaaattttttttatatgaataacttcatcaaactaaacggtctaaattcgagttttagtttttagttaaacaaaaatctgaattttctttatacttctaggaaattattttgtctacatcagtttcgtcaatttggtttcatatttcttctaaagcctagcaaaaactctaaaagaaaattcaaatttcgatcacctatgctaagtaaataattttaatttattctacctgcacaaataccatgtcatatgaattactttcactctattatctatgtttatcacaataaaccaaaataatagaagaacattaaataataaatttttattataatttttacaagaaattacaatgccttatttgataccactcttagtgcaacgacaaacaaattttttacacctagcaagatttttaccccttctaaaacaagcttttccgcagtcataacaaaaactcattacgccttgaagaaaagagtgcccgagatgtatatccactagatattgatcaattgaaggactcactgctggactatcaagatatgttgtctcttttgaattcattgttttggtaattatcgatgtacctataaaatttccaaaacatattgaaaattattatattaacatttaagaaatgaatatatatatatatatatacacataagatcttaattaaataaatttagacttacatgaggaagaaatgactagaagagttaaaaacaaaataattgtcttcattcttaatgtaagatttaataatattggaaaaataatattttaaatatcttttaagttttgtttttttcttctaatgaagttattaaaaactagacaatgtgatatttatatgttcttattaaaaatatgttacgaaaaagtaattgttctagtaaacgttttatttttttattaatgaaagataaggaaacacttatgtttggaagagtggtttcatttctaaagttttttattttctttacaacatttactacttataacagtacattcgagaataattcgcacgtaaatgtcctaaaatttggtttatcagactttttttaaaagaagattcttattaaatttactaggactagaactttatataagatctaaaaacaatattaaaatttgattagttttggtgatattacatgtaccgttaagtatattaaaaaaattttactgcctttttgcaataatatttttttatgttggttatttttaaaaagacccattttcttgaacaaaatgaccaaattatccatcatctaatgacaacatgtaattagaaattgaattttttttgccaaaatttacttttcccacaaaaaaaaagaattcacgccaaaattattttttccttgccagaaaaaaaagtttctcgcaacaatttttttcttccgccaaaacaattcacgcccaaatttgcatttaaaaatttttgtaaatttttttagaactgttttaatacctttgtaaatcttttaaaaaactttacaaaattactcagattagtaagttagtccagggtctctaaggttttactcttactgctattgattcccaaactatacctaaacaagcaacaagcaaaactcgaaacaacaataaatgcactaaaagacttaaacgaacaaacttctattccatcctagtttttaggcctctacgaattcagatcatccctcaaggcattgccacacactcctaaacacgaaattctaaaagagatcgcatccctcaatactacatcgtcatgttgcgcccggtcaattgcaaagtagccccgagcctttgtaagctataatgctacggagtttcacgcaaagaacagcagacggatcggaagacatgattcgactaatgctaattagctatccactcctaaccaagaacaaataaacaacaaaaagttcccaagtaatcggacagcaccacagttatgttaccgtaaatcggacaagataactgttatctttgtcggaatttgggcagcataacgtttataccatatttgaacataatgcaatcataatataaaacaatgaatcactcaataattatcgccaagtatgatctactaacctcctaagtttcataattatttaaaataaataaacacattaacatgtgctacaacacatgtccggaacttacgaaacttataggtgctccgcgcatccttgggaaacagctattcctaccccttgaatccattggtatttttctcctatttggttatctaacataccataatcatacttgattagggactaatcggcgattgctaaaaataaactacgatcggaaaacttaccgacttccaaatcagaacttttctcaggattccttagcgaaactaacttagagcgtttctagggtgaggaatttctaatgggagtcgaaggtttatatagagagctaaggcagtttactaagctacttcgccgttaggtcctccactaatcatgtctcttccgacaacatgtatcactgagtcacgattgtcaacaccaagcagcgtccgttgattaacaaccagactgggagcatcgtgaagttgacaccctgacatgagtcattgcccttgtcgacattacccgcatgcgagacatggtcgtttctctcccacatattgtcgtagcaacttatgtacctgctcgctgtcgttaagcaggtcgacgaggtgtccgattgtcggccgcacaataaccgcacacgccggcatgggtcgagcatatgtccaccgcggtcgggcacacgccatcgtgggtcgagcagatgtccgccgcaatcgagcatacgctagtacgggtcgctcacacatcgctcacagaccgttcatggtaaggtctttgattactttcttgtcccaattctaaaatccgttcgtgaatcatttccaattgcatcacaaagg

SEQ ID NO: 8061 - DNA, 3000 bp, Unknown
  misc_feature (1)..( 3000): cDNA_ID_1810226_gDNA_ID_1621188_Annot_ID_57455 3000 nt of promoter + ATG
gtgatgccccaaggaatcatcaccaaagacaagggatagtgcctccaccagttcagaataacaattttgagatcaagagtggtctcatctcaatgatacaagcaaacaagtttcatggtctacctatggaagatcccctagaccatcttgatagctttgataggctctctggccttaccaagatcaatggtgtcactgaagatatgtttaagctcagactatttcccttctctttgggagacatggcatacaactgggagaagactctgcccccagacttcatcacctcctgggatgattgtaagaaagcgtttcttgccaagttcttctttaatgctcgcacatctaaattgaggaacgagatctcaggcttcacacagaaaaacaatgaaactttctgtgaagcttgagagaggattaaaagctacaccactcagtgtccccatcatagtttcaagaaagcttcattattgagcatagtctaaagaggagctttaccaaagatcagaatactactcgacactgcctcaaatggaaacttcctgaacaaggatgtagcagaaggatgttagttggtcaaaaatctagcacaatctgatggatgctacaatgaagactatgatcgctcaatgagaggaactggaggaactgaggataaatagagcaaagatatcaaggctctggatgaaaagctagacaagttgttgttggctcagcagaagcagatacactacatcactgatgaagagcacttccaaatgcaagaagggggaatgatcagactgaagagctagctgtgttacattcagaacaaaggagggttcaacaagggctacaacaactacaagcccaacccaaacctctcctacagaagcactaatgtagctaacccccaagatcaagtgtatccaccacaacataatcagtctaagccttttgttcaacacaaccaaggttatgtccctaaacaacagtttaatggaggctactgaatagtgtgtattttgcatgttttgagcatccatttgtcatcactttagcatcatatcatcactgttttatacaatttctcatcatttgtcatcactttacatgtttaggatagttttgcatgcatgttgcatatttgtgttgttttaaggtgattcgaagctattgacgagctaattggaagaagcggacctgatcatgcaaaaccactcgacccccaggtcgagtagacgcttcacaacctcagcagaccactcgaccccctggtcgagtagaggacatcaccacttcacctcaccactcgaccacgaggtagaatgtcttcatctccatcacctgaccatcactcgatcacctcactcgaccccgaggtcgagtgtcttcaccaccattaccagacaaccactcgatctcaccactctaccttgaaatcgagtatcaccatcaccaccactcgactacatactcgattaagagcttcagagtctttttcattccgcactcaaccagacactcgagtacaaggaagaaaagaagactccagctattcactcgacctcctactcgaccacctgggtcgagtacagttcttaatccgtcctaatactgcgtcgttttaagtattagggtttcagaatattttgctataagttgcatgtacttcacattttcgcaaacaagtttttttctagttttattctgcagacactgtgttctagaccttttgtaatccgaatttctctttatttattcagtattcagtatttgttttggatttcttttactgttgttcattctgttatcatcctgctgttacactgttgttatcatgttttcaacctgttcaacgtttatgctttctgctatgatgtctaagtagtgaataggtttctgaggatgggttagagtagtgtagaattctcagtatgctaggtggttgagtattgattgatagatcccttctggattagttgttcttaatgcctattgctttctgatcaactggaatttgagcccagacatttccgcgcccaaaacgtgttcgatgaaatgtctgaaccattaattccagagattcgtgaccctgtaccaaggtattggttggagggagtgttttggctttaacttgttgattcgtaatgcctgttaggttagctctcgtcaatggtaattgagtctgggactaggttaacttgagggtctctattgcggtggcacttagatttggttaatgaatttattgtctagggataatttattgagcatgtcaatcacctgtaaactgaggaaacgaaactactcaattaccccatcctcgggaattctttatcttattgagttctttgtttacactactgttgtttactgcatcttgtcatctgttgcttaatttctgcaattctttcttgttactcaacctcatactcgaccacccagttgtctggcaacagactgtgcagtcgagtaactgtgttatactttctgtctgttactcgacctcacctagtgctctgcaaaagttgtgttggtcgagtgttttattgtttctgcttgaatttttgttttctgcatgttcatttagaactgctagaacacaccaaaacctgttattgcttggcttgacttagtgacttctgatcacatcttgattgttagcatcacacccatttggattgacaacctaaaatactacaacgacatgattggtgttttaggataattgactgaaaaatctattatcaatttggcgccgttgccaattgggtgtttgtttgttacatttgagatttcagacttgcttagatcaagttctttttcaattttcttttcagttactaactgtgtgtttttcttgttgtcttcttgatccaggtacacctctactgtatgccaactcgatcaacaggcaatcagaacctccttttcaacgagaacatcgaccgaatagctcgcgaactcagagaaaggagaaacacagtcaaccttgtacctcagcaaccactcgaaatg

SEQ ID NO: 8062 - DNA, 99 bp, Unknown
  misc_feature (1)..( 99): cDNA_ID_3047579_gDNA_ID_1621188_Annot_ID_174518 3000 nt of promoter + ATG
cagctcgaagacgaatatcagttagtaaaccagcacgagcaggaaaatttcaaccagctcaaaaccatgaggaaagtgagccgggaattgaaagaaatg

SEQ ID NO: 8063 - DNA, 3000 bp, Unknown
  misc_feature (1)..( 3000): cDNA_ID_1810286_gDNA_ID_1621189_Annot_ID_57461 3000 nt of promoter + ATG
tttccatggcaaacaagctatcatcatcatcatcatttctcttagcaccaattctcctggttccactcaatttgctacttcttatctcatgcctctcattggctaatctctcaatccgcctttcttcagcaagaagatccaatccatctcctttggaacctctctcaatccctctcgatgtatcagagacacgctgatacctcaccatctcctgcttcggattccctctcctgaaactctcatcttctgacacaggcactaaagattcatcactcttactccatcttacatctttggctattctctgaactctcctttcttcaacaacaagctccaattcatcaccttttgaacctcttgcaatccctctggatgtatcagaggaacggtgatgctcctgcttagagtatcttctcctaaagctctcatctttaggcatagtcactgaagattcaccactattactccatttcacagccactgaagattcacgacttttactccatcttgcatctttggctattctctgaactctcctttcttcaacaacaagatccaattcatcacctctcgaacctctttcaatccctctcgatgtatcagaggaacggtgatactcctgcttagagtaccttttcctgaaactctcatcttcaggcacagtcactgaagattcaccactcttactcaatttcagagccactgaagattcaccactcttactccatttcaaatctgtagccactctatgattttcaatttctccattcctcttgaaaactctctcattacgtttatcacttacaatctcctgccttgagtatctcttcctgaaagtttcatcttttagctcaccactcttaatcttcatatctttcacttcataaacactatcaccattcccacctccaccatcatcttcctcaactttcaatctgtcgaatttcttcttcttccttgctgttttaaccgattccatgatttgcaggtactgatcaaaactgggtttgaattcaaaacctttatcaccgggtttttgcaaaccaacctccttcgtgttcaaattcaagcaaaacattacctttgaattcaatttcctcgaattaagacgaacgactcgtcggcaattatagtatggctgatgaaacaatggtctccagaaagaattccgactttcatctaaaagcgatgcatttacgaaagcattcgtcgaaatcgtcaccgccatttttgtatccttactaaagctctactgatttttttctgcaattcactcgaagttcgaaattatcatcagaggcaaatcgtcgttgaaccctatcggctatcgtcaacgtccgacgtggctaagcgaataaaactacttgacgtttctttaaaacaaactaacgaggtgtagtttttatgaatatagaaacgggacgttgttttttatgtgtgacagatcgtacacattccaacttgttattgggcttaagcctgcgtttgaggctattgcaatattgcatgctttatttggttaaaccgtggtagttttgtgtcttcggtccatattaaatattgaatgggccaaaaatgaaataaaagacaagaacaatgatctttttgttataaaatataacgctaaaataaataataatattatatttgatgtgaatatgaaggaaagagccgtaagagaaatgaagagcgaaatagatttttgttattcttattttctcgttatttacaataaaacaaataactatatatataagggagaaatttggtgagctagtgttttggtgagcaagacttattcaaagatggataatcattcacgtttctaacacatttttctttacgttactaaaggctacacaaattcattataaagcataaacacacttggaaaccataaaatgagatggtttatagtgttagtatgagttgaaaccaaggcaaaagatgatggtgataatagaatccattattttcttgctagaaaagggtcttcaacggttaaatacaagagaaatgatgtaaagcaagtataatgagtcatgactcgtgttaattaaaaggttaaaaagtatatgttggacctacttcttttgatgtggtaataattattgctttgtagcttttttcctcatctcatgtagtatttctagaataaagcaaatcttattctcatgatcgtagattgctaagaataggtttaatcttggtttttatttggtacataatgctgggagggatgatttttttggacaaaccgcataaatccgttttggtatgttctgttttggctgaaaatggtcaaagaagagtcacggatggttattaaggagagaacaaaagcgacttctcatagaatcttaccgttggaaaatacaacaaaacgtcacctaaatgataaaagacaaataaagaatttaaagtaccaaaagactcaaagatatgaccactttcatttgtttcacccatttagcataacaacatcaacatgcaacatttgattaatgtgaaattaacaaaccaagagttttggaatttgttttttctcctacttatgtgtgccaaataaatgaacttctatcatattatagtacttaagaatgatattatattgaatagaccaaaaatgaaatagaagacaagaaagatgatcattttatatgttagtaaaggctacacagatgcattttaaagcataaacacacttggaaacaataggaaactacaagtgagaacaagttaaaagtcttccaccgatctctgcagttgcattaataaaaacattcagtaaccgagaacgcttttttcttatttcttctagctaaaagtattctcagaagaccattgtactctaaaacccacttaactctctctctttctctttcccctttcttcttctgagatacgcttctctactccactgccatggagctctaatgggtctctgcaattttcattcttttcctcttttcttctgagaatttcagctcaagaaccatg

SEQ ID NO: 8064 - DNA, 3000 bp, Unknown
  misc_feature (1)..( 3000): cDNA_ID_1810282_gDNA_ID_1621189_Annot_ID_57462 3000 nt of promoter + ATG
gagtggataatatacacttacgtgccatgcccttcaccatcaaatggtgaagcatcatcctgagatgaattcaagactcctctactgagagcagactcagcaaaatggcgtgctccaatgagtttcctattgcaagaaccgggcgggaaaccaatggtaacttcacagacgccagtaaagtgaggagggaccgaatatgtatgccccgagattttgtcactgaaactaggatgagtgggatcaattccagtatcaataaagcctataacaactccttctcctgcatattcagagcctccatcacggagccaagctccacgaggcaaacctaagaactgtggtgtgtgagtagttgctttctcgaccagaaagtccagaaccacattttccacttcttctctagctgcaagtctatcagcctaaagaaaaaacaaaccagttttcaaactcaagagctcataacaatgaacaaacactaacatttagacattcatatactgtttccaagacaatgtaagtacctgttttcgagtaagaaccgcggaaaacccattgataagatagtggtaactataaagcttaaggtaattctcctttctcaatacatttctcagcaatgaatcgtgaactctaataatagaagcacttcggttcctatatatgtataaacaaagagattataatcatactatagcataaaggtttcagcttgaaggcattagacattaatgttaatagcttcgtttaacaacataaaggtttcaacttggagcacgaattcaacaggcatgcctatatatccgtttagactttcaggaaaagaccaaagacacaagagacaagtaatctgggacccaaaattgacgaatttcaactaatgtcggtctatgaagattgagaaaaagaccaaaccctcccggaaaaatcaacagcgattccacgaagaaatcaaaccctggataaagattgaaactttgaagaacaaaaagaaagaatggtaacttttttctacatacaatgttctgtaaatttgggacgaagtagcggtaaggctgtgtttagagtcactcgattctctgccggagaaatgaacagatggacggtccttgagagtaacaatgtaaacagcagaagaaacggttgcgttttggtcagactcagccaaacagaacacagacgacgaaaccaaacagagaaggaacacaaaacgaacaagagaagactcatccatggttcttgagctgaaattctcagaagaaaagaggaaaagaatgaaaattgcagagacccattagagctccatggcagtggagtagagaagcgtatctcagaagaagaaaggggaaagagaaagagagagagttaagtgggttttagagtacaatggtcttctgagaatacttttagctagaagaaataagaaaaaagcgttctcggttactgaatgtttttattaatgcaactgcagagatcggtggaagacttttaacttgttctcacttgtagtttcctattgtttccaagtgtgtttatgctttaaaatgcatctgtgtagcctttactaacatataaaatgatcatctttcttgtcttctatttcatttttggtctattcaatataatatcattcttaagtactataatatgatagaagttcatttatttggcacacataagtaggagaaaaaacaaattccaaaactcttggtttgttaatttcacattaatcaaatgttgcatgttgatgttgttatgctaaatgggtgaaacaaatgaaagtggtcatatctttgagtcttttggtactttaaattctttatttgtcttttatcatttaggtgacgttttgttgtattttccaacggtaagattctatgagaagtcgcttttgttctctccttaataaccatccgtgactcttctttgaccattttcagccaaaacagaacataccaaaacggatttatgcggtttgtccaaaaaaatcatccctcccagcattatgtaccaaataaaaaccaagattaaacctattcttagcaatctacgatcatgagaataagatttgctttattctagaaatactacatgagatgaggaaaaaagctacaaagcaataattattaccacatcaaaagaagtaggtccaacatatactttttaaccttttaattaacacgagtcatgactcattatacttgctttacatcatttctcttgtatttaaccgttgaagacccttttctagcaagaaaataatggattctattatcaccatcatcttttgccttggtttcaactcatactaacactataaaccatctcattttatggtttccaagtgtgtttatgctttataatgaatttgtgtagcctttagtaacgtaaagaaaaatgtgttagaaacgtgaatgattatccatctttgaataagtcttgctcaccaaaacactagctcaccaaatttctcccttatatatatagttatttgttttattgtaaataacgagaaaataagaataacaaaaatctatttcgctcttcatttctcttacggctctttccttcatattcacatcaaatataatattattatttattttagcgttatattttataacaaaaagatcattgttcttgtcttttatttcatttttggcccattcaatatttaatatggaccgaagacacaaaactaccacggtttaaccaaataaagcatgcaatattgcaatagcctcaaacgcaggcttaagcccaataacaagttggaatgtgtacgatctgtcacacataaaaaacaacgtcccgtttctatattcataaaaactacacctcgttagtttgttttaaagaaacgtcaagtagttttattcgcttagccacgtcggacgttgacgatagccgatagggttcaacgacgatttgcctctgatgataatttcgaacttcgagtgaattgcagaaaaaaatcagtagagctttagtaaggatacaaaa

SEQ ID NO: 8065 - DNA, 3000 bp, Unknown
  misc_feature (1)..( 3000): cDNA_ID_1395054_gDNA_ID_1621189_Annot_ID_57464 3000 nt of promoter + ATG
aaaataggaaacttccaaaggagattaatgcaaacattcataaaaaaataaaggggttatatccttctccaagtaacagaagaatatgcacattcacttcattctaagttggaaaagaatcgttctttatggaatatttcagatgaacttcaggtggaacagaacagcatccaccagaagatagagataagtgaatctagtacataccagggtccttctgttttgttgccaatgtaaaagctgttcctgctgagttctcctaggtgcagaaggaggcttggagagtctatcatgttctgctgcaggctttgtactcctgtcaacaagctccgccttaaaatctggaaaatttttgctttccagagacttgctcaatccaaaatctgaaagcttgatatggccgtttcgagtaatcaataaattatcaggctttatatccctacaaaagcaaaggaagaaactagagttaaattatcaccacgtatcaactgaaagctaatttacaagcactgtaggaaatccggaagcttgatatgattctagtgatagtaaatgtcaagtaagatgcaaaaatggaaaaaagaacaatatgaaaagcttcaaatgccagttgttcaaacctgtggacgtaattatgcttatggatagactcaatagccagaattgtctgcgcaacataaaaccgagtctcatcttcccgtaaggtatcctttcgcatcagcagtgtcatcatatcacctccagggaggtattccataataagatacaaatgctcatcatcttggaaagagtaacaaagcttgacaatgaaagggctatccacttctgcaagcacatttctttcagctttaacatgttccacctgatatttaccgcataaagagaggattagcgtatttacgcagatgttaatgaattaccaatttaatcacaactaaactctttgatttggagagatgctatcagatagtgcattacctgccctcgtcgaagcatctcggatttctttaactttttcattgcatatacgcttccagtagatttttctttacaaattctcacctggacagaaatgaaataatattaaatcaatacaccaagtaaaatcactaacagaagctttggttcatagaaaaagaataatagctagttatcagtacttcggtagccagtaagagagctaaaaaagaagcaacatcaaattttatatgtaaagatgagacaagatattagctaagcttacaaaaaggaagtgaaaaataagagaggcaaccacaaagaacacataaagagatatacctcaccgaaagcaccccggccaatgatgctaagcagttcaaagtcatcaacccccattttctgtctttgtagacgcatatactccatttcctttttctcaaagttctttaatatatccatcttgtcttcaacagtaacatcagcatcagctaggttttgttccaagatgctccgactgtattcaagagcgagctgatatcagaaggttcaatctaaaccagtagcagattaattcctaaatcagacccaaccatcagtactagaaaataagactactctgaagttccatttgtaacaactaaagcacaagaagtaaatattggcatcacaagaagaatcccgagaacgtaccgctcttttctttcctggagactcttcttctgaattttataatgattctcgatatattgcttcgctgcagcaactttctgtttagtagcattagatggtgcatcattcataggaggtctcccaagattcttcacatttccctcttgtccctttttagtagggcttgatttatccggtttctgctgccgtatctggaaccagctccttgtaggctccgtagccatttcaatccaatctaatgcaaatcacttcataaaacctgcagaaaatcaaaacaaaattccaaaacccaaatgcttcaaaactaaatcaaattgatgacaaattcttgtctaacaacgctggtcaacacctaaaatctcaccgtaaattccggaaacaatattaaaactttcacttccaagttaattccacacgaatcgattttaatcactcttgacatagagatacatatacatctagttctggattgtggattgcacgcatgcattcgaatcaaaacttgcttataatcaaatagttacaaactccaattccaaacaagatacgcacaaacaccatgcgagattgaagaagaagaaaaacgaaaagtcaaactattcacaaagaaaaagtaaaactcgatcggggaagatgacaaatttcgcgaaaggatcaaagaaacttacatcaacaaaacaacaaatcagagagattttgattttagctctcgcttcgaattcgaactgttgcttacacgcattcacttaaaacggaatttttttaattaaaagatctcaaaagggagagcaaaaacggattacgaactaataacgttttttgggcaaagcgtattttatcttgaagcagtaaacgccgtttaagttacagtcacgatgactcggtggctgattaaaaccaatactggtaaaccggcttttaactattcccgggtcatttattggggaagctaaatgacacgtgtcagtaaattgttggatttgtttgtcgacataacgtgacagcacgattgaacggagtggtttgctaacgtcattagaacaactcccgcgcgaattggataaaaacgcgttttattggtaagacaagattgtcaccgtccgtatgtaggagacgtgtaaagagaagcagagtgtcgaactaattgggtcatcgaaaagcccattgggcctaaaatagataacaatgagtgtcaattgtaacattcaaaatgtatggggctttatgtacatcttaaggcgtcatatttttttggttttgattattcacacttcagttttctttattttggagttagacacggatctgtgagatctagaagaagaagaagaagaagaagctaagacaatg

SEQ ID NO: 8066 - DNA, 3000 bp, Unknown
  misc_feature (1)..( 3000): cDNA_ID_1810274_gDNA_ID_1621189_Annot_ID_57465 3000 nt of promoter + ATG
tcgttttcaaaagtctgccttttgtctcatcagttatggagattctggatttcaaggaacaagatctgtagttctgttggattcgaaactcaatgaaaacaaaagcttcagtgagaaatcaaagtaaaatgcaacatatccaatggaaaaaactgtttatctatgataatttcaagatagggtcggtaataatatgatgttcttctggtagatcataaggcaaattgattccatggactttgaggtacttcaggcgaaagattgaagtgctctctcgaagttatcttcagctgatgctgctcgcttcacaaggacgtgttctggatgtgaaagtttcagctggctgcaaaaggattggaaatggaggaataagtcagcttactgatgcacttgttgttatgcagaaaatgcaaaaggtcatgaatatttatactttaggtagcgagaagatgatttcccgacgtgaagactgcatacaacgaggtttgcaagagtttctgggtctttagcatcctgcaatgagaataaacatctatgatttcaaacttgtccattttataataaacggaatagttgaaaagtttagatttggtgtaaggagttttcaagtatcctcatagatttaaatcgagtgagcatttccgatgacatgatattgagaatgggttgtgtcgatacagatttaaggaaagaaagagtaggttcatcactcaccttgttgagtgcttcaagtagtagagtctcagcttcttcaaaattacccatatgcatgcagcaaactgctttgccgttcaagatcaagcttgtcattgggtacttctcagagaaatcctggaagattagataagcttcctgtatcttggaaccaccctgagatcataaagaacaatttcatattaagaaacacattaacaaacttctctacactatatggaaaaaagaaatggatattcatatcatactactgccagattcaaccacgcgctcgcgagctgagtgagtgtgtggtcttcatcaatctgttgcatcactctcagttgtttctccgcaaaatctgatctgtgcatctttatgaatatctggacattcaaagcatgcctaaaatatgcagaaacaacaatcatttatcgagtaaacgaaaagagatcgctgtgacaagacaaaacaaatcgaaaagctcacagatccatggttcctccagaatgagtgtgcttcagagcctcattatagtcttcctcatgcatgaatatagtaccagcaatcaacctgataatagcattgtttcctacagttggatctgccaaccattccctcaagctcgaaatggttgattcctaaccaaaatcacagaaacaactacgtattcaacaatgcagatcactaaaataagatcaagatatattcaattccggatctctgaagctaaatcatcaaaagaatcctagaattctactaaagttatctgaaattccgctaagcaaacgttacagaagatgaattgaaacatctcaaaatctcttgaattaccttgttttcaggactcgatagatacatagcaaggagtttcactgcctgtagaggagtagcagcggcttcatcgatctcactgatgacaagctacgaagacgaaatttgaaaaacgtaaatcagcaaatgatcaaaacaaattgaaatccaaatcgaaaaacacgagacggaagcaaaacctggtaacttccgagagcgatgtaagcgcgatggacgagacagtctcgctcgacgatatcttcctgcgaaagattagggatctcgctgttgttgatcgcagcttgataagcacccaagtagaaatggtttctcaaattgaagagatgatctggtcctgccatggatgccattgtcttagcttcttcttcttcttcttcttctagatctcacagatccgtgtctaactccaaaataaagaaaactgaagtgtgaataatcaaaaccaaaaaaatatgacgccttaagatgtacataaagccccatacattttgaatgttacaattgacactcattgttatctattttaggcccaatgggcttttcgatgacccaattagttcgacactctgcttctctttacacgtctcctacatacggacggtgacaatcttgtcttaccaataaaacgcgtttttatccaattcgcgcgggagttgttctaatgacgttagcaaaccactccgttcaatcgtgctgtcacgttatgtcgacaaacaaatccaacaatttactgacacgtgtcatttagcttccccaataaatgacccgggaatagttaaaagccggtttaccagtattggttttaatcagccaccgagtcatcgtgactgtaacttaaacggcgtttactgcttcaagataaaatacgctttgcccaaaaaacgttattagttcgtaatccgtttttgctctcccttttgagatcttttaattaaaaaaattccgttttaagtgaatgcgtgtaagcaacagttcgaattcgaagcgagagctaaaatcaaaatctctctgatttgttgttttgttgatgtaagtttctttgatcctttcgcgaaatttgtcatcttccccgatcgagttttactttttctttgtgaatagtttgacttttcgtttttcttcttcttcaatctcgcatggtgtttgtgcgtatcttgtttggaattggagtttgtaactatttgattataagcaagttttgattcgaatgcatgcgtgcaatccacaatccagaactagatgtatatgtatctctatgtcaagagtgattaaaatcgattcgtgtggaattaacttggaagtgaaagttttaatattgtttccggaatttacggtgagattttaggtgttgaccagcgttgttagacaagaatttgtcatcaatttgatttagttttgaagcatttgggttttggaattttgttttgattttctgcaggttttatgaagtgatttgcattagattggattgaa

SEQ ID NO: 8067 - DNA, 3000 bp, Unknown
  misc_feature (1)..( 3000): cDNA_ID_1810264_gDNA_ID_1621189_Annot_ID_57469 3000 nt of promoter + ATG
actgacggagatggacctggtcaagctctagcggaagaacttgcacggcgtttggggaaagaaagatgttggcttgtcaaatggccgaagaaaagtgaagatgaacatttcaaagatgcaaacgaggttagtgtagattatatgtaaaatttatgaaattgcttttgtggttactctggtcttaatgaccattacttggatgattttcttaggtgcttatgtctaagggacctcatttactcaaggaagctattctaaatgctgagccttaccctttgaagtcatgaagtgtgtccaagtcatgttcttcatatttgtcttattaatttttcggaactagcattaagagtataatttttattttctttctaattttgcatattatacacattctaaatttaattattaaccaagaaaatatattaattgaactttttgatgaaacagagtacatagcacttttggattaaaaaaccaacgaatttacattagttaagaagacaattaactaatggttaaactctaactaatattgaaactaccaaggaacaaattagaaacagacagaacatagacaaatctaattcatcagatttgttgacaacaatttgttaatgtctcgagaaatcttagggtttgtcaagatgcattcttcggcttttaggacttgaaccatttcccttggaaccacacacacttcttctgtagatagcttctcctggatttcttgagaaccaagcaaaaactgcatttctcttcccacctttgaactatccagagtctgcaaaatttaaacaagtatcgtataaaaaaaggaaggaaaatactgcaaggaaccatttggatttagggtttatcttatacctgcattttggtctgcttcagttggagaatctcaatttgagcctgcaagaacttgacatatttagctgcggcattgaacatttcggcagtgttgtgtttctggcttccagggattagttttcccagctcttgagtcttctctgtgattcttcttctcctctttcgtgctgcgatgctctgagcagatagctctcgcttcttggtgtcgccttgttcagtccacccaaccttgaacgtcgatgagaaatcaggagcttgaaacttggaaatgttggaagcttctgtgatgtaagaatccaagaggtaattagattcagggctaggggaaaaagggtcgtgactgttgaaatggaagctggagtcaatgagtttctggtgttttggcgtgtggaaggaatctaattcctgtgactcgttgaagactcgggtcttagggctaggaaggaagatttcttgagatggaagaaacgactcgtagaaatgatcatagtgatcaaacccgaagagagacggtgaaagagcttcgtcgggatacaatggctgatgttgcggttgctcttggaagaagaaactgtcagtttcagggataatcatatccacatcagggataaagcaatcctgaagctggattacatctgagttggagaagtagcttaagcagtccatagttaagaaatagatgatgaatttttagcaaatgaagaatgtgaagcaatcaggagcagttacagatggggaggttttgagtaaatggtttaattaagacttaattagctttaattgctgctaatcaagcttagagagagtaaacgcagaaaacaaaggaaaggacaggagaagatatatgagagaagcagggattctgtcttttgttttcttttgagtgaagtaagacaattcaggtagtaagtttgtaacttgtaacttaactgtcacgaaataaatatgaaagagagagggagaagttagggttttggcgaggattaaggaagggctatagtgggttttaacttttagatttagcttaacaacctcctaaatattaggcctcgtttattttctttttcttaattccatttcaagaaatatatacttatattagcttgacgttattttggtacattttattagttcttcaaagatactagattaggaactaaaaaaaagtttaaaatgaagttagagttctacagcctctaaagcctcagtaggctactaccaatcagcccaaacaattttaatttgccaataacttttttattcgtggaatttcacgaaatatatacaaaaaatatataatttctttatattataccacgaaagcatacaccacatttcacacttgaatcccaaagagaaatcagacactactttctaatgaagaattagttatctagtaccatagaaatgtaattcacaaaccgcatttagtttatcctcatgaacttatgtttagtagtataaattcgcaaaaacatatattaaaattcattaattctacaacatctaaaattcattatgtatattagttcttagtattatataatagcatattgggctattacatttattttttactattttaaaacaatttaagaaaaatgaattaagtaagtaatttgtgtcatattttagcgtttttcttttatcggtggcgcgatttactcggtaaaagaagagctactacggttttagcggctaaaaatgttgagattggtggttccacgttgttctctctgactttgccgccaagtttcctatctcaactaattaaaaatgggccaggcccaatcgctcttctacgtgccacacacgctttgactttgttgccaaggtttttcttaaggaaataatgggtcgaaataaatgctaacaggcctaaagtaacaattaatgggcctttttgcttcgaagcccatttatctcaaagagagcgaaatcaaaatcttccttcgtcttcctccataagacacggatacagaggagggaaagaagaacccctaaaacccttgagcaaccactatgaatggataatagctgaagagcttttactcaaatcgatacttcgagatgcgatttttgcttcgtttaccacaaattcattttcggaaactctcgtgctcgatgtctgtactc

SEQ ID NO: 8068 - DNA, 3000 bp, Unknown
  misc_feature (1)..( 3000): cDNA_ID_1810260_gDNA_ID_1621189_Annot_ID_57470 3000 nt of promoter + ATG
aaaatattttcactgaataccctctttcctttctgaaacatgaaagattaatattcgttttgataggacggagacagagtatgtcagccagatgcttacaaaaatcaaacgcttttcccaacaccactcctgccatgtctggtttgtcgctcatccaaaacagttgcaacattgggatggcggtgcaccaaacctttacgatattagtggcagcgcacattttataaacaaatgtgacaatggtattatagttcacagaaaccgcgacgaaaatgctggacctcttgatctagttcaagtgggtaccaatcccttcatcttcatctgtaatgtattattttaaaaatggccttcttattgtgtaaagttactaacctttttgtatgttttagattggtgtgaggaaagtacgaaacaaggtggcaggacaaattggtgatgcatacttgtgttatgacaggtacataaacttttcaactaccttcttatttctactaatctaacttaacggactaaacaagttttcacaagaacttatgatagtattttgttactttggcatcgaaaactagctgaagttattccgaagtacccaaagcgtagagacctttgcctagaacaccaaacctttatcaaaactctgttcaaagttacaatcgataattctactatgttggttcagtaatgaaatctttattcgacaggacaactggttcctactcggattctccagtgacgcctggaatgccagagaggagatcacccaagcggtactgatcagtttggtgaatttaaaggccgtcaaacacggtggacatagcgtatcgataacatttgtcaactaaattttatcccttttgggttaccattggtgaggaaaaagatgatcttgtgagattcttacctttgtgttttaacagactgtcaagattcaagaacaagattatgtctctactatgtaatgtggaattatgaatcatggtgtttctctattgtgtctggtaggtctgatccaaaatgtgactgaattcgatttttgtacagctctgtgatctttttgtgctctgtctgtttctgtagtttgttctgtttctctctgtctctgtctcctccttttgttgcggctgatttggtgttgtgaattagctgtataactgttgacttcaactacctctctgttataattatgcaaactctttgcaaattgattcaattatttccaatgttatactgctttgtgttacgtctatctagttgatttctttgagtattaatctaattgtcacgcaaatattttataatagaatcagttgcggcggtgcactataaatgtcgatcatatataatcattgcgaacgtaattaatatagggaatataggtgaaagttgtggaaatagtttattctcgtcaaaggatatgaccaagaccaaaattattggtattatctaatttatcaatccattgtttttttttcacacatttgcttattctgatatatttagtattgtttttaattatacatcataaagacataaacatcatagacaaaacttttattgagaacttatataaataatcattttttgtgtatgttaatcacatatttacattaggaaataactaagtttagaatttttcgaccaatattcaaatcacttaatcatctgatttacatgcaaacatttgatgatatgaaaccattcatatgaaacagcaactcattaatataaaaatataatgattagtgtctttgttggcatattttggtgtcaacagctaaaagagacatttacttaccaataaaggagaccgtatatccaattccgactgtttaatgaaaatcatgatatattaaggaacaaatatttgattgagaaccgttacaacgaagagattcttctccactatcacattatacatggtactttctaattatattaaaatgggacgtaatttagaattaagtgataactctgtaaaattagaaaggaaacaaaacaaaataaaaccatattaaaatgaatttcacacaaaaagtgactttggtagtgaatatatccgtccgttgcgccgaacatactctgtcgaatagcaccacgtgtcgtgtaaacagatcagcatcgacgaccgttgagagaacatgagaagcgaaacgtgggacctcaccaatatctttgtttattaatttatatttcttggtgctacgtaaaatatttgttctgcgattttgagaatttgccaggctggcaaattggggccaggttggatcatccaacggctgtggttggttcttcatgtttactggtagggtccatcatgtgaccgttgctaagggcggtgtggaccacctctagtcctagggttttttccttctctgcataaagctcccttctttgttcctcctcctctctcttctcttatttattcacaaccccccattaatctctttctctgctgcagcttaaactttaaaaaacactacaagaacaacttcttcaggttctataaagagattccgaagaagaatcttttccagaaacagtgtaagtcttatcttcttctttaggttggtttctctctttttctctctttagaagctgttaaattcgaatcctttttgggttttagttctattgtctctcttgatttctcgatttttatatagataaacttagaaagcttcgaatttgagctaggtttctctcgccttcaggaaaaaaaaaaagaaagtttcaatcttttcctcctgagatttagttctgcagagttgaaattggattctgtgttatgttgtttgagttcgtttaatcgttagggtttatacaagaattacgtttttgattttagatctctactaatcaggaagaagaattaagcttgtttcttttagatctcaactaattcaacaaggttaattagttctagggttactactttggtgaattgtataattggtgactaaatattgtttgaatcgattctgaatgacaggctttaag

SEQ ID NO: 8069 - DNA, 3000 bp, Unknown
  misc_feature (1)..( 3000): cDNA_ID_1810256_gDNA_ID_1621189_Annot_ID_57471 3000 nt of promoter + ATG
tcagtacggtgggttcaaaacagtagacgataccgaattctccaacgaaactgtctctgaagttgttgttaagcctggatcatctgaaaccatcgaaatcccagctcctgaggtataattagaaaaccaaaccctaccttattcctgaagttgttaaaccctatctttctaattatggttttttgttttgtggttgttttcatagactgaaggtacattggtatgggacatagcggttttgggatgggaagtgaattacaaggaagagtttgtgccaacagaagaaggagcttacacggtaatagtccaaaaggtgaagaagatgggagcaaatgaaggaccaatcaggaacagtttcaagaacagtcaggctggtaagattgttcttaccgttgacaatgtctctggcaagaagaagaaagttctgtacaggtacagaaccaagactgaatcctcttcctgaagtggaggatttcatgtagtctctggatatataatattcttttctaaatttaaacgtttggtgttattatttatttttgagtgatatgtaagagaaagagatactcccattatttcattgatattcaatcttttgcttctttctttttttggtaaggtcaatcttttgcttctttggtatgagatttttcctctcttccctatttgatttatttgattaaaactgtatggataaataaatatgttcgaatattcagagttttacatgggctgagtattggcccaatggcctttcagagtaacaccaaagaagaaatatgtgatatgttttgtatggttgttctgaaaggttttacagtgagaaaaacagttgaacaaccaaaagaggaatggtttgatgattaataatttttcttttgatctaacattcattatattataaaccccaaaaccgggaaaaaattgaaattcggatggaaaaaaacataacaactctatccatagttaaatcttttttttgtttgtcatctctatccatagttaaatcttagttcttacttatgagtaaatgtccttagactactcatgttacgatcgatgatgcatgtgtgtgaacttaccttaatggatatacgcggcgaaaacaaagactgccacaaaatctactctttgtgttgttattggtacacatcaatggatgaagaatagtggctcgaaccgcttcattggccagaaaaatataagattagctactacatttttttctaaagtaaaatcaattttgttttttgggatcaatttttgcagaattctatgtagtgattacgacaccacacgcatgcatggcatcatcagagaaaaagattatagatgactagacgcactgatccttctacctttttttctttaaattgaatgattttaatataaacaatttgtaacttgtaatagatttgcacttctcctcctataaatgcgttcgtcaacatctttgctttcgtacggtaaaacaacatctctcgttgaaacaaaatgtgtttgatcattttaaattttctaataccttacgtcttttattttaatttctataagaattgtctgtatggaaagtttttttaagatttttgttgcattttttttaatggacagcttagtcatgcttctctctaatctatagactaacatgcgggtaacatataaatggcttatataaatatattcttaacaaaaaatatcaatattcttttcagcatatcagtgttataattaatttagaatccacgtctagtttatattttcttctttatttgcggccccaataatactacttttggtcaacaatatgaaagtcaaaccagccgctcaaatgtatccttcatgagttcatgttatatttcagtcaatacttttcatatttaaacacttattataattacgtaatatttttttgcccaaaaaaaaaaattacgtaatattcaacatctctaccttgtagagttccaaaacattgtcacaaaatatttataaagaatttattttaactaattaggtcgttaattgtccaagggtttttcatagttgatatagttctgttcaaatatagccatccttaatcgattcatgggatcgtaaattactacttcgagtgttgtaaaaaaaaatgaaacttctacattacaaactcgaatttaatgcatctggagtgatactataaaagtagggatgctctcaggtcgcatttgagagacacagaaatgattttaatggaattaatatattttcagtttttcacaaaaaaaaattgtgtttataacaactgcagattcaatgctgattttatgagtctcacctatagaatttatatttctatattcatagaggcagtataggtgttgacccaacatcgaaagaacacttcgtaaaaaattctttggaacaaggctgaaaatttactcccaaatttagctatccgatgaagataaatcatttaccgtttattaaagaattatcgagattttagtccaaaccaaaagagattatgagcctaagattttgaatttgtattggtaaaagaaattgaacgaaaatttcagaaaaaaatattaataaattgaacgatagagttcacttactacatagtcaactagtgcctagctataatagtttcaaaagacaaaaaaaaacaaaatcggttaactacttccgtgacataattctcattttgatttttgaatccagtctaatttgaaaagtatattcaaaatctttaaatccattaatgataacttttataatacgttgacacacgcaattgtatatacaatattcttgaattttaaatgtaaattctagaatatattgcgatcaccacactaatcaaaatctttgggacaacttgaacccacatttgacttttcttggtcaaatattttggcatcatgcatgatcttctctataaaaaccaaaaggcctcaacgacattcataaactcagtcattatatttatttttgttgtatttcaacgttcaatctctgaaa

SEQ ID NO: 8070 - DNA, 3000 bp, Unknown
  misc_feature (1)..( 3000): cDNA_ID_3075806_gDNA_ID_1621189_Annot_ID_174544 3000 nt of promoter + ATG
acgacaatcaacattttcccgccaaaacgcaattcaacattttcccgccaaaaacgacattcaatattttctcgccaaaacgcaattcaacattttcccgccaaaaacgacattcaatattttcccgccaaaacgcaattcaacatttttccgccaaaaacgcgattcaacatttttcgccaaaaatgatttcacattttcccgctaaaaacgcaatttaacatttttccgccaaaaccgacattcaacattttcccgccaaaaaggatttcacattttccgatcaaaaacacaattttaacatttttccgccaaaaatgatattcaacatttttccgccaaaaacacaattcaacctttttctcatcaaatatatatgtaatacagaaaataaatacaatttaaaatatatttataagcaaattatagatacaacatacatataatagtatattagcagttaaaataaactctaagaaaatgacaaacaccaagttgggtacccacgggtagtctcaaaacaatcagtttttttcgggctttacccactaaatcaaaaacccatctgggttttctaaagttgggtttttggtgggcaggtttattttgggttcaggtcgggttgggcttttttacccaccacaacatctctagatcttggagtacatataccatccagtttagttagaatatattattatccggttcaattgactggttaagttagaacagttctatataagaaaattgttttacactttactctttaagaaataagaatcgaaaatcttaacaaacttttcttaatagctcagctcaattcttattttgtaatatggtatcagagtcaggtttcaatgtgtctcgattgtagaccatccgtggatgtccagtcccacaaacttcacgtttcagatgtccagtcctgagcgtgagggggtgtattagaatatgtcctacatcgagattttgataatttatggagcaatatataagtatgtggtaaacctcaactcttgagctagcttttgggtatgaggtagactcatactaatatgaaatcatatttttatcatctgttagaaaacactagtccttttaggaaataccaaaatctacaggatgtaaacataagggatagtggagaatctatttaaagtgaaatggagttggtaaattgaggcttagtactacataggtcagtttgttgacttctaaagtggctttgcattcacaagtatgaatggtcaagcttagcgtttggtggtgcgatcaataaaagattaattatcattagtattaatgtattatagtatcactatacatctcttattaagtgctatacatcacagatacccacaaaacaatttgtaactcaatttaaaggtagtaattttttataaagagatttcataaatctaaatgaaaagttaaaggacagaaagtaatcaaagttgaaccaaacaaccataagaaagaagggaatctggttattaacatagctaaatttgttagttagtgtattttctagaatccaatatttatatatatatatatatatatagctaaataattgatgatttttgaaagaaaattttcctaaataaaactattactatacctccccaacatcaatccggctaatagttacttaatttcatgcttaattgttgataaaataatattttgtataagttatacatacgatcaaaactaataatacatataagggtttttaatatataacaacgccattctaaaaaaattgaggcgacaacaaatatattctacggactatatagttttgaaggttaaaacctatatatacttgctaggaaaaaccaatttataatatttcgaatggtgtaagttttttttccaagtaattaagtaagagttgtaggctttctatttatggatcatccactatttttctacttggccactcactataaacgtaaaacatattaaacgaccaaaagtaatttagattctatcttaagagttaagactacactgttacataaaatattttccactcttaaattttctttctttgctaaaaaatttaaagttgacaaaaatatctaaaataaaccataataactataccatttagttacagaatatttttgattgagtaggattatgcaacttaagacaactctctaagatttattgtatattttattcaaatataaattgaagaaaatatattaaatttttgagccacaattactggagatggtggtgtcagtatctttgaaataatgaagaaattgtcccctctaaagttaaaacccacaaattatgacctactttcaaacaccatatatttctccataaacttggggtcttaatcaattaattataaaaacagattgtacattaacattttccttttttcattgacacgaaaattttagaaagaggttatccaatgtcaataatgtttcatttcagattcggctcaaaaatagaaaaatatacaaataatttgaattaaatataataatgactttttcttcgaactcacagtacataaggcaacaagtgtcagatttgatgcatagagataatagcatttttcgtagtttttgttaaatataagtataatacaacattccaaatttctattacagatttttaactggatcggataattagatcggcatatttttcaagctttcagcaaaaacgatcaccctaaaattattttttttgatggaatgatttgtttgaggatattgaatatatacactccaattccaaaaaggctataaagtatgaattaaacaatcaagtagtaatagccattattaatgattcgaaaatggtaaagaaataattaacactaaacaagagtcaaaagaacatgacgtaaatattacatcaactttacgtataaaccccttccctctctctatttaaacccaacacatacatatgaaactcctcaacaaacacaaaaacctcacaaccactaaacaacacacaaaa

SEQ ID NO: 8071 - DNA, 3000 bp, Unknown
  misc_feature (1)..( 3000): cDNA_ID_3047461_gDNA_ID_1621189_Annot_ID_174541 3000 nt of promoter + ATG
taaaaatccatttgataatatagtggtccaccaaaaatctttcaaaatatttaaaaatcacgtttgttcacttcgacaaaaaaacaatttgtgatttacttgagggttgctagctctcccaacttttgttattggttgcaatttctttatatgaacttagttttgtttgtacgtagttgcctaaataaaacactgaaaaacgtacaaagactacaaagtattactaattccgtaattactcaaaaatttaatatatgtgatcagtgcaattgatgatatagttagacaccgaacaaccatctgtcaaactcaaaagtcaataattttatataatttcctagtttcaccagccggctcatgatccgcatgcaaatcttgaaatattcttgatagcacaataaatttattaaattctttgtatggggttcttatctccatattccatgttttatgtgtccttgtattaaatattgttaacaagagtcgagacatattaaacatgtcatgttccactattactaacttatcgtagataatgcttgccacaagataccgaaataaatatatcatgttagcacacttctttggtttggtagttggatcgggtcatttccgatttaatctgtcgatttaagtgcaactaaagaaaatattcgatgtcgaccaatagaacaaacatgggctatatagatatatataacatttggtttttattttattttgttaaagaaaacatttggttgctattttcacatggatcattataaattttggttttggatgctattaatctacaatcctcgtatagttatttattttcttctgtaacctcaaacatatatctaatgtgtgaactgaaataaaataagatataacccacttaacaataccaagttcacatgttagctacgccataaagtttcaaaatactaagacttcacgctcgcatgctcaagcagcaagcacccacacaagtagtaacatatatatctatattttatttacattgtgctaaaatatctcttctagataagttttaaaacgagaatcatgagaaaaaaataatttataacaaaatttgttgatgatgttaggatgtagatcaatgttttataataatgatgttgtaaaaaaggcgataagtgtactttcaatcttgtttatcattaatatggcctttatcaaagtgtacactactaaaaaagacactgcaaaaacaatataatgagaacaagaacatttggaaattcagttcactataccttcttaatctgaagaatttgaaccactttaatagaacacttgtgatattaccttgaaatttataaatcaaagttaatatacagattattctttctttaatttgttaatggactatacaagtcaaagatttaccaagacatacatggctaattgtaattaacaatctcgagcacacaatctacttttgttataaattgccgcatctatttatgaagacaccatgaagcagtaaaactaaaatacatctacaacgacggacatttaaagatgtttttacttgatataataatcaccatgttaatacggaaattacatgatattgagttatagataaaaatctagtagatacatcctaattatatatagcataataaagctttaaattgaaatgttgacaaggagatgcatgaatttaaaggcataggccatagcttagttaccatttttgtaaacgaccgtcttcgcaaccacttctttttctcgttgacctgacaaaagcttcaaattatagttattgtggattgactttattttacatagtgtaggttttgtttatcatcacaaattattttaacaatcaccatctctaatcttttacgccattaatattaatattttcataatatattttagcagtcagatttataaattgtacctatttattttgttttaaacagtaggttaatgataataatattaacaatttacaaaaaattatgtattaaaataacatgattattttttttttgtcgtttttgttacgctgaaaaattacatacccaatttaaatctcacttccaaaagacataaaaggattgttttttactttgtgaaaattacatattgacagtcctattttgatgggcctaaaaatggcccaatagtaattagtttgggcagcagcatttcacctctgcgacggtcggagctcatcttcaatcataacttcatcttcttcaagcaaatcaactaaactctgatcaatccagaaggagcgaaagagaactatagatcggatgactaaattcccaacaaaccatagtttatccaaaattttccttggactaaaccggaatttccaccggttcagaattaaaccggtacggtacacccaattcagcaacaacaaacaaaaataaaccagaatctcccgatcaccgcactggttacattcccggcgccggaaaccgcctctactaccgcgtcgcagcgagtaagcatgtcttctgtcttcttcctcttatacttttcattagcgttgaaattaaggtttgaatatactcgaaataagattggataaatcttctgcaattcgaagaaattcaacgagagagagattgctgaaaaaaaactaacctaaaaagcacgtcacaaggccggcgagatatcttcaacaatggtcttcttctctttcgataaacaacaaataaaaaaattccaaaaggaagtaagaatagtcgtctctctgacttctctttaaaatgataagtcaaagtaaacaaattgatgccacggtgcttcctctttagcttgtgaatggtgtataataaaaactcttccttgctctgactttgtctttcccattttaccaagtctttctttttgtccccaccatagttgcaattcttgattttctctcaggttttgaatcttttgggtcatttggtctctcttctgctgttttcctctgaagattagagctttaccagagagataacttgttggagaagacaaatg

SEQ ID NO: 8072 - DNA, 3000 bp, Unknown; identical to SEQ ID NO: 8069
  misc_feature (1)..( 3000): cDNA_ID_1810256_gDNA_ID_1621189_Annot_ID_174536 3000 nt of promoter + ATG

SEQ ID NO: 8073 - DNA, 3000 bp, Unknown; identical to SEQ ID NO: 8068
  misc_feature (1)..( 3000): cDNA_ID_3047469_gDNA_ID_1621189_Annot_ID_174535 3000 nt of promoter + ATG

SEQ ID NO: 8074 - DNA, 3000 bp, Unknown; identical to SEQ ID NO: 8067
  misc_feature (1)..( 3000): cDNA_ID_3047473_gDNA_ID_1621189_Annot_ID_174534 3000 nt of promoter + ATG

SEQ ID NO: 8075 - DNA, 3000 bp, Unknown; identical to SEQ ID NO: 8065
  misc_feature (1)..( 3000): cDNA_ID_1395054_gDNA_ID_1621189_Annot_ID_174529 3000 nt of promoter + ATG

SEQ ID NO: 8076 - DNA, 3000 bp, Unknown; identical to SEQ ID NO: 8064
  misc_feature (1)..( 3000): cDNA_ID_3047485_gDNA_ID_1621189_Annot_ID_174526 3000 nt of promoter + ATG

SEQ ID NO: 8077 - DNA, 3000 bp, Unknown; identical to SEQ ID NO: 8063
  misc_feature (1)..( 3000): cDNA_ID_1810286_gDNA_ID_1621189_Annot_ID_174525 3000 nt of promoter + ATG

SEQ ID NO: 8078 - DNA, 3000 bp, Unknown
  misc_feature (1)..( 3000): cDNA_ID_3047461_gDNA_ID_1621189_Annot_ID_57476 3000 nt of promoter + ATG
ttacattcccggcgccggaaaccgcctctactaccgcgtcgcagcgagtaagcatgtcttctgtcttcttcctcttatacttttcattagcgttgaaattaaggtttgaatatactcgaaataagattggataaatcttctgcaattcgaagaaattcaacgagagagagattgctgaaaaaaaactaacctaaaaagcacgtcacaaggccggcgagatatcttcaacaatggtcttcttctctttcgataaacaacaaataaaaaaattccaaaaggaagtaagaatagtcgtctctctgacttctctttaaaatgataagtcaaagtaaacaaattgatgccacggtgcttcctctttagcttgtgaatggtgtataataaaaactcttccttgctctgactttgtctttcccattttaccaagtctttctttttgtccccaccatagttgcaattcttgattttctctcaggttttgaatcttttgggtcatttggtctctcttctgctgttttcctctgaagattagagctttaccagagagataacttgttggagaagacaaatgggaggtgtttgttcttgtgtattcaaagatgatgataagaagaagaagttgagatcaaacgatgatgataagtcaagagggttttctgggaaacttaagtctatgagaagaagtaaaacctctgattcttattattcagataattacggaggctcaagacggaaaagttctaagcctgatgaggttgttttcaacttttctggcgagcttggtccgatgcctccattaaggaacgattccaccaaggtttttgttttcaaaggcttctttaggatatgcaacttctctagctaaagatttcatctttgtattgatgagaatttggttcttgtttttttctacagtttatgcagaggaactcgtttatgggacgggctggggtaatggggctagagaaagctgttgaagttctagacacgctcgggagcagcatgactcgtatgaatccgagcaacgcgtatctctctggtgttacatcgtcccgtggtggcaaagtcactatattggcttttgaagtggccaatactattgccaaaggtgctgctttgctgcaatctttgtctgaagagaatctcaagttcatgaagaaagatatgttgcattccgaggaagtcaagaagttggtttctacggataccacagagttgcaaattcttgctgcttctgacaaaaggtttgtgttttataatttatccccatttgtttctgtctttggttcgttttctttcttgatttattttctttttcctgtagggaggaactcgatcttttctctggagaggttatcaggtttggtaatatgtgcaaagatctgcagtggcacaatctcgatcgatattttatgaagtaagtttagtttgtgttgaacaagtccttatctaatgctttttagtcacttacatgccagtggattttcattgtacacgggtctataacgtttcaggcttgacacagagaactcacagcataaactgctcaaagatgatgcagaggcaaggatgcaagagctcgtcactcttgccagaatcacttctgtatgtttccatgttgaagtttcaatgagctgttgtaatctttttctgggagatttgaaactaacttgcattggctttatcaggagttatatcacgagttgcaagctttggataggtttgaacaagattacaggagaaagcttgcagaagtagagtctttaaacctccctcggagaggttggtcttactatttatttgatcagtcttagctctttcaagaacacccgatttcattttctttttctacatgtaggagagggtatcgtcatcttacaaaatgaactaaaacaacagaagaaactcgtgaagagcttacagaagaaatccctatggtcccagaatctggcagaggcaagtggttattgaattgctgtgtctaagtgtgtggtacatatgctagttattctaatatcttcttttgttgcagataattgagaagcttgtggatgttgtaagttatatacggcagacgattgtggaagtttttggcaacaatggtaatgtttctttgtaccgctggtcctcttataatgactccacttctggaaaaccaaatttcaactatcattttcttaaccaacaataggtctaagagacaatgaaggggagcagggaagagaacgattaggtgaagccggtctttcgttacactatgctaatctaatacaacaaatcgataatattgtaagcctaagattccagattctcaccagtcttattctgatatatattctctggttgaaactgatccttgaaatttctaggcgtctcgaccatcgtcacttccttctaatgtaagggacacgctgtacaatgcattacccgctactgtcaagacagctcttcgtcctcggctacaaactcttgatcaggaggaagaggtttgtccaaaaaagatctctgtttctcaagtatatcgtcaggcattgtttggttctgtttcttgttttgttacctaacttgagtgtttctgcagctttcagtacctgagatcaaagctgaaatggagaagtcgcttcaatggcttgtcccgttcgctgaaaacaccaccaagtaagtattccttcaccatcatttttggtttaatatgtttctccttgttcattttggtcacattcaattttcacagagcacatcaaggcttcggatgggtaggtgaatgggcaaattcaaggtaagtctctatcagctactgaagttttaaattttgaatcttcaaactgatctagcaaactacgaattggtaatttggaatacaggatagagtttgggaaaggaaaaggaaaaggcgagaacaacgggaatccaacacgacttcagacgcttcatcatgcggataaaccaatagttgattcatatgtactcgaactcgttgtatggcttcatcgactaatg

SEQ ID NO: 8079 - DNA, 3000 bp, Unknown; identical to SEQ ID NO: 8070
  misc_feature (1)..( 3000): cDNA_ID_3075806_gDNA_ID_1621189_Annot_ID_57478 3000 nt of promoter + ATG

SEQ ID NO: 8080 - DNA, 3000 bp, Unknown
  misc_feature (1)..( 3000): cDNA_ID_2165617_gDNA_ID_1621190_Annot_ID_174558 3000 nt of promoter + ATG
tttttgatatttttcctagtattgttatctttataagtggcttaattcatagaacttagatgtttgagagaaataattttgatatttttattaggggaaaatctctgacatgtgttgcaagtgaatatacttgtgatttgtttgtgcgtttgtggagggaacttggtctataccttggctatgagtggactttcggtatgaattctacaacctgtgtgctttgattttggaaaggtttctgatcatgaaggtaatttaacactcttctcattgtatctttaatttatatagctaatgcatataataaaaacataaatattttaggtcgtcaatgtataatctcacataatggtgcttcaagaattacattcaatcaaagttacccagagattaacatggatcgcatcacataagaacatttatattttcattatcccttaactgtttagtgtattatacaaaattttagtcttagctatttatttcttttttgttttcctactgtttcaggactaaattctttgaacggatgcaaccagctgagctaggtaaagttgttgatgagaactgaagacatcaagaccaaaccccttttcatcattattataaaatcttctctattatgcttaaaaaatgtactgttaaaacttcgtttatgtttttatttcactgactatgcatgatttctgtaaaatattaactttgattatgcttcgttttatttaataattactaaatcactatagttccgtaaacttagataaaaatttaactgttttgatattgttattcttatttataatttggatttaaattatttagattttgtgttgattgtaacacaatgtatttgaaatggaacttttgatttcaaatttaaactaaaatatgagttagatatgcatgtattaaacaaagaaaataaatatgcaaaacttagagtttattaaaatatttgtccagtgaaatatgccattaaaacgttagagaatcttctaagttagaaacatccatgatttcaacgatgagtttcttaatcaagcatcccataatttttgttacaatttgcacaataatagagtagataaactaaagagtaaatttggaaaaatgccctacttatgagttttcgattgaaaagtacctttaaacaaaaaactatttttaatatataaatttacgaaatttgtctaaaaacaaattataaaaagtatattatatgtacatgtatactaatttaatgctaatctactaaattattcgtgaaaaatatttgctaatgttttcagtttgtgtttatatattgttaatacactacaaaaaaatttgttcattgatagcataacgttatatcacggattactcaactgctattgaagattatttacaaattttgttttcgtataacagcgttttatcaacgctattaaatagatttactcatatagcaaggttctaacgctatgacagaattcctctaacccgggaaactaaaatgactcataccgcgaaacacttaaaataatttttttttttctgtgaacagacatattttccctctgagctccagaaaaccctaagaaaataaaaccctcaaacggacgactcgaatcctggagccaccgattgaactcgccaccgccgttgttgaagtttgccgccgtcaaagcaggagccgcaacaacaatcccaatttcggccctaattgtccgattaaaccatctctctgaatcccaaatcgaaggcatgtctctctgaatctgtagatttatttcatctctttcgttaacctagttagttttcttttagctgtcgttaatcctttgaactgttttggttcttaatcactggatttatgggtttctctgattcgattcaggaaagtttttatcttttgcatgtccgtgttctttgcaaaattagaactttatgcttatgtggtttgatttaggcgtagctggataaatagaatgcacaattttgctttcggaaattttaaatttttagattttaacaaaacttctcgagatttacaagtgtttgttgacattctattacagctatttgtattgacttgttcttcgaatctttggatctttgagtgcttgtaatgacatggtctctgaatgtttagattatttccacaacttgtcaaacacattcttgcataaacaaacacatgaaactagatatactcattctattttttgtttttgcaagtgctactgtgtaaataatgggaatgtgaagctgatatttggctcttattacgcgacaggttagtatcatcttgatcatcactgtttctttttgtcttgaatatcactgtggctttgtgtatggaacatgactgtttctttttgtcttgaacatcactgtggctttctgtattgaacatgactgtttctttttgtcttgaacatcactgtggctttgtgtattgaacattactgtttctttttgtcgtgaaaataattgtggctttgtgtattgaacattattgtttcttttgtcttgaacatcactgtggctttgtgtattgaacattattgttttttttttgtcttgaacatcactgtttctttttgtcttgaacatcactgtggctttgtgtattgaacattactgtttctttttgtcttgaacatcactgtggctttttgtcttgaacatcactgtgaatatgagtttggggctgaatataaagtgatttagatatgtttcaagagtctttcatataatttgaaatcattcttatggtattaaaggttttaaaacacgctttcaatttataatggtggaaaaggattgggtgcatctactcttggccagtaggaaaatctggagatcttacctctctttttattctccttttaactcttcactaaagagttgatcatataatattttttttttaattaacctttaactcttctctgaagagttgatcctgcttatgagagaggggttacaaagtttgtacgagatgtggctgcagct

SEQ ID NO: 8081 - DNA, 3000 bp, Unknown
  misc_feature (1)..( 3000): cDNA_ID_1810344_gDNA_ID_1621191_Annot_ID_57485 3000 nt of promoter + ATG
tcaacttctctcgactaataaagttaagcatatatccctatggaccagacatgttggaaacactcctacgtttacttggaaatgctccaaaactaaaagagtttttggtagattatgtacgtatcatcctcctcctcctcttcttgctttaatggactatctataatctatactattcaaatttttgcttatcatatatagccctcccttattgcttctcagaaatttgtctataatcccgaggatctcccatggtcatggaaacaaccgagtcatgttcccgaatgcttgtcatcacagctcgagatattcgagtggagagactatggggatagaataatagaggaagaattcttgacatacgttttggccaactctaagcgtttaaaaaccgcaacaatctccctgaggttaaatcttgaagatccagagttgatcatcgaggaaataaaagaccttcctagggtttcaacaacatctcaccttttgttcaaatgaaaagtctacagaagctcagtgaatgtgcaagcttaattagccttatctgctataagataccccaaaataattgatgttcaaggtttctttttctttcttttaaagtaaaaacactatttacggtttcttgatagtgttcctttttccaaatactggataagttgcagagggcttagtttcctagtttacagtcttaacaataacatcatagcctatgattcatagggtgtttaattgtttattcacatatttctgctgggtcgctcttaatgagtcttttcttacaacatcataaaacaaattttgggtttaaagtcaaacattgactcgctgctggccctctgatgtttggaatcttacttagttcttgaaattgtatggggaaaaaacaaccaatgttattgaaaaatggtcaagcctcgttggacagctgatgtgaggaatatcgaaacatgtaaatggaataagtggtctatagtagtcaacgttatacttgtcaacattcgtctgaagttaaccgtaatccgtgggcagaaaacaaacaaagtaagtgtttggtcatctcaagtctcaacatatcccattaccattatccaaattatcatatatacatattctagttccaaaaagtttagattgaactaggaaaaaagaagaagaaggaaagcgtggaaagaaaaagcaagtctctcatcctctataaaatattccatttatttcattcttgtttccaccacagtggtgcatttgatatctttgcatgaggaatgtcttaagtggtttgtctgctttcctctgtttttgttcttttgcagatcaagaggcttcatcttttgcttactgtcaaggagtcagctatggatgttccatccaacttggaatctcgaaggcgtcttacagtactttcttttcaaattcactattaatgggacatgcctgctgcacccaagattcgcaacatgctttccttctcgtaggttccaggcacaattcaagttaatttatggtcgtcttctcataggcttactatatcttaacatcttccattttgcgttgtcacagggtccttacaccatacttccgttgattgataggtatgatagttaagctcaataaatgaccacacttgtgtttctttttgttgatgattagggtttttgggtttctttgatcttaagcataaaggacaagctaacataacccatgtcggggatggctttgcatttagaaatcttagatggggcttttgtgtccttttacttgtgtgttaccgtgatttaaaatcatcgacaagtcaacacatatatacttaagtaaagagatcttctacccgcaatttgtgacaatcaacgtaaatatgttctcttcgagcccaatgttttggcacaataactgtatccctgtaagattttcaaaagaagccagaacagaataatacaagcacagcagttagatagaaaaccatggagcgccgttacatgagaagtaaggggttaccctcagaaaaagaaaaagaaaggaccacttccgttccattgtataaaaatccagacatcaccttcttcttcccctgtaggttaatctcactgtccagttgcaaaacagagcatgaacagtaagctttttgtttaagattttaatagtgagtgtgagtcatcacatgctgatctcgggttttactaatctctcgtcactttttatatccactaattgggccaattttcattttcagggcccattattataatatttataggcccacattctcttaaccctccatccagttcacattgcgccatgccttagcgcaaacgttaaaatggcgttgtttccaacttaaatccaaatccattaatgtatttatttattttggattttttttccgtatacaaactatattcaaattttgattttttttcgtcatccgctaatcttttcgttttccaaaagttaatgaagcaacaaaaatataattttaattgaaatgattgcatatagtttgtttcaattaagttctaaatacattatcgtagtgtaatgaaaaatatttttgattacaccaatatgctcataagtcataattaaaatctgaatttcattgtgatgttgtagactttttatttttgttcagagatgttgtggcataaatgactatatgggataatatcgttggctcgttgtggtatctctctaattttatctcattgtaattccattgctgcatctaactacttacttaagttgtgttttattttatttttataagataccccaaaatgattgatgttcaaggtgtgtttttttatttgtacaatgagattaataaatcatttatttttagtcaagaagcattgaagcaagagaacgaaccatttgaaagactcataaaccaaattgagtcaaacaaacgaatttcaaagaagtagtttggtatggacggatctggtaaaccggtttcggtacgattgtctggttatttttggttaaaattgattgggtatg

SEQ ID NO: 8082 - DNA, 3000 bp, Unknown
  misc_feature (1)..( 3000): cDNA_ID_1810337_gDNA_ID_1621191_Annot_ID_57487 3000 nt of promoter + ATG
tgcaacattttatccataaacaaacaatttaattggtgaataactaaaggaaagtttttgtcatgatcaattttctgattagggttttcactaatgaaacgtaaaacataattttttttctttaaaacatatcagtttcatacctacgcgtgagtgttaagaagatttttaaggtgaaagtattcgtatgcagaatgatgaagctttgaatagcgacatgatttgtatgaatatcattatcaacaatatgaaacacaagagacaaagttacttataaagttacattttttctgttgacctttttgaaatgtgaccggaaaatttcttctttctttttctccacagactaattcaaaagtcatgattatcagtaatataataaaacctacgatttaaattattttgactagtgaaaacgactttgctctaatggtcgataaatagagtataatatagatctcatgtttaactttaaaaccgactatagatgcaaaattctcaacatctcattatgtcaaacattgaactgttcgtggtggttatattattgtctattttcatagtttccggctgatataatactattttcttgactaacgaaggttgccgaccataagtgaaacattggccaattcatttgatttggggctttgagaatttctggcccatccaacccaaatctgttaaaggttgccgaccacacctttcaatattggccagagaaagtgtggcgatggcccagaaaatctcaaagccccaaatccaatgaatttctgctttcttgaccatataaccaaaactatttcaacaaattcttgctaaaatctgtttttggtcaaaactgtttcaacatggcatcagtatgatgattatgaacctactcaatccttggacaatgatcatgtgtctgatggttaatttggatataatttgggtgagtgttttctataagcatataatttgtgattgttttgttggaaagtataataatagttgacactatattgttagcatccaattcacaaacaattacacgagtggtttgtaactaagatctttttgctgatccttgggtatcctaagcaacctgaacattgcttttggatttaacatttggcttggtggaaccttctctccatcctttttggcgagctctctcttcccacctagatgttagctttttctgctcggcgagtgctaattctgctttttctcgagcttcttcgcatgtttccatacccgagttgcacttatctgcttccttttggtatgaagaagttaccttcttggcctccaatagccccatgtctgctcgtttgtgtttctctaaagattctgcttcacgcagcttcagttcctcggtaagaagttcagcatagttcttctcagtgtcttcgttcacctctggatcgtgctttgcacaatctacacattcaaaactagagaagtttagtacaaagactcgattgctaaaagacttttaaactgatacagttaacgaaataccattcacaattaactcaccagcaaaagaagcattactgagctctgcaagaagaaaggaaacaagtaaaaaaggatcaatcttttggaattggtaacatctgaagaagaatataaattcagcttagcgagaaacatatagtaacttaagaaatctgttacaacaagcattacaaataatgatgttgagttcatactacagtcttcttggggttcactaaacaaattctatcaatcaaatcggtctaaaagcaatcacaatgcatacaatccaaacaaactgcattgtttgttgattggctattatcagaacagtcgccagtaaacttcaacttccacaatccgagaagttaacaaatcataacttgaaccattaatgtaactcaaacaataggagcatcaacactgtggacaaataactgagataatctttttaagatggagaacacctaaacgaatgaaacatcattcaagtagatctacacttacttactacactaatcattctcagactcaaactcaagcacgaatcaagctcaaagcttacaaattcagtaacctcagcaccagattaaaaaaagccaaacttgaaaatccaactgatactactaatccttacttccaccaccagctacaacaccaaattttgatataaagttgctaaattcctacatcactctacaaaaaggagtaaactttagccacagatctgttgaaatcatgggcaccgatcaagctaacttctgtttacctttgggaatggtgacagcggaataggtagagcattcacaggggcaagaaggacaagaggaggcggaaacggcggccaaagcctcagtgagatgccagtagagaggcggaccaagaatgtaaccagccatgctcagccccagtaaagctagcccgatcttcagcgccgccgtgtgtctcgccatttcaactctagatccgccgatctgggtcttcgtaaagattagatttttcggcgagtttgaagaaaaacctcgtagagggattttagagctgtgtgtgtgtgactgtgagacgacgttatttagaaaaatcggtgctagagattttgacacacacacacttttgagtgactcttttgctctctaatttcgtcgacagttaaatagtaagcgtgtagatttaagattctcttttgcgtcaatgtctctccttcaaatgctcgacatgatcggtttggtctgatttgaattggttcggttcaggagattaccttttgattacaatcataatgtgaaattattctgtgtttgggcctttggttatagcgtaactccagccggaacctattgaatggggctttagttgctcttggtccaacatgctttttcctctttaggcctagctggaaccggttgggccggttggccgtcgacgtagaataagtctgactatataagttaataactaatgctgttttgaaagtaaaaaacctaaaccctagtattattttggttgctttcgatg

SEQ ID NO: 8083 - DNA, 3000 bp, Unknown
  misc_feature (1)..( 3000): cDNA_ID_1810316_gDNA_ID_1621191_Annot_ID_57496 3000 nt of promoter + ATG
agaacgatcgttcgttaattatacaattaatcatttattgttgaagagacagaaacaacatccaagagagagtccaaaggacggatccattacaaagacatgtgcaagagattttcttagtctcgtactcctttcggtcggtttctccaacaaatgggccttggcaacaggtaaaataatactattgggtctgttttgtaaaatcttacgttttctgaaatggaggatgttgatacctttacaatgggcctaaggtcccataaattgggctttaaagggcctctttttgatacttccttttttcattttatgtcttgatgttcgaaatcttctatgtaaacaaattttttttggttttaatgtcaagagaatatgtgtgtgtgaacaatttataatgaccatgttacattttcgtctcgtatgtttaaaattcttgtttttatttgaagttttcacataattatttgagggaaatattaaatgatctttttgcaactctaataaaacgttagtaagtggcatgctaaatatataaatgataatacaccaagaaaattgaaagtgagctaaatatatcattcctaacaaatagttgataaattctcaagttgatatattgtactagatattagtcataaatagaacctaactatgaaccaataataggtctacaaatgtggggccagagacaagagaagaagtcacgactttgaatcttgatgatcatggatgaatggatatcatgcatgaaaaaattaaaatttctatgatatggaaaaacgacaataatggacgaaatctttgtacgtcaaaatcggagacttagatcgttagatgcatgcaactaattaacaactccaataacttcaattgaaaatgtgcgtatactcactctcatgaacggtcttctcgtattgttaattcactgtaatccttttgcgttttgatacgcaacttcggaatgggcaacggtatagcgaggcttacgtatgctttggaaaaacattaattcatatattaatgttttatattccgtgagaaaatttcaatgttttggaaaattagaacaaattagaacaaattctcgaaagataaattgaaggcattatgatattttcgtacgttctttttacggaaagttctttaacggcatccaaaacgctttcgtacgtggccgagtgctcgcggcgcaataatccttgagaatcataaggtatattccctggaatgtaccttttttgtttttcttataaaaaaactatctggtgcattttgtttttatggagtaatttatccaattaaagtccagtgtgggacactaaacattacaaattttatgtctttagcttagttatcatctgtttttttttaattagaaaagagtagttttctggtgtgagtgttatgtggaagacaaatatgtgacgtggattctaataatgtattgtcgtgatgtggttctttttgcattatttcgttttgattatgtaatagacatatatttaaatggtgcgattatgcaccgaagaaaaacattcgtctccatttttctttatacgaaatttgaccccaaaaaaaaggtaaaacacggcgtccgtgttattatgtagtatcatgtatgacagaaatggcaactacagtagatagtttggaccgaattttattttcacacaattaaatagttatttcaaggcagtaacaaattggtggaaaaaaaaaaaaaaaaggcagtaacaaatattaaaaccgaatattggctaaaattatacatttcaaaacaatattatgaaattgtttaacaaaacaaaatgtgaaaggaacatagaagtaattaatgtactcagattacgatcccatagaacttaaataaaggtgcgtttatgaatgccagatgactcagattagtgattgttcttcccacttagcagagtaattgctctttgtcctttggaatctctctctctctttttatttctctgtgtttcgcttggaatctatattttcgctatttcctggaatgatgatatatatgtatgttagtatgtagtagtcaatatttttgtatattgtgaataagtgactttttcaaggtaaatataggtcagaaacttcaaattcaaaatattaaatattataatattggtgaaaatatatagtcaaaaaatgattttaggttcggttgataatttattcaatgagagtgatttacccgaataagatgattgtgtgtgagcaaaaagattccacaatgatgccaatttaagcttcaacaagtgctttcctattaacaagaacaatttatgtaatatcatttttttcgtttgttttgcaaaactgcaaagtcattttattttgtttactttaataatccttgaaaatgttataacagttatttcctcaaattagaccatcatactattattattgttattatcaaccgttgataaaaatggtagtagcatgtacaactaagatagaccgttacaaaattcgtgtattgttaattattatatagtttccgtatgttgctgttttcagctcaacttgagtaaatataaaatattaaactgtttattctaatattggattcttttgtgtagtggcaacttatttttttctaagctttttttttttacagattacggatttcagtatgaaattgtagatccaatcaactattttcacatatgctaaaaggtatctaaaaagtaaaaacacttaacagattataaacaaaaaagcttttaagataaatgtcacaaattctttaaaaataaacaaataaacagctattgacaaacaaaaaataaaaataaaaaaggagtccttgctgggtccatctcctttgcgttctttttcgtctgttgaattttgaacagagtcacaagtctctctccatataaacctccccaaggtcgacgctacgtaacgaccatctccattactcgactctcctcacctaaagattcaaccttttctctgtttcccaattcagagatg

SEQ ID NO: 8084 - DNA, 3000 bp, Unknown
  misc_feature (1)..( 3000): cDNA_ID_1810364_gDNA_ID_1621192_Annot_ID_57498 3000 nt of promoter + ATG
gtatagttattttatgtgatggtagagttagtgtcgtgacagatttaatggatagagataatgtatttgatatcgttaaactgtatgtggtgatagagattttttacagagttagtttgttgacaaagttattagtaatgacagtagatttaagcgagcgagtatgacaaacatatttgttcgagttatctatagttacgatagagatatacggactgacagactttaatgtacttaaatctatgagataatggtgattgacatatgtacttgacagtagagttaaagtcaaatttcatgtgacgacatacatattgttgttatgtgatggtagagttatattttatttaattactagaatagcactcaaaatttttgagttatgaatggcgtggtgatagatttacgagtttaatgattttttagacatgtcatttttctagattaagcatatgttctaagaatggaagatactattatacccttatccgaataagaggatcttctgtggatcgggcaagtagaggtcgtaaactgtagaaaacaattgaattatctgttctgtttggcgatggaagagatagtattagtgtgtgggaagtagaatttcaacaacaggcggtgggtatttagtgttgatgaacgaggcggatgtagggttctaagttcgaatcgaattaaagggtatggagatcttgttgcaatggtatatcaggatttcagtttggatagtagggattgtaaggttagtctaagttataaaatttgtagaacgatgcttattctcgacgatacacctcccgtaatagtatgtaacggaagacaattcgaaggttttctccgtcattgtaaaatgggaagcatatgactatgtgttacggtacaagctataggttgtgtggttggcgaaccagaagttgaaattgtcgaagagggttgctggataactgaggatgttcttgggtttagtcggcggaaaatccacaaaaacttggatgagttgaggataaagaaagcggaaccaattatagatgaggagtactgataagtgtgcattttacatgttttgagcatccatttgttatcattattgcatcatatcaccactgttttataccatttctaatcatttgtcatcactttgcatgtttaggataattttgcatgcatgttgcatatttgtgttgatttcaggtgatttggagctgttgacgggctaattagaagaagcggacctgatcatgtcaaaccactcgacccccaggtcgagcagatgctccacgacatcaaaggaccactcgaccccctggtcgagtagaagacttcaccactcgaccacctggccgagtaccaccatgagagtcactcgatcacttcactcgaccaccaggtcgagtatcatcacctccaccacctgaccatcactcgatcacaccactctaccaagaagtcgagtatcaccatcaccatcactcgactacatactcgattgccagcttcagagtcttttccattccgcactcaaccagacactcgagcacaaggaagaaaagaagactccagctaatcactcgaccactcactcgattacctgggtcgagtactgttcttaatccgtcccaatactgcgtcgttttgagtattagggtttcggaaatatttcgctataagtagcatgtactttacatttttattgatctaagttttatttcccagacactgtgtaatccggatttctcttaatctattcagtattcagcatttgttttagattttgtttactgttgttcatcctgttatcaccttgctattactatgttgttatcatgttttcattctattcaacgtttatgttctctacaatgatgtctaagtagtgaataggtttctgagggtgggttagagtagtttagaattctcagtatgctaggtggttgagtttgattgatagatcccttctggattagttgttcttaatgcatattgctttctgatcaactggactttgagcacagatatttccgcgctcaaaaggtgttccatgaaatgtctgaaccactaattctagagattcgtggccctgtaccaaggtattggttgcagggagcgttttggctttaacttgttgattcgtaatgcctgttaggttagctctcttcaatggtgattgagtgtgagactagtttaacttgaggatctctgttgcggtggcacttagatttggttaccgaaattgttgtctagggataatttattgagcttgtcaatcacctataaactgaggaaacgaaactactcaattaccccatcctcgggagtttctcatccaattgatttatttgtttactttgctgttgtttactgcatcttgttatctgttgcttagtttttgcgtttctctcctgttactcgacctgatactcgaccactcagttgtctggcaacagacggtgcagtcgagtatccctgttatattttttgtctgttactcgacctgtcactcgaccacacccagtgctctgttggtcgagtgcttttactattctacttgaatttctggtttctacatgttcacttaagactgctagaacacaccaaaacctgttattgcttggcttgacttagtgacttttgatcacatcttgattgttagcatcacacccatttggattgacaaccttcagtactacaacgacatgatagtgctttaggataattgatcttaaaaacctattatcaatttggcgctgttgccaattgggtgttttattgttacatttaagatttctgacttgcttagatcaagttctttttcaattttcatttcagttactgactgtgtatttttcttgttgtctcatttatccaagtacacctcttctgtatgccaactcgatcaacaggcaaccagaacctcctttccaacaacaacttctaccgcatagctcgcgaactcagagaaaggagaaacacaatcacctttttgccccaacaatcgaa

SEQ ID NO: 8085 - DNA, 3000 bp, Unknown
  misc_feature (1)..( 3000): cDNA_ID_1809065_gDNA_ID_1621192_Annot_ID_57499 3000 nt of promoter + ATG
caagtggtcttcagctttcgagcgtcccacttgtcggtagggagtaccccgttgaggatgtagtctcggattggttctctccagtctgccccccagtcgtgaggtgtctgattatcagggacttcgggactatttggaccagacaattcttcggtaattggaggcgggacaacctttggaacgtcgttttcgtcatcgagctgctgcaggtcggtattgttttcttgtgcttcaggcgggacaaaatttgatctttgagattttgaagctcactgcttacaccatccggctcctggggagactctgaggtcggacgtctaagggagggctctactcgaaataatgatggagttggtgcggtaactccatcaataggaaggtcgggatttgccggggtagtcagtacaacctggttctggtttgaagttgccccaacttcaacttgagagacgagaggtaactgaggtggcggagtctgctgacctgctcctgcctgtgaagtttggatgctcgaactgatgtctccttgaaaatcaaggcgtgagcgaactccagcggtacgtgacactccggcagacaggaagtcaactcgatctgcgtacgcgttgtgagctgtccttatttcagaatggctggtggtgagcgccgcgagctgcccactgcactgttcctgaaaagaaacgaacttatcagataaagaagttactgcggtttgctgtcgctcggtcttgtcggagagctcttgaagcagcttcatgatatcgtcaagggtggaggcttggtcgccggaactttcgttgccgctggtgctcatgatgattcaaccgaagctctaaagtaagaagtttagatgcccctccttctagcgccaaattgtggatgtcggaatccacaattaggaatttgtggattgttatgagggccttaaactttgttagtgaagctaagatcaaatcggacagtatttcagttaatcggaatattttgtatagtcattttctcgtcccttttacaaatgatgaatcactcctatttatacaaattaatcgaatatctacgaagtaaattaacgcttgaatcacgccgcgaatcatgtctcattaatgtttacgtttcacatatccacctcgcgcactaacgcattctcatttactccgcagatttccgttacgtgacgcttaaaaatgattcttcaaattgacctggctctggtgggcttattttggcccactccatatttgacaatcctggactcatcgttgaggctttgactcaggcccatttaaagaatgatgacggatctcgggccaaagcaaagatacgagatccgacatccacagttagctacatcaacaacaaccagggtggctacaaaggatacaacaacttcaaaaccaacaaccccaacctctcctatcgcagcataaacgttgctaatcctcaggatcaggtgtaccctccacaacaacaacaaggtcaaaacaaaccttttattccctacaaccaaggttttgttcccaagcagcaatttcagtggaaccaccagccgcaaccaccacatgggtttgcacctcagcaaaactgtaacgcccgcgatcctcaataggatcgttggctaagacttggtccgagagtagaaggtggagtctcggacaagcgagaaggagctggccataagctcggacaaaggggaaatcatgcgggctaagctaggatcgtaaagaaattaactgggtcagctcgcccaaagctcaagctcagctggaaggagtgacggttactcaggtcgagtgacagtccagctcgggcagctggacgagtgacggttgagctcgaggtagctggacgagtgacggttgagctcgaggtagctggacgagtgacggactagctgggcggttatgggcgaagagatacaactcttcggaaaggtgcaactcttcggaagggcgcaactcttcggaaaggtgcaaggaacggatgtgttgattcgggaagcatccattcgccccctatataaggaagggcgcccaggaccattctactcaccataacacaccgaaaacacaagaaactcaccattaaaactctctccctcttgggagaataaatagtcttaggattcggtagtcgggctgtggccgacaataaagaaggagggtcggatcgacctaacctcgagaaggaaggtaagggatcctagactttgagtctaagggttctaggatgtgaattagtagtcggatccttgaaaagatcgactagagggctgggtagtatccgggtcatgtgcatcctacacaagactcggtctgagtagggatcggctgaggccgagacgcggctcggcagaggaccggcgggtcttaactgacctgccgagaatcggctggactgatgcgcgatcttcccctctctgaattctctccacggatccgagtagtgtatggcatatagagcattgcatggacttgcatatgattaagtaaatgagattacttatggctctatgactttcaggaacgaatggtgatcgtgggaaggacttggcttaggcgcgagagactcaaggccgggatgatgggtggtgatagttcggatagtctagggatcgattatatgacttgtaatagcttatatgcaaactcataagttgtatcgaatcctttgcttgatcaataaagtatccgattgtttgtttactctatttgtctcatatattgaatcacggaatcatatggaacggattagactaggaaagaacctcataaacggttagggccgagtcacttagtggcttgggtcgagagaactcgtccggactttaggcagtccggatcggggcctttcaagttggtatcagagcatgcttggttctaggactaggtgttgggttaaggggtatcaccactcgtcggcttgagaatctcgcggtagttgctctttactcttttgcgattttactaggagttatgtggattaactttggaggtttcgcag

SEQ ID NO: 8086 - DNA, 3000 bp, Unknown
  misc_feature (1)..( 3000): cDNA_ID_2139789_gDNA_ID_1621192_Annot_ID_174612 3000 nt of promoter + ATG
ggataaatcagcgcacttgagcttgttcctcctcaagttcacgtcccacataacgccttaggcggttaaattcctcatcatattcacgcaccgtgcggttcccttgaactaggtcgaggtacgcacattcaagcctatcccaagcctccggtggaaagtacttcttgttaaactcgtcttcgaaatccgcaaaggaccggacctcgtcccctctgcgtttctcgacggttaaccaccagttatgggcgtctcgttcaaggaagtggaccgcaatgtccctttggtaatcctcaggacagcgggtagacttgaagttcctcttgagtctactcctccactcatcggccacaatcgggtccgtactgcccatgaagtgtctcgtgcccagccttgagacatgttcgagaagactcagatagtctcccctttttctcccatgattcggttgcggattcacttccacaacttccaattcatcgtccttttggttatccactctttggaccaccggatttgctacaatggccttggttaatgtggctagttgcgccatcattcctttcatcaaatcccactgttcttgggccgttggagtattgttccggttatccgtgttgtcccttgcaccgctactctcccgtgcttcctcatttatggacttcttcccggtctcaggtccgaccgagtctgtcccatcgagcatcgtcccgactctggttttctcgttgatcatcgttttctcctcaaccaaagtctcctcgacaatgcccttgtccttcttactctttcctgttttgctgctcttacccatctgcgaaacctccaaagttaatccacataactcctagtaaaatcgcaaaagagtaaagagcaactaccgcgagattctcaagccgacgagtggtgataccccttaacccaacacctagtcctagaaccaagcatgctctgataccaacttgaaaggccccgatccggactgcctaaagtccggacgagttctctcgacccaagccactaagtgactcggccctaaccgtttatgaggttctttcctagtctaatccgttccatatgattccgtgattcaatatatgagacaaatagagtaaacaaacaatcggatactttattgatcaagcaaaggattcgatacaacttatgagtttgcatataagctattacaagtcatataatcgatccctagactatccgaactatcaccacccatcatcccggccttgagtctctcgcgcctaagccaagtccttcccacgatcaccattcgttcctgaaagtcatagagccataagtaatctcatttacttaatcatatgcaagtccatgcaatgctctatatgccatacactactcggatccgtggagagaattcagagaggggaagatcgcgcatcagtccagccgattctcggcaggtcagttaagacccgccggtcctctgccgagccgcgtctcggcctcagccgatccctactcagaccgagtcttgtgtaggatgcacatgacccggatactacccagccctctagtcgatcttttcaaggatccgactactaattcacatcctagaacccttagactcaaagtctaggatcccttaccttccttctcgaggttaggtcgatccgaccctccttctttattgtcggccacagcccgactaccgaatcctaagactatttattctcccaagagggagagagttttaatggtgagtttcttgtgttttcggtgtgttatggtgagtagaatggtcctgggcgcccttccttatatagggggcgaatggatgcttcccgaatcaacacatccgttccttgcacctttccgaagagttgcgcccttccgaagagttgcacctttccgaagagttgtatctcttcgcccataaccgcccagctagtccgtcactcgtccagctacctcgagctcaaccgtcactcgtccagctacctcgagctcaaccgtcactcgtccagctgcccgagctggactgtcactcgacctgagtaaccgtcactccttccagctgagcttgagctttgggcgagctgacccagttaatttctttacgatcctagcttagcccgcatgatttcccctttgtccgagcttatggccagctccttctcgcttgtccgagactccaccttctactctcggaccaagtcttagccaacgatcctattgaggatcgcgggcgttacagttttgctgaggtgcaaacccatgtggtggttgcggctggtggttccactgaaattgctgcttgggaacaaaaccttggttgtagggaataaaaggtttgttttgaccttgttgttgttgtggagggtacacctgatcctgaggattagcaacgtttatgctgcgataggagaggttggggttgttggttttgaagttgttgtatcctttgtagccaccctggttgttgttgatgtagctaactgtggatgtcggatctcgtatctttgctttggcccgagatccgtcatcattctttaaatgggcctgagtcaaagcctcaacgatgagtccaggattgtcaaatatggagtgggccaaaataagcccaccagagccaggtcaatttgaagaatcatttttaagcgtcacgtaacggaaatctgcggagtaaatgagaatgcgttagtgcgcgaggtggatatgtgaaacgtaaacattaatgagacatgattcgcggcgtgattcaagcgttaatttacttcgtagatattcgattaatttgtataaataggagtgattcatcatttgtaaaagggacgagaaaatgactatacaaaatattccgattaactgaaatactgtccgatttgatcttagcttcactaacaaagtttaaggccctcataacaatccacaaattcctaattgtggattccgacatccacaatttggcgctagaaggaggggcatctaaacttcttactttagagcttcggttgaatcatcatg

SEQ ID NO: 8087 - DNA, 3000 bp, Unknown
  misc_feature (1)..( 3000): cDNA_ID_3047570_gDNA_ID_1621192_Annot_ID_174603 3000 nt of promoter + ATG
atttagttggaaggtaaaaaaaaaaacagtttagtcatgtaatgcgtttaaaaaaaaaagatcacttgtgtttaatagaaaccataatcccaaaaatatttaacttttcatttatattagaaaaatcaatcatctgctacataagataagagatataataaatacatggtaacacataccaaataaaataaagaaaatcagctatctggcgtatataaattgcatgactacatatacgaaatgtatgacgttatgtaattaacatcataaacaaagaatttaaggttaaccgatcaactgattgtggcgttgaccaacaaaaatattcaaaaataaacttttaatttatttttaatatattaaaaactatgatatgtcttgtaactgttaatttagttttaatgttttaaaaactatgatgtggtctgctacacttcagatagctgacgaatttttttttatatatattacacctacaatattaacataattatatgtttagtccaaatagaccgaacaacaattcacaaaattgaaactgaaatcggatatgaattgggtaaaaaaaagattctaaataattttctgataaaaaacaaagaaactatatcactccaaatctcttgaccatagtgtttgttccattccatcgtcaccatagtttagactttaaattcagtttcactttgactaattttagataaattaacatattaaacggaatcaacaacttccctctctcccttggcgactacagaggcgaccaacaaaaccagtttcctgtttcattttttttaacaggctgccggcatttgccggtagtttttttgcttttctactcctttcttcttttgtttttaatattgtgatgggagatattccccttaattggatttctgctcgtcctatcttctcctttcgaatggtgacggtgtttattgtcatgtttagaacagagacatacaattaccagtttcatgtaaacccgttgctatattcgaaatcagaaaaaattcatcccaccaatgtctctttacccatgtcatgtcgattcatttgaatcatggtgtatttccttatctaaagtttgttttcggtggtttctctcaccgacgtgatctccggttttcaaccgatgaagtttcttcaaatctatggtttggagaagtcatttgggtatttgatccaggaatcaatagacaaattcttttgagtgaaggaattggcatcgacaataatttcctcttctcaaacacatggtccgatgatggcgatgtactcgctgtccaacgatccgtttattcatgttcatggtctaatgatggtgatgtactcgctgtcaaacgatctatttattcggattctatggaaaaaagtaatcatggtcactaaccggcgacgatgggtagagtgttataaaatacatgatcgagatccatttcaagcaacatatccgtgtgttcgtttaatcaaagtgatgcagaaagcatttgggagtttcatctataagatgttagccttttacgagtatatgacgaggggacttaacagatttcatctgttgcttgtaaggcttccgtttggaaagcagggtcatttccatttttttatcaaaattgtacaatttcttttattttattcgtatttgagtggtttcatgtatcatgtattatataatatttttataatataatataattgattcggtgttaaaaaaaaaaaaacatattaaacggaaattgcgaacgttaatggaaaagaatatattttattattattataaatgctgtttggtacaggtggcttacaaaaatccaaagtgccgtaacttattagcttctctttcatttcaagtcaaaaagtccaaacctctgcagattttattcctaaacccgaccatggaagaatcatcaaaccaacaaatcctcaactccgagacccgacccgacccgattcaaaaaccaccggaatcaccagccaccaaactctcattcccgagactcttcctctggtttgatcaatcaaatcgcatcaaaactctgctctcatggtccatcttcttcctcctcgccgtcatcgtcccaatgatctcacacttcgtgctaatctgcgccgattgcgatttcaaacaccgtcgtccttacgacggtttagtgcagctttcgttatcgatcttcgccggaatctcgttcgttagtctctcagattggtccaagaaatatggaatccgaaggtttctcttcttcgataagcttaaagatgttagcgataaagttaggatcggatacgaagctaaaatccaggtaaattaaacgtatcgactaattatagtattagtaatctaatttcatgattaagaatcgtaatttttgggattaaaattggtaactagtggaataagaagcgattgtaaagaaccggttatttcagttttctttcaaaatcggttcatcagtcggttcaatttggagagattgaatcatatttggtttacgtctcggtttcggtacgcctaaaccgatcaattgcctaaaaatcaaaactataccgaaaataaaccgatttctacccaaaacatatattaatcccaaccaaattaacatattttaccctactttatcagattttaactgggaaaacccaaaaaatcggttcaattcggagaatttcattaaccgaaatactgagataaccgactcagtttggtttggttaactgaactcgcaggcctagaactttaagttttgacctgccattgaatcttaggctcaaatcttgatgtttttttaatcccaaccaatttaaccgattttacccgattttaaccggggaaaatcggttcgattcggagaatttcattaaccgaaataccgagataaccgagacattgaccgaactcgcaggcctagaactttaagtcttgaccgtgccattgcatcttaggctcgaatcctgatgtttttgaaagtctcctctgttttattgttgcagagatcaatg

SEQ ID NO: 8088 - DNA, 3000 bp, Unknown
  misc_feature (1)..( 3000): cDNA_ID_3087961_gDNA_ID_1621192_Annot_ID_174602 3000 nt of promoter + ATG
tttacggattcttggtggataaaacatggttgcgtatgatcttcagcatcgaacttgctcttcttctatggctgctcaaaaagacaatcagtaattttatatgtttctactctgaatccatattttcatttttcatcactttcctcttgtaaccgataacattcttcatgtttttggtttttggcagtgaacataacatgaagacagaatcagtgtcacacaacacacacgaagagattggtactaagatgtttttatttcaacaatggcgatataacagattctttttgtagatcttctatatatacaaatataaaacgtgtgtatgtaaatcaatgtttgatcctttttgagttatatatatgtatccagatcatatttattgattgtgtgtaaatactgatttttgaaacctatgtttggtctcattgatgaatccgggcgtgaaatgtatgattatggttttgtgatattctcgtaaattgtgtgataaaactttacgattaacacaaattatttagatactgttgagattagataaatactactattattatttttgtcacttacttcctaagtatcttattttccaattaactaaaacttatcctattatctaaatttaactttctcttcaagcaactcttgtatatatacgttggttctcttcagttcattgtaagtatcacaacacaataagaagtctattttattactctctcgtcactttttttctttattattttattacttctataatattatattatattagaatatataatataaaaagttgaaaacacacaacaaatttgaatatattatttaaaaattaaggtccaaaatctaataaaagttccgattttgttagccaaattactcattttaacttcccttcaatatcactttgttacgcaaacgactcgacaaccgttctctctcccaagcgatctgccattgaaggcaacttcacaaaacttcatcactttggccggcgtcggtctctctagcgtcggctattctcgtgtttgttattgcttttctctaatttctgcaaagttttcagtttcttgtggtaaataacggcaaaccgaaaatctcaaatttatgttctttgccacatcgtgacggtggtacatcattactatcgattgtgattcattcttcaatctggaaagcctatcaattcaacttgatttcacggataaatgcatccatttgtcgatgtttctgatcgtgtgttatatcgattcttttgaattttgattgtccttgtataaggtttgtatacggtggtctctcacaccggcattatctccagttatcaaccgatgaattttctctgcaatgtggagttatcatttgggttttcgatcccggaatcaatggagtaaccttgtcgcttgaaggcattcacatgtttcgaattgggtatggctttcgatctaagattagattattacttatcttcagtcttaatctgtttagagttgggacaacctatttttatctcgaaggcgaaggcttcctcttttcgatgacacgatccattgatgatgatgttatctctttcgcttggtcggaaagtttaggttctatgagaagagaaaccatggtcactaaacagcaaagatgcgaacgacatttcagaagtcatgtttcaaaaccatatctaacaacatatcagattttttacagtaatgcagaaagcatttaggagtttcatctataagatgttagccttagtctcttgcgagtgtatgaagaggggacttaaaagatttattatgttgcctgtaaggcttccgttcggaaagcagggtcatttccacttcttcatcgaaattgtgttcaatttcctttatttgttgcaatggttgtatttggttggttatgtatcatgtcaacttttatgatataatataattgatttgccgttaaaaaaaagaatatataatattcaacacgttatctgcacgagtgactctcgatccgctagcacgcacgactctagatctgcttttgaggtaacatttaaattatattgaataatttaaatcattaaaaattatatatatatatatatatatatatggagtaaaagactatatcctcttctcgattataatagtaggttttgcctcttggtcgtataataaaatttacatccttgatcataacggtaagctctacctccgcgatcatatgttcagatctatattttggatcaaatggtagtctccgcctccttgatcctatgaaaagctacgcctcttctacaatcatatgaaagagtatacctcctacaatgatttttttttaatttattatattatagcttataatatataaattatttttatgttgctttattatgaaaacaagcttttggaaaactttttttataataaaattttaatttgacaaattgtatcatattatttatatagttatcatgtcgaacttggcaaagcttgatataactgtctttgatgtttctggaaaaattatatgacatggacattatatgcaaaaatgtatctaaaagcaaatgggcttctcaaaaccctcgatctgtcgaaaattactttagaagagaaaaaggcaaaagccatgatgtttttgcatcactaccttcacgatggtttaaaagatgaataaatcacgagagaaaatctaacagatctctaggtctctctcaaagataggtttgatcatcaaaaatatgttatcttaccaaaagtcaaacatgaatgactaaatcttcggtttcaggattaaaaaagtgtaagtgaatataatttcgctttgttcggattcacttccaggataattctatgtggagaaaatgtttccgattatgatatgatcgagaaaaatttcaaaacatttcatcctacaaatgtaatcctatagcaacaatatcgagtgagaggatataatcgatattctaacttgatgcaagttcttgttgctgaacaaaataatgaactcatgatg

SEQ ID NO: 8089 - DNA, 3000 bp, Unknown
  misc_feature (1)..( 3000): cDNA_ID_3047579_gDNA_ID_1621192_Annot_ID_174593 3000 nt of promoter + ATG
tcaatttcaaaaattaaacatgataaaccaaataacagtttttcatctataactaaattcgattcaaattcagtattaaacacataggctctgataccactgaaagaattcgtaccggtttataacgatttataaatactaaaaacgaattcaattgccaagatccatgtaaataaagaatcaaatttagatcatagggtttgaatatacctggatattctgcagcggaaagatgaaccatattgttgcgaggttgttttagcaccccaagtgttgtgcctctaccgtatccacacgcacacaaactggattagatctggaatgctagttcctttgagatctaatctcaaaactcagacaaacaatttgtctctctattttatggttttatgatcaaaagtgtatctcacaaacgttgctaatatatcatatatatagccaaacgtttaaccctaactaattagggttaataatgggccaaagcccaataactctttttattgatccagtttgcttaggtgtgtgaccctgtaggtttgtataatattagtaatgagttataactcatagattataaccggtctctagcaaaacattataaccacctaatattatacaaatgtcaaaccttgacattacaactttagctagagtaaagtacaactgatttcaggacattcccaacaactgtttggctcgatattaatatgagacatcccaatgaaaatcaacattataatatatcaaaataataattattcttttttgacagatctaaatgtgtaactataatacaaagttactaaattacatatgttctacgggttaaatctaaaaacacatcaagattaaattttataattttaatataaaagttttttgaataaaaataaaaaattatcatgtggtgtaccacaagtcaatcctaaaagaaaaaaataatattagacttattaatacagtaaatttatgacttattaaaaatcgtacaaaaccttatcgaaaattattaattaacacaaacaacaacaaatattatacacaacaaatttttcattttataaaatacaaaaataaataaaatattaatccgcggtataccgcgggtcatatcctagttcactacaagagaacaaaacttttttcaacagattttccaacggtaaataaacggttagaaattttcgacggtttcttaatgatattccaacggatttctaacgacatgtttcctatcaaaacatcgtcgaaactttccaacggattctaaatgatcgccaattcgtcagtgatttccaacaaaactccaaccaaattaaatccgaccgaatatttccacggatttctgatcaaaatatctctgttttgacccctcgcatattcgtcggaatattctacacttttctgacggaattccaacaaactatacttggtcaaatagcagcccagtcaaatagccgttcggttaaatagccgtgcgtttagtttttttttataaaaaatcatcaaaaaaagcggtcggaaagccatctgaaactcgttggaaacattgataattctcatatttttattcttctacactcattcacaaaatcgtccaagcaataaaatataactagagaaatggcttcttcgaatccgtttaattattttcgatcatggatggaccagcccacgcgtgatccgttaaaggagttgctaatgtcggaatatgtagaaggtcttaaacaattcatggcatttgcggcaaaccaaccggtaaccatcgaataaaaaaaaatgtattgtccatgttgtacatgtcagaattttagagttcttcctgtatctcaagtttggatgcacttatatggggaagggtttatgccaaggtacaaagtttagttcatgcatggagaaaatgagtcaatggtgaattatggtagttgtaacgaacattatcctgttgataggttagtggaaccaaatccggaagtagatgcaaatgtaggtaccgttcagatggtgaatgattttttcgtgaaaatgtacactcgtttgatagggatagtgatagagtagaggaacctaatttagaagcaagaaagttttttaatatgttagatgcagcaaaacatcccttatataaaggatgtaaaaagggtcattcgcctttatcttctacaaccaagttgatgggtatcaaaactgaatatcatttatccgaggattttgtggatgcgattactgattttgtgaaagatttattacccgaagataatcttgcaccgggaacatactacgaggtgcagaaattggtagctggtcttggtttaccgtatctggtgatagatgtgtgcattgacaattgtatgttgttctggagagaagattcagatcgtttgacatgtaagttttgtcgcaaacctcggtgttggtgtcggatcccgcaccaggaacaccggtaccaaccaaagattgccacgtggacaagagaggcccaaaagaagtaaggcccataggcttctttaggcgaggagaagaacacaagcgaagtggtcggtccgcgagatggatgtgatgacgggatcaaaggtgtctggattaaagagcctttaggccggaaggcgaagcccatggagctcgaagtcaattcaaattcgaacgtttgaacaataaattcaaagaccgaaacagatacatttaagatagaataattgtgtgtaaatgagaattaagtgtaattcttaggtataaattatagggtcaaaggccatggaagacacacacatttttgtgcaaacttaccatacacattttcttacaaatctcatagttttcttcataatcaatagttctctacacttattttttgtcctcaagaataatctttctcactaaataaataaatacttgagtgtgtgaatccgacatccacattttagcgccgtctgtgggaacggaggattcttgagtcgtcagacttgtctatacactacatttccgaggtaagcaacaatg

SEQ ID NO: 8090 - DNA, 3000 bp, Unknown
  misc_feature (1)..( 3000): cDNA_ID_1810360_gDNA_ID_1621192_Annot_ID_57500 3000 nt of promoter + ATG
agctcggtgagctgatcgtgtactgacccagctgggtggtccggtcagctgacactcgagctggtggactgtggtagctcacgggtgaagaggtgtctcggccaaaaggtgtaaggtcgagcgggtaccaacgaacggttgcatcgcctaatagatgcaaggaacggatgtgaccttttggaaggatgcaaggaacggatgtgacctttcggaagggtgcaaggaacggatgtgatgcttcgggaagcatccattcgccccctatataaaggaggacgcccaaggcctttggaataatctcacatcatctcacaatctcacaatctcacatcatctcacaacatccaaaacaccataaaacgttcttaaaggagtcccaacacatcctagagttgttggtcggaaaggggatgcggctcggcgagtataactcgaccgaactgatgcacatgctacctcccgatccaacggttcgatggagtgtagaggatggagagggtagaccgttcgtcttagagacgaatcggatctagtagaccgatcgttggatcggatcggccagaccgatcgtaagacggatcggccagaccgatcgtaagacggatcggatcggccagacggatcggacagaccgatcgtcggacgggtcggatgggacaggccgatcgtctgacggaacgggtcggacagaccgatcgtcggatgggatggatcgagaaaagtgttcgaggaagcacaaggataagtgcatccgaacacacccaagggtcgcccatggatgcaatcttaccggtaaagggagaaagcaccaagaatgggtaaggaacgtgattcaccatataagatcaacatcgcggccgccttcatgtatctatctcctcagccatggtgaaaccgatcagagatcggtaagaccaaagggtgactcgacggataaccaacgggaaagtccacggtgggaaccgatggacaaaacagatgttggacccgcgagaaaacctaaggccgacggaagaaagatttcatgggctagcctacgatgatctagtggatgaatccacggacccttgggtgtgataaggatatagttcggatcgtatggatggatcaataagccaaaagctttatcgaccaccatagaccggacggataaacggttagtaaaccgtgggcggtcgtagtaaatgacaggatcggaaacatggatggttcgataagccaagggctcaatcgtccaccatggaaccgaaggggagtacgtttggaggacggatggaccaataagccaagagcttgattcggtcatcgtgaaccaagggaatcgtacgatccccaatctctatcgttgtacttagaccagtggggttggttggttgtatggctaagtaatgatagggattggttcatcaattcacgaccgatgacgagtcgttgaatgaatggagtaaggcgacaaacgggctaaggaatcaaatccgcatattggccaaggtatgtaacgatctagcttattagttaagatagacgtttggtaattgaccgtgaaagtaagataaaggaatatgcgattgtttggcttagaatggttagcgaacatatgcatgtcttgaccgagtaaaggatcgatcatagaattaaacgaaggttagaaagacttccgctgtgtaataagagagcaattatagaatttagcctcgtaaaggcaattctatgttgaatcgcgaaaaattaagaggttcggccggggagaggcgcgaacttgagtacacagtcgccggacaccgagacgtccgggactgggtctcacagaaatcatgcgggctaagctaggatcgtaaagaaatcagctgggtcagctcgcccaaagctcaagctcagctggaaggagtgacggttactcaggttaagtgacagtccagctcgggcagctggacgagtgacggttgagcttgaggtagctggacgagtgacggttgagctcgaggtagctggacgagtgacagactagatgggcggttatgggcgaagagatacaactcttcggaaaggtgcaactcttcggaagggcgcaactcttcggaaaggtgcaaggaacggatgtgttgattcgggaagcatccattcgccccctatataaggaagggcgcccaggaccattccactcaccacaacacaccgaaaacacaagaaactcaccattaaaactctctccctcttgggagaataaatagtcttaggattcggtagtcgggctgtggccggcaataaagaaggagggtcggatcgacctaacctcgagaaggaaggtaagggatcctagactttgagtctaagggttctaggatgtgagttagtagtcggatccttgaaaggatcaactagagggctgggtagtatccgggtcatgtgcatcctacacaagactcggtccgggtagggatcggctgaggcggggacgcggctcggcggaggaccggcgggtcttaactgatctgccgagaatcggccggactgatgtgcgatcttcccctctctgaattctctccacggatccgagtagtgtatggcatatagagcattgcatggacttgcatatgattaagtaaatgagattacttatggctctatgactttcaggaacgaatggtgatcgtgggaaggacttggcttaggcgcgagagactcaagaccgggatgatgggtggtgatagttcggatagtctagggatcgattatatgacttgtaatagcttatatgcaaactcataggttgtatcgaatcctttgcttaatcaataaagtatccgattgtttgtttactctattcgtctcatatattgaatcacggaatcatatggaacggattagactaggaaagaacctcataaacggttagggccgagtcacttagtggcttgggtcgagagaactcgtccggaatttaggcagtccggatcggggcctttcaaaaaccaaggtcctgctgctcccgatgctgaa

SEQ ID NO: 8091 - DNA, 2393 bp, Unknown
  misc_feature (1)..( 2393): cDNA_ID_2140236_gDNA_ID_1621193_Annot_ID_57503 3000 nt of promoter + ATG
aagcttgtagaagctcccaaagaatttgaaagctatggacaacttcttaaaaaatccattagtttttagtgaaaatctttacaaggaagtgatatacggtttcttgtataaataagctctaaaaaactaagaaaaaaaaaagaatttaaccaaaaataaaaaagacagaacatatttttgtaacttggaaaaggtagcaacggatgatctagtcccagccgataggtgtgaatttttgatgaccattcactaaacaagtaacaaacgttaaaattttaaaatatgatgacatcagcagacccaaatttcctaaaagtccttgcaactctaataaattcctattttctgattttcgttgaagaacgtaatgttgaaaattcaacaagaattgagtacattgtactcgtttgcaactcattgtgtgaggtctcgaatcctttgctcattttgatttcaaataaagctttctttcccttaattcttagattttgagatgggttggctgaggaagaagaagaagccaaaatccgatatagcgtccgagagaggggccaagttgttagaagagctcatcgaatgttgcgatggcaaatccaatcccatcaaattcttctctgctgatgagatcctcaaagccaccaacgatttcagcgactctaattttgttttacgattagaagttcccttcaaatggtattctggtaagaacgagaatcatcccatgatactaatcaagaaagatgttggctggtggagtggcttgagagtagatcgtttgtgccgcgacatagcagtttcatcgatggtgagtggtcacaaaaacttcatgaagttggttggatgttgtcttgagttagattatccagtcatggtgtatcatagtgttaagaaacattacaaattagaaataagtgaacagccatggaaaaagagaatgaagatagcagaagatatcgctactgctttagcttaccttcacaccgccttccctaggccctttgtatataggattttgtctcattggaatatcttattggatgaagatggtgtcgccaagctgactgatttctctcactgcgtctcaatcccagaaggagaaacatttgtccgggttgacagagacgtgggattatatagttactttgctgataattacgttaggagtggcctagtctcagataaaacagatgtctttgcctttggaatctttatgggtcataggcttctattaggatacgaatactatttcgagcattatcgaggagaagaagaagaaagtgaagatggatttgacagtctgatgaaaagacatgctcggaatttgctctcaacattaaaggaagacagaccaatggaagagattgcagattcaaagatgatagaaaagatgggtcaaatttcagaacaagagcgttgtcaaatgaaagctttcttgaagctatcactgagatgcaccggccctagtgaagaagttccaacgatggtggaagtggccaaagaactaaacaagattcaaagatctctttttaacgactcttcttctctttcttcaggtcaaacccaactcgactctgcccaagacatttcttccacagtggtcctctcaaattagacactgctaccaagtattgcctgccaggtatttcatgaaatgtttcaatgggttatgttgagctggtttcgttttttcaggaaaaaaatcgaacaatgtgctgaaaataacttcgattcttgtttgtattaaaacattatcaagtttcatttttgttgttgtatttataaatagtgctacgttacttttgattcattatattgtcccttagagtctgtgtatgtgtgtttggattttgatggatgcgtctgtgtttgttaattcaagagatatctactcgtgtattataagggaaagtctcccaagtcaataacaattctaaagtttacattgtgagttgggaaacatggttcattgacgtaagtttgcaaattccagcaactacatatgaacaatgcaatcaatattgaactgtgaactccatgattgtttggtggatttggacattcacatctatactaaagtgaaacattcatgacggtaaacttctcttggagctgtatcttgcatattaagaatcaaagaatatcagtgaattatgatcttcattgtcagctttgtcttttcaagagttctgatcttcagctttgagtaatttccgttttcaattccaataaaatatgttttatgaaaaaatcaatgttattcatcgaccaaaacgacgtaggatagagaaagaaaaatgggaacaacatccgagtagcctccgagaccacaaacatcctccaataagccaaaagaagacgagagaaggagaagagtcgaaatcgccattgaaatg

SEQ ID NO: 8092 - DNA, 3000 bp, Unknown
  misc_feature (1)..( 3000): cDNA_ID_1810432_gDNA_ID_1621193_Annot_ID_57506 3000 nt of promoter + ATG
gtatttgtagaatctgctgaaaggagatgacttttatcggattcggcttccatctaatgtggttagtccaccagggagagagtttgtgattgcatcagtgagagctgtaagtctatgtctacctttttggttgatttctttgtgattgttctttgattgtttgctagtgctttcccatgtctggaggtgtaaattacaggctttgttttaagtctatataaaagactctttgtaaccatggtggttttgttttagtttcactctttgaactcttagtaggctacacctttctagtaataatctaattctactctttcgagatatgagagcttgtttatataattggatcggtatgaaatggttagtcgttttgtaatacacttacagatttgtttctaggctagactgataaagacaacactcgtttagacacccttcttgctttttcccacttttcagtcagtttatgtgtctgttatagaacaatatacttgtttgattgcagagatgtctaccacgggatggcttggatgagcatttcattatacacatggtaatgcccttttttggtataaacttttgttgagttcaaagtttagtttgcgccttagcattttaactactacttgagtgtattacagagaaagttgggactatgaatatagttcaaaactgtgttcggcacagtttgtttacttgctaattgctatactgtctccgtttgcaggaaggtgctaacatcttggcagttagttatggttctcctggggcgtgtcaatatcctcgccaattgaaacttgtaagtgaactcgattatcccagcttctctttttatttacactctaactgagataaattggacatggactgatcctttcttgccttcggtctagaatcagataatactgatacaattatgaatgcggatgatgtaattgagtcattatctttccattcaccaatattttctgtgatttaatatattttgagtcatattctagagtacagtatcgcaccctctttctctactgtgcctaggtattttcagcataagtggactatctataagtgttctgtaatatgttgatagatccgcagaaacttttgtgaggaaatagtaataccgtcagaagattagatatgtgagagtatggtcttaggatcactgtaagcattccataatgttgtgattttgcggtgtggtgtgaagtaattagtgttgggtgactgtgccatgttctgtgagtttttttgtgctggtctctctaagtgtcactcatagtgatattttctgatagaatccgaccttgggttctatcacatctcttgtctgaacactgaaaccgtatattcatgaaggaaaaaggttacattatcgttagagcttctgactttgattatgtatgcgttctaatctacgtttttcgttttgcttactgtagccagcaaaatggtcgtttaactctcacacaattctgaaaagcagtgagcaggcgccaaggtagaataattattgtgttttttttttgcatcaaaatggcttaactttgcatgatcctggatgtctatattcgacttgtgttctatagatataaatatatttgtcagttcatcaagttatatcaatcaagaaataccattgcttctccaccctttagcccaataactaatatttttttatcttatccttacctgactgtttcacagaactccaatattcactgaggagattctaggcagtgagaatgtagagggagaagttgaaccaccaccagagagatcattttgggcgaaatatgtgagtaatacgataaagatcttttgatgattccttctttattttaggtcttgatgtaactttcatatgatacgcagtggatgtatttgataccgctgggactcgtagtgatgaatgccgtgacacaagcatcaaacatggctgaagaacctgcgggtggacaggcaggaggtgcacaagtgcaaccagctgccaggagaagatgattccacttttacttctcccaaagcaatgaaaggtagaccacgccgcaattactatgcacaaatttctcttttacctagcagtctttaaatcttatgatcctaggagaatacatttatatatttgtttggctatcttcgcagctgtggatttatattatttggttgtaacttataagtcacgtggaattaaatgaattcggagtttgcatggaaatatcaacaaggtttaggaagctgtctttgaagtgcgttataagatcaaatctgatttttagcttatgttgttgtagctgcagctggttagagatgatgattcaacagatcttcatgtaaaccatcttgccatcatttggttttatgtaacctttaattttaatcctcgatcggtgtgtttttgtactcaccaatcgggaaatcaaaaatcttgtcttcatgacatatcaagaacaaagacatttagcagcttccatatcttgttttgatcgcatttcacctgtccaaccacatgtttgtcaatttgtatttgttagtaaatttaagggaagtcaagtcgtttacaggccatgagagaaatcatttataaaataattataaactgaaaaaataaaatatataaagggtttattttctcaaaacccagtttttagggatgttattatggaaatgcgggcctaaacgggcctttagcaattcaaatattagcccatagaatgtacaacttttattttttatttttcttaatcataaacgacgcagttcttgtgtcgatcttcgctcatctcttctaccacgagcagactgtagccacggcgaccaaaaggggaacaaggatacgattacgacggaatactccgccggaaagttatttctcgtccttaacggtgccggagtagtgtagaacaggtcaatagttaatttccacgttttagtttggtgatttgagggattttaggctcttgattggttttggaaaatctgattcagggattgaacaat

SEQ ID NO: 8093 - DNA, 3000 bp, Unknown
  misc_feature (1)..( 3000): cDNA_ID_2107797_gDNA_ID_1621193_Annot_ID_57507 3000 nt of promoter + ATG
aatttgggccctgattatggctttgatgtggtgaggtgagaaaagtgtttaaccagtccggggttagaggtaaacccaaaagatcaccgctcaagattgacccgacgtgtaagtgtatgggttacattgagttaatcagtgttcttaatctacctttttattgtaagaacagaaaaactataccgttctccgacatttcaatcaccaatagacttggtgtactatagacattagacagcaatgtagagtttaataaacatgacctgtgaatataaatgcaaattgtccgatttaataaaagccaatcaatcacggggaaactggtatagtcaacactcttaacccacacacacatattgactaaatttatcaccaagacaactttatgatgtcccatgtgtgaataataaataacaattagtaattaatttacagatcttgcaggttacttacgctaacgcaatagagagagttggaacaaacatttgacataaaacatctcttacaataataacagtgtcagataaataaacatattcaaagatattgtctagtctctgcacttgaagatgaataattgcttttttactctttttcctctattttaaactaaaacacttaaagatcttatcagatcagaataaggcactaaacttgatccattttcttaacatgtcactcattacaaagacttaactttaacagcttcactatcaccaccatcaccatcaataccatcatcatcatcatattaaatactcttccaattgccagcttaaccaaacaatgactcttttccaaaatatgctaaattctaacttttaactttcttaaaacacataagaaacaaaatgatgaagtaaacaagagaatgaaaaaaaaaaaaaaagagagagagaaagacagatagagagaattgattgaacagagaagaagaaacaaatcttgcttgaagtgtgaacaagattctcaaaacaaaaaaaaccctagaaaattatgaaaaaatggcaaatgcaaaaagacaattaattaatgaggatgatgatgttgctgagatagtaggtaatgaaatttaatgaagactgaaaaataaattatagacaaaaaataagtagaagactcaaaccaagaacagatattcttctttttttcctccctttcacacttgaagatgaatcaagatttagattcacttgtttctctcccctggaatcaaaacattcataaccaaacatcaaaacatgaactgagcagaaactaagaacagagaagaataagaaacttacaaattacaatgaagtagaagatctcagatatggcaaccaaagcaattgcaagttttgggagtgaaagaacagtaaccaaagggtctattagggatattgcagttaatagcatagcaacaaggagaaggcaagcaaagacctttagcaccaccacaacaagtacaaactgaacatatctgaaaacttccaagtttccttcttgtttcattcattaccataaacttctcctcccccaatggcaccatcatcatctcattatctccttcagctggtaatacctcatttgcctaaacaaaattccaatcaaaacccataaagctcaaaactttgaattcaggttatgttaaaggtttgatttttaacaaaattagaaatacccagatgtgaaagaagagaactttagagggatctaagtaaagaaactaacctggtgactggaactgatgaagattgagaagagaagaagcaacaagaagacaatagagatcttcgattcttctaaagttctcattttttttttttttggtttgaaattttattttctttgttgggtttggtttattatgtggttagggattttgggtaaagtagcaaatgctacttctctctcgagctacttttttcaattattttggttataacatttatgatttttgtagagaaatgtttttgttttttttattgagggaagaaataataagtggggtctttaattttactattctttaatttctccacttcattaccacaccaatatcgaatcaactgatagagaaaaccataccaattgtaataaaacagattcttcttcttcttttcgaaggatctgattcttttggtgacaaatataatttcaataacgttgagtgtttttttcaattagcatttagaatagtgaagtggagaagataccaggcagcaaaatttataacccatacataagagcttatttggtcaatgacaagaatttaaaagtgtgtcgtacatgtagtatatagtctttgagttcatagtttcagtaaatttctttgagttcatatctctggtactgaaatctgataacaaataaaataaatgagtcatctcacaatatctaaaggaataatctagaaaatgcgttgccaaaacgtggttttgaaattgtccacaaatctgaaatctttgtaaagtagtaatcttcaatatccaatatataccggaagaaaaattacgagaatactattaccgtaattagtaaatcaaaaagattttcatatattctattaataaacttaatacaaagaagatcaaggtatatatctttaggtgcaagacaagcaaaagtaaatctacttgcaactctcattaataatactatgtaaagttgatggtgtaagagataaaaaaaacgtttgctttgaagaagataacaaggaaatctcaaaattgcttaatagtactaaattaaaatttgaaaccttcaattggttgggagctagattctgaaagcacaaatttgaagaatgccaagtcaaacggattaaacgggacttgtgaaactgatactactagataaaattcttgacaaagcccaagcgttagagggctcagataggcccactttacaaatgtaacgacgtcgttttgcgtatctcaaagtaaggaaatctctccttcgagagcaaagagaaagagcttgctaggtttttctcttactctgcaatacacagcaatg

SEQ ID NO: 8094 - DNA, 3000 bp, Unknown
  misc_feature (1)..( 3000): cDNA_ID_1841622_gDNA_ID_1621193_Annot_ID_57510 3000 nt of promoter + ATG
tttctctataatttttgtatatttaattaatgtaaatatacaaaattatatcaaatatattatttccttatatgtttcattttaatcattttttattaaaatgaataattggacacctagatagctaggccaaaacaatttttgacattccattgacttatttacccaaaatggaaagtgtgggtgattctggctgtttagatgcttagacataatcttactttctatccaactaattattacctgtaactgtaagtttcaattttaggcattttatattaattatattaaaataaaaataataacaaatagaaaaatgtatagagaagaaaatatcttaaattacctttgaaatatatattttcctttaaatggactttctatataaaaaataaatcacattacatatatgatacaattttccccctaaatgtctggttttatgccccccaaaaggtaaaatatctatatgggctgtctataaagataaatgattatcactttaccatcaatcacatgccaacacgtaagggtgaaagtaataccatatcctgaaaataaaaattgaaaatagtccagcaaagcaataagaaacacattttatctagtatataaacaatcgtcctcatgctaacaaagcaaaacacatataacaaaaacaatagatatgaagagaaagatgaagttatcgttaatagaaaacagtgtatcgaggaaaacaacattcaccaaaaggaagaaagggatgacgaagaaactaaccgagctagtcactctatgtggtgttgaagcatgtgcggtcgtctatagtccgttcaactcgatcccggaggcttggccgtcaagggaaggcgttgaagacgtggtgtcgaaatttatggagttgtcggtgttggaccggaccaagaagatggtggatcaagagacttttataagtcaaaggatcgccaaagaaaaagagcagctgcagaagctacgtgatgagaaccataattctcagattcgggagttaatgtttggttgtctcaaaggggagacgaatgtgtataatcttgatggaagggatcttcaagatttgagtttatatattgataagtatcttaatggtcttactcgcaggattgagatccttattgagaacggtgagtcttcttcatctttacctcttcctattgttgcgaatgcagctgcaccagtcggatttgatggtcctatgtttcaatatcataatcaaaatcagcaaaagccggttcaattccaatatcaggctctttatgatttttatgatcagattccaaagaaaattcatggttttaatatgaatatgaataaggattcgaatcaaagtatggttttggatttgaatcaaaatcttaatgatggagaggacgagggcattccttgcatggacaacaacaactaccaccccgaaatcgattgtctcgctaccgtcaccactgcccccactgatgtttgtgctcctaacatcaccaatgatctctagtctaagggatgtatttcgagtgaagtgtttgatcgtttgcatttgtgttttctccattttataagacaaaacttatatgtgatgtcttttttattattattaattgttggacaattcttgcgtccacacttatcttatttaccctttcttaagttccttattaaactttacattttttttaacaccatcaaaaactttctctttaagttgtttattacactttacatttattttacaccatcaaaaactaaggtcactaaataaaaaaaactatgaagcctcattttcccataggagcaatgtgagacatagacaaattgagtaaacaattacatcacttggtaaacaatttttttaatatttaattagtattggttgttattgatttaaattttatatcactttctaaataatttaaaatcgtatatttgtatcaagtgatgcaaatggatttagatttgtatcaattttagtgaactgatgccacataaactaatacgacatcgattattgcaattgatgttaaactataattcttgtatcgattgtaaacaagtgattcaaattaatagcattcaatttttttcatgcaactacttttttgtttgtagtatttgttggatagaacgtaatgttatggcttaacatttaaacggccagaactatccacactctccattttggacagatcaagcaatggaaggtcaacattgttttggcttaaccatctaggagccctatttatttgtttttaattacattttaagaaaaatgactaaaagaaaaaatacaatgaattaatatatttaggataatacagtattcaaatatttacattaatttaatatttaaaacagtataaagaaaaagaaacatatctaattagttttataggtgcttaaacatatacgaattcagtagttcttagcaaattttaactattgaactttgtgttcaaaataaccttcctatgatgtcaaatactgaaactattttagaactcttgtgagttatcttagcaccacattttatcacttataactctttttttattatttttaccaatagaaagtttataaccatgtttttataccaattgaatttcttatatttttcaaataattgtaataccaaaagatattcttagagtaatgtactttacaaattataaaagttgaaaatagcgatatatgggctccatctaatgatctcaatgcgggaccagcatgtgatatacgaatgtctatatacattattttctctgttttgtaacaataaacgagtaatgaaattatattttattggcttcaatttgtaacaaccaacaagaggtcgaatgagccaactagaatacagcccacgatcaataatcaaacctatgaaacttccttctctctttcttttaacatttccaaacactatatatactaatgtcacttacctcgattgtccatcaaacaatacatttgagatatcaatactcctgtgagaacaaa

SEQ ID NO: 8095 - DNA, 3000 bp, Unknown
  misc_feature (1)..( 3000): cDNA_ID_1810408_gDNA_ID_1621193_Annot_ID_57514 3000 nt of promoter + ATG
ttaatccaatttaaacatgacacatgacgacatcttatgttttactttacaatcacataaggtaacaaatttgaatgccaaacattataacaataataaattaccattgtaggagtaaattatatattttgacaataaaagtatataattgattatactagaaatcgactcactctaatactatgccatagtattttaattattttaaatgtttattttatttggagttttataattaaaatatataaataaataaataaaacttggataatattcttaaatattttgttattgaaatttctttacaacaatgtaaattttaactataataagtggtggcaatgttaaatgttaagtgacaaaatttggaaaataagttagatattttatattattataatgatttcaagaactcataaacattttgatgaattgcaagatttgcttgctaaagtaaacgccagaaaacattgggcagatacctatttttctttgattgtattggtggtgcatgtaaaattgctttgtaaagaacaaatctcatatttgtactcgttcctatctatgtatatcggatatcaacgttaaattttgcactttatcttttgcctaagtagatgacttttctcaagagtagccgaatttcctgtatagtatctgcattttcttaaagtgatttccttacttacagctagagactacattacctttatttctccagaaattgcattaacaaattcttgccaccatgggaataggttataaaaagtagtttagcaacaaaagccgtatacaatagtgatattgtgcccttcaaagaaaataaaaaagagagtggagataagaacgacttaaacaaaacgaaaaaaggctttggatataaagcatatatacaccagtttgttagtcaattcactttctctttatccgtttgtttagtttgagtattgaaatatcagtgacgttactaatgtttcatttagaatgatcgcatagacataacagaagatcacattttgaaaatgaaagttaccttttaagctcactcatggtgaagtgaaggcaatggagatcaaggtctttctacagtcttgcaactcccccaaactgagaaaccatcttgagtataattaacttttaccgaaataatgatagtgaatatgcatggtttaacttagggacctcaatataaagtgtaactaatatctatctgataatgaaaactaaactctaaacacatacatggaattatcaagcatgttaagctactatacacatccgataaataaccaagtgtgtaaaaaccacagagcagcaattgtctctgaccccatagaaaccaaaaatatatctacattacagagagttatacattcagatatcgtcatatatattgtaatgtattggctttattaaccgaggaatatagtcaatcatctttgaaacagaacattaaaattgaaaatatcaaatcacacaataataaaaatctacataattcatatattaatcccggtctttcaagctggcttcttcaattgtggttttaaaaccttcctccgatcaaaaccttccttcttaattcagttgtggttatgcttatctttttcttaatttgtgcaaatgcttattttctatttttcttaaataagtacatccgttataaaagagattaagaaactccagtaatttacaatttgaagaaaatgaaacttatggaatttatgtcaaaagggggaaaatgcgttaaaatattgtattagattttcaacagttgcaacttgcaagggtttttatacgaggactactttaagatatactgcattttataagatgtatgtagttccacttgttgatgtttgtaaaagtgacctagagtatgagaaaaaaaaaacactagtataaaataaaagtaaaaatgtttattattatcatcttgtcatcacaaatctggatagtttattacaagcaagattacatatgagattcaatacgtaaacttgatcgtggagtgttacaacgagtacaaacacattgcctgaaaatacattgtgtgatacggcaacccggacatgtatcgtgacaggtattgtcgttgttgcaagaccctccacgttgtattgttacatctccactcattcttgcttctccctccaataaacctatatataacatagtttgaatcattacgaatattatgcacttaggttccatattcgtttcttattacgaatatatatgatcatcttgatttgaattgatttgccttcttttttttcttacaaaagaattattttgtttctttggctttgttgttaaaaaagataaactatatgtaagaaaaacggttaacttgcatgtggacaataaagattatcatgaaaaataaagaacactatgataatgcgctgaagttaaatttagagttgaaagatggactcacatgaaagggacaataagaaggcaacaaacacaattttcctgaacactattttctccattcctgatagtattgattatcattatacaaacgtgtatatatacataagttaagctgatttgttgccaagaacattattgattctcatcaattttctgatttgtttaataaattgcaacggcaagtttaaggcaggagatttggaagattctcatagatattggacatgaaatctctatagttatgacttatgaaagaaaaaatctcggatcaacacgtttgacaatatttagtaaagatattctaagcatgagtttttacctaaatatataatcctgaacttatgtttttaaagctttctaaaatcaacatacgatatgtatttatcctcaagatttggacaatcctacattcaatgttttagtaaccgcgcaagaagtgaggtcatctagaacaaaagacagaaatgttggacctcaactttttgctatgagtaggctgattacaatatccagaaggaatcaacactccatttggttctcaggttaagaggtggtatg

SEQ ID NO: 8096 - DNA, 3000 bp, Unknown
  misc_feature (1)..( 3000): cDNA_ID_1810400_gDNA_ID_1621193_Annot_ID_57516 3000 nt of promoter + ATG
ctagacgtggaagctgaccttcaaggaagttgtaggacaagttcaagtactcaatattcttctgtctgaacaaagcttctgggatctctccatgtaatagattgtcagaaagatcgatcccaaccatagacaatagattgtagctgaaacttaattcatctttagcaacaacagctgctgatattttgatctctacttttcctggtggctcagcaaatccttcacctccaccggtctgaaaatctttgaagcgtgtgctgtttaagttatcgtctggtatgaaccaagagaatctgttgctggagtagtcaatcatttggattttgtcaaacttgaacaaccaagaaggaagtgttccactaaacttgttccgggcaagagaaagatacttgaggttggaccatttggtaatggcttcattaaggttccccgagaggttgttggaacttatatccacaatctctagagacttcagaccagctaaagtaagcgggatctcaccggatatatggttgttgcttatgtccagtatctttagactatccaacgcatcaagctcgggttgtatttcgccagagagattgttgttacttatcatcagagcaagtaactgaaagcaaccaacaatgttgagaggtattgagccggttaacgcgttgtgggaaagatcaatgacctggagatatgtcagattaccaattctagcaggaatatctccagttaaaagattgtgagagagacgcaatgcttgtaaactcttcaactctgtgatcctcaacggtatatcaccagaaaagctattgtgagagaggtcaagaagaaccaaacccaatttctcagttgtttccgagattctactaggaagacgacctgaaaacccgttgtgactcaagtccaacatcacaagcttctctgaaaacataagcctaggagatatctcgtagttgaagccattgaaagatagattcaaatgactcagctcttttaaagaacccaaacaagaaggtaatccaccaaccagagagttctcagctatattcagaatactaagagacggacgagaggcgtagaaacaaggtagcgtaccggaaaactgatttgaagcaagattaagaaccaccaatggctgctgaaaatctctgagtgtaccagtcatgttattgctctcaagattcaagtacttgagagacttcaaatacagtaaactctcaggtagttctccaacaaacgagcagaaactaaaatcaactctctcaagattcattgagaaattaccaaaccaatgagggaccacaccgcctaaatctctattctcacttagaacaacttctctaagctccttaagacttacaaatgtggcgggtatcgaaccaacgaatctattccgactaagattaagtgtcctaagattacgcaacgaaccgaagcaagaaggaatgtttccagagaagttgttgtgagaaaggtccaagctttgaagagaagagagcttacaaagagatgggtgaatctgactggagagattcagaccggataaagtgagggagagaacttttccggtcggattctgacaagctagacctgtccagttagaacacgatgagccgtaccatgtcgataagcttcgatttaggtcgtgaatcgaaactctgaatatcaataaagaagctttgtcttgtgggtcgagatcgggaagctgagattgagctagaggcaacgagggagagaagacgaagataaagaagaagagagtgaaatctgcaatctttatcatagctcagaggagaaagatgaagtttttaggtatagcggcagttgaagtaaattaagaaggtttcaggggtgagttgcagaaatcgcagagacctctctttgcaatggagagtgaagcaacgcgacctggaagtggaagtggaagataaagacagagagaacattctctttcggttccttttgttttagcctttcagacccaagaagtgattaattaatgcaaaattccaaaaatctacacttatttctaggaaaaacaaaatacaaagggtttgattcagtacgtaatccgtattgttaattactaattttataggtatttataaaaaaatcatatattttactaagaaattttaaatttagtctcaaatcttatgttattgaacctagaatttacttaaaatcatttcaaaataatatgattctttttttttggataaagttaccattcattcttgtaacgtttactataaaaaaaaaaaacagcatatgattccactatgaagaaaaattccaaatttaccggctcaaagaagaaagagtgtaaaagaaaaatcgaaaccaaatgtacaatttcactataagtcatacgatttcaactcgagtaaagagcttcaagtttgcatagtctcaaaaaataacatgttcgaagatgtcgaaaatgtccatgaaaccaacaatttaaaacaaaaccaggccagctttgtagctttaggcccattctaacacattaatttatgttttgtgcaactctaaaactttctctatataaatggtatctaaaccctagatctaatagtaagtgccgaagaaatctctcaagtctctctcgttgtctcaggttggtcagttctttctctagatttcaacttgtttagtcttttaagaggaaaaagcataaagctttctgtgtcatttttaatatctgagaattctaaaaaaaatgttctcttgtgtattgtaactcgattttcgtcagatcatttctgattatgggtatgttttgttttgctctctagggttgcaacattttgtagagaaaatgggttcatatgcatcagattctgcaatgttgaagacttggagaaagactcctccttcgtcttgttctcttgtcagactttcacatctttcttcactacaagcatatataactaagaaatgttgccttttttgtaaaaatcaggagattggttgtttacccaaaaggaaacgaagaggacaatg

SEQ ID NO: 8097 - DNA, 3000 bp, Unknown
  misc_feature (1)..( 3000): cDNA_ID_1810388_gDNA_ID_1621193_Annot_ID_57519 3000 nt of promoter + ATG
ctcggtttcaactgaaatatggtttcggagaacctgtgataactttgccaaaaccattcactaaaccataaccaggttaatacttatctgagtcagaacaagaattccgaaggtttgaagagctgaccaaagaacaaaacggtcccggttttgtcttctcggataaggaaaataaatggatgatcagccacaaaatctatcttcttaggaggtggccccatatcaagagcacaaccgtcatcttctacatcagcagttgcagccgcagcttcagcaccttcttcatcgatctcgacacaagctttatggtacattgacactgaatgcagtactcccacttgattcaaaacgcttgtagcagaaaaaccgaattcgatcttaaactttggaattctaaattcctcaagttcaactttgtatctcggaatgtgactatccaagaatccaggtgtagatgctattttcttcaagagataatccaatccatctttcttgtcagggagatagaaatacattgagaatttgcggttggtatcatcacggcctcgtcggtaaggaccttgaaaccgttataagctcttactttttgtgtctcgtagctggtcatgaatggcacagagactgtagtgccattgaccatgtggaagtctctgtcttttgtatagtacttttcaaatggtctcttccaagctcccttgaaatacaatgcgtttgcgtaaatcttgttggttcggcttgtcacagattcacgaggaagaagatctttgatgagattattggtgtgatcttcaacccatgaattcacctccttacgcacttcttcagccttcaaacaaaaaaaacacatattggatgatttttgaaaacagtctcctaattcgaattatgatttgggaatcaacatacattacgaactattaggtttccaatttgactggttgagtatgttctttaagtcaaacagctattacacacttcatctagaaacaccaaataacgtttctgcaaaaccctaattatatttcttcgaaaccctagtttcttttttgctgttaaagtggaaaattacctttgatcggaaatctacgggaacgtaaacagccttgaagaagttctcgaagagagccttgtatttgggatcaatcggtagtgatttctcaatccagaggccattcaccgccctcatctttgggccgccactagcgctgctgtcggcgtagacgatggatgatagttctcggaagacggatttgagctcatcgattgaagaagatctgaggaaggagaggatttcaccggcgactaagccacctccggaaccagcggcgtgcatggtgatcgcagagtttattgacgccggcgagaagatgacgttagattccgactcagaagataagacgtgcctcccaaggatcatcgcgacgtcgttttgcttcttcatagcctttttcacattcatctttggtctctccaactagatagagaacttgcaaaagggtggaggattatgcatggtctatggagggacagttatatatagtgaacaaatccattaagaaatttttaattattattagggtttcttggaaaactagtcactttgcaatccaggtgtataaatcaaacacttaaaaatgactactttgcaaattgtaaatagtaatatgactactttcccaaatatgtttgaaaaaattaaaatgattacttttcacttatctcaaattatttttacaatggaatataaatagatttttctatactaaacctctgtaaattaatactcgataagttccacttcaaaaaacgaaccaaaggtcatatttcatccatgcatgttcgaacatgcaaagagaacttactaataatgtttggtcccaaattcaagtattctctggttctctttgcatggatgaaagaagatggccatatttttataggaatgttcagaaggagaattcacaatgtggagaagatagtgctactggtttatattgaagtcaggttaaggtttatgatagtttcaaggacattgatgcggactaattggcatcagatagtcgtgcttccaagactaatatcaggcgtaatgggttttactaatacgattatgaaacagcctcaagaaaaaaggcaaaaaaatcgtattggagcaaaaaagtcgaagaaatatcacgaatatgtgttttcgttagcgaataaggcgttttcgtccaaaacgcatcgtgaatcttatttttcgtatttttttcagaaaatggctcacatatctgcttgtgtaataattttggttctgtagtcttgtataactttaacactttaatttcgatataatggaatgattttaaaaggaaaaaaaaataataaaaaagaagtaaataaatcgatttttattaaattagaaaacaatttaattttggattgaaaaaaattaacgtactagttcaaaacgccaagttaatatctcggatagtcctactttctcatgattcagttctttatagaccatctaaatcaatccgtctatggatctaaaatcgttcttgaaactaacatgatgaaacggtccctagataggttggccgaggcaaagaagaagaagtcagctcttaactctaaaaaccaaaaggaaaaaaagaagtcagaccttactcgttttgtaaagatttagtcagcgaagaagtcgactagtgttcgagtggggaaacacgttgtcaactcttaagtctaaatctttgaccccaaaaaagagagcaagttgtccactataattctgtcttcttatgcaactttcatttttggccacctaaagtttcaagcaaaacaacaaaaatgatcttttagaataattattataataataacgacgattaatgaactctatatatctcacaaaagaaggacatgtttgcaatcccaaccaagaagataaacaccttagcaaattcaaagaagaatatatcaaacatcttttgtttctaagaaataagctctctgatt

SEQ ID NO: 8098 - DNA, 3000 bp, Unknown
  misc_feature (1)..( 3000): cDNA_ID_2140111_gDNA_ID_1621193_Annot_ID_174645 3000 nt of promoter + ATG
ttaagttgtggtttccaggattggcggataccatttaaagagccaagtccagatgaagaattttacatgatttcaggtgaaactgaggacaccatagcggagggcagaattgtccaggccagtgttcggagattgcagaatggaagagccatatgtgtattagattctgggttaactgggatgcttatgaaggaagatttctcagatgatgggagagatattgttgacttggcggaccagctgaaagaaggcgatatcctcacatgcaagatcaaatcgattcaaaagcagaggtatcaagtgttccttatttgcaaagaaagtgaaatgagaaacaacagacaccagcataaccagaatgtggatgcatattaccatgaggatagaaacagtctccagcttgtaaaagagaaggctcgaaaggaaaaagagctggtgaggaagcattttaagtctcggatgattgtccatccccgctttcagaatatcacagctgaccaagcaacagaggtatgccaaacatttactcttctttggtacttatattgagttttgaatgcatttgttatatattcaaagaagtctctgtctctgagtttccttgttggtgctgtgtacagtatttgtctgacaaagactttggagaaagcattgttcgtccaagttctcgaggactcaactttttaactttgaccctcaagatttatgatggagtttacgctcacaaggagatagctgaaggtgggaaagaaaacaaggacattacaagcctacagtgtattgggaagaccctgacaattggagaggacaccttcgaggatctagatgaggtatatttaatgtaatggtgttgtcagtgaacacatttagttgattcttgaacatccgtcagctttttaacattcctccgacttttgtaagccttttttggatctaatttgttgcgtcagtaattgatgttaaccacaccatctcataactgcaggtcatggatcgatatgttgatcctttggtatctcatcttaagacaatgctcaactatcggaaattccgtaaggggaccaaatcagaagtagatgatcttcttaggatcgagaagggcgaaaatccttcaagaatagtttattgttttgggatttcacacgaacatccaggcacttttattctgtcttacataaggagcacaaacccacatcatgagtatataggtttatatcccaagggatttaagttcaggaaaaggatgtttgaggacattgatcggcttgtggcatacttccagaggcatattgatgacccattgcaagaatcggcgccatcaatcaggtctattgctgccaaggtaccgatgagaagcccagcagaccatggatcatctggaggaagtggttggggtagttctcagagtgaaggaggctggaaaggtaactcggatcgttcaggctcaggtaatgcattttaaatttgtttttttaacttgcatagaaaagcttgtgtggtcattgttctacttctcggggttatgttttaatttaacttctggtaatctggattttagatgccgagaagtatttatatattaacattatttatgttgtctccttgactatacttctggacgtccgctcttaagtaactgtgcaactgtattgtagggagaggcggtgagtacagaaatggtggtggacgtgatggacatccaagtggagcgcctaggccatatggtggccgtggacgtggtcgaggcagaggacggagggatgatatgaatagtgatagacaagatggtaacggagattggggtaataatgatactggaactgcagatggaggttggggaaatagtggtggcggtggttggggaagcgagtctgctggtaaaaagactggtggtggcagtactggtggttggggaagcgagtctggtggcaataagagtgacggtgcgggcagctgggggagtgggtctggcggtggtggtagtggaggttggggaaacgattctggcggtaaaaagagcagtgaggatggcggttttggaagtggttctggcggtggcggaagcgattggggaaacgagtctggtggtaaaaagagcagtgcagatggcggttggggaagcgagtctggtggtaaaaagagcgatggagagggcggttgggggaatgaacccagcagccggaagagcgatggcggtggtggtggatggtgaagaaacacaacctcggctacaaatgttggttgggtaattaaattacgaaggcaaaaggcaagacataatagtataaacacattagtagtaaattagctttctccctaaatgccttttacttttactttgattctctgcatttttgtcttaacctgtcggtattagtatcggtttatgtcttgtcccgactcttaacgttccaggaaagtctttttaagtcgatgcttacaaaattttagaatctcgttatcttgaatactttttgtttgtttggcttctgtttcacctaaattacataatcaagctcgtaaattaatgaactatttacttattgctgtaccggcatgttcattttggattacttatgattttccatcctttttgtttttgtgaacatgaaattacaattagccgttatcgatctaaacaattcatttcgaaaaaaaaaaaacattttcaagagaagaagtcgagagatagcaaaacaaattttattagttgttgccatatatacaactttatcctaaatattcattggataaaacattattgccttcatcaccaaaaaatttgaaacaaacgttttaaatatttcttctaatcgtgccttgggataaaattggaaggggatttagtggctaagcttaatttaccattttgccattattcctttttcgattaaaacgttttcccttccaaacgtcttcttacgagagagagagaaagtatctaaaattaagctttgtgtttgaaatcgaaatcgaatcgagaagaagagaatctcaatg

SEQ ID NO: 8099 - DNA, 3000 bp, Unknown; identical to SEQ ID NO: 8097
  misc_feature (1)..( 3000): cDNA_ID_2140103_gDNA_ID_1621193_Annot_ID_174642 3000 nt of promoter + ATG

SEQ ID NO: 8100 - DNA, 3000 bp, Unknown; identical to SEQ ID NO: 8095
  misc_feature (1)..( 3000): cDNA_ID_3047610_gDNA_ID_1621193_Annot_ID_174636 3000 nt of promoter + ATG

SEQ ID NO: 8101 - DNA, 3000 bp, Unknown; identical to SEQ ID NO: 8094
  misc_feature (1)..( 3000): cDNA_ID_1841622_gDNA_ID_1621193_Annot_ID_174630 3000 nt of promoter + ATG

SEQ ID NO: 8102 - DNA, 3000 bp, Unknown
  misc_feature (1)..( 3000): cDNA_ID_3047618_gDNA_ID_1621193_Annot_ID_174629 3000 nt of promoter + ATG
ctttgcttgccttctccttgttgctatgctattaactgcaatatccctaatagaccctttggttactgttctttcactcccaaaacttgcaattgctttggttgccatatctgagatcttctacttcattgtaatttgtaagtttcttattcttctctgttcttagtttctgctcagttcatgttttgatgtttggttatgaatgttttgattccaggggagagaaacaagtgaatctaaatcttgattcatcttcaagtgtgaaagggaggaaaaaaagaagaatatctgttcttggtttgagtcttctacttattttttgtctataatttatttttcagtcttcattaaatttcattacctactatctcagcaacatcatcatcctcattaattaattgtctttttgcatttgccattttttcataattttctagggttttttttgttttgagaatcttgttcacacttcaagcaagatttgtttcttcttctctgttcaatcaattctctctatctgtctttctctctctctttttttttttttttcattctcttgtttacttcatcattttgtttcttatgtgttttaagaaagttaaaagttagaatttagcatattttggaaaagagtcattgtttggttaagctggcaattggaagagtatttaatatgatgatgatgatggtattgatggtgatggtggtgatagtgaagctgttaaagttaagtctttgtaatgagtgacatgttaagaaaatggatcaagtttagtgccttattctgatctgataagatctttaagtgttttagtttaaaatagaggaaaaagagtaaaaaagcaattattcatcttcaagtgcagagactagacaatatctttgaatatgtttatttatctgacactgttattattgtaagagatgttttatgtcaaatgtttgttccaactctctctattgcgttagcgtaagtaacctgcaagatctgtaaattaattactaattgttatttattattcacacatgggacatcataaagttgtcttggtgataaatttagtcaatatgtgtgtgtgggttaagagtgttgactataccagtttccccgtgattgattggcttttattaaatcggacaatttgcatttatattcacaggtcatgtttattaaactctacattgctgtctaatgtctatagtacaccaagtctattggtgattgaaatgtcggagaacggtatagtttttctgttcttacaataaaaaggtagattaagaacactgattaactcaatgtaacccatacacttacacgtcgggtcaatcttgagcggtgatcttttgggtttacctctaaccccggactggttaaacacttttctcacctcaccacatcaaagccataatcagggcccaaatttgagtgcctacagcaaaaagattttggcccaataacaaaaaactgttttttaaaacaattacaaaattttcgtctaaattagattcaaaactgtatagtaaaatgtttgggactaaccactaaactacagtcacatttttgaaaatgatgactctaaaacaagttataattatttgctgcgtaatacccttgcttcatgggattacgtggagaagaagagtaagtatcaatcaatttattgctagagatttgcaaaagggggaatccgtgtgcagaggtgtctagatgaagccatgagtctacagcggagtttgaatttgcggtggatgagttacggtggagatgacattttccaaacattacaagccttaacacgtgtacctactgagattttgatagaacttgaaattgtttcccaaataaacctcttattcggaagttaggttttggactcaaaatggatgggatgcatcatgaggtatgagatatgtttcccaatgtagtctccggcgatgagattctttatcaccatttttatttaacgttaatacttaaatctttgtaagacagaaaaagaataagatgttagtcaagattagaataacgagacctaatttgtgaaattttccgtagctttttgtggataatagtttgtttagtaaaactgatccgaattaatgtgaactcgtaagactcctccatctcaatggagcggctaattagaacaactactaaattgtgacaaatctaaggttgtctcacataattcaagagtttaaaatatggtatagtcttagatatagatatcttataccaatattcataatttgctaaagctaactagacattcctagataatttaccgccaagaaaactaattaattggatatgtttttcttttctctataatttttgtatatttaattaatgtaaatatacaaaattatatcaaatatattatttccttatatgtttcattttaatcattttttattaaaatgaataattggacacctagatagctaggccaaaacaatttttgacattccattgacttatttacccaaaatggaaagtgtgggtgattctggctgtttagatgcttagacataatcttactttctatccaactaattattacctgtaactgtaagtttcaattttaggcattttatattaattatattaaaataaaaataataacaaatagaaaaatgtatagagaagaaaatatcttaaattacctttgaaatatatattttcctttaaatggactttctatataaaaaataaatcacattacatatatgatacaattttccccctaaatgtctggttttatgccccccaaaaggtaaaatatctatatgggctgtctataaagataaatgattatcactttaccatcaatcacatgccaacacgtaagggtgaaagtaataccatatcctgaaaataaaaattgaaaatagtccagcaaagcaataagaaacacattttatctagtatataaacaatcgtcctcatgctaacaaagcaaaacacatataacaaaaacaatagatatgaagagaaag

SEQ ID NO: 8103 - DNA, 3000 bp, Unknown; identical to SEQ ID NO: 8093
  misc_feature (1)..( 3000): cDNA_ID_2107797_gDNA_ID_1621193_Annot_ID_174626 3000 nt of promoter + ATG

SEQ ID NO: 8104 - DNA, 3000 bp, Unknown; identical to SEQ ID NO: 8092
  misc_feature (1)..( 3000): cDNA_ID_2140070_gDNA_ID_1621193_Annot_ID_174625 3000 nt of promoter + ATG

SEQ ID NO: 8105 - DNA, 2393 bp, Unknown; identical to SEQ ID NO: 8091
  misc_feature (1)..( 2393): cDNA_ID_2140236_gDNA_ID_1621193_Annot_ID_174622 3000 nt of promoter + ATG

SEQ ID NO: 8106 - DNA, 3000 bp, Unknown
  misc_feature (1)..( 3000): cDNA_ID_2105522_gDNA_ID_1621193_Annot_ID_174646 3000 nt of promoter + ATG
tatataattaagaaataaaattgacaagcaaatatgtgtgtcagtattatattgtgcattggaagattttcacacttatttggcatattatatctgcaggcgaaactggaacgtgtccgagtatatatatgtcaaatatatgaaaatatatatatatatatatatatatatatatatgtcacatgttactttgtgattacatgtttcgttatacttgaaatacatgatgaattatagtctgagtagggtgggtgatttacttaaagatttcataagaatgttttacttgagtcaatatcccaaatatattaacgttttcgtttgtggtgtgttataatcaaatagaaataaaactccataatgccgaggcttgacccgaattctgtatttcatagaatatttcttcagttaactaaattagtaaataatttttaaaaaaaactaaattatactattattatttatttctaataattttcttcactaattaacttattcatagacttacttttctactataaaacataagatttgtagagttatacttttgacatacatggtgcaactttcttaaacatttatattttgaatacggaggatctcacacaaaactccgattaatacttggactctatagaagaaacaagtttttattctattttacccacatggtcctcgactaatgacctatataaactagatttctataaatatcatgatggtacttagatccttgagatccctccctcgaggttgcaaaatagctaaaagttcacaaaatttattgtgaacatgttcgaaatttttttgattctaaggaagcttctttgtgtttatacactcaaaacttttgattttttttttctttcttcctgattaaaagacaaaacgcaaagagaacaaaaaaaaaacttgttatttgttaactagatttaggatcattttggaacaaaaaaaattagaaagcaaaggtttatttattggttacctgaaagacaaacaagggttgatcatctttgggcaaactctgaagctgacttgtaaccaattgagcaaaagctggatttggataaaccaaatctccaagttcctccaacgtgtagtcactcgccgccgtcacaaagccagctccagcaccgttacagtcaacatcaagccgtccagagctaggatccacgcggagtctcccggccaagaactcataagcgtccatgagtttcaccaacgcctttctcagcttctccgagaccatctccggtggaaactccttgttaggtcggaagaaatgaactgtttgaacgtcaaagttgagaatttggtcgacgttggataagaacatggattttctctcgctggtttcttcagatgggaaaatgagtgttgattctttgatcgtaaccttaagatcttcaagaagcaacggtggagattcttggtacgaagaacccattttgcaacccttctctctctctctttctctctaagttaattaggttttgagtgaagtttgtgatttgggtttcagacttaatctatattatatagactaacacgtagtaaaaggcgtttttaattttatcttggctttatgataatgtacgtgtacattatagtatgaaataatccatggagagtaaattattgatcccataataaatgtgactttttaataaaaaaagatatggtacggatcgttacaagaacaaacaaagcagtttcgtgctacgtagacgtcgtttttatccagtcacatgaaaacgttattctttaaaagctaaaattgtcactgttgtattattgtgttgtgtttatagatttgggaagaatgatgggctgcattggtgggtgtgagtagggttggtgatttatgttttttaaaatttgataggagaactttgatatgtcggtgtagctacataatatgcatgtgatatatcaacctttttgttgtgatatttgccaaactttgacttctccatttgtggtttatggaataatacgatttttacccatttgcagtatctcattacggttacaaacttacaatctacaattagtctagtttctaacctttttcttgccatattaaaaggcatgaactcaaaatatggccgaatccaagcccggcccgttcataaaaaagccgaaacatttgttttaggccacctaatataaaaagtttttagggcctcatgtgtaaaatttgtcctacaatataatttgtctagtgttatatttatttttatatatgtccaaatgtttatattattatcaacttgttatttaattttaaatatatcaattataagatttaaaactttttcacagtttaaaattttatatttttgataaaattaaattgtttaactaaaaattaaattaatctatagacaaacttttaaatttgaatccgatttagatttattttaattttatttatcatataaatttaaataattgtttaaacattttagccgatgtaacgtttttttattaattattaatgtatgtctattttcttatatttcgaattatcgaattaaatattctccactctaattataagataagttgaataaactttgttttgtttttagtctcgacttttttttctttacatttcttcaaaaagtataataatttttaaaaacattattaaaaaaaaaatatttctaaaacgcagagaaaaaattgaggcaaatctgtcagtataaacttgtaatttcatcgtctccgtcttcttcttcgtttatcagttcttcgtcgcctttcgcttatgaaaaattcacactggtaaagcttcttcctttaccaaacccatttctcttctctagctccttctgggttctcttttcgaagaaccctagtaatcgcgagaaccttcttccccctttctcttcgcaaaatcagaaatcataatcacaatctcttcgtttttttttgcagtttgcagggctaatttctgcgttatcgtacttctaatttgttgagataaacatg

SEQ ID NO: 8107 - DNA, 496 bp, Unknown
  misc_feature (1)..( 496): cDNA_ID_3047627_gDNA_ID_1621193_Annot_ID_174621 3000 nt of promoter + ATG
aagcttgtagaagctcccaaagaatttgaaagctatggacaacttcttaaaaaatccattagtttttagtgaaaatctttacaaggaagtgatatacggtttcttgtataaataagctctaaaaaactaagaaaaaaaaaagaatttaaccaaaaataaaaaagacagaacatatttttgtaacttggaaaaggtagcaacggatgatctagtcccagccgataggtgtgaatttttgatgaccattcactaaacaagtaacaaacgttaaaattttaaaatatgatgacatcagcagacccaaatttcctaaaagtccttgcaactctaataaattcctattttctgattttcgttgaagaacgtaatgttgaaaattcaacaagaattgagtacattgtactcgtttgcaactcattgtgtgaggtctcgaatcctttgctcattttgatttcaaataaagctttctttcccttaattcttagattttgagatg

SEQ ID NO: 8108 - DNA, 3000 bp, Unknown
  misc_feature (1)..( 3000): cDNA_ID_1810384_gDNA_ID_1621193_Annot_ID_57520 3000 nt of promoter + ATG
ttttggccacctaaagtttcaagcaaaacaacaaaaatgatcttttagaataattattataataataacgacgattaatgaactctatatatctcacaaaagaaggacatgtttgcaatcccaaccaagaagataaacaccttagcaaattcaaagaagaatatatcaaacatcttttgtttctaagaaataagctctctgattatgtcgggagcatcttctgtttcttctatttgttcctctaatgtatcattgatccctacgggacctcaagtgttcatcaatttccgggggaaagatttacgaaaaggcttcatgagctttcttaagcctgctttgaaaaaagaaaagatcaacgtgtttattgacgaacaagaggagaggggcaaatacctaatcagtctttttgatacgataggtgagtcgaaaatcgctttggttatcttttctgaaggatactgcgagtcacattggtgtatggacgagctggtgaaaatcaaggaatacatggatcaaaacagactcataatcattccaatattctacaggcttgatctcgatgtggtaaaagatcttacaggaaaatttggcgataatttttgggatttggtagataaatatcaacctgaaccaaaaaagctccataaatggacggaagctttgttctctgtttgcgaattgttttccttgatcttaccaaaacacaggtttttatttttccacttttatatgttcttattacttgataaattaagtgttatctgtttaactgtaacaatttctgttcactcattgacattttactctcttttctttgtatcatagtgacatttcggatagagattttgtaaagtcaatcgtcaaggctgttaaaaaagtgcagaagaatttcttccaacgaagaaatggagaaatagaatatcaagatttctcagtccctgcatgtaaactcactatcactatgcacgagtcaccaaagtaagtagtgcctctcttacgatttcatttaggaaaattaatgatattctgatgaaacatacattgcttcagtggtatgtcatgtgaaagtattgatcgaatagctaagttaaatcattttagctactagtatttccacaaagtaataaataaaaaaatgctaaaagcttgtgtagtagattgttaagttttacttttattatatttttagtacatctctatcatattttaacttgtataaaatgtctactatattttccttcatcatttgctttctaatttattattggaaaaagttcaacattttcttcttaaggatagattagaaactgtgacattaatttgcatgaaaagattagatcccctaggtctcgtttcctgataactttttttttttcatttcgatgtttctatttatgtacagtgaggaagccgttcaagttacggtgctaaatgaattttaccagatgaagaatcagtcaccagtgccctcatacgaggtcctaatttacatttgctgtcttgttagttgattttctttatatatgtttattggtatcatttcatgaactgacatggagatttatatatcgacagttcaaattttgggtcgaccttacgagaccaaagggtaacgttttcatgattgacgcaagagatctttccattgcatggtcagaggactccaaccattggacctggctccctctcccaaaccaaaattcaaagtaaaacttctcttaaaagtatttcttatataaattgaaagaaatatcttaaatcacgaaaatatataccttataacgataatatttctagatttattgtctaatactaagcacaatactttccagtgaatcagtgatggaaattgcatttttgaaaagtgctagctggctagacgtagctggaaagtttgacactcgatatttgaccccgaggacaaggtacgaggtggtgttcgtagtgaagttagaatacacattcgaatgggagacactagtgaagctaaagctagacttgccgaatacttgggagaaaccgcaagaacagagtgtggacatgtttgactacataagtgaccaatggctcgatattccagttggagagttcaccacatcgaagaaaaacgtcggggaaatctcttttgcaatgtacgaacacgagtgccaactgtggaagtcaggcctcttcgtcaaaggtgttacaattcgtcccaaatactaagtcattttataagcatgtatgttgttggtctgagatatatatagtggaaatgctcgctttgaaccataatcttagtttcacctcccaaatgtttgttacaatgttacttgtgtagatagtttgaccggtttcaaaacttatactctatttactctcttctgcattggttatcacatccataaccaccaaactattgaattctataactgaccaaacccaaaccgaatttttagaatatccgaacagttcccgactctctatcctattagacccgaaaccgaaaaaaaagaactgattgggacgagtatccgaatgcccaaacctaccaaagttgtaggcctagagataatcctatcgaaaaatgaccaacaacattttgcaaaatttgatattcaaccgattttaattaaagtccacaatagtcatccataaaaaatattgtttacaatgataaggtgcggttcgatactaactctattttggtattcggatgattgatcaacaacattttgcaaacattgaaaagaaaacgtaaatttcgtttcctaaaaaaaaaaaaaattcgtttcctcacaatataataaataatttacaaagaaaaaaacgaaaaatggcaatgtgactcactcaatcggtgactcgctatagtctgtgaagaaaggccaatttcgccataaagttcacacctttgatctcctttgtttctgggtttctcctaaatcatccaaattggtatcgaatttgcccttctccgattcaatttcttcacgatctcaaaacccagaagaaagaatc

SEQ ID NO: 8109 - DNA, 3000 bp, Unknown; identical to SEQ ID NO: 8098
  misc_feature (1)..( 3000): cDNA_ID_1810380_gDNA_ID_1621193_Annot_ID_57522 3000 nt of promoter + ATG

SEQ ID NO: 8110 - DNA, 3000 bp, Unknown; identical to SEQ ID NO: 8106
  misc_feature (1)..( 3000): cDNA_ID_1810376_gDNA_ID_1621193_Annot_ID_57523 3000 nt of promoter + ATG

SEQ ID NO: 8111 - DNA, 3000 bp, Unknown
  misc_feature (1)..( 3000): cDNA_ID_1810372_gDNA_ID_1621193_Annot_ID_57524 3000 nt of promoter + ATG
taccatcaacatcaacatcatcaaacagcctgtctttgatcttatcctcagcacttctcctagttccacctctactatcaaactcatcatcggatgattctccctggccatttccctgttccctttgagctttcttcaaccgcttatactgcctctgtcatggttcaagaaaaaagtcaaatgtattagtactgcacatatatttttagtgtatctacaaaatcctgatgtattgttatatacacaaatatgactaacctttttgaatttgacgttgttatcttgtagaagcaaataatcatcttcatcaagaccttcgtccctattaaaattatcataaatggaaggttagtcagaaagagaacagacctgctatagttcgtctaatggtaacttacatactcatcacaaacaatgtatgaaaatcacaaataaagactgctgagaattaagggaacatttcttcaaaagtatcatgcatgtcaacactaacatttagtttttcatatgttagaaaaggataaaatctaagagaatgagtaaggatataaaatattcactttttctttcgtttcttcttctttttctgcctctcctcatcgctatctttcctttcttcgtcttcttcctcttcttcctcttcgtcttcatcattcactatgaacccatcattctcatactcattcccaactacaaaacagatatacggatcccacatcatggaacaaaaatagcctgaatctaagttaaaaagcctagaaagaaaaagaaaaaaaaatactcaaacccaaggtgagagaaatgtgtgcagctcaaaacttgcagaaaccatgaagtctaaaaaggaacaaatcaagcaaccgtatgaaacagagaatatagaaacaagaagtggtagaaggagagactttgcagcagataagtaaacatctaagaaacaagatgcattcactttttttttttttttggttgccaaatccagacactgcatcttctaatggagcaaatgcagcagaatttctccaaatgaatcgattttaagacaaagaactgcatgcgcttcagtactaaaccaaaccataccactaatttccttcgatgcaatcagactctacagcttccagatttagggtggtaagcaaaaagaaacgaaagacgacacatttctcactgggagaagtcaaaatcaaggaaaaaacttataccgtcatcatcatcttcttcatcatcgttttcatcatgctcagctggatctccatgaactggctctccgtcgtcatcctcaagctcatgatcctctacgcaaaagagaaaaggattcaattttttcatacaaatcagaagaaataaacaaaaccctagtattattacggcgtttcacacagaaaaaaattagggtttgcgacgaagcgattaaggtaccttcatcgtcagagattgcgttcctcgccatgtttatctcaacaaattagaagtacgataacgcagaaattagccctgcaaactgcaaaaaaaaacgaagagattgtgattatgatttctgattttgcgaagagaaagggggaagaaggttctcgcgattactagggttcttcgaaaagagaacccagaaggagctagagaagagaaatgggtttggtaaaggaagaagctttaccagtgtgaatttttcataagcgaaaggcgacgaagaactgataaacgaagaagaagacggagacgatgaaattacaagtttatactgacagatttgcctcaattttttctctgcgttttagaaatattttttttttaataatgtttttaaaaattattatactttttgaagaaatgtaaagaaaaaaaagtcgagactaaaaacaaaacaaagtttattcaacttatcttataattagagtggagaatatttaattcgataattcgaaatataagaaaatagacatacattaataattaataaaaaaacgttacatcggctaaaatgtttaaacaattatttaaatttatatgataaataaaattaaaataaatctaaatcggattcaaatttaaaagtttgtctatagattaatttaatttttagttaaacaatttaattttatcaaaaatataaaattttaaactgtgaaaaagttttaaatcttataattgatatatttaaaattaaataacaagttgataataatataaacatttggacatatataaaaataaatataacactagacaaattatattgtaggacaaattttacacatgaggccctaaaaactttttatattaggtggcctaaaacaaatgtttcggcttttttatgaacgggccgggcttggattcggccatattttgagttcatgccttttaatatggcaagaaaaaggttagaaactagactaattgtagattgtaagtttgtaaccgtaatgagatactgcaaatgggtaaaaatcgtattattccataaaccacaaatggagaagtcaaagtttggcaaatatcacaacaaaaaggttgatatatcacatgcatattatgtagctacaccgacatatcaaagttctcctatcaaattttaaaaaacataaatcaccaaccctactcacacccaccaatgcagcccatcattcttcccaaatctataaacacaacacaataatacaacagtgacaattttagcttttaaagaataacgttttcatgtgactggataaaaacgacgtctacgtagcacgaaactgctttgtttgttcttgtaacgatccgtaccatatctttttttattaaaaagtcacatttattatgggatcaataatttactctccatggattatttcatactataatgtacacgtacattatcataaagccaagataaaattaaaaacgccttttactacgtgttagtctatataatatagattaagtctgaaacccaaatcacaaacttcactcaaaacctaattaacttagagagaaagagagagagagaagggttgcaaa

SEQ ID NO: 8112 - DNA, 450 bp, Unknown
  misc_feature (1)..( 450): cDNA_ID_1810491_gDNA_ID_1621194_Annot_ID_57526 3000 nt of promoter + ATG
aagctttaagatcattgattttgattttacattctaaaatgacggaatcgttgtatcggctgcttatttagggttttgggttttttgtgctgttggtagcttttaattgagtgtatttggtatttttggattagttgaaaaatggttgggttagtttgaatccaattctcgctgagaattttatgctcacgatcattcacataagagattccgctatctgaagaaatcgaagcatgtgaaattttcccttttcctttcgatgtctgcgtttcgctgcgttgtcatcttttgttcttgccatgggacttaaaactaatatccttatacttttcattgcagcttaatgtttaacggcatcaccagcatcttgaaggagtactagttttggttagattcgtcatacatgtgtttgaattagagtaatttgaagggctgttttgttttgtgatg

SEQ ID NO: 8113 - DNA, 3000 bp, Unknown
  misc_feature (1)..( 3000): cDNA_ID_3047687_gDNA_ID_1621194_Annot_ID_57528 3000 nt of promoter + ATG
agcatggcagattctcttataaaccataaaattagtatccccggcagaagtgcaatgaaaactttcatgaagtagtggatctgcctcttctgaagaagatccacctcaactccggcgttgcaaatagtctcaaacaagtaaggatctaagggaatgtcaacctagaaataaaaaggatatgacatggtgaatgtacatcattcatttccaaatacttgcaactataatttttttacttacaatatattctagagggaaaccttctttcatggtcacatacaatctctttaggtcttccgtgaaaacaacagctgcaacctgttatgaacacatacacagattatcgtgccaacataagctaaaaaaaagatctatcatcctatcacgtccagcttcaaattaattgctttggaaaaggaatatattcatcatattttaactcataatgaatataccatcacttgttatcatttaaaaaattcaactggatataatgacacttgccactcacaatcccaaagccggacaagagtataggttagagctgtacctcagaagaatcaagcttctgaaggaagtaggtatagggaagcttagggcgatatcgccaccatctctttgatatccagagagctctagttccctcagtttcagatgtccttccaataacatcttcgcgaagacttttctctacctctttcatatcaaattcaaccacatacttcgccgctgaggagtttaactgttctgataatttttctcgttctaacatttccttccaggttgcaagcctttcccgccaattacctacactgtctccaatttcacctatcatagaagaatgcaatagaggattagatggtcaaaagcacaggttaccaatgatagtagatgagggatctagaagtgctgctctgaaagaaacttgattagtgagataagattaggtcgtcaaaaacaaaggtttcgcacaataaatcacttcttgttatatcttcagcatgccactactaaacaagtatcacctaacgaatgtatactgaccagagacacccagatcttggcttagtttcttctttgcctctgtctgaatcctagcatttctaccaattattttcttgagagatccctctgtggtctctagatcgtcatcccacgcattttctccaacataagaactatcgtggacaagtgttccatcaggcgcttcaatgaacctttttaatttcaagcctttaggtgttgctttcctccacatatttctcttgaacctgaaacactagaataagtcaggacattctacaaaatcaaataaacagaagttcttttagtcttcccactcttgacgctttagatgcctcattagctgagtatttacttgttaaaggatgataccatagtttgaatatgaaccatattttaccatgtcccagtagagaaaattacaatcggaaactgaggattaggaagcacctacttttctatatttccaggagatggctcggggatcaaagcctccataaaagactctgttaactctcttctctctcgttctacccgaggagcttggatggcaacataaactctttgacaagaaagtaacagcgcaaaagcatatatgaacaaggcagcaactcgtttaccgtcccaattcctgatgtcctgatacaatacatcttccctcattaagaaacaacctaatacactagtatatgtcgctagaataagcgtagttgtagtctcctccaaaatttatgcttccgttaaatcaacaacaaaataaataaataccatacgtttgtccctcaatgttttagaacacaagcagaagtctaacaatacttgagaatcagaaatttgataattacgttaaaaagctgaaccagcttaccttccaatgctcccacttgttccaatcaataaacgaaggcactgtctcattcttaaagcgagtcagctcgtgatggcccttgtgcacactatccttaactcgagccacatactcattcactctcccacttgcttcttccgagtcaaacccaatttctgtcttcacagattctccaatcttctccccaatccgctcggcaccaaggcgaatagactgagccaatctcacccacgaaaagcctccatcgctattagatgaagacccactactactttcagacgcatagactcgaaagagctgttttttccgggtagctcccagtccatacttggcgggaaaccgaacaagaccaaaactttttgatcttttcaacaactgagtcgatgaagagataagcggattcggtttatacgaaattgcaatctccatgaatgaaatcacaagaaaaaaattaaaaagagaacaaaaccagacgcatttgaagatttttcccgattaaagagctctctctgagaaaattactgaaggaaaatggtgagtaccaaccattcagctcactcgactctccggcaagacttacgcttctctccggtaaggaggtttatctacactgatccgtcgttgagagtgtcctaatacttcgaaggagaaagatgacgcttaaactcaaagaggctcgaagcctattagttatataattgggctagcccattaaggtccatcagcccactatccgaaaaataatatatttaaaccgtggaatccaaggagagacacagtggcaaaaagggtaattatagggacatttcttggggtgttgtccaagctgcttttatataaggaagggatattgttctctcgcttctcgaaagatccattcaccaactctttataccagcctctgtaacgttcgatcatcttgtatttcatttcaaccactcatgtaagtatattctttcttcagattccgattgttttcttcgattaagttttgagctagattctctagatctgtttcaccgatttggttgatttctccgtcaatctgaactcgcggtgtgcatcttgttgtttgcagtgtttttagtttgttttacgaagaatcaact

SEQ ID NO: 8114 - DNA, 3000 bp, Unknown
  misc_feature (1)..( 3000): cDNA_ID_1838761_gDNA_ID_1621194_Annot_ID_57530 3000 nt of promoter + ATG
aatctatacacgtttggtatcttgatggatggattgtataagaaagggagaacgagtgatgcacagaagatgttcgacgatatgaccggtagaggaatttcgcctaacagagttacctataccattctcatttcaggtttgtgtcagaggggaagtgctgacgatgcacgaaagctattctacgagatgcaaacgagcggtaactatcctgattccgtcgcacacaatgctttgcttgatgggttttgtaaattgggtcggatggttgaagcatttgagctgttgcggctttttgagaaagatggttttgtgcttggtcttcgaggttatagcagtttaatcgatggattgttcagagctaggagatacactcaggcatttgagctgtatgcaaatatgctgaagaagaatattaaacctgacatcattttgtacacgatattgattcaagggttatctaaagccggtaagattgaggatgcattgaagctgttaagcagcatgccaagtaagggcattagcccagatacctactgttacaatgctgttataaaggctctatgtgggaggggacttttggaagagggtcggtccctccaactcgaaatgtcagaaacggaatccttccctgatgcgtgcacacacacaattcttatctgtagtatgtgcaggaatgggctggttagggaagctgaagaaatttttacggagattgagaagagtggttgttctccttcggttgctacgttcaatgctttaattgatggactgtgcaagtccggtgagctcaaggaagccaggttattgttgcataaaatggaggtcgggagacctgcttccttgtttcttaggctttcgcacagtggaaaccggagttttgacaccatggttgaatccggttcgattctcaaggcatacagggatcttgcacattttgctgataccgggagttcgccagacattgtttcttacaatgttcttataaatgggttctgcagagcaggagacattgacggtgctctcaagcttctcaatgtgcttcaactaaagggattatcccctgatagcgtcacttacaacactctcatcaatggacttcatagagtcggcagagaagaagaagcttttaaactcttttacgctaaagatgattttagacacagtcccgcggtttacagatcgctcatgacatggtcatgtcggaaaagaaaagtcttggtggcttttaatctatggatgaaataccttaagaagatatcttgtctggatgatgaaacagctaatgagattgaacaatgtttcaaggaaggggaaaccgagagagctttaagacgacttattgaattagataccagaaaagacgagttaactttagggccttacacgatatggcttatcgggttatgccaatcagggagatttcacgaggccttgatggtgttttcggttttaagggagaagaagatccttgtaacacctccgagctgtgtcaaactgattcatggactctgcaaaagagaacaacttgatgctgcaatagaggtgttcttatacactctagataacaacttcaagctgatgcctagagtttgcaactacctcctaagctccctcctggaatcaacagaaaagatggagattgtttcgcaacttacaaacagaatggaacgtgcagggtacaatgttgactcgatgcttcgattcgagattttgaaatatcatagacatagaaagcaggtgctgatagatctttaggtaatgaaatgattattaaaggtttatctacatccggattcataggcattagttttgtggagaagagaaatatgagttttgattcgaatctctttaccttaacactacattagaatagaaaaatctctggaaccggaagctctttgaggaaaaggaaaaggaaaaatatgaggtttatacgtaaatgctttgtatgctttattgttcatgaagtttttccttatctttattgtacactgatttgttttgtattatgatgttaaatttctttgaaataaagactaaacatgtctaaatctttctggtttccttccaagacctgttccaacatttttgaccctcccataaattatgtacacagcttgtttgtaagataagggagcttcctgaatccttttggttagacaaagagacatgaatcaatcataaatacctcttgattcttcgttgtggacttggcttatcagatattgttcgaatcacaagatttggccaaagtttcctgaagttgacatcaacaaaaagcatctgctgatttcaggctggaaagggccttttaaaaaaaatccccgggccatatgaccatatctgtctgacgtggcatcaccaagggctttcctaattcagtatctcagtgccaaaacgacaaaagatcacagtgaggccgactaatcatgggcctgaccgttgatccacgtgtctttgtattccacgtccaaatctcaacccttcctttacatatgccatgtcatcatctttttcaccatttttttgtgagttttatgtgtgagttttttttttgctgtcattaatttagaaacaataatctcgttgtatcagtatctctatttaatatgcaaaaatcagtcattagttttattttaataccgttgaaaaaatgcaataattcataggtgtgccgcagcagattttaacccatcaattttataggaacagagtgtgtcgtctctctacaacagtcgtaggcacattaatactataattgccttaaaaactccgttgagtagacaaaaagagtgcaattccaaagcatttcttattcttatagattttaaaaataggaaaaaggtgtaaatctgcgaacattttggattcttcacgtttgtttatattttgggttggctctacacctactctcagaagtcataagccaagcaaagggggttttagggtttttgaccgcgagccagatctctttcttttgtttctcccacttccgaatca

SEQ ID NO: 8115 - DNA, 1404 bp, Unknown
  misc_feature (1)..( 1404): cDNA_ID_1810443_gDNA_ID_1621194_Annot_ID_174681 3000 nt of promoter + ATG
aatctaaactacgtcaaagcttgttgcagagagaccctgagacttcaccctaccaatcctttccttgtccctcacatggcacgtcatgacacaactctcgctggctatttcatcccaaaaggtatctcatttttccccaaaatttatgcatttaggcgtatttgactccaactccttaaatgtagaatcaggaattctaactatatttatttttgcttgatttgagcaatattttcatattagaatatttgttcctttgatttattattttggactgaaaagtgaaaataagtagattgtgacatacgaatctttcaaattattattttatttgtttattaactttaatatattgattgtttgatgtggatcacaggcagtcatattctagtgagtcgtccgggtgttggtcgaaaccctaagacatgggatgagccactcatctacaggcctgagcgccatataaccggcaacgaagtggtgttgactgaaccagacttacgacttgtttcatttggaactggtagacgcggctgcgttggagctaagcttggaacgtccatgattgttacgttgttgggtaggcttctccaagggttcgactggaccattcctcctggtacgacggacagagtcgagctagtcgagtcaaaagaaaatctgttcatggctaatcctttgatggcttgtgtgaagcccagattagatccaaacatgtacccgaaactctggaccggtccagcttgatcataccggttaacggcaccacatttcaattgctattgtcatgtatgagtaaaatttgaataaagtttttgtcttgaggaaaagttgaagaggaatatagcccataacgttcataaaaggcccagcccagtattgttctgccgttttaatttgagcaaagtaagcttcaagtaaagaaacgggttgagtgcaaaaatggagaaattaacttgcaagttgagattagcacataagaagagtatctaattccatcttgttcacaaagtcattcttttagcattaatgatcctatatttatatcaaatctcataagatcttcagtgtataatatatagtttaatttttttctaggttttcgttcgaactcatgtgggttcagtaaataaatgtttaagtccccatctggccgcgtcaaaaatacttagataacaacaattagtggttgacatagaaaagtaatgattgttgccgcgtagaatgaaattaataaaattataaagaacagtgaagcaataaatgtttccttggcgtcttgaagagtagtcttcttaaatattccagcccaaaaaaaaaaagattctatccattatcaagagaagaaaaaaaatctgaattccaattcgaagaagaagaagaagaagaaaggagatgactatg

SEQ ID NO: 8116 - DNA, 3000 bp, Unknown
  misc_feature (1)..( 3000): cDNA_ID_1810451_gDNA_ID_1621194_Annot_ID_174677 3000 nt of promoter + ATG
tcataacaagtgtgactcttcgaaaagcccattttataatgaacaagtctttgattgagtagcttgaagtttgctctagtgtttcttttggacgtaacctcgaagatacggattccaagtaacctctatttgcaggtgaaatccgtttgagcacttcaatggcttctttgttcttcccttccaaatggagccaacgcggtgactctagggcaaagaaatagatgaaaatactgtggattcctgcaggaatggatgtgcatagatagagaactttccaagaagcgtgtcggacaaggtaagcgattccagacaacgacatgaaccctaacacaaacagagtaaacggaaccatagtagctcgcggtctccatttggtggaaattcgctcacttatcagaactaacgcgtatgtcccggtctgagaacgcgcgaatccgatcacaaactttaagaaggagtagatccatatgttggaggataagaaaatagagattccagtgagtgacattgcgaaactcgagaaaaaaagaagttgcttccgtcccaaggaaccgtcagggatcatagccaaaacgactccaccaacgatagaacccacataaaaagttgaactaggtagacttctgaggaaggagctggagcactcgagatcgaactctgaaatgactgatttacctttgaaaccaccgtcccaatcccaagctgaccggggaatcttacagatatcggtagttgccggattgcagatcgtgtggtcaagacagtgccacgtgggatatgcatctgtgaagacggtgatgaatatctgctgagagtcaaaggttagcgcgagcccaacgagaactatctgtaagaactgcgagaatccgaaatcagacaagcttttctcgaggatcttgtcgaaagtcagaggtgaagaagtgtcttcatcttcttcaatgtgggtgggcaacaatggtgccaacgaatccgccatggttgcttactttgatcgatcttgttgagaatgtgagaattattacatcaaaattaaaaacaaacaactagtacttttgaaaatatataatgtgtggtcaagagatctgatctttgatgatcaatgagaaattgtttttttcttgtttgtttttgtctttttgaacaaactgtttaagatttgtatctgtgcgggcctttttgtgttaaactatgaccaataataattgaagcacaatataaatacatagttgctgatgtaagtacatgcgacatatcaacatggacacttctgcttataaattcatactgggccgttaagtaaagcccattttaattggttactcaaattgagaagtctaccgctcacgtgtggcccacgataagtacgttatgcttccacatgttgcagagaattgtgaaacttgaccactcaactcttaacatctcgccgataattttttgtttttgttttttttgtttttgtcataattcgccaagaaattatgttatatataatataacgaataaagaaaggggactatcaaattgaatagtaaaataaattattataagcttggcttataagattatctatgttcatctaccgccaccattctcactggtgacttgccaccttgtgttgaatatgcatatattatatatacatattgttcaaatgtttattattcatttgatatgcattagggttatgttgttagtattatgttttaggtattaactaatcactatttcaatattttcaaataatcttatttatgtatgcataatttttttatccacatttatatgagattataggaaaattagtgctcaatgttttggtttctatgaggaatttaagtgagttcgaatcccaagacatccggagaataaaaggtgaaaaagaacaacaaaaataaaagataaaaattgtatttgatatagtatcttttaaatgggccctttataaaaagacacaacatctcttatttgacaaaaagaaaactacaaacagtattaaaaattcattaatccacagtaatatatatcactgggtgtagtgtcattttccaagaaagatcatacctagagatcgtaattacaattaaattaaaatgattagcctagatatcctcgaaagacaagacaaagatcatatgctaatcgagctaatatgatattcaaatttaaaggaccaaaaaagtgtgtgatcgaagactcaaaaggagagcccatagtgtacaaaaagaaactgcacggatcggatctattcacatgactcggattttattccatgttattagtcgctgttccacatttcctttccacgtatgactaattatagatacattgtctcttcaagatagatagataacatatttgcagaaaacaagttgggaaacacacacatttgtaacataactcttgattttccatacgacaaaataaaaccatataatacagttaaatgacaagacaaattcatataaaacttacataattttgtcacatatatagctgaatgctgaatatacaaaaatcaatatcacgcagaatacttacacggtttaccaattatataaaacatagtctattactattagacgcagattatataacatacaacaagtagccatacgtagtttcaagaattaattaaatttttaaagaaaccttaaaaccccaaataagttattttttattgtcaatattcgaactaattactataagcttcttcccatgaatttaaaattataatgttaaacttctgggaccgctagactgataaaatgtcccttttgtctctctctacacacatatacatctctatacatatatataaatacgccaataatcgctatccattacaaaaaccattgtgttagatattcaaacaaaaaaaaagaacgtcacaaacatcagactgatcaccatcactctttgattagaatgagcaactcaaagtcatactggagaaagcaaagatggggaacgccgccacaagccctaacaccgttaatg

SEQ ID NO: 8117 - DNA, 3000 bp, Unknown
  misc_feature (1)..( 3000): cDNA_ID_1810455_gDNA_ID_1621194_Annot_ID_174676 3000 nt of promoter + ATG
tgtgacaatgttttggaggattatgacttattaacagtcgatcgatttatcgaatttagtgttatatattaaaatattaattattcaaaaaaattggatcagttatgtttcaaaatagcgttagattacatggctctatgccaaagttgggattttatttttgtttgtagtttttttaagtggggaaaagataagaaggttagaaggaatatattcatttcggagaagaaatcccaaagcaccatcacaaaaagatgcttgaagttcaagcaactgtggcctctatttttttataagccgacttactttattgtcactaatttcatttctttctttctttaagctcttagtttgcttcaacaacaattagctaaaagttaaacattagctttacttggtttaactaaaaacaaaaactttggtttctttttttcaaagcaaaatacaatttagcttaaaatcattattgaaaacattaataaagaaagatgagaacttaaatgattttagggcggatgatttgctaatgctaatatgcatcatatcactatgaatcaattttgtagataatagtgatgatgattgtgaaaacacaaatatcgtgataatataagtaggaataatatatgtgtgtatctatactcaaaaagtggtaagaaaaaataaaaagtctagtaaactatgtaaatgtggctggccaagtttatacggttggcatctatcgcgggagttgtattttcattttttaatattgttggcgcaataagaatctatctttattcatcaaagaggagaagaatcgattccaattctcatgcaatttgaactttgatttaatatttaaattcaaaagttataaccattttcttattttatcttggtcagaattgtgtgcggtaattgattaatttaatttattgtacaaataattcgtttcacagccaagatttttaacatttctggcaaagaaaaacactgtttttttatttattccaagaaattaatatctgaaaaatgtgttaccatgtatagctgcacaatcgtcagtcctacaaaagccaaaaaaggttatagccccagcaagctttaaccaataaattaaaatggagaaaagaagaaaaacatatggtaaaaataaaaagaataaaagagctttaataagtagaagaagaggtccccaacgttaactctatctttacacattgatgcataattctccacatattaatagtccgtgtttataatatgtataactttaaaaaattgttccatattcttatgttaatttttttgttttaattcaatattcattgactggtattggtctacattttaacatgtacatgctttcccttaattaatacttaatatataacctctaataaatttctgattcaattcaaattttattcttagataatattctctcttttttgtgtgtgcatatcagcctcagccatattcattgacttattcttgttctatgtaaatatgctatgggacctcccactcatatatatttaggttgaccatttattttacatgcatgcaattgaatttaggggttaatctaaatcgttgcgtatatgaattatatatgattttagtttgtatattgaaaaatgcatcgtcgttctatacataagctagtttagtagctaatagggcaatattaacaaagttgattttctggtttgtagtgtccatacaagtaatttagttaattatctcgtttgttcacctttttgtttcttttttcttttgctagctagttaattgcggatgtaaactacatcttttactaatcgatgaatggaaaacgtttttgtcgtagacaaatattccaccgtacctaacggttttggattgcatgtatataataaatttgttccaaaaatatacggtctattaatttataacgaagctcatcattgcttagaattgtatattcacctcataattagccaaaaaggtttaccctaccataaatgataaaatccctagccttgtggaatttgtttcgttaagatatttgtatgtatgcctccaattacgatatatgacgatgtagacaaactataagtctagtatacgactctcctcgtgcggtcttaattgaatagaatacatagaactttaatatattcactttaaaagtttatattttcctataaagaaaatatttacaaatctttgattactatttactccaaatcaagcatgattaagaaaatagtatatagaacaattgtatgataaatttggatttaaaaattacttctaaattataaggtagtaaagaaaaagaaaccaaaaatataagaataatagatgtgcaatatctttgattcaggtgaattatattttaacttagatatctcaagtcattttaatgtttatatcaggaaataaagaaataaaaaccatcatgcaacaaatcatgcatatatattagatacatccgtaaccgctttttttcgtcttttttttttgtttttttcgtcgtcacatccataaccgttttgatatgagatctccgatgttcaaaattcaatttcccccaaagatatcaatttaatatctaatatatactattattttaagtttgcgcagtaatttaataatctgagacagacatgatttacttaatgtatacgtatagtggcttttacacacattttatattgaaagaaattcaaaggtattcaagctaagaggataaaaaacacaaatgaaaaagatagcgacagtatcttttcacaaaggaacgtctgtgtactagtctgaaactttagttctcttccttactaacgataaaacatatttaactaaaccataatttatttacaaacaaaacaaaaaagacgagagagagaaaaaaaagccgtcatctgatctcttcaaaaacgcatcgtattctctcacatttttgcatcacattcgtttcttgaatcccctctttcagagagagaaagagagtcagagagagagagagagaga

SEQ ID NO: 8118 - DNA, 3000 bp, Unknown
  misc_feature (1)..( 3000): cDNA_ID_3047667_gDNA_ID_1621194_Annot_ID_174674 3000 nt of promoter + ATG
caaaatcaggaaataacgtgtacatgtgtatatcaaccgaacaggtggaccgtagatatcgactcaacaaaaaactacttttatgagattattacaagaactgaagaacatatgattaaatctaaagactgaacaaaattctctgcttattttgcaatttccaactgtaattcatttacattattttctaaacaccatttactggctagtatcttaacaacaacaggacaaaacacaaacgtttgttttcaacaatatcaaaattataaacgaactatatacttattttcgttttttctcttttgttagctaagccaaaactacgccgtttgacgatggagggatcaacgcctgatgctcgaagggctctattactgtaaacctccagcacttctgttccacgaaaggtacgaggggtctccgagttgcctgaaaccattaatacagaagatcatttcactgtacacgttccaaaatctgaaaagtgtaataatgtcttaacaaaatgaagcatgcatgaccctgagagtgacgtaccttggcttaactagatacaatacggcaaatgtaacagccaagaacaagcaaatactgcctacagtcagataagcaatcccgaggaaatcattccttccgccgagccagctagttgttgacagcactagcttcttctgcccattgaagctgtaagtgttgtagttgttctgcaacaagaccgttatggtatcacccgcgtgtaggtctgtctcaatcttcccatacagcttcctaaacgttggcaaagccgcggttcgcatccagactatgaggtcttcttgctcactcaactatccaacagacaactcttacacttgttaaaatcctatcagaagaaggaatctaaattgatcgatattcaaggattttttaccggtttagaaatattaagagttccaccgcctattggtgctcctttctgaaaatttttagggaagacatttttcccaaacttgttttctctgtcactcttccatgagatacctttcttattcacaagaagttgttggctatttcttgaaaagctataagtatcgttgaacaaactccaagcaacaagaccacatggcacaattggttctccacccacattatcctcaggtgcacaggtcttcacatcatgctcttcttttggacttcttagttgtgcatcgtttcgacttttcacatacctaatcatatacaatcaaccagaggagtaactgtattaatgcagggaaagtaacaggcaaaagcgataactattactaagcagataaggcaaagtaccgtctatggttttggtagaaattctcaagttggtagtatacatagacaggatgcttcatagcttttgtcacctgaaaaaaatgaaaggctttagaaagagccatacctagaagaacagctaatatacacaatcatagaaggaactaaattgccatagaagaagacatgtaccgttattgttctcttacagatcttatctccttcaccctgtatgtaagcgaccatgttgtttctagaagatgttggaatacagtctgtgtcatatcgatcaacaatctcgactaccttcaagtatgaatgaaacatatcctcaataaaaccacaaaaccgaagctggaaaataaaccattagaaaaggcagaaaaacaatagcatgatgcacatactccctgagaagcaaataagcagatcactccaaggggaatgaagacaaccccagcgacaagaaatgtcaagatcacctgcaaatggccatgaacaataagaaaacagcaaaaagagtaagagtcatccttttccactattgtaacattgaacttacccatcttggagtaagaattggcttgcacgctggaagctcttgctgagtaaacctagaatctggtaaagaaaattggttccttgtgaagttaagaacagagaatccaaagcaaccatacagtttgtttaatgggagaacaatgtttaaagttttcgaacaaaagatttcaaccaatgtcacatcaaaacccaacaactaaacgtgagtttcaactacacggtgtaggacaacttgaaaaaccaagctgatgaacctatacacctcttgtatatacgaatctacatcaaacccagagtatacaagaatgctattagaaatcaaagaaacatgcaaaaacacatggtgatcgaggtatagcaacaccatcaacagagaaatttttgtcaattcaatacgaattccaggaaagaaagaaaaaaagaagacgaaatttctaaggacgatccatgactatacaaaaagttcgaccaaatcagaagattagaaggatagatagagatagaaagatcacattttggtcgcttggaggtttttttgacaccggaaatctcagacgatccgcctcctccgacggtggaagatgccgcggtggaactcatcaccgaagaaattgattagaaatgaaatctcctctacaactatattccgaatcgaatggacggcatgagtcgttttgggaagaacagatcctacgcgaatgaggggaagaatgttaggttaggcttatgaaacatatctacttggggaagatgtatagatcttttagatgaagaagcaaaactctcgacaaggaaaaaagaaagacgactttgacaaatgctgttatcatgggagggaaaaataaaataataataagccaatttttatgttattttttaaagggcaatttgggtaaagaataaaaaacggaagttttcgaacaaacccggcaaatgcggttaaactgccacgtggattacacgtcattaataattaacccactcgaatacagtcaaataacccacctgtcatttttgacggatccaattttgaagatattttacttgtaaaaaatctcttgacaacatataatttcgttgcctagtagcttcttcacagcttctgatctcactagtgttcgtcatctttgttcgattgaagtttgggaagtggtg

SEQ ID NO: 8119 - DNA, 3000 bp, Unknown
  misc_feature (1)..( 3000): cDNA_ID_1398634_gDNA_ID_1621194_Annot_ID_174673 3000 nt of promoter + ATG
attcactactagtggcatagatacaaataacagaatgtacacaaatatgattagagaaacctgtggactcgtaagcaaagcatccccaatttcaggagcatttcccatgaccacattaagtgccccctattgaaaataataatgcaaatgaaacatgaagtgttacaaatacaaaaaaaaaaaaaaaaaaaaaagagcaaaaccctaaagagatggtctgcccaaagagttcattagcacaaaagaaacttcgtaaaaaactagcctttaaaccacttaatcctacatcaatgggtccatacatcagatagtagccacattgacgacaatacaaactcttggagatgggctgatcaaatattcaaatcagattacatgtaaaacggaaagactactgtgttcgaacttaacacattattggttatttccctgacatgaggaaatccatctagatgtgaccagagacgctagttggttgtatagttcaagcctaatataaaagattaccggaggaactccagcttgaagtgcaagttcagccgcagcaagtgctgttaggggcgtaagttcagatggtttaacaaccaccgtgcatccagaagcaagagcagggccgacctacaataccatttaccatctacatcaaatttaatgaaaaaagttctacatactcactgggtactaggcagctatttacagaaagaagaaggtaaattggaatggtaaaaaaagcaagaccttccgagtaatcatggctaaggggaagttccaaggggtaattgcaccaacaacaccgacaggctgcaaagaaaatcaagagagtcaagcaattgagatgtatagtaaacacttgcgattacaaatacagccacattgcatggaaaaaaaagtacacgaggaatatccacatataaaatggaattcgcaaagcaaggttaaggttctccaagttcatatcacattgctacaagacttagaaaattgcaaaaaaaaattcttgggaaggtgtgggaatgcagagccaagtcacaggtttccaagcccagatagcctggcaattatttaactacgcacctacaagttaagcttagggtgcagaactatgtcactacaaaaaagctgcatgtattaaatatagaagcatgaatggggaaacctgttttagaaccaacagtcggcgatcagacagattcggaggaattatatcaccatatacacgttttgcctcctccgcatagtactcaataaaacttgccccatatgctacctgtaaactaaattgcagaatcatatattgcatttaagaaacgattgcaacagttgagacaagcctaaacagcacattcaatgttctcaaataaaaaatgaatcattaacctctccgatggcttccttgagtggttttccttgctccaaagttataagttgtccaagttcttccttgtgtgcaatcaggaggtcatacctgtgtttggtgaaatgaagtggctcagaaccttataatcctaaacatccccatccaacactacaaaagtaaaagagaacgcattgctacgggataaaagattgtaccatctccgtaaaactttactcctctctccagcagtcaatctgctccaagctgaatgtgataacatgtaagagcattagagcaaaatgttcagcgtgaatagaagtgaccatcaaacattgagcaggagagacggaacagtttaaggtagaattaagaagctcgaaaagaaagaagctaaagtaatgaagaagagaagcatacaagtaaatgcttcataagaagaagcaatagcatcatttgtctcttttgttcccatacatgcaacatcagctataatttcaccggttgctggattgttaacctgtcaggaagaaaacatgatgtcaacataaagcattccaaaataacatccccaaaacaaagagagagggtaaaaggcagagttgtatgaccttgattgtcttattgtcatacgagtcaagccacttgcctccaattagaccttgagttcgtaatagaccagaactcctaagcttttcagaaacgctttgtgcgtccatactcatctgataatcaattgaattaacagagtatcattatcataacgtattcacatttgttctttaacaaaaacatccggaggaaacccaattcacttttcctccatgagaccacaagatccgagaaatactagaaaaactgaattcagatatataaccattgttctgattttgaaaccactcgatccttttctccgtgagagactgcggacgaatccacgagtaaatatgtaaatacagaagaatcgattgagaagacagacgatttacctggcgacactgagaagagacgaggaggagggaggtatgtgacgagatgagctttcgacaaccgccgatggctacacgcgctgctgctcctattaccatcaccacttcccaaacttcaatcgaacaaagatgacgaacactagtgagatcagaagctgtgaagaagctactaggcaacgaaattatatgttgtcaagagattttttacaagtaaaatatcttcaaaattggatccgtcaaaaatgacaggtgggttatttgactgtattcgagtgggttaattattaatgacgtgtaatccacgtggcagtttaaccgcatttgccgggtttgttcgaaaacttccgttttttattctttacccaaattgccctttaaaaaataacataaaaattggcttattattattttatttttccctcccatgataacagcatttgtcaaagtcgtctttcttttttccttgtcgagagttttgcttcttcatctaaaagatctatacatcttccccaagtagatatgtttcataagcctaacctaacattcttcccctcattcgcgtaggatctgttcttcccaaaacgactcatgccgtccattcgattcggaatatagttgtagaggagatttcatttctaatcaatttcttcggtgatg

SEQ ID NO: 8120 - DNA, 3000 bp, Unknown
  misc_feature (1)..( 3000): cDNA_ID_3047671_gDNA_ID_1621194_Annot_ID_174671 3000 nt of promoter + ATG
agcatatatgcccattgccatacatatatgtatattcttctactatcaacataagttagacagatcaaaattggttaaatatggtaaaaatttgcacattgtctccagtaaagtgatcttctgtgacaacgaaagtatgcaactaaagtgcgaatctttatgagaaacagaaccttatatccttccacaggttaccttgcaaggattctttgaggtttttgttttggtttgtacacatgcacatgacacacacacacatacgcgatatatataaagaacgagagagcgaagagacaaatatttaacctatcttggtcctgtttctttgtcttcttactcttgagagtgtatagctaattggttttatttctcttttggtattcatcttaaaaccatggaatcatatcgagtcttcacaactatttgtcttcttctttgtctctttctctcagccaacttcttcactcattatggtaaaatcatctctgtctctttctttctttctctctatccaactctatctctaaaagcatttgatattgattatgattttcttatatagtagtagatgcaagaaaaagcgtgggatttgagagagagccaaagaaggtgatgatgatcaaagcattaaagcacacatcattgttacagaaaatgatgacacagctcaatcttgctcagcctttagactactcttcatcctccaacactcaaccttatggcgttagcacaactctcactctacctccttatgtttcacttcccccactttcagttcccggaaatgcccctcctttttgcattaatcccccaaatactcctccttcctcctcttatcctggtcttagcccacctcccggcccaatcacattacctaacccacccgactcctcctctaacccgaactccaaccccaacccacccgaatcatcctctaacccgaacccacctgattcatcctctaatccaaactcaaacccaaacccacccgttaccgtccctaatccacccgaatcatcctctaacccaaacccacctgattcatcctctaatccaaactcaaacccaaacccacccgaatcatcctctaacccaaacccacccgttaccgtccctaacccacccgaatcatcctctaacccaaacccaccagagtcatcctctaatccaaacccacccattaccattccatacccgcctgaatcctccagcccaaacccgccagaaatagttcctagccctccagaatctggttatacaccagggcccgttttaggcccaccttactctgaaccgggcccatcaacacctaccggatcaattccaagtccatcatcggggtttcttcccccaatcgtttatccgccacccatggcaccaccgtcaccgagcgtaactccgacgtcggcttactggtgcgtagctaagccctcggtccctgacccaattattcaagaagccatgaactttgcatgtgggtcaggagctgattgtcattcaattcagcctaacgggccttgctttaagcctaatacattgtgggcccatgcttcgttcgcctacaatagctattggcaacggaccaaaagtacgggtggctcgtgcacgttcggcggcactggcatgcttgtcaccgttgatccaagtaagagaaatatttgtttatcaactattatttattggtaatattcatttttttaaacaatgttattgaatggcaaacaggctttaacgggtgccattttgatttcttctgatgcatgaagacgaagacagctctcactttacattttgttggatacgaataatatcaaagaaatctagatataatatgtttaggtgggtcgctcacttgtaagttgaaaccaattaaagcttatttcttgggaatggcataattataaatcttatgctaaatacgtatattgcttttgctaatggaattaggtcttctagacttgtggtacgttgcatctacttaactactatcactaataattcctttatttatacacacatcccttttctcccacaatgatttagtagctttgaaataaagtaatatacgcattctcagtttctcaccacgacatctttttttatttatagaaaaacttctacgccggtctattatctcaaacacgtgaaatgtcaccctgctaggttttgctgttgattagcgttgttcactaattttgtactaggtattcaaaagaatcgcaactgcagatttaagtgagtatatatgaaagagtctcaacaatgtaagtgaaacagtttacgtaggaacaatgtaacttgatgtaccttattctgttatacgaaaaacattcgtacaatagaaattaatcgttacaaatgtgggttaattctaccgtgtgcagatattgcgtgagtactttaatcacttgaatattttggttcatgcattttgttcatggtgaactagcaaaaaattagttgctataaaacaatatggcctttttagtaaccaagtaattactggtctagtggcgttttgaagacatatgaactgtggtttcgaactctgtgggtgaaaaaaaaaaaaaaaattttgtattgatcagaaaaattcggcaaaatccagagacctaatgttaaatggatacaaaagaaaaaaatgaatataatgttcgttcagcatttttgttttgtattgtattctgtacctatggaaaattagtttttaaaccagaatggaacaaaaaaatcgaatatatgaaaaagtggtaaactcaaaatcggcaaaaaaataaaaacagaaaaaaggtgagaaaataggaaaaaggtaaaaaagtaaaaaaaaaaaaaaaaggaagaacccttccgatttgatttgattgggactatataaagggaactctataacatcatctctctcacaagtcgcaacgctccaacgacttcaattcaatttactttcgattttgtcctcttccaaaaacccttccgcttaaaccctaattcacttcgccggcc

SEQ ID NO: 8121 - DNA, 3000 bp, Unknown
  misc_feature (1)..( 3000): cDNA_ID_3047679_gDNA_ID_1621194_Annot_ID_174668 3000 nt of promoter + ATG
tacatcttcgatgatccgtggaagaaccgcgaaagtaattcccagaaatgtcatttttacgcttagtaggagttccatttctgagtctccattgatttctccgagtcgaataaaccctaaattagccggtagtttctcgttcaacatccgattattgagctatttcactgttagaaatggcttttgtcccgattgttctgtaccgagagaccctaattttgttggattgactacacaatgtcggagtattgtcaggaggttttgtagtgaaaagattggaagtagtgaatctagtggctggacagaggaggttgagtatttagatgagtcgggtagtgtactacacagtggtaagggaataagatcagtagagccagggcttgatgaccatgtaatggttggtggattgaagaagccttacatgaatgcttcttctgttgcaaagattgttgaagttgttcagaggtggaaatggggaccggagttggagactcagttagataaactccagtttgttccgaatatggttcatattacgcagtctttgaagattgttaaagaggttgatgcggcgctgagtctgtttaggtgggctaagaagcagccttggtatctgccttcggatgaatgttatgtcgtgttgtttgatgggttgaaccagggaagggattttgttgggattcagtcgttgtttgaggagatggttcaagactcgagtagtcacggtgatttgtcgtttaacgcctataaccaagtgattcagtatttggctaaagctgagaaactggaggttgctttttgttgtttcaaaaaggctcaagagtcgggatgcaaaattgatacgcagacatataataatctaatgatgttgtttctgaacaaaggtctcccgtataaggcatttgagatttatgagagcatggagaaaactgatagtttgttggatgggtcaacttatgagctgataattccaagcttggccaaatccggccgtcttgatgcagctttcaagctttttcagcaaatgaaagaaaggaaactccgaccaagctttagtgtgttttcttcgcttgttgattcaatggggaaagctggtcgattggacacatcaatgaaggtttacatggaaatgcagggatttggccataggccatcagcaactatgtttgtttccttgattgattcatatgctaaagctggtaagctggatactgctcttaggctttgggatgagatgaagaagtcaggtttcaggccaaactttggattgtacacaatgatcattgaatctcatgcaaaatcaggaaagcttgaagtagcaatgacggttttcaaagacatggagaaagctgggtttttaccgacaccatccacatattcgtgtctattggagatgcatgctggatctgggcaagtagactctgcaatgaaaatctataactccatgactaatgctgggttaaggcctggcctgagcagttatatttctcttcttacacttctggccaacaaaagacttgtcgatgttgctgggaagatactactcgagatgaaagcaatggggtattccgtagatgtctgcgctagcgatgttttgatgatatatatcaaagatgcttctgtggatcttgctctgaaatggcttaggttcatgggttcttcagggatcaaaacaaacaattttatcatcaggcagttatttgaatcatgcatgaaaaatggtctatacgattcagctaggcctttgctggagacactcgtgcattctgctggaaaagttgacttggtgctttacacttcgattctcgcccatcttgtcagatgccaagacgaagataaagagagacaattgatgtcaatcctcagcgctaccaagcataaagctcatgcctttatgtgtggtctcttcacaggtccagaacagaggaaacaaccagttctaacgtttgtcagagagttttaccaagggattgattacgaactcgaagaaggagctgctaggtactttgtgaatgtccttctcaactaccttgtcttgatgggtcaaataaaccgagctcgatgtgtctggaaagtagcgtacgagaacaaactctttccaaaagccatcgtctttgatcaacacattgcttggtctctcgatgtgagaaacttatctgtcggagctgcgctcatagccgtggttcacactctccacaggttcagaaaacgaatgctttactacggagtagtcccgagacgtataaagctagtcacaggaccgacattgaagattgtaattgctcaaatgctgagctctgttgagtcgccttttgaagtcagcaaagtcgtcttgagggcaccaggagagttggtgatggagtggttcaagaaaccgatcgtgcaacagtttcttctgaacgagatcccatcacggtctgatatattgatgcataagatgaacgtgatgttcccaagctcggctcctgagcttagatctatgtcacctcccaaaccactcatgtcatcgaaagcgttctaacaggggagacaaaagtcatgggtttttgtaggcgggttctctgtttcagatctctcattgttaatacttgtctgaaaatataatggaaatgatatttacgtctttaaatcattgttagttcatttttgttcgattacgtctttaatgtctccgagtaaagcttacgtccttatcctggataggaattaatctgtcccgagtattcctacgttcttatcctggataggaattaatctgtccatgtatccaaacatcacctctcagttaatatctccaatttacacgacgcgctaaaggtgagaggagatctcacttgccttcttcactcactctgcagcaacttcgagatcaagttaaaggtcagattccttaattctccatttcttatttgcttcgttgcagagaagaattaggttttcccgatcttcggattctgattctgattttcttttgcgattattggcttggcgataagaatg

SEQ ID NO: 8122 - DNA, 3000 bp, Unknown
  misc_feature (1)..( 3000): cDNA_ID_1025139_gDNA_ID_1621194_Annot_ID_174667 3000 nt of promoter + ATG
cattgaagaaaaacttaagaccaagctgaaggcctaaggcatatggctcattaatgtgtactaaatatatattatcggcccgagttacggctcgttaagaaaacatagaaatgatttaggcccaacaaataatgtatgttctatattataagcccatttattattacccagctaagtcggctttgaaaagagtataggcccatttaggtgtcacgctcattagggtttattgtaacctagaatcaaagctatataagccgtcttttccacaaatccatacatcggccaagcgagctcctcaatttttcttgtttacttgtttcctcatcttttagttattgttagaggttatcttaggatcgtagcctgtgatgtttgagattgtccgtaccatctgagtttctccttgacgattacctccactttctgaggctttagatctaagatcattagttttatttttacttcggcgatgatgatgaaacaagattaccatcaaactttgagaggtttttcgctcgttgatgtaaacttctttttataatctgagcctagtttgtttgtttgaaatcttatgtgttacatgttatatgaaatcgttttggtgataggaaaggcaacaaattagagtctctgattcacttatgtcaatagtggataaagcgctgtacgttgccgagatagatatggcgatattctggtacttggactagttttgatagttccatgtgcattcaaaagcccttacatgtttctctcaacttattcccattagtatatgtattttgatttggtaaaggcaacaaattagagtctctgattcacttattcaatagtggataaagcgctgtacgttgccaataattacttggtccaaagatctcccaatcggctttcagtcttattttagccgatatgatcgatgttcctaaattatagattttgttacgtgttttcatatagctgagctgaccatatcatgctatttaccaaatctttttgatcaattacctgacacattgacagacgatcgatttttagacactgaaatatgggccgaaattttgaaggagtaatgtctggtaaagcaatgtttgataatgttatggactgctgcgcttgtagcagttagatttcattgggttataagatcgaattcaatatcccctaaaaagattgatgtaaactgtagctttgtagcagatcataaattatttcataaaacagctttcgacgggaaagtttataattttgatataggaaccggataataattgtatcagtaattcttaatcgggctttggatagtcccttcctttttagtgaattcgaatcgaaatgcaaaaataatgaggctgacgcgcttaattttctcaaatatccaaaaatggccaatttcaaaaggggttacctacagatttgtggcgcgtggtaataactcgcttatagtgcaagtggttattttgttttctaatagttaattatttaccatacaaattgtcttctaatgtgggcttactaaatactttacggccttttcgttttcaggcctagggagttaggcccattttacatctttcttgtcggtttcatttttaatgttcgtatattcgagctcttttctcgtctgtacaatgaacaaagttttactgagaacaataaagatactcaaatcattcatagggtgatcaattcgtataaacttaaattttgttcgaggattaaagtataatttataatgcctattaaggttctttgataatgctatgagcccaattttacgatcgtcgtattctatgctaccatcccattggacaagtacgatgccatattagactatttagttcaattgtctaatttaattccgaatttaaaaggccttaaataaataaatatagtaaggtttgggcgaaggttacaaatcatttcactctttcagaacacaaaatagcccaaaacatgtttcgacgagcaaacttaaaatttgtttatgaaaaccgttacgcgtataagagtaaaaaattgtcgtaactgggctagaaagagctaacgatttacagatcttaggtgcaaaattacttttcgaattccttaaactacagagataagtcgagggagagttaaaacttagaagcaccaaaaaaaaataaaaaaaaaataaaaaaacttaaaagcatcacgcgctagttgacaaaaaaaaaaaaaaaaaaaacatcacgcgcttactttttcgaactatacaaaaatagctaatttcgaaagggggttaaacctacagatttgaggtgcgtgctgataactcgcatatagtgcgcgtggttattttattttcaaacggatacaaatatcgctagtgtgggctttcttaataccggtctttttattttttgggcttaggcccagtttacacgtgtcttatcattttatttttttatgtttttctatgcattaaaaaattccttatggcaaggacaataacaaaaaaaattcattaaagatcacatagtattgtaaatgtgagattaaacatgaaaattttattttccaaaattactgctttttaatgcataagattatacttttacggtactaatgtacaaatattttccttgaaaaatcatttactaaaaataattaaataaattcgtacgtcttttctttttggtcggaattagtacgtcttttctttcttttttggtggctatttattttgttcatattagatcaaacttaggagaaatataaatatatatagatatcaaataaaaagtaagaaacataaaaatattagaagtcaaaataaagaaaagaaaaaatacaacgcgaaggtttgattaccactcaaaaaacgagcagctgtttatcttccaacaaagcttcttcgtgcatcttcgctcttctcaactcgtcatcctctccctctgattctcttaagtcgccttgaaaaattaagacaaaacaacaacaaaagaacaagagaagctctaaaatccagcagct

SEQ ID NO: 8123 - DNA, 3000 bp, Unknown; identical to SEQ ID NO: 8114
  misc_feature (1)..( 3000): cDNA_ID_1838761_gDNA_ID_1621194_Annot_ID_174665 3000 nt of promoter + ATG

SEQ ID NO: 8124 - DNA, 3000 bp, Unknown; identical to SEQ ID NO: 8113
  misc_feature (1)..( 3000): cDNA_ID_3047687_gDNA_ID_1621194_Annot_ID_174663 3000 nt of promoter + ATG

SEQ ID NO: 8125 - DNA, 3000 bp, Unknown
  misc_feature (1)..( 3000): cDNA_ID_1807141_gDNA_ID_1621194_Annot_ID_57531 3000 nt of promoter + ATG
gttttcatacaaacaaatgttgtcgaccttgttttattattatattgtttgcttgatattcatcgtttttatagggcggtgccaagaaagttataatttctgccccttctgctgacgcacctatgtttgttgttggagtaaacgagcacacataccaaccaaacatggatatagtctccaatgcaagttgtaccaccaattgtcttgcccctcttgccaaggttggtaatgttgcacaataattttaccctcatttcattgctatgagattcattaaggtcaactaaactgtatttggcaggtggtgcatgaggaatttggtattcttgaaggcttgatgacaactgtccacgcaactacaggtctatataacttactctcctgctgcagatcactgaatgttgataacctgattacactaacctgtgtgttttggttattttttctttcagctactcagaaaactgttgatgggccatcaatgaaggactggagaggaggtcggggcgctagtcaaaacatcattcctagctcaaccggcgccgcgaaggtacacaaaaactcacatggttatcgcaagcatgtaattatcctaaatcgggaatcatatctgagctgtggttttttgatcaagtaggctgtaggtaaagttcttccagaactgaatgggaaacttacgggaatggccttccgtgtaccaacatcgaatgtttctgtggtggatttaacttgtcgacttgagaagggtgcctcttacgaagatgttaaggcagccattaagtatgcttcctaaaattttattgcccgaccagatatcgtcatcgaaacattatcgtttaatgtagaactcttaataacctctcatggtttaatgtaaacctctaacaggcatgcctcagaaggacctcttaaaggcattctcgggtacacagatgaagatgtcgtctccaatgatttcgtcggtgattcaaggttggtctctctccttttcttcatagtcatctgaatctttttttgtggttgaccaatgtggtgattccaatttggttataacaggtccagtatctttgacgccaatgctggtattggattgagcaagtcctttgtgaaacttgtctcttggtacgacaacgaatggggttacaggtacacttttgtttctcatcttatatttctcatcctagctaacagttctaacacttaaaaatcttctcccattttacttacagcaaccgagttcttgaccttatagagcacatggctttggtagctgccagccactaaatacacacaccagttcttgcagaagcttgagtctttctgctttttgcgtaacctgctctacaaagccggtttggatttgttcggttcaattaggtgccactgtgctaggtgttttgaaatatttggcttgaatctcgagcctttactctatttttgttctgttccagtatcagcaaccatgatttggtccaaaagactgaaaaactgtgcgacttacatctatgaataaggggctaagctagttgtactttaccaaaaatagcttaccagtataagcaacgtttggatacttcttgatagcgcatcgttagctttgcccgtgcttatgacaaaagatcactaaccactgaaacatattttttacaaatgaaaacagaaattgaacttgattagcctgtgtaaccatgtttcagaagaaagcttactcgttttttcatccgacgaaactcgtttggtattggcgattcctggaagggaagcatgaagatttatccattgagatggacaacctcatcatctatctcctctgtcttgtttctgatctctttcaaaacttgtttgtcttttctctatcatcaccacttaagaaaaggtggctgtttttgagttaacggaagtagactcactcaagtgaggctatagctaaggaaggacatgagttatttattggccaccatgcggataaggagaactcttgaagtaaggttactcatatattttcacttgccccgatatttcatggaaactacaacattttccacgaactattgtttattacatatgttttctaagactttatttattacagatatcgcctgaaatttcgtattattacaaaaacacacgtaaattttgtcaattccaaatatctccaaatttttgtttgttacatattgttccctcaagtttttgtttattacagattcccctgaacctctcatggtttgatgtaaacctaaaacctcaaaatcaaacaagtttgtcacagaaagatatatagtctccaatgatttcgtcagtgattcaaggtctctcttctttctctaaatacgtaacaactaacacggaaggcatttcattggctacaattatttcaaaatttatcttacaaaaaaggataatagagtgtgatattgttcatcagagacgtccacgtaagggtaaactaatcagtatatggacaaaaaggtacttgtttatctacaccaggaagaaaaacaataccagttttccggtccacaacttttgcatcaccatgcatccgcagccacgtgtgttcttatgaatattaaaatctacttatttcgttatacgacaaacgaaagatactgctttgttgcgtagacaaacaaacaaaatctcttgataataccagatattcttaattaattagtacgttttaaactcaacatacccataagaaaatccagttagctcatggtttcatgttttccaatagatatatgtgtatataattaaacgctttgcatcgtttgtgatttgcatgttggaaataataatgttttttttttgctaatcaaggtttgattaaggaaaaggagtttggactttggacctttctactacaaatacatgtggccctttttggccaacaccaaaagttccaaaaaagaggccaaaaaataagcaacaacttttgattctctcgtaacttcccccacaaaatcagcagagcgagagcgagagcgatcggtt

SEQ ID NO: 8126 - DNA, 3000 bp, Unknown; identical to SEQ ID NO: 8122
  misc_feature (1)..( 3000): cDNA_ID_1025139_gDNA_ID_1621194_Annot_ID_57532 3000 nt of promoter + ATG

SEQ ID NO: 8127 - DNA, 3000 bp, Unknown; identical to SEQ ID NO: 8121
  misc_feature (1)..( 3000): cDNA_ID_1810479_gDNA_ID_1621194_Annot_ID_57533 3000 nt of promoter + ATG

SEQ ID NO: 8128 - DNA, 3000 bp, Unknown; identical to SEQ ID NO: 8120
  misc_feature (1)..( 3000): cDNA_ID_3047671_gDNA_ID_1621194_Annot_ID_57536 3000 nt of promoter + ATG

SEQ ID NO: 8129 - DNA, 3000 bp, Unknown
  misc_feature (1)..( 3000): cDNA_ID_1810467_gDNA_ID_1621194_Annot_ID_57537 3000 nt of promoter + ATG
tggcttattattattttatttttccctcccatgataacagcatttgtcaaagtcgtctttcttttttccttgtcgagagttttgcttcttcatctaaaagatctatacatcttccccaagtagatatgtttcataagcctaacctaacattcttcccctcattcgcgtaggatctgttcttcccaaaacgactcatgccgtccattcgattcggaatatagttgtagaggagatttcatttctaatcaatttcttcggtgatgagttccaccgcggcatcttccaccgtcggaggaggcggatcgtctgagatttccggtgtcaaaaaaacctccaagcgaccaaaatgtgatctttctatctctatctatccttctaatcttctgatttggtcgaactttttgtatagtcatggatcgtccttagaaatttcgtcttctttttttctttctttcctggaattcgtattgaattgacaaaaatttctctgttgatggtgttgctatacctcgatcaccatgtgtttttgcatgtttctttgatttctaatagcattcttgtatactctgggtttgatgtagattcgtatatacaagaggtgtataggttcatcagcttggtttttcaagttgtcctacaccgtgtagttgaaactcacgtttagttgttgggttttgatgtgacattggttgaaatcttttgttcgaaaactttaaacattgttctcccattaaacaaactgtatggttgctttggattctctgttcttaacttcacaaggaaccaattttctttaccagattctaggtttactcagcaagagcttccagcgtgcaagccaattcttactccaagatgggtaagttcaatgttacaatagtggaaaaggatgactcttactctttttgctgttttcttattgttcatggccatttgcaggtgatcttgacatttcttgtcgctggggttgtcttcattccccttggagtgatctgcttatttgcttctcagggagtatgtgcatcatgctattgtttttctgccttttctaatggtttattttccagcttcggttttgtggttttattgaggatatgtttcattcatacttgaaggtagtcgagattgttgatcgatatgacacagactgtattccaacatcttctagaaacaacatggtcgcttacatacagggtgaaggagataagatctgtaagagaacaataacggtacatgtcttcttctatggcaatttagttccttctatgattgtgtatattagctgttcttctaggtatggctctttctaaagcctttcatttttttcaggtgacaaaagctatgaagcatcctgtctatgtatactaccaacttgagaatttctaccaaaaccatagacggtactttgccttatctgcttagtaatagttatcgcttttgcctgttactttccctgcattaatacagttactcctctggttgattgtatatgattaggtatgtgaaaagtcgaaacgatgcacaactaagaagtccaaaagaagagcatgatgtgaagacctgtgcacctgaggataatgtgggtggagaaccaattgtgccatgtggtcttgttgcttggagtttgttcaacgatacttatagcttttcaagaaatagccaacaacttcttgtgaataagaaaggtatctcatggaagagtgacagagaaaacaagtttgggaaaaatgtcttccctaaaaattttcagaaaggagcaccaataggcggtggaactcttaatatttctaaaccggtaaaaaatccttgaatatcgatcaatttagattccttcttctgataggattttaacaagtgtaagagttgtctgttggatagttgagtgagcaagaagacctcatagtctggatgcgaaccgcggctttgccaacgtttaggaagctgtatgggaagattgagacagacctacacgcgggtgataccataacggtcttgttgcagaacaactacaacacttacagcttcaatgggcagaagaagctagtgctgtcaacaactagctggctcggcggaaggaatgatttcctcgggattgcttatctgactgtaggcagtatttgcttgttcttggctgttacatttgccgtattgtatctagttaagccaaggtacgtcactctcagggtcatgcatgcttcattttgttaagacattattacacttttcagattttggaacgtgtacagtgaaatgatcttctgtattaatggtttcaggcaactcggagacccctcgtacctttcgtggaacagaagtgctggaggtttacagtaatagagcccttcgagcatcaggcgttgatccctccatcgtcaaacggcgtagttttggcttagctaacaaaagagaaaaaacgaaaataagtatatagttcgtttataattttgatattgttgaaaacaaacgtttgtgttttgtcctgttgttgttaagatactagccagtaaatggtgtttagaaaataatgtaaatgaattacagttggaaattgcaaaataagcagagaattttgttcagtctttagatttaatcatatgttcttcagttcttgtaataatctcataaaagtagttttttgttgagtcgatatctacggtccacctgttcggttgatatacacatgtacacgttatttcctgattttgattatcctttgtcgtaatgtaattggtcaaaaaagatttatttgtatggtaatgacttgtaataatctactatttattaagccagatttccagatattttcgggtcctacggtcgtcgtcagtcgtcaaggctaattcgtcgcgagtatgtatatttctctctctgtcgctttcatttttgattttattgttttcgtttcacaatctggaattgactctcactgtcactgttgatgatgatgacatctcaccaggttgctacgacgccgtttcggttgcttctggtttctttatg

SEQ ID NO: 8130 - DNA, 3000 bp, Unknown
  misc_feature (1)..( 3000): cDNA_ID_1810463_gDNA_ID_1621194_Annot_ID_57538 3000 nt of promoter + ATG
caatttcaggagcatttcccatgaccacattaagtgccccctattgaaaataataatgcaaatgaaacatgaagtgttacaaatacaaaaaaaaaaaaaaaaaaaaaagagcaaaaccctaaagagatggtctgcccaaagagttcattagcacaaaagaaacttcgtaaaaaactagcctttaaaccacttaatcctacatcaatgggtccatacatcagatagtagccacattgacgacaatacaaactcttggagatgggctgatcaaatattcaaatcagattacatgtaaaacggaaagactactgtgttcgaacttaacacattattggttatttccctgacatgaggaaatccatctagatgtgaccagagacgctagttggttgtatagttcaagcctaatataaaagattaccggaggaactccagcttgaagtgcaagttcagccgcagcaagtgctgttaggggcgtaagttcagatggtttaacaaccaccgtgcatccagaagcaagagcagggccgacctacaataccatttaccatctacatcaaatttaatgaaaaaagttctacatactcactgggtactaggcagctatttacagaaagaagaaggtaaattggaatggtaaaaaaagcaagaccttccgagtaatcatggctaaggggaagttccaaggggtaattgcaccaacaacaccgacaggctgcaaagaaaatcaagagagtcaagcaattgagatgtatagtaaacacttgcgattacaaatacagccacattgcatggaaaaaaaagtacacgaggaatatccacatataaaatggaattcgcaaagcaaggttaaggttctccaagttcatatcacattgctacaagacttagaaaattgcaaaaaaaaattcttgggaaggtgtgggaatgcagagccaagtcacaggtttccaagcccagatagcctggcaattatttaactacgcacctacaagttaagcttagggtgcagaactatgtcactacaaaaaagctgcatgtattaaatatagaagcatgaatggggaaacctgttttagaaccaacagtcggcgatcagacagattcggaggaattatatcaccatatacacgttttgcctcctccgcatagtactcaataaaacttgccccatatgctacctgtaaactaaattgcagaatcatatattgcatttaagaaacgattgcaacagttgagacaagcctaaacagcacattcaatgttctcaaataaaaaatgaatcattaacctctccgatggcttccttgagtggttttccttgctccaaagttataagttgtccaagttcttccttgtgtgcaatcaggaggtcatacctgtgtttggtgaaatgaagtggctcagaaccttataatcctaaacatccccatccaacactacaaaagtaaaagagaacgcattgctacgggataaaagattgtaccatctccgtaaaactttactcctctctccagcagtcaatctgctccaagctgaatgtgataacatgtaagagcattagagcaaaatgttcagcgtgaatagaagtgaccatcaaacattgagcaggagagacggaacagtttaaggtagaattaagaagctcgaaaagaaagaagctaaagtaatgaagaagagaagcatacaagtaaatgcttcataagaagaagcaatagcatcatttgtctcttttgttcccatacatgcaacatcagctataatttcaccggttgctggattgttaacctgtcaggaagaaaacatgatgtcaacataaagcattccaaaataacatccccaaaacaaagagagagggtaaaaggcagagttgtatgaccttgattgtcttattgtcatacgagtcaagccacttgcctccaattagaccttgagttcgtaatagaccagaactcctaagcttttcagaaacgctttgtgcgtccatactcatctgataatcaattgaattaacagagtatcattatcataacgtattcacatttgttctttaacaaaaacatccggaggaaacccaattcacttttcctccatgagaccacaagatccgagaaatactagaaaaactgaattcagatatataaccattgttctgattttgaaaccactcgatccttttctccgtgagagactgcggacgaatccacgagtaaatatgtaaatacagaagaatcgattgagaagacagacgatttacctggcgacactgagaagagacgaggaggagggaggtatgtgacgagatgagctttcgacaaccgccgatggctacacgcgctgctgctcctattaccatcaccacttcccaaacttcaatcgaacaaagatgacgaacactagtgagatcagaagctgtgaagaagctactaggcaacgaaattatatgttgtcaagagattttttacaagtaaaatatcttcaaaattggatccgtcaaaaatgacaggtgggttatttgactgtattcgagtgggttaattattaatgacgtgtaatccacgtggcagtttaaccgcatttgccgggtttgttcgaaaacttccgttttttattctttacccaaattgccctttaaaaaataacataaaaattggcttattattattttatttttccctcccatgataacagcatttgtcaaagtcgtctttcttttttccttgtcgagagttttgcttcttcatctaaaagatctatacatcttccccaagtagatatgtttcataagcctaacctaacattcttcccctcattcgcgtaggatctgttcttcccaaaacgactcatgccgtccattcgattcggaatatagttgtagaggagatttcatttctaatcaatttcttcggtgatgagttccaccgcggcatcttccaccgtcggaggaggcggatcgtctgagatttccggtgtcaaaaaaacctccaagcgaccaaaatg

SEQ ID NO: 8131 - DNA, 3000 bp, Unknown
  misc_feature (1)..( 3000): cDNA_ID_1810459_gDNA_ID_1621194_Annot_ID_57539 3000 nt of promoter + ATG
tattactgtaaacctccagcacttctgttccacgaaaggtacgaggggtctccgagttgcctgaaaccattaatacagaagatcatttcactgtacacgttccaaaatctgaaaagtgtaataatgtcttaacaaaatgaagcatgcatgaccctgagagtgacgtaccttggcttaactagatacaatacggcaaatgtaacagccaagaacaagcaaatactgcctacagtcagataagcaatcccgaggaaatcattccttccgccgagccagctagttgttgacagcactagcttcttctgcccattgaagctgtaagtgttgtagttgttctgcaacaagaccgttatggtatcacccgcgtgtaggtctgtctcaatcttcccatacagcttcctaaacgttggcaaagccgcggttcgcatccagactatgaggtcttcttgctcactcaactatccaacagacaactcttacacttgttaaaatcctatcagaagaaggaatctaaattgatcgatattcaaggattttttaccggtttagaaatattaagagttccaccgcctattggtgctcctttctgaaaatttttagggaagacatttttcccaaacttgttttctctgtcactcttccatgagatacctttcttattcacaagaagttgttggctatttcttgaaaagctataagtatcgttgaacaaactccaagcaacaagaccacatggcacaattggttctccacccacattatcctcaggtgcacaggtcttcacatcatgctcttcttttggacttcttagttgtgcatcgtttcgacttttcacatacctaatcatatacaatcaaccagaggagtaactgtattaatgcagggaaagtaacaggcaaaagcgataactattactaagcagataaggcaaagtaccgtctatggttttggtagaaattctcaagttggtagtatacatagacaggatgcttcatagcttttgtcacctgaaaaaaatgaaaggctttagaaagagccatacctagaagaacagctaatatacacaatcatagaaggaactaaattgccatagaagaagacatgtaccgttattgttctcttacagatcttatctccttcaccctgtatgtaagcgaccatgttgtttctagaagatgttggaatacagtctgtgtcatatcgatcaacaatctcgactaccttcaagtatgaatgaaacatatcctcaataaaaccacaaaaccgaagctggaaaataaaccattagaaaaggcagaaaaacaatagcatgatgcacatactccctgagaagcaaataagcagatcactccaaggggaatgaagacaaccccagcgacaagaaatgtcaagatcacctgcaaatggccatgaacaataagaaaacagcaaaaagagtaagagtcatccttttccactattgtaacattgaacttacccatcttggagtaagaattggcttgcacgctggaagctcttgctgagtaaacctagaatctggtaaagaaaattggttccttgtgaagttaagaacagagaatccaaagcaaccatacagtttgtttaatgggagaacaatgtttaaagttttcgaacaaaagatttcaaccaatgtcacatcaaaacccaacaactaaacgtgagtttcaactacacggtgtaggacaacttgaaaaaccaagctgatgaacctatacacctcttgtatatacgaatctacatcaaacccagagtatacaagaatgctattagaaatcaaagaaacatgcaaaaacacatggtgatcgaggtatagcaacaccatcaacagagaaatttttgtcaattcaatacgaattccaggaaagaaagaaaaaaagaagacgaaatttctaaggacgatccatgactatacaaaaagttcgaccaaatcagaagattagaaggatagatagagatagaaagatcacattttggtcgcttggaggtttttttgacaccggaaatctcagacgatccgcctcctccgacggtggaagatgccgcggtggaactcatcaccgaagaaattgattagaaatgaaatctcctctacaactatattccgaatcgaatggacggcatgagtcgttttgggaagaacagatcctacgcgaatgaggggaagaatgttaggttaggcttatgaaacatatctacttggggaagatgtatagatcttttagatgaagaagcaaaactctcgacaaggaaaaaagaaagacgactttgacaaatgctgttatcatgggagggaaaaataaaataataataagccaatttttatgttattttttaaagggcaatttgggtaaagaataaaaaacggaagttttcgaacaaacccggcaaatgcggttaaactgccacgtggattacacgtcattaataattaacccactcgaatacagtcaaataacccacctgtcatttttgacggatccaattttgaagatattttacttgtaaaaaatctcttgacaacatataatttcgttgcctagtagcttcttcacagcttctgatctcactagtgttcgtcatctttgttcgattgaagtttgggaagtggtgatggtaataggagcagcagcgcgtgtagccatcggcggttgtcgaaagctcatctcgtcacatacctccctcctcctcgtctcttctcagtgtcgccaggtaaatcgtctgtcttctcaatcgattcttctgtatttacatatttactcgtggattcgtccgcagtctctcacggagaaaaggatcgagtggtttcaaaatcagaacaatggttatatatctgaattcagtttttctagtatttctcggatcttgtggtctcatggaggaaaagtgaattgggtttcctccggatgtttttgttaaagaacaaatgtgaatacgttatgataatgatactctgttaattcaattgattatcagatgagt

SEQ ID NO: 8132 - DNA, 3000 bp, Unknown; identical to SEQ ID NO: 8117
  misc_feature (1)..( 3000): cDNA_ID_1810455_gDNA_ID_1621194_Annot_ID_57540 3000 nt of promoter + ATG

SEQ ID NO: 8133 - DNA, 450 bp, Unknown; identical to SEQ ID NO: 8112
  misc_feature (1)..( 450): cDNA_ID_1810491_gDNA_ID_1621194_Annot_ID_174661 3000 nt of promoter + ATG

SEQ ID NO: 8134 - DNA, 3000 bp, Unknown; identical to SEQ ID NO: 8116
  misc_feature (1)..( 3000): cDNA_ID_1810451_gDNA_ID_1621194_Annot_ID_57541 3000 nt of promoter + ATG

SEQ ID NO: 8135 - DNA, 1398 bp, Unknown
  misc_feature (1)..( 1398): cDNA_ID_1810443_gDNA_ID_1621194_Annot_ID_57545 3000 nt of promoter + ATG
aatctaaactacgtcaaagcttgttgcagagagaccctgagacttcaccctaccaatcctttccttgtccctcacatggcacgtcatgacacaactctcgctggctatttcatcccaaaaggtatctcatttttccccaaaatttatgcatttaggcgtatttgactccaactccttaaatgtagaatcaggaattctaactatatttatttttgcttgatttgagcaatattttcatattagaatatttgttcctttgatttattattttggactgaaaagtgaaaataagtagattgtgacatacgaatctttcaaattattattttatttgtttattaactttaatatattgattgtttgatgtggatcacaggcagtcatattctagtgagtcgtccgggtgttggtcgaaaccctaagacatgggatgagccactcatctacaggcctgagcgccatataaccggcaacgaagtggtgttgactgaaccagacttacgacttgtttcatttggaactggtagacgcggctgcgttggagctaagcttggaacgtccatgattgttacgttgttgggtaggcttctccaagggttcgactggaccattcctcctggtacgacggacagagtcgagctagtcgagtcaaaagaaaatctgttcatggctaatcctttgatggcttgtgtgaagcccagattagatccaaacatgtacccgaaactctggaccggtccagcttgatcataccggttaacggcaccacatttcaattgctattgtcatgtatgagtaaaatttgaataaagtttttgtcttgaggaaaagttgaagaggaatatagcccataacgttcataaaaggcccagcccagtattgttctgccgttttaatttgagcaaagtaagcttcaagtaaagaaacgggttgagtgcaaaaatggagaaattaacttgcaagttgagattagcacataagaagagtatctaattccatcttgttcacaaagtcattcttttagcattaatgatcctatatttatatcaaatctcataagatcttcagtgtataatatatagtttaatttttttctaggttttcgttcgaactcatgtgggttcagtaaataaatgtttaagtccccatctggccgcgtcaaaaatacttagataacaacaattagtggttgacatagaaaagtaatgattgttgccgcgtagaatgaaattaataaaattataaagaacagtgaagcaataaatgtttccttggcgtcttgaagagtagtcttcttaaatattccagcccaaaaaaaaaaagattctatccattatcaagagaagaaaaaaaatctgaattccaattcgaagaagaagaagaagaagaaaggagatg

SEQ ID NO: 8136 - DNA, 488 bp, Unknown
  misc_feature (1)..( 488): cDNA_ID_1810524_gDNA_ID_1621195_Annot_ID_57547 3000 nt of promoter + ATG
aagctttagcatttaaaattattggattgatattttggtggttacgtgatgaaaaaaggttgctttttattaaggtctttgagaatggaaataaaccttttaccttgtagtattgcaaatcttagttagtgtttatcatgtcaacccaagatagttgcaaaaaacccatatcatttcagttctcatattttttcaagagtggatttctacattgatatatcctataagctcttctgacaaattatttcttgcttatctctgggtttgttccgtccctctactttatgatatctggatcttagttacctcaatgattgcacttaattaagttatgagtcgatgctaaaggaaggtgtgatcaatttactatgaaatgtgattctagaagtgttttgaaacgggcataataaacaatatttttttcctaagtagaaaataaatagttactaaacttgtcgctgggtatctacaggttttatactcttatg

SEQ ID NO: 8137 - DNA, 3000 bp, Unknown
  misc_feature (1)..( 3000): cDNA_ID_1821667_gDNA_ID_1621195_Annot_ID_174707 3000 nt of promoter + ATG
tctctgcttctttgctttaatggcgcagatacagaactagggcttagggttttcctcaatggctttacttgttagtgttgatccaacctgaggatttgtatcatcaattttacagaatctcaccactgttagctcaggacatttcctgctgcaagaatctgtttacatatacttgtgtctgagactctgaaacagacaagttcacttgtgtctgaatcatgtaatttttgtgttagtctctctacaaatgattgattcttaaattagacgaataaaccagagaaaaatgttatacattgcatttatggactgagttgtgatgtacattgagtaggtgggaaggtgctccaagcaagtttccatgggagtttaagaagacagagacaatatatttcatggaagggaaagtgaaagtgaatgtagacggatacgacgaagaagaagaaacctttgagatagggaaaggagatgttgttgttttccctaaagatatgaaagttgtttgggagataactgaagctgtgaagaagcaatatagcttagaggagtagtgactttgtagagagaatttgagtcacattgatgtttgtttgttgtacttggttactactttgaactaataatatctatggaattgcaatgttgattaggattctgattatagaagtaagaaaactatatattatatacaatttaattaggaccccaacagctcaagtacatgactgttctaagagattcttcagccttcttagccttctcgctctcaccagaggaggtaacggctgcggagacagaagacgaagagaaccttttcccttgagaaacagatctaacgttgttccggagatgttgattaaccgaccggagtatgtagttccaccgacaaagacctagttggtcttttaatgcctctacggctccgatgctcactgccactgtccatgctttgcttgtagaactcatctttcttcagagaattaaacttctttgtgttttgtgttttgtgtattgagaattgtttttgttgatgatgtttagaaagtgaagtgaattggtgtgtttatgtaagagagaagaagccaacaatattgccgtgtagttggagttaaaactagaagctgtggccgttggttttggttgtttactactgtctggatagtaaaatgacgttgttagccttttaagaacgaattggataaggggtaatattgggattctggtagttcctggattaacgagtgccgctatcatgtgcacctggttttgagattgttcacttgtttgggtttcgtgttgtgtccaagttttgaaatatagtaaatgttttctttatctccttgtagaataatgcatgttggagatgaataataatataatatcaaaaatcatttgccgaccaaaaaagtaaaaaatatattaaacacaaaatgtaaataaataaataaaaattcaatcaaaagaaaaatggttttgcgatgacttactttttttttttttctttctttcatacagaagatgaataccatttaacatgagtattcaaaaaatcaaaagtaaaactagtatcatcaaatatttccgctaaattagtaaacatatttccgctcataacaattagaatgagaattttagaatgttggttctgtgacaaccacacaaatttccgagtttagtagatttggaattggtgtttttctttgcgatttactggtatgcgctcttgagcaatcgtatacaattagagtagtaatattattttacttttctgtaaattgctttaatccgttctcagttctctttataacttctgtcaaaaatttaaaatgatataaaatttaacattttactaaaaaaaagagattgtaaaaaagaatatagagatttgttttattttatcctttaatcagtcattttataaataataaatttcgtttcaagtagtacattaatttttaaaatttttatagatttaatatacagatcattctagtatacacaaaaattaggatctatattattatttaaaaaaaaaaaaagcagctcaagtcgatgaactaaacatgggcaaaatcgtcattgaactaaacattcatagtttcagcagaaaccaagaaaaccagcagctacaaaacccactttttgtctgcactttcaaactccaaaggcacggcactttttgtctgctttctcttcttttataaacaaaacccactttgattcacttctcattcatcatcaacaaacacaaaatcgaaaccaaatcacttaaacaagaaagaaacaaagagaaatgagctctgcaagcaaaacgtggatggttgctgcaagcatcggagccgttgaggcattgaaagaccaactaggcgtgtgtcgttggaactacgtgatccgatctgcgaatcagtatctacgcaacaacttaagatccgtgtcgcaagctaagaagctctcttcctcatcaatcgattataccaacaagaccaagcaagctgaagaatcgctgaggacagtcatgtacttgagctgttggggtcctagttaatggacaatggagggatttgaaaaccctaatcatagagttttgataatgtctcttttagggtttaaaacccttaaaaaggttaaaaatgtatagaatttgctctgtaaagtgactcttgagtcttgaactaatgattaatctcttttcataagatttgttcaaatcggatttttcagttactgcaactaagtaagaaagacttaaactttgaatataaatacagagaatttggtacgttgtgtgtgacaaagatttatttctgttgatataattaggaccctaaattggaggtttgttacagtcaaaagtttgtactgagtttttactacaagttagggattttgttaaatgcttatcccatttttcatgcagttctgttgctaattctccagcttaataaagagaggttaattttgtttggtttatgtgtgtgaacatttcttgtctgagtaaag

SEQ ID NO: 8138 - DNA, 3000 bp, Unknown
  misc_feature (1)..( 3000): cDNA_ID_1822266_gDNA_ID_1621195_Annot_ID_174723 3000 nt of
tccgtgggagtgatcaaagctgatgtgttcatcatccatatctgaatattctgtatatttttgtttatagaatgaatcctattgacattaaaatatataactttggatgagtctacgtatggccttttttgagatgttgctgacattatcatatactaaaataataaagtgcaatgtggttcactcgcaatagccgcattttgtcaccatttaagggaatttactatttttgtggtgaaattatgtaaattaccacatgttaaaaaaagaaaaaatattagatctcacaacttcatttgaactagggaacggttgacattgttttttttttaaatagttaagaaaatttggaaataattttgaaaagtaactttgacataaagaaaatcttgagaattgatcttttatttgttttcagaaatgattaattttatgatgatttttcttgaatcatagaaaagtcatataggaattgctccatgaacaaagcgacaagtttctccgtcatttagaagatctgtagataacatttgccaagaaaggactcacaatcacttctcaaaatgatccagctgacgagccattgatcgaaccatcttatagctgacaagacatttaatgaaagtcgcgcttacgtcacttacactcaaaacacgttcttctttctaagaaatcgtcaaaaaaaaaaaaaaatagattgcacgaaaatgccgagaatacaacttggaatgttttaactagtcccattaattcgatattttacctaggtcaagtaacactcttataaataatccttgcactctcgaagaaaaagaaatagggagtaaggtaattcaccagttcccaccttaaaagtaaacctaacttgctatatctaaatacaacaaaatttcactcatgaggaggagaacagttcacggatcatccaacttgttctctctcattccttctttcttattctcaaatggacatcatcgtgtttcaaagattttcagcacttattacagagacaatctacatttctacatctcattcattttgtcatttgtaatcaagtcattcaagttaaataataaaaagtgtgttttttctttcaaaagtttgtaatcttttgaagctttgtcaattcaagtttattggtgtgattccatagtcttgtttgattgcgtttctagtgtgtttgtgagattcaaacattctagttcgtgtgttgttgtggattcaacgacaaaacttccattttccatctctaccatcgttccatcgaatcattcaaaccgtaggccgagaaaccgagaaacataaaccttaggtaaattccaaggtttgcatcagattgctttgaccaaggctcataagtcattacttgacaccactctatctttcacgaatttaagaatttagagagactttgtgaccttttggatatggttagatctctgttattatttggttttgagagtcattggtaattgattcaacatctttatcacttaatagtgatactttttctatgtgtttttttttgttggttctatttggcttaccctttaagaattctagtggtcttgtatcttcctatatatctaataacatatggttgtttctatttcatttattttttatatttaccgcgacacgcatcagaaaacgaacttggcaacttaacaaattagctattaatcaatggacatgacatgtacatgccaaattaaattgggcttaataaaacacgtgttcgttggaaaaaattaaatatgttttgtatttttatagttaatagtgtaacgatttatcatgatctgcgccgaaattcacgctcagacgttatatttgagttctttaaattattatttataaaaagtaagtcagaatatgaaaaaaccggaaacatcgatcacattaacttaaaagtaataatttttcattttaggatatattttggataccgacagctttgtcactacatcgaacaattttatgtttttttagaatttgttaatatgatgataccatttgatatccaataagatacttatttactttatattattagattagaatcatctacaacataaaatctaattatttagatgagtattatagatttgttacctctcgagtttaagatcgataactcatgttgttgaaacaagaaacataaaagatagttctgaaatttaaaacataaaagagagtttgaaattgaaaattatatatattgtagaaagtttatgacaagaggagaaagtatgattcttttagtatttgtttctatataatattaagaggaaaaagtaaagttcttatagaatatattctttcaagcaatttagctacttccagctaaatcattaaactcctttgactagcaaattaaataaatttaaatcatataaaggtaaaaaaacacacataaaatattagttttaagaaagatgaaaacaagtaaaaaacataaacaaccgaacatgtgtcaattgttttcagcagtctaatactcgtgtgactggccaatttaatgactatgactcactttcaactacctaacggtttcaaaacatgttaaccttgttttttttctttaaacaaaatcccattagttgtcactttaaatctctattattatagtaattattacaatctttttttaagaaacacttagtgacccatattaagaaaaaaataactttatttttaaacccatatcttatattttgtatctatccaattccttcctattatgtaaatttaattctatattattatattttgttgtgacatcttctcataaaataaataaatagctatcacaatttgatagcacctgaatacttcacctgaaactttccccacctctctctctcatcttatctatcaccattgcttcatctccaaatcttgaaattctctgttttattttcaagaaaagacagaaagtgaaacaagtcttttttttttttttttttggtgtggaacattgatatttgagtgacgatg

SEQ ID NO: 8139 - DNA, 3000 bp, Unknown
  misc_feature (1)..( 3000): cDNA_ID_3071695_gDNA_ID_1621195_Annot_ID_174704 3000 nt of promoter + ATG
ctccctttgaatttctgcgcttttcgacagtcgaaaaactttgtttagataactccaaaacacacacaatcatgtcgaatttgatcccttacctttgtgtagtatctgcaacctttctctccatcagtaacaataagcagcttaagcttatcatgcataagagacaaaacaacatcatccttctccgcatctccacgcgttagaaacgttacctcatcatcgcttacctacacatcacgaaactcgaacactaagatcatcgaaaacacgagtccggttgttacaacaaaaacaaacataccttgataatatcagcctcattccaaatacttttgatgccttctatagcagcttcagtagaaggccaaagaggcaaccgaacgttcgggtcataagagagtaagactcccgcatctttagcggttttcatcgcagccatgtgagctgttctacatggctcagagatcaagctaatggaaccatagtggaaaatcttagctttcttgataagatccttgttgagttcagattctttcaagagcatgtccgcactagggttcctgtaaaacataaactctctctcaccatctttcttcaaagtcacaaaggccaacgcggttcttgcattggtatcaaagcaaacaccttcactgttcacaccgttcttcttcaatatgttaaccaacatgtgtccaaactcatcatcaccaaactataaaagacattacacaatcacatatcacttttcaccatcagttaatagattctaacataaattatacaaaccttgccgatgaaagctgatttgccaccgagtttggtgatggcacaagcaacattagcaggagcaccaccaggggctttgagaaaaccggtggactcagctaaagaaacaccagaagtgtcagggacaaagtcgataagcatttcaccaaaggaaactatcaatggagtattagccatctttactcagacaagaaatgttcacacacataaaccaaacaaaattaacctctctttattaagctggagaattagcaacagaactgcatgaaaaatgggataagcatttaacaaaatccctaacttgtagtaaaaactcagtacaaacttttgactgtaacaaacctccaatttagggtcctaattatatcaacagaaataaatctttgtcacacacaacgtaccaaattctctgtatttatattcaaagtttaagtctttcttacttagttgcagtaactgaaaaatccgatttgaacaaatcttatgaaaagagattaatcattagttcaagactcaagagtcactttacagagcaaattctatacatttttaacctttttaagggttttaaaccctaaaagagacattatcaaaactctatgattagggttttcaaatccctccattgtccattaactaggaccccaacagctcaagtacatgactgtcctcagcgattcttcagcttgcttggtcttgttggtataatcgattgatgaggaagagagcttcttagcttgcgacacggatcttaagttgttgcgtagatactgattcgcagatcggatcacgtagttccaacgacacacgcctagttggtctttcaatgcctcaacggctccgatgcttgcagcaaccatccacgttttgcttgcagagctcatttctctttgtttctttcttgtttaagtgatttggtttcgattttgtgtttgttgatgatgaatgagaagtgaatcaaagtgggttttgtttataaaagaagagaaagcagacaaaaagtgccgtgcctttggagtttgaaagtgcagacaaaaagtgggttttgtagctgctggttttcttggtttctgctgaaactatgaatgtttagttcaatgacgattttgcccatgtttagttcatcgacttgagctgctttttttttttttaaataataatatagatcctaatttttgtgtatactagaatgatctgtatattaaatctataaaaattttaaaaattaatgtactacttgaaacgaaatttattatttataaaatgactgattaaaggataaaataaaacaaatctctatattcttttttacaatctcttttttttagtaaaatgttaaattttatatcattttaaatttttgacagaagttataaagagaactgagaacggattaaagcaatttacagaaaagtaaaataatattactactctaattgtatacgattgctcaagagcgcataccagtaaatcgcaaagaaaaacaccaattccaaatctactaaactcggaaatttgtgtggttgtcacagaaccaacattctaaaattctcattctaattgttatgagcggaaatatgtttactaatttagcggaaatatttgatgatactagttttacttttgattttttgaatactcatgttaaatggtattcatcttctgtatgaaagaaagaaaaaaaaaaaaagtaagtcatcgcaaaaccatttttcttttgattgaatttttatttatttatttacattttgtgtttaatatattttttacttttttggtcggcaaatgatttttgatattatattattattcatctccaacatgcattattctacaaggagataaagaaaacatttactatatttcaaaacttggacacaacacgaaacccaaacaagtgaacaatctcaaaaccaggtgcacatgatagcggcactcgttaatccaggaactaccagaatcccaatattaccccttatccaattcgttcttaaaaggctaacaacgtcattttactatccagacagtagtaaacaaccaaaaccaacggccacagcttctagttttaactccaactacacggcaatattgttggcttcttctctcttacataaacacaccaattcacttcactttctaaacatcatcaacaaaaacaattctcaatacacaaaacacaaaacacaaagaagtttaattctctgaagaaagatg

SEQ ID NO: 8140 - DNA, 3000 bp, Unknown; identical to SEQ ID NO: 8137
  misc_feature (1)..( 3000): cDNA_ID_1821667_gDNA_ID_1621195_Annot_ID_57550 3000 nt of promoter + ATG

SEQ ID NO: 8141 - DNA, 3000 bp, Unknown
  misc_feature (1)..( 3000): cDNA_ID_1810509_gDNA_ID_1621195_Annot_ID_57554 3000 nt of promoter + ATG
atatcacgacttcaactcacggctgttcatatatactaatgtaagcatgctggatctcgttttaatattttaataccatatatatgaattatacatgattgacaaatcaatgatttatactcaaaatgttatatggttggattcagtcaggaggacatgggtgttataatcccttatgtccggtcggatccggaataatactagtcagtcatgaagttactcctggtttacttaccaagcacaacgatttcgaactctccataattaaggtcagtttttttccaaaaactattaaagacataactctgtgtgttttaggtatttttaagtatagtatggatatgtagtgttagtgtttttttggtgagatctagtgttagggtacttgtattccattcaatatatatatcttactttttactttttcatattagatattgcaaaaacatttgcataaaaataattaaacattgataaaaatagttattaaaattaattgtaagctttttgtctataatctttgccttttctatatggattttttttttttttttgaaatccatgaggttctgggccgaaacccataatcttctcagacccaaagccaaatcatttaacattagtttcgtcccaaacgtcactcgaatcggcgacctctaagtttcgcctagggtctttaccaattgagctaacgatacttggttttctatatggattttgttgagtacaggacaaaatatacgggcattggtggcttttgatgggtaacagtagcagctcaacttggaaagaaattgggttctggccaacacataggttcaaagaaagttttggtacaggtgtcgaatggggtggtgaagtctatagccctgcgtctacaagtcctcctatgggtaatagtcattttccgaagggagccccaaaatagactcatatgtccgtttgatcacgacttgggacgaaaattatggtttggacatggttgtgaaaaacacagagagattttcaaacagttgttataaagtgaaagatgcacagagtcgttttggccagatgtaggtcatcttatcgtttatggaggccccaggtgtacataaactttgttagtgcgtagcattattccaaaattgtagtatctgaaaatgttcaaaataaatcaagagaattacgttcttactatgaataaaaatatataagaaaaacgtaaagaaatttaaagaacatctttatattctttttttgttatcttgtttgacttggttagaaaggagaagacaaaagaactatttatatgttccaaattttaaaaacatcttacttattacatcatatatcattagaaaattccactacattaccttaaagatatataatattttctatagagatatagttctagacaaactttacttggtgtgttaacactcttaagtttttctagaacttagacttagttaattttgagtttggtccaataattaaactcttgatcatgatcccgtgattaaacttaacccaaagtcaagtttgatctcactaccggattatttgaggtgaatcaaaatataacaatataccatgtaattggtaggcaaaataaccaaaatttgaaaaatcaatccgaaccgaaataaatggttttatttggttatggttttttcttaaaactcatttggttatcatttttcttaagtttttggtttaggtttggtttggttaaaaaccaaatgatttttttttgtttttgattaaaattaagaataaccatatatactaatatattgtccaatttatattatgattagagtatcattggattttttctttactagacttatatacagtgatctcttagtaatatctgattattcttatattatttttattctacgtttcattttatttatgcatcaaacttatactttttttttgtaaaatacatggaataaccttaaaacccgtacccaaaccaaaaccaaaccaaaccaagatacatatagttttttatatgatttcaatttttacaaaactgaaaacccgtcataaattgtaaaaccgaaccataaccaaacttaattacatacggtttctttatggtttcaagttttttgtaaaaccaaaaaaaacaaactgaaactaaactgaaaaactgcacgcccaccctaatactatatttaaaaataaatctcaattaaaatcaaaaattaaagaaattaaagaaacaaaatacttatgattttaaggaaaatctaagaataattatttttatttattattttcatttgtcattctgaataatcacacaattagttttatacaaacattgattatgtcacatcattttatttatagtacatttttcttattttaatttatttataaatataatttatacaataggattataaatgcaagagaaaaaaatactatcttcaatttacacatagaaatgtattacaaatacttaaaataaatttcttattttcagattttttttagaggaaaagttacaaatattatgccaagcttgtgttaagaagttagcattaaagatatgaataaatgtcatcaatatatcgatgtaaatttaagaagaaattatgtttgacttgtatggtccacaaataattatgtcatctttgacttgtgcatggtcaaaaataacaataaatctcttaaaagcattcatggaaattagtaattacttagtttaagaagaaattttgtttgacttctgtatggttcaaagatatatatactatatttaggtttgaaggaatttaaggaaacgtatatgtattaattattttttctaacccttagctaggtgtatattctactctagtgaatcattcagaaatattacatttcttgtgagaaggtgattatcccaaatgacttcttcaaatctttctcctattactatatctcaataataactgtatatatagaagaaaaactaattatcaaatttctctagttcacaggttaatgaaaatg

SEQ ID NO: 8142 - DNA, 195 bp, Unknown
  misc_feature (1)..( 195): cDNA_ID_1822270_gDNA_ID_1621195_Annot_ID_57560 3000 nt of promoter + ATG
cttttggtgaatgtcagcctcttcgagaactagccaacctggtaggtatctcagcatttattacacatgcgttatccagtgaactcacatatgtataagaagattgtgaatgagcatactactagtccacctaaattgctaataaaactgttccaggtacttatactaggtaaccgagatgacatcgaagagatg

SEQ ID NO: 8143 - DNA, 3000 bp, Unknown
  misc_feature (1)..( 3000): cDNA_ID_1810580_gDNA_ID_1621196_Annot_ID_57563 3000 nt of promoter + ATG
atacgaaaaataatttttattggttttgtatattcaaaaacatattctatattcattagtttaaaataaaaaaaaaactaaactaaaaatagaataaaaatcattattaaattttaaaatttaaattaaaataggaaaatattattagagttaattaagtaaggaaattgcttatttttatattgacaattaaaacacttcaattatttctatacaattttttaaaaaaatatttttcaaccacaaaaattattagaataaaacataatacacatgaattttattttacaaacttttttgctgaaatcaacattgttagattttctatctttttatatattaaaaagaaaaattgcaagtttttggttgtttatgtgttattacgagaacttttcttaataatatttgttacaaaagggaactaaatagtatacaaaaataaatttagactaaagaatatgtaaaataaaattataattttctttaccatgcaaactttagagtaaagagtcatatactcaatttcatattgcttcctaatgaaatcgagtatatgactctttagtctaaagtttaataatgatttttattctagttttattttagttttgaaattaaaaataaaactaattattataagatttaatgcattgaaaatacaaatatatttttacgaaatatataatatgttttggaatatataaaagcaaaaaaatattttcgtatttttgaatattaaaaataattttaattttctttttgaatttttttttggtcaacgccggtcaacactagtcagtgccggagtcaactgaccggtttaccggaattgtatgtttatggtgttaactacatgacgtcctatacttcatatacgtggttatggaatacatctatttcgtgtagctggatatacaatagtatagttggtatgtgtgaccatgtattctcttatacttcgtgtagctagcaatcttttttcctttagtaaattactatgcataatagtaagtttactaaatgaacaattgattatgcaataaatcatatgaaacacaaaatatatatatggtgcttactagcttatcaaacacatagtagatatggagcttactatcttattcaaacttatagtaagtttttgcacaactcacatatatatatttactagtttatcaaacttataataagtttttgcacaactatatatatatatatagagcatactagcttatcaaactcataatatatttagagtttactagtttatcaaactcactagcttatcacacttactagcttatcaaacttaagaagtggcaacacaacaaaattaagttcaaatcatatcttttatttaaatttgttttttcatggctttaaataacattgtaaatagctctcattatcccaagaaaaaacaaacttatctttctctcatgagtaatcaacaacttctagtcatcatcgcaaaggaaaattcaatattatacaaggcccaatcaaagccttcgtagcggcgaattaaagagatcgatactatttttttagagtatatatactaactaacctttgacaacaaaagaataaagagaataaccatagataaaaagtatgagagagaaaataacttttacacctcatttatgacacttttaccctaactaaaccaaaccgtacattaattttttatttctccgaaaccatcatcaccttctccataaccatctccatcacaataaccaccacaagctctagtaaatcatttgactatagccgttcacggtgttggttttcatcaatttggtggttcaaccattgagctcttccatttatttggtctatataggatttacctatttccgatatcgtttctttttagaatctgagatttgctttcaccctcaaaagtttaagattttctttcaatgttatgttatcatttcatatatcatgttacttttatattaggcatgtattttgtctaaaagcagtgtatttatttgacatgatctgcactttttaaataattcatgtcctctattgtaatcacgtatcttattcctacccatccaaacaataagatatgtttcttttgaataatgcatgttcattttatattagacatgcattttctaaaaatacatggtattatataaaagatctacaccttttaaatatttcatgttctctactgtaatattattcatacctatccgaacaataagatgtatttcttctgaataatgcatgttccttttataattgtcatgtattgttttaataaaatattaattcatttagatactatgttgtctgtaaataattcatgttttttattcagatgttaatcaactctgatttattatcactggcattattgtagaaacaagaaaatagaaagatattttttagtatttattctactttaaaaaatgttatttatctaaattttctgacaaaaaattatttttttaattttgtttaattttatggttattttttatcattaaccttttttttatatcagctgtaatggaaaaatatatcaaagtaatattgacactattttttttttgaaattaaaaataatattgacacttgacagttcgaaattcaatacttttctaattataaatggaatattctgtacccgtccaataaaacaaggaatttttccgttccagaacaaatattcgaaatttttttaccataaaattcctttgaaaaatgtaagtcaaatttaatttattttaaatataattaatttattgtggatattttattttcagcaaattgacaaagacaaaagacaatttacttaaacagttctatctattacactcagaaattgacgcgactgatagataattccaattccagtcaaacaaaaccttcacaactcaattattcttccgattttggtttctctcttccaatcatccttcaagctcatctttttcttctacccaataacgaaagtctcctcctttactaatg

SEQ ID NO: 8144 - DNA, 3000 bp, Unknown
  misc_feature (1)..( 3000): cDNA_ID_2176125_gDNA_ID_1621196_Annot_ID_174752 3000 nt of promoter + ATG
gactggttgaaacgcagtgcctgcatttgtgactgcatgagtttacggaatcagacagttgcggtttcaagcattataaacctttttgaacgactggtttaacggttaaaaattggtgcatttttggaaggtttatgactggttaacggatttacgtttatggtagaaaaattacgggtttatgtttttagcaagctaattacgggtttacgtttttggcagaaaaattacgggtttacattttttttgcggcaaaattacggctttacgttttttggcgggaaaattgaaggtttaggttttttggcggaaattacgggtttacgtttttggcggaaaaattacggatttctttttttggcgggaaaattacgggattacttttttggcaaaaaaattaagattttatgtttttggcatgaaaattacgagtttatgataatgttatcatcaatgatgatatctatcatgactatggtatgttgatatgatgatgaagaagatagtatgatgatgatggtgatggtaatatgatattatgagagggtaatgatgatgatgatattgtgttgataatgaataaattgatgggttgatgaagccatttgaattttttttgattatattcaatcggtttagagattttagtacaactaagatgtcatttttgttttttaaggtctaattaaatttatctcttttctggtatggttattcgattctccaataatataagtttcaattttcaagttttgaaaaacaaacaaacatagcttttagtttttttatacttcttcaacgtatgaatcaaatatgcatatggaacatcaaaatcaaatatgataactccatataacatattcttaagaatcttcaatgactttaacctcaccagaatcagcacctggtgatttttaactcttttcacttttgttttttaatgactcttctaaaaagatgttcgtaatacaaaaaaattagcttccaaaacttataaaagctatatagatcttactttaaaaaattaacaaatgcattgagctcttaatcactttctaatgaattcttttgttctacatatatcatgaatcatgacaaataacattcaatacctacatacaacttaacaaaattacattttttaataaaaaaagcccgcgatttggttcgggtttcgccctagtactaactagagaagaaagagattttcgaagaaaaaatatggaacatgtgaaaagtttagaaggtatgacacatattgcttaaacaaaatcataagaggatggaaagagacactgtaagaaaaaatgaaacaaataaaacgagtgcttgcaaaaagatagggagagtgatagctctttgtaaaaaaattgtgaagacagaaattcatatacatattgaaaagaatgtgagaaaatatgagttgttaaagtaaagtatagataagcttatgaatatacttctatataatatcttatttttagacgagctatactaactaatgcagcgaagataaacaaaaaagaatagtaaatttacggatttcaaaatgagaaagtcgtcgaagttattttccataaaacaatttatttcatacataaaaagacgtcgtgatcctaaatatctaaagctaaagagagagtcatgagccaaaaaaatgttcttttgataaatgttgtaaacctaaaagttgtattaaagttatttttagttttgtatttaaattgtaactattgtcatggtaattttaaaattcaaagagtttataatattaacaacaagtagacatataaaaacatatcttttaaaaaatttctataataattttattcacacaaaaaaatattaaaaagttttacaaatagacccatgcgtagcgtggattcataacctaggatttagaacgactaatcgggagttgccacataaataattaacatatttagtatctaattaattaacatttttgaaaacaaccaatcgggagctgccacatcaataattaacatatttagcatctaattaattaacatttttgaaaatagcaattactttatattttaaaatgtaaaaacaaaggaactaacaaatattaaatttaaacttataaaataggaagctatataattataattatgtaataataaactcaaacccttataggattttatacaactaatccaacatttttttaatataacttaaagaaacgtaacaaggacgtggtttgatggtggtgtttttaactgtatcaatttgaatcaagttctcgaagatatgctcgtggcaactaccatgagaattccactttttcggtcatgtgacaaccacacaaatttccgagtttcacgagttcaaaatcggtgtttcaactcgtaacttagccttgaacgcataaaagcgaactgaatgaattagagttgtaatgttgtatttatttttgtagattgttttaatccgcttcttgctaatctctgtatttctgtcaaaaatcaaaaataatataaaatctaattgtctaccaaaaaaaaaatcattcatagtccatgagtagaatcaaaacaagatagattcaaactttatcaagatagataaataagctaagaaatgaaatagttcctcaaaactaaatttagtgtcaccaagaggcaagatcaaacttttcaaataagggaaagaagagaattgcaacgtgattaattgatgaggtcatagtaaaagtcaaaaatctgtgtgactcaaaacgggtaaaaacaataattgggatgtagttgataactctaaaaaaaaagggacaaaaatgagatttgcataaagtagagatacaaaattgagaagaaaaaaaaatcctcttcactaaaaaaaaaaaaacttccgttatcgatctctatctctctcttcccccacaagggtggcgattcgaggagtttccatggtggaacagaaaccctagagcctttatgctgccactaattatcactcttcactattgaattgggg

SEQ ID NO: 8145 - DNA, 3000 bp, Unknown
  misc_feature (1)..( 3000): cDNA_ID_3088172_gDNA_ID_1621196_Annot_ID_174746 3000 nt of promoter + ATG
ccatgttttcaaaggagaaggttacggtaatccaaccgatgaacgtcattgcgttaacagtgtttcgatcagttttaacccggcaaaatcttcctctataatctgaggatatgattgatcgatcatacaacatcttctaatcagattgtgttgttaaaattgtcatcatgtagtgaatatgcactttctgtggtggtcaatataatgcaacaaataataagactcattagatattggatggttactggtttctcttaatatgttatagaacatttaataacgatttaattatctaagggatcattactagtgtttcttaattataactctttagaactgaaaaaaaatattatagagatttcgttttgacagaaaaaaactcaaaccgatccattttactttccattttgagtgtgttgattttaaaaaatatgatacgtttttattactaatgaaaatagaagatattatttccaatagtggatctcatatgtgtatccatatcattattttcataattgcgtaaaatatctcgtttcatatatatttgtgtgagataatgggttgagattaggagtgggcattcgagtaagcgggtcgggtttgggtaaaatccaatcgggtacgggtttttcgggtagataaatttaggacccaatagggtaaatataaaatatcggttcgggtttaatcgggtttggctataaatttttgggccttattttgaaactgatagccggatttccgggtaaatacccagatttttcgggtaaatacccggattttcgggtaaaatttcgtgtttcaggtaaaatttagatttttgattaaaatattcgggtatttttgggttcgggtttggatcgggttcggattcggtttttcggatagaggaatttaggacccaataaggtaaatcttcgggttcggtttcggttccaattttttgggtcagtttcggttctggttgttggttccgattttttcccagcccctaattgagacgttggtttgtttgccaataatttgtcatgtggaaaagtactcgaatgtgtttttgattcactataaatggttgtcccgttttgagtttgataattcattagcatgtgactatatcatatatctatttattacactagaagcattattctctttttaaagcaatattctctgttcgaattaaactctagctatcttttacatacctactaatggatattttcatttgggatatcgaccaatcaaaaccacaaattttagctgatcaagatgggatctcaagtttggtaggtatggaaaaatacatacgtacacatccagagagcgaagaatttgtgatgaatttctaataaatatatgagttgttgagaaaacaatatttcaactaatcttatatttataatggtcccatgcatgatacaaacgtggtcgttatctcgtccatatgaccagtgaccacatatgtttcaatacgtgtttcatctcaatgcttcacaacctccatttgtattgttccgcacaacttaatgttatgtacaagttgaatatgcttattatgtagtaaaatgtaaaagacataaatcaattcattagtagtaaaacaatatattctcgttgtcatcagtcattactcatcatttggcaccaaaatgcggaagccaagccagctgtgaatggtaagtatattaatctctattcacatgcaacatgcactagtgtgtcagtaatttggtccatgacaatacacatgtgtgatctagatgtccttgcttcttcaaaggttacagcacaaccatatctagtatattactagaaagagaaaagaaattttgttatagcattcatctaaaatgatcagagaaaagaaattttgttatagcattcacctaaaatgatcagaacaaatctgaatgaaaattcagtatatatatatttagacgtttagattgtgcagacaaaatgtatttagtgctacaactgatgtgtaatgtatggactactttcataaaaagtgcagaataatatgcacggaacaatattattacaagttctaagattattcatatctacaaagattgatatttttaataataaataattcgagtttccaaatcgatttttaccatttttattttaaattgaaaaagcaaaacattcatgcaagaaaagttaaaaacaagttagtggaaccaacaaaaaaaaaacagtgttaatgaatgtcccaagtccgaacttttataatggtatcttttcccatgatttattcatgatttagacaataatagggatttacggattttgccattttttgctataatttttacgaatttgttattttgttaaaattttacggatatactatttttctatatattaaaaaatgttcacatttatgagtctttttttgcttaaatacacattttataagttataacaaataataaattctataaacaaatagaaccgattaatttaaatataataggtaaaacacatgttaaatcgtatttttatattataaatttttttttattcataaaactttagacaaaaattgcaaaatccataaatatcactaagaaaatggcaaaatccgtaattgattccaaaaatatgacaaacttttgaatcttttaaccaaaaaaagaaaacagaggtttttataacaagttcagtttacaattttcaacgtgtggtttctctattagaaccaaaagaataatatatatccaaacgtgcacaacgtgtcaatttttttgttacaaaatgtgaagaacaaaaaaaagtgtgaaaagctggttatgagttatggatctgcgcctataaatatacaaacatttctccatccactccatagccaaaccatactctccaaagtccaagctcacaatgaacacttcgtaagtctctctccctctctcaaaatgttctttttgtctgaaatgtaaacacaattttttgttgctctcgttgctcagcccaaaaatggaaatggaa

SEQ ID NO: 8146 - DNA, 3000 bp, Unknown
  misc_feature (1)..( 3000): cDNA_ID_3047723_gDNA_ID_1621196_Annot_ID_174744 3000 nt of promoter + ATG
gatagcccaacaaaaaaatcaaaatatactgaagacgaatacgacgaaggaaaataacagattaatgaatctgttcgcgtgtaaagcttaccaacattcggaagcaacatgtttttttacactttttcgtgctacttaagtattggttgtatggtttgctgaggtttaatgtatatgttcattgatacatttgtattattgatttcaaattaataaagaatgaagatgttaaataaaaaaatattgcgtaatacatttgcatatatttttttctcgaaaagtggaagcacgactctgttgcgcaagccatactcttttggcattctcttttcttaatgataagaagataagaattcgtgtcgtcttttcttttctttttcaaaagaattcgtgtaatggtctagtcacaaatccataaacaagattaggtttctgattaaaaaaatcttgtaatttttagaaataaatatctgatctcttcccaataacaatttttgtcccattagtatgtttaactcagcgatcacttaatataactcagtcgtcacttaagctaactcaaccattacagaacatatctcagtcgtcacttaatataactcagccattatagaacataactcggtcgtcacataacatatttgccaaaaaaaaagagaacataactcagcctttacagaaaaaatcaaaacattaactcagccgtaacataaatattgataaaaaacagaacataacagagccgaaaccgtacctcaccaccattcgctttaatatcttcagcaatgacctattctatagttgcacgggtacggctaccaccccatctaagcaacggaatctcatccgtgttaacaacgttcccaaaacgctcggcgatggtgatgattgactcatacgcccaagcctgcaacacgaaaaccagaccactgacggtgtacgtcttgccaataggcctcagcaactttatagaaacgacaagggcttcatatgctgcccgaccccatggataagtcttcatggcttcgtcgtcgaaaactcttttggcactctcaaatggtatcctagagttagtatgcaagccaaaaagtccaatggatagaagagtcaataacccaaaccatctacgcttttcaggaggccaagctctgcacgttactaagccctgcctaagttcatctagattatgaccttcaccggttggcacacgcaattcactgaagaacgctttgtagtcagcttcaggctcaaacttttctgtaggcagttgatctatatttaaacccgtgatatgatgaaattcgttcaatccaaaccggatgggtttaccagccacgatacaccaaagctccttcttcagtattctcagctgtctgcatagtagataatgtacggtcttaccagaccatagaaaatgactatcaacaagcttagcaattaatccaagctctgtctctttcagttctgcccatatttcttttcctattgattctctaattgcagggaactctcccagctttatattatgattaatgcctttaccctccagattagaatccccctcttggtaaagtcttggagggtactcccttgcttggtcttcagacatctgtataaccataaatcagccgtaagcattccataactcagtgataacataaaacaaactcatccacagataccataactcaggcaaaacataaatctaactcagccatagataacataactacgtcataacataaacctatctcagccacacataacataactcagccataagataaatctaactcagccatattttaacagaaactcagtcaaaccataacataacaacagctcagttaaaacataaaccagactcagctatatcaaaacagaaactcagccataacataaacaaactcagccgtcatataacagaaactcagacatcgatgtaaggttaaaccataactcagtcacaacataaaacaaactcagacacagatgaattgataaatcataaatcagtcggcaaacaaacaataactcagccgtcaaatcaaatagatcttagaaatcggccaccatatgtcaatcaacgacgacgttaaaacccagctttaaaaactatcgttacgcatcggaaaacgatttcagtgacgggaatcacttgcgattgaacttagatgtcagagtcttacttaatggaaacatactcaccggaacttagatgtcgaatgtgacttcgcgcttacggaaatgcgactgcggcgtctgaatttcggccggaacagacgagaaaagagcaaaacggcgaaagaaatcgatttcgttccgtcgagagagaaagaggaagaaagcgacagttttttttttttgggagatgatgaacagtaaagccaagaaataagaaacccaaacgttatgcggtttggagatgattaatgacgtggattatggtaatgacatggaatgatgacatgtataatcactgtttttttatttaatttttagttaaaaacgaattaaataataataattaattaaaactagttaggggtgttaattgtaattacacaattactaaaaacatctgagtaataaaaaaaagatgtgttctattttaggaataaacatacaaatgtgttttatcttaggaattatttcttaaaaaatcttgtaatttttagaaataaatatctgatctcttcccaataacaatttttgtcccattagtaccaaaaccatatttcaatttgggatttatttctataatatcaaacccgaattttgtaaaccgaaccgggacaggataatgggacaaatgagcacttgtattatcacgtgcattaatcattcaccagttttatagtagatcacagtggttcatatgtatctagacgcaaactttgaatcattcatcaacgcaatctaagtacaaatatagatctcactgcaatgtttcaagcaccaacctgatcatcatcaaaaccatttcatccgtagtggtca

SEQ ID NO: 8147 - DNA, 3000 bp, Unknown
  misc_feature (1)..( 3000): cDNA_ID_2105982_gDNA_ID_1621196_Annot_ID_174740 3000 nt of promoter + ATG
cgtgatcgattcctctctgctggaaatagaatagctgatcttctccaatcttagaggtactcgcttcgtgctctactttcgccgatggattctttacctgttattgttccagaccaaccacaaaacaaaagtggaaatcaatcacaaaagagcaaaaaactttacagctttctcatagcttataataaagattggatcattggcaatttacctggatgtaaggataggtatttgcagctgctttgtctccgataagcattgagtcgcaagtcgaagtatttttagcaccctcagctttggactgcacctgaacaagaccacggtaacaatttctcgaatgcccggccgaaattccctttgaaatgattctacttttggtattctttcctttgtgaatcatcttagtccctgtatcagcttgctgatagttattagtcaatgccacggagtaaaactcgccaacagaatcatcgccttctaaaaccacgctcgggtacttccaagttatcgcagaccctgtctcaacctgagtccacgagatcttggaacgatccccagcgcaaagaccacgctttgtgacaaaattataaatcccacctttaccttgttcatccccagcataccaattctgcaccgtggagtacttaatctcagctcctttcccacaatagagctcaaccacagcagcatgaagctgattcgtatcataagaaggagcagtacatccttctaaatactcaacaaaactcccttcctcagcaacaatcaaagtcctctcgaactgaccagtctccatcgcgttaatccggaaataagtcgaaataggcatcggacatctagtgttcttcggtatataacagaaagacccatcgctgaaaaccgcagagttcaaagcagcgtagtaattatcatcactaggcacaactctacctaaatacttcttaatcaaatccggatactccctaatagcttcagatatcgaacagaagataacaccagacttctctaaagtcttcctatgagtagtagcaatcgaaacactatcgataaccgcatcaaccgcgacattagccaaacgtttctgctctgttaaaggaacacctaacttatcgaaatactcaagaagctgaggatcaacttcatctaaactattcaaagttggtttctttttaggagcagagtaataacacatatcctggaaattaatcgaaggatatctattatctgaccatttaggttcttctagtttcagaaacttagcataagctttgaacctaaactcaagcatccaatctggttcctctttcaatttcgaaatcaaacgaatcgtctcttcagataaacctttagggattgtgaaggaatcgatatcttcaacgaatccgtacttcttatcgtaatcgagattttggaaatactgttgaagtttatcagttgagctaacggttgatgtacctgatgatgatgattcagaagctccgatgggacgagaatcgattccaacatcggctctgagtttgaagatcggtctcgttggatttagggatttgggagatgggaattttaaggattcgggttttgggtgaaacccttttggtgattttgaggaatcggaagtgggttgtggagagaagctggagataccgtttgcgagaagagacgccattgttgttggtgtggctcttaggagaagtaaaagaagattgtttttttttttttttttggagtcgtgtgttagaaaaaaaacaacgattaggaaaaaaatgaagaagagatgaaatgttaatatttatggaattttctgagccgtagattgaagatagtctcgtgtcagccacgagacgatttttttgttggattttcacttttcagctcaattataaaccacatacgttttccactaactaattataaaaaaaaaataacgttgatctcttctttatttgttaaaaatctcttttagatattagatattttttatacttggacaaaacaaacaaagatattagatattttataatccgatttacgggttggtttcttgtttttgttaatgaaaaaaaaaattagtttgatcttttatttcaaaaacttaataatattttattttaaaatttgttggttcattcatttcagtttagtttggtacactgaaatcagttttaattctttttttttctcatctgaattatattagaaactaaagtagaatacaagttgaaatacataagccaacagaccaacggaatattttgagaaacttagctgaaaaaaaggaagtaaaaccaaaaacatatataaggaaacattttaaaccaacgaaattgaatcaagagacaaaattcaaaagaaaataaaaaactatgggaaaaataagacctaaacttctcctaaaaaatgtgaacgccggaaacaccaataagatcggatagattttacaccgaagtcaaaactaatagtaaatcgacagagaggaaagcaagaagccgctgaaaccagagacataagtacaaacaccatcacacctcacccaccagaccgagatagcaaaatgtactagggacaaggcataaaccttgaagatctactagagataattaaagcactagacacaatcagtatcgattctacttgggttagctgattttcgagccataaactatttcgattctcagctttcacccccggacttttgggcccttaaatttccaccatcaactttcatattcccaaaattacatcatctactttcggattcatgcttaaacatacatttccaattgaaccattcatttaaccgggattaaccacaaatccgcgtttactgtaccgcgattgcgattaacccgactaatacccagacccgttaagaaaacgacgtcgttttcatttcgtttaactcatcaaaaagagaaagaaaacgacgtcgttttcattcttcttcttctgcaaaatcgatttggtcgattagggttcttcattcgacaattttataagaaa

SEQ ID NO: 8148 - DNA, 3000 bp, Unknown
  misc_feature (1)..( 3000): cDNA_ID_1810562_gDNA_ID_1621196_Annot_ID_174739 3000 nt of promoter + ATG
caggataattaggtgaaagctggactggtggtgcatccctttgcagtgtcccaaaagcattgaaagtgatagcagcaatcgtattcacttgttcttgcaactgtgagattatatccatcttccaaaaccttaaaagaccttgaacaagtataaaatttacagtaatcaatcacatattagacttttaacatatactcaaaagcaagatataacgttcagagaggatctaggagattcaaatggcacaaaattggtggtcaattcctgaatttatcaaacaagattctcaacaaaactagtgccaaagcataaatcacttaaaaccagttggatttcagagaggatcaaaatggcgaatcctcagggaaaaaattgacctaatcgatttaacgaagcataagctttaacgaagagacttacccgtcgacaagatttctccggcgacgcagagtctgttgggtgtggcaacgacagataatcgctgcgaattggggcgttttgttgttcttaataaacttcgttctgcgttttgggtttgggctcgaagatttttaaaatgggcttttaaggtggcctttcctttggatttttgggccctaattccatagaattcgtaaggaacgatttctgttgtttctttaaacctactgctttaattaattgacaactaattaaaaaaaaaaacactgaagtagaattgggtggctgatttttgagccataaactatttcgattctcagctttcacccccggacttttgggcccttaaattttcaccatcaactttcatattcctcaaaattacatcatctactttcgaattcatgcttaaacatacatttccaattgaaccattcatttaaccgggattaaccacaaatctgcgtttactgtaccgcgattgcgattaacctgactaatacccagacccgttaagaaaacgacgtcgttttcatttcgtttaactcatcaaaaagagaaagaaaacgacgtcgttttcattcttcttcttctgcaaaatcgatttggtcgattagggttcttcattcgacaattttataacagagactaatccaatactacaatttcactccaaaacctcaacaacacctacactcttccccaaagccatacaatagatgcaacaatcacaacagcaacccctacagtcttcaaagctgactttgccataacatgtcctagctcttccacattctccttcatggtcaagagttcaccctccatcttcttaatcagctcttcctccatctgcttagcgtttttattaaggagctccatattagccatcacgttcattctgaggtcactaatattctctacaactctcttacacttctcatttaccatcttaatttcgtccaagagagcttcatcaacccatttgaacaagtgctcttcattttctctctataaaacataatttccaatcatttactccttcaatcaatcaaatatatcacaaaatcgaaatgtgtaccttcattgctatcgcacaacggtagaatctccggtatggattctcctttgttttcgatgtgaatgtaatgatctcttctccacaccaacatttcgaggggacaccaggaggacagacacgaaatcctgaactggaagcggatgagtagtagctgttggtgctcattttcttataaaattgtcgaatgaagaaccctaatcgaccaaatcgattttgcagaagaagaagaatgaaaacgacgtcgttttctttctctttttgatgagttaaacgaaatgaaaacgacgtcgttttcttaacgggtctgggtattagtcgggttaatcgcaatcgcggtacagtaaacgcggatttgtggttaatcccggttaaatgaatggttcaattggaaatgtatgtttaagcatgaatccgaaagtagatgatgtaattttgggaatatgaaagttgatggtggaaatttaagggcccaaaagtccgggggtgaaagctgagaatcgaaatagtttatggctcgaaaatcagctaacccaagtagaatcgatactgattgtgtctagtgctttaattatctctagtagatcttcaaggtttatgccttgtccctagtacattttgctatctcggtctggtgggtgaggtgtgatggtgtttgtacttatgtctctggtttcagcggcttcttgctttcctctctgtcgatttactattagttttgacttcggtgtaaaatctatccgatcttattggtgtttccggcgttcacattttttaggagaagtttaggtcttatttttcccatagttttttattttcttttgaattttgtctcttgattcaatttcgttggtttaaaatgtttccttatatatgtttttggttttacttcctttttttcagctaagtttctcaaaatattccgttggtctgttggcttatgtatttcaacttgtattctactttagtttctaatataattcagatgagaaaaaaaaagaattaaaactgatttcagtgtaccaaactaaactgaaatgaatgaaccaacaaattttaaaataaaatattattaagtttttgaaataaaagatcaaactaattttttttttcattaacaaaaacaagaaaccaacccgtaaatcggattataaaatatctaatatctttgtttgttttgtccaagtataaaaaatatctaatatctaaaagagatttttaacaaataaagaagagatcaacgttattttttttttataattagttagtggaaaacgtatgtggtttataattgagctgaaaagtgaaaatccaacaaaaaaatcgtctcgtggctgacacgagactatcttcaatctacggctcagaaaattccataaatattaacatttcatctcttcttcatttttttcctaatcgttgttttttttctaacacacgactccaaaaaaaaaaaaaaaaacaatcttcttttacttctcctaagagccacaccaacaacaatg

SEQ ID NO: 8149 - DNA, 3000 bp, Unknown
  misc_feature (1)..( 3000): cDNA_ID_2176089_gDNA_ID_1621196_Annot_ID_174737 3000 nt of promoter + ATG
ctacaactgaatcattgtaacttctatcaaaatttgaaaatggtttaaatttaatcttttaccaaaaagtaaaataataataagtttgaaatgtttcctttttgtaaattaattgtttttgattaattcaaaaaaagacttttaaaatataagaaattttttcatccaaatagatagaaataacatattagttatctcatatcatatatttctctcaaatgttcatcgtattcatttgtagtgacaaccatttgcatcctataaaccccaaaaaataaatcattcgtcaggcccaatcatgtcaaaattaaaatacttgaaaaatacacaatcctatatcatagctgacgcatttatttcatacggcatgccggcaaaaacgtcaacagaaattaaataaaaagaaaagacaaaatttccaccggcaataagctttgaaaattatttcatatagtactaataataataaccaaaaataatgctgatatgaatgaaaaaacaaagaaacggtgtcataatgatgggacaagcagagttgagatctgtgtgagtgagtgattacctgaaaagtcaactcaccggcttaagaactcggcttttgccagctctctctttttaagccttctttaatcaatcatgaaacgatcctcttgtgtagttgcaataagttgctatttttctattgaattttgtattacaaaactaattcaacaattatttacaactaatttcctcaaaagagctattattcagaccagtttgtatatagtgtcaatagaaataagtgtggagttctttacagaatccaattaaatcctgaactattttaaaaattgtctctaaaaaatgacttgacatactaacaacaaaaagtattttaaggtagagattcaaattcgtcaaaagtaaccaccgatgggagatttaattgggactctagtcactgaaagtcgaatctggagatcaagacggcgaagaaattggtttcaagaggttagggtttgattaagagagaattgctaaaaaagaagaaataggttagttttttttgtagtttctcaaacataataagagtacttttgtcatttaccagatataacgcgtttgacgctgactttcattagcatctacaattgttagccgcaggatgctgagtttgctgcagctacttgcgtcaaccaaacgaacatacatactcagttacgtttgccaccgccacaacaacatgtgatgaccaaacgaacacgctaattatacacgacaaggatcctcttattcttcttgcgagtcatgatcccttttacaaatttataaaccttgtgatattatcttcactaatataaaacttcatatgggttgcacaagtttgcaaatatttctagctttcgaccaaaagcccaaaataatctacccctctgccaaacaaagtcttccaaaattttcttatttgcttcccattagaccatttgtagctatatgcattaggttcttttgaaagagaaagaaaaataagagaactgcatcatgttagtcttgatatctattcaattatcgtaccctaaatttaaaatatttcttaccaaaaaataaaaattttggaacgaaaagcgagaaaaaactcggcttttacgaaaaacaaatatctgatgacaaaaaaacaacaaaatacaaatatctttcaaattggtaagcaaactctttaacaattactaatccgagttagtttgttttcatatgtcatatcaacaaaatccatcctacatacctcagatttttagaaaaccgaatccggatttttgtagtctacaacttaaagacactattgaatctacaccatataagtatagtgaactgtaacattaataaacatgttcacctaaaaaagaaaagaaaagaaaagaaagtaaattatcaacaataatgaatacttgttttcttaaacgggcctaagtaacaagaaaagcccaatacgtgaaacataagtatattcactaggctataagcccataaaacatatgttgaatagactcacgagtcacaagtccccaagtctcaacagacggtggatgatgctccgagtctgactccggagaagaaaaagtatatgtgtgggattggtagttgccacgtgagtacgtgaccctgcgtggtagttggctattgattagtatttgttttgatgtccccagtccccacttttgttactgagctcgacgttttctttcttagtaaataattgattccaacctaaagcgttgtctaagatgactttagtttttataatattgtcgaaaacgaaaatatgttttttataaaatgcatgtttgttactagcatagctcatatacattatggtccgcagtaaaacaagattctgtttactctacttgaatttcaaccatttctcatgttgaaagttacttacttgaacttggacattgaacatatatagatgaatatccaaaacttaacacaccaatgattttagaatttcatgtgtctctcttattgcattatttaagaaaatttgccacttatgatatgaactaacaccagtactaattccccaaacatatttattaaccaattattttcacgcatttatttgaagattcgaattatgatttttgtcttttcttttgagtaagtttttttttttttttttgaacaaagagtaagtaatacttaaaaacaattccatgtccataaaattttactttatcaaaaaagaatactattaccataaaagaggtaacacaatctgtgttttaagttccactacttcaggagaccaacaatcttccaaactcaaatacaaaaaggtttgagactttttccaagatttgtctcttctttctttattctacctctaaaacaaaaatcctaatcgagttctctataatattcaataaagattataattcttcttttatcttttgataaaacttgtgctttcatgtgattgtgtttcactttgatttataatctcagattccaaaa

SEQ ID NO: 8150 - DNA, 3000 bp, Unknown; identical to SEQ ID NO: 8148
  misc_feature (1)..( 3000): cDNA_ID_1810562_gDNA_ID_1621196_Annot_ID_57568 3000 nt of promoter + ATG

SEQ ID NO: 8151 - DNA, 3000 bp, Unknown
  misc_feature (1)..( 3000): cDNA_ID_1810552_gDNA_ID_1621196_Annot_ID_57571 3000 nt of promoter + ATG
aaataaactaaattaaacatacaaaagataatctttacggctcggttaatggcaccggggagtccttcaaagaaagctggccagccgcatccggcgtcaaacttcgtggtggatttataaagaggagttttgcatccgatgcagctgaagattccttcctcaaagaacttgtcatattcttctgttcccggcgttctgaaatatttttaaccataagaacacttggattgaattgtattatgcatttgtatactatgtttcaaagtaagaactgaaataaatcaccccaaaaatcgtaacaaaagaaggagcaatctatacttggataaatctaaaaacaaagttctatagtaactgagaaaaccaataaaacacttaggtttagggtttagggtttaaggtcgttactgtttgtttgcgattgcgtttagtgtagttttttcttttcaaaataaatcaacaatcttaagcattctaagctaaaaagactttgttaattgaaaacataaacgcaaaacgcaaaccgtttgcagaaaccgcgtttgaaacaatcaaaacaaagaccaaaagcaagaagcaacactacacttgtttgatgtgcatctagatccaattttcccctaattttgttttcaagattcagtctatgattacttgaagcctaattacagtgcttatccttgaaaaggtaacaacatagtgaacctatcaaaaatcaacaatcttctgaatccaatctttcaaaatatgagtacataaacaacaaggcctaacttgagatcacaaactatgaaaccctaaacccaaatttataaagaaaacaaagacttactcagtgcccttttgacggagaatccgaaactgttcaggagaaagaactgcacgccactcctcctctgtttttttaaccaccgtcacaagatccgccatgacaaccaccacgaagaagctactacaacagagagtaaccagaagctgaaatattaacagaggcaagcaagcgtaatgatcaggtaggttcttgaatcattacagtgatctatttgtacataatttcagtgatgtatggttcctagttttgagtctagattcatatgaaactgttgtgaatctttagactggtgtatcatgcacgtgtcaatagagtctcacagatgcgtaacatagtatagattttgtattacaagacaagagtgtgttttattcaagttacaaatcatacatactacagactacagttgttgtcaaaatgctcgaggtgatgaatttaaatagtcatgaaagaaaaaatacagtacacagtatagacacacacactcatacaagattcttgttctgtttttctcccactcacttgagtgaaaaaatccagagaaagaacaaataatcttgttcggccaagatttacaaggaagacgctgcgggtgtgaacttaagcgaaacgctgttcacgcaatggcgttcatcggttggagtagcgaaaccttctcctttgaaaacatgaccaagatgtccaccacatgttgcacagttgatctctattcttctcccatctgggtctgtctgataaaccaacaaatgtaagcaaaatacacaaagaagagagagttcatttttgttaccaatttgatgaaaaaagtgtttgtgctctgagagtattttctttaccgttcgggtaatggcaccggggattccttcaaagaaagctggccagccacaaccagcgttgaactttgtggtggatttataaagaggagcattgcatcctacacaaccgtaaactccttccttgtcgaagttgacatattcccctgttcctggatatctgaaatcaacaaaacacaaacccgcaatataaacattcattccctattcaataagatatccaaatactagaaagaccaaaaccccaacgacgaactcagacatattaatggtcatttacatagcaatccattctaagacagaagctaataatagtaaaggctctataggaactgacaaaacctgacagagcaaccaagttctaaagtcgagctcttaaagtcgtagcacattcttggtaaaaccaatactcagatcttatctttaataagaaaaaaaaacaaactcatctggagtttaagagtaatgaaagatagtatccttgaagaactataacctttcatgtaagcttatcctaacagctcaacatctataatagcaggaaatttgtattgtttccaatcactcaaaagaatagactttatcctaacagatcaacatctatagcagaaactttctatgtaatctacacagagagaagatctaatcatcaacatagtgctcatcatcaagacacacccctgaaaaataaatgttccaacaattggcaaaaaaaaaaaagttcaaacctttattaactctgagaatcacaaattaagcgagttatgaaataaaaaccctagatttctaaaaccaggattcctaatggaagatagttaccaaatttgctcaaattttgaaagctaaattgaaccatgaaaatcgctgaggaaaggttaaaaactttactcagtgcccttttgacgaagaatccgaaactgttcaggtgaaagaatcgcacgccactcttcatctcctttctgaaccgatcccggagccgccattgccaccgtcgaagctacgccggaagagaggcaaatcgaatcggattcaacgattgacgattgaagaagaagaagtagcgtgaatgataaaaagagaatctttgaattgacgatgttcatcaataaatttataatctttgaattgaagaatccacaagacaaaatcaaaatttgacgattcttcttcaactaatcttgttaatttacatgattacccctaatttatatgattgattaaattatcacccctaaggtttaaaattggatagaacaaccctgtcggggtttttgttcagggttttataaacttgctcttcttcatcttctcaatctcacttgaaatccgaacatg

SEQ ID NO: 8152 - DNA, 3000 bp, Unknown; identical to SEQ ID NO: 8146
  misc_feature (1)..( 3000): cDNA_ID_3047723_gDNA_ID_1621196_Annot_ID_57574 3000 nt of promoter + ATG

SEQ ID NO: 8153 - DNA, 3000 bp, Unknown
  misc_feature (1)..( 3000): cDNA_ID_1810547_gDNA_ID_1621196_Annot_ID_57575 3000 nt of promoter + ATG
tttcaaaggagaaggttacggtaatccaaccgatgaacgtcattgcgttaacagtgtttcgatcagttttaacccggcaaaatcttcctctataatctgaggatatgattgatcgatcatacaacatcttctaatcagattgtgttgttaaaattgtcatcatgtagtgaatatgcactttctgtggtggtcaatataatgcaacaaataataagactcattagatattggatggttactggtttctcttaatatgttatagaacatttaataacgatttaattatctaagggatcattactagtgtttcttaattataactctttagaactgaaaaaaaatattatagagatttcgttttgacagaaaaaaactcaaaccgatccattttactttccattttgagtgtgttgattttaaaaaatatgatacgtttttattactaatgaaaatagaagatattatttccaatagtggatctcatatgtgtatccatatcattattttcataattgcgtaaaatatctcgtttcatatatatttgtgtgagataatgggttgagattaggagtgggcattcgagtaagcgggtcgggtttgggtaaaatccaatcgggtacgggtttttcgggtagataaatttaggacccaatagggtaaatataaaatatcggttcgggtttaatcgggtttggctataaatttttgggccttattttgaaactgatagccggatttccgggtaaatacccagatttttcgggtaaatacccggattttcgggtaaaatttcgtgtttcaggtaaaatttagatttttgattaaaatattcgggtatttttgggttcgggtttggatcgggttcggattcggtttttcggatagaggaatttaggacccaataaggtaaatcttcgggttcggtttcggttccaattttttgggtcagtttcggttctggttgttggttccgattttttcccagcccctaattgagacgttggtttgtttgccaataatttgtcatgtggaaaagtactcgaatgtgtttttgattcactataaatggttgtcccgttttgagtttgataattcattagcatgtgactatatcatatatctatttattacactagaagcattattctctttttaaagcaatattctctgttcgaattaaactctagctatcttttacatacctactaatggatattttcatttgggatatcgaccaatcaaaaccacaaattttagctgatcaagatgggatctcaagtttggtaggtatggaaaaatacatacgtacacatccagagagcgaagaatttgtgatgaatttctaataaatatatgagttgttgagaaaacaatatttcaactaatcttatatttataatggtcccatgcatgatacaaacgtggtcgttatctcgtccatatgaccagtgaccacatatgtttcaatacgtgtttcatctcaatgcttcacaacctccatttgtattgttccgcacaacttaatgttatgtacaagttgaatatgcttattatgtagtaaaatgtaaaagacataaatcaattcattagtagtaaaacaatatattctcgttgtcatcagtcattactcatcatttggcaccaaaatgcggaagccaagccagctgtgaatggtaagtatattaatctctattcacatgcaacatgcactagtgtgtcagtaatttggtccatgacaatacacatgtgtgatctagatgtccttgcttcttcaaaggttacagcacaaccatatctagtatattactagaaagagaaaagaaattttgttatagcattcatctaaaatgatcagagaaaagaaattttgttatagcattcacctaaaatgatcagaacaaatctgaatgaaaattcagtatatatatatttagacgtttagattgtgcagacaaaatgtatttagtgctacaactgatgtgtaatgtatggactactttcataaaaagtgcagaataatatgcacggaacaatattattacaagttctaagattattcatatctacaaagattgatatttttaataataaataattcgagtttccaaatcgatttttaccatttttattttaaattgaaaaagcaaaacattcatgcaagaaaagttaaaaacaagttagtggaaccaacaaaaaaaaaacagtgttaatgaatgtcccaagtccgaacttttataatggtatcttttcccatgatttattcatgatttagacaataatagggatttacggattttgccattttttgctataatttttacgaatttgttattttgttaaaattttacggatatactatttttctatatattaaaaaatgttcacatttatgagtctttttttgcttaaatacacattttataagttataacaaataataaattctataaacaaatagaaccgattaatttaaatataataggtaaaacacatgttaaatcgtatttttatattataaatttttttttattcataaaactttagacaaaaattgcaaaatccataaatatcactaagaaaatggcaaaatccgtaattgattccaaaaatatgacaaacttttgaatcttttaaccaaaaaaagaaaacagaggtttttataacaagttcagtttacaattttcaacgtgtggtttctctattagaaccaaaagaataatatatatccaaacgtgcacaacgtgtcaatttttttgttacaaaatgtgaagaacaaaaaaaagtgtgaaaagctggttatgagttatggatctgcgcctataaatatacaaacatttctccatccactccatagccaaaccatactctccaaagtccaagctcacaatgaacacttcgtaagtctctctccctctctcaaaatgttctttttgtctgaaatgtaaacacaattttttgttgctctcgttgctcagcccaaaaatggaaatggaaatgaaa

SEQ ID NO: 8154 - DNA, 3000 bp, Unknown
  misc_feature (1)..( 3000): cDNA_ID_1810543_gDNA_ID_1621196_Annot_ID_57576 3000 nt of promoter + ATG
attagtcacgtgtataggaaagtgcagacgggttagctaactatgcttttttttgtcattagagttttattctttggaggttgttcctattgattttgtttctgttgtaagcgatgatgtgcttaggttgggtctacgtgactaaggcaagtgtctatgtagtttttttttgaagttttaataaaatttagatagattttttcccggtgactagaagcttcatcgagataggagcgatactacgaataaggtatatggggcagagtgccctaccaaaaaaaaaacactaaaaaaataatgaagatatgtggagtttaatgtagttattttgaaaagaaatgtgattgaatcctaactatactcatctaaccaagcttataattcgtataattcgtataattcgtattgggctgcatgtttgagaaagactgaccatattttttagtatcataaagttcgatcagtaaaaataagaaatgatagcttagttagattctagtaatactatcatgttttaattgtttatatataacaattgtatcttacgtaatataattcatataacaattgcatgttgtaaaattataaaatatcttttcatttaaaagattcgactaaatacatatctcaaaaatgacatttttagtatttattaaataacaacaattgtttttaaaacacatgcaatttgaattgaatgaatgaaaataacacaacatcactagaatataaatcactactttagaaaatcatagtcaatgacatactttttaaacaatatttttgcaggaggagagagctggattaagatatgagataacttgcacaaaatgtgatggacatctaggtcatgtcttaaaaaatgaaggttttccaacaccaactgacgaacgccattgcgtcaacagcgttgctctcaagttctcttccgctatcacatctcagtgataaacggatccggtttagttctccggaatcaactctatctatctatgaacgttgattactaagagacctttctacttctgttagaatgagaacgttgtgttcttcaattcatcgcatttatgaactattataaaattgaatgttttgtgttttcattatttttagtaatgcttatgtacgtatcattgaaattgtttgtgtcatatattgtgccatttttctattgagtgttaatgtattatcgtatttaccaaaattatatatagttattgtctaagtctgcgaatcatttgccatttggatacacatgcatgtctaaacaaacgtacacatggggatgtgaccgaactatttttttgtttgtttgttcttttaatatcattgacgtttttaccttacttctcaattgttcttctttttccgtaatcgacaccgtagagtttcgacgatgacatgacgcggccaaattcaaagcaattttaatccattcagttcttgtctatgattagatgccttgagttccttcctgtcatcaaaacgaatttaactagatccattggattttcaatatgttggtggcggagatgtatttttttaatcgcaaacaaaagagataaagtttgtgaaattggtagagaatgtgttgatggagttgacagatatggtgatggagttgatggagaatgctttgatgaagaaatcacggtgttgatgaagtaatcgcggtaaaacaaagtgatggagacaggaaaaaaaatgacggaaacgatgatgaacggtgtttgagatagggtaaaattgtcaataaaattttaataagtatccaatcctgtaaacccaataagagagtgtcatttttcaaaatttttggccccaaatatatctgattgtataaaagtccctaccaatcacaccctatgttttccgttattgttttagtcatatataccatattcaaattttatgtaaattttatgtaaatatgttcttcaaattttttaaaaaatcctggctgacccggtccaagtatgtcagttagctaatagttgtgtttgttagtcggagaagtctatttagctatataccacctttcatgatactattactatcccctgttgttttttttactaatacgttattgggatgagatgccatctaaaaggggaacttctccaattctgttcgttgggaccactccagattttacaatcccggcttatgagttttgagaccactctcacttattttatctacattttgtaagagtgccgtgtttcatacttagttatttctctgataacaaacaaattggggttctgttcttaaaatatataaaagcccgtgaggcccaacaaacggaaagtttggcccgtgaaagaaagaaaaacaaaacttatttattgaaaaatgacacgtgcagaatcatttactaaaccagacaataaccggttaacggtttaatagttagcaacagaagaaccaaaggattgtcttcttccacaatcagaatctgtctgtgtggcttgtaacgcttcaatgtcagtgaagtctttagctatatccacaaaaataacataacaagattaaaaaaaagagagaatattttatctctctagacttgacaatttccctctctttctcactccctatacctgtatatgtatatagaatcgtatatatctggagaaatacacgaggtgttctcgtctctgacgacgtggtctattgtcttcctcagctttagtcaatttcttctttcggaaacttggttctgtgatattatccaaacttaaagtttgagtctttagggtttatgggtgacaacaaaagtacatgcctttaggctttagttttgtgggtttcatctcaaaatggcaattagtactatgttagggtccatctcttgttgcccctctcccaaggtatttccttccttgtgcttacttgtgtatctgtcgactgaaaaacctctcctttatgtatttaagtttatgtgcaaagccttaattggtgattgaatccttagttctgatttgatttcaggggtatgag

SEQ ID NO: 8155 - DNA, 3000 bp, Unknown
  misc_feature (1)..( 3000): cDNA_ID_1810536_gDNA_ID_1621196_Annot_ID_57578 3000 nt of promoter + ATG
tcttacgagttttgtttccattaactctatctttcgtatctgcaactttctgcaattgcactgatcaattatgaatttacccaatttgatattttgaactgatgggtttcgtttcttttgatgaatcagagagcttgctagggttcttggtgagaaaggcgttatagtgtttgctgatgttgaacatgtcattcaaaaaagtaagagtctttaattttttgaattcgttgttctgtattttgcttaagttttagtctactctagtgtcgcaagtagtttctaatgtttggtatgtgtgatgatgtttttttttaagatgatcgatctttggttgaagtcttcaagttgtttgatttgatccataagctcactactgatcacaaaactgtgacaaggatcacaagagaagtaaaaccctaattctaatttccattcattagcttgattttagtaattctatagacttgactgatgatcttatcttgacaggttgtggaagattttgctttagagaatgtggtgtatcttgagttacgaactactccaaaggtacacaccttttggcatattttttgcaagtggttaagttatatgaatgatggagattgtttgtttgtagaggagtgattcaataggtatgagtaaacgttcttacatggaagctgtaatccaaggtctaagatctgtcagtgaagtcgatattgattttgttaccgcatctgattctcaaaaactgcacaatgctggtgatgggattggaagaaagaagatttatgttagacttcttcttagtattgatcgtagggaaacaacagagtccgcaatggaaactgttagtgtttcaaaacaagctaagctactcagaatacttaaaagactaatgcagaaaacatttgatactctccttttttctttaaaggttaagctcgcattggaaatgagagatgtcggggtagttggtatcgatctttcggggaatcctcttgttggagaatggtaaactgttcttagttctcctctttatcttttgcttcgctttatgagttggttttgaaatcttccatgttcttgtaggagcactttcttgcctgcattacaatatgccaaagacaatgatcttcacatcactcttcactgtggagaggtattaactcttgaaaatccacttaaccgattttcaaatgtttatgtttcagattgtctactactttctctatcttagtgctttgtaggttcccaatccgaaagagatccaagccatgcttgattttaaaccgcatcggattggacatgcctgtttcttcaaagacgaagattggacaaagttgaaatctttccggattccggtaatagatttgcatgtaccattattctctgtttcttataatctctttaaccaatttcaagagtttgctatgttttgcaggttgaaatatgtttaacatccaacattgtaaccaaatcgatatcttccatcgatatacaccatttcggttagattttctctttccgctgcttcgttttctacattcctccttgttcatttaaaatcaaagcaatcttgacaagatcttagtctgatcttaacagctgatctttacaatgcaaagcatccattgattctatgcactgatgattttggagtattctccactagcctctccaacgagtacgccctcgctgttcgttctcttggtgagcttccagaacctgagctcaaatccaacagttacagagcttttctgatttttgagaattgtgattaagtttagattcacaaagaaactacatttccaaataatctaattttgtttcttctgtgaaggtcttagtaaaagtgaaacctttgcattggctagagcagccatagacgcaacatttgcagaagatgaagttaagcaacaacttaggttcatttttgattcagcctcgccagagcacgtttagtgagactgttgagtgcttcagattttaccggtttacttcattttgttggtttataccaaaccgaacaaaaggtgttttggttcattggttggttcgaaaaaataacattcatctcgaatattgattgtaataatataattataatttaaaattttcaaacttttgttctctgttaaaaataaaaattgatttcaacaaatataggcataggtctggccattcggatttcggatcggaatcagatcgaatttttttgaattcgcataatttggatgaagaagtttattatccgttcggattatatgactatacagtttggtttcggtttggatgatattggattcagatcggtttcgcaacagtttttgagaaaaaaaagactaaaaattgtttaattttaataataaatcgtttacttttactaaaatttggtttaagtttgcaaactttgtataattataacaaatataactaaaacaaaattggatatcaaagttatttcagatatttgtgttatttattattttttggttataaattataactaaatataactaatatttttaaatatataattttatttcggattagcggatatcagttcgattttcggttcagatatgattcggttcgaataattcagataagaaaattcgttatccggtcagattttttaactttttggttcgatttcgaaaccgaatttttcggatcggtttcggatttctgattttatgctcagccctaaacaaacatttgatccaattttccgaatcgggctgaacgttgctaatccgatttcttattccggttaatatcccgattcggtatagctataccgaatgatctcaccacgtgtacataaagcatccacgtgtttcatgaagattacacgtggcacaagccagcagcgaaaacctagtcgcctctctgatacatcttcttcctcctttccggtgttaaaggaatcaaaacaaaattcaaattcctaactaaacagtaattaaattaaaattaatgaggaagacgaagctgctttgttgatgatcaatg

SEQ ID NO: 8156 - DNA, 3000 bp, Unknown; identical to SEQ ID NO: 8144
  misc_feature (1)..( 3000): cDNA_ID_1810528_gDNA_ID_1621196_Annot_ID_57580 3000 nt of promoter + ATG

SEQ ID NO: 8157 - DNA, 3000 bp, Unknown
  misc_feature (1)..( 3000): cDNA_ID_1810684_gDNA_ID_1621198_Annot_ID_57596 3000 nt of promoter + ATG
ttttctctattagtggagtttcgtgagtgagtgatcttgtgccatcgggattttgatcgttcctacttaaatttgagccggtatcgatctaaaatttcaagtaaacctagatttgaaaatcggatgctttaatctggatcactcaaatgtcgttgatgtagacatattatcacaacttgacgtttataaatagccagaatgaaataagaagatcgcttgaactttaagaactaatcgggggtgataattgagcagctaggatccattgtccttaaaacgttgtttatttagttgaatatgtaacggctatggagatctataatccggttttacatttcacatactctagattagtttcatataacggctatggaaatctttaaccatctatctaccagtatgcataagctaatttaaccttttaccaaaaaaaaagtatgcataagctattagatcatagcgtagtgttcattttgcagtagtcttgtccttgaaccgtactacatgagtccaccatatgattttttttttctcggctatggagttctagttcctttagtctattcttaatttgcagaatatctaggaagagttgctaattaattcccatgtttttggtattcaacagaaacattgttcaacagagatattaggaacaatcattcacaaaatgagaaggtaatttccgtatcaacagttactggatgaatctttatcttttctacttccactgaatagctttttctcccaattcagtgtactctctgattaaaatcgtgagtcattttgaactatatcattctcctttccagattttaatttattctaaaaacggtagaaactcagaatatgtagatcttcttttttttgtacaccaaatagataccttaaagtcagagtatgttttgcgcatatacatagattgtgagtgcttcgctaaagaatcagccgagacatttgctgatctgggaataaaactacaagagaagctagaaagcctattaatgcagataaatatgtcactcagaatatgtagataaatagtttaatttgctgacctttttggttctatgatttgaaattattctctgagacatattcttgattgatcaagttctttttcaccttttatgtccctctttttcccctataattcaaatcagattcttcttttatgatattacatctagttctttgttttttgaaattgataagtggagggataacaacgagactggacatggaagaaagttccaaaataaagtagctcatagtctgaggataataatctttaaatgtttctttggaaccttcattttcatttctttattacttttgtttcttgtctgtgctcgtttcaaatcgagtccattgcattacaaaactctctttcgggcctttgtgctctgccttaattttcttttgttatttactcttttctttgtcagaacaacaacaatatctaggcaaataaaagaggtttttaaattctataatcgttatcatagtttcattatttctatatgtttagacagaaatgttgtcttgattgaatcaaggttcctttcttagaaaaaaaagaaatgcatgtcggctttcatcttacttttaattggaataagtaaactaaaatctttattcatcacatgcatttgcatgtatatatatatgtatacgttatccattgcttttgctaggttcatgttcttttttttgtgcaataatggcttaatttgttaatccagcttgcagattgcaatttgactgcaaagtttccccacttccataactatatgtatgtgatatcaaatcaattcattatgacgagcgaactcttgacaactatctttgtcagtactctgctttatttggtcgtttttattttgcatgaaaaaggtcaaaaaaagctttactcatttggatattgattagtattacacaaagtcttagtttggatatattttctcaaatgtttccactgctttcaacattcatttgctttggggataagtcaaataccttgacaattaactaattccctaactaaatatctcacctttgtttattagtgcttttttggtgaattaagtgtttttaatttatcccgaccccattgtgatcttgttctgtcacatttaattacgtatatttagtagttttattactaccattttgatagacatatattcatgcatgttaagtaccaaacaatttgttgacagtttaggtatggcgtgtttggaggatttgaaaagttgatggagctccaagagaagatccaagtggctcatgtttcttcaggttactttgctttcatgttctattaacataaataatctctttggttggttccttatttttttcttctttatcggaaagttacatattacgttgtttcttagccacgcctgatttgaattaaaggctcactgaccaaaacatccaagcccaacttttgctaaagcatataagcatatacctatgtcagtttccggcgacttttcttttttgctcttttttgaaccaaaacaaatttctagctaatgtagaaatttatactttttaagaaaattactggacttgtaacaccattagtaataagataagatgagacatttgttttgtttatatgaaaatatagtcagtaataactgttttttatgttctcttttcaacttatttttaattctttttggctttcaactttgcttctttttgataaaagacacatatattgttcctaatctttattgtctttaattttgaaaaatgccacaattaaattttgaattaaaacttcttttaattgcccctttaatgttctccctgactcccaaatctacacgaaacactaggaatagagaaaaaacaaccctcgggtaaagacagagcataaaacacttgtagtgtagatataaaagacacacctcagagaagagaagagcagagagagagagagagagagagagagaaagaaagatccaacttccacaaagaacc

SEQ ID NO: 8158 - DNA, 3000 bp, Unknown
  misc_feature (1)..( 3000): cDNA_ID_3088685_gDNA_ID_1621198_Annot_ID_174794 3000 nt of promoter + ATG
aaatttcaatcatatacattcaattttactatacattttaactatttcttttatcataataaactgccttttaactctatacactccaacttattgatgatatttgaattttaaatagtaactcatatttttttcagtatttaatttagtatttctttaaaataaattttaatcttacaacttcgattttacaatacaatttaaatattattttttatcataatagaatacaatttaattcgattgtatacaattcaaatacaatccaaattttcaatacaaatacaatttaattctatacactccatcttattgttagttttcctttttaattaataaaattataagttaaatttttagatatagaaatataaattagtatatgtaaatatgtttatttattttttaaagaattttttttgacatatgtcaacatctcaatgatagacctgacacgtgtcatgatctcgtgagttagtaactttcaaaactgtactttatataataagatatatgcttatatgtttcatatatatatatatatatatttattagatcgacaataacattaaactatcattactagtttacttttttaaatatgattttaataagtatcatataaatgtacaaagtgtatacaatacatgtttttatatatatatatatatatatattttttttatatataagcataaatatatagacgaacaaacaatgtagacagacctaggcacctagctatgatctatgcatacggacgaaccctattatacgtacgcatgattattgaatataccttcaaatataaacttgtgagcgtaaggttattatgttttcaatactgacgaatgacgattgtgattcatgttttgaaaaattaataaagtttaaaccatcgaatgcgtaaaccaattattcatcttttaccttaggaaaaagctggatatcattatcatatatttattaagcatattaaaccagaccaatgatttaagtcgaaaatgacagctttcaagctttgcttattggccaataaataacaaactaaaaaaagaagaaattttttaaaacgaactggtgaagtctcgtgttatcacgtgcatggagccagtcagacagagacatcatcaggtgcatgatggaccacggtagtccatttcttccctacaaccatacacgtggcctttttacatttaacagtcaaacatctggtcaacaacactctcatctgggcttccttacatcaaaccctactttttttttgtttatcaaaggcccaattgtatataagtgaaaagtttccaatgggcctttcaaggattattcccagcccaatatttctggagattaggtttatttatcatcgccaccaaagaaatttgagccgaagcttcataatcgtagtctgaggtatttttctcgatcctcaaacatttccaacacctaaaggcttattcgttacagatttctcaccaatcttcggatttattgtgctcgtacgataagcatatattagtaaatttagtggctatttaggaaatttctcgtttgatttcttgttgttgttgagatttgaatctgttgtttatggtttttgtgattacttggttttgcagagacaatgtcgacagtcggagaacttgcttgcagctacgctgttatgatccttgaagacgagggcattgccatcactgtatccttaaatctcttgacattttctgaatctcatgtcctagctattgttgtcgctatatcttgttttggttggatccttttcattatcgagacaacatggtgtgagtgtttattttaggtttatggagctctcttttgatgaaatagtcagtaccaagattcatgtttgctttggcacactcaattgttgggcatgtgttaaatgacctatctgcaaagttgttggtttagggttaggaattaggattcttttttactggatttaagaaacgtgtttgttctattagttttgatatgtaggttcaatgtttgggttaggtatccttaaccctattattgatagtctgataagattgcgactttggtcaaagcggctggtgttgagattgagtcttactggccaatgttattcgccaagatggctgagaagagaaatgtcacagaccttatcatgaatgttggtgctggtggtggtggaggcggtgccccagtgtctgctgccgcacctgctgctgctggaggagctgctgctgctgcccctgctaaggaggagaagaaggtacaaatttaaagaaacaaaaacattatattgttatatcttttagctaggtttgcttattgatactctctatgttgtttaattgtttgtaggacgaacccgcagaagagagtgatggagatcttggtttcggcttgttcgattagttgtctcctttcattttacgtttcatatgttctattgctttagttgctttgagattttaagttttgtcatttcgacactactacagtttactcttatatcatgtactggagttagcaattggctcacgaccttctttgtagttcatgagagttatcttatgctcaaaatgcattggagcttattgaatttgacttttggattcagctgcgtcttctttcctaccaaatctcagtctatttataatttgatcttgaaatagaaaagaagaacaaaaaatcaggaaagatatgaacatctgttacaacttgataattcagtggatacgcaggtttcatgaaccatggtttctcagaagttttgtaagttttttactgattatactaatgttgtcaaatgtataaaaagtaaaaattgaaccttctgcataatccagaggctttcattttttttttcttttcttcttgtgatggactcgttttagctgaaattagaacgtcggttagtaccggcggagaatgttcggagtcgagtcagtcagagagttctgataataccaaacggctactttgaagttcacggctattaagaagtcgcac

SEQ ID NO: 8159 - DNA, 3000 bp, Unknown
  misc_feature (1)..( 3000): cDNA_ID_1393284_gDNA_ID_1621198_Annot_ID_174793 3000 nt of promoter + ATG
gctcttaatgctcttcttgcctatataattcaaagttaaatccaaaacctgtttgattactaattaatcaaatgtagttaagggagaattttgctcaccaaatagcctctgaaaccagtttggattacaacagctgcgtaatcttctcttgcggtataagtacgtcttgtaagatttggtaactccttcgttgtcgaaggaggatgagtttccgatgcggcggagacggtggccggcggtgtagatgcgtcgtacctctgttctgtaacagaggataaaacggttgggttgatgatcgtcgttgtttctgtggatttctgcgccggagcgtcttttccgacgccggaggtcttcaccggagagtcatgattcgtagattttctaaataaccaacgtctcttctctttcttctgcagaaacagagcatatgaattatagtaatatacaaaacagagaaacaagaaacagagcatgtgaataaaaaaacaagaattaagaagcaagatctcgagactagagaaagtatacgaaccttgtcttcatcttcgtcgacttcattaccatgagcattgttgttgtgttctttcttggtgggagatcggaaagctcgtttcacggcagtgagccaagaagaagaagaaccgctcttcttacccattggaggttaggtaggatttaagattctcaacagagtcaagacatggtagtagtagtagttatgttcctgttttgggacatagaagagaggatgagagatttggtttagattcttgcgcagaaatgaggaagagagagaggagagtggtgggtggatcttgggaaacagaaatgtcaataaatttggaaggttgcttaagggagacttctgactctgaccacctctttaactgcgaccatgacagcgatgactcttcctcttcatttactttctccacttcatttattttgttatttttgtttaactcatttcactaaactagttatatcacattattattattatatcatgtacctacttgcatttgttgtacattcaattctagaagatttgttgctgttaaattgaaagatagagttttgttgttttgagagttaattttaaacaaatacaatataaactaattctatttcattatgcaaaacaattcttctttcccttggttcgattatgcaattatatttcatacattctaatttttgggttttcttaagatatgcatgaatattattctacttatatatatatatatatactagataaggcccgcctaagatataaatttattcaaatatgtattgataatatttaaaatttgaatggtaaatagtgatccacacttttctaatgttaaatttagtaatttttgaattaaataaaatttcaatcatatacattcaattttactatacattttaactatttcttttatcataataaactgccttttaactctatacactccaacttattgatgatatttgaattttaaatagtaactcatatttttttcagtatttaatttagtatttctttaaaataaattttaatcttacaacttcgattttacaatacaatttaaatattattttttatcataatagaatacaatttaattcgattgtatacaattcaaatacaatccaaattttcaatacaaatacaatttaattctatacactccatcttattgttagttttcctttttaattaataaaattataagttaaatttttagatatagaaatataaattagtatatgtaaatatgtttatttattttttaaagaattttttttgacatatgtcaacatctcaatgatagacctgacacgtgtcatgatctcgtgagttagtaactttcaaaactgtactttatataataagatatatgcttatatgtttcatatatatatatatatatatttattagatcgacaataacattaaactatcattactagtttacttttttaaatatgattttaataagtatcatataaatgtacaaagtgtatacaatacatgtttttatatatatatatatatatatattttttttatatataagcataaatatatagacgaacaaacaatgtagacagacctaggcacctagctatgatctatgcatacggacgaaccctattatacgtacgcatgattattgaatataccttcaaatataaacttgtgagcgtaaggttattatgttttcaatactgacgaatgacgattgtgattcatgttttgaaaaattaataaagtttaaaccatcgaatgcgtaaaccaattattcatcttttaccttaggaaaaagctggatatcattatcatatatttattaagcatattaaaccagaccaatgatttaagtcgaaaatgacagctttcaagctttgcttattggccaataaataacaaactaaaaaaagaagaaattttttaaaacgaactggtgaagtctcgtgttatcacgtgcatggagccagtcagacagagacatcatcaggtgcatgatggaccacggtagtccatttcttccctacaaccatacacgtggcctttttacatttaacagtcaaacatctggtcaacaacactctcatctgggcttccttacatcaaaccctactttttttttgtttatcaaaggcccaattgtatataagtgaaaagtttccaatgggcctttcaaggattattcccagcccaatatttctggagattaggtttatttatcatcgccaccaaagaaatttgagccgaagcttcataatcgtagtctgaggtatttttctcgatcctcaaacatttccaacacctaaaggcttattcgttacagatttctcaccaatcttcggatttattgtgctcgtacgataagcatatattagtaaatttagtggctatttaggaaatttctcgtttgatttcttgttgttgttgagatttgaatctgttgtttatggtttttgtgattacttggttttgcagagaca

SEQ ID NO: 8160 - DNA, 3000 bp, Unknown
  misc_feature (1)..( 3000): cDNA_ID_3088681_gDNA_ID_1621198_Annot_ID_174792 3000 nt of promoter + ATG
ttttgtttctttaaatttgtaccttcttctcctccttagcaggggcagcagcagcagctcctccagcagcagcaggtgcggcagcagacactggggcaccgcctccaccaccaccagcaccaacattcatgataaggtctgtgacatttctcttctcagccatcttggcgaataacattggccagtaagactcaatctcaacaccagccgctttgaccaaagtcgcaatcttatcagactatcaataatagggttaaggatacctaacccaaacattgaacctacatatcaaaactaatagaacaaacacgtttcttaaatccagtaaaaaagaatcctaattcctaaccctaaaccaacaactttgcagataggtcatttaacacatgcccaacaattgagtgtgccaaagcaaacatgaatcttggtactgactatttcatcaaaagagagctccataaacctaaaataaacactcacaccatgttgtctcgataatgaaaaggatccaaccaaaacaagatatagcgacaacaatagctaggacatgagattcagaaaatgtcaagagatttaaggatacagtgatggcaatgccctcgtcttcaaggatcataacagcgtagctgcaagcaagttctccgactgtcgacattgtctctgcaaaaccaagtaatcacaaaaaccataaacaacagattcaaatctcaacaacaacaagaaatcaaacgagaaatttcctaaatagccactaaatttactaatatatgcttatcgtacgagcacaataaatccgaagattggtgagaaatctgtaacgaataagcctttaggtgttggaaatgtttgaggatcgagaaaaatacctcagactacgattatgaagcttcggctcaaatttctttggtggcgatgataaataaacctaatctccagaaatattgggctgggaataatccttgaaaggcccattggaaacttttcacttatatacaattgggcctttgataaacaaaaaaaaagtagggtttgatgtaaggaagcccagatgagagtgttgttgaccagatgtttgactgttaaatgtaaaaaggccacgtgtatggttgtagggaagaaatggactaccgtggtccatcatgcacctgatgatgtctctgtctgactggctccatgcacgtgataacacgagacttcaccagttcgttttaaaaaatttcttctttttttagtttgttatttattggccaataagcaaagcttgaaagctgtcattttcgacttaaatcattggtctggtttaatatgcttaataaatatatgataatgatatccagctttttcctaaggtaaaagatgaataattggtttacgcattcgatggtttaaactttattaatttttcaaaacatgaatcacaatcgtcattcgtcagtattgaaaacataataaccttacgctcacaagtttatatttgaaggtatattcaataatcatgcgtacgtataatagggttcgtccgtatgcatagatcatagctaggtgcctaggtctgtctacattgtttgttcgtctatatatttatgcttatatataaaaaaaatatatatatatatatatatataaaaacatgtattgtatacactttgtacatttatatgatacttattaaaatcatatttaaaaaagtaaactagtaatgatagtttaatgttattgtcgatctaataaatatatatatatatatatatgaaacatataagcatatatcttattatataaagtacagttttgaaagttactaactcacgagatcatgacacgtgtcaggtctatcattgagatgttgacatatgtcaaaaaaaattctttaaaaaataaataaacatatttacatatactaatttatatttctatatctaaaaatttaacttataattttattaattaaaaaggaaaactaacaataagatggagtgtatagaattaaattgtatttgtattgaaaatttggattgtatttgaattgtatacaatcgaattaaattgtattctattatgataaaaaataatatttaaattgtattgtaaaatcgaagttgtaagattaaaatttattttaaagaaatactaaattaaatactgaaaaaaatatgagttactatttaaaattcaaatatcatcaataagttggagtgtatagagttaaaaggcagtttattatgataaaagaaatagttaaaatgtatagtaaaattgaatgtatatgattgaaattttatttaattcaaaaattactaaatttaacattagaaaagtgtggatcactatttaccattcaaattttaaatattatcaatacatatttgaataaatttatatcttaggcgggccttatctagtatatatatatatatataagtagaataatattcatgcatatcttaagaaaacccaaaaattagaatgtatgaaatataattgcataatcgaaccaagggaaagaagaattgttttgcataatgaaatagaattagtttatattgtatttgtttaaaattaactctcaaaacaacaaaactctatctttcaatttaacagcaacaaatcttctagaattgaatgtacaacaaatgcaagtaggtacatgatataataataataatgtgatataactagtttagtgaaatgagttaaacaaaaataacaaaataaatgaagtggagaaagtaaatgaagaggaagagtcatcgctgtcatggtcgcagttaaagaggtggtcagagtcagaagtctcccttaagcaaccttccaaatttattgacatttctgtttcccaagatccacccaccactctcctctctctcttcctcatttctgcgcaagaatctaaaccaaatctctcatcctctcttctatgtcccaaaacaggaacataactactactactaccatgtcttgactctgttgagaatcttaaatcctacctaacctccaatg

SEQ ID NO: 8161 - DNA, 3000 bp, Unknown
  misc_feature (1)..( 3000): cDNA_ID_1810672_gDNA_ID_1621198_Annot_ID_174776 3000 nt of promoter + ATG
aggctaaaagcaagtgatagaaccaaatcttgattggaatctacaatgtatctagagaatccttatgtcgccatggcaagcaagaaagagatcaaggaaaaataagatcgtgactaaacattggccaatgttctgtactttttggtgaatattatagaatatgtgttcacctggaaatgctggtgtcacaagctttcctttttctcttgagaggtttaaggccaaggttcagagctaaatcctcaacaggaaccttgatcacatcgtttctaacaccgatatcagtagcatacctactcatacaatacatcccagcagtgacagttgctacaccaacaggatttggaatcaacaatgtgagaggtgacgagagtagtgcagctagaggagcacctatgatagaactggcttgaccacttctcccaaccccgttcttatccagaatgagcaatcctgtcttgcagtagagagcaaaatcttcgcagttattctggaagacattgtagttaccaaatccgttttggagaaggtgcattgctctatggatgactgtttgaagcgggtcagatggagcagttgtgcacgtgccaccgcggaatctggtgaggaaaatcgatgagctgactccataatcaaaacggtagagagaacctttcttgagaaagcagtctaggcaagaaagtactactccactctttggtcgtttatatccacagtcaggatatgtaggacaaggagcttctgaagaatcattaacctctgaaactgaagaagacgaagaagaagaagaagaagcgagtgtaggagatatcaagctgtgctcaggtttgaaatgaaccactttgcaaccaccaacaaatacgcctacaaatgtggaaaatttagaagaaaacaaaatgctttcttcagttgaaatgtcaacaaaagcaatcaaaatctatttgctaccaccattgactatagaaggacaagtcatcatcagtacgattgaatccagagaaaacaaaagatgagactttttgaagatccgtttcaataaagtcaaaaactttggcatgagggaaaaagacctaataacaaaacagagtttttgacacaataacccaataagaaaccaaatgacggtttgtttcttcatctctgcaacggaaagaggtaacataaaccctaaaatttacacaaagaagatccaaattgaggaaaaactatggatgattcatgccaaaagctcattgatgatgaaatcaaaaggaagaaatcgaaggtaccgtggtgagaataagcgaagacggctcgataagtgtagatgtgatcaccaggtttaagctcgtctctctcgactttgttcgtgagtacacccattgcttcgtcttcctcaaaataaaagctttccctttggcttgtggaaattgcagtgtacaagtagattcttacgtcagcggcagagatatgattgggcgatcaaaccggagactgttgaaccaatgccgttacagaatcttttgacggcgttaactgttagatgacgacaatcgctgtggagggtaatatggtcaatatacgaaaaggcttttgtgaacacgacgccgtttttaaagtgtccctggaatcttattcttcctttcttggtgtattggactcatattgggcttaaagaaaacgctctacggcctaaatatcgaaaagcgtattatttatctatcaaccaattgttattttgctcattgccaactaatgaacaatgcttagaattaatcaaattttctaatctgaacgaaggaagatataagtaggagttttatacaatcgataattgtatacttaattattattataagctatattggttaatgagtttctttggagtgagtatataataagaaaaatatatatagagccgagcgtagtggaggtagatcaggcaataatggaagaaacttcgaggaacttcgctttttgttgtaaccacaaaagcgaatataacaattaatacggtttgagtaggcttgcagattttcagacagcactcctactgacagatgtttgaaaattaaaatatttattgcgattattataacaacactgtagtaaggaacttttgggttatttcattggtttattaaagtctttaatcgttgactttttaatttcattattatctgtaaactcgtattttaagtgattttaataataataatttgaaagtaaaatggaatatcccccgatatcaagcgagccgtacgggaaagggaaagtcaaacatgtaataacagttttaaatgaagggtactacagtcttttcaaggggttaataacgttccgttttctttatggacagccaatcagatgggaccacgtatatcactattaccaaaccttcgcttttctggaaagtggaaagcaaaaccacagagagaagagaagaagaacaaagcaaaatatattcaaaatttaagcaataaaggcaaaaattaaaagacaacgagtttcaaacacgaaaccacgacttgtccaaatcaagatttgtcctttttcctttttagtggtagaacgcgaatcaaatttgggaataaaattttacttcttactttttcaaaaattcttgggtcttcttcagctttgtctccaagcaaacttttagtcaaatcatttttttctttcttgatggactttctttcatgtttgatatttcaatgacgaaagctctaactggtttttcttggaatttaggtaagaatttatactctgtttctctctctgtttaactcagttcttgttttgggtttctgggtttgtattttttttagatctttgattatttattatgttctatgttgtaaaagatatcaaaccgtcaataaaaactgtaactttatttgttgtttaaaaattgatatttcattgtttgattgaaatttttctacaggaatttgataaacggtttctcacatacacaagaagaaaataaccgttttgagttaaagtaaagcttttgaacca

SEQ ID NO: 8162 - DNA, 3000 bp, Unknown
  misc_feature (1)..( 3000): cDNA_ID_2123402_gDNA_ID_1621198_Annot_ID_174762 3000 nt of promoter + ATG
aacaattggtctccggaagaacaaagctcattattcctccttagctatgtaagtgaaaaatattattgtttaattttgatttttatgcaaataaactctcaaagtcttctatttttacaattttactctctacgtccaaaataaaaaaatatacaaaataatcatatgaagtcaaaactaatacgcaatatagccgatttttgcaactttacatatattgtaaacgttttcagatatagttgaaatcttcatctcaagggcttcaatttgatatattatttatcgaaattttaaaatttggtaatagcgaaaaaagctatattgtgtattatttttatttcatatgattattctgcatttttggacgtgaatgataaagttgcaaaaatggacgactttgacatatattcaactcatgtataggtgtggaaatgctggagagaaggagaagtgttgaacattgtggatccaagtttgattgaaacaagaggtctaagtgatgagatcaggaaatgcattcacattggtttgttgtgtgttcaggagaatccagggagtagaccaacaatggcttctattgttagaatgctcaatgcaaattctttcactttaccgagacccttgcaacccgctttttactcaggagttgtagactcatcgtcaagagacaacaatcatacaagaaacccgcgtattgcgtctttgaatgatgttacaattacggagttagatcctcgttgattaactttgtaagagacaaaaatgattttttctattgctttaaagtttacttcagaatgtatcagtatgatttttggttatgttgtaaaagacttgttaagcatgagatctcaattggtgttgttttcttgagtaatcaagaactgaatttgtgatgataaacagattttgaagagttcttttaggtttctgtttttgaataatttaacaaaagaaaattaaggcagcacaaaggcccaaacgacagttgtgcaatgtgatggagtcgatttgaacgagcacatagacaagaaacaaaagatgaaagaagtgaaaatgaaggttccaaataaacttaattaaagagtttatcctcagagtcagagtgtaagctactttattttggaaactttcttccatgtccagagtctcgttatcatccctccacttatcaatttcagaaaaccaaagaaccatggagggaatcaagagagatcataaaagagaaatcaaatgtgaattatagggaaaaagaatgatggacgacataaaaggggaaaaaagaacttgagcaatcaagaatatggctcaaagagaatcatttcaaatcagagaacaaaaaaaggtcagcaataaaaccattaattgatcaaatctacagattctaagtttccatggtagactatgtagtacggtttaaggacaaggatactgcaaaatggtttacacttccatgtgttttttcaagaaaataactttgatgcacatatagcaagaatacacattcactttcgagatataatgatccgcaagtactaaaagaaagataagaaacaacatacattaagttgtatacaattttacgagatcaaaggaaataaaggatatttaagcaagacatatggatgaaaataatatgtttagcaaatgagtaaagcaattaacaaattcaaatcaaataaatctatcccaaatcgtaaatctaagttaagcctataaaaaactaaaagctagatggaatatttagaagtgagaagatgaaacacaatgagaaaaataaggaggcaaagtcaaagactaaacgcaatgagaaaaaaaggaacgttggtattatgttgggccttaaacgtacattagcccatagctctttattgtataatgttttattattattatactgttgggccttaaacgaacaatttggtttatacaattcggagaaacgtttggataacgttcaacgtctagaatcaatatcatgatacttttatatttaatgcagggaattataactatactagatagacggctgtaagatgtaaatataattttttatcgataatatttaaattttaaatagtaaaataataatatatacattattcttatatataattttgaatagtaaaatagtagttttatgcattttattttattatacacattcaattttattgatgatatttgaagtctaaatagtaatctacacactttttctttattataatttagtatttagaagaaaaaaaacaaaattttatcttacacattcaattttgtaatacaatttaactatctatttcataaaaaactcgattttaattctacacacttcatcttacttgataatgatttcatgtcaaaataatatttatatgagatcaaatctatattttagttaatattaaaaattattaacaattaacaaaacataattaataataataaattttttgttaataccatatatattaaaaatttgaccaataacatatataaaattgttttgttaatttgcttttggttaagaaaaataaaatgtaatattttttagatatagacatatgaattagtatatgttaataatgatttattttttagttttctatttctttaagaaaaaaaagttaattattttcttacacgtgtcaacatctgatcgatagacttgacacgtggcataatcctatgaattagtaattctaataagatattattctggtcttacgattggtagacgagttatatttaatacgctttacatcaacactcaaatctactttgaatgaaaggttctaatgctgctacacagctaacctactttgacgtagtcaaaaacacgtcacgtctaattttcaaagaacagaaaatttcaaagtgacgaagacttattaaatttggtttcgttgataaaatacatataaattatgtaaaagtttaaaaccatgaacaaactacaacattcataatcataatcagcaagtccactttagagtcatg

SEQ ID NO: 8163 - DNA, 3000 bp, Unknown
  misc_feature (1)..( 3000): cDNA_ID_2173159_gDNA_ID_1621198_Annot_ID_174759 3000 nt of promoter + ATG
tttcaaattacctctaaaagcctttccatgttcctgagaaccaatcgatagaaaaggttggcctctgtatctttgaaccgtcgcattttgcttctccgataactacagttaaagaccaacaatttctacagtgaccactgaaaaactcaaaatcgagatgatcacaatctctactctatacagtgaatcaaacatagaacaaataggcaaagtcgcaaccttacaaataaagcgctcatcttcaccaccaacggaagcggcagcaacagaaactgtctcatttttcgccggagccaccgtctccggtacgagtgcttcaccgggagtcgatagcaaaaagacctcaagaacatctctgactagcttcttgtgattggttcccgataagtcgataccgagtttagccgaagcgtcaagtcggagtttgaactccgtcatttggtccatatcagattcactgagtatgctcttcactgtttcctcgattttttgtgtagcgacaatctccatagtttcaccagaatcaagcaacgaattctccatttcgcccgaaaaagaagaaaaaaaaggataaagaaaaagatttcgcagtagcgtcgagttttggttgttggccggcgttatatttagggttcataaatcgccgggggaaaaaatttggccggagtgtgaaaaaaagaggttctaccgagaattgaactcgggttactggattcagagtccaatgtcctaaccgctagaccatagaacctttttgctatagctgttgcatttaatactttatatatgcaaatatatatatatgagttttttttccttatctatatatcttttctgttttataatacgatatatgaatacatgggtgagatacgaatacgattgagaaatatatgggtgaaatacagtttttcttcacgaagccgataagatactaagagtcgaatccttctagaaactaaaccgacagaaagcaaattatttttgaaaattaagctcaaacaaaagaggctaaatataaagatagcaaggtaatagtcattaacatttgttgtgaataatctagtttgggctaatgttaatcttgttttacttgtcttctcactgcattgcagcttaagaaattagtattgcatgctgcgagctcagactcagccagagggctaacccaacagattttgatgcctaaaacatctttaagctcatttaaaattcttaagcattttaaatctatttataattaaagtctcaaaaaaacgaaggtaaggttcgaactgtccacgaaagagtcactaatctatgaaacaatcactagactacgaaacatttttaaaatttgatgccctttaatattatctataattttaggcgcgtaaagcatgagtttcaccaactttagcccagggccggccctgctcagccataagagaagcaaaagatgtaatgcaaaactccaatacgcagtaatgataacaaaaaaaagtttgttcgttaaagcttatcaatgcttacaaaacatcaaaaccaacttgacatgtgatggcagtaacaaaatcgagaaggcgatgctaaaagtaacttcataaactagattgatcaaaagtactcatagcttcggaatcaacataagacaccaaatatgttcaagtcacctttaaaagcaagttaatagccaacaaacaatgtgcatttcacatttcgcttctccaataactaatgcctaacaatttacagaaaacatcacttctttcctcgacaatccattgtattattttcgtgaaatgtcatcatagaagaagcacttaaaatgaaaattgggttggcccatgaatttgaattctctaacccaagaccaaaacccataaaagttatttacgaccatcgaaccacttttttttttttttttttaacggcaaacatttttctattaattagcccaaatgggcttcataaacaggtacaacttgaggccaaaagcccactaattgcaaacattaaatagacaatatgatgacacatgtatgcaatgtggagattgcagcgtagatcaacgtttcagcacatgccccgtcactgcttcgccggagaaatcttccgccggtcagcaaatgattcagctcctccatgaaactttctacccacatttagttgtaccgaatgccttttgccaaggatcaccggaaatagtctattggagttagtttggtcaccggaaatttaaacttcagctgattaggattagaatattccttggaggaccattaaaacatgacgtgaaccccaactcgtcatactcttctccaatcaaccacaacaccttgatctatcatccatgaagaaccgatgcccttacgcttttattagcatagcgaggaattttccttcacatggaagagtaatcaagcatccaatgaacacatttccatctaaaaacctccaagaattaaacatcttctaaaattgaaagtgttgatttacaacctgcaaaaggccttataaaaaaccggcaaagaaaaccgaaagaaactccgaacaattcggaaattaaaaccggcaagataccggaaacaaaagaaaagaaaaaaaacttaaatgaaatccgatttcaatcggagaaaatattaaacagagttttcctctctctcaaagataccagagagaaccacttggttaattaaagaaaatctattttaaccggttgtttaaaaaatagttaaatttggaaagaaaacagaagttgaaacggtagaatagtaaaaagtaatgaaacgtcttgttccctaattaataattacttacgattcacgaagtagactttaaagcccatactaccctctggactgtggccacgtcactctcctttaactactttgatagtcccaaagctgcgacggcgataaatcgatgaattaacgacgttcgaagaaactccagaggtctcttcattttccttttgtatactggtaaaaattggtggtctcttctttgtctccgagtatg

SEQ ID NO: 8164 - DNA, 3000 bp, Unknown
  misc_feature (1)..( 3000): cDNA_ID_1810680_gDNA_ID_1621198_Annot_ID_57597 3000 nt of promoter + ATG
tcccaagttttggaaacatcactatctccgctttgaaggtaacaatgttttcttcttcatacccactgacatttttcttgcttaagaaacaacaactttgtttttttttgttttataggttaaatgtggtggtcaattttatcatttagttgactctctcattttgaacacggctttcccaagcaaagaaacgtttctagttgtcgatgtgctgagggttgaggagaagggtaagatgctgaccggagaaactccgttgtcaaaccctaatttacttgagagagagaccaagactattaaggatgttgataaaactaaaaagaggaaactgaaaagtttggatagtgccaaaagaagtcgtaagaaactatctcttgtggatcagtcaagtggtaaaggagtggttgaaccttttgcaataggaaaaggtaacctctgtttttctctttattatggtctatgaactctttagttgttgttattggagagtattagacagtagttgagttaccttttattgtatgatctgattttattaagacattgaaagaggctaggtggtcttactcttgaactagtgatagaaactgaattagctatgttgcgtgggaatcacaaattaatcataagcaaaactactaaaaacgaaatttttagcttataacaatagttgaattctgtttttagagtggcccttaattaatatatgtatatttatatgatcaatagaccttgaaaagggagaaaaaagtgttgctacggatattgcacttgtggatgatgagaacgagagtcacaaagatgatgatgttcgtgtagtagaaggtaaacgtttatgtttacagctaaccttacggattttcatttctagatgatgttacataagccttgattagttccaactgctgcaattaatcatttaactgcttaattgttagacatcaatcaatctgctgatgttgagaacgaagggatcaacaaagatgatggtgttgatgcaacttctgaatcttttccaaactcgacaggagaaaagaagccagttaccaatattcttgtattaatggcgcctgtgccaaacagtaatttcagttccttgttgaatattcattttattttctctaatcatatataacgtgggacgtttctattaactcgtaaattgctgaatctgtgtagagaaaaaggttggtacaaagaacaatggtggaaaagatgctgatgacaaggcctcgactaaagaagttactgaagtggcttctagctcaaggaacgttgaccacgatgttgttatgggagacttgcaagagaatgtggagaaagttgttaagaaatcaacaaagaagtcgaagaagaaacagtcttcggacgttgtggaggaggcttaagtatttgtcatctgagataaacaatgctcgattatgagcatcattgatctcatttctatcttcttttgagttgctgaactttaatgctagcttgttctagtttaagaaacttgtttcctgttttttctaatcgtgaggttttttggttttctaatgcatgatgtcattaaggctttaacatttcacaatctatgttgagatgaatgtttattatgaattaatatcgcttgtacttggtttttcttatgaggattttcttaacgtcaatgtatctaatgctaattgggatattgtaacgatgaacaacttaataattggtctattacaaggtagagtcttccattgaaagcagctattgttggtgaaagatttgatgaaaaggattcaaaggtaagctcatcctagtttcagcttgttgccattcttcaaggttgggttgaataagaggagattcagaggtaatatactctgtagccctctagaaagcagaaccgatatgtttaagattgcttgttggcagagtataaactatccttttgtttcccttttcagtatgagacagtctcaggttttgtctgtgaggccttaagagaatgatgaacaagacgaaggtaaacacgagcgtcaagatcagaaggagaagcaccaagtttatagactagaggtacatagattcatagtactacttctctttgcactaccacattctgcaaaatgcatattttattctcttaactgttcagacagatactagcagggaatgccagagaagtgagtgcagtccggttcgaacgagttaatgatatggatcaagtgtgatttgtgaaaggcccgagatggttcccaagttcgtaagaaaatggagaagtgaggaagattccgatggtaatctccaagccaagagaatcatgcatcgaaacaaaagtttagttccatatattgtaaagagaattaagtattgactctaataataaatttgattaaattaaatgactcatttgcaataattacgtagctaaatgggcttcacttaccattatacggtccaatgaacactggctccgagttttgccaagatataaacgattcatcttcttcgtttcatgaacagaagaaacagagcaagtttacacacagagagttaaaaccctaaaccttttcgtttcccaggaacaatggctaatcgcgaaacagattcctcaccggagattcgctgcgtctttgtagaaaccaacctcgacactcgtctcgcgttacctgtgcataaagatgaaatcatctccgatttcaaaggtctctcttctcaaattcatcactgaatcggcttactaaaacttatagttactgcgtttctctgattattgtggtttttggtttatagacaaagtactcaaggagcataaacaagttttcccagaaattggagaaatcaatatctctgcgatgaaggtaattggaatttgctactttgtttcatacattaggaacaattaattgatgagttgctttttattttatttttcaggttaaaagacgaagagagttttatcatttctcagaatctttgaatgtgtgtaaggcttttgatggcattagtacagactggtttatg

SEQ ID NO: 8165 - DNA, 3000 bp, Unknown; identical to SEQ ID NO: 8161
  misc_feature (1)..( 3000): cDNA_ID_1810672_gDNA_ID_1621198_Annot_ID_57600 3000 nt of promoter + ATG

SEQ ID NO: 8166 - DNA, 3000 bp, Unknown
  misc_feature (1)..( 3000): cDNA_ID_1810664_gDNA_ID_1621198_Annot_ID_57603 3000 nt of promoter + ATG
taaataaatctcggtcttcatttcatcttatcttaaggtgtggcttgttgttgttgttgttgttgttgttgttgttgttgttgttgttgttgttcatatatatatatatatatatatatatgtctcatgatgattaattgtacgcttatgcccgatcataaaaatagaaaatcatcatcttgtaataatattaaaataatatgtatgttgaacaattaatatttagttatttactatactcaatctcttctatgagttgacttgtcaattgaaattttataattttattaatgatttggagaagaaagtaattttacatttttccatttttattttaaaaatcatttttattttaaaaatcactttagttcaggttttttgttgctaaaatgtaaatattcataagaataaaaatgtttaggtttacagttatatattttagacttatagacttggtcttatggcaaaaaaaaaggattaaaacatggaaggaaaaacaatcagtttgtcgactcaacgtatgctatgaagcaaacaatgttagagaaaaagataaagtgatacaagattttgaagttcctccaaagtgagttacaaaagatgaaatttggcaatgaaaatttataaaaacttcaaaagtggaagcctttcactggaggccaatggactgattctatcggctttgccaaactattctacaacaggttaatcatttggagaagaaagtaatttagtggttatttcacatatataccaccattcatcaatataacttctatgttacgtttccgttcataaagatatgtgaaaacgaagttcctgtaaatgaatgattaagttaagaaatttattcgctaaatctataaattcatctgatcaacattgttgtctacgcaattgttgttcattaaatctttacggtcacaaaaataacaacctcatgatatgttagaaaaactttaatcatacacttgcaaaaaaaagtgaagcaaaatctaccataaatatgcaattgtgcagtggtcttctcctcttaattttgtttgaagtacgtatattcgaaactttatttcgattataatttttcgtacgattctttataagtaaagcaaaataatgatggattgaagaatcttgaaaatggaaagaaatggacgagaggcttttgaccatttgtatggccagaataacaacactcactaccaaatacaataacgtgattttgtttaatagattagatgcggtaggaatatattattcttcgtgaactaaaaccatgttttataacgacaaaaaaaaacccatgttttataagtttatgggccaaaattgggcttttgtattataaacatgtttacggaagtattcagctaagtatatataaaaaaaaacaattacactaatttatttaaattttattattacctacttacaattagtaaaatttaaaattaacaaaaaaaaaacttttacttacttttagttattgttttaagaaaaaacatcattaattaccctacttttttttttaatactaggaggttctaagccaaaacatcttaattattatattgtttatatgtctaataatatccataaatgtattaaaaaaacttaaaacataaactaaagggtaatagatcataatattattgaatggagtaagaaaatgtataaattataattcaaaaagagaactataatctgcttttctacccaaatgaagtaaaataagacatcaatttgcatttcaatggtcagttttaaaggtaaaattaaagacgttaaacacgtgtaatgtaaaagagatcactcatgagtcatgaccaaccatattcttagtttatataagtaattcacaccccttaaaaagaaatatagtctataatcaatcatacttagcatgaaaacgatgatcaagtttctgctgttaatactggtgatctctcctatgtcgatatgcgccgagaaggacatgatgataaatgaatgccacaatgcagacgtcccagccatatgcatgcaatgtcttgaatccgacccaaactccattcacgccgaccatataggcatagctggcatcgtcataaactgtcttgaatcccacctccatatcatcaccaagcaagttttcacttacaaattataaccaatatacagaaatatcctctaatatatcaattttttcatttgtgtagtaacataacgaatttatcgtcaaagaaagataaaggtgaagtgaaaacagctctggagatttgcaaaaaagacttgtcgacgaatgcatctacaatactgtcggaagccaaaacaagtttgaaaaccggtgattatgataaaaccaacaaatcgataaagcttgcgcttggctttcctctgagatgtatgttcaatctcaaacgtgtcaagttcacgtctccccaactatttagtcaaatcaatatctatgctcaactctctgacgctgctatgaggatcattgatcgcttctaataagtaataactccttattgttttctatataactcaacttcgatcaatgcttaccccaatttgaataaatcatttcctttatgaaatttataaagtcacatatatccatttgttgtagctctcatgttttttttttcttttcaaatttgtcaaaataagttttcgtttgaaccatcattcaatataaatctaaatgatatattgtcttttttttttttttttttttggcaaagaatgatatattgtctatttcatcaaagttggaccactatacgataaattgttgttcttataacgttaaagtaggaaaacagttcagttttcacgtgactaacttactactattggaatatttatcataaactttaattcacgaaaatcattaatgaaaatttgatattactactataatatcgtcttctctattaatttagaatcttattcatccttttccacttgtcttctctaaccctctaaattctctttggtcgggatcactggaaagaa

SEQ ID NO: 8167 - DNA, 3000 bp, Unknown
  misc_feature (1)..( 3000): cDNA_ID_1808523_gDNA_ID_1621198_Annot_ID_57606 3000 nt of promoter + ATG
agagagattacaagcatggccaagagttgctggtcctcccgtcgtcatgaaccctatcagtcgccagaatttcatcgtcaagtcacgtcctgaataacttttgatgccttctcgtgcatcgttctcattcgttatggattcattttcgaatatctgctcttttgtgtttgatttgaggatcggctgattgctctagctggttatagtaataatttgtgttgatgcgtaacacattattcggatcaagcttttccccgatgcataacttttgtaaggtttgttgattttgacgataaatgaaatcgagccaaaaagaaaaacttctaagacattattggtttgtttggtttggaattttgttatcgctgattctgtaaacatttttaaaactgttacttttcatctcaagccttggaattaattatcacacaaacctggaggcaaactatcaggtaaacgtgattctaaacccggttcatacaccaaattgaaccggtgacactaataccatacaacaacatttaacattgtacatgtgaatgtgaaccattccacatccatctaggaactgaaactcaactgtctcagaacccttttaacagagactaactcataaaatgacaaaaccttttttttatatcatcgtgaagaaagtaaaaatgaaaggtagaacctaattgatatcaacaagaagcatcacttattcttcctctatttcattttccttcagtttttgcatcaccaccgccatgtctagcggctgagccaccttgcccatcagctccactctggctcatattggtcccatccggtttacctcctccactagcatcgttaggacccgcttttggtagagaaagaaggtgaaaatcagtaatgtgataataagttccaaactgctgtaaaaccaaatattaccattgtttgcggcaagagcagtttcatggtggtgcatttgatgttgcagtccgttgttattattcaaacccattggtctaatccccatgtgcccttgcatagcttgttgatgtaactgttgctgcggatccagaaactgatgcgggctaccaaattgcaatggacctctaggagggaaaatcccaggaggtatttgttgagccattcccacagcttgatgttgctgcatgaagtagcttggtggtggctgcattgatgacggattaggagccatctacagaaaccaaacacacacaaactataagaaccaaaatgttttgtttttcaactgatcaaaacagaaacttactgcttggggagtcatggctcctgatgttagtgtagctgctggtggctgaggttgagcatccgcaattgcagcgagatacatcaaattcttctggagaagagcttgatacctaaaagaatcaagcaagaaccatgttttattattaatattctatttaccatcagtaaagctaacatagctcggtcttggtatcgagaatcccacacttactgagcacattctgcaagtttaccgaggttctgattttccaagatcgccattatcagcttcttgttctcatcaagatactgcaagaagcagcaataagtgactcactgtgtcaacatgtcatcttcacaatctgattttaagctttcaaatctcatatgcatacaaatactctgttttcactcaaaaaaaaactccaaactcatgattgtacatccaattccagtaacaaaaaaaagttaaagcggaaaacaatgacactttaaaacaaatcatactcaagaaggaaagttcattacaacagtttaaactactcaaaaacatcattacacaaccaatttcaaagctacgataaacagacattatgactaaacaacagaaagacaaaaaatatagaaagtaaagtagtaaccttttggatctgttcggtggtgatattattggtgggcggaaatgaaggaagaaccatcggaatcatctgtggagattgctgcatcttttataattcaccaatcaaaactctgaaacagtgaaaccctaaagtttcttctcacgattattacaaaacaataattctgagtgatagaattggtttaagagcccaatgcaaaacaaactgatgcaaaaatattcaacaaacgaatattttggattatccttaaatttaagacttttgatttgtttgaatttcgccgacgaggtttctgggaaatcgtaggacaaaaaagtcccccaaccaattaatttgtctcccccaccgaatgtacacgtggcaccttgtctgatttttcgtcagctctacgataaccaaaaaaagacaacatttgtagctgttattatttattgggcctgttaatgggccttataaagaattatgaaagcttctgtgtcaagaagaaggttactttaaatctgtatcaatatcagctccacgacggcgattcgtcgttgtcctccgaaccaagcaaactccgatccctcaccgtggctccggatattttacggcggttgttcccggctcggactcgaagaattgtccggattctccctttgaccaggctggagatgaaccttttccggttctgctccggtctgaaagtcctcggctatttcatgatccttcttgtcgtcgccgtcgttggtgtatcttactacgccgtcgtagttagcacatggtggccgatcttgatccgcggagaccatggagctttatccgccctcgctgccttaatcatctttgttttccatttcctggtaatttccaagtctcataatttcagattaggttttgtttctggaattgtaagtctaggttttctgctacttaacccctaaaccttaaacttagggatgtggcatgaaacttatgtagccaagagaatgagaaatgcaatgtagttatgaagcatgaagcagtgtagatacataatcattgtttagaccattgattgttagtaaatgtttaggctccctgagtttaggtttacaattatacttctgatttgcttggttctttgcagctgata

SEQ ID NO: 8168 - DNA, 3000 bp, Unknown
  misc_feature (1)..( 3000): cDNA_ID_1810656_gDNA_ID_1621198_Annot_ID_57607 3000 nt of promoter + ATG
cttacaagacgtacttataccgcaagagaagattacgcagctgttgtaatccaaactggtttcagaggctatttggtgagcaaaattctcccttaactacatttgattaattagtaatcaaacaggttttggatttaactttgaattatataggcaagaagagcattaagagcattgaaagggctagtgaagttacaagcactagtgagaggtcacaatgtgaggaagcaagcaaagatgactttaaggtgtatgcaagctctagttcgagtccaatctcgtgtgcttgaccaacggaaacgcttgtctcacgatggtagtcgcaaatctgccttcagcgacactcaaagtgtgctcgaatctcgttatcttcaagaaatatcagacagaagatccatggtgagtgatctctataagtttcagaacaccattgttgctctgtttcaacgaccatttttgctctgtttcagcaatcagctatataaagctaacattttgaaatgccttttttgttgttgtgtagtcaagagaaggaagtagcattgcggaagattgggatgatcgaccacacacgattgaggaagtgaaagcaatgttgcaacaaagacgagacaatgcgttgagacgtgagagtaacaatagtatatcacaagctttctctcaccaggtaatagatatgaattcatattaatcgtttgtttgttttcggtaatttgattcgtttcggtgtttgatttcggtgaaaggttcggagaacaagaggtagttattctacaggagacgagtatgaagaagagagaccgaaatggttagacagatggatggcttctaaaccgtgggataaacgagcttcaacggatcaaagagtaccaccggtttacaaaaccgtggagatcgatacttctcaaccgtatttaacccgcggtaactcgagaaccggtgcaagtccaagccgtagccaaaggcctagttcaccatcaaggaccagccaccattaccaacaacacaatttctcatcagctacaccatctccggctaaatctagaccgatacaaattcgatccgctagtccgcggatccaaagagatgatcggtcagcgtacaactacacatcaaacacacctagcttgagatctaactatagtttcacagcaagaagtggttatagtgtttgtaccactactactactgctacaaatgctgcattgccaaactacatggcgattacggaatctgctaaggctagaatccggtctcagagtgcaccaaggcaacggccttcaacacccgagaaagaacgtatcagttcagctagaaaacggctttcgtttccagttccaccgctgccgcagcaaatggatggtcagagtttaaggagtccaagtttcaagagtataggtggctcacaattgggtgcattggaacaacaatcaaattactcttcttgttgtactgagtctcttggtggtggtggagagatatcacctgcttctactagcgattataggcgatggttaagatgattccataatccaaccaaatcaaccggtcatgatttttttcctcccttttttttttttgttatatataaataaaaacaatttgacaaaaagaaccataactttttcagtttttattgatgatctttgagattggtgtgtaattttgtttgtgtttatgtttgtgtgtgtgaatttgtagcttataattggaagtgtttactaactaatctctatataaatatgtatgctcatatttttatctataaatgttgcaattaggatgtgaacaatagtttatcaatctgtcatggtatctttgttaattatatggaatctttttagtataaaataacgaaaattttcactggccttatttgtttttacatgcaaagtgaagttgttaagaaaaccataaaaaaaagctgcaactttgcaacttgagatccacgagcaaggaacattacccatgtgacatgattcctacatgatcagtcttgtcttctacgttatacactactactctatatccacctaaatataaattaaatgcttctgaaatggaataattttaaaacagcacgtagttttcatatcaccaaagaaaacggcagggctggcaaaatcacgaattttttaaacaggtataataaagaactagaaaacactaggcccaataaaaacagtgggcttaaaaagcgttttgatttagggttaatgtgtgcgtaacatgtgatcatagcccacgagtgggtaaggagtgtcttcatcttcttctaccggagatcgagaaatagccgacgaagttttgttttttgagtaaaacagtattcgtcggacaaccgaagcgaaatccctaatttcccacaacacgaaataccaatttccccaattcgaaaacaaacacggtctggtatgccgagaaaattctccatttctacttttcttatacatttgttttggttgtttcatataaatacttctcatcttcttcgattttgttaccctcccccaaacaatataaaaaaaaaaggataaaccctagtttctttctcagactgtttcaagttcagatttttatttctgagcttaactggtgagtaatttgctttctggagagatgtgtgagttacgatctctaatttcattggttgcttcggttatggcttgattcttctctctgttatcaatttggatctggaatcatatatatacatacacaaaaactctgctctttttcaaagttttgatttttatctcatttgacgcttgtttcgtgatagcaatgaactacaattcttctgtatctctgccactaaaagaacctgaatttagtttgaaccatcctttcttctccacatttttttaaacgaaaaagagcagttctcatatcacccattataagcttttttttttggtgtatggtcctatagcatttttttaacagtgattacctgagcttcgtggttaaaaaagagtatggttattggatgaccagatg

SEQ ID NO: 8169 - DNA, 3000 bp, Unknown; identical to SEQ ID NO: 8160
  misc_feature (1)..( 3000): cDNA_ID_1810653_gDNA_ID_1621198_Annot_ID_57608 3000 nt of promoter + ATG

SEQ ID NO: 8170 - DNA, 3000 bp, Unknown; identical to SEQ ID NO: 8159
  misc_feature (1)..( 3000): cDNA_ID_1810649_gDNA_ID_1621198_Annot_ID_57609 3000 nt of promoter + ATG

SEQ ID NO: 8171 - DNA, 3000 bp, Unknown; identical to SEQ ID NO: 8158
  misc_feature (1)..( 3000): cDNA_ID_1810645_gDNA_ID_1621198_Annot_ID_57610 3000 nt of promoter + ATG

SEQ ID NO: 8172 - DNA, 3000 bp, Unknown
  misc_feature (1)..( 3000): cDNA_ID_1810641_gDNA_ID_1621198_Annot_ID_57611 3000 nt of promoter + ATG
ggaacagtcctctcggcatcacctttgcctgatgaaaattttggaagctccttggtgtcttctaaggggggtaactctgcagttccatccagcagtataagtagcatgatgggaggtgttgttggggttggttcgacttggaagctctttaatgaggattcaacttcggtggaagaaggtgttgtcatatttgccacctatcaaactggactagtggtaaatattccagatatttgttcatagtcaatttactggttacgcttctggaaatgatccttttctgtttttgtcaggtaaagctcattccaaatttggaggtgtatgcacaacttcctaggccagaaggggttcgggaaggttccatgccatacactgcctggagacgctcaacaggtaattcttctcctggtataactgtgtactttacatgtactgttttacgtaggtaaaattttgcagaaaattattcgaaggaggcagaagatagggtttcttttcttgtcattgcctgggatcgtcgagttcaggttgccaagttggtaaaatcagacataaaggaatatgccaaatggtcacttgacagcccagctattggtgttgtttggctagatgaccaggtgtgtatactgatataagttttttctaagcaaatacatattcatgagttttcggcttttctctgcatattcagttgctggtgatcccaactgtgacgggccatttgtatctgttcacaagagatggtgtggtaattcaccagacaaacttttcagtggctggttcttcagggaatgacctgatttcctatcatacgtactttactaatgtctttggaaatcctgagaaagcttatcacaactctatgggtgtcagaggggcttcagtgtacattctcgggactgcacatcttgttatctccagacttttgccgtggaaggagcgggttgatgtgttaaggagaggaggtgactggatgggtgcatttaacatggcaatgtcactcttcaatggtcaagctcatggagttgttgacctccccaaaactgtggatgccataagggaagccatagcacccagtttagcagagttgctactttcctatgtagatgaagtattttcttatatttcaatagcattttccaatcagattgaaaacaatggagtaactcatgagccaagtagtggaatcaataatgtcaatttagagatagaagaacaatacaatcgtgttggtggtgttgccgttgagttctgtgttcatattaacaggatggatttgctctttgatgagatattttccagatttgttgctgtacaacaaagaggtatatttttcacatctagatgtattaccatcaacttccttttttttgtgctacattttattaaggaacaggggtcagtatcattccaactatataataattgtttaaaagatgttactacgataggatagtaactacttttctataggttgtctgattctgtatctttatttttttaaatccttagagagctttggtccaccgatcttgaaatatcttattttggtatctcctttgggttggtgtttttcttatgcatgccgatttctataatacatacacatacgtgttgtgctgtgtgtttgcatgtatgttctccattacttttagtttagttcttctgtaaatggtttagagtaattgtatagtttgctaaatgaaacagcataatactttcatatggataaattgcaatgctgagtataatattttgattccttgaggttagtaagtaagatataaacgttctttggaaactgctttccttttccacctcagtttggtactttgatctttgtttaaatctattgatgacaattaattccttgtgtctaatgagatataataatttctcttgatgactagatacatttttggagcttttggagccttatattttaagggatatgctcggatctcttcctccagaggtatcttttgtgaaattataagatttcctcaagagtgccgttgtattttattttatgatttttttgtttcatctcagatcatgcaagcgctggtagaacattatagtaggaaaggatggctacaaagaattgagcagtgtgttttgcacatggatatttcttccttggatttcaatcaggtcacgtttgtagacaatttcacgtgttctgttcggtccttttcttcaataagttgatgtgttgatttagtattatggttgaattttgatgttttcctcattgacacttaggtagtcagaatttgccgtgagcatgggctttatggggccttgctctatcttttcaacaaagggttggatgatttcaggtcacctctggaggaactcttgattgtcttacggaacagtgagaaacaaagggctacagccattgggtatgttatgttaagtcgttgtactttgttctggctgaataaaaccttacatgcaaaactgaactcgagagcctagaattcaaactgctcattcatttctacctaacatgcaactaatcctagagcgcacctatgcatatatctaattgcaatattattgttgtgtaagaaaattttgatttcctttatgacgcaatatagttgtctgaactaaggtatattttgcggccacataaatgatgagttctttttaactctgtttctttttcaggtaccggatgcttgtttatttaaagtactgctttcttggtttggcttttccaccaggtaggattctgttatggtttcactgcatgttatgatctgcaatcgaccttattgtatccagtgacctataactttatataggcattttcctctcacaaacttatttggagttttatctgcaggacatggaactctaaatcctacacgatggccatcacttaggagtgagctgattcagtttctactggagaaatcaaatgcccatgattctagtacatgtgtaacatctcgattgaattatttgaacctctaccatctgctagaa

SEQ ID NO: 8173 - DNA, 3000 bp, Unknown
  misc_feature (1)..( 3000): cDNA_ID_1810633_gDNA_ID_1621198_Annot_ID_57614 3000 nt of promoter + ATG
ctcatctcaaaccaaagtagaaagggaaatctactttaacattttttctttaaacttgacccggagacccaaaacccgtctaacttcagagctggtgtgagtcttcaagtcatatgggtcctgaggtctctccccaaaagttaagtatcttatctactaatctctcactgttctctgagtcattccggaggaaattcgtatctactatacatttagtaccgaattgatgtatattcagtattggatagttaaacttgttccttaagaaaaaaagaaatcgagttcatggactgagatttgcaaacgaggtcttatcatatcttcttgtaaaatacccgggttctgttctcaaataatttcaggtatcaggtattacatgaaccgaaattgatatccgtgagtattttttattacccgaacatatatatacatatgaggacatatatactgataacttgagtttgtgaattgtttaatgattggattatggaacaagttaaaaacaaggtttatttcttgttttttattattgtaataaaggaaaacttgttataattttatggatagttttatatatgtttgggtatatctggacaaggttttggtaaataatattgaaacccaaaataattttggttatttattgggttcttcaacctatacccgaagagaacctatagcttaaataatacgtataatcgaaccagtcttaaacttctaaaccgaacccgaaagactcgatccaaacccgacccgaatacccaaatttcctcaccttagactaaaacaaatggactcctcccttatcaaaagaaaaagaaaaacaattgggctccttgactctaaaaaacacaatgggcttcgtgagataatataatgagtccattagtcatctataaattcagtgactagcgaaaaacatgagaaacatatcggaagcttcttcaccaacctggaaagagaccaccggtaacgtctccaacttatttccctcttctttccatttttttttcaatttacttcttcttcttcttctccagtttcttctatcggtttatttttcaattccatcttcattgtttcgcagacccatagataggctttgatttagggattttaatttcaatggctgcgatcgcgaatccacgcttgctgcttaattattcctgcgaatgacattttcttaagtttaacctttttattttctgttatgttgtttgctcgtttcgaatgaggtcactttttaactcgttcatggatttagcttctaaaaattgatctttttttgcagaaatatgaattaggcatatatatatatatggttttagaggtcaatatacattgtattattcgtttgcttcattcttacaaaagtagagctaaaaaaacctgagcttttaagtcaaagccttattcaaaaatgtttttgctttctaatttctaaagcttaagcattgatgttactgttttgtgatgttcaggtggactggaatcagttttggtagagagcgttgttaaagtttcgtccattaacaggctgaagagttcttcctcaatctgtgtaaccaccacttcgtgctcctcctctatctgtttctcattccagtctcgtctttcgatttctctagcacatgcttgtctcctctgctcacttgttccgcgttcaagctctgattctctctttccctgcaaccatccttttgcctcgcataccaattggttctcaaagtgttgagtttcgtggaatgagtttgtcctttgcatcaattcatctctgaaatagtccattatcagatgttcttcgtggatccaaatggcgtgtctttctttgactcggttccatagctgtgctgccttctcttcaacctcatcattgtattcatcttcactctctctatcaacagtatcacaattctcatcatcatcatacttggtatctgtctcttgtcctccttccatgcaagatgcttcatccattgagccccattcatccaaattgaaaggactaatgttggccaaagactcaaaccgctgaatcgtttgcatgagcttttgtttggttcctgcaaaatcatttacataacgtatgtttcagaacttcgaagtctgaaaaaatctaagaagagaacttgcttcgattgcaatgaaggaaatctatactcactttccacattgtcaaggcattgactgaaagaagagtctgatgtttcgtcatattcctcatgttgaatctcaaacactgagacagggctgttgtgctccttttcacactgtaagttctcctgaccatgatcattacatattaggccaaccaaatcatccaactagtaaagtgcatagggtaataatttcagtatgttaaatgttactcttataagactcattcattaagttgttagattcgtagtcataaaggaattaaagggtacatgctattatatgtaccaaggacaaagacagcttctgttttgtcttcatgtgaatttatattaacaaacagctgcacgtgcatttagagacagcatgggcgaccttacggttgaagcaaagtcaacccataagatctctattctcagatcacattgtcactttatttctttcttaattttgatttgattctgttttctctttatttatgcatgtagtagtcaaagtatgtgattaattaatgttataagtacgagtttctatttctcttaatatagtattcttacctcaggtcccacttcagtgtcggctagtattactgctgtgcaagaatcttcgccgacgcagtgtaagttgtttttaacactctgtttttcaccgcactcctcaacgttacttccccatgatgatggtaaaaactccgatgtaaaatccaagtcagaccaactgctgcaggatgtgccgctggtggtggaggatcctgtggttgttgtcgtgttcttggttgtgtactgatgaggttcaaaatgtgatatgtcctcatgcaggtccttagacgagtgccatcgcacg

SEQ ID NO: 8174 - DNA, 3000 bp, Unknown
  misc_feature (1)..( 3000): cDNA_ID_1810752_gDNA_ID_1621199_Annot_ID_57618 3000 nt of promoter + ATG
aattgtttaaccttcgccatgcatctttaagaaacgttatcgagagaatttttggtatatttaaatctaggttcttgatttttaaatctgcaccaccgttttcttttaagacccaagcagagatagttctttcatgtgctgccttacataactttcttcgacaaaaatgtcggtcagatgaattttcaagtgacgaagaagatgaaacagatgttgacaatgcaaatcagaattctgaagaaaatggtggtgaagaaaatgttgaaacccaagagcaagaaagagagcatgcaagacattggcgagcgaccatagctgcagatatgtggagagatgctactaatattggtagccaaagatagtaattcactttttataaagttcatgtatttgtctttctttggtgttgatggagacacttttcccgtgtttgagctgaaagatttatttttgaaccctttacactttcttttattattattatgaacgagttcttgtcgtgaaatgatatatgacatgcttccgggctaatctcatcgacataattagaaactgagaagttggccatgggaaaatggtacaagacatacaaatacagaaatgacaatgatgtcagcatgacacttgaccataacgttttaaattatgttctactcatatcggtggtggaataattataccttgacctaagaagtatgggtttatatgtattcttttgtaaacgtttaatactattaattatgaacgagttattctacctctatcatctatgttacagctaagcttttggagttatactgtaaaacattgttcattattcaaatcatatcaattaaaataaaaagtacaggatcatatcaattagaatattactttgatcatcataatattctagttgctactaaagaatagaatcatattacttagaatatatattaccatgatcatcataataatatcacaatctttttgttatattaacgtatatctttacgatcgcactatctctataaatgtcacgtacatctctcttctcattctctaagcatacaagctcattcgactgcaaagaaaaaggttcacttgttcttacttttttcttttgttcttatttacagaatcatatgttggaagtgtgatattgattaacttttgaatagttaacttttgtttcccgtctcactatttccttgttttttgcattgacgtatggttattttttattaaaatattgcaactttttcatgttttaacgtatatttgtttttccaatttgtcataggtatcactatgggagattcacaacccaaaaaaagaaaaaagggggattataatccgtggtctccagaggagactaagctgttggtgcaacttcttgtggaagggatcaacaataattggcgtgattctaatggcacaatcagtaaattaaccgtggaaacgaagtttatgccggagatcaacaaagagttttgtcgttcaaaaaactacaatcactacttaagcagaatgaagtatttaaaaatacaataccaaagttgtcttgatcttcagcgttttagttctggttttggttgggatcctttaacaaaaagatttacggcttctgatgaagtttggagcgactatctaaaagtaagtatcacattttcttttttaagtgaacatggtcgtacttacatattattaatatgtccctttgtttttgtaggcacatccgaacaataaacaacttcgttatgatacatttgaattttttgacgagttgcaaatcatatttggggaaggtgttgctactggaaaaaatgcaattggattatgtgatagtacggatggacttacgtacagagctggagagaatccaagaaaagaatatgtggatgattttgacaacgtgtatgagtatgatactacaactcatcatgagtcatcggagcactacgcaccatttatgtctcatggaacttcagaaagtcctaagcttcccccacgtaaaagaacaagatctgagagaagtacttcacaaaaagaagaaagtcctatgatggttgttagcagtaaaattttggatataatacaacaaagagaagagaggcaacaaaatgaagtggcacagaaaaagaataacgtttgggatgctataaaagaaatttctgacttggatgaatgtattcgttacaaggcacttacgaaaatttatcatttgggaatacaagacgttttcgtgagcatgtcggtggaagagaggctaggatggattcaaaccattatggaataatttgagcttaatttttattttctttgtttttaaagtttttaatttggattcaccaaaattattatgaataaattctttatcttattcccaaacttcaaaactctagaaaacttgaaataaaaaaataaaaaactggtcaaagttttgttagatttcgattagattataaaatcatttgttatagagttcatatctattagaaaaccaaatgacatcatatatcactgaaaatagacttccacgacagaatgaatagtgattcagtttaaatgaactcagatgttttaaaatctgataaacttcaactctaatggagttgacttcaacttcactaaccaataacaccacctaaacttataaaattcagaaaaataatcataaaccggaaacaaagctaattatggatggaagagaaacgtaaaccacgttaaaccaaattatggtttaatcaagaaaataaacgaaacaaaatcaagagaaaaattaagattacatcgaataaaccaatcgaaatttacaaagattgtttctgatatcacttcataaccgaatataaactttaagagataaaccataaaccggaaataaagctatttaaccgaatcaaaccgacttaaatcgatttaaccggataatctaaggtctaaaataatgagactgtcactgaagtttgtagatacggcgaggttgtggccggagaaattcgagaggaagaagcaatg

SEQ ID NO: 8175 - DNA, 3000 bp, Unknown
  misc_feature (1)..( 3000): cDNA_ID_1810748_gDNA_ID_1621199_Annot_ID_57619 3000 nt of promoter + ATG
atctttgacccatttagtttgtagagttaatgtaaatgttgactcttaaaataccattaattttcttattgatattgtaaagtttacttagtccattcttaagataatatatacttaccaatcttgttatatataaaatataattttttgaagttagtaactcataagattttgccacgtgtcatgtctattgatttttgacacatgtaatcatattatctatttttaaaatataaaaagaaaaatattagaaaattaaacagtgttgaaaatataataaaataattagaattaactttttagttaaactttataagtgaaatatatatatatatatatcttatataaacaatttttaaaatgtaaagaagataattataataaattttatgtatcttattaaataaaaattgaaaatacaagtgtatatcttaaataaaataaaaaatgtctagaagataattatttttatcttattaaataaaaatggaaattaaaaatcatttaccaattatttaatttgaaactacttattctaaaagaaaaatgattacttttttcttcaaattttaataaggatttaagaaattatataatattattatataaaatacaataaataagaatttttcttaccatcaatcctagaaagatagagattttaaatactcacctctacataaacaaagaaatagtctcatatattctcaccaaacaaagaaactcttcaaaatcaccatcattgcttcaaagtcattttattgataaagctttttttgggttacctatttctcaaacaatattcatatgtgttattggtgttttattgataaagctttttttgggttacctatttctcaaacaatattcatatgtgttattggtgtactacatttggtatgtattaagttttaaaaaaaaaatatttagcatggatattaattaataaacaatgactattgaagttcaaaataacaatataagttattaaaattaatttaattggactaatatatttatcattgtataatgtttttattcgttaaatgaaaacacaaaattattgacgaagttgcagtaaaaaaaaagaaaagaaaaattattgaagaagttatgagcttctaagaaagaatttttgaatatttaaagagaatattagtatagttatacttatgtcttcttctaagaattttaacgcgtatattcataagtgaaaacaccataaatttagaaaatggttgatagaaattatttttgatgactcgacgagaatgttagttaatttttttttatagtttactcattaattttaagtcatttaaaattagtttgacatgaactaaaattaacttttgagattacaacatatagataattattttagtattaactatgatatagatttggtatgtatacattttattttgatacaaacaatttaacacttatcgattaagatgaagagtgcagaatcaaattcagtttattatgataaaatagatggttaagttttaaaaatagaatgtgtaagattaaactttggtttttttaaaaaatattaaattaaatatagaaaatgtgtgtgcgttactacgtagaattcaaatatcattaataaaataaagtgtgtagaattaaaatttatttattattattaaatacatagttaaagtgtatatcaatatgaaatgtacaagattgaaaatttgattaaaaataatattactaatgaaatattaggataaatatagattactatttagaattcaaatatcatcgataaaaattatatttatattttatgtcggtctattgagacaggtcttatctagtcagtatataaactataattatttttcttttttgttaagctactagacgagattgaagcttaagcatattataaacaccataaaataaaaatattcaagacatgccttgtaaatttacagaaatgttgttgaattacttaaatatgtaaattgaaggttcacttaatttattcagatgttgattatcatttgcaggtctatactattgaagacagatagaagccagactatgccagaaattcaaaatctgttttattgtattgtgaaaactgaaaagtagtacaagtgagataattttgatcgaatcgccaaattttggtaaaaagaataatataagtaaaaacatggactaaagtagaaacaaaaaacaacacataagaaattactaaaaaaaagatccaccactcactttctcagctgaggtcttcctctctaaaatcaaaattctcagttccctcttcactccaaatttagggtttctcagtttcttctgaacgtctcctcaccttcctcgctttcgagattcaagcttctgggtttgtattttttgtccttcttctaggcttttactttctcccttgtacgactcgtgatcccaattttgtatattaacattggaaattatctcgttttttaacacttgttgttgttgttgtgtatcaccgtcgtactttttttggccgattagaagttttagttttgatttttgtttagaattttgcttccgagaaaagggggagaagaaaaatcggtgcttttacataattgctattgtgtttaaaaattgaaacttgattttaagttgtcagcattgatattgtgttttacatcgacatgactttatgcttccttctttgtatttgcaggtctatactattgaactttactactcatagcctacatttccaatgtgtcctgtgggtagagaggcttgtgatgaaggatgaattacatttgtgttaatgatttggcttttcttgtcttttttatggtaagctgagttttctgttttcactgccagctatttttgggattgggaagtgatatattaacaatgtatctgccatggacttctgtgtttgcaggaatgagatattgggtctttgatgtctttgttgttctgatatccgaaatttagctgattcaagaggtttcttggttgaaaatg

SEQ ID NO: 8176 - DNA, 3000 bp, Unknown
  misc_feature (1)..( 3000): cDNA_ID_1810740_gDNA_ID_1621199_Annot_ID_57621 3000 nt of promoter + ATG
ccggcttatatattaacgagtcacaagactcacaactgagttgtgcatgtgaaccaagtggtagaagactttttttgttccaaaagtaaaagcaaacaaaatcatccaataattgacttaaatctcaaacaggtcaattacatccacgtgatatgttcttggtacttaagttttcaatgaaaaggatttggcacatcctgccaagctaacattttttgtctgtctttttcaattttcagttttcattttttcatgtaaaagatatgtctcgtgagttttcagttttcatgtaaatgatttggcacattctccaagcaaaatttttcattcccttttcatttttcatttcttttttcatgtgaatggtgtgtcaaaaaaaattgcagtagtaaaaccataaacaagtaataatttttgtaactgatttaaatacatagtatgatattatgttattaaatcaatttttaagatgatatttgtgaaaaagagaaacacgacgtgaatgattttttttttttttcatggagtgaatgatagtacattatttactacttaaaaaaaaatgtgataataaataaacttctttactaatttgttatctgtcatttttgcaaataaataaccaacatatgttcatttactgcatgtactcataataaaaactctttagactagaaatattttggtgttgttgacaaaaatagaaatatttcgatgtattatatgtttgaggaaaaaaaagagttggaattagctagcaacatattccattgctttctcctatccatatcaaattcagagccaataagaatctcacttttttaacagcaagaaccatatgcttgaacaagacatacatgtttatctatcaaagcttaagggcttgaaaactaattcatagtagagaagtctcattttgatcaaaatgtatgcaaagaatctcattttgatcaaaacttatagtactttcaacttgttaaatatttggatcctttgggcaaacattatttttgctaataacatctactctcatttttttctgagcaattacttttcgtttcttaaatcttcatcacttccacaatttggcatttgtgatgatttaatcacctccaggtcctccattgattccaatttggcatttttgatgtatcgctatacaatttttcattttatataacaagatggatcgttggtaaagattatcccaaaaaactaacttctatattttttacttagattttttggttaattcataatctcttcatattttttatttatttatttttgtcaaaaataccattaaattaagttagataatttctccagatcaaacatctagaatatattagtttagtctcctctccatcatcaaaattcgaattgtaactttgaattgattgcatcaatggtgtttcttttacggtaactatcagataatagttaagaaaataaagagttaattgaaaactatatctatttgtaaggcattgtaaataaattgccaccttaagtatgataaacgacaagttagacgtgaatttatgcgtaactaggagagaacccctatgctcgtgaatttgttaatatatatcaatcactctgcttgcattttcttgtacatatttttatgttatttcgttttctttatggtcttagtgtttctcttccatcttagtgtatttcaatcgtatcttaggaatgaaaatcaacttcaatgaacaactaaaagtggttcttttagcagtatagaaaaatggtaagccataaatgattagaaaagatgtaacagtacaaaataaaagttaactttagtggttatgggcgttattgtgtgtaccaatcaaaaccataactatttgcatttttttttttgacaaagaactatttgcaactattactcattagtctctactttgaacttttgttttgttgatatataattgaaaacaaagaaaaatttgaagggattgttgttgatgtcgccattttttttcgaaatattttgaaataggtattttactaaaatttgacggatatattatttttaaaaatgtttgtatttaagatttttttgtaaaaatatatattttatataaaatattaaatcctaaaaataactgagtaaacccaaacataacgaataaaaggtatgttaaatcacatttttgtaacgagaaaaaggacaaaatccacaaactattctaaagaaggcaaaatccaaaaaatatcatccaaaaaagacaaattcataattgattcaaacttgaaagctaaatgttgaacattgacataatgctcttgatttgacattcagaaagacaaagcatgttatcccatatgacatgtcagaacaaaaagtaatactatgttttttttacttagactccaagagaacaaaataattagttttctaaattactatattaaacgaaatagtaatgattagcaaagatttggtagttaaaattggaaccgaacgaatttaagcagagatttatctgtgttttaaccacattttcgccagtaattaaataaagatattaatttaacgaaaattgaaaacaagtctctgtcaaaagctgcgaaataaggaagacacaccgttgaagcactcgtcgtacaaaggttccttttttcttttttcttctccttcgctttagggtttgattcttccttctccaccactccttaatttctgccaattgcgaaaaagaacctgtctttctcgtcttgttgtttcaaaaccctaattttcttactgttttctctgttcagtctctggttctgtacggagacgacaaaggtactgtttttcttttttgtttttttctgttactttctttggtctttctctgtttgtgggttttctccggcttggaatttgtaaaaaggagaaagctttatcgatttaaaaggtgattaactgattttgctttgttgggtttgtctcttttatagactctctgttccgtggagttgaagaaattgaacggaatg

SEQ ID NO: 8177 - DNA, 3000 bp, Unknown
  misc_feature (1)..( 3000): cDNA_ID_1810732_gDNA_ID_1621199_Annot_ID_57623 3000 nt of promoter + ATG
tcttccatttcgagaccatctaatatccattcggtccccacaaagtttcgggcagcggcaatcgcatgtacacacgggtacttgtcaacatcaaaacgtcggcaagaacaagttttccttagcaagtcaacataataagaaataccaccttcaccaatgacgctgtattgacgttcgaagctgttaagctcggtcaccggcatcgttttcgcaattgggcataaggagtgtatttcgttctccacaaccggcacaagaccccttgttttagaatatttaacagactccttcctatgtttgttaaaccattctgaaattttctcaattatcgcatcaagcaaaggtaaaaggaagtatttccttgcacgctcaaacgtactgttcaatgattcacacgcattgctcgtgtctatgttatacctatccccttcaaaatagcacatagcccaattttccacaggagcccatcgatccaaatacggaccgacattaggaaatcttctcctaaatcgagcatactctctcgtgaactcaaactgagtataaacatgtgcgcatgcaatgaagttagccgccgcttcttccttctcagttttcactcgtactttaacgttttgagacaaatgccaaacacaatggccatgtctcgcgtttggaaacacttgcataattgatttgatgatgctctgatgtctatcactcacaaaaaccaaacctggtacatctggtataactgttttcagcttgttaaagaaccacgaccaactagcatcgttctccctatcaattacagcagacgcaatgatataattgtgatgattaggatcttgggctgttgcgaaaactagcataccgccgtatacggtcttaagaaaagtggcatccacaataacaactttcctcataactttgaacccttcaatgcaagcacccaaagcaacgaataagtacttgaacttttgttgtgcatccacttccacatatgatattgtcccgggattcacctcctttaatacgtgcagataagagtacaagtcggtgtagcttttttcaggactaccacgcacatcactaacgtgttatcttttccctctccatgcggtagcatacgagcaatgcaaacccattcttccccgagcaatactcattatgcttttaggtggtggagtttgaaactcacctcgataatcctcatacaaaatagacgcgattaatcgtggtgtgccggtatgtttacaattgcctgagttcttatcagaccgcttgcatgtgtgcatcttcctgtgaactctaacactaaaacaatctgaactctttacttttgcacatcgtaaataccatcgacaacctgttgttttagattgccgacatcgtaacatgagtcgctgtggatctgacgctatagttgtagtcgcaaaacaatacttatttgcagctctgttaaccaaatcttgcacggcctccttagaaacaaattcttgatgcaattcaatctccgttccatcttcccattccgtaacactctgacttttctcactactctgacttccttcaccaacacatggaagctcataatactcaattctaccatcaacaccattatcttcagcaacatccatccggctatccacatgctccctatcttcaataactacattctccatagcctcttcaaaaacccggctatccgcattctcaatagcctcttctacactattagcctcttcaataatcggttcagcattaacacaattacctcctgcatcttctcctctaaaaattgtcactactccaccattctccacatcaaatgcattcaactcctcataattaataccaactgaacttcttctctctacccttgaattttgttccaccctctcagattctttatttactacctccacgttcaaagctggtctaattcccttagcattcactaccgttagataacctaaaaagtcatcatcatctacaatagatgtctctctctgagatgtgcatagaatataactcaatttcaccttccttgaggtttcatctattccaatcttcttgcatatcttttctactaacatagagtatgttacctttgacgtcctcaacaatacaccgcttaaagaattgtttgaaatccactcatgctattctgaataatacccattgtcaaattgtatgaatgtgtgcttgttcttcatcgtctcctgtaattacaaataaattataaaaacataattacgtaatcattcagatgtagacataattgtacctatattataactcactaataccatttgtaccacctgtcatattgtatctcaataaaacacttgtaccgcttatactattatatctcagttttaccatttgtcccagttcgtcaattctgggtttcacaaatcgtaaatttcgattgaatactcactaaattctctgattcaaaacgataaaacagcccagaatgaacaatacaacaattttatgttatgaacaactaactccaacaagaaattcacattaatctacaaatcaaaacgagatcggatttacttttgccgttgaagaggaagctcactttgggagcagattatcggcttggaagctacgacgatatcggaagctaactcgccggtgaaattagagctcaaatcgccggcgaaatcggagctcaagtcgccggcgacgaagtcggaaaaaatcacgtccgaagtcgtcggagagaatcgcgggagcaacgaccgtttttctatttttttttttactaaatgatttactctttattttgaattctccctcagttattcattaagatgtaattacgcatggtcgagtggtactcagaataaatggatggtacttagaatagattttccaaaatgatggcagaatagaacgtggctctataaatacataaatcccagcagtgtttgccatcagctacaaaatagtaattcacgctccttgaacaatccgccatctctctcgatcagatcgataatg

SEQ ID NO: 8178 - DNA, 3000 bp, Unknown
  misc_feature (1)..( 3000): cDNA_ID_1810728_gDNA_ID_1621199_Annot_ID_57624 3000 nt of promoter + ATG
tggcttttctcttccaaggaaactatgcaagcggtgcagaagcattaactagaacgttcctaatctcgggttttattgttgctcttgatttgcttctcaaggtatctctactttgtctactcttataccttctcatttctgaacaaatcttagatatggtgaaatgacaagtttaggatcttccttttgcttttgccaaactttctgatatgaattaggccttaccatttctgtagtccttacgggttttaccttcattcaggcaatttttctctttggatttggagtgccattgtttattgacaacaatgaaaatggaaaaacgttcaaatggggcttatggatcattcataagcttctactcactggcgtttatgggatggtgttcttgatgtacaactctaggtggagagaaaaattgcctggtaagttgatcagacgcttctatcttcccataatagcctccactggtttctttctatttatcatcattcatgtcttcttgtttctaacagcaaggcctgcattctacaactacataatcatcatgttcgccttatacagcctttacctagttgcatctgcgtttaccgcaaacaacgcgcattttggtttctggtaactcttatctgaaaccatcccaacagagaatattgtcttatgttcagcttgtatctgccttttaactcaaaatacttgcaggttatatgggatcatgagtgtttgctaccacgcattataccttcctcttctttacataacgttcctcgcagactttttccaggtaatcatcatcattcatcttctctcactgactctctcactctctctaaaatgcaaatgggtttgctgcaggaagaagatttgaacttggagaatgtatactactcagagatgaaggatgctggatttttcgactctgattgggaataggactagggtaacaaacatcttcctcattttctcaatctgtaaatacacgttgggtaggatctcctagaagtcatggctgctttttccggctttggcgggttacattttagggtctagtcttttgtatgtctgtactttttcctcatgtttctttctcttttataaatccaaaatgtcttgtgaatctctttgttccttaagctgataatctaaaagaaagttttgtagtagtctaaagattgacataataaaccactagggcaaattaagacatacaacaaagcatgacacaattgagcaaacggcaataacaaaagacaaaagcctttggttgtttccttaactaagcagtcttctcttggacgagttcttcaatgagttcagcagcctgttggactgttgcaatctcctttgctctctcttccgccattgttatcccgaactcttcctccaaacccatcactatctcaacctgcaaaaagaaagcagaatttgttgatgatgatgtccaatgagctctgagatacaatacaatgagatgatatttaccgtgtcgagagaatcagctccaagctcggtaaatttagttccggcagtgactttttgatcatcggtgagcgacaattgcttcttgacaatctcagacactttctctactgtctcttgcttgaccttaaaccacatatataccacattaccaaatatattcaaacagcctcaagaaagtcgaagaaatatagagttaaatcaacatactgcacaagaaactgcgagacgagcaggcatcaaacgtcgtaggctgaaggagagattattagtcttttcattgttgaaaatcgtagcctgtttgttgagacagaaccttgttgttgtagcctgttttcaccatgcattaacaacgacaaagaaagcaatgaggatagtttttctacaaccatagctaagggatttgtgttgcaaatgtatgatcataaaaatcaagatgttatgaactctttattgatagtatcaaaatatggttatcgaggcaaatgataaatcgatattaacgagcaaattaatgtatcgttagcaaaaaggaggagaagagagagatgtaccgagaaaggagcttgcatggagatggaggagcagaaacttgtcgccattatcgatctgatcgagagagatggcggattgttcaaggagcgtgaattactattttgtagctgatggcaaacactgctgggatttatgtatttatagagccacgttctattctgccatcattttggaaaatctattctaagtaccatccatttattctgagtaccactcgaccatgcgtaattacatcttaatgaataactgagggagaattcaaaataaagagtaaatcatttagtaaaaaaaaaaatagaaaaacggtcgttgctcccgcgattctctccgacgacttcggacgtgattttttccgacttcgtcgccggcgacttgagctccgatttcgccggcgatttgagctctaatttcaccggcgagttagcttccgatatcgtcgtagcttccaagccgataatctgctcccaaagtgagcttcctcttcaacggcaaaagtaaatccgatctcgttttgatttgtagattaatgtgaatttcttgttggagttagttgttcataacataaaattgttgtattgttcattctgggctgttttatcgttttgaatcagagaatttagtgagtattcaatcgaaatttacgatttgtgaaacccagaattgacgaactgggacaaatggtaaaactgagatataatagtataagcggtacaagtgttttattgagatacaatatgacaggtggtacaaatggtattagtgagttataatataggtacaattatgtctacatctgaatgattacgtaattatgtttttataatttatttgtaattacaggagacgatgaagaacaagcacacattcatacaatttgacaatgggtattattcagaatagcatgagtggatttcaaacaattctttaagcggtgtattgttgaggacgtcaaaggtaacatactct

SEQ ID NO: 8179 - DNA, 3000 bp, Unknown
  misc_feature (1)..( 3000): cDNA_ID_3047806_gDNA_ID_1621199_Annot_ID_174834 3000 nt of promoter + ATG
aactttgtatgttgaaatagtaatccaattttaacgaaactttttattttgtaaagattttgatgggctttttaaaacaatttctacgacgtggacagactttggagtttgtatgattaattagattcagatcctcacgtagattgaataaacaataactcaataattgatccttctcaaattttaataaaataaaaacattttttaataataaaataacaacattacaaaataccaaaatatgtagggtaatagtttttgctaatatagttattatattattactaaaatataaattcacatgttaatatttgttgttgacaaaaacaaaaacaatgatattacaaaaaaacaaatagggtgattaaacgctagaagatccgtaaccattttgatgacaaaaagatatggtactaagatgaacacgtttttgagaatattcaaaacaaattcatttccgaaagattatcaattttcaagcatacagtatgatctggtaaactataaatggtagaaccacgataattaactagtcgattctatatgttatgacatagacttagctaggagcatatccggcagaccggcactaatctaatgatttcatgagttgttattatctaaactaattaacaattaatagaatgaaatatagttttatatttaagtttttttttttttttttttttttttcggaatatcaggaggttctgggccgaaacccgtaatcccttcaggcctgaaaccacaacatgtaatattagtttcgtcccaaacatcactcgaactaacgacctctaagtttcgcctaggatctttaccaattgaggtaacaacgcttggtcaagtttaaatcattgttgctttctgtgagattttgatccctataacctaatttatcttatgagaaattaaccttttttgataaaggataaggaaaatagtaaccttgtataaaaaaattcattgccattttcatatatatatatatatatatatatatatcctaaaatgtatatctctaataaaattagaagaaatgataccaaaaataaaggtgaaatcatgataaaattttgtttttttttgttttggttcattgagtttgccattaacgctttttttttataaataatttcgtctacacaaattcatccatataatattttcttttactgcatcagagtttcactatgtatttaggttttttatgaattttaaaaaagttcagcatcaaggtgaagaaaattccaaaaaaataaataaaacggtgacccaaaaaaaacttgttgtcttcaaaaccaaaagtactcgacaaatcaaatagataaatcatgaatcttagtacagtcaggttttatcgtctacgataagttccacaataaatccaaacactaaactgttcagatctcagatagtaactttaaatcaacggctataaattcgccatttgtactttcatttacacaacagagaataatacatacactctatctctctcctattcgtaacttatatttctctctctactgtgtttagaaattggaatcttctctcttctctatctccctctctcttaaaaagggaccgtacacgtctctctctatttccagtaaaaaatcgaaatttcgtataatttcctcagtcccgtaattttctccttttttttcttccccaattccttcaattttcgaattcgcctctctgtttcgttcctcgtagacgaagaagaagaagaatctcaggttttagctttcgaagcttccaaaattttgaattttgatcttctgggctcttttgtaaatcagactgaagatatttagattacccagaagttgttcaaggtaaagcaattcagatcagatccaccaattttttttttttttttcatttgaagtttttgtgtttgttgtttgttgttgggagatatttgaaatctgggttattaaagttccgacctaatttcatattgtgctattaccaaaaataggaaattttgagaatttggttttatgttgtcatcatttaataatattagccttttgtgggatttgtgctttttgttgtttgtatcaaaagtctcagatttggattcactttttgtgtgttttttatagtcaaagctgattcatgctatacattacacagcttcactgtttagtctcagctctgttttcttgaaaacaggaatggtttcagtggacagcacggaaagataaaagagacttttttttccagattttgctgatccaaaatctgaatagttgttcatgttcttggatcaaatctggaaagaggaagtttgttggatctagaagaagataacaatgttggattctctagtgtcgaaactgccttcgttatcgacatctgatcacgcttctgtggttgcgttgaatctctttgttgcacttctttgtgcttgtattgttcttggtcatcttttggaagagaatagatggatgaacgaatccatcaccgccttgttgattgtaagttcactcaattgaaaagagtaattactgagttccaacttgaatgacatttgagctatttggttgcaggggctaggcactggtgttaccattttgttgattagtaaaggaaaaagctcgcatcttctcgtctttagtgaagatcttttcttcatatatcttttgccacccattatattcaatgcagggtcagtctttttttttacatccatttgagccttttcctctatgttgggatatatcttttaatgtaggacttagtttggtagggtctcatgctatatgatacgtttagttgcacgggttttacctacaaaagttacataaaacagattgaaagaaaaaacttagttttgaaaagtatgcattatgtgattctaggtgataaagttagtacaacgctttaaagatgttgattagtaagcttaagctctacttctataaatacctgtcatacatcaactttttctagtacttgtgattgttataaagaaaagagggcatg

SEQ ID NO: 8180 - DNA, 3000 bp, Unknown; identical to SEQ ID NO: 8177
  misc_feature (1)..( 3000): cDNA_ID_1810732_gDNA_ID_1621199_Annot_ID_174827 3000 nt of promoter + ATG

SEQ ID NO: 8181 - DNA, 3000 bp, Unknown
  misc_feature (1)..( 3000): cDNA_ID_1810748_gDNA_ID_1621199_Annot_ID_174816 3000 nt of promoter + ATG
tcagactataccgagacaacaacattagtaagttttggcatgttggtaaatattattgctctcaagtcttaagaaaatataatcaagttaaaaaagaaagattaagggggtgttattggttagtggattttaatagagttaaactctaacccaaatctaatgttattcattcattgattttaaatccattatttaaatcaagtgttattagttcttatacttacaatatcttcattaaaagactttaaaattaagtgttattggttttcatatttctaatgtttatattactagagtcttaattctaatgttattggttctcatattcacaatgattagttcaagtttcatgttattcatgtttgatagattttcacaaatacttttatttgaaaagatttgaatgaatctcaaactgatttcatgtgtaaattatagcaatcaaaatattgccttgtatcttgagattttcacaatcatacagtctcatgagaatattacatattgccttgttcctttgccaaaaactttctttttccttccacatctaggttcacgttacatctcggactttcttctctccttcttctttcttcttccctttcacggtaaagtctatctcttttcatcattatagtagtcatggctcgtgaatttgcttgagaacaaagtcacttttatcacttttgatcatactattatatatatttttattgtaggttttataatggaacgaaatctttgtgaggaagatgattcagatgtagatattatgttattgatggtggttggatccgttgatgcttatgaaagtcaaatcccacgtccgatgcgacgacaaatcacaaaaaagggacacgcttatatacaaaaggctttgaaagatgatcctattcattttcgtcaactatatcgtatgaatcctgaggtttttgcggaattatgtcatcttctccaaatgaaaacaggtttgaaaggtacaccacatgtatgtgtcgaggagatggttgctacctttttgataacagtgggccaaaattcaagatattgtcacacaatggacactttcaagagatcaaaattttcaacaagtattaatttccacaaggttctcagagctttaaacatgcttgcaccaacattgatggccaaggttacaaatacagtgccctcaaaaataagcaaaaccacaagattttatccttacttcaaggtacatatctttttgtgtgaataatatttcttgaagtcttatataaacagtttttaatttatgttaggactgtgttggagctattgatggcacacacataaatgcaatggtacaaggtcctgaaaaggctagttatcgtaatcgaaaaggagtcatttcacaaaacgtattagctgcttgtaactttgatcttgagttcatatatgttctaagtggatgggaaggttcggctcacgattcaaaagttctacaagatgctttaacaagaagaactaatagattgcaagttccagaaggtaatagattacaagttctaaaaggtgatttatcatatgataatttatttctaatagtgtgcttccatgtttcaggaaaatattatttagcagattgtgggtttccaaaccgacgtaatttcttagctccactacgaagtactcgttatcatctacaagattttcgtggtgaaggacgtgacccaacaaatcagaatgaattgtttaaccttcgccatgcatctttaagaaacgttatcgagagaatttttggtatatttaaatctaggttcttgatttttaaatctgcaccaccgttttcttttaagacccaagcagagatagttctttcatgtgctgccttacataactttcttcgacaaaaatgtcggtcagatgaattttcaagtgacgaagaagatgaaacagatgttgacaatgcaaatcagaattctgaagaaaatggtggtgaagaaaatgttgaaacccaagagcaagaaagagagcatgcaagacattggcgagcgaccatagctgcagatatgtggagagatgctactaatattggtagccaaagatagtaattcactttttataaagttcatgtatttgtctttctttggtgttgatggagacacttttcccgtgtttgagctgaaagatttatttttgaaccctttacactttcttttattattattatgaacgagttcttgtcgtgaaatgatatatgacatgcttccgggctaatctcatcgacataattagaaactgagaagttggccatgggaaaatggtacaagacatacaaatacagaaatgacaatgatgtcagcatgacacttgaccataacgttttaaattatgttctactcatatcggtggtggaataattataccttgacctaagaagtatgggtttatatgtattcttttgtaaacgtttaatactattaattatgaacgagttattctacctctatcatctatgttacagctaagcttttggagttatactgtaaaacattgttcattattcaaatcatatcaattaaaataaaaagtacaggatcatatcaattagaatattactttgatcatcataatattctagttgctactaaagaatagaatcatattacttagaatatatattaccatgatcatcataataatatcacaatctttttgttatattaacgtatatctttacgatcgcactatctctataaatgtcacgtacatctctcttctcattctctaagcatacaagctcattcgactgcaaagaaaaaggttcacttgttcttacttttttcttttgttcttatttacagaatcatatgttggaagtgtgatattgattaacttttgaatagttaacttttgtttcccgtctcactatttccttgttttttgcattgacgtatggttattttttattaaaatattgcaactttttcatgttttaacgtatatttgtttttccaatttgtcataggtatcactatg

SEQ ID NO: 8182 - DNA, 3000 bp, Unknown
  misc_feature (1)..( 3000): cDNA_ID_2156241_gDNA_ID_1621199_Annot_ID_174815 3000 nt of promoter + ATG
gcttgtaactttgatcttgagttcatatatgttctaagtggatgggaaggttcggctcacgattcaaaagttctacaagatgctttaacaagaagaactaatagattgcaagttccagaaggtaatagattacaagttctaaaaggtgatttatcatatgataatttatttctaatagtgtgcttccatgtttcaggaaaatattatttagcagattgtgggtttccaaaccgacgtaatttcttagctccactacgaagtactcgttatcatctacaagattttcgtggtgaaggacgtgacccaacaaatcagaatgaattgtttaaccttcgccatgcatctttaagaaacgttatcgagagaatttttggtatatttaaatctaggttcttgatttttaaatctgcaccaccgttttcttttaagacccaagcagagatagttctttcatgtgctgccttacataactttcttcgacaaaaatgtcggtcagatgaattttcaagtgacgaagaagatgaaacagatgttgacaatgcaaatcagaattctgaagaaaatggtggtgaagaaaatgttgaaacccaagagcaagaaagagagcatgcaagacattggcgagcgaccatagctgcagatatgtggagagatgctactaatattggtagccaaagatagtaattcactttttataaagttcatgtatttgtctttctttggtgttgatggagacacttttcccgtgtttgagctgaaagatttatttttgaaccctttacactttcttttattattattatgaacgagttcttgtcgtgaaatgatatatgacatgcttccgggctaatctcatcgacataattagaaactgagaagttggccatgggaaaatggtacaagacatacaaatacagaaatgacaatgatgtcagcatgacacttgaccataacgttttaaattatgttctactcatatcggtggtggaataattataccttgacctaagaagtatgggtttatatgtattcttttgtaaacgtttaatactattaattatgaacgagttattctacctctatcatctatgttacagctaagcttttggagttatactgtaaaacattgttcattattcaaatcatatcaattaaaataaaaagtacaggatcatatcaattagaatattactttgatcatcataatattctagttgctactaaagaatagaatcatattacttagaatatatattaccatgatcatcataataatatcacaatctttttgttatattaacgtatatctttacgatcgcactatctctataaatgtcacgtacatctctcttctcattctctaagcatacaagctcattcgactgcaaagaaaaaggttcacttgttcttacttttttcttttgttcttatttacagaatcatatgttggaagtgtgatattgattaacttttgaatagttaacttttgtttcccgtctcactatttccttgttttttgcattgacgtatggttattttttattaaaatattgcaactttttcatgttttaacgtatatttgtttttccaatttgtcataggtatcactatgggagattcacaacccaaaaaaagaaaaaagggggattataatccgtggtctccagaggagactaagctgttggtgcaacttcttgtggaagggatcaacaataattggcgtgattctaatggcacaatcagtaaattaaccgtggaaacgaagtttatgccggagatcaacaaagagttttgtcgttcaaaaaactacaatcactacttaagcagaatgaagtatttaaaaatacaataccaaagttgtcttgatcttcagcgttttagttctggttttggttgggatcctttaacaaaaagatttacggcttctgatgaagtttggagcgactatctaaaagtaagtatcacattttcttttttaagtgaacatggtcgtacttacatattattaatatgtccctttgtttttgtaggcacatccgaacaataaacaacttcgttatgatacatttgaattttttgacgagttgcaaatcatatttggggaaggtgttgctactggaaaaaatgcaattggattatgtgatagtacggatggacttacgtacagagctggagagaatccaagaaaagaatatgtggatgattttgacaacgtgtatgagtatgatactacaactcatcatgagtcatcggagcactacgcaccatttatgtctcatggaacttcagaaagtcctaagcttcccccacgtaaaagaacaagatctgagagaagtacttcacaaaaagaagaaagtcctatgatggttgttagcagtaaaattttggatataatacaacaaagagaagagaggcaacaaaatgaagtggcacagaaaaagaataacgtttgggatgctataaaagaaatttctgacttggatgaatgtattcgttacaaggcacttacgaaaatttatcatttgggaatacaagacgttttcgtgagcatgtcggtggaagagaggctaggatggattcaaaccattatggaataatttgagcttaatttttattttctttgtttttaaagtttttaatttggattcaccaaaattattatgaataaattctttatcttattcccaaacttcaaaactctagaaaacttgaaataaaaaaataaaaaactggtcaaagttttgttagatttcgattagattataaaatcatttgttatagagttcatatctattagaaaaccaaatgacatcatatatcactgaaaatagacttccacgacagaatgaatagtgattcagtttaaatgaactcagatgttttaaaatctgataaacttcaactctaatggagttgacttcaacttcactaaccaataacaccacctaaacttataaaattcagaaaaataatcataaaccggaaacaaagctaattatg

SEQ ID NO: 8183 - DNA, 3000 bp, Unknown
  misc_feature (1)..( 3000): cDNA_ID_1810720_gDNA_ID_1621199_Annot_ID_57626 3000 nt of promoter + ATG
actctattaagaccagaacactctgtttgcttgaataacaaacaatttaacaataaccaaatattttgtcatttcgacatatgtaaggaacgtgagttggtttatactctataaggaaaagagttaccaatgaacaataatttcctaattaaaaattagtaaacgttaaaagtatttttttgtcattccgacatggcctcgtttttttcctcgaaaatttagaaataatcatattatttttacttacaaaatacatatatatatatatatatagatatatataactatagttagaacaactatattgtcgtgaataggtaaatttgggaatcgtgatgatatataatttggatccgtagattgtaggtgatgcatttttgtacctaatctttaattccaaaataagtggatagctctatatgaaatttggccctactttatttgacatgaccttttaaatatttgaaaagccatgagacaatttatttaattttcataaccgtgataataaaaacaatttgtttgtaagaacaattacataacaacatttatctaaattatgagtctcgtcggcggtatgtaaaatatgttaatattatcctttttctatgtaatagaataatagattatctttcttggttggcactaaattgcacgttaaatacttgaaaactttgtatgttgaaatagtaatccaattttaacgaaactttttattttgtaaagattttgatgggctttttaaaacaatttctacgacgtggacagactttggagtttgtatgattaattagattcagatcctcacgtagattgaataaacaataactcaataattgatccttctcaaattttaataaaataaaaacattttttaataataaaataacaacattacaaaataccaaaatatgtagggtaatagtttttgctaatatagttattatattattactaaaatataaattcacatgttaatatttgttgttgacaaaaacaaaaacaatgatattacaaaaaaacaaatagggtgattaaacgctagaagatccgtaaccattttgatgacaaaaagatatggtactaagatgaacacgtttttgagaatattcaaaacaaattcatttccgaaagattatcaattttcaagcatacagtatgatctggtaaactataaatggtagaaccacgataattaactagtcgattctatatgttatgacatagacttagctaggagcatatccggcagaccggcactaatctaatgatttcatgagttgttattatctaaactaattaacaattaatagaatgaaatatagttttatatttaagtttttttttttttttttttttttttcggaatatcaggaggttctgggccgaaacccgtaatcccttcaggcctgaaaccacaacatgtaatattagtttcgtcccaaacatcactcgaactaacgacctctaagtttcgcctaggatctttaccaattgaggtaacaacgcttggtcaagtttaaatcattgttgctttctgtgagattttgatccctataacctaatttatcttatgagaaattaaccttttttgataaaggataaggaaaatagtaaccttgtataaaaaaattcattgccattttcatatatatatatatatatatatatatatcctaaaatgtatatctctaataaaattagaagaaatgataccaaaaataaaggtgaaatcatgataaaattttgtttttttttgttttggttcattgagtttgccattaacgctttttttttataaataatttcgtctacacaaattcatccatataatattttcttttactgcatcagagtttcactatgtatttaggttttttatgaattttaaaaaagttcagcatcaaggtgaagaaaattccaaaaaaataaataaaacggtgacccaaaaaaaacttgttgtcttcaaaaccaaaagtactcgacaaatcaaatagataaatcatgaatcttagtacagtcaggttttatcgtctacgataagttccacaataaatccaaacactaaactgttcagatctcagatagtaactttaaatcaacggctataaattcgccatttgtactttcatttacacaacagagaataatacatacactctatctctctcctattcgtaacttatatttctctctctactgtgtttagaaattggaatcttctctcttctctatctccctctctcttaaaaagggaccgtacacgtctctctctatttccagtaaaaaatcgaaatttcgtataatttcctcagtcccgtaattttctccttttttttcttccccaattccttcaattttcgaattcgcctctctgtttcgttcctcgtagacgaagaagaagaagaatctcaggttttagctttcgaagcttccaaaattttgaattttgatcttctgggctcttttgtaaatcagactgaagatatttagattacccagaagttgttcaaggtaaagcaattcagatcagatccaccaattttttttttttttttcatttgaagtttttgtgtttgttgtttgttgttgggagatatttgaaatctgggttattaaagttccgacctaatttcatattgtgctattaccaaaaataggaaattttgagaatttggttttatgttgtcatcatttaataatattagccttttgtgggatttgtgctttttgttgtttgtatcaaaagtctcagatttggattcactttttgtgtgttttttatagtcaaagctgattcatgctatacattacacagcttcactgtttagtctcagctctgttttcttgaaaacaggaatggtttcagtggacagcacggaaagataaaagagacttttttttccagattttgctgatccaaaatctgaatagttgttcatgttcttggatcaaatctggaaagaggaagtttgttggatctagaagaagataacaatg

SEQ ID NO: 8184 - DNA, 3000 bp, Unknown
  misc_feature (1)..( 3000): cDNA_ID_1810708_gDNA_ID_1621199_Annot_ID_57629 3000 nt of promoter + ATG
cgaggttgttttctctcttcattttattcttcttctacttagccgaaaaagaatgaaacttggtggtctatatgtatgctctttggtgtggcatgagaccctttggtaattggagaagtcgtgatattgttaattacgaacttgttgaatttattccaaagtatataatatttaaggcagcaacttgtttttttttacatattctaatttaaccaacaattaaagtcaaccgttgcaaaggaggagacttcgtctcatgcataattaacaataacataagaatcattgaccggattccatgtgaccactcaaaagagcaagacactcataaacgttctcagctcgtaaatgagacctgtcctcagcaaagaaatggcacactttgtcactcatctcaatccaactgcagcccggtttcttcctcaatcccatttctttcatttttaatctgactcgtcttgctgcatcccatgactcaccagaagcatacaaattgaacaagaccatgtaggttgatgcatcatctggataattctcaacaagcaatcttgcgattctatctcccaatgaatgttccaggtgcaagcaacaagcagagaagagagtactgagaagctctgcattgtcacttgtctctggtgtttgttgaataatttcataagcttcaagcaaccgacctgctcggccaagaatgtcaatcatgcacgagtaatgttcaataataggctcgattccgtactttgatctcatttgactgaaaaatttgagaccctcatcaattagcccagcatgaccacaagctgacaatacagcaagaagagtaaccccatcaggttttagaccaaacttctgcatttcatcaaactggtaaagtgcttctctgggttgaccatgagatccatacgcagagatcattaccgtccatgatacaacatccttctttggtatactgttgaaaatcctaaaagcctctttttcattgccgcatttagaatacatgtcaagaagcgcactcaaaagcaactcgtctgtttcgagcctgctctcactaatggacaaatgaatctgtttgcctttctctaacgcagccagttgcgaacaagcaggtaaaacacttgtgaaagttaccacgtctggcttcactccaacactcaccatttggtcatacacttcaacagccttaaaccaattacctacactgatataactagaaatcatgacattccatgactcagcaacgtccttctgtgtctttgaaaagacggtttcagccaaatttgcttcaccacacttgaagtatagatcaatcaaggaacagttcacatagatatctgcatttacaacgcttctaatcacataaccgtgtataaattttccatgtaggagattccgtgagcgagagcaagccatcaaaatgctggtcaaggttgtctgactcggtcgagttccttctatgatcattctattcaaaatctcaacacatgacttactgtctcctttagcgacataacctttgatcatagaattccaagcaaccaaactctttctaggcattttctgaaaaacctccctagccacctccaagcagtcacatttcccatacatatcaacaagggcagagtttacatactcatctaactcaaaccctttcttcacacattttctatgtatctccttccctctctccaaccacaacagccttgaacacgccgatatagccaccgtcaacgaaactgaatttggttcaaagccagaactttccattcttccaaacaactccaaagccttctctgcctctccactttgataaaaacacgaaataaccgtgttccaagatgctacatctctctcaggcatttcatcgaacacttgtagtgaattctcaaacaagttaaactttgcatacataccaaccaaagaactcgccacaaccacatcacaaacatacccactcttcaccacaagagtatgaatcatcctaccaagaaactctctacccaacgcaccataagccttaatcacattcggaaaagtaaacgaatcagggacacaaattgagcaattcaacaacctcttgaaaacctcaagagtgtcatgaaacattgagttctttgaataaccagacattaaagagttccatatgtaaacatccgatcgtatatcgaagttctcgaagacgtgtctcgctgagcaatggtctttacaagtaaagtagacattgatgagacttttgcataaaactacgtctcttcgtaaccccaacgtgagtattctctgatgcacaagcttgattcttcttagagacttggtgctattggtacactctcgcaataaagacaacaactttgaagattccatttcaagttcacatttttttttgtcgtgagagattgaaatgtgatcagtcgctgctttagctaaattataaaggaaagacatgattcaaactacgacgtcgtttatactaatgggccaaacttaattaggcccaaaatgatttatttttctaaattagcgatgcgttttaaaaccctaggttacaaaaacgcgccgttagcaataaaaacgcagcgttttgagaatctctgaaccttcttcaacaactataaaaaccatcttaaaccctagcagaatcgcggctcctgattttagctctctctaaagctgtagttgtgcgttaaccctctaaggtactgaatctctctcgccctctctttcttcgttgttatggcaaataagcttccaaaattctaagactttgacaaagtatagttctgttctttgtcggattttcaagaatttgaacagagtatctgccttaactattattctgatttgtaaacttcgaaacagggaaaaagttttaccttgaatattgtttcgtactagcttaatggctttagctcgtaaaacactaacttgcaagtttggtgactttgagttgattcaagggtttctcttaatcttgttttttcttcttttcaggagcttgtaaaaatg

SEQ ID NO: 8185 - DNA, 3000 bp, Unknown
  misc_feature (1)..( 3000): cDNA_ID_1810780_gDNA_ID_1621200_Annot_ID_57633 3000 nt of promoter + ATG
gttgagaataaagtaagataaccaagggctccttgctcatataagcgcaaatgttttaatttcatgtttgtaatcttacagagtgatataatttacttgttaagccatcaagaaggagatataattttgaagttttccagaaaagaaattgtaaattcgaaattaagaaatcacaaagaagaaaaatatcaaataaataaacgaatatcacgtatcaaataactctcgtgatatgcccatatatattttaatcatgttaataatcaaaaggctcttactacactgaaaacacatgaacatgagtcaacgcctcaacggaattgataattttggtggttcttaattaagcaccgattgcaaggaaagggtcatttctctcaatacgattacaagaaaagagtcatttttatctcgcatatatgttattaatgagtggttgccattacaagttatgaacttttgactttaggaagcccaccaaccatcagctgaaaactaggattagcggggggaatttgattaatgtcaactgatatcctccaatttctctttgagaaaagctcaagcaaagtatatgactctttgggccactcaaaagatctttaatcaattaacttgaggacatgtactttaacaacaattgacacatatagacacgtacaagagttgcacgctattgatacaaggaaattttggtctagtatgaggtaataacgtctcaacgagataaggttaaaattatttagacatgcttgggaaaatatttttgttagtagaaatttgtagagtaatgaaatttagattcttatattgaaatttcatccaaataaatgacaagaggtgagtcaacaccaaaagggcgtgtgagtatgagagtcaaagatagcactaactatacgatgcgggaagtcagcagtttagtcacacgtgtcaacctatgatttaaggagagttggtgtatttgtcacagaatcattaaaatttggtaaagttagaaatagaggggccagtgctagtgttgtttagtcgttacaacaaaacctcaacggtttttgtttgcaactttaccaaaatgaataccctcatccacaaactcttttctaatcaacaaagtattgaaattttcagttacatactagtatttactatttacatactagtatttttgggctagtagaagagtgtatttgaaaaattagaggagaaaaaaagtcagcgtggaggaataaaggtgtgagatcgcatgttacatgtttgatcaacggctcttcacttcatcattcaatactcttttttttttctttttttttggctcaatctgtcaataaaataagaaaaacataactgataattatatatatttagaggcttatttgtatttatgtttacacaacagacaggtcttttatttagccgtttctgatattaaaaaagaaagtaaactgctttcgttgatattcttaagtatcccattaattcttttccttaaaaagaaaacattaacttgttgttgggacttcgtatattagcttaagtgttggtggaagagtgcttgtaacctactccgacttcttcttcttcttcttcttatattctccctctctctctctctcctttttcttctatttctgctctgttttggtaaattgaggaaatggaagagaggcataagtgcaagttatgttggaagagcttcgctaatggaagggctttgggaggtcacatgaggtctcacatgctcattcaccctctccccagtcagcccgagtcatattcgtcttccatggctgatccagggtttgttcttcaggacagagagagtgaaaccgagtcgtccaagaagccctcccgcaaacgatccagacttaaccggagatccatctcatcattacgtcatcaacaatccaacgaagaagggaaaagtgaaaccgcaagagcagcagatatcaagatcggggttcaagaactcagtgagtcgtgtacggagcaggaaccgatgagttcggtgtcggacgctgcaacaacggaagaagacgtggccttgagtctcatgttgctgtcgagagacaagtgggagaaggaggaagaggaaagtgatgaagagagatggaagaagaagaggaataagtggttcgagtgcgagacttgcgagaaagtgtttaagtcgtatcaggcgttagggggacacagagcaagccacaagaagaagatagcagaaacagatcaattaggctcagatgagttgaagaagaagaagaagaagagtactagtagtcaccatgaatgtccaatctgtgccaaagtcttcacatctggtcaagctctcggaggtcacaaaagatctcacgcttccgctaataatgaattcacgagaagatcaggaataataattagcttgatagatctaaatctcccagcgccatcggaggaggaagagatggcctcgtcggttttttaatgcttgatcagattggtcaaactatagtaattaccacctttgattccaagtaatgtagtaaaattctccaagtgtacgtattgaggacaaattttgatgtggtcaaagaacacaagtgagttaggtaatgagggaaatcatgtgatagtagtcgatttgtgtgggaaaatggtaaagcatgaaagcgtgatcgagtgacgtggtttgttgttgctcaagtcgtgtgtttcgttatgccaatgaaataaaaaaagaatacccaaaattacttatatactcttaaagagggaattttgccgactaagagacagagagaccaccgtaacttttggacaacaaaaaagctctaacgagtcacgcctttagattgcactttcttcttcttctttaaaaaaaggaaagaaaacaaaggtgtaattgcagtggagttgttccccaagtcacagagagaaatcacaggcaattttggttatcccttaaccggtccatccatatctgaaccgtcccggtacaaagatccgttggtttctggttttgagatg

SEQ ID NO: 8186 - DNA, 3000 bp, Unknown
  misc_feature (1)..( 3000): cDNA_ID_1810768_gDNA_ID_1621200_Annot_ID_57636 3000 nt of promoter + ATG
atccacttctgtcttggggatgaggaagttgtaggaagatccggatcccgagcccggtcctgtctggtcgtaggagaacaaggaggctggcggagcggaagagtggggatggtagatgggatcggaggcgccgtaaggagtggtggtggtggtggacccgtacaaggagtggtggtgatggtgatgatgaagaaactggttgttgctgttggtctgaccgtagagggtgaggtgatgctgttgttgttggttagagaaggaagagaggaggggaggagaaatggtgatgtgacggtggtcgttgttgtaatgggagatggggtcgaaaaaggagaaggatgaccgggtcgggtcagagtccgggtttctttcatctccggagagaacgatggaggaaggattatcccattcgtagtccaacatgttgcaatcccgaggaagatctctctctctttctttcttttgtttataaaatcaagacggagtagtgaaaaagagagagagaggctaataaaggaaagggggaggagacatgtcggtgcggaataggttatggaatggttttaatggactgaaagcaaagcgacgtactacacctctattagaatcacacacagagacacactctctttctttttttccaataaaccctaactttctatttgtgggggtggatttccttctctctctattgctctctctcccaccatctctcttaaaggtccctttttaaaattcattttttttttgatcttcttcttcgtaaaaaaaaaagagagatagctgtctgtcttgtcatctagctacttaaaaaagtgaagatggagaagaaagaaaactcacatgggtcgtgaaagcagtgtgtgtgtgagtgtctgtgcccttttttactaaaaacaatttaaattattatttaccaatcatctgcccctttttactactagtatttttcaaagctttctaatttgtaatcttagtagtacctacgtaggattaatttgaatatcgaaaaaacgtaactcactacttagcaactgttgatggagcctctaattgaacttttgtttgacaaacaaattaaacacacaagtatgtatagacagactcttactatgttattttttaacagcgtattgtatatatggatgatacatatatagcccccgcaggactttaaaaaaaaagaaagaaaagggtctagctagtattggtggtgatcgtgtggttaaggaaaaagaagagtaaaaaacgcgtttgttctacacttatttaattatgtcgggacccgcttctgttcccctgctgggcctctctcttacatttgttttcttttttactagcgataaataagatatgagaatgagataaatcatcgtagtcagttacaagtttatacgtggttttttttaagaatagagagaaataaaatatctatttcaattaaccacaaaaaaaaaaggaggaaaaggccaaaaaagagagagagataagaggcaaaaacggtgttggggtttcgaaagacaggatggcaaaagtgtaaataggtagcaagttggaggttgatcgttttagggaagacagaatgaccgatcgtatcttgctaacgtacacccactcacccccaaacaacaaattactattattcgccaactctctctctctcttctttctctacctcacgcgctgctatctctacttaatcgaacggtcccgattaatcggatggtgatcacgtggcagcacagggaagagagtagggttagctgagcatagacgagagagtgaggttttgtaattggtaatggcgtgggtcccctatttttaggtgctcaaaggctgccatcgacgttgacccccgaaaccgtacggactcctgtctctattatccttgcccctctctctctctcttttttttttttctaaaacaaattataaacccgaaaaccaaattttctattttcatatttggttctgggatatatatttatatgcataatcctgtcttctacttttttgtttttgttttaatacagtgtacaatattgaaaataggaatgctgctcctactacaacttattctgatgtacatatagtacgctgttaggaggcttttttaattcactcaaagtagtcaattgatagtgtacttatgtatctactaaggcagttatcacaattaaagtaaactaactcctaattataatgaaaagctctcaatcgctctaacgataagctatctttctaactataccaaaataaattaagaagtccctacatagtgtgtatactgtaacatccataatttattcaaccgattccgttggtatccgaggaattaacagtgtattttattaagagtaaaaaagactgtgcatatatataaaaatagagaaaaaggcaaaataaaaggaggaggataatgttacaccaaacttgttgccttgtcaacatctctctcttaatttgagagatacccacttattgcactttctcactcattacccccacctcctttcttccctaattactgcgcaagtattatgcatatgcgattgttttaaactagtccgcaaattgattcccaatgaaagggaaacggaatgtagtagatcatccatacaccacgtcttgtgttggtgcagttacaagtttacttcagggtttaacattattttaaaatctgtatgcaatcaaacaatctatcttcaaaaacttactgatatgctatggatgatgattaatagctaggacttaattatatgctgttgcttcttctccttttttttttaaagtttaaaacaaaacaaaatattgtgtcggggccacctctataattgggcctaaagtaaagttatctagaacaaagaggagcccatttagattgggccttagagagttatagaatgaagaagaaagggtttgttctcttggtccgccggaaggggtggaggagcggcggacgtgtgccgccatatttcgcggcaactttcttctgcaatg

SEQ ID NO: 8187 - DNA, 3000 bp, Unknown
  misc_feature (1)..( 3000): cDNA_ID_1810764_gDNA_ID_1621200_Annot_ID_57637 3000 nt of promoter + ATG
cttttttaatttgctctctccgtagtctaattatacataatttaatcacacagtctcgaaagagtagtatgattatagtaagtcttctaatacctctcgtttaggtggaactaacacatgacatctttgagaagcttgtaccttcgtgtggccgtcttaggcgacgtaactccgcctccatctccagcaacgcccttggctacttgatcgtgacggttattgttatgcttgatccggtggccgggcgaatattccgatctgtttgagaagtcattttcatatttaaccgaagaagaaggcttctttgaagaagaaccgccatgtctagcaacgttgctcagcttccggtcgtcgctgcggcaccagtcgcaaatctcggtaggctccgcaaactggccgtagtagttgctacaataactatatatatatatacacacatatatgatcaattaagaaacccattaatagccgtgaatggtcactctgatatacatatgcatgaatgatgaaggaggactacttacgagtgttggaagcggcagcggcagtgaccgcagctgaagagcttgtcggagaaaccgacatcaccgcacatgcaacacactctctccatgatatatcttcacaatctttattatttatatatatcgacccttgtatatatatgttaggccgtgatgtttaaagtaattatacaactatgcgtgttagtaaaaatgtacaggtagactagagagtttgcttgccgtcgttttcacttttcggttttagagagaaagccaaccttaaaatggggagtttttcggaaatgactgttttctccttccttttgtgtttttcccctgtcttgtcattttctagttttttcactcttcgtgcacatatggtggatggatccttctccatgcctacggaaagcgcaatgcagtgacttgtggtcttttctttctttcaaattataggctttcaaataaaataaatgttgtatatcacgtatcatcaaattcattagaactcgatcgaccatcagtttttttaactttataacgatgttgacgtgacgaaacgcatgctgctgtgcgagtgagagagtgttaagcgatgtgaacaacagaacaaacagtttgcgacaataattaacaacaccaattttttcatccaacttagtagtagtgctgctttttctcccttttcacataaagcggaaaaaatatattgggattatctcttggtggtgatgtatagatcgcacactaacatgtaagttagtgggagttcaggcttgaagatctagttctttagcgagtcttcgttggtccggcggcttattatcaacgtacgtgtacatgatgagctctagctatagtagggtccaacttgtcgccaagactgattaattcgtcatatactagttaattactctaaacgtatagctaaagaagaacattatatatagaatattttgttaactatgatttgtttatggtgttagacatataagtttgtttaatgtaacttcaaattatgttgatggatagagatggatttaatgaggagggttaggttatatacaatttggtacccatttattgtttgctttcccaatatttattgcggtttgcatgttttataaaaactggttaatatatttttcgggagattaaatataaggaaactttgatgcgactcgacgactttgagtgtaaaattgattaaacgcaccagtcacatgatatggaggcaatcggaggggaaacaaaaccgacggcgatgtgaagttcccggtggtttcgctaacttggaacctaaacggtcggagagggatccacgtggcagaattcaggagatatttttggagtttggttggccatgttaagcacatgccctgtcttcttctccctatctctcatcctttgcgttgcttcctcttttcactgatactatattttttatttccacctatcagtcatttaccatgtacattagtacgcaacgcacaattcggtgccaaattagagtttcagggtctcacctctctctaatctgtttgtataaactttgaatggagggagacttagaccatgtacatgggtgatatttttagagtatcatcagtttaaaaattatttttatattaaccaaacaattagaatgagcttgattagtatcattccaatgatttttttgatattactatcatttacgtggcatctcctgattggtcgcatttgtcaaaaataagaaaaaaatatttatctattaaacaaatattataaataatactaaaattttttaatgatagtttgttagtatcacctataaccatgctcttaataattaggatataaaacatgtgaatgagagaagtggaccctagtgatctttgtttgtagtggcctcaagattttactttagtcccaaattcggaggaaattatttttgttaattaatcatttattctttcttttgttctacctcattccaacttacaaattcagtatccaattcataagttgaaccaaaaggaaagacatcattcaacccaagattagaccaactgtctttcgtgacacacttgcaattaatatgattcttaaaaaatgttaatgattttgtttggaaccaaaagacaataagttagcagtcaaaaaagcagtaaatgtaattagaaagaagagacatggtaatataatagatattatggatggtgtgacgaataattgatctaataatcatttcagacaagtggacaaccctacctcctgagatgatctttttagcattctatgtatgtactggttaaaaaaaggtttcagaatcaaaatgatgatgatcgtatatttgaaaagaagccaatgatctctactttgaaagaagagaagatgaaaagaagccaattatgaagatgaagaaagggcataacagaagattgagtgttatcctttgttgaggagtgcccaacacaaattaaagaatgcttcttttcctttgttggatata

SEQ ID NO: 8188 - DNA, 3000 bp, Unknown
  misc_feature (1)..( 3000): cDNA_ID_1810788_gDNA_ID_1621200_Annot_ID_57639 3000 nt of promoter + ATG
aaattgtacgcctacctctttctctcttctttaattagggctcttcttttttttttgttgttgttgtggatctttgagcctagataatatttttaaaggtcttgtgtcaaaaagggatatatgaaagacgactatgttcatctctttgtgaaaagacctgttcgaagatctcccatcattaatcgaggttacttttcccgttgggctgccttccgaaagcttatgtctcagtttcttctaagcgggacaagttctaagaaacagatactgtctctcggagctggctttgatactacctattttcagttgctggtgcgtcttctttttcttctcctttttgttagcttttaccaaattcaccattcttcggcttattccagggatctctcgcttcttctcttctcattttgtaggatgaggggaatgggcccaatctctatgtggaacttgattttaaggaggtactactggatgagcgtgctgacaaaagtatccatcatgtgttttgagtctaatgcctaaatggatttgcttcttacgttaggtgactagcaagaaggctgctgttatacaaaactccagccaactcagggacaaactaggagccaatgcatctatttctattggtaagagccttttttccccccatgtattattatgtagaatgatccttttcattatgatgcatttcagcttgtgcactcatatttttcttcattccgcttctactagctactaactcaaccacccccttttactttgtaccgttagcgtctagtttcagttgcttactcttaactcgttgggctgtttatctctacagacgaaggacaagttctcagtgatcattacaagttacttccagttgacctgcgcgatataccaaaattaagagatgttatatcctttgcagatatggatctaaggtatccatgaataatttttatttattttacacactgttatcttgaaccttcaaccctcttcttctacccgggtttaagatatatggtaacagatacttactggtgatagacctacttgatccctaatatcattatcagtctgccgacgtttattattgcagaatgtgttttgatttatctggaccccgattcaagccgtgccatcgtcaattggtcgtcaaaaacgttttcaactgcagtatttttcttatatgagcaggttagctcaactgtgattttccttgtctgcataatattgcagatacgaatcttattgcttatgtgtctaacccgttgggtttctgtttgcagatccatccagatgatgcatttgggcatcaaatgattagaaatttggaggtaagaacgtgtactctactactctagttacagcgacatcttcattagtaaagcttttttgagatttttgtcaaaatatggatactagtatgacactaaaatattctagtattgccacatgggttcatgttgtactgatcaattaccttcatttaaacttgttctgaaagcttaacggtgtttctgttcttcagagtcggggatgtgcactcttaagcattgatgcatcaccaactttacttgcaaaggagagattgtttcttgataatggatggcaggttcgttttgcagttagaatattatgattaaagcagggctaactttcatgtataatttctgatataaggactctcatttctttaccctcttctttattctggtgtttcagagagctgttgcctgggacatgctaaaagtgtatggtagttttgttgatactcaagaaaaacgcaggtcagtactgtacgttttgttaaaactgtgtaagggcgttatgttattcatacctagtatctggctgaactctgtcaagaaatatctaaaaaatgctgttgcccgtgacttttgagctttccaatgttttttagatgaacctcttacagtcttactatatatatcctgttttttgttttttcttctctctcactctctctctcactatcctgttttggctctcttgtttcttcaattcatgagctttcattagaaagcctacttctcttggaatatatcttaaatgagaatgtcgtgtttctaggatcgagcgattggagttgtttgacgaatttgaagagtggcacatgatgcaggcaagtctgtctatacctcattaactagatgttgcacctctatgtatgtatgggaaagcataaaaagaccaaaagatgattggtgttgaatatcaacggtatccattatatatttttgatgatgcatgcgtcagatcttgttctagtgtgtaggtagttgagcattatttaaccgtttatattcaacaggaacattactgtgtcacatatgctgtcaatgatgcaatggtacgtacatgagtctctacaagtcattgtactttttagattctggaatgtttttttgattaaaaaaatgcagggaatatttggtgatttcggtttcacaagagaagggggcggtgaaagaatgagctcatcagcgtcatcaccttgaaaaggaggagggtttgtattgcattgaatccccggaacttgcaactggtacgttagttaatacagttggaggaaaacccctggtggtgggtagaatctgatagtgcttggtttacctaatttgtaaggaatgatgattgattgcacaaagttagaaaggcctttctctgggtgctgagcagaaaacgaaggaaacacgaacttgtctgcgttatctgtgcttttgatttagtttaggctcatggtcgagatatgtgggccgggcctccccttgttttatttttggttgtattttctaataattgtgcaaaacaaagaaacctcacctcggtcaagaaacgctctgaaatctgaactctgaaggttgtttttcttcttctttcggtggtgaaaaaattatctttatgaaaagacaaaaaagtttttgaaaaaaggaaatttttttcaaaaaaacagactgagagagagagagagagagtgtgttgttggcc

SEQ ID NO: 8189 - DNA, 3000 bp, Unknown
  misc_feature (1)..( 3000): cDNA_ID_1810822_gDNA_ID_1621200_Annot_ID_57640 3000 nt of promoter + ATG
gtccaaatgatggcgatggtaaagaatgtcgtgcattgacttgagacgagtgaaacggtttcagtaaaacggagaaagagtgtgactctaaatactttgaaaacctacctgaacgttgaagctctcttccaccttagtatatggtgccatgaccacatagattgcagctacagatcccagaatcaaatcatatcctgctcccaccaatcgaaagtttcagttatataaaaaaagaaaaagagatcatctggccgcctaagaagacgaaacgaagaaattaccataggattgaagaaacttggccattttcgaatccgtcggcatcgtctctgtatcggggaatcggaaatcaggcagcccggatacacacacaatttcgatggaaacagaaaaactaaaactgggccttaacttttcgggttacaaatgggttctggcccaatatgtaagcccattaccttttttcttttgcggggacggacttaaagaagggcaaaggacacggagaggtaatctcgatctcgagaaagaaagaaaaaaagagaaggcatggccgcggaagaagcgacggagttctacctgagatactatgtcggtcacaaagggaaatttggacacgagttcctggagttcgagtttagagaggacggtaagctccgttacgccaataactctaactacaagaacgatactattatccgcaaggaggtatttctcacccccgccgtgctcaaggaatgcaagcgtatcgtctccgagagcgaggtcctttttctctctctcttccgatttgcttctctcttgttaattgtccgcgttttggtcaatcgacgctataatagccaattagggttttagtgattttgcttcgatttttgtcgatctagggcatctttcctgactagtgttgtaggtttagaaccctcttcgttgttaatgctattatctaggaataatggatgattttgtacaacctgacatgtgattatttgtctgcgggtagattctgaaagaagacgataacaattggccggaacctgaccgtgttggaaagcaagagctcgagatcgtcttgggtaatgagcatatctcattcgctacatctaagattggatctcttgttgattgccagagcagtaatgatcctgaaggacttcgcatcttctactatcttgttcaggtctcctctctttttcttccaccccttgccttaccatcttttcttttacctaatcccttaactctattggactcgattatatatttaggactctgccttttaacgtattcactgtctcaaactttaacatttagggtttggctgttaacactcatcccttacatggttctgtagtttttttttttttagtttctgtatttatttgtgctctaacatattccttttgaaactttcatggttgcaggacttgaaatgtcttgttttttcgctcatctctctgcacttcaaaatcaagcctatctagagaagaaaatcagtttgtgacatgtcaagacgcgatgaatttgttgggaacatgaggactttgtgactgaagtttggttgtttttatgtctctggttctctgttttttttttttgttggatttgggtgaaagtgggtatgtaagatgttctacctcaacttttggtccttttttgtgtcaacatcccatgtgaagaacctttcatgaaccacaacctatcttctaaaaaccatatacttgctgttttcttatcacaaatcattcactctccctaatgtacatctacatatgatgcatgtttcttttccctcaagccaatttaaactaaggaatgtgatctatctaaaatacaaagtatcaaaaactagctggattagtcgataattaggattgtttccattctaaaaaaacgccctcggaccattcaaactgctcctccaaaacccgtaaatctggttttgcattgaagatatcaagagtagctttttatgaatcgggaagaacaatggaggattcatttgtcagtgtcaggcggattactcacagcctagacagaggacgcacctgccattcatcctcaggttaagcacgcactagtctcctttaccttgttgtagtgtgttgcagagagtcacatgcatatttcatcttgtggcaggatcaggtgcatggttagggcggggactggcttgtgtttgtgcacagaaaagggatcaccactctcgttattcctttgatctcacccctgctcaggcaccaactagcatcagctagttagttagttaccttttaagatggtcggggaaacattagtagctggttagttagttagttacagcagctttgggttaagagagataaacgcgaagccatatatattgacaattggatggtgtataatttattgttagaaaacgagtccgcatttgatattcgatattgcattgcgttcaaggtgatggatgataagtggctcacaatgcgggattcctacatggatttttttttttttttttttacatggattttaacgtagcctttctcctccatatagctttgactttaagagatcaactcagtcttcagagactgagtgtaagtaaatttgtgtttgtttggcagacggtgctgaaatcgacaaggcatcaactggagagagagcttctactggaagatgggacccgagtccaagccttaccttgttttaacctcctcctccagaaagagttagagtatatctcccaacttaaaatatagatgtcaatcaaaaagcaagcaacaattggaaaaatgaatcaagaagactagtatagatccaacatctgggaaccacaaaacaatctccaattgctgagtggatcgtaggaagggccaatttacaaccctaaacttgtgaaagaagaatgaattttaatcttggcgttattgggcctccgctcctctggactctgtcgggcttgatccattttcgttgctgagtggatcgtaggaaccctaaacttgtgaaagaagaatg

SEQ ID NO: 8190 - DNA, 3000 bp, Unknown
  misc_feature (1)..( 3000): cDNA_ID_1808065_gDNA_ID_1621200_Annot_ID_174886 3000 nt of promoter + ATG
atcgctgagtgatgacgatgatgataattaatttcgaaagcgataacgttttgggagatttggaggagcttaccgttgtgtgaggagcgtttgaggtttttggaagaagctctctcgatgtgttccgcagagaaaagctaaagaatgtgaccttatcggtaatttgtttaatagttcaaattattttcacttttactcctctatttctttagtgtttctttttagtgccttcaaattttgaaaactaacaaactcaaccccaaaccaaatccagttaccaagttgcagcattacacttcatattttcatggaagactacattaggtggaacattgaattagcatagcgtcacgggagctcaagcgattctctgaacctttcttcgcttgtaagtcaaggaaaacaaatggtcactattggcttctcgagcatgattgtcttcgctcaggacccccagcggttttctcagagccttggcttccctctgaaagttattactagacgaaatcctcttgctctctgttgtttcagagcctctgtcaacagtcctaggcttaaaaccaggagacttcaggtggtaccggacatattcttcttgctttagaggtatattctgttctgtgatggagtaatttgaaacacggagagcactgggaacagtgtgtgttggatcatgaaacaccggttctgtaccttggattgatctttgtgtagtttccaaataggttaagaaagggtctgggatagaacagccaagagttccgtagggtggtttctcaaatgtcgtacctaagtatggagacgctgcaaatctagtactctttgaaccggtttcatggatttgcaggagattgtttcctggagctacatagggtttcctgaggatggcagaagaagatttagggactaatttgagaacaccctttggcaaagtctgatgatgatggccagcagaaactaagctggaaccttgataccggaatactccttccttggttatctttatcttgagactgttcttggagctgccactgcgagggaaggttaaacttttcgatctatttctttccacgggtttcactacattgggagttttgaatctacatgtagcactatccatttccttagatggaactctattgaggtccagtagcttgagattaccggtttgagttcgtcctgaccaaatgaggagccttgagtaattgcccaatttatttccatactgaacccacaccctttgcatttcggtaaatgtcctgatcagcttttcatgatagaactttaaagagtagtaatactttctcctcttgacaaacataacaccttctttgaaacaagctacctttggagtaaacaatccacctagcaaattcttgtaaaacttatcctctggattcccaaaatataaattggcaccatcaagaagttcctgcatcgtcaaactgaaagtctgtggatccatatctggcagaaaacatgagaggaagaatctttcttcttcagtcagaagtgagttccaagtctcaacagacaatattcccgttaaatctggtagatcgtagagctcgtatggtatgttacagagctgaccttcaaccaaagctagctcacagtttacttgcgcaatgtcgtaatcatcagagtcatcatcttcagagtctagcccaactgtttgattcttattcatctgtagttaaccacttactacccttaaaacacaagtacttcaaatctccaaccacaaactcagtagaaaggaacacaagcaggagatacctagatagaaaatgttaaagactcatcatcagcaattcacattacaagaattctactacaatacaatggacagcgagaagctgagtatgttactaatcagaaatcaaacgaacataaatagcattttactcactgatttcagcaacaacaacactaaaggctatataaaacacgaaatatacattgtgagatcaatgaagcactcaaaaagaagaagatacacaacaccagaaaatctcccagatcggatcagctacaaagcttaaacgtaatcgatcgcgaactcaatcaataaccaaaatcaaaagctccaacaaggcaaataactagagagcgaaaacccttggatttgacaacaaaaatgtgcagacaatttgaataaaaaacaagtatcatacaaatctcagcacaaatcagctccaatgagtttcaaaaacctaccggaactaataaaaaaaaagaatctcgagatattcagagaaatcgatcggaaagcgtaaaagacgaggagcttaccggctctaaagacaggtgaaattagcagattagggtcgaagaaaccatatccctttggctacagatacgaacttcatcgccttcaaagattctctgcttcctttctagagatttctatggcttttcgatcgatgcgacagtagagtagagactagagagactaattactgttacacttgtattttgatttctttaattaaagccgcctaaagtaactaatgccttgattactttaattaataatcatttttaaattgtgatttataatcaagttagacattacttcacaaatagtttgggcctggaaacgtataggcccatgtaaactttaataaaagaatcaccttgcaggtaagtataatatcctgatattattatttacttgatagaatgggcctataataaaagaaatcaccattaaagaattataggcccatgatatcaagtaaatatcaagaaatgatgattaatgatcaagttagacatcattacttgatattttggtaagtaggatcaatcaacggtcaggatccttttagtaaaatcatgtgtcattttcagtttgtctaaaagataagcctttcactttctctctctgtcttattagaaaagaaaatttgtaccgtttccaaagtctgagccaatcattgtgttgattctggaattctttgtgggaacgagaaatttgtacaagggagattcatc

SEQ ID NO: 8191 - DNA, 3000 bp, Unknown
  misc_feature (1)..( 3000): cDNA_ID_2125069_gDNA_ID_1621200_Annot_ID_174885 3000 nt of promoter + ATG
agtacccgttatgtacttgtatactcctgatttgtaatgtgcaaagtcctgaagaacaaaaagatacatgaaaatgtggacttcaccaagatataatcaatatggtttgatcaatcaaaaatctttttcattacctcgtaaacggtaaaagcaacctcgacaggtccattcttgtaaacctcagccataatgtcttgagggtcaggattgattctgtatgcgccgacaccatagtgttttgattcaccccatagctggtttctgcttacacatttcctctcacattttggtgtagggtaagtgggttcacatcccgggtgagagcaaccagtattgtcaaagtatggatcacactgaagaaccaacagcattacaaaagttcaatacactttgaccacattgccattattatttgttctttgctgagaatttacctcttgggttactacaccgtggtacttaaagtacaaccatgcacccattgggaaaccaccattacaaccaaaaccgcaaagtaatccacaacatgctatgacatcattggcagataaggaaacattctgcaagggaagaagagcaattacattaaaaagctgtagcaatcgtcaatcttggcttgatggagaaagttgtgttaccaagttatatttgatgcagaacctgtcggacagtgattcaacagcaccaaatgcccagcaagaaccacaatgacccaaaagaaaccaaaaccataaagttatcgtcgaccagagtaacacattgttcaatatataacccactcaaatgaaatgatgtttcacctgatctttagtgcaataaagagggagataatttgaaacaaaacataagaagagtcagtaaatcattgggttaatgacagagatagtggaagctaagagattaaaaccgacctaagatccttcgaatactggtgcaatgtgaccaagcggttctagcatcaaattctttaggaagcttcaacgataaatcatgtcttacaataggtacacctaagtatgccgtctttggtgtttgtataacaccgaggagtcgcttaaactctgcaacctgcacatacatacacaaaaacacaaactttcaggaacaatgataagtaacgtagctcttaaagagataagagcatggaggtgataataaactcacggtggcatttgcaaaccgatcattgaaagcagctttccaaccagcgtttggattctcattgacttcctttacaatctcattctgcaaaagttgatcatcaacgtttaggcaatctaaaagagacgaaaacaatacagataattgtgtggattaagatcaaaacctgaagaatcagtgaggtcagtttctgcttggaaagattttccgctgcaataccctgagattaagagataaaccagcttcaaaagtttaaaactttactgatatagaaacaattacaaaaaaccatatatacatttccccttcatatgtcttagattgatacgcagagaaaaaaatcacaaagtttgatttattttgtttttttttaacttgtagctcaagagtccaacaaatcgatcttagtaagcaattttaacacacagattacgaaagtttaaagtacctgcaagttgaaggatgaaaataagagcaagaaaacagaggctaataagtgaagtctgatacaacaactatcagccatgatgaatctcccttgtacaaatttctcgttcccacaaagaattccagaatcaacacaatgattggctcagactttggaaacggtacaaattttcttttctaataagacagagagagaaagtgaaaggcttatcttttagacaaactgaaaatgacacatgattttactaaaaggatcctgaccgttgattgatcctacttaccaaaatatcaagtaatgatgtctaacttgatcattaatcatcatttcttgatatttacttgatatcatgggcctataattctttaatggtgatttcttttattataggcccattctatcaagtaaataataatatcaggatattatacttacctgcaaggtgattcttttattaaagtttacatgggcctatacgtttccaggcccaaactatttgtgaagtaatgtctaacttgattataaatcacaatttaaaaatgattattaattaaagtaatcaaggcattagttactttaggcggctttaattaaagaaatcaaaatacaagtgtaacagtaattagtctctctagtctctactctactgtcgcatcgatcgaaaagccatagaaatctctagaaaggaagcagagaatctttgaaggcgatgaagttcgtatctgtagccaaagggatatggtttcttcgaccctaatctgctaatttcacctgtctttagagccggtaagctcctcgtcttttacgctttccgatcgatttctctgaatatctcgagattctttttttttattagttccggtaggtttttgaaactcattggagctgatttgtgctgagatttgtatgatacttgttttttattcaaattgtctgcacatttttgttgtcaaatccaagggttttcgctctctagttatttgccttgttggagcttttgattttggttattgattgagttcgcgatcgattacgtttaagctttgtagctgatccgatctgggagattttctggtgttgtgtatcttcttctttttgagtgcttcattgatctcacaatgtatatttcgtgttttatatagcctttagtgttgttgttgctgaaatcagtgagtaaaatgctatttatgttcgtttgatttctgattagtaacatactcagcttctcgctgtccattgtattgtagtagaattcttgtaatgtgaattgctgatgatgagtctttaacattttctatctaggtatctcctgcttgtgttcctttctactgagtttgtggttggagatttgaagtacttgtgttttaagggtagtaagtggttaactacagatg

SEQ ID NO: 8192 - DNA, 3000 bp, Unknown
  misc_feature (1)..( 3000): cDNA_ID_3047856_gDNA_ID_1621200_Annot_ID_174883 3000 nt of promoter + ATG
gaaaattgttataccaatgtatgtttggttcattgtagcaagaatcagtttcattctttactggcttgtaggattctgcaatcgcggtagtctatgcagagaacagcggaagatgcagcaagaacgataaggacgaaaaggtttgtgttttcgaatctctgatttgatccgacttggagagagactgactgttaaaagttgcttacctgctctcggttcaggctcttccaaatggtgaagcgtggatcccgaacttggttaaggcgataactgatgtagcaacaaaccagaggaaagcaattcatgtagacaagaagatggtagatggatcttactctgatgataaaggaaagaaactcatccctcttatcataggcgctcaggtaagaaagagacacagtttgatttattgtcttgttcgaatttggtaaacaagtgaaatcctttcttctactttgcagtatttgatcgttaagatgattcaaggagcaatcagaaatgatatcaagacaagtggaaagccactttaagaggctctgaagaagaggttttgttgtgagcaaattacaaggagaagaagagtttttcgattgttctttcttttgttagattttatctgcaacattttcttgtttccggctttatctttgtctgtaatttatggagatttgttcaaagaaaagattgccatgctttctggttaaatgaaatggatgtttcccaatcataatatcaccaaaaaaagaatatattatgttctgtagataagaaaaacaaatgatctgctaaagtctgttttgaatcaaacaagtcttttagctgatgggattaattgtttgcatcctcgggtgattacataaacacagatcaacagaaaactcggcataaccaaggccgcttctatctcccacaggaagactagcattggtagcctgatgtcaatgtctgttagatcatcaatcactgctgcttctgttccattataaacagtttattgagaattggttcggaatcatcatcatatccatctcttatttcctaatactaatagacatgagtgtttgtttgtaacagaggtttaagaaatagatcgtcccggtcccacataatctaacaaacttaccgtttagattagataatcaccatcagatctcacagttgcaatatgatgaaaatagacggtccagatttctcgaacgttctcaaataagaaaaaggaaacaactgttgaagataaaaggaaagtaggaaacaatcgaaatttggatatggtaatagtcattttgacatgtgcaatctttttaatatgttgtagtacctgaaagaagctggatgggctcaaggagaccgagtttttgcttgtaccagccaagacctttagctgtcccgatttgtttttggatcatatcacaagctgctgcatgaggtattgctttcttcatttacttttttttttagtaattgattgaaagattttttcaaccatgttttgttttttttgtaagtactaaatttttaatttttgtgacataacatccaaacagaacgtgccaaaaaaatttgataccatacgcgaaaatatgatttaatattttaataaatattataaacataacaaaaaaaataattaatatttaaagtttaataataaattaagcaaattttaagcaaaacataaataatttagaacaaaaatatgaccaaaaacgattaggttgattataatgtgtaaactagtaaaatgtgctagtgtcgttattatgttatcaatcaaacggtataatgcatgttgttaacaaaacaaaacatagttttattgacttctcaaaaatgacctttgaaataattacgacaaagaatatttttatttttttactaacctttctattatcgaactctttcgttgtaaaaatgtctcttgtcgccggtagtgtcaagaagacggacctttgaaatacttctcaaaaaagacctttgaaatattcaaaggtatagcaggtggcgagatagcctggcttgtgagagaggagctttccgtcttctttgttatgtgtatattttaataaataatttttttgttatgtttacattatttattaaaatattaaactatatttttttgtttatagcatcaaaattcattggcacgactctgatgacgagacaccaaatatccatataatggtgttgcagttgcttcgttggaaagacgataatcaacctccggccaagataatcttcatatcaaactcgctcagtatctatcacttctcttggttttttgcttaaaatccgctcagtatctgatgaatattataaaatttcttcattgaattttggggtttgaacagcaaaagtaagaatctgatttgtctgaaaattaaacatttgcgttcaataaatagcatgaatttgatttgctataatttcgtagaaaaagttggacaagaagaagaagaagaatacaacgtggttaagcaatttgaatccctatattttgtaggcatgatataaacattgctgtaaaacgataatatataatcggtgtgatacaacaagaccgtgtcatgagaaaccgacatagcccagcctgatacgcggttctccttctccaatcattaatatccctcttcttccctgcaattactctttattgtacttaccttttctcataaatctacaaaaaatacaagtacgatttaaaacgttatgatcgttgtaaacttccatgaatggccaaaacaaaaataccaaaatctaccattggtcaatagactaatttttctttatttcattgcaattatgaagaaattacattgtctttatttcactgaaattagatatttacgaaaccaacggttcatatttttttttaacttatgaataaaataataataataataataatcaagtactgccaaaaagaataaatccgatagaaattcattataagatgagaaaaaagatctgttgagagaattcgaaagaaaaactcaaatg

SEQ ID NO: 8193 - DNA, 3000 bp, Unknown
  misc_feature (1)..( 3000): cDNA_ID_2125058_gDNA_ID_1621200_Annot_ID_174881 3000 nt of promoter + ATG
tcagatatttgattcatcaaaatcaccaactagggtttacaaagtccatgcttttcgatcattgatcagagagctttcaagaaatatttgcaagaaaatggcaatggctccagtaataaagctggtcttaggttcagttgcctttgccattttctggatattagcagtgtttccctctgtaccattcctaccaattggtcgaaccgccggttctctgttcggtgcaatgctaatggttatcttccaagtgataaccccggaacaagcttatgcagccattgatctcccgatactcggtcttctctttggaacgatggttgttagtatataccttgagagagctgatatgttcaagtacttaggcacattgctttcgtggaaaagcagaggtccgaaagacttgctatgtagagtctgtcttgtttccgctgtttcaagcgctctgtttactaacgatacatcttgtgtggttttaaccgagtttgtgttgaagatcgctaggcaaaagaatctcccgcctcacccgtttttgctcgctttagccacgagtgcgaatattggttcttctgctactcccattgggaatccgcagaatcttgttattgcggttcaaagcaagatcccgttttgggagtttcttcttggtgtttttcctgcgatgattgttggtattaccgttaacgctatgcttcttctcggtatgtattggcggttattgtcagatcataaagaggatgaagaagaagtacaaaatgctgattctgaagttgttgcccaagaagatgtccaatctcataggttctcgccagctacattttcgccagtctcatccgaagattcgaacttgagaatggatgccgccgagactctcagaaacagagcgggttcagcgggtgagagcgagttaataagctgcaattcaaatgcgtcgagagaacaacacaacgacgcagagtctcaaggagagagcaataataccaacaatatgttccagaccaagagatggagaagagttttatggaaatcaagtgtttatttcatcacattaggaatgctaatatctctgcttatgggtttaaacatgtcgtggaccgcaattaccgcggctctagcactcgtggttcttgatttcaaagacgcaaggccgtctctcgagaaggtgaaaaccaaattttcttaaactctttagagatacaattcaaagatcttatcaaagttgtaacttttgcaggtatcgtattcgcttttgatctttttctgcgggatgttcataaccgttgatggattcaacaaaactggtatccctaccgctctatgggacctaatggagccatatgccaaaattgatcaagccaaaggaatcgcggttctagcagttgtgattcttgtcctctccaatgtagcctctaatgtaccaaccggtaatgtcattatttttaaagccaaacatgtatggttggctccacgaacaatttcttgattcaaaaggaaccacaagaccatgcgaatgattattttttcttttttttttaatcgtttgtagtgcttttgttgggagcaagagtggcggcatcagcgatggggagggaggaggagaagaaggcgtggttgttgctggcgtgggtgagcacagtggctggaaacttgacgttgcttggttcagcagcaaacctgatagtgtgtgagcaagctcgtagagcagtgagccatggatacactctcactttcactaaacatttcaaattcggtttgccttcaacactcatcgtcactgcgattggtctcttccttatcaagtaaatcatagctcactctgcatatatgctttcttttttcaagaaccagtgtttatagctaggttttatttccacacttatgtaatttaataatagttataatatccatatttgcatcattgaaaaacaaacagtatcacaactatgggtctgactggtagtcttctatagaagaaaaatagtgagaagaaaaagaattcttctgtgttgtacttaaatgtaaccagtcagataaaaagtaattggttttgtttcttcccaattcttcaaaaagcaataaaaagtaattggttttgtttcttcccaattcttcaaaaagcaacgtgaaaaggaagaattcatcccacttcaaatacatgagagagaaaattcttctgctttttgctttttcttttcttcacttttcttcgtttatttttcatctcatttcgtccattttttatcagtcacaccctatataagtaagaaaatggtatagcatttttcaagttgaagtggttcttctactccgcagatgtgtgtatgtagagctgaggaatttatgaatgtatatgtaagcgcccctctttttttttgtcttttgtaatttaatattcacattgtattgtatgctatgttccatactcggcaaatccttatatttgtggctggttctttttatttacgacttctacgaagtttcctatatacaaatttcaatgtggtttactttttgtgatcttatataagcttcaagataaattaaccattgacgttaacgttaggagtaactgtcacatcacatgactaagcgcactttgacttaagtgggtagggtatcaagaagatgatctggtaggaaagaaattatgtgacccaacatctgcattatggggtccaaaacctgtccgtaaaatagttgacgaaatctaccaaggatctcaatttttttttttttttttttttttaggatctcctttattgtgccttatataagcgcacaaacccatcttgcctgcttagagcatgaccagcggtagttttttaaatttggttctcaacagttaagatatgctttaaatccctttgttggacttgctcttatgatataaacttgtagacgagcgggcgaagagcgaccatagagaaagctctctacttcatattttgatatctttccctctcttagttttgatctgaacctttttgtagctgttgaaaaatg

SEQ ID NO: 8194 - DNA, 3000 bp, Unknown
  misc_feature (1)..( 3000): cDNA_ID_2125031_gDNA_ID_1621200_Annot_ID_174872 3000 nt of promoter + ATG
tgggatcctctccatcgtttccatcatgggatacattacttacattgacttcatgaacaacatgggacattgcaacttcgagcttttccctaagcgtctcttccacctcttccctcccctcaagttcctctgttacaccccctcgtacgtcgtttgtaaaaacactactatttatttggatttgaatatatgcatgcatttataacatggcatcaaatatgttgaaggtttcactcgctccaccacacgcagttccggaccaactactctctgttcatgccaatatacgacttcatctacgggacgactgataatttgaccgactcactatacgagaggtcgttggagatagaggaagaatcacccgacgtcatccacctcactcacctcaccacacacaactccatctaccaaatgcgccttggtttcccgtccctctcctcttgccccttgtggtctcgacccccatggtacctcacatgcttcatgtggcccttcactctcctctgctcatttgccctcacttcagctatccctttgcgcacctttgtctttgagcgaaaccgtctccgtgacctcaccgttcactctcacctccttcccaagttttcctttcacgtaagcattttacacgcatgcatatgcactttccctctctctcgctctcttgacacaaacgggtttacttattatgttgtacttcacaccactattttccaaactttcacacacaaaaaaaacattgattctcacttaacttgtacgtactacgtaggaaggacataaccttttatacaaaaagaaaattaaaacaacctaaaaatgaacaatgaacattttcttgtgggtataccttttgtaagttgcatctaaagtttattaataattttgcctcataaacatgcggcggtagtataaatcacagcgccaccatgagtccatcaacactatcatagaggaagctatccttgaagcagatgaaaagggtgtgaaagtaatgagtcttggcctgatgaacaatgtaagtttatttacttcaaatccccctaaatatatatgaatcactattggataagtactgtaactaattacacacgctggcaaaagaaaaaagtaactaatcaacacacaattaattaatgagagggaggaactaaacgggtctggagaaatgtacgtgcaaaagtatccgaagttgaagataagactagtggacgggagcagcatggcagctacggtggttatcaacaatattccaaaggaagccacggaaattgtctttagaggaaatctcacaaaggtggcttcggctgttgtctttgctctgtgccaaaagggcgtcaaggtttgtgaatatatgagggaattggaatatatatactcagcttctcatatcaaacaaaaaataatgtagtaatgtgtatatataggtggtcgtgttacgcgaggaggaacacagcaaactcatcaaatctggggttgacaagaatctggtactgtctacaagcaatagttattactccccaaaggtgtggttggtgggggatggaatagagaacgaagagcagatgaaagcaaaagaaggaaccctctttgttcccttttctcactttccgcccaacaaactccgcaaggactgtttctaccagtccactccagctatgcgtgttcccaagtctgcccaaaacatcgactcctgtgaggtacatctttgaattcttatagatatatctgtaacttttatattatataagctgatagatgtgttcatctataatgaatgaatggttgttatatatatatagaactggctggggaggagggtgatgagtgcatggaaaataggaggtatagtgcatgcacttgagggttgggaggagcatgactgcggcaacacttgcaacgtcctccgtctccacgccatatgggaagctgctcttcgccatgatttccaacctctcccaccatctcctctatgagcttttttcatattcatacatctatgtcccctttcttgattatatctacttcccttccatcattgtttgctgtttactatgtttttctatcgacaatatataagtacccttgttacccttggtgccacgtgcttcatatatgttagaaagggcaaaaaaattcgtcgtatgatatgcttagttaaattttataaaactcaataaaaatcttcagaaacagtgctatgatcattacatcttaactaagtgatatatatctgcgtgcctatttaacaaaataaacaaaaaaacaaaacaaaatatatttgggtgcatcatcaaatcaaagtagttgcaaaaactggacgaggtttttacttaaatggtccttaccccgcatggtccacttgctacctaattaaggattggtagggtgcgtatacgtatataaattgtggcggtgggagatggagttactaaaaacgaaacgtacaagtattattcatagctctcgtataaggggttagtccttagatctagatattttcacttttctttcatttatgtcggagcaacagacactagctggcgcttcaacgtgcatgatcttgattggctagtaaattccaagcatcaatacctaacacatgcccaacttggttcattagtattctttcattggtaaaatacccttacctttcaataatatccagaaataaatatatgaagccatccatcaaccggtgcatttcctcaaggcatggatatgatatcagaacatcgatgaaggtgggagggggtaattagctgagtgtcataaatgaggatccatgtggagatcatcgaatggtagtagtacatgtttggtcttagctggccccaccacaaggaattggactggtgggaagataggggtggttacgtcattccacatatctaccaattaaggagtttaatataaaccttgctatataatgtaccttggctcacaagagttgaagagacacagtgacgacacaaacatattacattcgacggtata

SEQ ID NO: 8195 - DNA, 3000 bp, Unknown
  misc_feature (1)..( 3000): cDNA_ID_3047871_gDNA_ID_1621200_Annot_ID_174871 3000 nt of promoter + ATG
tctctcgccacgagctcaaaggctgcatcaacgacgccaagtgcatgcgtcaccttctcatcaacaaattcaaattctccccagattcaattctcatgcttaccggtacagagtatttctatcttttcaaatgcctatgtttgctactatactactattccttggattttgaatacaattttccttggcctcttcaatctgataaacacacattccaagttaccatttcgaaccactttgataaaaatgtgttgcattccatagctgactaactaattgttcatcatggatggttttcattctcagaggaagaaactgatccatatcgtatcccgaccaagcaaaacatgaggatggcattgtattggctcgtacagggatgcacagcaggcgactcacttgtcttccactactctggtcatggttcgcgtcaaagaaactacaacggtgatgaagttgatggctatgatgaaacactctgtcctctggattttgaaactcaggggatgattgtagacgatgagatcaacgcaaccattgtacgccctcttccacatggtgtcaagctccattcaattatcgatgcttgccatagtggtaccgttctggatttacccttcctatgcagaatgaacaggttattagtccctcaaccgcttctaaaagggatgttgcttacctctctcgttatatttaacatacatccatttttttttttaattgaaacagagctgggcagtatgtgtgggaggatcatcggcctaggtcaggtttgtggaaaggaactgctggtggagaagccatttcaattagtggatgtgatgatgatcagacttcggccgacacatcagtaagtagaacgactctaatcatacgtcttgctgttgtagttggttcctcctctcatgattaaaacacatacacaggcgctgtcgaagatcacgtctacgggtgctatgactttctgttttattcaagcaattgaacgcagcgcacaaggcacaacctatggaagccttctgaattctatgcgcaccacaataaggaatacagggaatgatggtggtggtagtggtggagttgtgacgactgtgctgagcatgcttctgacagggggaagtgcgattgggggattaagacaggtaaaattctttcttgctctcttgtgttgatacagatcgataaatgttttcttaaatctgttttttgacaggagcctcaactgactgcttgccaaacattcgatgtctatgcaaagcctttcactctctagtaaaggacaagtcactttttatgtatagcgagtgtgatttgagaatccgtccatataaccaccttttgtttcttatttttatttttctttcaaaagaataaaggaaaacattgatttggtgattcgataacaaaatgtgccatctattctttagtctttacaaacaagcagcaaatggtttgcctttcagaatcaaaatttaaggtgtttctcgaatagacagaaggaagagaagagaagtcccagaaagctgttcagaaggcgcatacaaatcatgtgtgcgttgctgctgcaaggaaaagcacttccgctgtagcagcctgttctttgtttgataccccggccgttatcttccagtacaaaggaggagtttttcacaccatcgctaaagagaagacaccaaaagaaggtacctttatgcaacctagccattcccactccaacctcggtatgcgacctgtttctgagcaccgacaacgcactgctatctctaaagagaatgtctgagaaagcgacttctggtgctgcatacttagagctgcagccgaggatatggccagttatggtaccaaaagtggggagttctacaccacagtttggggcaaacacctgagtgaagtcgtcttcagggtgttcacagctgagagtgttgttgacattgcaattcccctcgcagagctcaacatactggagggccatgcagccaagaccgggactctcatttagtttgcctagtttccgagctgttctgttctggttcaagatgctcaccatttcatgagctgagtttcctgcaaccattctaactaacacttagtccgcctaaaacgaatcaacataatataaactgtcgaatctggttctgactaaagaaagcgaactcgagattaaatcagagggagtggctgtaaattcaaaataaagcctggccaaatgctgaacgagaaatccaagtctatattcgcatatgttatgaggggataaagcaaggagttaccgtgcaatttggagctagctagcactgatgagagtgacagaaacagtaaaatcaactccaaaatgctgatttcgttcttcatatcgtgttttatcctctgaattcccagcgtaatagctcgagctggcggattttcgaaaaatcgagaaaaacaaaaaacagaaaaggagaaagtttttgaaaggagatgagcttgatggagatgttgactggtccctgaataaatgaaaaatgtgttgcattatttctattattgagaagaaaaaaaccaggcattttggttattgggctttgatttgatgttgggctctcaaccattgaaattgaatgaagaaagaaggaaagtacgtgacttgaatttcatttacttcattaaatgggcggcgttggggccggtggaggtgggccaatgacattgatgtgtaaacagaggtaaagccgaattttggctaaggcgaatcaatgcccattggctcctctccttacatatttgaagtttgaggtttccttccttttcttaaattaaatgttgctgtaacatttctactattgtaaaccggggctccaccaccatgtgcttcttcaacactgtatcatcagagcccacatggtcatgcctctatataatactttgtattattattattcttatgtcacattataaacaagtacctccaaattgcacttccttcaaacttattcgacagtagactagctcaagtacctttgg

SEQ ID NO: 8196 - DNA, 3000 bp, Unknown
  misc_feature (1)..( 3000): cDNA_ID_3047879_gDNA_ID_1621200_Annot_ID_174868 3000 nt of promoter + ATG
ttcatcttactctactagtagtggtccttcagatgtcctagcaatctttcccatgacccatctagcgtaggccttactaggttctgcttatgtttttaaattttgattttgcagtcaatctggcatatggtaattggttaaagggaaatttttatccagctttgagtttcctggtatgtattatctttgtggtgacatattttctcgattatagatttagaaaatcggtcatgctatccagaactatggggtttgctgacatctctgttatccgataatcagatttttgccactgtaatcttcagatgcgatacgatgttactgcttgggcctattggtcttgaacttttattggtgagctggtgacgaatattaaatagtttgggttctcaacttctgtatatgtataattggccgtatactttaccgttccatctgatgcgggtgctttatgtttgtcaatgacagaccaaatcgatctccttctggaaagcacttaagtattgtgttggaaccgctctgttggccgtaggttggttaaaattcctcttctttctgtgatctattttgctttttcccttcagacactaattcccgagtctattttctgtggtcatggaataatccttagcacaggtcttaccattttcgttgactctatcatgtggaagaagtttgtctggccagaatttgaagttttctggtttaactccattctaaaccggagttctgattggggtgtatccttcaaaaaaattgtttcctcaattgatttatttttcatatgatgcataatgttctagcatttttctactgcctgattaaaggattgcgttctgtacaatgataaccgtttggaatttccaattcaaagtttaatattgtggcacttgcatttgtatgaaatgatgtgttgtccttgaaaattagttgctaaactagacacattccatacattggtacttcacctcagcactcccacggtctttacttgtagcttatccactttcattggtaaataccagacttcctaacatctgtgatagtgtttgtcttgttcctttctagttaggatcgctaattgtatctctacaaattttcttatttggtttctttttatgcagcttggtactttagttgacagaagggttccattctttatagttccagttttatcgttcgttatactatactctaaacttccacacaaggtattcagatggattacttatctcagtagccatcaacgtttcttaaccattttctgacatcggcttacctatctttcttgatttatgaaggaactccgatttatcattagttcagtgccaatgttcaacttgtctgctgcagttgctgctagcagaatgtatgagttctatcagatgtttgctagctaagctttcaatcatagctaggacgttctttgattctgtatcttaagagctctttggagtttggatacacataatttctgtatgccactttaaattactaccaatgcgggccgacctcttaatataatccgattttgttgtacagctacaataataggaagaaaacgatttggaaactggtgaatatggttatgctagcgttttttgcaatcaggtagaaatagtaaacaattatctttgctatgtaagagaaggaaagagatttgctagtctactaaacctggttctatagtgcagggtgcacggttgtaacattcatggcatcttactacaattatcctagcggctatgctttaaagcgcttgcatcagattggtgagtgacttattctgttattggggtttgttattaatgcagcagcattgacttggctatcaaacaagaaacatctgctggtcagcgtttgttttgtggtgtctatctacctctggttgataatttgcctacaatatgattaattgacttggtgccttccatggttctcaggccatcctgcaaatgtagctggggaagagtgggttcacatagacacttttggtgcgatgaatggaatatctcgcttttgtgaagatgattttccgtggaggtatgttagctgtactacctcgttttagggttggtaaaagtaaaggaaatatcaatgtacatggaaaaaagttgccactcggaagcacccatttgtgcgagatgaggcatctgtttgtttttcatgttcattttcttggatacgaatatcactttgttggaaaagggatcattctacattgcctttgaatacatagaagaggtatctgtttatctatttaggaggatataaaattttgttgtgcaatgcagatattccaaagaagaagagatagtagtggaggagttgcgaaaccgaaatttcacgtacctggtgaagtgagtatttcatcatatagtagaaagcaattcatagtaaataaaaaaagataccactggtggtcaacatgtaacactgttgtcatgcttggtgcagcgagcattcctctgtagatggatacaagtgcttattttatgaagaaggctttgagagacttgagctgcggcgaggtttccctcccattgtcttggtaaatcggtgggcgtggggctagtatttcatcaaaataggtgcatggaatgtaatgtaatgtaatgttgaattgcaggtaaaaaaagccaaagtatacttgcaccgggagatgaagaaggaagatccttttcataagaaatggcctggatgttaggtaatcctacaaatagagacaatgttttgggtcgatgtaatgtagcattcctcagagaggacatgatgtaatgtaacaacggagatgcttgttactgacttactgtaatggattcaacaaattcatccagaagcatcatcggcctttgggctttgagttacgcgtcacaattgaatcaattggtccttttaattagttttaccaatatacccctccgtcttttcccccttctcgtttaggaaaaaaaatcattagcttcgacttatccgaaacctaacgagtaacgacgagag

SEQ ID NO: 8197 - DNA, 3000 bp, Unknown
  misc_feature (1)..( 3000): cDNA_ID_3047883_gDNA_ID_1621200_Annot_ID_174867 3000 nt of promoter + ATG
gcaggagcttgaaaagatagtcgctgcaaatcccaaaacgctaattaaaccctaggaaccacccggagaatcaaatatataacagaggtaatttcgacccaagtatgtgtcgatggagaaaggaacttactactcaggattcatggttttcgatctgtgggaggaagagcagcgagcgatacagagccagagatctctctctctcttttctgattttctctcgcgatttacaagaggaggagattcagtgtttgggccttgaataataatatgagcgaaggcccaataatgcaaaagattaaaattcattcttctttcacaagtttagggttcctacgatccactcagcaacgaaaatggatcaagcccgacagagtccagaggagcggaggcccaataacgccaagattaaaattcattcttctttcacaagtttagggttgtaaattggcccttcctacgatccactcagcaattggagattgttttgtggttcccagatgttggatctatactagtcttcttgattcatttttccaattgttgcttgctttttgattgacatctatattttaagttgggagatatactctaactctttctggaggaggaggttaaaacaaggtaaggcttggactcgggtcccatcttccagtagaagctctctctccagttgatgccttgtcgatttcagcaccgtctgccaaacaaacacaaatttacttacactcagtctctgaagactgagttgatctcttaaagtcaaagctatatggaggagaaaggctacgttaaaatccatgtaaaaaaaaaaaaaaaaaaatccatgtaggaatcccgcattgtgagccacttatcatccatcaccttgaacgcaatgcaatatcgaatatcaaatgcggactcgttttctaacaataaattatacaccatccaattgtcaatatatatggcttcgcgtttatctctcttaacccaaagctgctgtaactaactaactaaccagctactaatgtttccccgaccatcttaaaaggtaactaactaactagctgatgctagttggtgcctgagcaggggtgagatcaaaggaataacgagagtggtgatcccttttctgtgcacaaacacaagccagtccccgccctaaccatgcacctgatcctgccacaagatgaaatatgcatgtgactctctgcaacacactacaacaaggtaaaggagactagtgcgtgcttaacctgaggatgaatggcaggtgcgtcctctgtctaggctgtgagtaatccgcctgacactgacaaatgaatcctccattgttcttcccgattcataaaaagctactcttgatatcttcaatgcaaaaccagatttacgggttttggaggagcagtttgaatggtccgagggcgtttttttagaatggaaacaatcctaattatcgactaatccagctagtttttgatactttgtattttagatagatcacattccttagtttaaattggcttgagggaaaagaaacatgcatcatatgtagatgtacattagggagagtgaatgatttgtgataagaaaacagcaagtatatggtttttagaagataggttgtggttcatgaaaggttcttcacatgggatgttgacacaaaaaaggaccaaaagttgaggtagaacatcttacatacccactttcacccaaatccaacaaaaaaaaaaaacagagaaccagagacataaaaacaaccaaacttcagtcacaaagtcctcatgttcccaacaaattcatcgcgtcttgacatgtcacaaactgattttcttctctagataggcttgattttgaagtgcagagagatgagcgaaaaaacaagacatttcaagtcctgcaaccatgaaagtttcaaaaggaatatgttagagcacaaataaatacagaaactaaaaaaaaaaaaactacagaaccatgtaagggatgagtgttaacagccaaaccctaaatgttaaagtttgagacagtgaatacgttaaaaggcagagtcctaaatatataatcgagtccaatagagttaagggattaggtaaaagaaaagatggtaaggcaaggggtggaagaaaaagagaggagacctgaacaagatagtagaagatgcgaagtccttcaggatcattactgctctggcaatcaacaagagatccaatcttagatgtagcgaatgagatatgctcattacccaagacgatctcgagctcttgctttccaacacggtcaggttccggccaattgttatcgtcttctttcagaatctacccgcagacaaataatcacatgtcaggttgtacaaaatcatccattattcctagataatagcattaacaacgaagagggttctaaacctacaacactagtcaggaaagatgccctagatcgacaaaaatcgaagcaaaatcactaaaaccctaattggctattatagcgtcgattgaccaaaacgcggacaattaacaagagagaagcaaatcggaagagagagagaaaaaggacctcgctctcggagacgatacgcttgcattccttgagcacggcgggggtgagaaatacctccttgcggataatagtatcgttcttgtagttagagttattggcgtaacggagcttaccgtcctctctaaactcgaactccaggaactcgtgtccaaatttccctttgtgaccgacatagtatctcaggtagaactccgtcgcttcttccgcggccatgccttctctttttttctttctttctcgagatcgagattacctctccgtgtcctttgcccttctttaagtccgtccccgcaaaagaaaaaaggtaatgggcttacatattgggccagaacccatttgtaacccgaaaagttaaggcccagttttagtttttctgtttccatcgaaattgtgtgtgtatccgggctgcctgatttccgattccccgatacagagacgatgccgacggattcgaaa

SEQ ID NO: 8198 - DNA, 3000 bp, Unknown; identical to SEQ ID NO: 8189
  misc_feature (1)..( 3000): cDNA_ID_1810822_gDNA_ID_1621200_Annot_ID_174864 3000 nt of promoter + ATG

SEQ ID NO: 8199 - DNA, 3000 bp, Unknown
  misc_feature (1)..( 3000): cDNA_ID_3047890_gDNA_ID_1621200_Annot_ID_174863 3000 nt of promoter + ATG
aaagaaacctcacctcggtcaagaaacgctctgaaatctgaactctgaaggttgtttttcttcttctttcggtggtgaaaaaattatctttatgaaaagacaaaaaagtttttgaaaaaaggaaatttttttcaaaaaaacagactgagagagagagagagagagtgtgttgttggccatgggatgcacggcctccaagctcgacagtgaggatgctgtccgtcgctgcaaggagcggcgccgtcttatgaaggacgccgtctacgctcgtcaccatctcgccgccgctcactctgactactgccgctcccttcgtctcactggctctgccctctcctccttcgccgccggcgagcccctctccgtctccgagaatactcccgctgtttttctccgcccttcctccagtcaggacgcgccacgtgtcccttcttcccattccccagaaccccctcctccgcccatccgcagcaagcctaagcctactaggcctaggaggcttccacacattctctccgactcctctccttcttcctctcctgccaccagtttctatcccactgctcaccagaactctacttactctcgctctccatctcaagcttcctctgtctggaactgggagaatttctaccctccctctccccccgactccgagtacttcgaacgcaaagctcgccagaaccacaagcaccgtcctccttccgactacgacgccgaaactgaaagatccgaccacgattactgccactcacggagagatgccgccgaggaagttcactgcagcgagtggggcgacgaccacgaccgtttcactgccacctcttcgtccgacggagatggggaggtcgaaactcacgtttccagatccggtattgaagaagagcctgtgaaacaaccacatcaagacccaaatggcaaagagcactctgaccatgttaccacttcttccgactgctacaagaccaaattggtggtaaggcacaagaatttgaaggagatccttgacgccgttcaagactacttcgacaaggctgcctccgctggggaccaggtctccgccatgcttgagatcggccgggctgagctcgaccgcagcttcagcaagctgaggagtaagtctcacactctactaactagatgtagatgatgatgcattgaaacccatctcattctcttactctctctatatttgttgtctgcagagacggtgtatcattcaagcagtgtgttcagcaacttgagcgcaagctggacctcaaaacccccattggcagtcaaatacaagctcgatgcatctaccctgaatgatgaacaaggcggcctcaagagcctctgctccactctagaccgactcctcgcttgggaaaagaagctttatgaggatgtcaaggtacattccctgtttttgttttcggttttcggcttaccaacggttacgaaataaacttgtgaattcgaatttaggcaagagaaggagttaagattgagcacgagaagaagctgtctgcgctgcagagtcaggagtataagggaggtgatgaatccaagctagacaagactaaaacttccataaccagactgcaatcactcatcattgtttcttcagaagctgttttaaccacgtctaatgccattctccgcctccgggacactgaccttgtccctcagcttgttgaactctgccacgggtcagtcttttttttgtagttgtgtttgtgtttcattgttccttgagggctgctggttcggtctaggcttgtttatatgcttctgcaaactcatgtgaacccgaattaggcatatgtaataccaaacccattgctgttctgccagtgggggattttataggtaagttcgaaataaaagtagggaggatttgtatgtgtctctaaccaccttgaaatgcagattaatgtacatgtggaagtcaatgcacgagtatcacgaaatccagaacaacatcgtgcaacaagtccgtggcctgatcaaccaaacagagagaggtgagtcaacatcagaggtacaccggcaggtgacgcgggacctagagtcagctgtgtccttgtggcattcgagcttctgtcgcatcattaaattccagagggagttcatatgctctctccacgcatggttcaagctgagcctggttcccctgagcaacggagacccaaagaaacagcggccagactcatttgccttgtgcgaggagtggaagcagagcctggaacgggtgcctgacacagtggcgtcagaagccataaagagctttgtaaacgtggtacatgtgatatcaataaagcaggcggaagaggtgaagatgaagaaacgcacggagagtgcaggaaaggagctggagaagaaagcatcctcactgaggagcatagagaggaagtactaccaggcatactcgacggttgggataggccctggaccggaggtgttggactcacgggacccgctatctgagaagaaatgtgagctggcggcatgtcagaggcaggtggaggatgaggtaatgaggcacgtgaaggctgtggaggtgacacgagctatgactctcaacaatctacaaaccggcctgcccaatgtattccaggccttgaccagcttctcatctctcttcactgaatctctccagactgtctgttctcgttcctactccatcaactgattatgtccaagtttctcatttatttttaagctctcattacgttggtatcatgtaaatttgaggattgattaaattgagtcttgtggttttgtgaggactcacaatctttctcatttaatacatgagcagacacggcacctaactaatggcccaaaggtggcccgccaaattgaatacaagggtaagaaatgggccaagaaagtgagagcccaaaagaggccgatcgttcgtttttgactcaatggccgttgacgttgacatcgtacgccgcacccaacgaccgccaaacagcaaacaacaacactttcccctttctctctctaaac

SEQ ID NO: 8200 - DNA, 3000 bp, Unknown; identical to SEQ ID NO: 8188
  misc_feature (1)..( 3000): cDNA_ID_1810788_gDNA_ID_1621200_Annot_ID_174862 3000 nt of promoter + ATG

SEQ ID NO: 8201 - DNA, 3000 bp, Unknown
  misc_feature (1)..( 3000): cDNA_ID_3047894_gDNA_ID_1621200_Annot_ID_174861 3000 nt of promoter + ATG
attagttaggtgaaaacatgtttgagaaatcggcggggattgtgttttcatggtcataaaacatgaccataaacactgaaagagattatgattatgctgagggagtgtgagaaatcggcagggattgtcatcatatagtactagactactagtactttgtataacgttctcaggaacatgtttcggtcagaattccgatggtgggatctagtcgatgacgtaataaacaacactttcatgcccgcctaagaggcagctgtcgcagactaagcaggtttcaacatgtgaggggccaaggcgctggctagtggtcaaaagacggaacactgagaatatctgtatcattccatatgatccaagcgcctagctttgctcaagtgtcaagactattgattactgaatactaaattcaaagccatttttcttttaatgggcagagagacaccaaatttgctaatgagggaaatcaaacataacaaggggttattgtgagagagaacagaggatcttatacaagttgaaaatccgcaaccaaataatcataatctactctcggtaaatggaatgtcaatccgcactgaccatttgctctctcttgctcctctaccttgttacaggatgcctcctcctgcgttccaaagttgaatgtgtgtatgttatatcatctcctttgtacttatcatctcactcatatctaatattcgttacctctttggtcggatcccatcttcttcgtagtccatcactccacttggttccccaaacatctccttattccctctgatgtcaacatccccctgcccacaacgtaagtaagactatatcgaccaccacccttcccaatcatatttcagacacaaaaaaccaaacgaaccttgtttcatttcatttaacaatcagacaataaccaagtactaccattccaaacaattcatgtcctctaatgactttaacacttcactaacagccgttgtgattgcgttccttgtttgtttttaattaaagaaaacttcataatatatgtttacatccaacatgtaagatttcttgttccacgaaagaacggttaaaaaagcccgccacagttggctgatcgattcgtttgttattaagaaacataactttttaatctatgataggactggacttggaaagctcaaagacctagaaagatttttttatcaagtctctcccatccccgcttacatagacctaagctattaataagaagaaacccactacaattctctgaagaaatataagacagaatagctgactggactctaactcatggtcacaagacagtaaccaagaaagaatgtaaccaatattagttacataatatacttagtagggaaaagtgaagccaataggactccaagcgcgactgaccttcatggacagagacttcttcacttcttccaccccttcttctgcttccttacgatgttttttgtccatctcactcatattgtccgcccatttgatcttgtcttgaattgaaatgagcagattctctgacgtgttcaacctagacatcaatttgggccaacacataaaagagtaggacgtcattagccatgtattctaacatcacgtacaagttcttataattagatatagaaggcaaaaaatcctggatctaagggaagaagaaaactaccagttggacaatgtgtgtaacatattccctagttgacctggccttagatccctaccagctgcaaacggaacctgcatggttgcaagagatatatgatgtttagaagggggggctcgtacgtttagaaacaaagcacaatggttaaaataggaaaaggaggcccaaaccaaaacacacctcaaaacatctttttaactgatccagttttcccctaactataccctgcaaagtgtaaaagaaaaaaaatgagcaccatgcgttgtcacagttagttgtcaaatagagattagaagactgctaaagagtactcaccgcatacatgcattcattgataagaaagtcctcgagttcgcgaacattggaaacatctaactcgaccattagtgtatcatagggcaatacctataacaagcagagtgagagagacattcagttaggcaaacagcaggggaaaaagataatggaacagagtagatagcaggagcaaatcatgaacctaagacaaatataccttgttagactcagcaagggtgaggacagtgagctgcttaagcttaagaatttggtcaggggacaagtgcggaagacgggtggcattgcctagtgtttcgatgaaagcaagtcaagaggagagaatatgacaaaagggaaaacgaattgaaatagcatatgacaaaggggtcatacatttgtagtctccccaggtgccatgggcaaacaagcgtagtagatccaggtacacagaatctgtggttccttcaagctgcacaattacgattaatcagctactagtatctatcaagttgttatgatcagcgaagaacaaaagcatgtaaaaccctagatcgtgaaaagcataaagtagtagtacctgggcaacattgggtagagccaaaatctcggagaaggcgaagagagaaggatgcgatgtggcttcgatgatgagcgggcccagagcctcggatttgcaagtagaagctcgcttcacgagctgatcaatgatctcggcttgcttctgctcgatatccatcttccaaacaaatcgatttccggtggtttagggttttctttcttaccacactaataacgaataaaatcccaaacttcttctctctgctccttccttcttccgtttttatattactgttttttttatgtgaccgaccgaattcttctagaatcttgtttaataattgggctcaaatttcgtagtttctgggccaaggcctactaagagaaatattagaaaccgcgtctggtgagcccaaacaatcccggggaagagagagactattgaatattcttcttccttcattttggctgagagagcgacgacg

SEQ ID NO: 8202 - DNA, 3000 bp, Unknown; identical to SEQ ID NO: 8187
  misc_feature (1)..( 3000): cDNA_ID_2124996_gDNA_ID_1621200_Annot_ID_174859 3000 nt of promoter + ATG

SEQ ID NO: 8203 - DNA, 3000 bp, Unknown
  misc_feature (1)..( 3000): cDNA_ID_2105410_gDNA_ID_1621200_Annot_ID_174856 3000 nt of promoter + ATG
gttgaagtagcgatcctggagcttgacgcagccattagaccttctctcgatggagaacaagaaattgcgagccacattgagattgcgagctcgaccgaggaactctaacatgaggaagaaagactgctctttgtgagaaaaccccttgttggaaacccagtcaaagaaccggagaccatccgcagggaccttgatgagacgcagggtttggagaacggtggttctggagatggtttgggacggatgaagagatgatagtgaagactcgagttcgtccgaccacgggttagagttcacggcacgggccaaggacctggcgagttttgatttggtggacctttcttcattggtaactttggcggctcggagaactggttgagacttggagacaaacaaagcatggagtttaggtacagaagataccattgcagaagaaagttgccgcgaaatatggcggcacacgtccgccgctcctccaccccttccggcggaccaagagaacaaaccctttcttcttcattctataactctctaaggcccaatctaaatgggctcctctttgttctagataactttactttaggcccaattatagaggtggccccgacacaatattttgttttgttttaaactttaaaaaaaaaaggagaagaagcaacagcatataattaagtcctagctattaatcatcatccatagcatatcagtaagtttttgaagatagattgtttgattgcatacagattttaaaataatgttaaaccctgaagtaaacttgtaactgcaccaacacaagacgtggtgtatggatgatctactacattccgtttccctttcattgggaatcaatttgcggactagtttaaaacaatcgcatatgcataatacttgcgcagtaattagggaagaaaggaggtgggggtaatgagtgagaaagtgcaataagtgggtatctctcaaattaagagagagatgttgacaaggcaacaagtttggtgtaacattatcctcctccttttattttgcctttttctctatttttatatatatgcacagtcttttttactcttaataaaatacactgttaattcctcggataccaacggaatcggttgaataaattatggatgttacagtatacacactatgtagggacttcttaatttattttggtatagttagaaagatagcttatcgttagagcgattgagagcttttcattataattaggagttagtttactttaattgtgataactgccttagtagatacataagtacactatcaattgactactttgagtgaattaaaaaagcctcctaacagcgtactatatgtacatcagaataagttgtagtaggagcagcattcctattttcaatattgtacactgtattaaaacaaaaacaaaaaagtagaagacaggattatgcatataaatatatatcccagaaccaaatatgaaaatagaaaatttggttttcgggtttataatttgttttagaaaaaaaaaaaagagagagagagaggggcaaggataatagagacaggagtccgtacggtttcgggggtcaacgtcgatggcagcctttgagcacctaaaaataggggacccacgccattaccaattacaaaacctcactctctcgtctatgctcagctaaccctactctcttccctgtgctgccacgtgatcaccatccgattaatcgggaccgttcgattaagtagagatagcagcgcgtgaggtagagaaagaagagagagagagagttggcgaataatagtaatttgttgtttgggggtgagtgggtgtacgttagcaagatacgatcggtcattctgtcttccctaaaacgatcaacctccaacttgctacctatttacacttttgccatcctgtctttcgaaaccccaacaccgtttttgcctcttatctctctctcttttttggccttttcctccttttttttttgtggttaattgaaatagatattttatttctctctattcttaaaaaaaaccacgtataaacttgtaactgactacgatgatttatctcattctcatatcttatttatcgctagtaaaaaagaaaacaaatgtaagagagaggcccagcaggggaacagaagcgggtcccgacataattaaataagtgtagaacaaacgcgttttttactcttctttttccttaaccacacgatcaccaccaatactagctagacccttttctttctttttttttaaagtcctgcgggggctatatatgtatcatccatatatacaatacgctgttaaaaaataacatagtaagagtctgtctatacatacttgtgtgtttaatttgtttgtcaaacaaaagttcaattagaggctccatcaacagttgctaagtagtgagttacgttttttcgatattcaaattaatcctacgtaggtactactaagattacaaattagaaagctttgaaaaatactagtagtaaaaaggggcagatgattggtaaataataatttaaattgtttttagtaaaaaagggcacagacactcacacacacactgctttcacgacccatgtgagttttctttcttctccatcttcacttttttaagtagctagatgacaagacagacagctatctctcttttttttttacgaagaagaagatcaaaaaaaaaatgaattttaaaaagggacctttaagagagatggtgggagagagagcaatagagagagaaggaaatccacccccacaaatagaaagttagggtttattggaaaaaaagaaagagagtgtgtctctgtgtgtgattctaatagaggtgtagtacgtcgctttgctttcagtccattaaaaccattccataacctattccgcaccgacatgtctcctccccctttcctttattagcctctctctctctttttcactactccgtcttgattttataaacaaaagaaagaaagagagagagatcttcctcgggattgcaac

SEQ ID NO: 8204 - DNA, 3000 bp, Unknown; identical to SEQ ID NO: 8186
  misc_feature (1)..( 3000): cDNA_ID_1810768_gDNA_ID_1621200_Annot_ID_174855 3000 nt of promoter + ATG

SEQ ID NO: 8205 - DNA, 3000 bp, Unknown
  misc_feature (1)..( 3000): cDNA_ID_3047902_gDNA_ID_1621200_Annot_ID_174852 3000 nt of promoter + ATG
ccgcagcctcacctcttcctaattgttataatttacatttgggttataaacatattgtaagcatgaaatgagagtattatttgttaaacaacatctatatagaatagatgcatgtgactaggaatgttggaaaaagtcaaaagttgcaccacgtgtcgttaaagcaagtgcttagctacttggaaccacatgaacaagaagacaccaaacccgttacttccactaaaaacaagggctttcttctttttaattcacaccaaaacactttgaacacacacatgcatggagccatgaactcaccatgcattgatttcgtaatgttcagtcgtggacaacacgatgaggacaacatgtcacgtcgtcctccgtggaagagggagagatcgatgtccactcagcatcatcatcttaacttgtctccaaacgaagacgaagagcttgccaactgtcttgtcttgttgtccaattcaggggatgcgcatggtggtgatcagcataaacaacatggacatggtaagggcaaaaccgtcaaaaagcaaaaaaccgcccaggttttccaatgcaaagcttgcaagaaggtgttcacgtcgcatcaggcattgggtggacacagggcaagccacaagaaagtgaagggttgttttgcctctcaagataaagaagaggaagaggaagaggaatacaaagaagacgacgacgacaacgacgaggacgaagatgaggaggaggatgaggaagacaaatcaacggctcatatcgcaagaaagagatccaacgctcacgaatgcaccatctgccatcgcgtcttctcttcgggacaggccttaggaggccacaagcgatgccattggctaacaccttccaattatcttcgtatgacgtcgctccacgatcatcatcattccgtcggcagaccgcagccgttagatcaaccatctctcgatctcaacttagcttgccaagaatattccgtcgatccaacggccatgagcgtagggatgatcgagagagatggtggtggcaataatcacaacgctacttcatcttcgtggttaaaactcgcaagtggtgattggtcttgacgactgactaatttaattaagttgctaattatattcttttaactttcattcgtttatattctttacatatatacaattaagtgcatgagtttatatatagagtttatggatttatatgaattacacttggcgtcttctgcagatttagagagccataaggagttctagtccaatatatacaaagatataagtaagaaattaagtttcacaactagttaatatacaagatagataattgtatcattttttattattatatacgttgagaataaagtaagataaccaagggctccttgctcatataagcgcaaatgttttaatttcatgtttgtaatcttacagagtgatataatttacttgttaagccatcaagaaggagatataattttgaagttttccagaaaagaaattgtaaattcgaaattaagaaatcacaaagaagaaaaatatcaaataaataaacgaatatcacgtatcaaataactctcgtgatatgcccatatatattttaatcatgttaataatcaaaaggctcttactacactgaaaacacatgaacatgagtcaacgcctcaacggaattgataattttggtggttcttaattaagcaccgattgcaaggaaagggtcatttctctcaatacgattacaagaaaagagtcatttttatctcgcatatatgttattaatgagtggttgccattacaagttatgaacttttgactttaggaagcccaccaaccatcagctgaaaactaggattagcggggggaatttgattaatgtcaactgatatcctccaatttctctttgagaaaagctcaagcaaagtatatgactctttgggccactcaaaagatctttaatcaattaacttgaggacatgtactttaacaacaattgacacatatagacacgtacaagagttgcacgctattgatacaaggaaattttggtctagtatgaggtaataacgtctcaacgagataaggttaaaattatttagacatgcttgggaaaatatttttgttagtagaaatttgtagagtaatgaaatttagattcttatattgaaatttcatccaaataaatgacaagaggtgagtcaacaccaaaagggcgtgtgagtatgagagtcaaagatagcactaactatacgatgcgggaagtcagcagtttagtcacacgtgtcaacctatgatttaaggagagttggtgtatttgtcacagaatcattaaaatttggtaaagttagaaatagaggggccagtgctagtgttgtttagtcgttacaacaaaacctcaacggtttttgtttgcaactttaccaaaatgaataccctcatccacaaactcttttctaatcaacaaagtattgaaattttcagttacatactagtatttactatttacatactagtatttttgggctagtagaagagtgtatttgaaaaattagaggagaaaaaaagtcagcgtggaggaataaaggtgtgagatcgcatgttacatgtttgatcaacggctcttcacttcatcattcaatactcttttttttttctttttttttggctcaatctgtcaataaaataagaaaaacataactgataattatatatatttagaggcttatttgtatttatgtttacacaacagacaggtcttttatttagccgtttctgatattaaaaaagaaagtaaactgctttcgttgatattcttaagtatcccattaattcttttccttaaaaagaaaacattaacttgttgttgggacttcgtatattagcttaagtgttggtggaagagtgcttgtaacctactccgacttcttcttcttcttcttcttatattctccctctctctctctctcctttttcttctatttctgctctgttttggtaaattgaggaaatg

SEQ ID NO: 8206 - DNA, 3000 bp, Unknown; identical to SEQ ID NO: 8196
  misc_feature (1)..( 3000): cDNA_ID_1807508_gDNA_ID_1621200_Annot_ID_57642 3000 nt of promoter + ATG

SEQ ID NO: 8207 - DNA, 3000 bp, Unknown
  misc_feature (1)..( 3000): cDNA_ID_1810818_gDNA_ID_1621200_Annot_ID_57643 3000 nt of promoter + ATG
tctctcgaagaagacggcagcaatcgtgtgctccatctcccaggtttatggctacggcacggtggactacgagagaaggccgattgtccagtggaatgccatctacaagaagatttcgctgatggagaagccagagcttggcgctgcttccgtcttgaatcagtgggagaaagccggccgcaagcttaccaagtgggagctctgtcgggtcgtcaaggagcttcgcaagtacaagcgtgccaaccaagctctcgaggtccgtgtcctccttgtatttgccctcgctttattttgtatctttaacactacttacttgatcgcgtatcgttttcataggtgtacgactggatgaacaacagaggcgaaaggtttcggttgtctgcaagtgatgctgcaatccagctcgacttaatcggcaaagtgcgtggcattccagacgccgaagagttcttcctccagctccctgagaattttaaggaccggagagtttatggttccctcctcaatgcctatgtgagggccaagtcgagagaaaaggctgaagccctgctcaacaccatgagggacaaaggttacgccctgcacccgcttcccttcaacgtcatgatgactctctacatgaacctcagggagtatgacaaagtcgacgctatggtcttcgagatgaagcagaaagatatacgtctcgacatttactcctacaacatctggctctcctcttgcggctccttaggatcagttgagaaaatggaactagtgtatcagcagatgaaatcggatgtttccatttatcccaactggaccacgtttagcacaatggccacaatgtacataaagatgggtgaaactgagaaagccgaagatgcactgaggaaggttgaagcaaggattactggtcgtaatcgcattccgtatcactacctcttgagtttgtatggcagccttggtaacaagaaagagctgtaccgagtctggcacgtctacaaatctgttgtcccgagcattcccaatttgggttaccatgccttggtctcgtcgctggtgaggatgggagacattgaaggggccgagaaggtatatgaggaatggcttccagtcaagtcttcttatgaccccaggataccaaatcttctgatgaatgcgtatgtcaaaaacgaccaactagagacagctgaggggttgttcgaccacatggttgaaatgggaggaaaaccaagttcaagtacgtgggagattctagctgttggtcataccagaaagaggtgtatttcagaggctttgacttgtcttagaaatgctttttcggctgaagggtccagcaattggaggcccaaggtgttgatgctgtctggtttcttcaagctctgtgaagaggaatcggatgttaccagtaaagaggccgttttggaattgttaaggcagtcgggggatcttgaagacaaatcttacctagctcttattgatgtggacgaaaacagaacagtaaacaacagtgaaatcgatgcccatgagaccgatgcgcttctaacacagctacaagatgatttgtaatctgatagtcctagatctttgctttaaaaaacgaatcttgtaaccggagtcaactgaggaaatgcgaaatatgtataatgtacacaagagactgcctagtgaaacatgaatgtaagagctgtgtccctttttgtgacagctatttggaattagtgttgcttagggaactggattagcctttgttctcttgtttgattgttgttacttgttaagactaatattggagaggttaggttgtgctcttttattttgggccggacggataaaaggcccgatattgaatatataagtctgagagtctcaaaggcccatctccattaagatatcttcgcggaatcggttgtgagagagagagacggtgatcgggaaatgtcgacgaaaggcgcggcggcggcgtaccctagcgcggctcggatatctgattctccatgttatcttcagtactctgcttctctcaaatgtgagtcatgctcctgatctcaccctttgtgattgtttcttcgaggataggatttgacatgttatcttcagtactgtcaagttccataacgaattagcattgattagatctcatctatttcattatgcttcctcaaggtgattagattagtgggttgaatcccatgtcagtgattcgatttaggtcccatcaattgataacgtcgggtttgattcctgattgtttatgtgtttccgttttcattagttatgcctcttagcttgaccccttgatttcttatcaggtcttgaagaatttggatcagacaagagtaaatgccaggatcattttgatgtgtacaaggaatgcaagaagaaagaggttgttgttgtgaatgaatatttaggcttttggcgtttccaacttctttgctgctttacctatgtgttattttgtttctcagagggaagctcgactggaacgcaataagacacggtcgttgttctcgtgaatgcagatcctcgaataccaatgatgtctcagaacatcacctagctagtagtatcctgttgtttcatttgcaatggctgtgtttgtatgatctatctaagtaaacaagtggaaagtgtttgttaatgttactttttactccccattggtgaatcatggtgtatacctgttaaactttgagagcaagtggttatttatttagttagagagttagagcttctccaccaccatattgaataagaagatctttctctcattcttttactttactctggcgtctgaaacagatccagggattccagtagtgaattgggcttaaaaactgttatatgggctttcgaaagtaaaaggttcggtgagctgccaaagaaaagtcagatgcctttaatcgcatttgacgacgattctttacgtgcgccattgactgcatcgtcgtcttcctcacgcgatttggtaatccgattcgtcttcatctgattccctcccttccgagaataata

SEQ ID NO: 8208 - DNA, 3000 bp, Unknown; identical to SEQ ID NO: 8195
  misc_feature (1)..( 3000): cDNA_ID_1807678_gDNA_ID_1621200_Annot_ID_57644 3000 nt of promoter + ATG

SEQ ID NO: 8209 - DNA, 3000 bp, Unknown; identical to SEQ ID NO: 8194
  misc_feature (1)..( 3000): cDNA_ID_1810814_gDNA_ID_1621200_Annot_ID_57645 3000 nt of promoter + ATG

SEQ ID NO: 8210 - DNA, 3000 bp, Unknown
  misc_feature (1)..( 3000): cDNA_ID_3047856_gDNA_ID_1621200_Annot_ID_57650 3000 nt of promoter + ATG
tttttgtaagtactaaatttttaatttttgtgacataacatccaaacagaacgtgccaaaaaaatttgataccatacgcgaaaatatgatttaatattttaataaatattataaacataacaaaaaaaataattaatatttaaagtttaataataaattaagcaaattttaagcaaaacataaataatttagaacaaaaatatgaccaaaaacgattaggttgattataatgtgtaaactagtaaaatgtgctagtgtcgttattatgttatcaatcaaacggtataatgcatgttgttaacaaaacaaaacatagttttattgacttctcaaaaatgacctttgaaataattacgacaaagaatatttttatttttttactaacctttctattatcgaactctttcgttgtaaaaatgtctcttgtcgccggtagtgtcaagaagacggacctttgaaatacttctcaaaaaagacctttgaaatattcaaaggtatagcaggtggcgagatagcctggcttgtgagagaggagctttccgtcttctttgttatgtgtatattttaataaataatttttttgttatgtttacattatttattaaaatattaaactatatttttttgtttatagcatcaaaattcattggcacgactctgatgacgagacaccaaatatccatataatggtgttgcagttgcttcgttggaaagacgataatcaacctccggccaagataatcttcatatcaaactcgctcagtatctatcacttctcttggttttttgcttaaaatccgctcagtatctgatgaatattataaaatttcttcattgaattttggggtttgaacagcaaaagtaagaatctgatttgtctgaaaattaaacatttgcgttcaataaatagcatgaatttgatttgctataatttcgtagaaaaagttggacaagaagaagaagaagaatacaacgtggttaagcaatttgaatccctatattttgtaggcatgatataaacattgctgtaaaacgataatatataatcggtgtgatacaacaagaccgtgtcatgagaaaccgacatagcccagcctgatacgcggttctccttctccaatcattaatatccctcttcttccctgcaattactctttattgtacttaccttttctcataaatctacaaaaaatacaagtacgatttaaaacgttatgatcgttgtaaacttccatgaatggccaaaacaaaaataccaaaatctaccattggtcaatagactaatttttctttatttcattgcaattatgaagaaattacattgtctttatttcactgaaattagatatttacgaaaccaacggttcatatttttttttaacttatgaataaaataataataataataataatcaagtactgccaaaaagaataaatccgatagaaattcattataagatgagaaaaaagatctgttgagagaattcgaaagaaaaactcaaatgcaaagccatcagaatcgaagcaggctgagcttgattctacggtctagattcatcccttccttctcttcaccactctccctcttcgtcgtcctcgctgctgttcctcttccgatctacttttccggtctactctccggcagaaacaacaagccgctttcagttatggttcgtcgtcgctcttcctccactttccttcttttttttgtttgttctgagatttgattcgccgattgtgtttgtttgtttgtgcagagactcaactccaacttagcttcttcaatggtggaatcgaatatttcttgtaccactttcaatatcttggctccgatttataaacgcgttgatcaaaaggtttgcttctattcttctgatttcttcactctttaccttgttgattctggaatcgacgacattggttgattgtgttgggtgttattaacagaatcatagcactcgagagagcgatttccgcacgctttggttagctcgtaaccagaggattttagatttgttactccatcaacgctcttcagttatctgtctccaggtacacactttgtctcttagaaagagtcaaattttgacttttttttttttttgttaagctgactcttagcaattgtgactgttcgtaggaagtttgggttgggaatgaggaattagtgaacatgtaccaccaccagctttcatcttcaggctacactatttatcagttggctagaacaaacagtcgtggtgatggtaagattctttattttttatcatgtttttgattgaatatggtctctgtccagagtcattagaaagttaagaggctcaatgttactgcttgatatgcttcagtaaatagtgtagggttgtccaaatctataccttttcatgacttggaaactggtagttcaggatctttctggtgtcaaagtgttcttgttggtgtttatatgatcttaacgtcgttgttagtaggatgccgtattaaaaggcaatcttatggatggagtagaaatattgtctaaaattcaaagtcaatgctatatgtttggactcctctagctgatcgcatgcgatgaaagataggcttcttcgcttttgatgtctcatttgtggacttgaatatctttcttacaggtcttttaacagccattcataaggaccattttaaagttgtaaattaccgggagctgctctttaacgattttggagaccgtgttgctcagctcttacatgtcaaaacagttattccctttccgcttaatggaaagcaagacgttcaacaagaagttattatagtgaacactcacctcttgtttcctcacgattctagtttgtctattgtaagactgcatcaggttggtcatcctttccatcattttgcattttgagaccgttcaccttgaatcttgtgatagtttaatttgattgcttcttttcacaggtttacaaaattcttgaatatctggaagcttaccaaaaggaaaataaacttaatcacatg

SEQ ID NO: 8211 - DNA, 3000 bp, Unknown
  misc_feature (1)..( 3000): cDNA_ID_2125069_gDNA_ID_1621200_Annot_ID_57651 3000 nt of promoter + ATG
cagaatcaacacaatgattggctcagactttggaaacggtacaaattttcttttctaataagacagagagagaaagtgaaaggcttatcttttagacaaactgaaaatgacacatgattttactaaaaggatcctgaccgttgattgatcctacttaccaaaatatcaagtaatgatgtctaacttgatcattaatcatcatttcttgatatttacttgatatcatgggcctataattctttaatggtgatttcttttattataggcccattctatcaagtaaataataatatcaggatattatacttacctgcaaggtgattcttttattaaagtttacatgggcctatacgtttccaggcccaaactatttgtgaagtaatgtctaacttgattataaatcacaatttaaaaatgattattaattaaagtaatcaaggcattagttactttaggcggctttaattaaagaaatcaaaatacaagtgtaacagtaattagtctctctagtctctactctactgtcgcatcgatcgaaaagccatagaaatctctagaaaggaagcagagaatctttgaaggcgatgaagttcgtatctgtagccaaagggatatggtttcttcgaccctaatctgctaatttcacctgtctttagagccggtaagctcctcgtcttttacgctttccgatcgatttctctgaatatctcgagattctttttttttattagttccggtaggtttttgaaactcattggagctgatttgtgctgagatttgtatgatacttgttttttattcaaattgtctgcacatttttgttgtcaaatccaagggttttcgctctctagttatttgccttgttggagcttttgattttggttattgattgagttcgcgatcgattacgtttaagctttgtagctgatccgatctgggagattttctggtgttgtgtatcttcttctttttgagtgcttcattgatctcacaatgtatatttcgtgttttatatagcctttagtgttgttgttgctgaaatcagtgagtaaaatgctatttatgttcgtttgatttctgattagtaacatactcagcttctcgctgtccattgtattgtagtagaattcttgtaatgtgaattgctgatgatgagtctttaacattttctatctaggtatctcctgcttgtgttcctttctactgagtttgtggttggagatttgaagtacttgtgttttaagggtagtaagtggttaactacagatgaataagaatcaaacagttgggctagactctgaagatgatgactctgatgattacgacattgcgcaagtaaactgtgagctagctttggttgaaggtcagctctgtaacataccatacgagctctacgatctaccagatttaacgggaatattgtctgttgagacttggaactcacttctgactgaagaagaaagattcttcctctcatgttttctgccagatatggatccacagactttcagtttgacgatgcaggaacttcttgatggtgccaatttatattttgggaatccagaggataagttttacaagaatttgctaggtggattgtttactccaaaggtagcttgtttcaaagaaggtgttatgtttgtcaagaggagaaagtattactactctttaaagttctatcatgaaaagctgatcaggacatttaccgaaatgcaaagggtgtgggttcagtatggaaataaattgggcaattactcaaggctcctcatttggtcaggacgaactcaaaccggtaatctcaagctactggacctcaatagagttccatctaaggaaatggatagtgctacatgtagattcaaaactcccaatgtagtgaaacccgtggaaagaaatagatcgaaaagtttaaccttccctcgcagtggcagctccaagaacagtctcaagataaagataaccaaggaaggagtattccggtatcaaggttccagcttagtttctgctggccatcatcatcagactttgccaaagggtgttctcaaattagtccctaaatcttcttctgccatcctcaggaaaccctatgtagctccaggaaacaatctcctgcaaatccatgaaaccggttcaaagagtactagatttgcagcgtctccatacttaggtacgacatttgagaaaccaccctacggaactcttggctgttctatcccagaccctttcttaacctatttggaaactacacaaagatcaatccaaggtacagaaccggtgtttcatgatccaacacacactgttcccagtgctctccgtgtttcaaattactccatcacagaacagaatatacctctaaagcaagaagaatatgtccggtaccacctgaagtctcctggttttaagcctaggactgttgacagaggctctgaaacaacagagagcaagaggatttcgtctagtaataactttcagagggaagccaaggctctgagaaaaccgctgggggtcctgagcgaagacaatcatgctcgagaagccaatagtgaccatttgttttccttgacttacaagcgaagaaaggttcagagaatcgcttgagctcccgtgacgctatgctaattcaatgttccacctaatgtagtcttccatgaaaatatgaagtgtaatgctgcaacttggtaactggatttggtttggggttgagtttgttagttttcaaaatttgaaggcactaaaaagaaacactaaagaaatagaggagtaaaagtgaaaataatttgaactattaaacaaattaccgataaggtcacattctttagcttttctctgcggaacacatcgagagagcttcttccaaaaacctcaaacgctcctcacacaacggtaagctcctccaaatctcccaaaacgttatcgctttcgaaattaattatcatcatcgtcatcactcagcgattatttaccaaaagaatttttttgctgaagggtttaggagtgatg

SEQ ID NO: 8212 - DNA, 3000 bp, Unknown; identical to SEQ ID NO: 8190
  misc_feature (1)..( 3000): cDNA_ID_1808065_gDNA_ID_1621200_Annot_ID_57652 3000 nt of promoter + ATG

SEQ ID NO: 8213 - DNA, 3000 bp, Unknown
  misc_feature (1)..( 3000): cDNA_ID_1810889_gDNA_ID_1621201_Annot_ID_57654 3000 nt of promoter + ATG
ttaccaatcgtcatttaaagacatcatcaatcttaaattttatttaaatacaatgatgagtgtgttataaatgaacaaagaaacataatcatagtgacttttcatgcgattaataatgaaaagtttgaacttaactcaaagtcgtctcattagctttaatttttttttatcttccacaaatatagggtatcagaatcacttataatagaatgaagtaaggattgacaaaaaaaaaaaaaaaaaaaaaaatagaatgaagtaagagcttctttttaattaaaaagacagcctcatatgtactgtgcatactaattattccattcaactatttgttcacgggctttttcttcatttcctccagctttttatctctgcatgcctttgttttcttattgctttttcaaaatgatatatatttgataagtttcaataaacgggtgcggatgtgaccaaatcgacatttgactacttgagcgtgacacgagtttgttgtattggattatctcaaattttactggatattcagaagaataaagatttcacactgttatgtttactcctccattatacacacaaagtaacgctttaaaattttgaatttgcagcgaaaaacaagttttcattttattgagatatgtacaatgatatacagaattttcatataatcacacgcttttttagagaaaatgaaatcaatgaaagatattgtacgttatgtaaattcgcgtgactgatatagaaaaaaataatcgtgaagaaagaattaccgaagttcatgtatattgaagaaaaacacacacacacaaaacgccaatacattctactacttgaaggtacagtttcatttgatacgaatatttgatttgttactgttaggctgtcttagactgagtctgttgatatgtcgtttctacttcctatttaatgaactcctttatatcttatcaaatatatacatcactaaactttaaaacttataacttggaccgttgttagtgatacggtatattctaattattaattttctgaagaatcgtacgtggtacatgccatccaatttcacaaattcacaatagttaaccccattcataaagacaacaaccaaaattcaaacttagaattggtggagaatcactagagataaaactaatcaattgcctacctgttctacctaacaaattcactgtcaaactcaaatatatactataactttatcaaaacaaagttagaatcaaatcatgtaaacttgaacgtatattagaggcagagctataatagttgataaattttaaaggtatcttcataaatactagagtttctgaaattgaatgaataatacctaataacttggtttaaatggtggtgttaatcgatatatacattattcgtcaatgatataatccatgtttttgaatgttaggaccaagttgtacacataactttaatagtaataatatatcgtaagtaattgtcgaatagcagtaaactaataaataaagaaatggtgaagtatataacgagttggattttcgctctgaagaaaaggaacacgattgggaactgcccgatcttactgtggcagcatagtactagcataacaataggtgatagaaagctagaaaacaatcccaagcttaaaatgcttcaagtaatcatatattatgacactctcattctattgagtccctcggttgatataatagctatttcacaataacaatcactttcgattcacatatttaaaatgcataaatttgttcaatttttttctcgttaaagatttttgttttcaaaatttttaacttgtttatattaaattttttaaagttttatttaaatattttaataaaagataagaagtattttactaaaaaaatttaacgcatgataatatctcataaccacccttttacttattggagctttgcaccttactttaaaggtattaattaaatttaattggtccgatgtttgctttttgtttttttgtcgttgtttgttgtgttcttatttttttctttcggttagttgtgttctttagaaagtgttaaggctaatcgcatttaatatctcgaagactacttattaaactaaaaattaaaagtcaatgttgaatctgcatatctactacaccggggacaaaatggctgtgaattaaatccgattcgaagcacgagagatatctgcccaatcgacctatttattgaccctttcatgtttcctcttttaaagtctgtcatgtaatatacacacacgtattatgttaagatatcaaaggaaaacctatttaattttgttcattttcaaaagaacaaagaaaagagatcagatataatagattgatgtgatcaaaattagtgcttttaaaaattattgaaagttcaacgagtttcaagtaaagtagaaaatccttgtaataatacctgttccaacgggcaaacctgcagctatgctaataacgcttgacgccttttgacctctttttcaatctttttttctccttccatgtttatttattttaaataagattttcgaaaatgatacattttcaagctgtaatgtaagattttattttattctgttaaaaaaaaaattcaccaatgatatttttctaaattatccactttaaatgtttattattgacaaaaactaataattaaattgctactttgatttaatgtaacaataaaatactagtattaaacaaatgaccttgacctggacatatgtgctttgcgtggtgttaacggcgtcagctgccgttatctccatcccaaaatatatacaagggaatctctttctctctctcacaccattcaatcacttccattttttcaaaatctctcttttccctcactcactctcactctctctctctccttctctcgcttgaagaacaagcttggtatatttgttacaacgggctaattaaccaatctcttttttcacaaataaaaagaagaaagagaggagtcattttttggggttgatatcttcgaa

SEQ ID NO: 8214 - DNA, 3000 bp, Unknown
  misc_feature (1)..( 3000): cDNA_ID_1810854_gDNA_ID_1621201_Annot_ID_174915 3000 nt of
ttcttgaaggtttcatctctgactatgcagaaattgataagattatttaaagaagaatacaataaatcagaaagtcagaaagcaaattaggagaggaatgaaagatattagaggcaagaaatcaattaattaatgctaaagaaggcaaaatttaagacaaaatatagatgactaactgaaaattcaacatacaggatatattaaattataaaaaaaaaacatcatgaaagtgagagttttataaagatgctaagaaaactgaagtgtaatggatccaatgatactttaaacaaataaatttgtgtacatgaattaatggataaaataaagaaaacagcagaaatgatgaggttttcgagacatacactgggatataggaagaagcgacgaaaccctagagggagagagagagaagagtagagcggtgtctggtctgagatttgtttctcggaaaaccgctgatggttttgtgaagcgcggttttgttggcgagcaaaaggtttgaaaggtaggtgcaaatcttggaggaagagagatgagagagtaatgacagagagaattgagagggtgcaatgaaattaaatggtgcgagagggacacttaattatcctacacgcttatatatatatagagagagagagatatgttacaatttattttatttatgttacaaaattatgtgttgtttttcatcttatatacaatgtcaacctaaaataattttattttttatttatttaaaatattataatgtggtgaggaatgacggctaacggtctatgagcctatgagacttacatttatctattagatatgtagttatttttaaaaaatcattagcattattcataacttatgcatatgcaataaatcaccacttaacaaaattaactatattaaaaaaagatttaactatattgaaatttgctttaatacagttctccatttacagaaaaagttagacaatagtccccatttgtcaaggatacaattttaaaagtaattttctgaaattttaatactcttagattatttataatatggaaaaaaattatatagttttttaactaaaattcaatgacttgttatagttaatatttatctttatgagatataaatttaatttttactttcaaaaaatatgactattatatttttaactattttattttattattatttcatatctttgttataaatttaattgtaaagaaggaaaatttcatgattcttcttccacatggcattttcttaaatattatagaagtttaggttgtattattgttagtcagacagaagttgattgagtgatgtatttattttatttcatttaaaagaagaaaatctaaaaatcatcaccttaattttgagttttgtttacgaaacaattgttttttcaatttaaggaagtcaatgaaatatcacttttttcacagtaagacttcattttacatgcctagaaatattaattactttgtggcccaagcatttataactataacgtgcaattaagctatttaaaatacggatcacccattaaaaaggtgataatttgtaaaagccatgcattcatcttaatttatcacgcgaatatatagagaaatatactgcgtatttaattacctagttcttaagctttgtttttttttttaaagtccttatagctatagctttaacactcaagtttttcttttcagtaagtttatactttacctagattctttaaaataactatatataaaaaaacaataacccaacttatttctgatttttactgtatatatgtaggtacagatatatagatggagttatacgtacgtacgtatgcgatagggtggcgaatagtttcgacgcattaaatgtgtacacagaggctgcatgggctttaggccatttactgctctcatgcctctcttgcactttaacctcctcttccttcttcgtactctcctactaaaaaaaactagtaattcaacgcctaacattttagttttttcttttttttttttttttttttttagttttttcttttttcctgctacatcactaaaagttaattatttcaaaaaagaattgctacaatactattcacattttaagtttgtttcatcctcgtaagtctcaaatatttatttttagtttatttcttttttttgtcaaacttttagtttatttcaattagtgttttttctgccaatatgatcaaatctgagattcaaaatggaattcttctgttgaaaaaatggatgcttttgtaataaattcaagatcgtagtttttttttgtttctgggcttcgtatatgggccataagacggaagtaaacttttggcccattatatattttatccccaacgagaatggcaaggccgaaagtctcattctccgagagtggaaagttagttaaggaaaatgattgatttttttgttttgttttgcattagtctataggacgacttgtttcacaagaaactagccgtatattgtaatatccaatcactgaattgagcaacttggatagtttacattgagaatgcaggaacgtggattccacaaactataacagtttattatagtttttaacttttgagagctaaggactaataaaaaaattccccaaactacatcttctccaaagtcaatagcttttcaaagcgcaaaagatgatttgaagctttcttaatcgttgcatgatttcgatttcttctaattgtggaaatttaatatatttaattgcagcaccagcagagatcaagaagatagtggaggccatgcaatgtcctcctcgagctcctcttgtatttcaaccctcattaagaaacagaggaaaaatgcaaatgggattatctaaatcttgtttggcatttctccatggactatttcaaagccgctgggtgatctataaaaggcctgagaatgtctccttcatcttcatctccaaagctcgttctcaccttacttggcaaacactcaacgaagaaaggagagagagacggtaatg

SEQ ID NO: 8215 - DNA, 3000 bp, Unknown
  misc_feature (1)..( 3000): cDNA_ID_1810854_gDNA_ID_1621201_Annot_ID_174913 3000 nt of promoter + ATG
taagcactgatccatcacaaccctacatgtacatgtatatatatccgtcattaattagtttcgtagttattcagaatgttccactatataaagaaaaaaagaaaaaaaaagagggaaaagaagagtttactcggacaaaacagtcatggaaatgcattctaatgagagcagcagcaagagaaggagcattagaaacgtggtttgaaacaaaatcttgaacaatcttttcagcattaggacaagaattggcatagaaattcatctgcaattgagcttggatcggtccaacaattcccacaagaaagaaagagactgaaagagctatagctatcaagcaattcatctttaaatttgttggtttaatttttgagactctctctgtttgggaggattatgttgtgtgatgtattgagacgttaacataggtttatatagaagagtttgcatgtttggtagtagaagtgggtccatctaagctaactaacatgtgctctttttctactttatttttctggctcataatcagcgccacaataaaaatttgagaaatttttattcataattacaaaatggttttttaatactcttactaatgaagagataatgttacacttcaatgaggcaatttggaagagtttttttataaaaaaaagttaattaaagtttacgtctttccacttatatttattttcctgtaatttgtaaaactaatttgtaatttgtatgttctaaaacacgtagcgaatttgttttctaatatatattaaccaaaatatcaaaaatatactctgatactaaaaatatcaaaagtattagatatggtaaaagatggtgaatgtttggtccataaatcaagctatagtaagttagtaacatagaaagtcttgattttaatgaccgttatgatgtcataatcaacgatttttgtttttttatataccaaaacgcaatagattgtgttgagcgttatgatgtcataatcatcgatacaaaaagtcaagccaacagtagattttagtgagttagtaacatagaaagattagctgaatgtaattaaaagtatcgagtgttctgatgtcataatcaacaactgtaattttttttataacataattgagattatatggaatcttattttggattcatttattttagtcgcgatcgagtactagaatattggtaatcttgaatactctaaatttttggatgatcaatcacctcaagacataacgtactttgatttttcactgaagaacaactcgtttttgccgacatcttcccatccaaaaaaaaaaaaaaaactcgtttcgagagtgatattttttttaattccaaaactacaatacgtactcgacctaatccgcagtagtacaactaaaagaaccgcaaaagaacaactgctaatgagcaagagagtattccaagattattaaccttgttttatattcttaagatcttcttttttttttaagttctttaatgtataatagaagtatataggattaactgcgacttggtagatagactaatttcagatgctaagatataccatatggtaatgatcctagtaaaattacttttgttaaacatatatgtacgaacagtaggacacgtatagtcatgttttctgatagacgattagtgttgccgttatatcattatccgaattaatcttgtaatgcatgtttttaagtgaaataaaatttcaaattacaacgtagtttaataatataagtcataaccgatacaatagtcactagaacataaaactaatatatatgtccaactttacaacgtatactctttttttggaatttttgttttgtcctaaattggtgtttcttatatcttgatgcctaatctttgttttgtaacatgcgcaatgatattaaaacattatattatactaggggaggagaacaaattaaaatttcacacaactactctatagaactgaattattcataaacggacgagagcatttcaactgctcgaaatattttcctatcatcaggagtggcgtttcgtcagattaccacgccaatttatttctttaagtctgtcaaacgttggcatcttctaataaactgatatatatatatgtggattctaaacaaacaaaaaaaaaacttgagaggatatttttagattttcatcctggaaaaataagtgaggctagagaagattttgatgaaagaaatctttaaattttaaactcttttggaaatatcttgaaaaaggattttccctgtaatttataagcggaaacaattcggaccggggccaaaacatgttagaaatatgtggatttgcagatttctgttcgggtcggccggttctgcctagttgtctagttgactaaggttttgtggacgggttcgttatttttctagcgactaagtaaacatgccctcttccatgacctggcgtctagaagaatagtcacggaacgtgtgttccacactcgttatagaccgtattcaactattcaatttttcccaaagaaattacttaagaatttaattagcaagttgggtcttagtaactgaaaacagatacatatttctaatgttattttatgagttgtcgtttgaacaatgtccactaaatgataacgtgcaagacattcgtgaatgtctaatgtgaaaaattccgttttataaggcgaaatgaccattattttatcttataaacaatagtcaattgtgtttcataggaaatttaatatattcaattgaaacaccagcagagatcaagaagatagtggaaggccatgcaatgtcctcctcgagctcctcttgtatttcaaccctcattaagaaacagaggaaaaatgcaaatgggattatctaaatcttgtttggcatttctccatggactatttcaaagccgctgggtgatctataaaaggcctgagaatgtctccttcatcttcatctccaaagctcgttctcaccttacttggcaaacactcaacgaagaaaggagagagagacggta

SEQ ID NO: 8216 - DNA, 3000 bp, Unknown
  misc_feature (1)..( 3000): cDNA_ID_3047930_gDNA_ID_1621201_Annot_ID_174912 3000 nt of promoter + ATG
ttctttgcagatttcagaagaacggaaccatcacatccctacatgaatcattacaaaagagtgttaggactagctagttttttcatatcccttggttaacagtctcgaacaagtgaaccaagcttactctgacgaaacaatcatggaaatgcatccttagaagtttagcggcaagggttttctggcgagaaacatattgtactgtgacaccacgaacaatttcctctgccttgggacacttagaccggtagtagtcgaggtcaagcaactgtggaatggcgacagaaactccaaccacgctaagaagaaccacaagggcgagaatgttcttgatcgccattaccgtctctctctcctttcttcgttgagtgtttgccaagtaaggtgagaacgagctttggagatgaagatgaaggagacattctcaggccttttatagatcacccagcggctttgaaatagtccatggagaaatgccaaacaagatttagataatcccatttgcatttttcctctgtttcttaatgagggttgaaatacaagaggagctcgaggaggacattgcatggccttccactatcttcttgatctctgctggtgtttcaattgaatatattaaatttcctatgaaacacaattgactattgtttataagataaaataatggtcatttcgccttataaaacggaatttttcacattagacattcacgaatgtcttgcacgttatcatttagtggacattgttcaaacgacaactcataaaataacattagaaatatgtatctgttttcagttactaagacccaacttgctaattaaattcttaagtaatttctttgggaaaaattgaatagttgaatacggtctataacgagtgtggaacacacgttccgtgactattcttctagacgccaggtcatggaagagggcatgtttacttagtcgctagaaaaataacgaacccgtccacaaaaccttagtcaactagacaactaggcagaaccggccgacccgaacagaaatctgcaaatccacatatttctaacatgttttggccccggtccgaattgtttccgcttataaattacagggaaaatcctttttcaagatatttccaaaagagtttaaaatttaaagatttctttcatcaaaatcttctctagcctcacttatttttccaggatgaaaatctaaaaatatcctctcaagttttttttttgtttgtttagaatccacatatatatatatcagtttattagaagatgccaacgtttgacagacttaaagaaataaattggcgtggtaatctgacgaaacgccactcctgatgataggaaaatatttcgagcagttgaaatgctctcgtccgtttatgaataattcagttctatagagtagttgtgtgaaattttaatttgttctcctcccctagtataatataatgttttaatatcattgcgcatgttacaaaacaaagattaggcatcaagatataagaaacaccaatttaggacaaaacaaaaattccaaaaaaagagtatacgttgtaaagttggacatatatattagttttatgttctagtgactattgtatcggttatgacttatattattaaactacgttgtaatttgaaattttatttcacttaaaaacatgcattacaagattaattcggataatgatataacggcaacactaatcgtctatcagaaaacatgactatacgtgtcctactgttcgtacatatatgtttaacaaaagtaattttactaggatcattaccatatggtatatcttagcatctgaaattagtctatctaccaagtcgcagttaatcctatatacttctattatacattaaagaacttaaaaaaaaaagaagatcttaagaatataaaacaaggttaataatcttggaatactctcttgctcattagcagttgttcttttgcggttcttttagttgtactactgcggattaggtcgagtacgtattgtagttttggaattaaaaaaaatatcactctcgaaacgagttttttttttttttttggatgggaagatgtcggcaaaaacgagttgttcttcagtgaaaaatcaaagtacgttatgtcttgaggtgattgatcatccaaaaatttagagtattcaagattaccaatattctagtactcgatcgcgactaaaataaatgaatccaaaataagattccatataatctcaattatgttataaaaaaaattacagttgttgattatgacatcagaacactcgatacttttaattacattcagctaatctttctatgttactaactcactaaaatctactgttggcttgactttttgtatcgatgattatgacatcataacgctcaacacaatctattgcgttttggtatataaaaaaacaaaaatcgttgattatgacatcataacggtcattaaaatcaagactttctatgttactaacttactatagcttgatttatggaccaaacattcaccatcttttaccatatctaatacttttgatatttttagtatcagagtatatttttgatattttggttaatatatattagaaaacaaattcgctacgtgttttagaacatacaaattacaaattagttttacaaattacaggaaaataaatataagtggaaagacgtaaactttaattaacttttttttataaaaaaactcttccaaattgcctcattgaagtgtaacattatctcttcattagtaagagtattaaaaaaccattttgtaattatgaataaaaatttctcaaatttttattgtggcgctgattatgagccagaaaaataaagtagaaaaagagcacatgttagttagcttagatggacccacttctactaccaaacatgcaaactcttctatataaacctatgttaacgtctcaatacatcacacaacataatcctcccaaacagagagagtctcaaaaattaaaccaacaaatttaaagatg

SEQ ID NO: 8217 - DNA, 3000 bp, Unknown
  misc_feature (1)..( 3000): cDNA_ID_3047934_gDNA_ID_1621201_Annot_ID_174911 3000 nt of promoter + ATG
tctacctcctcatctcggcctcaagacttcaatctaaaaactctattcatgcatacttctcatcttctgatcaagatcaatctcagagcccgacaaaaatcgagcacatcgtctttgggataggctcaagcgcgatctcgtggcgtgcacgtagagaatacgttaagctttggtgggatgctcagaaaatgagaggctgcgtctttgttgagcgtcccttgccgtcttctcaaaaccacacagattcatatctccttcctccggtttgtgtttcccaagatacttcccggttcaggtaatttagttcaatttgtttattgttttttagtcagaaaaaagtttcaacttctgtttcatcataaattaaaaataagtatagtttgcgatttattagtttaacgtctattaaagatttaaagtataggatatataaatttaaaatattgaattgtgacatttttttgtaattttatatatgaaaacaatttaaagacagaaattaattagttgatattcctactttattccttaatcaatttaacttgcaaattagggtacagttaaatcgaatcggcctaatgagacaagcgtctacaggtacacttggagaggcggtgacagaaacgcgatccgaatcgcgcggtgcgttctagaaactgtcaggctattcaacacctcctcagaagaagtaagatggtacgtatttggagacgacgacacgattttcattcctgaaaacctcgctcgaactctctccaaatacgaccacacatcatggtattacataggatcaacctcggagatttatcaccagaactctatgttcggacacgacatggcgttcgggggtggtgggtacgctttaagcagctcattggctaatgttttagctagaaatttcgattcttgtatcgaacgatatccacatttgtacggaggagactctagggtttatgcttgtgtgcttgagcttggggttggattgtctaaagagcctggcttccatcaggttttaaagtctatatgtacgtaattaatagttattagtaaaaaaaaaaactgattagagatatttgtttttatttttgaagcagtttgatgtgagaggaaatgcattgggaatattgacatcacattcaacgagaccgttggtgtcactacaccacatggctcacattgacccaatctttccaaactcaaccactttctccgcggtccgccaccttttctccgccgtacaactcgaccctctccgtatttttcaactatccgtttgctacgaccgttggtactcttggaccatctccgtctcttggggatatactgttcaggttaatacttttttacccttttttgttcaggactccaataacgtaatgttattaattcaaaatttaaatgtttgtttcaattgttagattgatggcaggcatttgtttctacgggatgttttgcgggcacaagagacgttccgaccatggcaaaaatcaggcggattagcaagtgtttacacattcaacacaagagagattcatcgtgatccttgccaacgacctgtcactttctacatgcaacatgtttcttctagtagccatgatggaaccattaaaagtgtttataagcaagcttacgagaattgcacctacgatcctgttacatcgcctcgcaaaattcatgagattagagtgttttcaagaagactcgatcccaatatcagacaagtacttcattctatcttttctatttttttatttttttttaaataacaaaatataggatagattagtagaattttttggccatagtgaaaatcttttttttttttttgacagcaaagtccattagagaaaatcattttctagattagtatatatttgttaaaatatcaattactatggtttctttacgtatagatacttcctttcgattttcgtatagaccaacaaaattaggaatattggggttagtagtggtcaaagttgctatattgagtgaactttttaaagtagcaccctaaaaatatagtatttcgtaagaaaatttgcttcttacttattagatttaagtttgttttatcataacaaaataaatgttttgaatgcggtagttgaaggctcccagaaggcagtgttgtgatatattaccaacttcttcaactggtggcaacataatggaaattggactgcgagagtgcaaagaggatgagctcatctatattcatccctaatttcaccgtaactaattatattatacctttacaatattgccatccattaattttgaacctaaaaatagtttttttttctttcctttttgtaaatttaacattaagttgttaattggctggttgcctttcaacatttggagcatttgagattactttgtgacaaaaaactgaacatgacatgaatataatctagggtggaccttcactgaaattgatgaaaatgacattatacttaaaattaggctacctaccaaattcaccctagatttaatatatttctattggttacatctttactttaagatataaaaactaagaatgataatttacttctattacaagctaagaatcctagatatctcagtcgctcacttttgcagttgattccctttacgattagcgtgctacaatcgtatcaagtcacattcacacactcttgtttattttgttcaaaaaatgaagaagaacaaaatagtaaaccgaaaataatgctatttgaaatataaatgcgaccgtattgatgcgggccaaatacaaatccggttaaaccagttaaagcgaaattggaaagtaataggaagtgattaaggtaaattaattaagtagtattaattagcgtaacattagctgggggattagacgactttgccaccgttgttaataccttccttgccttctttctttcgttaccatttgcgtgatccctatcttctttatcttcgccctccggattcttcaatattactaaatctgccatcatctcctcgatttcg

SEQ ID NO: 8218 - DNA, 3000 bp, Unknown
  misc_feature (1)..( 3000): cDNA_ID_1810866_gDNA_ID_1621201_Annot_ID_174908 3000 nt of promoter + ATG
atcatggctcatatctctcttcttgttggagcaggggttatgtcacttttagctaaatgggcttaaatgggcctaccattatgcaatatggaattcaaaatgactctactacaaccaattcactaatagatgacacgttatatgattcacttatagtttatagtctttgtttttttttgacacaaacttatagtttatagtcttgtttcatacaaattatatacccttctcgtttcttgacaattattggtttcaaaattttgttttttgtttcattttatcgttttatgtttttagtgtaaacttgtaaacaaaattcaagttttagtttcctatagttaaagagaaaaatttaaagtgtattaataaaatgtatggtcaaatatataaatcccttattggagtgaattttattttcaagatgacggttacactgccaagtgccaacgaaatgttagtagttcgattcttctaagtaggtgaacagaaagttggaaaaatgttccggtgtgaactttactgatactgataaaaaaaaaaaaaaaaaaaatctttactgataaagatctcaaaaaaaaataaaaaaaattgaacgttgactgtttgttgacaaagtaaacgttggccgtatctagatatcaaaattataagatatcatacgtgtttagatgaaatttgacaaatagatggagattagtatcttactgacttttacagttactgaaaaagaaaagagtgaaataggatagtttttagagtatctttttaaaaaatatttttacattctagagatcctaacattactaattagctatgatttttttaatcactttggacaaattcagaaaaaaaccattatccttttcttttgtcatccgaaaataatccattatccttgttaatcgcaatggataatgtaagaaaagaaaagaaaacataatatttgttgcaaaaaatagaattaaatacgttttgtgactgacaaaatactgttagaaaagcttaacagactgtggataaaacacaacttaaccaaaactgaaacgttttatctattacaaacaaaggaaataaaaataaaaatcatatggaaaagaatcgaaaatcaagcaaataaaatccatttgcattaaatgaaatcgaaattaagcaaattataaataatatgtaaaatccagtcagaaatataattaaaaaataaaaagagtaattaattaaaatgtttttcatctccggcagaacgagaggaatcatcttcttcttcttcaaccgcgattgattctcacgcgcgcatgaagacgacgatctctccaagtgttaaccgccgcgcgccgctttttccggagcggagaaggatcgacggaacccaacggtggcggccgtctctttctgccatttccgaagacggatccaccaccgtattcgccggagaaactcatcgctcttttggtaaatttgtagccagagaaacgacgtcgttttcccgcagatatacgacactgaagagcgcctggtataattcatgatttttctattttccaattcattttatttgctgatgttttgtagatgatgatgacattatcataaaatatttgtttgatagtatatatgagaaatatgaattttggttgaatgcgcgcaggagaaacgcaatcacataccatatagcatcgccagggtttgctccttctccgttcatgtattaaaaggtatagtgtgtattcttcttcaccttctgtaacgtcaaaaggtttttacgtagaaccctaatttaaacgaattaatttcttgtaattgtttcgggagccttaattgttatatttaaaaaaaaaactgttttatatttagcggacccatatgtaaatagtgctttttttttgaacaattcatgatttttcatatggttttaagttttaacgttagagaagtttatgtagtgttatgtagaggctatgttgttgaacttttctacagtttcgatcttatctacaaattatattgatccaagttaatcttaccccaaaaagatagttcaaagatgttggtggacatttcatcacgatagatgtcttattttgtgtgtttggattttgggggttgtttcatgtgaaattctcctctctgcatacaaatatcatcacataatggttaggaaagggctcaaaaagccaaagaaataacttgtctgaaaattatcaagcattatctgatttaaaatgcttgaggctctaaatccttcaagtgttgttttgcttgcctgatcctccgtgtcagtttatttttaagttccacatgtttgatactgaagctaataatttatcgctgttagggtaacatgtgtaaatgatacattatcatcatagatattatgattctatatattacaaatgatgattattctgataaatatgtgtattgttagaagtagaatatttcacaaattttgaattgctaaattgattttagatattattatgaattcataacgtttgtgtatttattttgtatttttcatttttgtattgatttatatatataatttttaaaagactacactaataataataactttgttaacaagagtgaaaatttattttggattgattgttttttgtaattttatcttctataactactgtgaaatagatatctataggtatttaaatagattttggtgaaagatattattgttttgttactttaattatatctacttatttctattggacaagtgtgacgatttgattagtattagatccatgtaaacatgtataagaatcttataacttataaattaccccacatgtcataatactgtaaaacaacaattaaaataggtttgtttagataatatttctatttaaacttaaaaaaaaaacctttcacacaagattctcaatttaacaaggaatctgatcgcttcttcttgattaaccctttttctttaacctcttaaaacaagaaaacaagaagacaaaacttgttttataatagaga

SEQ ID NO: 8219 - DNA, 3000 bp, Unknown
  misc_feature (1)..( 3000): cDNA_ID_1810868_gDNA_ID_1621201_Annot_ID_174906 3000 nt of promoter + ATG
catatgttcaaaaacttaatgagactcaagttgctctattaattaacacgtcttttattgatggagatcaatggttacagttttctgacctttaaaggaaatatatcaaccaaaactcgttggaatatactctttttatatatcttgaatcggaacattatgattggagaaagtgcaatttttaccaatgatttaaactgaatcattgcaggttaaagttcaaaatggttaaaaaattatttatatatatatgatacataacctccaaattataaagattacaatcgaattgaaaagtctctaggaacaaattagaaataggtacattaattgttgacgacaacgacgactatccaattgtgactacattaattttactaaaccgataaaatagatccgggttcggactttaccggttcggttcaatatatcaacatacgacatgcgatcacaacggagagcaccgccgccggagtattcgcctccgatatacgatctgttccacttagattcacactcgatctctcgaacagacgaagaaatcgtctatctctcttctcaacagatttcctaatttttgtctctatggattttgtttccgtaaagaagatacatctttttgtgtaaattgtcttgtagaaagaaacattgattcagtagagaaataggataaatcaatctctgtacttaaaacaaaagtatcatatatcattcgtcacaaccacacaaagttgttgaaactcagtttcaaagtttgaacgattaattatgcagtcttcaactgctgacttttgagaagattattgatttgtctcaggaatacaaaattgtcaaagtgattcattataaatggccccattcattaatcatccgacggctttcacgttatatagggtttggcactcatatatcgatgggctatatgctacttgtctcgtctaacttggaagaagaaaaaaaaagttttatcttctaatgaaccaatggatatcaaaacttggattttgaatacatgcaaacattacttgagtaaagtatcaaaaacttcattaccgaagcttatgatatagtaattgaattcgtactattgccataataataataaaaaattcatgtactaccacaattcaaagtagagacaaattactatattaaactctgaaggtatttgtgtgccgttgacacaaataaaattatcttagtatgtttttattttgaggcacaaattaatgatcaaatcgttaaaagatgaattctgggaagtatatactgagtggatattttcatttttgttggtagataatatccctcaaatcaaatcagcagtatttcttttcttgtaaaaggttttcagcatattagatgagatccacaaaaacaaatatctacacatcataaagcaataattctttgccaaaaaacaaaaaagcaataattaatttcgctaaaaaaagcaataattaaagaagttagaaattcctgagttttggggaaaacaaaactcgtgatttttaaagctcttccaggttggacgagatatatagtactgtagtctcttgtgattttttgtgctatatttttgtgtattgcgtcgcatatgtatgaccatgccgcatggtatgcagcaactacaaaacattcaattttaatttgtacgaagtccgaatgcagtaaacatatgtactatgtagtaatgtcacacgattctgaaataaaacatatcatggtcaataatcaagatgacatcgatgccattttagatgattttagctctggtttattaagacttgcatcttttcaaaaaaagcaaaatatctatgcgtagacctaaaggtaacaggatagagatttagatagaattattaaataatacgtaagacatacatgttaaagtccaaatcgaggaaagggaaattgggaaaatagagtcataatatcgacataatcagacgtttgagtcggttgacttcacatgtgcttaagtaaagagagaagggaaattgtgttttagatagttccgtacaatttatgtcgacattctctcgacatatagttaagctctttattttagtgtttgttaagatataatcgtattttttaaagtattcacgagaaaaacagtttcatagttacacgtagcatgtatgaacgtagtagaggatctttctcacttttaaaaatctattccctaaagattcgatttttcttttatttcatcccctcaaagtagctctcaactatctataatttaatttttaacaaaaaaaaataaaaaattagtagctccaagactaactatttgtagttttgtaccatggctaaaatttttaaaacaacatgttcgatggccgcatacgcatttcccttttcttatcaatttaaaattaattattgtttagattcttcgcgaatttgattacacagatcacatgggccatttgatcatcatgaccaaaatgattgcgaataatcgattattatttgtttatgttcgaatgaggatagacaaaaaattctgctcagtttttgacaacctcgagtaagttattttagaatcattttcttgaatcacatctattacaaattatttatgaaatatacaactaacgttcattcgtttttatttaaaatttaaatgttttaatttatttcgagggacaaaaacaaatacgggcctagtgatttttcatgtattttcttctttgaattatggagtcaaacttgtttgagttctacagagaaaaaaaagcaaattaaaataaatattgaatgtcatattaaagtatataatataacaaaaaattaaagaaataagtcttctcttagaacagcacctgttaaaatataactatataactgtgtaacacacactttgagataaatacatcgatcactcccaatctccccccgtattttgtcctttattcttccattcttcgcgtcgtcatcatttatcattatcatcgagaagagattcaaattcaaaccctaatcgataag

SEQ ID NO: 8220 - DNA, 3000 bp, Unknown
  misc_feature (1)..( 3000): cDNA_ID_3047937_gDNA_ID_1621201_Annot_ID_174904 3000 nt of promoter + ATG
aaatgtgccattagctgagtaggcagtgtcgttccacgcaatggctgtaatgtcgaagccttgtccttgcaacgttatgtttggtttagtcttcggaatcaccactttttcactgccatgcaatacttatatatcatttacttatatagatttcttaattgttattgtagtaactaaatcgacaacatactagtacatgccggagtttatccaaatcacgttccttctttgactgaaattccccactgcgtccacggccgattgcaccgtcgtgaaattgcagcaaccgttcttatccacgcagagataggatgttgtgtcggtgtccaatggaggtatatttttagggaaatcgtcgcatattgatacctttcttttggtatccgaaggtttatgccggtggtggtgatgatgatgatgatgatgatggtgatggtgatcacataaggatttcttgaatgaatatgatattgctttgataccaaaagcttcaggatgtgttttaaagagagttttagatgccagaacggcaattattgcgatacctatggatatggataatgagattattttcatacctgaataatagaagataattctgtgaaactttgattggttgatttaggggtttgagagggaaaggataaaaggaacttaatgaataagatgatgcataagagagttatttatacgaacaaatatgaaatatgaaattgcatgaagtgtaaggatttgttggaatgccttgcaaattaccctttgctaatgtttgctttcttacaaatattaaactatctcgatccacctaccaaaaaggctcatagcctttactagaataaaaaaaagtgaatatcaatttcgtttgtataatatatttgagaacccattgtcaatatatatactctgagtactttatctcacatgtaaacaaagaaggtgataaatgatatatcatttttcatgtttctaactaataaagtgattatgctagctatatgtataatgtgcaacaaaaaattaagagaaaaaaaatagtcatctacttaaagcaattttatagaatgccatactaatcatttatcaaacaaaatctgttcagctctgatgttttgttgttataatgtttcactatgcaaaaagaaatacagcaaaaaaaacgtaagttagaaatgattcgttattactgagtctatacaactataattcaataaacctcattatttggaagttgagtacacatgcatttaactttgttgattgattatctgactatatatatataccgtccagtgtccacagccttatgataactaagataaatagaaatgaagcatctaacatcccatgtgaaaataaatcttgtgtgaaattttatctcgcatacacgttcaccatataagattgtaagctaatgaatataagaagtgaaattaaaggtcccaatatttgcaagtatatattgtgtttttatcgtttcactagttatgtagtttctttttgataccccgatccaaattttgtaattacgtagaaccattatggtctatttattagtctattgattgtcttagtcaataacgcatatgtatcaccgaatatggatcattaattactgaataaaacacccaaaaaacttgttagcaaatgaaccctatgaataaaagaaggggcataatggaaatttagataactatccttcaatgatatacaaagagacccactccctctccacattttctttttcaaataaaaagactctctctctcccatttacatctcttcatcttcttctctttctgcattttgtgactaaatttgttccgatctccgaaaaatatgaaatcttattagaaaaataccggaaaagaaacagattagtacattcgattcagcaccttcaagtaagcatatccacacctcttctggtcttttatgatattttttcttatctttttttaaaaaaacttatataattgatctttgatccaagttgtctctgtttttcaatttcgggatttggaactatatattgtaggatcgtgacaattccgaatttcagatttcgatcgatcatcttttcaagtattagtggtaaaactcaacgtctctttgagaaactcaaattctttgtttatattaatcgccgttagttttccatattggattgtactattaaaaatttaatggtatgtggtaaatctttgatttgatttctttcaagatttaggtgcaactttcaagagatgtctttattgatgtaactggttttgtgagtcttttagcttagtcgaatttatttttatttttgaattttattcgcctgcaagatcattcaagtgctttaatatagtgttcattttttttaatttatgataatgttttttttttaatcaaatttttggttagaattccacatgttcttataagagagctactagtttggtgagcatttaatatgtgttttttttttatttgttgggtagtttttatttattgacatcataaagtttgatcacattgtaatttagatgatcataaacctattagccagattaaaaacttgtgaaaatacagacgttgacctttatttggagatcttccaaaccttctcaattctgttttctcttattatatttgaaagaatgttgttggcaataataaatccaccattgaatatcgtattattgaatataaacaatgtatatatatgctctctgtcgtcacaaggagattatcttatcttgttagttattttatataatctctggggaaatggttttcttgcaagttagggctttatttttcgctttaaacaatgaaattgttgcggttggattgttcaactgaacttgatcatatttcttgttgattattgagactttaacgtgtgacatttcattcatatatacaaaaagtatactctttaacaccaatttaaagccttaaattctcagcggttgcagaacacaaaataagaggaattgcttgattatagctatg

SEQ ID NO: 8221 - DNA, 3000 bp, Unknown
  misc_feature (1)..( 3000): cDNA_ID_3434222_gDNA_ID_1621201_Annot_ID_174902 3000 nt of promoter + ATG
ggcggcagtggtgtggatcttgttttgagttgtgtcgataactatgaagcaaggatggctgtcaaccaggtagctgttacttctttctcgaaaaggcttttttgttacaaattccacagttcttacttcaccatcgagcatttttgatcttacattctacataattcaattagttgggaatggaaaatatataaaatattctagattggctctgatttgagtttattcttatgaaatataggcatgcaatgagttacgtcaaacatggatggagtcaggtaaatagtatgctaataattatatgtacttctttttttcatttctcttttggctaacaaaaaaggtgatattttgtgcaggtgtatccgaagatgctgtttcaggtcacatacagctcttggttcccggagaaactgcttgttttgcttgtgcacctcccctggtatgtttttttccttcttatatcactcttacaactctaacctataatgccctgcattaattagtgcttgaggaatgtatcagtggaatatgggtggttttaaggattctgtgatccagggtattgttaatactactttttggattttctctaagcaatctctttactctgtggtaggtcgtggcatctggaattgatgaacggacacttaaacgggaaggggtctgtgctgcatctctgccaactactatggtaaatttcataccaccttacaatacagttcaaaatttggctatgttgactatttatcaagttttctgctattgcttttgtttatttaagcgctatctatatattttaagactcttgtttgattgtcaattcagggtgttgttgcggggcttttggttcaaaactctctcaagttcttactaaattttggtgaagtttctccatacttggtataggctttgcttcctccagctctcctcacagttaacactttatagtttatcacagaatgattataatttgaatcagttaaagcttactagttttatgcccgttacttgatcccacagggttataattcactgaaggattttttcccaaccatgaaaatgagaccaaatccacaatgctcgaatgtagcttgtctagagcggcaggtaacctgattaaatgcaaccacaaaactatctcagcttgtctttgttttgcgccttttgtttccatccatgttctggtgaaaaagttgaaatcccaaaatgcagaaagaatatatgcttgcaaaaccagaaagggatgctgctgctaaagctaagatggaagctgatgcatccacaactatcgatgaaggtccactccatgatgataatgagtggaacataaggtaataactcagtgaattagttaaaaatcaaaatttgtatttttgttatcatattttctcctttccagccatatttgcaacaagaaatctgatgtgtatctcatgtctttttatcagtgttgtcgatgatgaaaatgagaaggatactacaaaagctgcctcaagttcaggttacttaaacttgggactctatgtgctatccatgtgaaaatgtatcaaatataagtcctgttcttctgactgttatctaaattgatcctgtgttatgtgtagatacattacccgaagggcttactcgggagcttccagttgcagatgagtatgagaaagcaatagccatagcctcagggtcaggagaaacagaggaggaagatgaccttgaagatctgaagaaacagctcgaagctctcaacgctgcttgagtctttatgagggagaaaaaatagttgttttagcatatttatacatgaaagaggctacaagtgcaattgtgtatgcaaaaagagtgtgttaggattggtaaattggatctcatggacatataaacgtttttgatgatgacttctcccgtttttttagttgttaccaaagacaaaaagatacaattttgaagatgtttcatggatttattgtcataatcatccgaactagaacttagaaattcaaattagaaaaagattttgtccaatgatgatgatccaagtttggtttgtaatgtgtaaaccagcttttttggaggtaagatattaattgcgcggggaaatcaactagatgacgtgtgaatcgcgaattacaattacgtttttggatggagaactgtcttttttttcctttttatatccctaaaatacttttttgtacattcatttatatcaggaaaaacagagttgtaaccaaattattacagagatattcaaagatatttcaacctatcaactaaagatgacgtgtatattgagaatggcaattgcgtttatgagtgggaaaccaaattatttcattaacatgatctttaggaataccgctaataagagattactaatcactatttgaggttttaatttaaatctttgtagtcctgattttgaatatttcgttttagctaaatcagctccaatttttcccagttatcgtttgtcgaattcatattactgttaatttagttaacttccgaagactattagtacatgattcttcaacaaagcaaataaagaaaagaatcttgatgtcgttctctcaacaattcaacaaaacttggtctcgacgactcgaccgtgtgagatgtttgagaagtcagaacaccacacgtgtcgacataaagcccgcaccacgcacgcttttcgtctggatatatccaaattactttacagaaatcatttgtattgtttgttaataaaaactttgaaccactttgattactatattatttttttggaatttattctggtgacattaatgttctatcctccacgcggttctcataaaccgacttggcttctttatttttcctttatctttctctatatatttacacacacacgcatttgtgcagagatattcaaagattagaaacattcttgatagatacaaaaaacatttttcagacacaaaatcataaaatctttgcctttagtagatcaaagttctttacattaatcgttagaag

SEQ ID NO: 8222 - DNA, 3000 bp, Unknown
  misc_feature (1)..( 3000): cDNA_ID_3047543_gDNA_ID_1621201_Annot_ID_174930 3000 nt of promoter + ATG
tgacttagtcgaagaaaacgttcattaaatggttcccgccaatggcccaacggccccaaacgcgtagaacgtaacatgcatggggatccatattaatggcttcttcatcccacttgcttatttctttcgactttggaggtttcatttacctattatataagggaatgttcagttccagtgactgagatatcacaagcaaacaagagaagacattttattgttatttctctctctctctccttgtagatggaacttaagggcgttacttgtttgcttctttctttggttttgcttaattcgtgtgtggaatgtgttttgggggatggatctgtggtgggtcctgcgaggtttagagacgatgattgtaggtggggccggaggtgtgctggacgtggccggtttggacgcggtggtggtggagggttcggcggtgggagaggaagtggtggcggtataggcggtggtggtggacaaggtggagggtttggagccggaggaggagttggtggcggagctggaggaggacttggtggtggaggcggagctggtggtggtggtggaggaggtattggtggtggttccggtcatggtggtgggtttggagccggcggaggagttggtgggggtgctggtggaggaattggtgggggaggcggagctggtggaggcggaggaggaggtgttggcggtggttctggtcacggtggtgggtttggagccggaggaggtgtaggcggcggtgctggaggaattggtggtggagggggagctggtgggggcggagggggaggtgttggcggtggttccggtcatggcagtgggtttggagccggaggagggattggtggtggagctggcggaggagttggcggtggaggtggaggtggaggtgggggcggcggaggcggtggtgccaatggtggatccggtcacggtagtggttttggtgctggaggtggagtaggaggtggagtaggaggaggtgctggtggaggcggtggaggtgggggcggcggaggcggtggtgctaatggtggatccggtcatggtagtggttttggtgctggaggtggagtaggaggtggagtaggaggaggtgctggtggaggcggtggaggaggcggtggcggaggaggtggtgtgggtggtggatccggacatggtggcggatttggtgctggaggaggactcggcggtggtgccggaggaggactcggtggcggtggtggtgctggaggtggaggaggaggaggtttggggcacggtggtggtgttggtggagggcatggaggaggcgtcggcattgggattggaattggaataggtgttggggtaggtggaggctctggtcaaggttccggcagcggaagcggtagtggtggcggcggcggtcgccattaatcaaagctcttattaccaatctcacgtttagtgtcttgacaatactacttcttgtcattctatttctcttgtattgtttcaagactaaacaaaaaaatatgtatgatacatttttcacttcaagatgtgatttcttctatttttgtgtaagaatgttttcaaaaaaaaaaaatctaataagaaaatattgaatacggattgatcttaattttggacttaatccgttttctttctttttctctgaagacatctagtcagttttctaagaggaacacataaccaacattgtttcaacaatatatctttctttttgcaaaatacaaatttcaattgaattaacttgtgtaacatatgtacgacccatatttcagttttgaggtcctatcgtcagatatttctctacgaaagcaacataataatagttttagcttttattgctgtattggctacgttgacttatttaaaatttgagtttgcataaacaataactttctacaatgattttgcataaacaataactttctacaatggattttgcataaacaataactttctacaatgattttgctatagctatcgtcattttgtgtcaaccgcttgtgtctactttcaatattgattcttgaaacttgcctaatccttaagaaccttaacaaacacatgaaataacatctcatggtcacggtcacttccgacctttaaatagaacaacaaccaaatctcgtcatggactcatggaacattcgaaattttgccaatgatgaaggagactgacgtcgataaagccgtcatctaaatgtctaaagactctaaactcaacatgcatgttatagtgcttttctatctacgcaccaatgtctatttcatttttttttctttttttcagtttttagtttaatgatcgaaactatatggtattttaagttttttttttctttgaaatataccatatactccctccgtcccactaagatgaaatttttagaaatttcacattctttaagaaatattgtataaagacaattttaacctcttaatatactttaaaaacaataataaatatttatctaattatttagtaagggtaaaacgggaaaacagttttaaaatttgcattggaaatataaaacttctatctttgtgggacaaatatttttcctagaaaatttatctttatcggacagaaggataaagtcaaatagatcataaagctatagtttccatcattaattaagccattattataatacagtatctactaaaagttttggtagttatgtagagattgtgattttgcgtctcacattacacatgtatcggtttcacataatgtctataatatacgatacctaagttaattttccatttagcattgcttctccaatttaatttgatacaagatcttttggttagattgctgcagtcacaatttgctaatcgaaccgataggttagttgacacgtctgtataatgtcgtgtttcccgccgttctggacaatcaacaaaaaatggaaaaatagaaccgaccactttatagaacatagtaaccctaaacttaaaattttccaattatcctcaattttgcgaattaggacagag

SEQ ID NO: 8223 - DNA, 3000 bp, Unknown
  misc_feature (1)..( 3000): cDNA_ID_1810839_gDNA_ID_1621201_Annot_ID_174926 3000 nt of promoter + ATG
tgatgtgtgtcattgttctatagtgccacgaccgggggaattctagatcgagctatagaagctgaggacaggaagcatggagatttcttgagactggtatagttctgaatatagttcactgtttaacaagtctaaggctagctcttatcttcattctcattactcacttgttttttataggaccatgttgaagggtacctagagttgtcaggcaagacgaaaacttacttttctacagcattttcgatgtgggatgcagatttctatgtcaaagtagatgatgatgttcatgtcaatataggtaagttctaaaatcaacgaattgaattggttttctttatgtcattttgcataccttatactggcaatactaatgggttcaatgtttcactgaaatgtctgcagcaactcttggggaaactcttgttagacaccggaaaaaaccacgggtctatattggttgcatgaaatctggccctgtcctctctcaaaagtaaagcatcttccagtttcctccttcatatcaattttgtattcttgttaagtcatctttgttttatggagcagaggggtgaggtaccatgagccagagtactggaagtttggtgaaaatgggaacaaatacttccgtcatgctactggacagttatacgccatttcaagggacttggcttcttatatatcaatcaatcagtaagatgaagatgagattacattgtatcatagctcatttgttaactcatgtaactcttcgttcttatacatgttaaatgtttcaggcatgttcttcacaagtatgcgaacgaagatgtttcgctaggagcttggtttatcgggattgatgttaaacacattgatgatagaagattatgctgcggaactcctcctggtaagtcttaagctcttttcatctcctgcttgctgtgataccttttaagatgcttcaaaaatcaatgtacatattttgattacttagacagaaaaaacgtcaacatctttggtgttggggacctaactacaataatatctgctttaaagcaaaaggcttaaaaatgaagagaccttaacctatctaaagagatgactcgtccctatcaaaatctctactgatacaaagtcttaccaagaacctaaatgatttaagtttgacaataacatcaaatctttcaacctgaaacatactgaaaatatgttaaaagattcagttttggtatttgcagattgcgaatggaaagcacaagctggaaacatctgtgtagcatcattcgactggagctgcagcggaatctgcagatccgcagatcgcatcaaagaggttcatagacgttgcggtgaaggtgaaaaggctctttggagtgccacgttttgacatataaacagaggaatggtaaaaacataacggttttgctcagcccccaaaaacagctcaaagatcagaggaaggtcgtccagatatacaattccaagagatatccacttttgtattcataggtacatagaatagaagaggcaggaaggattagagataagtgtgaaaacctctggcaagaatcgcaattgcgtattgtgattgtggcgtttccattttggtataaggaaactgaacactacagtgaacacccctgctgctttgttcgttttgggtggcttgaaaatgaagcaacttgtggatttttacatcaaatacaaaacactatgccctgattcttttggatccataaaactattgcatagacagaaatcggatactgtgtaataacctctctggaaatcattaggcgcagtaaactgtaaaacttaacaatgtctctaaaattactttgaaaagtataaaacttgggaaagtaggataaagttagagacttttatttgttggtcttggtcacatgtcaaaacagacactttggttctattggtttgggtttcggtcgtctgaggcccgaaagctgcttcttactcgaaagtcgaaacccttgtgagagaacttggtgatgccgaagatggtaactccgacgagtactggaaccagtttattgagccattcgcagaatctgagggtcaagtggtctcttctctctcattgctttatcttaattaaggtctggttctcttttactttatcgattcctctccatgtgtgtctaccaaagttttgattttttgttgttgttggtgtctgaatccgagtgtgaagtagtcgtacaccctaatcgaaatttccaggatcaaacttagtgaaattcacttgttgatctacgtattgaaaattacgttcagagaggtcgaatcaacggattttttagttgtaattaagctttaactgatcaaaattaaacaacttgaagaagaatgtggacaaaaaaaaagaagagaaattgataagaaaaagtttagtattaattttagactaattaatcttcttggagtgttttgtttctctgttgtttaacgaatgtgttcactgttttgcatttggatctacatttgctacttagttttagtatcaacgggatcttatcgatgaattagtatactcatgctcgacacatgtagagatgatagtactggttttggtgaattaacttattttcttgaagaagaatatacagagaggcatttgccatatagagaacccaaaatggaagtaatttcggttaatccttaggagctagccgtgtgtccctttgtatcttcccaccacaaattagataggaacactcgttttggttagaaatctctttcataaataaattctatcccgctaagattctctcttgttctttagaaacaaaaataagatataatattactaccaggaattgcatggacaagattttttccagattaaaagatattttaccagttttacttgtagactttccaggtattgagtaatgtaatacacgtatctacatgaagatgaggatataaatatccatttatgagaaaagaaaaaaagggacaaacaaaagttggcaagtttaactaagtgaaaagtct

SEQ ID NO: 8224 - DNA, 3000 bp, Unknown
  misc_feature (1)..( 3000): cDNA_ID_3047945_gDNA_ID_1621201_Annot_ID_174899 3000 nt of promoter + ATG
ctgaattgacaatcaaacaagagtcttaaaatatatagatagcgcttaaataaacaaaagcaatagcagaaaacttgataaatagtcaacatagccaaattttgaactgtattgtaaggtggtatgaaatttaccatagtagttggcagagatgcagcacagaccccttcccgtttaagtgtccgttcatcaattccagatgccacgacctaccacagagtaaagagattgcttagagaaaatccaaaaagtagtattaacaataccctggatcacagaatccttaaaaccacccatattccactgatacattcctcaagcactaattaatgcagggcattataggttagagttgtaagagtgatataagaaggaaaaaaacataccaggggaggtgcacaagcaaaacaagcagtttctccgggaaccaagagctgtatgtgacctgaaacagcatcttcggatacacctgcacaaaatatcaccttttttgttagccaaaagagaaatgaaaaaaagaagtacatataattattagcatactatttacctgactccatccatgtttgacgtaactcattgcatgcctatatttcataagaataaactcaaatcagagccaatctagaatattttatatattttccattcccaactaattgaattatgtagaatgtaagatcaaaaatgctcgatggtgaagtaagaactgtggaatttgtaacaaaaaagccttttcgagaaagaagtaacagctacctggttgacagccatccttgcttcatagttatcgacacaactcaaaacaagatccacaccactgccgccctctttgctaggacaaaatgacttgtttgtcaagctggacgtgaaggtttcaaagccttgcactgttgttatgttcattgtgaaactctagcagaagaaaaatagaaatagcataaattggtgactcaggaattctgtaggtgggaagctaataatgttccgcagtaaacaacataaataaattaaccaaaaagagcctaaggatacatacatacatcatacaccatagacctcccatttaatacgtaatgagtctaaatcgaacacatccgtttgggcaaatccatagactttttagtttccagtaaatatgatgtaaaaatggccattgaactagttttaacctcatcatgtagaaaacttacttcaagaactacgtcagggtttatttctgcaagggtttggacagcagcatcagtctttgtcataccaacctatagtcacaattatccggagatcagaaacaatacgaaagggacgaaaatatgtattgcagaactcaaatgagaattgagtacctggtccggtctaaaaaacagtctgttcatgttagctagttcgacagtgtcatagtcatacaacaaaagacgaccaataccacatctggtaagcatctcagccgcaacacttccaacaccaccaattccctgtcatttagatcatcctttccttacttaatgaacaaacttatagctaaacaaggaaaatatcataaaagaaaaaacaaggagagaaatacgtacaacaatggcgacggaaaactctctaattctctcatagttgtccacaatgcccatccgctgaagtgccataagcctactgtaaggattactatctaccacttccgagcttagttcctgcaatagattgaaatcagaaacgttttacagaagataactttaaatgaggagaatttgtcaatacaaggcaaagaccttgactttggaacgccggtgaggattacatttagacagagtggctagattctcaacatgtgatcgcagctgcaaagcccaaacacattttcaggagaattcataagcaatgcaaacaacaaaaggctaagtgaaattaattcggagattccagattcaaatcaatacaaagatatactcgtaaacaccaatgcatgtgaaaattcccaacggaaaaatcataatccatgaaacgcaatttgagtattaattcctcgaggaatcaacagtattggaagaaatcattcactaagcaaattcacagcgttaagaaaaacgagatcggaagtaaaaacccaaacaccttgttgatcagagccggatctgagagagatttctcgagaacgtcaagatcatcgagcaatgccttgaatccaacctccatttttcagctctcttaggatgagaaatcgaatctgcgatgctgatttgggagagagacactccggaatttgtacacaaagtcacaaaggtttaaagccaaagacgttattgatttcaccaaacaaaaaaaaacaaaaaaagttgaccgcaataacaaggaaggaacataaatttatccggtctgttttaaagattgtggatcacactgggccttcaaaatagcccattagttcacgtatacggttgcactctcctagaatttttgtcacgtatcttcagggaacgcttaagatgacggatgacgaacgagccaccgccacggtagctttagaaagcccgtttaaaaaaatttgtagatcaaaatgaatatttgtagatcacaatgggccaagcttgggtcgttacgaagttgataaagactaacaaaacaaaaaacaaaaaaactaacatctcctatagcctttgattccttgtcacgttatgaaatgacacgtggttcttttggaaccggtttataaataaccggtaaaccgaagagaagaaccaatagaatgcgccatatcacatccaacaaaacgggaacctgattttggtcgcataccttaaacataggagatcgagattgatggatcctttctcaatccatccaaaatcttcagacccaatgctcttcttcatctaatttcctgtctgacggacacatcttgtagaatcagagaccagtttcttcagtagagactcgacgagaagttgcacctgaaaattcatattcagattaggggtttattgattcgtagcatgcgaaagagatatg

SEQ ID NO: 8225 - DNA, 3000 bp, Unknown; identical to SEQ ID NO: 8224
  misc_feature (1)..( 3000): cDNA_ID_1810885_gDNA_ID_1621201_Annot_ID_57655 3000 nt of promoter + ATG

SEQ ID NO: 8226 - DNA, 3000 bp, Unknown; identical to SEQ ID NO: 8221
  misc_feature (1)..( 3000): cDNA_ID_3434222_gDNA_ID_1621201_Annot_ID_57657 3000 nt of promoter + ATG

SEQ ID NO: 8227 - DNA, 3000 bp, Unknown; identical to SEQ ID NO: 8220
  misc_feature (1)..( 3000): cDNA_ID_1810875_gDNA_ID_1621201_Annot_ID_57659 3000 nt of promoter + ATG

SEQ ID NO: 8228 - DNA, 3000 bp, Unknown; identical to SEQ ID NO: 8219
  misc_feature (1)..( 3000): cDNA_ID_1810868_gDNA_ID_1621201_Annot_ID_57661 3000 nt of promoter + ATG

SEQ ID NO: 8229 - DNA, 3000 bp, Unknown; identical to SEQ ID NO: 8218
  misc_feature (1)..( 3000): cDNA_ID_1810866_gDNA_ID_1621201_Annot_ID_57662 3000 nt of promoter + ATG

SEQ ID NO: 8230 - DNA, 3000 bp, Unknown
  misc_feature (1)..( 3000): cDNA_ID_1810859_gDNA_ID_1621201_Annot_ID_57664 3000 nt of promoter + ATG
gctcttgtagaatcccttgaacaagggttgtgcctatgccaatcatgcttttcaaatcccaatgtaatctcgcgttttcttcttcttcttagaaacgatgctagtgattattcggcatataattttccactggatcttgattcctcttcttcgtcttgttcatcttcttttatcgatcgcaattgggaattttcccttggttccttacctctcaataatgaggactcatcatcatcttttgaaatccttcaaatatttgaagatcatacaaagaattatagtgatcaacaagtgttgacgcttcagcccgattatttggacataattcctaaggtatatacttatttatttttattttgttaaagaggggttttgttcattgttatgagatatatatgtttgcttaactcgttccattgtttcctgtgtgtcacttttacgcaggatagttcatgctcaggcttcaaaagctacgaaactaaagaagatatagagaatgttttgatgaacacttttgatggcgccgaggcagcagtattagacctaaaacaatataaccccgaggaagatttgatcctcacggagctaatcgatgaattagcaagagacaattcagagaccacgccgaccaatgtaaacatcagctttaattctgtcgcatattaattatctttaattatggttgacttatttatatatttttgtttcattgtgtaatagactttaccaacttcagcatctggtatgtcatcggatatacataaagattacaacactgaagctttggctaatgcaagttctcaagattattttataaaccaaatgattggctcaaaagcaaaggaagagaccaatgatcttgcaatactccctaacgctcttgttcaacttgactgtggacaatcgcagttgatacttaccgatgagatgttaccatgggagaatcaaacatttgtacctgttaagggatttagtccgaaagatcgagaagaggccaagaaaagatatttcgaaaagaagaagaaacgcaagtaggtattacacctcattatacttataggtagataactccatgcaagtgtatacgtacttacaagttcaaatttataacaatgcaggtttgggaaacaaattagatatgaatctcgaaaatctacagcagatacgaagaaaagaatgaaaggaagatttacaaaagctggtgctgattatgactatgacccacgagctaatgatattaacaaagggaaaatacaaacatgagctaatgataaccaagctcaattgtgatatccaaataaggaaaataaaaagatggttgcaataatatatatgatgatcatcatcattatggttccatgattttttggactttgttttgccaagggtgttttgtagttcagtggttttgtctgattggtcgagatatcgatatccactggatgcacacgcttaaaggactgcaaaggttcacagagaggtcaaaacgatctctagttctctactatagtgttttgattccactctatagatttttttccaaaattatttttttcttttattatttacatttatttatttcttaaaggagctttattgcagttactgtcaaattattttaccaaaaacaataactaaatttttcggtaagactctaaccgaaagttaattcggttcgtttgatttggtttttgttcggttaaatttggtttggtttggtttttgtttgatcgattaagttttgaatgaatttctgtgggagttgcttctcaaagacttaaacctgcaacttggcaagttttttttcttcttctcaaaccattgtcttcatcatatagctcttttaaaaataaatgtgacaataatcgattggtggacatacagtagaatgctaagaaaaaaatagccgattggagaagaagcaagaatatataaaccacctcttttgcaaattaaagatacgtgtttgtcatggccttttaatttttcctaataacaagttctttaatcatttctcacgaaacaaaactcaactgtcttagaaatatattaatattccctgcggctcggatcttgtgacactgcacatgttgaggacagctaaatttacgttactaaacgttgcttgtttcgtctcgtctcaatattttagtgtgtaataagtaataactatatatggaatataatatatgagcatttaaaaaaccatcgaacaataataaataaaaaccaagccttaattggacaagtccgatttaaaatcttacaattgaccaaaataaagttaggaacgagatctagccatcatttactaaacattaaattaatgatttacttttgtcatttattatataataattatatcatcataaatctagcagatggagtatttgatactcgttatacaaaacataacatgtatcttgcattcttgctaattaatgaccaaaagtagaaaagaattctatattgttatggcaaaattaaaatttaaaaaacgatctctattgtttctttttgttaagtaaaaatgtctctattgttaataaaaaaaaactcgctttttcgtttaagaattttttttattgttgtatggaactaagtgaattgagaataatttgacatgtgtcgagtaatagattcctttaccaaatatataagcatctccaattaattaagatgtacattactttaatttgaaaaaatacaaagtacaagaaacgtattactagtataatttattagactccttctttatttacgccttagcttccgtgcctaatcacaatactagttatttacatatagtttagtcagcattaattccttacactaaaaccatttttaacatgactccattgctctccctctgatcaaccctcctcctccgccgctgctacaaacactttaatatatattgccaccgtcctaccatatatatatagtccacttaagatctttccactcatttataacccaaatttgttctgtttcataaat

SEQ ID NO: 8231 - DNA, 3000 bp, Unknown; identical to SEQ ID NO: 8216
  misc_feature (1)..( 3000): cDNA_ID_3047930_gDNA_ID_1621201_Annot_ID_57666 3000 nt of

SEQ ID NO: 8232 - DNA, 3000 bp, Unknown; identical to SEQ ID NO: 8215
  misc_feature (1)..( 3000): cDNA_ID_1810854_gDNA_ID_1621201_Annot_ID_57667 3000 nt of promoter + ATG

SEQ ID NO: 8233 - DNA, 3000 bp, Unknown; identical to SEQ ID NO: 8214
  misc_feature (1)..( 3000): cDNA_ID_1810854_gDNA_ID_1621201_Annot_ID_57668 3000 nt of promoter + ATG

SEQ ID NO: 8234 - DNA, 3000 bp, Unknown
  misc_feature (1)..( 3000): cDNA_ID_1810850_gDNA_ID_1621201_Annot_ID_57669 3000 nt of promoter + ATG
acctacatatatacagtaaaaatcagaaataagttgggttattgtttttttatatatagttattttaaagaatctaggtaaagtataaacttactgaaaagaaaaacttgagtgttaaagctatagctataaggactttaaaaaaaaaaacaaagcttaagaactaggtaattaaatacgcagtatatttctctatatattcgcgtgataaattaagatgaatgcatggcttttacaaattatcacctttttaatgggtgatccgtattttaaatagcttaattgcacgttatagttataaatgcttgggccacaaagtaattaatatttctaggcatgtaaaatgaagtcttactgtgaaaaaagtgatatttcattgacttccttaaattgaaaaaacaattgtttcgtaaacaaaactcaaaattaaggtgatgatttttagattttcttcttttaaatgaaataaaataaatacatcactcaatcaacttctgtctgactaacaataatacaacctaaacttctataatatttaagaaaatgccatgtggaagaagaatcatgaaattttccttctttacaattaaatttataacaaagatatgaaataataataaaataaaatagttaaaaatataatagtcatattttttgaaagtaaaaattaaatttatatctcataaagataaatattaactataacaagtcattgaattttagttaaaaaactatataatttttttccatattataaataatctaagagtattaaaatttcagaaaattacttttaaaattgtatccttgacaaatggggactattgtctaactttttctgtaaatggagaactgtattaaagcaaatttcaatatagttaaatctttttttaatatagttaattttgttaagtggtgatttattgcatatgcataagttatgaataatgctaatgattttttaaaaataactacatatctaatagataaatgtaagtctcataggctcatagaccgttagccgtcattcctcaccacattataatattttaaataaataaaaaataaaattattttaggttgacattgtatataagatgaaaaacaacacataattttgtaacataaataaaataaattgtaacatatctctctctctctatatatatataagcgtgtaggataattaagtgtccctctcgcaccatttaatttcattgcaccctctcaattctctctgtcattactctctcatctctcttcctccaagatttgcacctacctttcaaaccttttgctcgccaacaaaaccgcgcttcacaaaaccatcagcggttttccgagaaacaaatctcagaccagacaccgctctactcttctctctctctccctctagggtttcgtcgcttcttcctatatcccagtgtatgtctcgaaaacctcatcatttctgctgttttctttattttatccattaattcatgtacacaaatttatttgtttaaagtatcattggatccattacacttcagttttcttagcatctttataaaactctcactttcatgatgttttttttttataatttaatatatcctgtatgttgaattttcagttagtcatctatattttgtcttaaattttgccttctttagcattaattaattgatttcttgcctctaatatctttcattcctctcctaatttgctttctgactttctgatttattgtattcttctttaaataatcttatcaatttctgcatagtcagagatgaaaccttcaagaaaacaataaagaggaaagattaaaggttagtattcccttgcctaccaaaaaaaacagaaaggtttgtattctcttcgtatatccttattttcattatacgtttggttttatatataaacacgtgtatatactttatagtagtagtatacatttacatattaatgtgtgtaataaaaacgtttaaatacgatgatgatgataagaaatagctggaaaaaattaatacatcacccaggccttatgtcacgttggttgtaagttgtataataactatatgttggtccgtcgcacaggtgcacagatataatactatttttttcatttcaatttttttttctttcttaatcgccaaatagtagtttacactttttcctgaagagtttttattttttgaaaatctactaatgattatatttaattaaattttgttttgttctcacgaaaatattgtttttttaataaacaggatagagttgggaatttatttgtacctactttttcccattttatttgctttgaacaaatgagtccaacatttctcttttcgtcttctctttcctatcccatctaaatcaaaactgatcaaaatacctcgaaattttaaattaaatcaccatccatcaaagctattatagtgtagaaattttaaagttttttctttggacaacaattgatttccatctacactacatatgatatgactcttgaatcaatcatagtttttatttcagtctgctgattagtttttttcttttcttttaaaagggtaaaaaatcggtagtttcgaataattttgagtatgtgaaaattcattatttttgggttggttattcaataacaaattaatttgtgattgtgatgtcttttttatgcaaggctcttttttcttgctttcaattagtgggtcctttgtttcctacaatcatctccaattcttctgtttgcttatatcattttgtatgatcttcaagaagaaagataaacgactccgaagaaagatttaagttattgttgttcatacaaaaagaaggttgtaaagttgttgacgtggacaaaagtattgccatatttttccagcctcgaagaaatttcccttcttcttcaaaccctaaattttgacaaaactctctacttttttttgcttctagggtttgctttcagtttccggagtataagaaaagatgttcgagccaaatatgctgcttgcggct

SEQ ID NO: 8235 - DNA, 3000 bp, Unknown
  misc_feature (1)..( 3000): cDNA_ID_1810843_gDNA_ID_1621201_Annot_ID_57672 3000 nt of promoter + ATG
tcttccactttcactttcagactatccggtatctgcatcttcaccgggtgtgaaaacccgagatttagcaccagctcctttccgtctactgttgcacgataaccaacacccacaagtataagctttttctcaaatccctttgatactcccacaaccatgttatcggtaagcgtcctaaaagtcacacagaagttaaaaaaaaagattagagaacaaacgatcttttaacctcaaaaaagttaaggacttcattggatgacaagaaaagatgagaagtttgtaacctgaaaaggccgtgcatttggttggctcttctagtttcgacggtttttttgacccttaagaaaccggattcttcctttgtaagctcaacttcgcgtgggtaagttaaagccagctctcctaatggacccttcactttcaagtcttgaccttccaatgcaatggttacattggaaggtacagcgatcggttgctttcctatccttgattctttgcactcaatggtcttactggagtaacccacttgagcaaaaggtgtgcttgagaccttgaacacatttctatctcccaaaaatgctgacctaaaacaaaggggaagttatctatctatcttcagataaaacatgtcaagaaagtaaaactctaccagatatatatctaaaccaatacacagaaactgttattggaacaaagataacgttagattaaggaagagaaacattcttgtagaactttcagtttccatggctaaaaacccctctagaatcctgctttttacacagtgagttccgcataacacattcaaattcccaaaataaaaatccacaatttcaagagtccataaccaattcaacattgccatcgatttaaaaagataaaaataacccattcaaagagattccttatacttgggaggctcatgaacacagtttatagagatttttgagtagaaaatgccaagtaaagaaaacgaaaccctagcggaatgaagaagctctatggtttgtagtatatgaaaagtacctgggttgaaaagatgagacgagtgaggaagccattgataagatttgatgatggagctctaagctctgctccagaaggaggatgaagagaagaagaagagcgttttatccagaaaagacttatccatcgtcagcttctgtaatcccctctttcaaatcattactttcacggcccattagctcactattttcggcccattacttttaaccatccttctgtgggacaattcattatttgtgtaacccatttatctatattgatcatggcctattatctcactgtttctaggcccattattataataactgttcacaaaatttacccaatgaacgtggagtttggattagattaatgaagtcaatagattattagtagatgcgtttggatcaaaattgtgcatctttcccgattaagtatgttttcaagtcgaatcttttaaaggcatggattttaaactactcttaacagacaaatttaaaaatgaaatgggcccttaccctcagaaaaatccaaacaacaaattgagaagattcaaagaaaaaaaagatgaactgtatatttattttcctggttcacatttcatttggtcaagatattcttgttctaaataaataaaaagttcgataccgacaagatatttgtggattcagtggcatattttattttgtgttaacaattaacaaatgaaaatttcaataaggaactatgtaataacaaatgcagctcttataagttttttttaataacattccttaatgaacactctaaagacaaaaaatagtcgaccatgtgtttcatgcaccttttatcatatgaaatcaatagtacaattactttactatttatgtctgaaaatatctttttcttttcttttttttttgtgtgaaattgatttgacaaccgttgaggagacttattctttgacgaaggcggccttggagcaattaggtcgtcactcctcacattcacattttcaattattattttgcctcatgtcatacgtagttaccctaattaccatttaactatatccgttgtaaccaaaaagaaaaatgcatcaactaccttaataaatgatagttaccaataagagccaacgtaaaaatttgatttatcgaatagtatgaggacacaagtaaagcatcgatcatactaccccacaccttggcctacgtcttcactgaccactccagaaatagcactccaaaacaaaatttacaaaatttcataaaataccaaaaaaataagtaatgataaggaagaaaatagggaaaaaaaaggagagagaatattatgaattattctttgcttgagctcagaaacagttcttcttctgcttcttcgacttcttttctctgtctttcttctttatgcttagtgctaaatcactcgtttacttgtgaagattatggatctctgattaaagtttgtttctcgtatttattccaaggttgcttcttctttttctcaattggatcttttaatttttgtttttctttatgttcttacatatataatctttagttatttgttcattgaattatttattacactttttgcttctttctctgcgaaccatctttaagacggccctcttacacttcattattttcagttcttacttgcacatgtaaagcaccagtttctagaatcaaagggcctcatataaatacattattttatacactataaataaatatacagacacaaaaatctgtatacaccaatctctctacagaatctaactcccgatttcttggttggttttgccttctttcaccagatttctggaccatcttttttgtcttttgttataatctcaattttgattcaggttgggcattgtttatttcgcaggtgttactccaaataaatcaaatggttatatgagaccaggacaaagaaaaactagtgcttttgctggaaattgtgataaagatgggatttttggtgatgataagagaagtttccatg

SEQ ID NO: 8236 - DNA, 3000 bp, Unknown
  misc_feature (1)..( 3000): cDNA_ID_1808486_gDNA_ID_1621201_Annot_ID_57674 3000 nt of promoter + ATG
tattaaggtagttgatgcatttttctttttggttacaacggatatagttaaatggtaattagggtaactacgtatgacatgaggcaaaataataattgaaaatgtgaatgtgaggagtgacgacctaattgctccaaggccgccttcgtcaaagaataagtctcctcaacggttgtcaaatcaatttcacacaaaaaaaaaagaaaagaaaaagatattttcagacataaatagtaaagtaattgtactattgatttcatatgataaaaggtgcatgaaacacatggtcgactattttttgtctttagagtgttcattaaggaatgttattaaaaaaaacttataagagctgcatttgttattacatagttccttattgaaattttcatttgttaattgttaacacaaaataaaatatgccactgaatccacaaatatcttgtcggtatcgaactttttatttatttagaacaagaatatcttgaccaaatgaaatgtgaaccaggaaaataaatatacagttcatcttttttttctttgaatcttctcaatttgttgtttggatttttctgagggtaagggcccatttcatttttaaatttgtctgttaagagtagtttaaaatccatgcctttaaaagattcgacttgaaaacatacttaatcgggaaagatgcacaattttgatccaaacgcatctactaataatctattgacttcattaatctaatccaaactccacgttcattgggtaaattttgtgaacagttattataataatgggcctagaaacagtgagataataggccatgatcaatatagataaatgggttacacaaataatgaattgtcccacagaaggatggttaaaagtaatgggccgaaaatagtgagctaatgggccgtgaaagtaatgatttgaaagaggggattacagaagctgacgatggataagtcttttctggataaaacgctcttcttcttctcttcatcctccttctggagcagagcttagagctccatcatcaaatcttatcaatggcttcctcactcgtctcatcttttcaacccaggtacttttcatatactacaaaccatagagcttcttcattccgctagggtttcgttttctttacttggcattttctactcaaaaatctctataaactgtgttcatgagcctcccaagtataaggaatctctttgaatgggttatttttatctttttaaatcgatggcaatgttgaattggttatggactcttgaaattgtggatttttattttgggaatttgaatgtgttatgcggaactcactgtgtaaaaagcaggattctagaggggtttttagccatggaaactgaaagttctacaagaatgtttctcttccttaatctaacgttatctttgttccaataacagtttctgtgtattggtttagatatatatctggtagagttttactttcttgacatgttttatctgaagatagatagataacttcccctttgttttaggtcagcatttttgggagatagaaatgtgttcaaggtctcaagcacaccttttgctcaagtgggttactccagtaagaccattgagtgcaaagaatcaaggataggaaagcaaccgatcgctgtaccttccaatgtaaccattgcattggaaggtcaagacttgaaagtgaagggtccattaggagagctggctttaacttacccacgcgaagttgagcttacaaaggaagaatccggtttcttaagggtcaaaaaaaccgtcgaaactagaagagccaaccaaatgcacggccttttcaggttacaaacttctcatcttttcttgtcatccaatgaagtccttaacttttttgaggttaaaagatcgtttgttctctaatctttttttttaacttctgtgtgacttttaggacgcttaccgataacatggttgtgggagtatcaaagggatttgagaaaaagcttatacttgtgggtgttggttatcgtgcaacagtagacggaaaggagctggtgctaaatctcgggttttcacacccggtgaagatgcagataccggatagtctgaaagtgaaagtggaagagaacacaagaatcactgtgagtggatacgacaagagcgaaatcgggcagtttgctgcaacggttaggaagtggaggccaccagagccatacaaggggaaaggagtcaagtattccgatgagatagttcggaggaaggaaggaaaagctggaaagaagaaatgatcttcatttttcattattatctacttacttatctcttcctttcaatgtttatgtgtatttgctcaaatttgtttagaaatgaagatgtttgtgttgggattcttgagtaagtttttaaaggaacccattaattgtttttgatgctctgacaaaaatttctttagtgctttgattgaacaagaacttgggcacaaagtgcctcatcggtgtgattctattgttatgtttccttattgaaccaaaccaatccaaatcggacaaaaatcatggtagataaactttttaaaacaattttttaatctattcttcttttttttaattacaaattttcttattttcttatatctaaaaaatcgtaacagtaagatattaatatctgtattcttaatttggtagataactttttaaaaaacgaaaatttcctataagaataataatagtcggaaataaaacaaaaaacaatatcatggtgattattcttatttgcttatatcttcttctttttcacaatttttttttaaaaaaaatatttacaaaattttcttatttgcttatatatataaaaaatcagtaagatattaatatcgattttttaatttggtagataacttttttcaaacgataaatttcctaaaaacaataaaatattcggaaataaacaaaaaccctgattgaagaaaagtctttttgtttatcagttcaccggaggcaaaaatcgtctctcgcttgagctgcgaag

SEQ ID NO: 8237 - DNA, 3000 bp, Unknown
  misc_feature (1)..( 3000): cDNA_ID_1807609_gDNA_ID_1621201_Annot_ID_57675 3000 nt of promoter + ATG
agtctcctctttcaagcaaagcacctaacttctaccatcctctcctctctcacactaccaattcattgattctccaatataccaaattaaaccaaacataaccgaccggtcggaagatttgggttagtgattgaactaaaaaggtaaaactcaggtaacacgacccgtacctttcattatgattatatggagagcttcaatgtccatcggttgccaacggtgaatacttaaattaaatgacactctctcatttctctaaattattggtggccatacatctgtgtgtataataatgtacaagtatattaaagcatgtgtctacttcactttgatggttatggaaaatttaagtcttgtggcttcctctttggtacaccaaaaatcattatatcaatcggttggctaacgtaagagacatgaaaattgcatcttcttctttttaaaaaacaaaattgactccattttttttttctttttgcaaaaaaatgaaaactatctttaaaaaaaaattgctaaaattactgccatataatttgttacacattgatctaccacctattaaaaaattatagcttttttaggcattgcttttgagaggaaataatgtgcaagtgcaacatatctataacataaaaatctgaaatatatgtgtgtatatatagacaaacatgtttgaaataaaccatgtggtttgattaacagctaataatgacacaccatacacgttatacttgaccatcacccccattctcaatttataagaccataaaatagttttccgtatgcaatgaataaaaaaaaatcaatgatagatctgaagcttattaacataaaatagaagtggataacattgatccaatcaattcattgcagtctctctgtttgttattcaaaacagcaccgaccttttgattgctcacatgccatgagcacagccatcgatggaatattacgtgaaggaaacaaaaacttgaatatatatttttcctcacgattgagttcagaaacctggttgagaaaaagaattagagtccacctaaacatatacaaaattcagtattatatagtatatttaataaaaatagatatgtgcgtttcagttacaacatatatatgtgttccctaggagtgaaaagatgtcttttgaattgattttcataataattctacgacatagggaattgaaaatttgtagtggcatcaaccgataaactgacttttatataatctaacgtaaattggttaaacacagagagcatctttacactttttttttttttttaaaccaaataaattaacaatgaccagtattgtcggaaaaaataaaactatccattaaaattaagatgcagaaacccccaaaactaaacctagggacagaacatattatatatatgtcaaagggggattattaaaactcaagaacaaatcgatggccaaagtcatgcatgtggcatcattatggacagaagttacacaaaactctcaaacatacatcaatggattgtaaaacgttaatgatgacacgtggaagaagctcgtgaggtgagacccactatagtcattatattttgggatactgattttgcagtgagccttgtgatgcaaaacagaaagcatcacatgatcgttagtatgtacagtcgcagaatgtctaatgaattaaaatgcatttatttattttttaagtgatcatttgaaatttaaacgtgtttgacgtaaaacatcctagttgtgactaaagacaaaaacacaaaacaaaaataaagtgatagttttgcataaataatcgatttcttttgttggaataacacgatagacatacaaaagtggagtcaatgggtcgaaaaatggacgtgaagccataaacgatggccatcaaaacataaaatagttgcgttaaactaaatctaaacgaatgtgatgaagcattattgatgggttacactatacatgaaagatcataaaactaacggtgttggttcgtaaagtgcacgtgaaaatgaatgtatacccttatttatatttcaacgattgaattttcaattactatttaccaaccaatttaactcaccacctattatgaccatgtggcgaggaccagctctataagctaaaagtcagagtcaaccaattaaagtgcctctaatttcaatatctcaaaatccctacgcatagcaatagacataccgtatgtgacatacctattaacgtatatatatatatagctaggctatttacatatcacaagctggaagataaattaatttcatctgatatgttgttttatatcaacaagttttatctaatctattatagagacctagatttttttttttttttaatctattatagagaccaaaaaccgtgatgccatgcttcattttgtttgtaatggtgatatagtaagtaaaaaaaaactccaaatataaagcgaattttgttttgtttttagtgacataatgcgttttgtttttatcatagttatgtttaatttactagcattattaatcggtaacggtcacaaataaagagatggtggtaactaggtaaattatatttggtgaaatactatatgacaaaaaaaaaaggttaatacatagtagtatttgataagagggacattttggtaaatatctcaaaatattggtcagtttattaaataggaactagagagacggttaagaagtcgttctgatttcgtctttcttctctgtaaagtcgtttctctctccaatttttttgttttcctgcgaaaatcaaagagactaacacagagagcttattcaattttctttcgatctgtgaaatctcagattttgatttggaaagttgtggagatttcagctgttcttctttgttgttgggtctatttctgggtttcttcgagctgatttatagagtttggttctccgatgatagagctaatctgcttgagatagctactgtattgagagttcttctgaggatctttatttttctttacatcttgtgaggaaa

SEQ ID NO: 8238 - DNA, 3000 bp, Unknown; identical to SEQ ID NO: 8223
  misc_feature (1)..( 3000): cDNA_ID_1810839_gDNA_ID_1621201_Annot_ID_57676 3000 nt of promoter + ATG

SEQ ID NO: 8239 - DNA, 3000 bp, Unknown; identical to SEQ ID NO: 8222
  misc_feature (1)..( 3000): cDNA_ID_1810825_gDNA_ID_1621201_Annot_ID_57680 3000 nt of promoter + ATG

SEQ ID NO: 8240 - DNA, 3000 bp, Unknown
  misc_feature (1)..( 3000): cDNA_ID_1811021_gDNA_ID_1621202_Annot_ID_57683 3000 nt of promoter + ATG
tccttacccacaaacgattcatagtaacgtcaggctcattatccacagaataatcacaccaatgtcatcactatctaaattagaaaatgtaatatcaaacaaaattggggaatcgaaattggttaaattaacagaatttgcactggtctgattatttatactctgattattaatataacacagaaaagcattactctttttcttacacgcgtttatgttttcaaaaagaaatatttatccgattacaacaattatatggagtcataacactgtaaacaatttgtacaccacatttttagaaaataaaaatttaacttgattacaacgtggaaaagtcaacactttccgagctttccttttataaaaggaggacggaagactcgccgtctcaaatgcttccacaaaacaaaacaaaacaaacaagaaatcccaacaaacaaacaaacaaaaaaagagagaaaaagaaaaaagagaggtgaaaactcgtgcaacatggcagaaccaactcagccgcttctgaccgattccaactcgtcatcaccgagatctctcgacgacacaatcgagagttacattggaagctttgggtgggctcagtttcttcaagcggctttagtctcattctccggtgttttcgacgctcaacaaactttcatctctgtgtttacagactccgaacccacgtggcactgcaccgactcgaactcgatctgccatgaatccatctccaacatctgtatcctccccaaaaccgcatggtcttgggattactctcctcacgtctctgttatatccgaatggggtctccaatgcgccggctctttcgtcaagggcttaccggagagttctttcttcgtcggatgtttaatcggaggtttggttctctcaacacttgctgattcttccttgggtcgtaaaaacatgttgtttctgtcctgtctcgttatggcgatatcaacgatgctaacggttttctcaccaaacatttgggtttacgctgttcttcgattcgttaatggatttggtcgagcgacgatagggacatgtgcgctcgttctttcgacggaattagttgggaagaaatggcgaggacgagtagggataatgagtttcttcggattcatgcttggctttttgtctcttcctttgatggcttacatgaacagaggaagttcttggaggattctctacgcatggacttcgattccaacgataatatactgcgttcttgttcggtttttcgtttgtgagtctccaaggtggcttttcgttagaggccgtagagaagaagctatttcgattctcaaaagggttgcttcgattccgtctactgatgtaagcagtggtggtgcaatatctatgagtttttcgagcttaccttttgaagaagatgaagagaagcctagtactaatgttaacatcttcacgaccatgaaggtgttggtagagaaaagatgggcgcttaagagattatccgcggtaatggccattgcgttcgggattggtttggtctattacgggatgcctttagcgttatcgaatcttgatttcaacatctatttaagtgcagcgtttaatgcgttgatggatttaccagcgaacctcatcacgcttttcctagtcgataaactcagtaggagaaacgcgcttatcggatttacggctttaggtggagtctctagcgttctcatatttgcgttacataatatgagaattggaaaccacggggcgttacagttggcgttagagctaatctcttactttagcgcgtgttcggcttttaacatggagatgatatacacgatcgagctgtttccgacatgtgtgagaaactcggctatcgcaatggctagacaggctttggtgcttggtggagttttcagccctattatggtagcagctggtcggaaaaacgcgttctggtcgttcggattgtttggtcttgctataggtttgttgggattgtttgcagttggattgccagagactagagggagtgatctatgtgacactatggacgaggaagagtgcaaagaccggcggagtaaagtcgccgttaataatgtcattgcatgaaatggtgaagaatttgaaaacacatgtgaaattaatgtagatttaatttagtatttatcacttgattacattaagacttaccacatatctttttttttggttagttgaaaagtgtttctaagaatgagccatcaaagcaccactctgatgaaacaatctcattttacagtttacacctataacacatggatttcttgaataacaaaataattcaaatttgtctcgtttggatattgatgccgatggttaaacgtttggctgtttgatttttgttagagataattgtgtttctgttctaattttcacacgttgtgtgaaaatgaatcgttccaatcccaagaaagtatattcattggggttgttggtagttggctgtttggtaattgaatgggaagaacaaaccagacagaaatttgtacacttcttggtagatatgtttaaaaggtttaatttacaaataggcccatctatcagcccttttgtaacccttttaggcccaactaagtggtctcaaagttcacaaacccaaaacttatgtggatttattattttaagcccacacaaactaacgaacggtgagctggcaagtcacgtgatgacacgtgatccatcaacccatcacttaccattaccccaaccggtacggaagtggttttgtatcttcctacttcgactcctcttgggtaattataattagttttagatgaaccaaacaatcccaaaataatattagaaaaagggaagaaaatctgaaaccaaaaaaaacgagaagggagtcgaagaagaacctttcgcgctctgacgaaattcattacttacactggatttatactttttttgtcttcctctctcaattatctccttcaacgccacaagatcctaaggcctctcacggatctctcttaagatcaatcgccgcggctc

SEQ ID NO: 8241 - DNA, 3000 bp, Unknown
  misc_feature (1)..( 3000): cDNA_ID_1841710_gDNA_ID_1621202_Annot_ID_57684 3000 nt of promoter + ATG
ggtctatgcaggcgcgagcaatggttctcttgcggataacggtattttgattagtggttgccaaacagatcaaacttctgcagacgcgagtcctcaaggtcatcctgaaatggcttatggagcattcaccaatgctgtgcagatcatacttgaggagacaaagggtatgattacatacaaagaacttgttttgaaggcaaggaagcttcttaagaaacaaggcttttctcaacgaccaggactatattgcagtgatagttttgtgaatgctccgtttatttgttaaggattgtattttggttcaaaagctttcttgttgaataagttatgtgacttgttgtttgatgtttttttttttttttttcggtttagttacaactgtgtttaaaatttcacatttgaactacagtaaaacctctataaattaataatgttgggaccgagaaaatttattaatttagagaagtattaatttatcgataaattaataattattaatttattaatttatagaaagattaataattattaatttatagaaagattttacaaattttgtaatttttagaaaaattcgatataaaagtagttttttctttataatcaataattttttctaaaactaattagaagcaaaaaacaattattaagtttaaaaaataataaaaagttttttcgatgtaataaaaattttagaattaaactctaaaaataattaactgaaatgaaagaaaaaataatactagagtcatattttaataaatcttttacatataatattgatatatatatatatatatatgtatatattggtaaatttacataattattaatttataatattgatgggactatatatttatataggattttcaaaaaagttattatcttattaatttattgatttgtatcaatttttacattggtccgaactcgggaccggaataatttattaatttatagaggttattaatttatcgagtattaatttatggaggttttactgtagtttgaaaaagaaaaaaaatatatatattcacaacatttagtgtgaaatttacatggatttagttaaaaataattaattctttccttaagtttaagttttaaagtgaaaatcattattattttttaaaaatgagttgaagtttcaaatccatattacgtgaaaatatctccgaacttcgaacacctcaaagcttacagaccaacttagtacgggatgcgtaggcgtggttagttttcgacgtttttaaaatataacacttagactaatttttaaaaattaataatgaaattaacatggttttagtttaaaattataaattatttccttaaagtttaaattttaaattggttttaatttctaagtgaaaatcattattattattttaaaatgagttgaagtgtcaaatctatattacgtgaaaacatccccgaacttcgaacaccacaaagcttacgaaccaattaatgacgggatgcataggcgcggttagtttcgacgatttcaaaatttaacacttcaactaatttttaaaaataataatgaaattaatattattttcttaaactttaaaatgtaatttagtgataatcactattatttctaaaactaaattgatagttgaactaatttttaacaaataaaaaggaagaaaataaaaataagaaatgaaaaaaggaataccttgttggtagcaaagaaggcccatacagccaaccccattccaaagtcaaacgtgagcccaccgttcttctgtacctccaccacttgcacgagatccaatttgacgaagaagattcattctttgtgacatcgacgaaacatgactctgatttttttgtttgtgtgatcttgttcatcctctctccctcgatctgatcggacagatttttgattgcaatgcgaagaagcaaacatgggcttcctctgttacttagggtttcataggagtattggcgttttgtttcgtcagggatcgatagattgattttcatcttaagagattctaaaatcaatttagtgtgagaccccttctcgattggaaacgatgatgaaggagacgtcattcattcaaccacgatgatgaactcgaactcaggggctttgcttcaatgttgattctgtataatcatcggcgatcatgcattataaatagaaatagatgataaattgtgtatcatcgacgaagaagaagaagaagaaggtgaacagagaattttgatttctcaagaatgaagaagaagaagagaatgcgtgagggttattttgatttctcaagaatgaagaagaagaggaagcgaatgtgtgagagtgtatttataagcaaacaaggttcttggtttattcccattttctcttaagcgtgtctttgcgatttgatatactttttattaatataaccgttggggatcatatttattaatctaaccgttgggattatagaggaaatttaaatttagatccggtttccatttttttgatgactttggtttgttttcctattactaattttgatttggttagctgagagcctgagactgagaggctttgttgatgacccttttgtcttggagatgacaatgagcatcaaacccaggcgtgttaattaaacggctccgtttacaagttgggccgaaattaggcctcttgttgggcttaaacctgattagtttttcttataaataacgtttttttttgttttggtaagaataataatgctcatttgtgagtcagtgactagtcgtcgtgcaataacgtgacaataaacaaaaaatcaaacaaatccaatgccacgtcagacaatacattccaattcgtggaaacgcgcatatcaatcaatgaaatgaatgaataaagaaataatcttagccaaaagtaaatataatatataagatcgatctcacttttggtcggaataagaagctattggatcgctgacagataatccgatcagattcagagagttttatcgatcagatcattttttctcaatg

SEQ ID NO: 8242 - DNA, 3000 bp, Unknown
  misc_feature (1)..( 3000): cDNA_ID_1810996_gDNA_ID_1621202_Annot_ID_57691 3000 nt of promoter + ATG
gtaaagaggtttgcaggctgttacatgctttgctcataaaattgaatcatagtctcagtggcactctagcttttcgaatgggtgacagagatgtattcttgtagctgtagtgccaggaaggaagaacttcttacatctgcttgaggattcagaggtatgacagattgctaaatcattctattctcttctttgttgtccacttttctagggtatcaaatttgttgtttggaactcaccttattggctgaattgcttgttccaggaagctactaaaagagcccaagaaaaagcttttgaacgcatccggattctcgaagaagattttgcgaaggctaggtatatttatcatcctcttgtcttttgtctttcatttcttactgggcaagtgattatttttgtgcaaaaagttttgtttgataaactagggtacctctgggtatgtaacacattttctagttggatagtcaagttgagagctaggacccagactatactagcgaaggaaataaagtgtggaaagcgtagtatctagtgtgaaacgtgtttgcagatgcaggtggattgctgaaaatactaatctgagcttatgtgtttgcaatcccagtgtcgatgtcctatagaagttataatcgtacgtcttgatacatagagaaacaacatgaaaaactggattgtatcttatgcagcatatccatgaaacgtaaactgtagttattgatttttgtcattgtttcctgtaaatttattttactgaacattataaactgcgttgttttcatctttcccctttggatttttaggagtgaagtaattgcaataaggtctgaacgggataagttggcgatggaggcaaattttgctagggaaaaattagagggcatcatgaaagaatctgaacgcaaggtgatttttatcacaaattcatatcatcagaagcttgtggtttcttcaaaattttcaccttatctctgtttatcttagagagaagaaatgaatagcgttttggcaagaaacatagagttctcacagctaatcattgaccaccagaggaaattgcgcgagagctccgagtctctgcacgcagcggaagagatctccagaaaattatctatggaggtagtataccatcacccgttaagtttatgattttttttgctttaatactaacagtcatctataggtctcagttctaaaacaagaaaaagagctgttatcaaatgctgaaaaaagagcgtctgatgaagtctctgctctatctcaaagagtttaccgtcttcaggttggaaacatgagaggagtgcaatttgatcttaagctgtgcgtactctttttttttttgctgacctgttgttctgcaggctaccttggatactgtacaaagtacagaggaagttcgtgaggtaagaaaacgacctttgatattagtttactaattctattctgcaataccgattaaaaatgttataactttatcaaaatactcaggaaacaagagctgccgagagaaggaaacaagaggagcatattaagcaacttcaggtctatataatatttgataagtctttcaaaattattatgtaagaagagtagaagttaaccgatgtgttggatgggttgtcacagagagaatgggctgaagccaaaaaagaattgcaagaagaaaggagcaatgcacgggattttacttcggaccggaatcaaactttgaacaatgctgtaatgcaggtagaagaaatgggaaaagaattggctaatgccttgaaggctgtctcagtggcagagtccagggcttctgtcgctgaggtactgtttcaagtctattttacctttcttaataacttagaccatgaatacatgaaccaattccatactgcatcgaggtggtgcgcatcaccagcatctttcagtgtttactctgtccgtctcctaggttgcataccctaattgctttcccaggtcgacattaaattcccattttctggtgctacttttgcgaagtgagtctttgcatgtggtttggcaattggttttacgacttgtgaataggcccaaaccaatttctggaaaatcactacatcgtcaatccactagatttttcagctgtttgccgtccattcacatattggcatatgatcatttttgcctgtttactattattgactattactttacatgtgtaaaattaggctagactttctgatttggagaagaagatacgatcttcagatcctaaggtaaatgttttgatttttctaatcattgaattgtggtgtttacttctaacagcaaagtcctggatggaatttgctattgcgagtttgtaacgattttcattttttcacttttagactcttgatatggatagtggtggaattgtctctctttcggataaggaggtcagtgaagtccttcatttttttttcccgcaattttaaattctgacatggggatttaagttccgtaattatggtattgtttgaaatttcctggttgcaatctatctgtaaaaggctgctcttgttattattctggatgttgtacataagattcaggcaggatttaggataggatctgcagtacgtattactgagttagttgaatttgatcatgtagagttaaggctttcgcataagctattgtttgagttaccttttacttgttgctatatggcaatccaatatttggttgtgtaaggtagtctgttaatctttttttttgctgtggtgattatttactctagatgtccatcgaactgcgtaccgcaaaggaagaaattgaaaaattgaggggagaagtagaatctagtaaaagccacatgctccaggtacttcctgaattggctaagttagtttcgatttcaacatgactattaattgaccttgtgaaccatcatgcagtacaagagtatagctcaggtgaatgaaactgcattaaagcagatggagtctgctcatgagaacttcagacttgaggtatttgtgattatgtttggatgaaaca

SEQ ID NO: 8243 - DNA, 3000 bp, Unknown
  misc_feature (1)..( 3000): cDNA_ID_1810992_gDNA_ID_1621202_Annot_ID_57692 3000 nt of promoter + ATG
aggtcccaaattgaagcaatgaatatccaaatgtccactttgaagaatgacctggagactgaacatgagaaatggcgtgttgctcagagaaattatgaaagacaggttggttaaagctctctatttcaagaaacattttgaccatcatgcatattcacgttgacgttggtttttattatatgatgctagaaactgactagattttattacccatcctgttgatccatttcatgaaactgttgttttctgaatactctattttactgcacctttgtcatatatccgaggatatcttcaaatattttctgaattgtgttttacattacattaaatcattgttaggtttttcataacttaaggtcttactgccatcagctaattctgttcttctctctttccatagatattacaactatcactctttttgtttcctacttctttttggagtgcaggttattctgctgtctgaaactattcaggagcttacgaaaacatcacaagccttagcagcccttcaagaggaggcatctgaactacgtaaattggctgatgcacggggaattgaaaatgtaacttctacttgtacacaactttttgtgattcaattcttcctacaattatagttgattcgtgaaacatcaatttctattttcttggtgtttatcagtctgagcttaatgccaagtggagtgaagagaaattgatgctagagcagcaaaagaatctggctgagaaaaagtatcatgaacttaatgaacaggtggccactgctctctgatctcttacgttgtagcttttatttgagcagccttattatttagtgtgttcaggatagtctttgacgatagtctttttccaattctttatgggtcaataatgcttaatcctccatgtgaatttgtgtagactttaattcatggtcatgttacaagtactcacgtatcttaattgatctctacatcagaacaaattactccatagcagacttgaagctaagcatcttaactcggctgagaagaacagccgttctggcacaatatcatctggaagcactgactcggatcaccttgaagattcgggtttgcaaagagtagttcattatctacgcagaaccaaggaaatagtaagagaacttcctttgcaggattgcttttcctttctttatgccccttctttgtactgtggggttatctaagtcatgtgcatcctttttgacaggctgaaacagagatctcactaatgagacaggagaaacttcggttgcagtcgcaagtgagttgttgtctcctctcttatgcctaatttgctacgacatcccttttaagcgacaacctttctcaatacacacatgcaaagcgaaaacctcctctattattcagagttgtggctgcggtatgatttttttttttgcaatttgtttgtctagcttgagagtgcattgaagatggcagaatctgcccggggttcacttactgctgagcgcgccagtacgagagcctcattattgaccgacgatggaatcaaatctcttcagcttcaggtaaagttgggtgattcgatatctgataacatatgaactaatgatctaattagtctttgtattggttgggttgaaacaattttcatttgctgactttaaattctccttgcaggttagtgagatgaacttgctccgtgaaagcaacatgcaactcagggaggaaaacaaacacaattttgagaagtgtcaggtttgtatggaacctttctttatgtctctcaaatgaccaaaccacattacaccacctgattttgttagctgtcttagagaaagctgataaaaaatttaaaacatcaggaaatgcgtgaggtagctcaaaaggctaggatggaatctgaaaatttcgaaaatctattaaagacaaagcaaacagagttggacttgtgtatgaaagagatggaaaagctaaggatggagacagatcttcacaaaaagagggttgatgaggtacgtcatatatgtatgggctcatacttacaattactttttgttactggttcatacttacaattacttgatgctttgtgaagttgcgggagacatacagaaacattgatattgctgactacaaccgcctcaaagatgaagtgcggcaattagaggtatgcttataaagataatatgacgttgtctaaatttctgcaatagtgggtgttttccaagggtgtgcatggatatgatatccctaccctttcactatatttgttgtcgtgaaattagttacaatgttaatggagatgataccatgtctgctgaaggtggttagttcttgctccttgatccctactggttaaagaacataaggtgctttatctatttgatattgggatggtcaatgaaccatgtgtgggatgccctttgagagagcctctttgtctcctagtttgggactactccctatcttgtaacctactctttaaatttcctccatctcgctggaacaccccaactatatgttgatttccacagttgcattattgatcattaatcgcatatagaattctagtgtacggtaattctcaattttgctgatgagaatttttggtgaagtcttagtgatatttgttaatattgtgtcattttggtttcgataatttgttgaatttgaattctgggcgtcccactggtctttagccctgcttttcctctaagttcttatatcaattgtgacgccatgatatggtttttaggagaaactgaaagcaaaagatgctcatgctgaagattgtaagaaagttctgttagagaagcagaataagatatctcttttggagaaggagctaactaactgcaaaaaagatctgagtgagagggagaagaggctagatgatgctcagcaagcacaggtagaatgagaattgagaactatctcgctgagttcattttagcttttacatgttgaagaagtactatcctatgtagatatattcatctgtctctgttacttattgtaggctact

SEQ ID NO: 8244 - DNA, 3000 bp, Unknown
  misc_feature (1)..( 3000): cDNA_ID_2992432_gDNA_ID_1621202_Annot_ID_57693 3000 nt of promoter + ATG
caagaccagatggttctattgaagtcgtcattgctcagagcacaggtctcgtcgaagtccaggttaacataatccaaatttccattagatccgtgtttaccataagcttccaaaatcattacttatgttttgctgaatctctgatcacagaaaggaacatacaatgtagatgaacaatcaatcaaactcaaaagtgatcttgtgggaaacgcttcaaaggtttcagattaattctctttgttattatttattcaatgtctctgtctctacacacaacatttttgtgtttctaattggtgatttatggggttttttttctccaacaggtgaaggagataagtagagaatttgaattggttgatggaaaactatcgtatgtggttcgtatgagtacaaccactaaccctcttcaaccacatctcaaagcaatactcgataagctttgaatccaagttcctgtgaaatcgaaacctgacacgaccgatgtgatattgagatgctttgattttgatatgtagaatcactctgtttagtaacaacatttgatactctttgtaagattttggttaccaaagtgttttgttatgttttgttcttgtaagcacaagtaagaagaagatgacaatttgagagttaaatgggcttttattaaaagaggtaaataggcccattggcgcctatatacgttcaattttagcatctgacgcctcaatattaatgatattctaattgactacaatagctttcaataattacaagattgtccccatatttattttctttttatactattgcatacacattttagaaattatgagatgagcaccgaagttattatcgaagcaaagtcaacaaattgaagtaagattaattctctacaattatataagatttggtttaataattgtaagatgcaatcttataaacttaattagacatacgtaatcacatataacaacagaaattttaatacaaaaaaaaaaataaaagacggaaaagaaaacaaaagaaagaaaatcatatagatgtgaagcagacacgtttaggccacggcaatgacaaaacgtggcaccttgtaattctcttaagctccataattttggcttattgtattaaatagttccatatggtgtttcttatttttttttggcctatttggctttttatgtggtgttgacaattataacttgatccctaagcaatatctactttggatataatacaaatggagcaaaaacacaacactttcatttttgaagaaaattatgtaaggtgattgtgtgtttattagtagtcccaatctaatagagagaaattaaattctaggagtgatcattttctaggatagttaaaacttatggatgactttcatatgagtttagatctggattttggtggggggacataagaaatatagatgcatatgtaagtgtacacaaatgaatgggccacttgacacctaatgatacaaattttcaaagaaaactcagattgcaataatggaagcatatcaatagtagtatgagatctcaatctacaatcttcaataacatttaaaaaataaaatccaacaacaactgtagcgtataggaattgttcatctcttttcatcaaagaatatttaaaattttgttagacaagaattaattaatgatttatatggttgagaaaactttttaaaaagttgtaaaactcatcgaataataaatcatttttaatggaaaatatagtttttatttttattgtgtggtattgctcggactcaaggatacatggagagagaggcagagtcaaatccaatttttcaactatcttatatgatattcttctgtgctttttatagtttgcccgaccataagaactggtcctaactttcattttttttgtttccatagaatatgtattcctatgatttttttttatagaattaattgtgttagttaatgccaaattaagattctcttttttaaaatcactttttgaagaagcacttacaagagagttgtgttaagaatagattccagatggaaaagttggcaagaaaagatgttttaagtttttgccttgtcgtctaatccaacggtcgatcttcgttcatatcaagaatccttatgacgtggaccattctcttccctccatctgtacctcttcccaacctctattttttaatttacatcgaaaataaataagaaggattgcaaaagaaaaaatagaaaaaaaactctctgttcttctttcttcttcttcttcgtcgtaagccattaccatttcttctccctctctctgtttttctttgttgcgtatctgtacttagttttcaaacataaaaataaaacatatctttagctgatgttgtcttcttcttgataaacagattttctacagctttttttctttctaatttaataattcttgagactttttaaaaccctctgcgaaacagatgattcgagttttggtttcttcatctgtgttttgattttttcgtcttttattcttagtcaaacacataaatttcttttactactcttcgtagatgacttctcatgttccaaaacatcctcgtaaatgtactctttctctctttctttcctacacacacgtgtttaatctgtgttgttcttacacgtctttttaacttttgcgtttgaccttttatctgaatcctgtgtttgtgtgtctgtaaatatatatatgtgtgtctatgtgtatagtgctctgtttcttgtgattagactcatatgtcttattttcaatattaactataaatatataagtcacgcctagttattagtttttatcggtacgactaaatattcagacatcagttcacgtttcaaacctgtctcttcacatagttaagaaaataaaggcatcaaaaagattactagtaatgtttgtgtctactttatacatacatatgtcttgtttctttgtgtttttcagaatctgatctcttcgggaacgtttgtttaatttgtttcagcctttgaagatatg

SEQ ID NO: 8245 - DNA, 3000 bp, Unknown
  misc_feature (1)..( 3000): cDNA_ID_1810985_gDNA_ID_1621202_Annot_ID_57695 3000 nt of promoter + ATG
ttttattttttaaatgttattgaagattgtagattgagatctcatactactattgatatgcttccattattgcaatctgagttttctttgaaaatttgtatcattaggtgtcaagtggcccattcatttgtgtacacttacatatgcatctatatttcttatgtccccccaccaaaatccagatctaaactcatatgaaagtcatccataagttttaactatcctagaaaatgatcactcctagaatttaatttctctctattagattgggactactaataaacacacaatcaccttacataattttcttcaaaaatgaaagtgttgtgtttttgctccatttgtattatatccaaagtagatattgcttagggatcaagttataattgtcaacaccacataaaaagccaaataggccaaaaaaaaataagaaacaccatatggaactatttaatacaataagccaaaattatggagcttaagagaattacaaggtgccacgttttgtcattgccgtggcctaaacgtgtctgcttcacatctatatgattttctttcttttgttttcttttccgtcttttatttttttttttgtattaaaatttctgttgttatatgtgattacgtatgtctaattaagtttataagattgcatcttacaattattaaaccaaatcttatataattgtagagaattaatcttacttcaatttgttgactttgcttcgataataacttcggtgctcatctcataatttctaaaatgtgtatgcaatagtataaaaagaaaataaatatggggacaatcttgtaattattgaaagctattgtagtcaattagaatatcattaatattgaggcgtcagatgctaaaattgaacgtatataggcgccaatgggcctatttacctcttttaataaaagcccatttaactctcaaattgtcatcttcttcttacttgtgcttacaagaacaaaacataacaaaacactttggtaaccaaaatcttacaaagagtatcaaatgttgttactaaacagagtgattctacatatcaaaatcaaagcatctcaatatcacatcggtcgtgtcaggtttcgatttcacaggaacttggattcaaagcttatcgagtattgctttgagatgtggttgaagagggttagtggttgtactcatacgaaccacatacgatagttttccatcaaccaattcaaattctctacttatctccttcacctgttggagaaaaaaaaccccataaatcaccaattagaaacacaaaaatgttgtgtgtagagacagagacattgaataaataataacaaagagaattaatctgaaacctttgaagcgtttcccacaagatcacttttgagtttgattgattgttcatctacattgtatgttcctttctgtgatcagagattcagcaaaacataagtaatgattttggaagcttatggtaaacacggatctaatggaaatttggattatgttaacctggacttcgacgagacctgtgctctgagcaatgacgacttcaatagaaccatctggtcttggacgaaagtaaccactctcggcgtgcatcggagctcctgattccaatttccatgtcttttgcgtatacgctatcaccggctacacaaagtgacagagtaagcgtatcgcgattttggtatgcagattggattaaggttaaaaatgaatcggagatctgatatggttaccttgccggaatgtgagaaacggatctcttcgccgtagcggaaagacggtatagtaggatattcaccttctccttgtcctctccatgttcctaatagatacgacaacggcgctacaaaagggtgcaccggcggcgattcccctgggttttggagttgctgcagctgattcatcgccggtattagcaattttctctggacagatgatacatacatacatacacgtgataattggtaaatatgctaaagcaggctacaggcccaataatagtaggctatgttctgggccattgggcctacattatattataaaaaaaaaacataaatcgatgtatgttcaattaatggtcgatctctaacaaatttaaaagttgaacttaacataaagtggattcgttgaaaaacagtaaatatattgtggactcaaaataaaaacagatagaggttttctaagattagtattttatgggtaattatgtttatgttctactatctaaacgatactgtattatgttgtgaaaatatatatttttattcaaggtttctatttatgaaagcattgatattataccaattgatatagtttttggaagatgtattgatagtcaattatttttgtcgggtgaagaaaaatatacatagaaagaaaagagataattaaggggacatcacaattttctttgtcttgaatgaaattcagaccatttcctccctccacttctccactttctttggaactcataagatactttttctccatccatttcttttcctctcttttcttaattaatcactgtccttttgtctctattttccacctgctttcttcatttcaagacaaactcctatgttcaccaaaaaaacaaaatattgaacaaaaaaaagaaacacacacattaatataaaaaaaactaatcaataagctatagaagattgttttctcttcttgctcaaaatcctttatggcatccgaaaacttcagacgtggaaggtaaaaatgctgcaatcttttgctccatatcttttaatttttctctgccaaaaaacagtaaatatacatgcgtacgtacctcgacgtgcagaccaatccttttgctagattctattcacaagacatgaggaagggctttaacattcgtgacaccaagtaatgtcctcatatggatgataaatgaactcaacccatattgacccttttttcacataaaaataaagctttaatctttctacattgaaacaggtttctctgatttgggagactcgctggcg

SEQ ID NO: 8246 - DNA, 3000 bp, Unknown
  misc_feature (1)..( 3000): cDNA_ID_1810979_gDNA_ID_1621202_Annot_ID_57699 3000 nt of promoter + ATG
aatcatatacagagaggcgaaactgagcaattcacataaaacttcactacctaatttatgattacaaaactcataagtccaatttcaaactttgataagaaaagcatcgattgacatagacctcatcaacaattaagcaattctctatagtctattcaacatttcaaaagctcgaaaacccagtagaaccactgtcaaatcatagaaacaatccaaacgctcgaaatcaatccagacactctcaaacccagaagctaacgagtggtcaaacgaatggctaattgagaacagatcgcgaatcagatatcgacttacactgagaaaggtggctggattaaagatcttttgcggaagagaaggagtaatcagtcggtgactagcagccaagaaagttctggagaaaagggtcgaggccatatccacctcaaatattctctcgataaaatgcaacagagatgatgggttgagttagaaagacgccaaaactatttgctgtcagattgattctcttcaagtactaaacccaaaaaggttgcaactttgcaaacgtttttatcaataaagaggattttgtcactgccgccacgaacgggtctggaagagagacacgtctagggcgtctttggcgtttcgtttcaccaaacgtgcttcttcgcgttttgtgttttgatatttttctattccggtttaactaatctgatctaaaccaaaacatgaaccgattcaaaagtatccattgataaagctggaaaattctacacaatgttacatctttaatgaacatatccaaagaaacaaaagatgaaaaagagattcaaaaggggaatcctttacggatgtatttcttggatttctcagctaaacgtttcatgtttttggatttctcgtaaaactccatcagctcggttgcaatatcttgtggatgacacattacataaaccttcaagaaccgtttctcgctcatccttaccgctctgaaaatgctcacttcttttatcaatggctttagacgcatttccaagactctcttaacgagatccgcacgaggttttagacgagactcgaggttgaggagaagcaaacaagggtgcttaaccacggaatgagctggaagtttcatcgaggctatgacgaaagtcatgtttctctgaactttctcaacagagagagagagaaggattgggcattttccatacaggtgccaaatctcttcttccgagaacccaaacttttccaagtttctaactttctcttcgattgtctccatcctcgagaccccgatgatgactgcaacatatttaaacatcttggattctctggtgactccagttttctcaatgtattcaaacttctcattgttaaagtttgttcttggaatcaacgtgggtcgcgatatcaacattgcgacaagatcctgttggctaaagcccaaccctttgtagtattctatcgcgggtttgatcttgtcatcgaggtcatacaacatgagtgacggattccggataatgactctgcgcaacacctcttttgaccccaaaatctccatgaagtagttgatcctttcatcaaggacaagacggcaactaaagaacctaggacgacagttaagaatcttcacaaggtctgaagacgtgattcccagtggcttaagaaggcttaacttaaactctaactgagcaacattggctctctgcaaagcaggcctacgagtaaaaagcttggatatttcatcatcatcacaaccccatcttcgtaaaacttgtaaaggactactagtaatatctctcactttctctttttcaccaacttctccaacataatcaaatttttttctcctagacgatagatcagaatcctcaatgcattcttcagattcattcaggcataacgtcgaacacctggtggtaaaggtagcagaaatgagatttctacaaccagcctttctgaccaagctcgaactagtaaacaataatctgataacagctaagaaatttctcttcccggtcgaatgcatttcaagggcgtaatcgagagtttaacaaactggagaaataaaggagcaaattttctctaagaatcaacaatggctctgcctcaacgacacaatcagcgacatttacacgcgtatttcagatgcttcttccatccaattttccgaaatagctagaaaaaatggaacaattaccagtacacgaagcttgtgatgaacgagcgaagaaacaaactccgaccaacggaggagagtttgtcagagaagaaggaggcgatggagagagacacagccaattcggaccaggtttgagtccgagtcgggcgtggaagcgagagagagtaggggactaggggtagtaaataaataatgtggttcaaactgaaaagagatataaaatattggactattatgtaagatacagtaactgtgaagttgttaaaacgccgccgttttggtttttttgtttctctcgttttctggcgtcagactctcaccctttgtgcaagaaaccttgagagcttaaaaattcttcacttgggtctcttctctctctcttctcttgcgaccattccgttcgatccatatatcaaaggtatgttgctttgattgaatgggtttcttttgttgaatttaaattgataactttaaatatattgaatttggggtttaagaaaagttttcaattttcgtctctgagtttgagctaagagctgatctttgagtttgagtttgtgtttgatttgattcactcacaattcttaattagggttggtatatcttgtctttttcatcgttttccttacacattgcccatggcgatgagactcttccgggtttttaagctttgtcagatttgaacgcttcagtctacttacttgctcagacgtggtttcttttcatttaagtttgaacattgttgatgaagaacagatttagcttccacgtttctaaatttccagagatgacactatttcgcattttttgcagcttgatttagttggttttca

SEQ ID NO: 8247 - DNA, 3000 bp, Unknown
  misc_feature (1)..( 3000): cDNA_ID_2993610_gDNA_ID_1621202_Annot_ID_57700 3000 nt of promoter + ATG
tggagtgactgcgtacttagtaaaacagcattattagtgagagttcatttttctcgtgttacactgtatctacatgatgatcacgggactatctattattcaaaagttggtaattatacactgagcctgattacagaagactcgcagacaaaaactaatataatcaattcctcctatgtataccttaagctaattcttaattaacaagttgcagatttacaatcttattttagtcaaaacactacctaatattttgccactttataactatatattcttactcctccaaagtatttttattaagaaatacataaaactcttatcattaccgctgtaaattcctaagaccatttcaattaacactcgtcgacatgtagtagtttcttacattagcgaaatttatttcagacaattttataagatatgtcaaatctgataatatttttaacacgagatgctagtttccattattacttgatgtcaaaaaagaagaaaatattatttaaggattttggtttctaaaaacgaatgtgaaatattcatgcatcggtgttagaaggaaagataagttgcatgcatcataaggatgccaaatgaagtaaaaatgagaaaatggaatcataccaaataatcaaccataccacagacagacaaccttttcccactcaacaaatctgatttgacatttatcaattcctctgtttacatattcatcttttctcatgtcaagatcacacactcttacctctcatatatataaaacagaaccaaattatctttggtaaaagtgaatctcatcaggaactgagtgatataaagttatatatatagaggagagagggagtgagagggagtgagagagagagaatggggaagggaagagcaccttgttgtgacaagaccaaagtgaagagaggtccatggagcccagaagaagacattaaactcatctctttcattcaaaagtttggtcatgagaactggagatctctccccaaacaatctggtatgtcattgcttttgtcatcacaatcaaagcaaaagcctcttcaattgttttttcttttctttatgattctgaatgtatatatatgcaaaaatgaagggctattgaggtgtgggaagagttgtcgtctaaggtggattaactatcttaggccagatctgaagcgtggcaacttcacttcagaggaggaagaaacaatcattaagcttcaccacaactatgggaacaagtaaatcatcagctaggattattattgtgctcatacatatatggtggatcaaaaaagtgatttgatattgacattaagctttctgcattttgatcaggtggtcgaaaatcgcttctcaacttccaggtagaacagataacgagatcaagaatgtgtggcacactcatctaaagaaaagactggctcagagctcaggaactgcagatgaaccggcctcgccttgttcgagtgattctgtttctcgtgggaaagatgataagtcatctcacgtagaagattctttgaacagagagactaatcataggaatgagttgtctacatctatgtcttctgggggttccaaccaacaagatgatccaaagatagacgaactcaggtttgagtatatagaagaagcttatagcgagtttaacgacattattattcaagaggtagacaaacccgatctgctggagataccatttgattcagatcctgacatttggagtttcttagatacttcaaactcatttcaacaatccactgcaaatgagaacagctcaggctcaagagcaacaacagaagaagagtctgatgaggatgaggttaagaaatggttcaagcacctagaaagcgaactcgggttagaagaagacgataatcaacaacaatacaaagaagaagaatcatcatcatcatcactcttgaagaactacgagctcatgatacattgataaaagatatttattttggatatcaatatgacaatatgtatgatggaaaggtagagagatagtagagaaaatgtatttcctatagttttttaattggcattatttttagtagcctgtagataaaacagagctggtcaaaagatgcacactatactaaaagtctaaaactatatatctggaagattctttctttagtcttagagaatcttgaagaaaattattgaagaatatttggtaggattagtttagtaatctcaatcatctaacaaccatcttgaaactggaaacgacaaaacatgaagaccagttactcttgtttggagatatattaacctcaacagctattttttttgctgaagaagaagtaacaataactatgaacttatcaacgaattaaggcaagcaactgaattagaagaagctaatctcaacaatgttgcatctccgaatgttttcttgaatttcattggagatagacaaaaagttggaagcttaatatagatagatctcagttttgtcttccatggcttctgataaatcttagttttcttgaaattgaagaaatattatatgatcttgataagaatatataggtaacttgaagaagaaattaacttctactttcaacttctttatcactggttcaagtgaaggaaaattgagtcaaattgggttgggatacccattttaacactccggtttatagtttgaaagtttaaaccgattggtttaatttgattcgaaagaatctggttcttataactattaaatataatgtcggttcatttgtacgatactttacaaaatatgaggtttcgtttgcaattctatatagattatcaggtttattttgcatttattcctaaaaccctaaaggggaaatcttcccggtctttattcgagacgacgacgacctataaaggccaatagcaatggatcgggtcaattaatctcgggtcgggtcatttctttttcaatttcgcggttctatctctctctgtttgctgactcgagattttcgagtttggtgggataattgatcggattcaatg

SEQ ID NO: 8248 - DNA, 3000 bp, Unknown
  misc_feature (1)..( 3000): cDNA_ID_1810966_gDNA_ID_1621202_Annot_ID_57704 3000 nt of promoter + ATG
aaaaacgaacatttaatcgtataatatttaatactagtagtaatcaattgaattttttttaaaaaatactattatataacgtgccgcatttaattttgccccatagactttaaaacaatttctacatttcggcccttaaatattggctccgtctatataactctctctgcgtttacacatccccccattactctctctatctctcgatgattcttgatatggctgctgacgtcagctctctcgtacggttactaagcggttacaaagatgatcgagcggtggttaaagattctgccggagccaaatcctcggcggcgctgatgactcgtgaccttcttggaaacggcagaggaggaggaggcgatcggtctttagagcttgacctcgaccttcaagtccccaccggttatgaaaaacgcctcgacttgaaggttcgtgttgaattgatggatcctctttagtctttcctttagtggttttggctgattagatcgtatcattgttgttttttttaacagtcagggaaagtgtatttgcaacgatgcaattcaacgagctcgtcgtcaataacaaacgcagaccaaaccaatcaaacagtaccaacgtttcaggatttgaattttcctcctccgactttgaacaattctcctttgttgaacctcttcgacgatacaacgccggaactgaagctacttccgtcgtctcgttcttctcgtccgaacactagtaatttacagagtgtatgcacactggacaaggtgaaatcagctctagagagggcagagagagatcctgctatgttcaagaaacgtcaatcaccggatgatacggtttacgatcattataggacggaggctgtagcgtcaccggtggttgccggatgtcctggttgtttatcgtacgtgttggtgatgatgaataacccgaaatgtccgaggtgtgataccattgttcctttgcctacaaatcctatgaagaagaagcctaagattgatctcaacatatcaatctgaatgttttggagtttatattggaacatttttgtaaatgatagataacaattcagggggtttattttgtaaaacttaagaaagaagaaaaaattgatggtaaggaaggaagattagaaggatgttaatggtgttttttgtaaatgcgttagttgaacaacaacaagaattttatttagaaacatagtaattcacggaataaatgagtcaattaaatgacgacaattaatgttacaattatcttattttctacttttgaataaactcgtagtccatggttggttggaaggtagtttgaattcattgtatatgtccatctaaatgcactgtctttttatgaaaagaaaaaaactattattaatagtgttatttgtcaattttgttatatattttaaaaaactccttgataatgtttggcttgaaattgtatccaaatgcctctcttatctgagtggttatgatttcctgaaattgatgactactaattactaaatgaaatgaggaagttgtgtttgcatgcatgcatgatatcttcaacaaacatgtttctcaacccaattaaagataaattttcaatctctgtgtttggacaaaaattgattataagaaaaaggcaaaaataaatgtgacaactgtttaatttttttgaaggacattcaatgttgtaatttatgtgaggtttaactttttaaggtcattcaaagttatgctgacctaacttcaaatgcttaggtcaacagagcacacatattcacatactatacgaataactgcaagtctgcaactaacgtaataaatcgcggctattaaaatccgatatgcatgtagacatgtagtagtaaacttatcttattagtatttttttaaaatgtcaacgaggtaaggaaatgtagaaatgcaaatactcacgacgagcatatattacatggacgtaatttctccgatattatactacgaccgacgagtagatgagttagatttattacgatagaatttatactaacggtggacctgaaataataatatttcgtaggtagtatagtttttgcattaaacagttttgtatgtgtgtggcattaatacattactccggatgggatacgtatcgtatagattgtatggtttgatattcatctttatccataacaaaaaaaatctagctagtgtatatttttcgtacgttacaagtttcgaaaattaggtttacgtctataattatatgacaaacatattttaaatatctaagtctcatcttcaatggaaactagtcctaaactcctaagttgatgtacgattttttttctcgttaggtggatttcagattataggaaaatgatatagaaaaagaaataagaaaaaaagaagagaaatggagaaactcatcctaatagaaacgaattcaattaatgggatcgtgacctctaataaattgtaattaatgctcctgctacatttatgaactttggtcatttcctttacgaaaacaatgtaaattccacgtgtcaacttatttgccatctctccattaattgattttggcatatttgtttcatctcgtgcttttcaggaaaaccaccaaaacaaaataagacgagaaaaacgatatcgtatgaaaatgtgatttctcatagttacatgtaattataagtcatacgtatatccgaaaatgtgaacaattcattatttgtccatgtttttcattattgaagcacgtacgacaacgtttgaccagcacattttttggcccaatatgaatccccatagagagattcttttttggcccaattaaacagcggtataaataaatgggcctagcccatgttgtttttatttttatactattttattatttccaccctcttcacaaaaaccctaaaccctaatttgaagttgttcgattcgatatccttgtgtgtgtgtgcagacagttttcattttccaattccattactgcctcttctttgttgctggttctgagtcagtggtgata

SEQ ID NO: 8249 - DNA, 3000 bp, Unknown
  misc_feature (1)..( 3000): cDNA_ID_2992336_gDNA_ID_1621202_Annot_ID_57709 3000 nt of promoter + ATG
cgtttctatattaggcactgataaaagttgtgatatcagactggaaaacaccaattgcaaaaagatatctagtcaaaagacaaggcctaatgtgaaagtttcactgaatgcttttaagtttcaacaaagaagcatagcagatgaaggggttaaactcaatgttcctacactttactaaaccgggaccttctttttagatccccatgtgttcacacagtaaaatagcttgaccataaaacactatgagaagtatagtgattgtagaacagtcttactggtttgaactgtggctccttgatatcttcctaggagcctattagttgacactagctagaacgtcaacacataacacaacaagggcatctctttatttctttagctgaaaaggggtctgcaacaagccataacttatggggccttggggaactagagtaggaagatgaccttctacgctgccagttaaacatcttcccctgttcagaaccaaagaggagattacagttttaagttttaactataactgagtatgattacaatggacaaacactactcggtaaggagctacaatagcagaatttacatactagatcttggcaattcgataccaaaggccattaagtcatagttgactaaagtttattggagctggtagaccatacgtttctaaatcaaaataacacaaagcaggatcttggatcatacttatgaactaggagtctaatatgtaccgtagtagctgtgcaatcacaacagataatcaaatctaacactgacaaatatacaaaggtttaaccattacctgcggggtgatatcgaccttgaacgcgaacgagcatgctattgcctacaaattggttatcggccacgtctgcggtctgcggattggataccttcttcttggaagggacctgcatgtgtgcattcaagaaataatccatcaaatgaaaactaatacaatgtaggcagaacatctataaaattgaaacactaatgcattgagttgcatacactataaataaattgatctcatcctctaattactacaatgcagctctttaaacacaaatttatcgtcacctaagaggagaacgtcttagagcaggactgccacggatccttcgagggtaaccctccagctgacagataaaaggtgagacagtgaactgaaatggtattgaacctcagacgaggaaactgaaaccgttttggaggagaacggccgctagaagaggacactggcctgcgtatgggtgatccaccactcataggcagaggtgattatcatatttctcaatgtcagtaccaacattatcagattttaaagcatctccctttggatcacttgaaacatacaccatccatgtacagctgtggtttctcagcatcagctatttttgccttgaattcaacatatgcatctcctcttgaaagattagcctgttaatgtcaatcgaaattatgagtaaagtacttaggaaacaaatctgcaaaccagccaagagcaattgataagaaacttacagctcgatctatcgcaagttgaacatgaatgatttcaccaaaatcgcctgcacataaggaaaaaaggaacatcactgaaattggatttaagcgatataacaacattcgagcattgatttgacaatttaaatgtgtaattgtaatgagtccacttcgtataagataaccaaattaccaaatccaatctctaattaatcaaattggagaagaataagaagaagacgacgatgatcttgaactggagcgggagcgtgagcgggaaatagaccacgaaagactcgaatcttcgccatggccagattcagattctagcgcgcttgtaaggttaaccccagacccaaccctaacggctacctgtcgatttacacacaaacacacacgagtccgcacgtgacaagtcatgggttgggtaagttaactataatgaacgacaaataaataattaaacttactaaagcaaattatagtttgacaaaaatagtcttaattttcagattattagttggatatgcatagtttattcaacttttctcttaatatttttattacatgattttttttatttttggagatttatcagttttttttgttttaataatagtttttagataatttggaaaagcaatgatctctgcatcatcaatcataaaaattaaaaaaataaggcctcgtcgctatatcttctctctagggttcgctgttgctttttcatcttcttcttctccttctctgtttctctgctttcgtcacgaaagggcgatatgtattgtttctcagtaggaagctcgttactctgattcgattcgattctcaatcctttcatcaaaccgttttgggacttcggattttcatattaaggtagcgtatccgcttagggatccaattttctccgagaattgtctccttctacaatctgattctcctcgatttttccagttttcaaagcagtcaattagggtttgtagactaattcggatttggagacggtagcggttatggacgcttttggaatcgggagtagtttaaatcaagctcccgtaactcaggatcttaagaaatttggagataattctacaggtttgttcttcttttttctcggatttgttttgtttctgctcttttgaattcggcgtcttgttctctgttagattgaatctggatctagttggttcttgttcttcaactgtttaggagtatataaaacttgaattgcctcttagttgattcgttagaccttggtcttcgttagattttatttactttcattgtcttgtactcccacgaagaagattagggaagacttagttgctaatttaaatcgtgaaatgagaaaccatattatgcctgttgagattctctccgattgagcaatttccggaagaatgtttcaggtttagatcaaacttgcatcagagtcttatagtttcatctcttgtttgggcttgtctaactgaaggtttcttttgtgcaggtaacaca

SEQ ID NO: 8250 - DNA, 3000 bp, Unknown
  misc_feature (1)..( 3000): cDNA_ID_2127813_gDNA_ID_1621202_Annot_ID_57714 3000 nt of promoter + ATG
agtgaggaatagcatctagatcaagaataatcgcctttctgaatttcaatccttagataagtttcactatcagtttggtgagtggaatacacttctattgatagatctcaaatccagaaatagagattacaggaaaaggggaaaatcaaaagacattattaccatactaaggagaacatagagcaagcaagataaggaagtcaagctaaggaagcaactccacattatcagaagcaaagcagctgaacccaatttggcgctgcaatggaaacccctaaaaatgcagtctttccaataaagaactgacaactgaagcaatcctaatagcttcccacatccactacacaccaatggccagtgacgctccacaagccctcctatcatctccccaaagcatcgcatcgcagaacaagcatcggagcacatatgtttctgagattgcatccatttccaaccttgcttaaccaacccaatatcctccatcgctaaaatccaacaacttcaatccctagcttagctcaacctcgagttaactcacagagacagaaaccgagatcgacaggggtgagaacataaccaaagagactcatctctcgacgaaactagctgcttctcatccatgaatgacttcgataagaattcacatagaaaaccccaccacgtttcggtaacttaattcaacagatttgccgcataaacttcagagagaagataaacaaatacaacaacaacaacaacaacacagtgttgcaagaagaaaatccggtcacgctgattcgttcaacgcaaatcccttcacatgcaagtttccccaaaaacaacagattagaaaaaaaggcaaagcaaagctccgtaatatctgaaacaacaacaacagaaaaaaggaatcttttctttcccctttattagcaaaaccagtctttgcttcattcaaagacattccctaaattacccatcaagctcccacttttaaaaaccgatctttgatcggatccagtaaaaatcatagtaattttccggcgaatagaatgcttcgtcggagatttcaccaccaccgacaagtagttccccggagagagaaatagagagagtggtaaacaaaagtaagaaaatgggcttctttagttaaagtcgattggagagggggacactgtaagattaaagcttgagaaaccctaaaagagaaagacaaactttcaaaaagttcttcgaggagagagagacgacaaagtttcgcgtatatagagagagagaagaagacaacaagatataatccattgagaagaaggcaacagtataattaagtcgttaatcattattaattagcattgtttttggctaattaattagcgttattagtcgttgttaaatgaccttacttacttactggagtagtctaattttttctgggtcccactttacttccaagagtgtgaaatcacctgcggctggtcctactataccataaagtcaaaaccggaccggttcagttctgtaaatgttgaattctaagcaatggatttaagtatttaaccgaaccgactctttaaaaaattgctgttcgacaagtttatacaattattactgttcaattcttcatttggcattatatgatatatcgatttagttgtgacttttgagcatgtgtttttttttctgattctaaagttgttttggaaaagattgtttgttttcatttgacattatatagttaagcatgttctgttatctgtatacaaatcatcgtgcttgtggttttgggattatgtgaagtaatacagcaaagatgcgtaatttattttaagtatcaaaattattctcttatccacattgtatatagtcaaaatatatattacagactgaattaaacagacttaataataggcaaaatgtacatatatttgcattagaagatttcaatatatgtgttttttttctttcagaaaggtcatttgactcataagttataacagctagcttatatagtccttagtccttactcatgaaaaaagaataatttgttttgttatttggggtctactactaacattagaagcagacgtgggatttaatttgatttattaaaattgtggtgggtaatatttagactgaatctatgaaatcgatagcttgtaaccttactcactctcaatttaattatattagttttgtttctcatcacgactgagacgtgtaacgaatatatcgactgatcaaccactagttattaatttaaacgactttaatttgtattaatatcatatcttaatgacttgagtagaagaataatagaataagcatagaaaacattgaccaaatccttgtgtacgatacaatcatgtattatatacagatttatttgttactagtaaatatgattagaacttgcattagacaatggtcaagtttgttgatgtttccagttatggagaagccataatttgagtagcattagacattgattaatcaagaaaagaaaaataatatcatctactagtgtcaacactacagacgcagcgagcgagcaattatagacgcagtatctaaacgctgatcggtgtacgaatttgcggttcatttcaacgcttggcaaaattcacaacgtggaagacattgcgagtttacgacaaactagtggggttgttttaagtaaactaaaacttgtaggggttttctcaaaaataaaataaaataacttgtaggggtcacaaatgaaaaataaaaagtattgaatatcctacgtggcatttgtttttttcatctcctacgtggcattacgaaatgaagaaaaaactgatctgacggatctgcttaaccagttgaagataacgttagtaaggaagatatccagaccaaagccacacaacattagccacgtgtcataaccacaatcacttaccggatcttctctccctcgtatttgaagccacacaacatgaacattagggtgagaagagatcgagagaagaatagtttgatcatcttgtgagaaaaataatg

SEQ ID NO: 8251 - DNA, 3000 bp, Unknown
  misc_feature (1)..( 3000): cDNA_ID_1810928_gDNA_ID_1621202_Annot_ID_57715 3000 nt of promoter + ATG
aaaaatgttatggaggatgataattctaattcacctgtatccatcgacgttagctccatacttgtcgacgtacttgtaaacaccgtatccctgcgattatacgtcattgtttagagaacccaccaaattattattaaaaaggatattaaacaacaccgttttcagttactacaaaccttgccctttctgccggaggcgtcgacgccgtccctcaagtccatgctgccgttaattcctacacacacatcgattaacggaaataagctatacatgaacggtaacgtgtatatgttgtaaaagtctgtgtaataataatataaacgaaccgaagggcttgtcggtcttgatcttcttgacgccactggcgacaattttgaaggagggacgagctcttgtgagcgacggtaatcctctagccgccgtcttctccaccgtgaaaccagctggtttcaatgtcaccgaagatagcatcactgaagcagccattatttttctcacaagatgatcaaactattcttctctcgatctcttctcaccctaatgttcatgttgtgtggcttcaaatacgagggagagaagatccggtaagtgattgtggttatgacacgtggctaatgttgtgtggctttggtctggatatcttccttactaacgttatcttcaactggttaagcagatccgtcagatcagttttttcttcatttcgtaatgccacgtaggagatgaaaaaaacaaatgccacgtaggatattcaatactttttatttttcatttgtgacccctacaagttattttattttatttttgagaaaacccctacaagttttagtttacttaaaacaaccccactagtttgtcgtaaactcgcaatgtcttccacgttgtgaattttgccaagcgttgaaatgaaccgcaaattcgtacaccgatcagcgtttagatactgcgtctataattgctcgctcgctgcgtctgtagtgttgacactagtagatgatattatttttcttttcttgattaatcaatgtctaatgctactcaaattatggcttctccataactggaaacatcaacaaacttgaccattgtctaatgcaagttctaatcatatttactagtaacaaataaatctgtatataatacatgattgtatcgtacacaaggatttggtcaatgttttctatgcttattctattattcttctactcaagtcattaagatatgatattaatacaaattaaagtcgtttaaattaataactagtggttgatcagtcgatatattcgttacacgtctcagtcgtgatgagaaacaaaactaatataattaaattgagagtgagtaaggttacaagctatcgatttcatagattcagtctaaatattacccaccacaattttaataaatcaaattaaatcccacgtctgcttctaatgttagtagtagaccccaaataacaaaacaaattattcttttttcatgagtaaggactaaggactatataagctagctgttataacttatgagtcaaatgacctttctgaaagaaaaaaaacacatatattgaaatcttctaatgcaaatatatgtacattttgcctattattaagtctgtttaattcagtctgtaatatatattttgactatatacaatgtggataagagaataattttgatacttaaaataaattacgcatctttgctgtattacttcacataatcccaaaaccacaagcacgatgatttgtatacagataacagaacatgcttaactatataatgtcaaatgaaaacaaacaatcttttccaaaacaactttagaatcagaaaaaaaaacacatgctcaaaagtcacaactaaatcgatatatcatataatgccaaatgaagaattgaacagtaataattgtataaacttgtcgaacagcaattttttaaagagtcggttcggttaaatacttaaatccattgcttagaattcaacatttacagaactgaaccggtccggttttgactttatggtatagtaggaccagccgcaggtgatttcacactcttggaagtaaagtgggacccagaaaaaattagactactccagtaagtaagtaaggtcatttaacaacgactaataacgctaattaattagccaaaaacaatgctaattaataatgattaacgacttaattatactgttgccttcttctcaatggattatatcttgttgtcttcttctctctctctatatacgcgaaactttgtcgtctctctctcctcgaagaactttttgaaagtttgtctttctcttttagggtttctcaagctttaatcttacagtgtccccctctccaatcgactttaactaaagaagcccattttcttacttttgtttaccactctctctatttctctctccggggaactacttgtcggtggtggtgaaatctccgacgaagcattctattcgccggaaaattactatgatttttactggatccgatcaaagatcggtttttaaaagtgggagcttgatgggtaatttagggaatgtctttgaatgaagcaaagactggttttgctaataaaggggaaagaaaagattccttttttctgttgttgttgtttcagatattacggagctttgctttgcctttttttctaatctgttgtttttggggaaacttgcatgtgaagggatttgcgttgaacgaatcagcgtgaccggattttcttcttgcaacactgtgttgttgttgttgttgttgtatttgtttatcttctctctgaagtttatgcggcaaatctgttgaattaagttaccgaaacgtggtggggttttctatgtgaattcttatcgaagtcattcatggatgagaagcagctagtttcgtcgagagatgagtctctttggttatgttctcacccctgtcgatctcggtttctgtctctgtgagttaactcgaggttgagctaagctagggattgaagttgttggattttagcg

SEQ ID NO: 8252 - DNA, 3000 bp, Unknown
  misc_feature (1)..( 3000): cDNA_ID_4359968_gDNA_ID_1621202_Annot_ID_57716 3000 nt of promoter + ATG
gatttggtttattgagttgaggttcacctgaatttactattgcagggagctgctgcagctgttgttctgaacttgggttgcactcctgggctctttatcgtaggactatttggaattttgattttatggatgtatgcaaacttttggatcactggaacattgtttatagtcggaggtaagttttgattttttccctgatcagttctgttcttatgctcttccactgttacaatacagccactttagattagtttgttggctgggttgagtctttccggttattggtcaatgagtatttttatgcatgatctcgactatttacatggtattgatttctctatttttgtttgattcaggctatttattctccttaaatcatgctcgcgtggtggttcttgtggcgggcttatatgcgatgtattgtgtcaaagtcagacttggatggcttggtcttttcctctcaataaatcttgctttcttgtccaacgatatattaaattgtcttcttcaatggtgtgacaatctaagtgaaaaaccacaacacgaggaaccaaagaaaccgaaagaaacaatcatagaagaagactattcaagggaatttgagtatccttcagttcctgtcgaagatgaaaccgagacaaagattcacgagaataagtcttctgctaaaccaactgcgccttctactgttgttaataccgtaaaggaaatttctagtgttaaaatagtcaaaatagaagagtcaagttcagctgatgaaatgaagagaatactgaatagtttgaatcattatgaagcattgggggtccctcggcataaaaagatcgatgctgcggtgcttaagaaagagtataggaagaaggtttctcctcttttccaatgctgagtaggtggttaatgaaatctctctgaatgttaatgaagtgtgttcaatatgttctaggcaatgttggttcatcctgataaaaatatggggagtccattggcaagtgaatcattcaagaaacttcaaagtgcttacgaggtagtcgaattacttataatcttgaatttgtatattttgaagttcttggtattttgatatatagacatgtaatggttgtattatctttttcaggttctatctgatttcgtaaagaagagagattacgatgagcaactacgaaaagaagaatctaggactaggagtgtttgtcagacatctcatgcttcttcgcatcaggtttagttaaagtcttttagcttctctgtaatatcttttggcgtgtggtctcatgttccatacattattcctattttgataagcagagtggtcctgattatcgatcagatgagtcaaggcggatacactgtacaaaatgtggtaattcacacatatggatatgtaccaataggacaaaagcaaaggcaagatggtgccaggtgatgaatccaaccaactcagaaacagttaaagaatattgttcttgcattttcgttatttcaaacctctcttacagataatctaatttgttaaatgtaggattgtggccaatatcatcaagcaaaagatggagatggatgggtcgaactcaaagggacattacccttcgagagagcacataaggtataaaaaagcttctttctcgccttgtcaaatgttataatgaatttggttttgcctcagtatcctcagctcaatcactttctttttcatgtccattaagattgaaataccgcgtgcttttgtttgcgcggagagcaaaatatttgacgtctcagaatgggccatttgtcaggtcagttctcttaccggttcctctgcggattacttaaatgcgaagatgacttgagatacattaacatgttttgattggattaaatagggaatggcttgtagaccaaacacgcatagaccaagctttcatgtgaacatggttgggttagaaaagacaacacagagatcaaactcaagtaggttcccatgggatctagatgtggagatgatggatgaggacgaagaagagtttgagctatggcttcaacaagctcttgcttcaggtctcttctgcgaaacctcaaaacgtagaaaaagctggagccctttcaagttgggccagatgaaaagcaagaaacagtggcgaagaacttccacttgattcaaatttgatcgaaaccataaacaaaattttcatatagctcaccacggtgaatccaaagccttgaagatcataatttttttaggggagtctttctctgtaaatagtatctgtcgattgttcttccaaaagaaaaaaaaaagaatctttggatttttcattgtggtaaactaaagaagctgtttttcttttttctttttctgaatcaatgtgtagatttaaaggtggttcatttgataagaagaagcttaaaaaagaaatgttaatggttactaaatttataaagtttgaatttttaataattctgtcccttttaaacatgagaaaataaaaattgagaaatcgaacccaaatttactaaagttttccctcctctgtatgttgctgacgaatcaaacacgtcgacctccaatattttttttttttaatttccttcaaagcttcgattttgaccttctgggttaatcacggaagagtttcctttttgggtagccgccgcaatttttcccggcagaggaaaaaaaacccctagaatctgggaaattgacgacgaagagggatataggtttggaaattttgggtatttaatttgatttttctttttctcgttccattcagattcaaaaacaaaaaccctaaccctaaaattcgtgttcgattaatttcgttgtctctgttttgttttctcttcgtgtaaacctttttttttcgagttttggcactctgagctatttgagtattacagattaagcttcgtcctgtcttattggagcaacatacatatatatatatatatatatagatatctatcatctgtatttataggcacacttgtaagtagaatagtgaggaagaaggtaat

SEQ ID NO: 8253 - DNA, 3000 bp, Unknown
  misc_feature (1)..( 3000): cDNA_ID_1010644_gDNA_ID_1621202_Annot_ID_57717 3000 nt of promoter + ATG
cgtattgcttccgtagaagttgacaatgaggtgaatttccattttgttctaacttcgaaacattcgaccattttaaccattgttactatcaggtggctccagtgccaagtaagaaaccggcttcagaaataccaacacctcaatttgttattgtggatacatatgaaagggattattctccgacttttggtcagcctgcttcttatctacgtgcaagaggaggtaccaatttcctctgatttggttttgtattcattggcaatgaaggtggtttctttgttatgtgcagactataagtttgtctgtttgtttatgcagctcggtctgagcttggagaatttgtggagtatgatcttgacaatgaggatgaagactggctttatgagtttgataaggataagaaagaacttccacctgaaaagtaaagtaaccaatccaactatccttatagctcttcttcttcggatttatcatcatcatcagtatttttctgttatcttgtagctgcatcatgctgatattttaaacgttgaggcggattgggttattcagactctctgcgtcttttagttttgtactgttgctgaattagtttgctttattcactagaaattggattctgctaaaattgttaaaaccaaaactcttagtgaaatagataccgaaagaagaatcgttccatttgatgcacaacacaaatgtgttaaattgtttgatacaggcttgagatcatcatttttaaactagaggtgttggatcacaagacgcgggaaagagcaggagttattacacctactctcggctctccagttcctgtgcttttgcagtttgatgctgcttctgatgtatacctttacttttggattatatatctcttgttattataactctacactcattttagaagcagtacaaaacatttgaatgattagttctgattcttattgcaggtgctgcaagtactgtccattaattatggaaccttccaggcgatcttcaactactggaaagaaaaggtttgaaataaaacttatgtgattgttacaagttttctggatacagacgttatgttgcataggttaatgatcttattttacggggtgagataagacggtttaatagattatttgattcgtgaaacctatgcatagttcttgtgaatgacaaagcagttccacatatggagtacctttggctgataatacttatgcatatgtttcgttttctgttttttatgtgaacttagcgtaaaagatggcagaagcctatcttacggcgtttacaggtttgtattatttatttccatttgaaacgatcaaggcctatgttggaaaggcatcttacctcgattatttagttaatgttttgcttcattgtttggaacagcctcccccaccggttaatgacaccaatccctataatgtgtttaggccaagggagaaagttcacagactccacacaagaagggtaggctgtcttttttatgcatgtgcgacattttttctattaaaatccaactggagaaagaaaaatagtgataaggctttacttcatcttcagatgcagaggagagaaaacaatgtgcagtcatttgaaaagcttcgacaggtgagtgaggcacctgaacctttatggttctttaatttcctgaaatctgagcaatttacgtttacagtgccttcttttagtttctctctggacaacattgttttttctgcttgttaatgatctgttagtgattcttttatggttttctattggattctgaatacatgggatatgttattatcaggttagacgcaatctaggccaagcacagagcattctggaggctctcattaaggtgttctatatgacagttttagtgtttatcttaacaagcggattgcattctccaaagttgctaatttgatgttacccattccgtagagagaagagaagaagagggatgtcatggacagtgaggttagccttcagagaatccaactccaatacagggtacttacttctacttcctctaaaactctctgttttccgttttccgggtctaaaattgtttttttttttgcagcatgaaacagagctcttggaagatagcttggctatgcctggatttcaacccactacaacatcatacaaatttggctcaagcgatgatgaactgatggactctgatgatcacaccagtactcgtgtacgtacaagacctgcggttattcctagttctcgtttcaccaacttaaatctgaatgcatctcatcccggaggcatcaaacaagaagttagaagacgacagtcacagcatggatggcttcacagactggtaaaaccttctcttacaacacctaagctctctctagctactataatcaatcatttaagcaaacctgtaatgattttgttccttaggatcctaatgaaccggtaatgctattcacaaaaccgctggttcccgataaactggcagctgcagggattgttcctccaacaccggattcatcaccaggtcaacctccaagtcggtttcaggggaggattgggcgtggtggccgaattattttcgatagatggaatccgttgatgcaatctcacattaattgtggaaactcttattacattgctccaaatcaccggtctaccaacttcgattgagatattttcacaatcttgctttgtaaagaattttccatcaccaatggtgtatgcaataacgattctcagctaaataagttttagcactttgtaactaactggttattgtgtgtatttctgtttattttcggttaaggaaagaatctgtttaattcaaaatccggttctatcggcggtttggaaaaccaaaaactattgtaccagggaccaaattgtaataatatcttcaactcaaaggacaaaataggattttagggctctttattgattttaatcggaagttcaggtttgctcatcaatcgcagtgaagaaggaaggaacctaaatcggaatttgggtgctccatca

SEQ ID NO: 8254 - DNA, 3000 bp, Unknown
  misc_feature (1)..( 3000): cDNA_ID_1810920_gDNA_ID_1621202_Annot_ID_57718 3000 nt of promoter + ATG
aggaacctaaatcggaatttgggtgctccatcaatggcttcgattttggctcgcaggtcactgaatactctccgtgctcgacatctcgtatgaatcttgttcgctcttgttatttcttcattttgtgtcctttagttagagttatttgaatgcctagaaatgggaatgtctcctggagttttgggagcttaagatgattctattcactctctgtgttttgttttgtgtcgacgagattctggattttatctagctgatcgatgaaatcatgtagggagatttgaatttgatcatggttcatcttaagggctttcgttttacttatggtttccttattctttttcgcatttaatttttgtgacgaaagccttttcgcaagtcaatttttttttgtttttttttgcgagctttaatcctttcattagcttgatatggtgtgtatgttctgaatacctctctgattacttctcgacattgataggttttgtcagggcaagctttacagggatctcatctgtctagactgcagtcccgtggtatatcttatggcagcaacaaaggtatattttctgctcttgtttggttttctttggtaaatcaggtttaattgtgaatctaccccttttccaacttgtattacgagattctgattcatatatgacttatggtttgcgtatgtaatattcagatgatgaagaagcagagcaactttctaaggaaatctccaaggactggaatactggtaatccatatgatctagacaattttactttttttctcctttcttcttttcttgtacgtctatcttccttggtgttttcctccccgagtattagtgattcctgatattctcaaatttgtagtctttgaacggagcataaacaccctgttcctcacagaaatggtccgcggtttgtcgctgaccctcaagtacttctttgatccaaaagttactgtgagtgatatcttttctagtcttccaaacttagattgaaagaaatctgtgttactgaagctctttcgtgtatgcagatcaattatccatttgagaagggtcctctgagccctcgcttccgtggtgaacatgctcttcgaagatatcctaccggggaagaacgctgcattgcctgcaaactctgtgaagctgtgagttttgagatcgatatgaatccttcatttaatttaacgttctctttgttctgatatggtactctgagtctatcaaattcatcttagtaattaggaaagctatttgagtatgagtaatatttactgtttagtctctagagttctgatgaaatggtcatattagctgacaatgatctatttagtgtgtataaaagttcaccacggattgtaattcttgtgagggatacttgtccttttcatcaggtatgtccagctcaagcaatcacaatagaggcagaagagagggaagatggaagccgcagaaccactaggtcatcatccctttagttctcatttatcaaccatctgctttctttattaccctttcatgatgatttgagctgtatcgtacaggtacgatatcgacatgacaaaatgcatctactgtggtttctgccaagaagcttgccccgttgatgcaatcgttgaaggacctaactttgaattcgcaaccgagacacacgaggtctgtttttcacattttctagaccctaataattttcgaggcatgcttattgaaatttttgttatattctctatgataggaacttctctatgacaaagagaagcttcttgagaatggagatcgatgggagacagagattgctgagaatctgaggtcggagagtctctaccgctgaaccattctacaacagtctctgcttcattcaacttgtttttcccggggaaacattttcgttgcttctgtttgaaaataaagacgagatcatatgcgtgtgaaaactcttttgtaatccagattttgtgctgtgtaattgaattgtttgtaaccaacctgactttgattttcggttcatgagttccggttattaggtgttttcggttcggagaaagagcatttaatttggtcaaagactgaaaacagataagtcttaagctacaagggtatatctgtacattaagaaatatttgatcggacggacaagatcatgtcttttttttttttacggcggacggacaggatcatatgcttatagtttatcctaatctgtccgatctaaacataatgcttgtcgattttttcatttatttgccttttggttgcgccaattatcgtattcagacagcaaaattaatattttaatgtgtattttttgttgagttactattttagaaaaacaacgaatccctagaaaggaaagaaaaaaaaaaacaaaatccccaaatcgagcgagtccaaagaaaaatcccaaattcgacgaacctacaagcccagaacatcccccgatttgggaaaacctgaattcattcgcttttgatttgccatcttctttctgggatttgtctactgcttgatcctaatttctgacctcgcttttggtttgagttcacacgtgccgcatcggctgttcaccggctttgtttcattgtgcagactccaatcatcgtacaatctgtagcaaccggttggtctccgtcaaatttctccactttgttgccaaattttactcctttttgtatcaattcaaagattgggggtgaatttttagggtttatcattttgttcatttttggtaactattttggggtttaattacttctttagttgatactatgattgatactatctcccaattaatatgagatcaaattgtgacaatttcagttctctgattacaccaagtttttttagcaggacattctctaaggtgctaaatcaggagatgaaatttggatactgtgacttctggaggagaggaaagttatgcagtgtttgttactgttaattaccagaagaactaggacaaggcgacggagactgaagaggtagctatgaatgttcaggctcac

SEQ ID NO: 8255 - DNA, 3000 bp, Unknown
  misc_feature (1)..( 3000): cDNA_ID_3047988_gDNA_ID_1621202_Annot_ID_174988 3000 nt of promoter + ATG
caaaccgcatgggctatgatgggtttgattcatgccggacaggttcaaatattttcaatcttggacttgcatttatttcaagtacaacgaaattatcttgaaacccctatcgtttcctctgctgtatctatacaacaggccgagagagatcctacacctcttcaccgtgctgcgaaacttatcatcacttcacaacttgaaaatggggactttccgcaacaggtaagtttcaaacatccccttttcgatcgatatatgaatatctcctgaagcatacataagttttgagatttagaataatgttacctcctttatcgtacctttctattgcctagtacttcatactctgtaataataaaaatcagatcgaatattgatgtcatggacctgaactcacttttcttgtttctaacgatagtaaatataaaattgatgtgtatatgtaatgagtttaattattctttgttattgtcgtgtctttgcaggaaatattaggagtgttcatgaatacatgcatgctacactatgctacgtacagaaacatcttcccactatgggcactcgcggaatatcggaaagctgccttcgcaactcatcaagatctttagctctttcttaatagtcaatctttaaaagagatttggctcttctttaataatattatacacaattctgtagatatgaaagacaaaataatattattaggagacttgatgttcttaatctgagagactggggttgagatttgcgttaagcaaaatgtcaggagatttgatgttcttttgcattaaagacggtgaacagttatgatcacaagaaaggtaatgaaagactgttttgttttcgtttgtgtttttgtctatctaagaacataatcgatggctccagtggttcccaagacagaattttttttttcattagtatatttctaattaatcaagagttgaaacatacacggatagagcttcctgagaatcagctgacacatttgctgatctaaacttctactaatatatagtctttacacgtcatcattcttttcgtttttgtgtcatatgaaattcattccaaactagcctttgtacacagcacaacaacactcacaaatagagtgctactaccataacaaacaaacaaaaagacaaatctattgcttcatgaataactaatgtttattgctcacaagtataaataaaaatctagttgaataatcaaagatgacatgaatttatttttatttgattctgtatacataaatacaaaaaggtaagtatttgaaatatttaatgatgaatccacaacaatttggatgagatgatgtagatatttttatacgagagaaaactctgctgtaaaaccatcgattactaattggaatttagttacgagaaaaacaacaatagatattaattacttttattttattatcttagttatgacatgtgacttggtatgtacgtctggctaatctttttcctcgtagaatcccatgcttcctacttctcaccataactataaggcattgctttgctttctccttatctttatctatcttaattaattaccacaaaaatatcttatttgattatcctgatgatgcttactagctagcaaattttggtccattcgatttagagcaattattggatgtgactacgtctacctaatctcatcacaattagcagtagcacagcgacacttctctgacttgcaatcgaccaattattgatttttatttattcaggtacgtgttctcaaatgagaggataagaaagggaaatggaaaagatccgcttttattcagtagcaataatttcgtctagcacaatgttagaagacttgatgttcttatgcatcattgtccatagacggtgaacatgcctcgtgcaagtgcctacacaaaacaacaattcctgtcataaaaagagcacttgcttgtgttttccgttttattgttttacgcttttgttaaaaaaatagggatattgtactttttgtgactttttgtctattcaatacaatacttaaaactaaatgaaattttacactattatagaataatggttgaaatcgaattttgtattaatgatattttcttacaataggacgcttaccttttcaacattttaagcttttgaaactctagtttcccactatattcgttttaccatgcagtgtaagtgtgtaacaatgtccgattgcctagcaaaaacatcaagagcacgagattctttgtaaaatataagtatataggttccaaattgtctttcacaaaaggaaattccgcacgttttttaaaaataaatggtgttttaaaaaaataaaaaataacacatagtttgaaagggagatttttttgtattactgacaattaaaaaaaaagggaagtataatataacaaaaccccccaatatgcaaaatcaacaatttcaaattggaatttaattagttattacgataataacaacagcagattaatcaattttattaagttaccctagtgacaactagcaagcaagttttgtccattcgtttttaagcaaagcatgtgactacgtacttcaacctattctttctttgtttacatacaggcctatatatatgtttcattctctatataaacattttttttttttttaataaacatacgtacatgaaactcttcgaaagtatcgaattaacattctcaaaggcaaacatagacccagtacaaacagagccgtgccaagagacataagcgaaactttttttgtttatattttagtacgttggctttcttctttatgtctagtctcatcggacgaaggtagttggcacaccgacacttctctaacttgcagtcgatcaatttttttatttttattcaggtacgtattctcaaatgccttctttaattagtggttatctatccagctgctctttcctttacgtttcatcagtgtcagaaatcaacttgatagaatatcataactatctatagggtcatcgtacgtcgttatg

SEQ ID NO: 8256 - DNA, 3000 bp, Unknown
  misc_feature (1)..( 3000): cDNA_ID_1810909_gDNA_ID_1621202_Annot_ID_174986 3000 nt of promoter + ATG
ctttttgtctattcaatacaatacttaaaactaaatgaaattttacactattatagaataatggttgaaatcgaattttgtattaatgatattttcttacaataggacgcttaccttttcaacattttaagcttttgaaactctagtttcccactatattcgttttaccatgcagtgtaagtgtgtaacaatgtccgattgcctagcaaaaacatcaagagcacgagattctttgtaaaatataagtatataggttccaaattgtctttcacaaaaggaaattccgcacgttttttaaaaataaatggtgttttaaaaaaataaaaaataacacatagtttgaaagggagatttttttgtattactgacaattaaaaaaaaagggaagtataatataacaaaaccccccaatatgcaaaatcaacaatttcaaattggaatttaattagttattacgataataacaacagcagattaatcaattttattaagttaccctagtgacaactagcaagcaagttttgtccattcgtttttaagcaaagcatgtgactacgtacttcaacctattctttctttgtttacatacaggcctatatatatgtttcattctctatataaacattttttttttttttaataaacatacgtacatgaaactcttcgaaagtatcgaattaacattctcaaaggcaaacatagacccagtacaaacagagccgtgccaagagacataagcgaaactttttttgtttatattttagtacgttggctttcttctttatgtctagtctcatcggacgaaggtagttggcacaccgacacttctctaacttgcagtcgatcaatttttttatttttattcaggtacgtattctcaaatgccttctttaattagtggttatctatccagctgctctttcctttacgtttcatcagtgtcagaaatcaacttgatagaatatcataactatctatagggtcatcgtacgtcgttatgtggaagttgaagataggaaagggaaatggagaagatccgcatttattcagcagcaataacttcgtcggacgtcaaacatggaagtttgatcacaaagccggctcaccggaggaacgagctgccgtcgaagaagctcgccggggtttcttggataaccgttttcgtgttaaaggttgcagtgatctattgtggcgaatgcaagtgagttctttttttcctcatgaaatatcttatactaatcttcgccttttttgttgttacaactaccaatgtttattttatttggtttgattgtatgtacagtttctaagagagaagaaattcgaacaaggcataccacaactaaaagctactaacatagaagaaataacgtatgaaacaacgacaaatgcattacgaagaggcgttcgttacttcacggctttgcaagcctccgacggccattggccgggagaaatcaccggtccgcttttcttccttcctcctctcgtaagtttcttcatctctctctatatacctttttgacgatactctatcttatatttctacgagagagataattaatcttcttaggaacaaaggtaaggttttggcgctttctttattacttgcatggaaatatcaaatatggaataaagaagagaaagacttactatgtttacgaggagattatggacaccaagaactttttggtttggttatccaaaacaaagaatttgtttcgcaaaaatcaaaagactaaaacgagagctagggtggaatttgaacgacttttttttatttttatatatagatattttgtttgtacattaccggacatctggaggaagtattcgatgctgaacatcgcaaagagatgctaagacatatctattgtcaccaggtatatatacttttagttgtgaaggtcactaatctcgaattaatgtactcttacatgagattatatatgttttgtctttttgcagaacgaagatggtggatggggattacacatcgaaagcaagagtgttatgttctgcaccgtgttgaattacatatgtttacgtatgcttggagaaaatcctgaacaagacgcatgcaaacgagctagacaatggattcttgaccgcggtggagtgatctttattccttcttgggggaaattttggctctcggtaaaatcttttgagccatgtatattttgttaacttaaatgggagatgttgaatgcttaaggttctatatataaaccatcagttggttttctatatctagatacttggagtctatgattggtctggaactaatccgacgccaccagaactcttgatgctgccttcttttcttccaatacatccaggtttgctatgttctgctgattctatatttgtgtttcgttttttctcttcaaataatgtttgtcctgctccaaaaaaatttgaaaacacacagggaaaattttgtgttatagccggatggttagtatacctatgtcgtatctatatgggaagaggtttgttggtccaattacacctcttattttactcttgcgcgaagaactttacttggaaccttatgaagaaatcaattggaaaaaaagtcgacgtctatatgcaaaagtatgtatgcttgactactttcaatcttgaaattttatttttcttggaagaaaactccacaaacattctgccattccttatgcaggaagacatgtattatgctcatcctttggttcaagatttgttatctgacactcttcaaaactttgtggagcctttacttacacgttggccattgaacaagcttgtgagggaaaaagctcttcagcttactatgaaacacatacactatgaagacgaaaatagccattacataaccattggatgtgttgaaaaggcaaaccattttaagaaccctttaataaaagaagaattatatgttaatatatattctcttaatattgtacatttttataaattaaaactgctacttttttcccaatataggtactgtgcatg

SEQ ID NO: 8257 - DNA, 3000 bp, Unknown
  misc_feature (1)..( 3000): cDNA_ID_2127829_gDNA_ID_1621202_Annot_ID_174985 3000 nt of promoter + ATG
tgtcacgtccttgccccctccacaggaaaccaccaatccagaaaatctccttgctagccgtatctattacatcaaagcaaacgcattacaagagctccaaactctagccagcagttcgaagaacggtaaaaggacaaaacttgaatcattcagcgcgtttctatggaaactcgtggcagaacacgctgcaaaagatccagtcccgatcaagacctcgaaactcgggatcgttgtggatggaaggaggagacttatggagaaagaaaacaatacttacttcggaaacgttctctcagtcccatttggtgggcagagaatcgatgacttgatcagcaagccactatcttgggtgaccgaagaggttcacagattcttgaagaaatcagtgaccaaagaacatttcttgaatttgatcgattgggttgagacttgccgaccaacacctgcggtttcaagaatctacagcgtcggatccgacgatggacctgcgtttgtggtttcttccggaaggagttttccagtgaaccaagtggatttcgggtggggctcaccggttttcggatcttaccatttcccatggggaggcagcgccggatacgttatgccgatgcccagttcagtggacgacagagattggatggtttacttgcaccttacgaaaggacagttgaggttcattgaggaagaggcttctcatgtgcttaaacctattgacaatgattatctcaagatttgaaaaaaaaaacctaatctcttagttttcaattatgggtatataattcgtgtgtttaatttctccggctggtttttttttccttgttttccattttatgtgatattatgtttgcctcttgggacttcgtatttgaattcttgtattcgttacaagattatgcaaccgtacaatgtactatatatctgtcaatatttgaatcaaatttatctctctgatgtgtttgttggattactttactaacgttgctcaatctataatacatttattaatactggaattcttggttcttttgccaacaacatatatacattcaatatagatgatgacacaacaacaatacaaaatactattctatggatgatgaatcaattatatggaaatcacgttctcacactatatataatactgtcatgatacctcgactacacgcatttggtgtcattggaatgatcgatcgcgtgcactaccaaaattcgtgtagccgccaaagcagataaaaccaacctccattatattgacgagtattgaccatcaaaactttctttcacaagtttattaaaaaatactcgtcacttatccgtcaattagtgtttattgtagattcttctatttgctacttgcaatttacctatcgtacaaaactgcgtgatatacaatctgttcatatccaatatttatgaaataaatcatatatgtaaacattaattatgatatatgcattaataattgaatacttacaaaagttgtttgtgatgtatagtattgatcactatagtctatagatggtactagctaactagagcttggttcttgtgtggttgtaccatttagggtttagtcaagactactctgactgtaattgataacactgatagctatttatagtttaattatccaaaatttggttgttcatcttcctagttgttgtattttaccaaacaaatattaagcagatttaactactaaacctagacccacctctacgaatagaaatttaatgttttaactaaaataagtattgcttctttctatatactggtggtttctatatacacgtgtatactgcttttgaccttttgtcactaatcacttttttttttcttttctcgtcttgtcactaatcacttaatcactataaacaattcgtttccaaacgttcatgaaaagtgcagattatatatattatacctttttgcaaacatttataaattttaacatacgttatgaacaaaatatacgccaaggaactaaataaacatatacaaaaacatttccatcgtttttacgtaatttctattaaaaaaatcatatttcagaatactgtatatatataaataatcttataaaagagtttaaataattttatacataagtataagatgtgtataggtacatgtaaatgttaaatataaatactatagtatagtccactactgttaaagcttcaatgggtgtgtaataagtagccttgttatttgtcaacgtggaagaatttgtgtagtaaagtaaaaaactgtgtgtaaaaattttgttgtcgttggggaagattagaaatatgtggttttagtcaaagtcattcttaacaactaaatgtccttttttgtctctctctttttttcttttcttttttcaaaaccttattttgtcaaccaactaaatatcctttatagcatttattatcggaaaatattcatgtacttattaactaaaaatttaataaatttatttctcaaaaaatataatctaataaaccaaagtattgatcagacagaaactaaggcattaatcagaaacatatcaagtgtattccaaaggcttcgagtttttaagaatttttaggatcgctcacattaagcgcattaagcgtgtgacagggtttgtgtgggcttatatatgagagtacatattagcctaacactcagctaagcccaagtatctatatacttccacaatttccaaaaaaacaaaacaaatatttaataattggttaattgaattttttaaacacacgcattttcaccgtcattgcgcatctttcgttctccctcaaagatctaaaataaatcaaaattagtaaacaattgttcagcaaaagttaatggtcgtgaatggtcattcttgtccaaacctcaacaatgtctctatccctaaatccaatcacaatggcacattatctcaaaccctcgtcgtcttgtccgtgaagcaaaccaaaaagcacaacactaactttggaaacccattttctatctttcttgcaaatcaag

SEQ ID NO: 8258 - DNA, 3000 bp, Unknown
  misc_feature (1)..( 3000): cDNA_ID_3047995_gDNA_ID_1621202_Annot_ID_174984 3000 nt of promoter + ATG
aatcgcagtgaagaaggaaggaacctaaatcggaatttgggtgctccatcaatggcttcgattttggctcgcaggtcactgaatactctccgtgctcgacatctcgtatgaatcttgttcgctcttgttatttcttcattttgtgtcctttagttagagttatttgaatgcctagaaatgggaatgtctcctggagttttgggagcttaagatgattctattcactctctgtgttttgttttgtgtcgacgagattctggattttatctagctgatcgatgaaatcatgtagggagatttgaatttgatcatggttcatcttaagggctttcgttttacttatggtttccttattctttttcgcatttaatttttgtgacgaaagccttttcgcaagtcaatttttttttgtttttttttgcgagctttaatcctttcattagcttgatatggtgtgtatgttctgaatacctctctgattacttctcgacattgataggttttgtcagggcaagctttacagggatctcatctgtctagactgcagtcccgtggtatatcttatggcagcaacaaaggtatattttctgctcttgtttggttttctttggtaaatcaggtttaattgtgaatctaccccttttccaacttgtattacgagattctgattcatatatgacttatggtttgcgtatgtaatattcagatgatgaagaagcagagcaactttctaaggaaatctccaaggactggaatactggtaatccatatgatctagacaattttactttttttctcctttcttcttttcttgtacgtctatcttccttggtgttttcctccccgagtattagtgattcctgatattctcaaatttgtagtctttgaacggagcataaacaccctgttcctcacagaaatggtccgcggtttgtcgctgaccctcaagtacttctttgatccaaaagttactgtgagtgatatcttttctagtcttccaaacttagattgaaagaaatctgtgttactgaagctctttcgtgtatgcagatcaattatccatttgagaagggtcctctgagccctcgcttccgtggtgaacatgctcttcgaagatatcctaccggggaagaacgctgcattgcctgcaaactctgtgaagctgtgagttttgagatcgatatgaatccttcatttaatttaacgttctctttgttctgatatggtactctgagtctatcaaattcatcttagtaattaggaaagctatttgagtatgagtaatatttactgtttagtctctagagttctgatgaaatggtcatattagctgacaatgatctatttagtgtgtataaaagttcaccacggattgtaattcttgtgagggatacttgtccttttcatcaggtatgtccagctcaagcaatcacaatagaggcagaagagagggaagatggaagccgcagaaccactaggtcatcatccctttagttctcatttatcaaccatctgctttctttattaccctttcatgatgatttgagctgtatcgtacaggtacgatatcgacatgacaaaatgcatctactgtggtttctgccaagaagcttgccccgttgatgcaatcgttgaaggacctaactttgaattcgcaaccgagacacacgaggtctgtttttcacattttctagaccctaataattttcgaggcatgcttattgaaatttttgttatattctctatgataggaacttctctatgacaaagagaagcttcttgagaatggagatcgatgggagacagagattgctgagaatctgaggtcggagagtctctaccgctgaaccattctacaacagtctctgcttcattcaacttgtttttcccggggaaacattttcgttgcttctgtttgaaaataaagacgagatcatatgcgtgtgaaaactcttttgtaatccagattttgtgctgtgtaattgaattgtttgtaaccaacctgactttgattttcggttcatgagttccggttattaggtgttttcggttcggagaaagagcatttaatttggtcaaagactgaaaacagataagtcttaagctacaagggtatatctgtacattaagaaatatttgatcggacggacaagatcatgtcttttttttttttacggcggacggacaggatcatatgcttatagtttatcctaatctgtccgatctaaacataatgcttgtcgattttttcatttatttgccttttggttgcgccaattatcgtattcagacagcaaaattaatattttaatgtgtattttttgttgagttactattttagaaaaacaacgaatccctagaaaggaaagaaaaaaaaaaacaaaatccccaaatcgagcgagtccaaagaaaaatcccaaattcgacgaacctacaagcccagaacatcccccgatttgggaaaacctgaattcattcgcttttgatttgccatcttctttctgggatttgtctactgcttgatcctaatttctgacctcgcttttggtttgagttcacacgtgccgcatcggctgttcaccggctttgtttcattgtgcagactccaatcatcgtacaatctgtagcaaccggttggtctccgtcaaatttctccactttgttgccaaattttactcctttttgtatcaattcaaagattgggggtgaatttttagggtttatcattttgttcatttttggtaactattttggggtttaattacttctttagttgatactatgattgatactatctcccaattaatatgagatcaaattgtgacaatttcagttctctgattacaccaagtttttttagcaggacattctctaaggtgctaaatcaggagatgaaatttggatactgtgacttctggaggagaggaaagttatgcagtgtttgttactgttaattaccagaagaactaggacaaggcgacggagactgaagaggtagct

SEQ ID NO: 8259 - DNA, 3000 bp, Unknown; identical to SEQ ID NO: 8253
  misc_feature (1)..( 3000): cDNA_ID_1010644_gDNA_ID_1621202_Annot_ID_174983 3000 nt of promoter + ATG

SEQ ID NO: 8260 - DNA, 3000 bp, Unknown; identical to SEQ ID NO: 8252
  misc_feature (1)..( 3000): cDNA_ID_2127821_gDNA_ID_1621202_Annot_ID_174982 3000 nt of promoter + ATG

SEQ ID NO: 8261 - DNA, 3000 bp, Unknown; identical to SEQ ID NO: 8250
  misc_feature (1)..( 3000): cDNA_ID_2127813_gDNA_ID_1621202_Annot_ID_174980 3000 nt of promoter + ATG

SEQ ID NO: 8262 - DNA, 3000 bp, Unknown
  misc_feature (1)..( 3000): cDNA_ID_2127795_gDNA_ID_1621202_Annot_ID_174966 3000 nt of promoter + ATG
agatttctctcttgtaaaggaatcgtttgagccgaagaacgagtctcggaaattgaacaacaaacggaaacgggagagtttgcctgaagaagctaagaatgttccggaaatagacatggttaagctcagcaagaaattgaaagagaactttactattcttcgggatataaaagaggacgagagagtgagaatggagttgttgcagtctgaagagaaaaaaccattgaagaaacagaacaacgtggtgaagaagaaacttaagaaccctaaatccaaaaagcaaatttgaaaggctttttgttttcccgctttaacggttatatactttgcttaaattaaacgcttcaatgaaatttttcgagtacaattttgttaaagagtgaaatcaacaagaagagtatttttcattttattcacatccaccctggtaatcctaaaaacttgtgtttataagttatgatgttctcgtatattttcaggattatttattcgaactgattcttataaagtggtaccaacatcgtataaaaatccatcgtttatacaaaacaacgtagtcttacatgtgccatagagttgaaagatacgcaaatcatcctctaatccactaacagttcgccacaaaccgtttactttgttataaaaatagagatggagatctcagctaatgtatgttgtacgctgtgaacagcaaattgttccccacaaaaaaaaaaagtccagccgtacaacggtacaagaagatacggccatgttgagaccttttgttctagaccccattttaatacacctataactataagtctctcgtcgttactacaagatatttgctactttatactatatttttttcgaattatcataggtcttcaattaataagtacaaaaattcaataaaaaatatgtgtaatcattatagtggatttacatcttttcatagtgtattatccacgcaagactcacatcgcatcatatatctgaacttttcaatcaattaaatgttaggtgttgggacgatatcatggatatataattcatattgacttcaaatttaaaataattattattattatatagttgatgatgatccgtagtacggtacgtgaaataacttgtattttgtcacttcaattttatttcacagtacaaattaaattgataattttgagataaaatcgaaaaaacaattttcatatccaaatcatcaagacgaatttctccgatcactcaaataaaaaaggagaagatcgaagaacaaaaaaaaaacagaatcatcatcatctactctgtagatacatcttcaccagataacgatgcaatgagctccgatgtatcatcagcgatgccagatcggagagactctacaacctgctcgaacacgaatacgttacaaggaatatgaagaactcctttctgagtgtatccgtattcttgagctgatcgattcagcaatccaacgaaaacaggatgattcagcagctctgcactcaccacgaacctctccttatcttcgcctacgttgacgggaacgtgaccggaaggaacactcgacgcgacggttgctcgcttgaccaagaaaactgaagaggagtacgttgacgtcgggtgatggatatcgccgctgcgatttcggttgcaggaggatgagtctgcgattcgtgacagacgtcgaatcagaggcttcatctttgatcctagacagccaaaaatgctagagacagagagacataaatatgggagagaggtgtggactcacattaagcttatcagaaatgtgtatattaagtattattatattttgagatgacacaaaaatggtatttaatttatttcatacatatatgtgttaacataatgagtcatggtcaatttaacaattgaaagaactacctaattttgattatgcaatatgagaaattctctaaatttggtttattttcaaaactttcctcacttacattagtcaaattacaaataagaatagtaagggtaattgttaacaaatgtggattgctaaaatcaaattttgattattgtacaaattaattttagacttttttatgtatgatgaaatgtacagaataaaccaagagactatgtagataaaaatccgttgtatttattaatctatttcttaccatgaatacgtaattttcccgtttgatggtaaattaacatataaatacacagagacgagtggataagaaaaagacgtagtatttattaatttactttttatttgctttccatgtatatatattttcatatatatataaaagaaaaagagtataatttagcaaaataacaaaaatataaatattgatagatggtttttgtatcataatttatttaattgtatttctggaattaatattcttctttgactagatttcataagaaagtaaacgaacacaaaattaatgttcatctttgactttttttggagggaaaagagtgtttaaacgtgggagaacaagaaacaaagcttgtagccaaattaaatagaagacaaataatcattagtgagaaaaattcttagattcctaatcttctttgtgtcttttccatcaaaccctaaaaagattcacgtaagagatgtcgagatttttggaatagtcaaagaaggtcgatcggattttgagctccctattgagattctatcgataattccgacggattctttcgagcaactggatctcgcgaagaggcgattatctgtaaagtgtcgaatttggaggaagaggtggtcgaattgaggaagaaactccatgagatggaaatgagtattcacgagcttgaaagggatgtctaggcgtggttagttttcgacgttttcaaaattaacacttaaacttatttttaaaaagtaaactgtaaaattaacatggttttagttaaaatttatcagttattttaaaattgttctaattttttttagtgaaaattattattattttttaaaaatgagtttaagtgttaaatctatattacgtgaaaacc

SEQ ID NO: 8263 - DNA, 3000 bp, Unknown; identical to SEQ ID NO: 8248
  misc_feature (1)..( 3000): cDNA_ID_2127789_gDNA_ID_1621202_Annot_ID_174964 3000 nt of promoter + ATG

SEQ ID NO: 8264 - DNA, 3000 bp, Unknown; identical to SEQ ID NO: 8247
  misc_feature (1)..( 3000): cDNA_ID_3048018_gDNA_ID_1621202_Annot_ID_174960 3000 nt of promoter + ATG

SEQ ID NO: 8265 - DNA, 3000 bp, Unknown; identical to SEQ ID NO: 8246
  misc_feature (1)..( 3000): cDNA_ID_2990119_gDNA_ID_1621202_Annot_ID_174959 3000 nt of promoter + ATG

SEQ ID NO: 8266 - DNA, 3000 bp, Unknown
  misc_feature (1)..( 3000): cDNA_ID_3048022_gDNA_ID_1621202_Annot_ID_174956 3000 nt of promoter + ATG
attgatccttgtcacgcggtttcttaggatcttttgtcccttctattccaaatttttaattcctatgccgtttttttcttctatataagcggtaaatatcatctctattggttgcagatcgtcgaggcaccggaattgctccgataaatctctcattcttctctgtcatcgatttaggtttcgtctgatttctcttgttacatctgttttatctaaccacaattacctctgttctatttcgtctctgctaattgaaggatgtggttgatctgtcgtcgctcccttttactttctggcggtttcttctttccctttgcttcctttttggagttcttagattacctgatttcttttcttttctgaatttctggagaaatttctacgtgttagattgtgtagatgttgaaggcattgttggagggaggatggtttacgtatgagttggtgtttttggtttcttctcttctatacaacttttggtctaattattgttttatttaatattggctaatgttggtgaggtatgatttcgttctctgtgtcttgttgtgttttccagattctcttcatcaatcaattcagtctgtttctcttctgtgtacacattcagatgaaagatgaacatatattccttgcagacgagttttttcctatctcttgtcctttttataagtagttattctattgaagtcttcaagtttctcagtaatgctatgtcttagctcctctcatgtggtttattcaggttttgttcctctttgcctccgggatctgttgcaatctatttgttctaacatacgccctggttaactggtctattcctctttctctctatttatagtgtttgatcctactctcttatgcttgtgacggtgtttttttttatgttaagtgtcccattcttttaggttttttgaagatgcaaagaaggctagttctgtctcagtgtattctgaaagatatctttgatctgtcgtggttcctgttacctttctggcggtgtcttatctccctttgttttctttttaaggtttttaatttccctattacctgatgtttttgtcgttttaaatcgtagaggtcaaggcattgttggagggaaggatggtatgagtttaattttgtgtttctggttacttctcatctacacacttttttccccctaattgttttatctaatattggctattattgtcagtgaggtatgatttgtcctctgtgtcttatgtttcccagaattttcttcaccaatcacttcactacgtttctctgctgtgtacacacttgaaagatgatcatatattccttccaaacgagtttgttcttataccttgtccttttaagtagtttttgtactgagcattttcaaatatcttaggatatctatctctgagctcctctgatggagaaggcttggcctgaggtctggactgtaccatcagggagttctcaacatgacttgatttttgatttttcaggttaaaggtagattttcgtagcgatgttggcatttctgttttaagcctaaggccctgtcttttgttatagatattcaagcttataaaagggaaaaggttcaggtttactaaatggattctttcccctttatctctgttggtgttatctctcatgctacatctatattagtgatggcttgtttttatgtatgtcaagtgctccgctcccctatataggtatgttgaggatgcaaaggtggcaagttctactttgatctatttttctcgaaattttcatctacagtcctcttttcattggagatgtctctatttctggttctatgctctgcattttcctatggtttaaatgctaatcacttcggctcgagatctactctttctacatgaattcattatcttcatataggaatttggatgatgctaggacgattctgtttcgacctgttcgcctagatttattggcaacgagggatggatgtaatcagcttttcttcccttatctgttttccctttctggttatgtaatctgcatcttctctatggtaatctcttctgcttcagatgaaatcattatcttcacataggagtttgtcttcacataggagtttggatgttgcagtggaagttctgtttcggcctgcttgcctacatcgccctatatctgttacatcatgagtttatgaggtggcttatttctattgatatctatagtgttgattgccgaggaaggaaaaacaagtttcaaccgtggaccgtggttgtctcaacagggatgaacttggaggttccatctctggttggattcaggtgttttgagctaatcttcttctgggtttacttctctaccatactttctaccgatttgaagatttgtcttctgtacctttgatgatgattctcagttttgcagcaatgactcagtttttcgccttctagtcattaaactactttcccacaatgagatacttagtgtttttgtaggttctttcacacttgttagcaagggtatatgtatgttgccgttctcagaatttggtaggtatgaatcacagatgtcattgtttattattgataacataagtgattcttgctggtagtgtgacctcttgagggcaggctcatagaagatgaagagcctcttggttttgatgataatgctccctacttctgagttctgaggtttctttattcctgggttgtagctggtttaatggttctgtagacatttgataatgaagtctctcacttcattttgtttgggtgatgtaaaatgttgtcagtggattttaggtgaggcttaatctcatggattattcttttgaaatcccctcaggtgaatcagtgaaaattgagaaagtgatgttcaacttcttatctcttaatccttcatttgctctgtcacacattgaagcctattttcggttgcagtttgttaagttttcatgggaagcgttgtctttggagtgttctgaagttgactttaatcctgaaagaagaaggatatgcttttactgaagttatc

SEQ ID NO: 8267 - DNA, 3000 bp, Unknown
  misc_feature (1)..( 3000): cDNA_ID_3048031_gDNA_ID_1621202_Annot_ID_174949 3000 nt of promoter + ATG
aatgacaaaacgtggcaccttgtaattctcttaagctccataattttggcttattgtattaaatagttccatatggtgtttcttatttttttttggcctatttggctttttatgtggtgttgacaattataacttgatccctaagcaatatctactttggatataatacaaatggagcaaaaacacaacactttcatttttgaagaaaattatgtaaggtgattgtgtgtttattagtagtcccaatctaatagagagaaattaaattctaggagtgatcattttctaggatagttaaaacttatggatgactttcatatgagtttagatctggattttggtggggggacataagaaatatagatgcatatgtaagtgtacacaaatgaatgggccacttgacacctaatgatacaaattttcaaagaaaactcagattgcaataatggaagcatatcaatagtagtatgagatctcaatctacaatcttcaataacatttaaaaaataaaatccaacaacaactgtagcgtataggaattgttcatctcttttcatcaaagaatatttaaaattttgttagacaagaattaattaatgatttatatggttgagaaaactttttaaaaagttgtaaaactcatcgaataataaatcatttttaatggaaaatatagtttttatttttattgtgtggtattgctcggactcaaggatacatggagagagaggcagagtcaaatccaatttttcaactatcttatatgatattcttctgtgctttttatagtttgcccgaccataagaactggtcctaactttcattttttttgtttccatagaatatgtattcctatgatttttttttatagaattaattgtgttagttaatgccaaattaagattctcttttttaaaatcactttttgaagaagcacttacaagagagttgtgttaagaatagattccagatggaaaagttggcaagaaaagatgttttaagtttttgccttgtcgtctaatccaacggtcgatcttcgttcatatcaagaatccttatgacgtggaccattctcttccctccatctgtacctcttcccaacctctattttttaatttacatcgaaaataaataagaaggattgcaaaagaaaaaatagaaaaaaaactctctgttcttctttcttcttcttcttcgtcgtaagccattaccatttcttctccctctctctgtttttctttgttgcgtatctgtacttagttttcaaacataaaaataaaacatatctttagctgatgttgtcttcttcttgataaacagattttctacagctttttttctttctaatttaataattcttgagactttttaaaaccctctgcgaaacagatgattcgagttttggtttcttcatctgtgttttgattttttcgtcttttattcttagtcaaacacataaatttcttttactactcttcgtagatgacttctcatgttccaaaacatcctcgtaaatgtactctttctctctttctttcctacacacacgtgtttaatctgtgttgttcttacacgtctttttaacttttgcgtttgaccttttatctgaatcctgtgtttgtgtgtctgtaaatatatatatgtgtgtctatgtgtatagtgctctgtttcttgtgattagactcatatgtcttattttcaatattaactataaatatataagtcacgcctagttattagtttttatcggtacgactaaatattcagacatcagttcacgtttcaaacctgtctcttcacatagttaagaaaataaaggcatcaaaaagattactagtaatgtttgtgtctactttatacatacatatgtcttgtttctttgtgtttttcagaatctgatctcttcgggaacgtttgtttaatttgtttcagcctttgaagatatggtgaagaatcttaaagtggatcctcttgctaaggtcactgcctccaccacttccatggtaataaagattctctcttctctgtttattacagatgattcatatgttttggttcttaggatgatttatcagttatgtgtttttgtgttccttttgttttgcaacattaaaggtttctgcaaaagagaataagaatcagtcagaggcagagccatcatattatgaaactcttgagacatatcaaggcctgccttgtccttatggtggctactatggatactactatccaggttttgcttctttttacacactgatactatataatatgtactcaattctgcttttagatgatcataatctgaattagcgtgtttttacaggtcttgatggttcagttggagaagcaaaggataatggatactatggttatggaacagaagttcagtacccggtaatcaaaacttccttgtcatgaagagaatgaattactcactcgggtgactcgatctttttaactgaccattttcttgatcttgattttaaggtaatgcaaggggaaaatgggtctgtgatctacttgatgccagggtttcagtcttatgatgcaagccaaacttatatgcctataaacccggttggtgtatcgagtcaagcacttcattcgccgatgtatgctgctcagggttattatcagaaccaatttggttatgcagatgtttcatcgcccacatatttatgggaccctgttggagacaggtatgtgtatggtgttgcttcatataccccacccttgaaacagaacatatcttcttcaagtcataaccacaacaattattattcaaagagcaagaactccttcacgggtcacggcatgggagatcgtcctaaaacaccgcgaaaagtaacatttacactctttaattcttctctctttcacattacctgaagaggtttgactcatctttttttctttgtattgatgctataggcatcacagaacagctatgccccacccccactgcttaaccaagaaaaaggtcgcattgcttacccgatg

SEQ ID NO: 8268 - DNA, 3000 bp, Unknown
  misc_feature (1)..( 3000): cDNA_ID_3048035_gDNA_ID_1621202_Annot_ID_174948 3000 nt of promoter + ATG
tctttctactgacatacctttggtccagacgggttgacaattctgggaccagcaacatgatagaggaaagccaagcagttatttctaaggttcctgctggtgtgtcaggaactgcactagcagcttcactcttacgtgatggatggagtgtgagttttagtcttagtatacacttccagtttacagtgtttcaactctgtttgtggtgtatatatcactctttttatcttgcagctggccaaaatttatgagaagtatcaggaggctgttgatgccatgaggcatgagcaattaggtagaaaggaagctgagatgatacttcaacgggtatgatctatttaacttgttattaccaggtctttgtttaaaatttagatttccaatcttttccacttttgttttgtctatattctctatgtttcactagtgatttttcaactgcagttcactaatgacttgagaataatatttttcttctcctgttaacttactcttggtatcctgctttgtaggtgttatccgaattagaagagaaagccggatttatccaagaagaaagaggtatgatctacttctgtgcttctggagccatatgttttacgctcccaaagatttctttcactagtaatatatttgtatcttgttggagacacgcttaaatctgtttttgttcccaggggagtatgagagggtggttgaagcttattgtctagttaatcaaaaactccaggattctgtatctgaacaatcaaatatggagaagttcattatggagctaaaggtacctgatattgttatagtggttgttcaagatgcgttcttgtgctgttcttatacatttatcttattgataggctgacttgaggagacgggaacgtgaaaacacactattgcagaaagatatatctgacctacagaaacaggtaatttgatgatctattcttcgctgttcagtgttcaccatgtttgttgtggtcttcagtttcttgattaccttaacttgcaatgttaattgttgagactttgtctcactaatgtatgcctggttgttgcccaatcgattgatactgtgtttgtttctactatttaggttacgatactactgaaggaatgtcgtgacgtccaacttcgatgtggagctgccagggatgatgatgaagatgattatcctctgctctctgatgtggagatggaaatggaatctgaagctgataaaatcatttctgagcatcttgtaagtttgtttctttatctcgacgtcatgttttgtgttagattttattttgtaaaataaattgtggatgactaatgcttgtcctcatgttgggatgaatttcagctaaagttcaaagatataaatggactagttgagcagaatgttaagctgagaaaccttgttcgtagtctttcagagcagattgaaagtagggaaacagagctgaaggtatgaaggattttgcatgcatagtttctttggtagggtgtgaagttttaaaagaatttgtgtaacgtcaggaaacgtttgaggtagacctgaagaataagactgatgaagcttctgccaaggtagctaccgtgctaaaaagagctgaagagcagggacaaatgattgaatccctgcacacatctgtaagtatttccaccctccaaatcttttctctatcgcagcacttggtaaattgatgttgggtttcttttcaacggtttatttattttgtacatttttcgtccttttcaggttgcaatgtataagcggttatatgaagaggaacagaaacttcattcatctgattctcgttcttcagatttgtctccaggttctacttctatgcattattacgagtttactgcactatgtgttcttagataccctctattattgacctcatggctaagtttaattgaattaaatgatgtttcagttttatcttagaaccagttcttttcaaaattttaccccaaatgtcatcaaggtttagtgctgttctcaaattcaaacgaaatctatatttggaacagctaccaaagtttggtcttattttcgtatatctcaattgtcagtaatgaaaattaatgctgtacgcacaaattttgaagtgtattctggcttttcaagcataatccactttcctggaaatctcatcttgtttccttaaagtaaagaggtttgcaggctgttacatgctttgctcataaaattgaatcatagtctcagtggcactctagcttttcgaatgggtgacagagatgtattcttgtagctgtagtgccaggaaggaagaacttcttacatctgcttgaggattcagaggtatgacagattgctaaatcattctattctcttctttgttgtccacttttctagggtatcaaatttgttgtttggaactcaccttattggctgaattgcttgttccaggaagctactaaaagagcccaagaaaaagcttttgaacgcatccggattctcgaagaagattttgcgaaggctaggtatatttatcatcctcttgtcttttgtctttcatttcttactgggcaagtgattatttttgtgcaaaaagttttgtttgataaactagggtacctctgggtatgtaacacattttctagttggatagtcaagttgagagctaggacccagactatactagcgaaggaaataaagtgtggaaagcgtagtatctagtgtgaaacgtgtttgcagatgcaggtggattgctgaaaatactaatctgagcttatgtgtttgcaatcccagtgtcgatgtcctatagaagttataatcgtacgtcttgatacatagagaaacaacatgaaaaactggattgtatcttatgcagcatatccatgaaacgtaaactgtagttattgatttttgtcattgtttcctgtaaatttattttactgaacattataaactgcgttgttttcatctttcccctttggatttttaggagtgaagtaattgcaataaggtctgaacgggataagttggcg

SEQ ID NO: 8269 - DNA, 3000 bp, Unknown
  misc_feature (1)..( 3000): cDNA_ID_3048039_gDNA_ID_1621202_Annot_ID_174947 3000 nt of promoter + ATG
acaaaaataaattatcttcattgctttaaaaagcttaaacattattctatttaaaaagttaagaacatttgaacacaacttgctgatgttcacactataacgagcataaaataaaataaaaatacattcttcgatttaatagtagactttacttgatccattcaggtcttatcaatgaaaacaaagactacagagagcttgttggtacataataattagcgtagatgaagggtaatattccaaataaacatgatcttcaagaatttatttcaataaatcaatttcataagagattacataccatttttttttaccatgttcactagaagtctagaatccaaaaaatagacttgcgcgaaagaagagtctctaatcagtaaccacaccatatagttacttagcatataaacggagcattcacaaagcggtcattgcaatacaatcctggtctctgaataaacatctgtttcttcagaatctctcttgccctcaataccatttccttgtttgtaatcttatctttatgatcagtctctgacaaaaccatttggatggcattactaaacgctccaaacgcttctcctttcttcttaacatctgctgatgtctcatctgtttgacatccactcaacagaatccctcggtcaggaaacaatccgttgcttgatcttcctccataaatctcacgatcgctcttcacttgtgcctgcattgcgggtttcatgtagtgttcatcgttcagcgtctcttctatataccctcgagcactttcttcgatcttaccaagtagcgtactttggtcatttgttttccttagcttggtaagaatcactttcatgaacttctttatcttcgggctcgaatcttcaccaaagacatcaaaaagggtgggtctgattttcccaatctcgatattgtcttgcccagtttgttgtttgagaagttcaataaacctctccaacggcagataccttgatctgacaacttcatctccctcgcctacttctacgatctcgcgcgtctctacatgagaacttccgattccacaaaaagcaagcagtttcacaaaaatgctatgcaaacagtttttaaactcgaattcaaaagaagaaactttggattctcgatttggcttcgtcgtggtactctctccgatctgttccttagcttcatcaatgagcccgccgctgtgacaagagtctgatacgatagttatctgacatccctctggaacttgttccactaaatccctgaaatcatcatctggcaatgcaacacacaaaacagcgtagatatataaaaaaaaaaacctcaatcatttctattagtgtccatgtcaacataattcaaaactagccttgagacttaacagagtcaaagagaggggtaaacagattctaaacagagcactctgttttaaacagagcactctgtttttcttcattaaactaaggaaccattccataataaactcttaccaggaattggattcaagtcggaaggaacaatacactcatcaaaacctgtatcatcctcttcccctgtttccggtgggactctcgtgccgtgtccgctgtaatgcacgaataaaacgtcaccggattttgctggctttatgagctccgacaaagcctgacggatgttctttcctgtgggttgagtgtaagattcgtcggtgtcaatcagcacagtgatatcttcctccgcgaatccgaaccggtcaacgagacacttatgcattctatggacgtcattgacgcagccttgtagctcctccgtggttcctggatagttgattcctatcaacaacgctctctttgccattcttgcaaccttcaagagttctttgtcggagaaaaaacttccgctggatctaacgattcttcaatgagatttgtgatgaagattaacattaaaatactaaacattattggcttagtgggaactaactttatgtttctctatttaaatgatggcacgtgaaaattgtggactaattatcaaaaaacataaaacaaatcgccgtctgtggggatcgaacccacggccacgtggttaaaagccacgcgctctaccactgagctaagacggcgagctgatacaacatttcgtaattaattattaaacttaattttaatccgcatgtgtttaaggttcttctataattagtctaagttagcaaaaattacatagtgatgatgatttgtaaggccaagtgaaactatatcatcaggatcgtgatcctataatggatgtttttcttaagtgattttatagcaaagccaaatgaaatcttaagttattctttttttacaaggttcagtgttttaggtcttatcttttgtgtaacacctactttcatataatgatatttatactcttagcgaaaaaaaaatgaaatcttgaacactaatcagtaaaaattgtcaaaaaaaaaaaagaacactaatcagtaataacctattgcgatgagtatcaagtcgacagcaggttcactttaccatttttctcacaatgttggggaataagaaatgaagaattaaaaagaatttttaagttttgcctattttttgacagaaagaaagaatatttttcctatatattttaaaaacaaatcaaaacgccgtctgtggggatcgaacccacggccacgtggttaaaagccacgcgctctaccactgagctaagacggctgaacaataattaaatcataataacattcaaagcataacctaatcagatatgttgaagcccaacaagaggcctaatatctctattcggcccaactaacataacaacgacgtttaattgacgcctggggttttctgtctccggcatagcataatttttcgtcctcccgaagcgctttttcatcttcctttgttctgggtttctctccaaaaatcgccggagaaattcaaatcgtcatctctaattcgtcggagaatccaccgttaggtatataaacacggtttgtttctgaaattagggtacgaaaaa

SEQ ID NO: 8270 - DNA, 3000 bp, Unknown; identical to SEQ ID NO: 8241
  misc_feature (1)..( 3000): cDNA_ID_1841710_gDNA_ID_1621202_Annot_ID_174941 3000 nt of promoter + ATG

SEQ ID NO: 8271 - DNA, 3000 bp, Unknown
  misc_feature (1)..( 3000): cDNA_ID_3047984_gDNA_ID_1621202_Annot_ID_174990 3000 nt of promoter + ATG
gcccattaaattttagggcccaaaaattaaaaagtttcattacgaattcgttcattggttggtttttttttttttctgaataggttgaataatttggttatcccaaagccataatatttttgtttatctgatttatctcctgttcaaatgacttacctaacgcgatctggctgagtgaaaatcaatactaaaagattggataaatttgtgattgtaaatttgtaattggattaaaatcaacaatatagccaatatagcaatctatttagattttaaggcatttttgtatataacaaataaattaacctcgctcgtgaattaaaaactcacttgcattcgccacaagagatcactgcaacctttaacacggggacggttgtctaaatagttccggcgagcatcttcgacggcggctcgttcctcaggtgtgccggctttgggatcaaactcccatgtttgacgtccgacgaagttgttgctgctgaacaagtaaggatcttctccatttccctctcctatcttcaacttccacataacgatggtcctagctatgtatagttacgtgtacatatatatactcaacgagtttagaatttcatagaaataatcaaatgatagtatattagagagtccagtttgtaaacaggcgtacggtatatatagataaaaaaaccatgtattaaaagatcccttatgttatgaatatgagatggagagagggtaagagagataagagagtgaccgagagaatacttgtgctgggtcgatgtttgttttgcgattgatgattatactttggggagtttcatgtacgtatgtttatatatatagaggtaggcctccatacagtatgacaattgaataagaataatttggggatattatatgtacagtatgtaagagcatcattatccatgagttcttaagaatatgaaaaaatttcttaaaatattatataaaataaaataagaatttaaaatataagaaatgactcttaaaagaggaaaatggttcttagataagagatatttgctacattctctcttcttgttaagagccccttaatatttaattattattttgtatatcaaaatgttaagaattttgtgtaaaaactcaccattaaggatggtctaagtatgtatagtttacgaacattaaagacaaagcttaaagttgttgacatgaaaattacactcttcaactctacgcagcttaattgtagttacaaagttttctctccttctcttgtttttaggtttttattttatttctcaataatgtcttattgcgataacatcgtattatttgcttttaggagtatatataaatgaactcagaagacttctcgaatttttgctcattatgataaacagatattagttcttattatctaatactagctagtttgtagttaggttccatataattaaataatcagtcccatatcacaatatcaaagtcatatatataatcaaactcatttaacaaatgaaatggtggtccacctgtttagttcatgcaacttaatagagaatatgtgtacttttaaaaacactttaatttgattttacttggggagagtgtagagaccactcaaataaacgccgtataaaaaagttagaaacgatacggtcgcacttaattaccacaccgcaagaagaaacgatacggtcgcacttaagagatcaaagctttttctgtggtacgcatcccatgttacacgtggccgtatgtataagcgtaaattgcgattgacaaattgagttagctctctttcactctcactacatatgtttttgtcaaattactatatttagatcataacgatcatgtgcgtcctacatttttatacgaacatttgtccactctgcatcaaatacggtgcacgattcgtttattgttaggtcgaccaccggtcatgattaaatgctgattgatacattttaattttggttcctttttataatggtataatgtgcagtaacagttgggattgaattacatacggttaaaaaacaagtggcgattatgaatgatttgttagtcgttcacaaaaacaacgacgattcattttttttgtcattatgtatagggatcccttgtgtgaattatcgccacttgttttttgatgaacatatattgatgaacacgtgaattatcgtgaaaagaaggctctgctattttgtcatctaatcccctagctactttcctcctataataaaatgatttcataaatattttacggttttagtttaacataaatttagtgagcttaacatgtttatatttaatatttatggccactcgatagaaacattagaaaagaaaagggaaattggtttaatacatcccaactagatcgtaaatttaaacttcataaattctaagtgtgtccaacgctcatattcacaaccggacatttgaaatccaccgtctacaaccaaacttatcctagggctttaaatacaccctttgtttcggatgacaatctaaacccctggtttttagctactacgctactctctagataaatgagataactcttcattgatactcacgtcacgtacaaatcactcccaattacaaatcaatttatcttcttttctcaactttaatataattgacgagttttttcctcgagtctgacaaaaaaaccaaaaaaaaaaggtttagtatttagggctggactcaaattatacaaacacttgcggaatatcgtatgggctttgggtgctaagtgaggcgacatgaagatattactggcaaatattcagtcacgaaccattttataaggttgactaacaaaagtatgcatgcaaactaccgttgaaatgtgacttcaaaacgaattatgtatgtatgtgtgtgcgtgtaaatgaattcaatttcacacacttctcttctttaattttctccacatatattacgtgcatctcaatgcacgatgcataaaatatgccatatctttagattattaaattaattaaggtctaaaga

SEQ ID NO: 8272 - DNA, 3000 bp, Unknown
  misc_feature (1)..( 3000): cDNA_ID_2104927_gDNA_ID_1621202_Annot_ID_174989 3000 nt of promoter + ATG
taacagtctatatatatatatatatatatatatttaacaaataggatcgcacaaattggacttgacactaacaaattgtttatgaagcttaaaaattgtttcagaatacccaaaatatagtataaaggtgctcaagaataaaattgtttcttgaattactgttttttcaagcttcatatttttttttttgttgaattctggataaagacagggtaacaattattaattagctagcacgagagagacatcacttcacttcatactctgtacgtttaattcataaactatgttgacacgcacaaaaagtaaagaaaaatagataaatacctgcatacgccatatgagatcgctgctagctttaacacgaaaacgatcatcataaaatttccgacgagcttcttcgacggcagctagttcctccactgtgccggcgtccggatcaaactcccatgtctgtcttccgaggaagttgttggtactgaacaagtagggctcttctttgtttccatttgctatcttcaacttccacattctttagaccttaattaatttaataatctaaagatatggcatattttatgcatcgtgcattgagatgcacgtaatatatgtggagaaaattaaagaagagaagtgtgtgaaattgaattcatttacacgcacacacatacatacataattcgttttgaagtcacatttcaacggtagtttgcatgcatacttttgttagtcaaccttataaaatggttcgtgactgaatatttgccagtaatatcttcatgtcgcctcacttagcacccaaagcccatacgatattccgcaagtgtttgtataatttgagtccagccctaaatactaaaccttttttttttggtttttttgtcagactcgaggaaaaaactcgtcaattatattaaagttgagaaaagaagataaattgatttgtaattgggagtgatttgtacgtgacgtgagtatcaatgaagagttatctcatttatctagagagtagcgtagtagctaaaaaccaggggtttagattgtcatccgaaacaaagggtgtatttaaagccctaggataagtttggttgtagacggtggatttcaaatgtccggttgtgaatatgagcgttggacacacttagaatttatgaagtttaaatttacgatctagttgggatgtattaaaccaatttcccttttcttttctaatgtttctatcgagtggccataaatattaaatataaacatgttaagctcactaaatttatgttaaactaaaaccgtaaaatatttatgaaatcattttattataggaggaaagtagctaggggattagatgacaaaatagcagagccttcttttcacgataattcacgtgttcatcaatatatgttcatcaaaaaacaagtggcgataattcacacaagggatccctatacataatgacaaaaaaaatgaatcgtcgttgtttttgtgaacgactaacaaatcattcataatcgccacttgttttttaaccgtatgtaattcaatcccaactgttactgcacattataccattataaaaaggaaccaaaattaaaatgtatcaatcagcatttaatcatgaccggtggtcgacctaacaataaacgaatcgtgcaccgtatttgatgcagagtggacaaatgttcgtataaaaatgtaggacgcacatgatcgttatgatctaaatatagtaatttgacaaaaacatatgtagtgagagtgaaagagagctaactcaatttgtcaatcgcaatttacgcttatacatacggccacgtgtaacatgggatgcgtaccacagaaaaagctttgatctcttaagtgcgaccgtatcgtttcttcttgcggtgtggtaattaagtgcgaccgtatcgtttctaacttttttatacggcgtttatttgagtggtctctacactctccccaagtaaaatcaaattaaagtgtttttaaaagtacacatattctctattaagttgcatgaactaaacaggtggaccaccatttcatttgttaaatgagtttgattatatatatgactttgatattgtgatatgggactgattatttaattatatggaacctaactacaaactagctagtattagataataagaactaatatctgtttatcataatgagcaaaaattcgagaagtcttctgagttcatttatatatactcctaaaagcaaataatacgatgttatcgcaataagacattattgagaaataaaataaaaacctaaaaacaagagaaggagagaaaactttgtaactacaattaagctgcgtagagttgaagagtgtaattttcatgtcaacaactttaagctttgtctttaatgttcgtaaactatacatacttagaccatccttaatggtgagtttttacacaaaattcttaacattttgatatacaaaataataattaaatattaaggggctcttaacaagaagagagaatgtagcaaatatctcttatctaagaaccattttcctcttttaagagtcatttcttatattttaaattcttattttattttatataatattttaagaaattttttcatattcttaagaactcatggataatgatgctcttacatactgtacatataatatccccaaattattcttattcaattgtcatactgtatggaggcctacctctatatatataaacatacgtacatgaaactccccaaagtataatcatcaatcgcaaaacaaacatcgacccagcacaagtattctctcggtcactctcttatctctcttaccctctctccatctcatattcataacataagggatcttttaatacatggtttttttatctatatataccgtacgcctgtttacaaactggactctctaatatactatcatttgattatttctatgaaattctaaactcgttgagtatatatatgtacacgtaactatacatagctaggaccatcgttatg

SEQ ID NO: 8273 - DNA, 3000 bp, Unknown; identical to SEQ ID NO: 8240
  misc_feature (1)..( 3000): cDNA_ID_3048044_gDNA_ID_1621202_Annot_ID_174940 3000 nt of promoter + ATG

SEQ ID NO: 8274 - DNA, 3000 bp, Unknown
  misc_feature (1)..( 3000): cDNA_ID_1810916_gDNA_ID_1621202_Annot_ID_57719 3000 nt of promoter + ATG
ttgtcatccagaaattcagaagacgccaaaatctgataaactacgagagtggtcagttcatttacctttttgggatgaacttcgtaaactttcatatgaaaaagtcatttacatcatccaactgcccacgttgttattcgcaggtacttagcaatgttgagaaaagcttcaaaggagggcattgttgcagaaactatcaatctatatgaccattttttcatgcaaactggtgaatgtagagctaaggttacagcagctaggctcccgtattttgacggtgactactggccaggtgcagcagaggatcttatataccaaatgagtcaagaagaagatggaagaaagggaaataagaaaggaatgctcaagaaaaccattactaaaagggctctaaaagcttctggtcagactgatctatctgggaatgcttccaaggatctgcttctaatgcatagagtaatattttctttctatgaatattgcttcctttttgtatatatttttttctcatttgttttgtttttcttgttaatcatattcacctgttttaccgattcccagctcggtgagaccattcacccgatgaaggaggactttatcatggtccacttgcagccttcttgcactcattgctgcatactgatggtatctggtaatcgttgggtctgcagccagtgcaaacacttccagatttgtgacaagtaagaattctttcgaggtctttttgctctttgattttataatcccttctttgttgtattgcacataagattatgtagaagtcccgagagatacatttattggatgggctatgtgtccttgttactgattaagttcctctgaatctaaaatgtcattcttctttttaggtgttacgaggctgagcagagacgtgaagacagggaaaggcatcctgttaattttaaggataagcatgcgttgtatccagtgagttgcattttcttgttgaggatagtgttctttagctttgtctatgatcagttttgtgaatattggtggtattgatatcgcaggttgagattatggatattcctgcagatacaagagacaaagatgaaatactcgaaagcgagtttttcgacactagacaagcatttctgagtctttgtcaagggaaccattatcagtatgatacattgaggcgggcaaaacattcgtccatgatggtcctttatcatctacataacccaaccgctcctgcctttgtcacgacctgcaatgcgtgtcatcttgacattgaaactggtcaaggctggcgctgtgaagtatgtccagactacgatgtgtgcaatgcctgtttcagtagagatggtggagttaatcatcctcacaagttgacgaatcatccatctttagctgatcaaaatgctcaaaacaaagaagcgaggcaattgcgagtcttgcaggtatacactatactgttcctttctaaaactgatggtgcttctctcttggtcctgaaatttgtatgcaaatagtaacattttttttttgttctcttcttttggttttgcagcttaggaaaatgctcgatcttctggtacatgcatcacaatgtcgttcggcacattgtcaatatccgaattgccggaaagtgaaagggctattccgacatggtatcaactgcaaagtacgtgcttcgggaggttgtgttctatgcaaaaaaatgtggtatctcctgcaactccatgctcgggcctgcaaggaatcagagtgccatgtacctcgttgcaggtaaacaaacctcatgaaattacatcaaccttacatttaagacgtgaaacatatttggtccatttgattttgtgttgatgatcattgtgaacatctctgtctctctgttcagggacctaaaggagcatctgagaagattacagcagcaatcagattcacggcgcagagcagctgtaatggaaatgatgagacaaagagctgcagaagtcgctgggggctcaggttaaaaaaaacttgtatatttagaaagatcaattcaaagttgcaaaaactttcatccttctctcgaaggtaacaccttttggaagaagaagaagaagagccagttagagagagacagattgtgaaattagcttagattggtatttaacagtcacgggtcagggattaacatgcgagctttaaaccaaggatgccactttccagaagaagaagaaagagagcaatgccagccttcttcacagatgacaagagtgttgagagattcaggtttgatggggtttggttggctgatcttctgattctatctatacatacacacacgcgcacacacacacttgcccacttctatttttggtaatttattgtatttttgtaaaattgacatttctgattcgggaatggcaagagtgtaacatatacagtacgttaacgtgtttttttttttttttgttttttttttgtgtaagcaaagtaagataagagagaatagagagtctttagattctctaccactctttttttttggtaatttgtattgatgaaatttgtattcacactttgaatcaataataatttagttctttgattagatttgtaaacgtgcatgttttatttgcagttagtgtgttactgtgattgagaagaaggtttagagagacgaatcttaatgccacgtaagcaggagattctgataagtatctaactgggcgtttggtggagtttgagaagtatctaaattccaagccaccagaaacggacacgtgtctaaacaaggatagagtgtagaacgagaaccacttagcttaagcaagacagagagtctgatgagaaaactgcacaagaaaatcagcaagagtaatgataatacactgtccttcgtcatctctctatcgcgcgaaattgttatacaacagaggtagtagtaaatctcatcagtgtcagtgtcagagtcgcttggtgactcgatctgcggctgttcgtatatccacggcgacgatcggggctatagccgcggcggttatg

SEQ ID NO: 8275 - DNA, 3000 bp, Unknown; identical to SEQ ID NO: 8255
  misc_feature (1)..( 3000): cDNA_ID_1810909_gDNA_ID_1621202_Annot_ID_57721 3000 nt of promoter + ATG

SEQ ID NO: 8276 - DNA, 3000 bp, Unknown; identical to SEQ ID NO: 8272
  misc_feature (1)..( 3000): cDNA_ID_1810905_gDNA_ID_1621202_Annot_ID_57722 3000 nt of promoter + ATG

SEQ ID NO: 8277 - DNA, 3000 bp, Unknown; identical to SEQ ID NO: 8271
  misc_feature (1)..( 3000): cDNA_ID_1810901_gDNA_ID_1621202_Annot_ID_57723 3000 nt of promoter + ATG

SEQ ID NO: 8278 - DNA, 3000 bp, Unknown
  misc_feature (1)..( 3000): cDNA_ID_1810897_gDNA_ID_1621202_Annot_ID_57724 3000 nt of promoter + ATG
acgggaagcggtttgttggcccaataacgtctctgattttgcaactacgcaaagaactgtacttacagccttatgaagaaatcaattggatgaaagtccgccatctttgtgcaaaggtaagaatgttaggatgtatcgacatttctctttatgattttctttcatggaaaagaacacggatacattcctctactttaccttaggaagatacatattatccccgtccactggttcaagagttggtatgggacagtctttacatctttgcggagcctttccttgcacgttggccatttaacaagcttcttagggaaaaggctcttcaattggcaatgaaacacatacactatgaagatgaaaatagtcgttatatcaccattgggtgtgttgaaaaggtaaaaacaccttaccttaagacacaaagtattgagcatctggagttaacttcagtctctttctgcaggtactatgcatgctagcttgttgggttgaagacccgaatggggattatttcaagaagcacctctctagaatctccgattacttgtggatggctgaagatgggatgaaaatgcaggtatgtccatggagattggaaatccaatttgttacgtttactaaccttgagttggtaagaaatcgaattttttttgattatgcagagctttggaagtcaactatgggatacagggtttgcgatgcaagctttacttgcaagcaatctctccagtgaaatctctgatgtactcaggagaggacatgagttcataaagaattcacaggttcgatatctctgcagcatatactgtagcacaaggaactatttcttttgaaaaatggaacattagcttaaaattgataaacaattgaaggttggagagaacccttcaggtgattacaaaagcatgtaccgtcatatttcaaaaggagcatggactttttctgaccgagatcacggatggcaagtttcagactgcacagctcatggcttaaaggtaaccagccgttaaaactaaacacattgacatgttcttcagtggcatgagtactacatccttgctgttttctggtctcatagtgctgcctgctgttctcgatgttggcgccggatattgttggcccaaaacaagaccccgagagactacatgattctgttaatatcttgctctctttacaggtgagcattatcagacatagaatagaaccaacatcatcaaagaaacacccattttcaggtcgtgacagtttcacttgtttgcagagcaaaaacggaggtatgactgcctgggagcctgctggtgctcccaagtggttggaagtaagaaccaaaccccataattattttcaaacaaccaaaagatactttttaaaacatttgcggtcatgtaaccttcttcatgtatttgtctcagttgctcaatcccacagaaatgttttccgacattgtgattgagcatgagtacagtgaatgtacatcgtctgcaatccaagcattgagtcttttcaagcaactctaccctgatcacaggacaacagagatcaccgctttcatcaagaaagctgcggaatacctagaaaacatgcaaacacgtgatggttcatggtacactagcgattacgatttatctgaaattgttcacggaaatccaaactaacaagaaatgaaccattgttctttgaatctacaggtatgggaactggggcatttgcttcacgtacggtacatggtttgctcttgcaggcttagcagctgcgggtaagacttttaacgactgtgaggcaatacgcaaaggcgttcagtttcttcttgcagctcagaaagacaacggaggctggggagaaagctacctctcttgctccaaaaaggtacacacttgcacattttgatgaaatcaacttgatgtaggatcattcagtcactacaatcctcttgatctatgcagatatacatagcacaagtaggggagatatcaaacgtggtgcaaactgcttgggctttaatgggtctcattcactctggacaggttttaatcattcaatattgatcgacgaaaatacaattaattaatgaatcagtactatatatgaccagtgctttacacaacaggcagagagagatccgattcctcttcaccgtgctgcgaaacttatcatcaattcacaactggagagtggagattttcctcaacaggtacgtttcctacaccaaaatggctactatcatcttaaaacttccaaattctgtaatagctttactgatagaagtggaaaaaacaaagctaaaagctaattgtagtttgtttaattactttttcagcaagcaaccggagtgtttttgaagaattgcacattacactacgctgcatatagaaacattcatccgttgtgggcactcgcagaatatcgcgcgcgagtttcgttgccatgacgacacttttcataaacttttctttatatcagagaacatgtgaatttattaacctatcatcagtctattacaagaattcgtgtatgcgatatgtcaatgtttttagtcaatgttttctttttgtgtaccgtccattggaaggcatgtttcacatggtgaagatacagagatgcgtgatcgtctaaatttagactaggccatttgttacacttttttttttatgtttcttccaatttttcaacatgttgaacaaaagagtcaaaaccacacaaatgtgttattgtttctttatcttttttttgtgttatagaatctgaaattagattatcagccaaaaataaaacccttaaacaacaaccattagaaaaagaggaaattctccaacccattaatcttgcatctctacttcatttgcttcctccataaagaatctttgatcaatcaaactctattttttttttgtcaaatcaaagtgaagttttctcttttgcatcataaagactcaagagagggaagagatacttttcttccttttgttcaataataataatatatatatagagaagaagaga

SEQ ID NO: 8279 - DNA, 3000 bp, Unknown
  misc_feature (1)..( 3000): cDNA_ID_1810893_gDNA_ID_1621202_Annot_ID_57725 3000 nt of promoter + ATG
tccttccactgctattgttcccgtaaagaggtattctctgaatcaaaaacccttaaaggtccttactttgaacaaccctaatcgattctgtttgagcagataaattgtcgagacattttgctggaagacgcagacaaagttcgagccattaccgaatatgtttcatcttctgcaattgagaacttagtcgttggatctgcatcacgtaatggcttcatgaggtaattaaagttaccttctttcagattctgtaacaaaaagtttggatttttgttcaaaggattctgtttttgatgactctgagcagaagattcaagacggatttgccaacaacagtgtcaaaatcagctccagatttctgcaatgtttatgtcatttcaaaaggcaaaattgcttcagtacgaaatgcatcacgtcctgctccttaccaaaattcgatgcagcaatgtgaaattgacaatcatcacccacatactcctgacaaagcaccaaagtaccatgaccatcccaattctgcaggtttagttcattcctctttgaaaagaataaaataagttctttgcttttccaaaagctgatccaattttgtgtgtttccattgattttgcaaacaggtagtacaccatctagaccgcgcaaatcagttgaagcagataggtataggaattggaagcttgttgtgatgtctttaaggttaatgtcttacataaagtcttaaaagattcaacatttatgttttcttgtagatcgccgttggtgaaaaggaagccatatggggacttctatgattcagatagtgacctttcgtttatcagtccgtcttctcatcgtgactctgacatttccttcatcagctcaggaagaccaagcgttgagcggtcttcctttagccttgattttcctgaatctgcaaggacttcaagaatgtcaacgagctcagagcaaagcattggctcaaatcgtttgggaattaagttcagtgatcctgatttccttaacgaatcctctacattctctgaagagagtggtagaacatcctcctattcatctcagagcttggttagtactattattactcaagctccttctctttttcttcttataaagattgaatacttgctaagatgggattgtcttgttgcaggatgatgttgaagctgaaatgaagaggctgcgtctagagctgaaacaaaccatggatatgtatagcacagcttgtaaagaagctttaagcgctagacaacaggtagtacttaatactaacatctaagtcaatgagattagtacatttgaatcaaatatcgatttttgaacttttaggcaacggagctgcaaaagctgagaaccgaagaggagagacggttggaagaagcaaaaagttcagaggaagcagcaatgtcaatagtggaaaaggagagagctaaagccaaagcagcgttggaagctgctgaagctgcaaagagattagcagaagtggaatctaaaagaaggttgactgcagagatgaagacaatgaaggaatcagattcattctctcgcggatttgttcggtataggaaatacacggttgacgaaatcgaagaagctacttcaaattttgcagagtctcaaaaggtaggagaaggaggctatggtcctgtctttagaggctttcttgatcacacaagtgttgctgttaaagttctacgcccagacgcagctcaagggagatcacagtttcagaaagaggtaaaaaaaaaatctttcttcgtttctgattttatacaagaaagttttcatctttgagtaacatatgtttatgttttctcaggttgaagtgttaagctgcataaggcatccaaacatggtgcttcttcttggagcttgtccagaatttgggattcttgtttatgaatacatggccaaaggaagtttagaagaccggcttttcatgcgaggaaacacaccgccgattacctggcagctacgtttcagaatcgctgctgagatcgccacgggactcctcttcctccaccagaccaaacctgaaccaattgtccacagagaccttaaaccaggaaatgttctgctcgattacaactatgtgagcaagatcagtgatgtcgggctagcgagattagtccctgcagtagcggaaaacgttacacagtacagagtcacttcagctgcaggaactttctgttacattgatcctgagtaccaacaaacaggaatgttgggtgtgaagtcagatgtttattctcttggaatcatgcttttgcagatcttaaccgcaaaacagccaatgggtttggcttattacgttgaacaagcgatcgaagaagggactcttaaggatatgcttgatccagcagtaccggactggcctatagaagaagctctatctttagcaaagctttcgcttcaatgcgcggaactaagaagaaaagatagacctgacctcgggaaagagatattgcctgagctcaatcggttaagagagataggtgaagagagtttagagagtgtgttttatgcaggaaatcaaggaaagtctccaaacactagccaagtctcgattccggaatctccagctgcagaatctcaatcctagttttgatatgagggaagcaaatgtgctctaacactcaatttgcaggagttataaacaaaagcagagcaagtttctttgctgattagtgtatagcattagaggaatttggtattctgttaaataatcagttatgtaaccgcctttttgttaggcccataacggttttgaacaatcaatactgtatttattaaagaatcgataatgtaagagcccatataaataggcccaatggctcagaccggtttgacccaaccgggattttggttttattaattaatttggttttgaaaatcaaaatggttaaacccatagctacagataaaccctgcaacagcttcttcttcttcctcttgatgtgggcagaagcaaagtagcgacctttgtcttcttctccatcgtgtttgttt

SEQ ID NO: 8280 - DNA, 3000 bp, Unknown
  misc_feature (1)..( 3000): cDNA_ID_3046155_gDNA_ID_1971666_Annot_ID_175019 3000 nt of promoter + ATG
tcgaatgaaagcttctttacaggacctcttctatttccctccattcttcttcctagtgacctaggagttgggttcgtgacattttttctttctgcttattcaagtagcccggtctggtaagtaaggactttgctctcagtagaagtcaaaaagccttcaacaagaccacatccgctattgaatcagctgctatagacttagctaaagaatgtcttgcacgagattcaatgttatgtgcttgattgcgatcacatttttctcgtagttgatgagctgccaacctccggaattgagggttgtaggtagagtttcctgcgttcaacttggagttggaagagttggatttggagtttataaaagctgttattagttccgactccccggtctaggcctggtacttgttagttctaaggtatcagtgtcgctactttctgtaaaaaatttcctgcgaagggaagcgggaaagacaaggtttcgaatcttggtctaagaacttacactacactacggaggcacgggccaagagatcataacagtcaaatcctcaacctcacaagcagacaagctggtggatcatctgatcttgaaataggtcatcccagctatcccgatcttttctctctttatttcgtcaggtatctgaatcatacgattcctcggatgtagcttttcacattggaccaaaacaaggcccggaaaccccgctagctttgttgatagaaagttagcttcccgtgcttgactagtagggctaatgaacgacccttaactatggaatgttacgcctttcctcggttactcacaacgtaatcaactccattggttattttccccgggggaacacctatagccccaatagactgatttagtaggtatgatgtattactaggagtctctaagttcctgctttggttgtccctgtccgggctaagcggagtttagctttggccgttaataagagcttccctccattccttcagtccagtcacgcttttcttttcggcttttgcttcagtctcttcttttcgtcctttcaggtggcatttcgcttagtcttgtcattccttccgtcatgctactgtcatgtgctataaattgatcctcccgtctagtgtttcctctctcatgttatacagaccgctcctttaatccaatgaataggcggcgagggtgacaaaggcttagaagcaggggcgggcagaagcagcattaattctttcgcccgcgcgtacatattctattgagcgtatacgatcattgagctgatcaccggtggcttcctcacttgtgatgtgaagctgctttccatttctcatttttgaggatatcgatattctcttaagagaaagggtagccttttgtcacgagctggactcgaaccagcgcgtctggcaaaaagaccatccagatttcaaccttagactgatcgtgactttggttactcggttccccacgcgaaccccacacgccatgggtacgtccgaggtagattaactacgaacttttttcaaaaaaagtgtgatatattttcctcacttactagcaaagaactggaccaggattcgtccttggctgcctacgtacccctttgggaatcaagtaaatcgtagttctcttaacttattgtcttctttctaagtcttgctttcttctctctttactattgcttctttttcttttctttctataaaatgttcctcaatagcactgattcttcatatatttttgtcaaagcaattgggttcacaaagcattattttctcggtccattttccacctctttcttttgtcgaaccatgctaagcaaagatgcacggttccagtcttctttccctccccgtgtccactagcgctcctatcctctccttttcagtcgagtcactagggttcctctccttttagtcgagtcattagggttcctctccttttagtcgagtcattagggttcctctccttttagtcgagtcattagggttcctctcctttttttagttgagagttacgtcagtaccttttagtcgagtggcttctcgctcctgcccagaacgaagagaaggcgaaaaagcgccgccgaagcagcatgagcgggcttctattgctacgtaacaatagagcaggatagcattttgcgcccacatgtttgaattttagggtaaaaagctcgcttgttatacgggatccgacgcatccagcagagcgaagcagcgttccattcttttcggcggcatccttccgcattggcggcgagtggagtgccacaatcccattcatcatttttgatctacataagccaaagccctccgcactggcgacgtccccggcataaatgcaaggaggatgtatagctgatataggatcttgtggaacaggatttgattctgcaagcggttcggtacaaacaaagaaatttcgaacaaaaggatcggaactcgctgataggaaaggagagaaaaacaaagcaatgccaagagctccgtcaattcgctgttcatcgatagacgaagctctctctttatcatctcgtgccagatgcaacaaaggatgagtcctttttccttctcgcgaaccacgggagcgccaagcgtccagaggatttttaattttcctttcaggataaagcggcgcataaaaaagggctggtccgtcaaaagtccggttccttcgcgaacgaagttcagaatcaacaagggttcgtagaacgaagggagtgtacaactggtttttcaaaccactttcttgttcgtaacgagggagagataaaattgagttcttcacgaagttcgagacaaaaaaaaaaaaaagactttccctatggcctccttgttttaagacattatggctctggggtcgaccccggtaacaaagaaaaaatccataaaaatttgggatccgacaccataataaaatactaccctcatgattagaccatgttcctgagatttgataaaagaaaggtgcattagcggttaatacgttgtaattggataagttattaggaat

SEQ ID NO: 8281 - DNA, 3000 bp, Unknown
  misc_feature (1)..( 3000): cDNA_ID_3046102_gDNA_ID_1971666_Annot_ID_175057 3000 nt of promoter + ATG
cccaggatgcgaagggaatgagctcggctgcttctcctccacactgatttttctccgtgcctgctccgcatgcgcttccccattgggctttgctctcctcttattcttcattggacggttcggttcggatggacttcgccgttctttcccaactaaaaaagaaaaggctgtatcacatcgagatgtcgattcgttttccgcccccaatgagatggggaatttgtaaccccctatttctactttggggcccttcatctttctgaatccaggcccgtcccggctcgtgtcgttccaacaaccggcggggagcatctcagtatacgatcgcgcgcagtaactgggagtcctattacacctaaggcgaacttcaattcaccaaaccaaggttcatctcgtgtagtgattgtggactctactaaggatattgagtagacggttgatgtatcagactcgaccctatctttcgtagcatgcattcccatcggtgtcgcaactgattcggtaagctacgtgtccggtgcacggagaactgccttcggtcctccaaacttacttattcgtggcaaccttccggccgcccaacgacctataacgctagtcactactcccactggggctagaaagtaagccccacaacccaaagcggcgaagaacaaatagaatttgctacaaaagccggctaacgggggtattcctgcgtatgagaacatagtaatggagaaggtaatagccgaaataggattcgttttggctagagcgcccaaatccgctatatatttgacacgggtttgccgtaatgctgaaactatggcgaatgcatccatcgtcattaatgcataaataaagataccaattagtagtgattgaattccttctatggttccacatgagaaaccagtacgaatataacctacatgtccaattgaactatgagctagaggtcttttgactttcgtttgggccatggcggccagtgctcctaagatcatagaagcaatgctgcagaaaaagaagatttgttgcaatgtagctccataggaaccataaatagaaacacgtaaaatattagcagaaatagagattttaggcgcaatagaaaggaatgctgtaaccggggtgggtgaaccctcatagatatctggtgcccacatatatagagtcaaagggaatatggagtccgagggggagggggttttcttcggggctcgagagattgaatagacccacaagtttgaaattcgccactggggaattcacacgaaagggaacgaggaattctcaacgaaaaaagtgctctctgaaccgaacgtgaaagtttttttccatcagacggctgttcctgtaactccactctcgacttggattatatatccaaaaaggtccgctctcggccattccacacgctgcctagccgaggtgtggtttctgaagtggattctctcttttctagtagatgccgaacctgctgccccattgactaagaagaggggcgggcgcagcagctacatggaccccttcctttctgttgttgccagcgctttcccgggccgagccggaatttttgattattattctaatgggcaggcaaagccgcaggctgctatcccaataggccagcgggcggttcgaggagaggctccggcaatcatagcaccgcggtcgaaaaagcgtgctcccttcagataacacgcaccgtagctatcctcggccttcttcgttttcgatgcaaaagaaaggaaatctctcgatctccgaaagccttttccttaccccgccgcatctccctcccttcgtcgagcctttccggggttgttccttccttatcagaacttggcgggcattctttccagccgggggatgggttttgtttgaacataggctcaaacataattttaaggtcctagctacgccatgcgttcaataccaaatctggaaagctgcagaaatgacaaaaagagggccgctttcctatgttgcactgaaaaaagaaggacctaagagcgtcttctcttaggttttttcctcccgcgcccgccgccgcctggcccccgttagagggaaggggaagattagcaaagcgaaaaaagacagaggaagggggagcagcatcttattctcttcgcgagaacttccggattgaagaagcattcggaacgggctccagcgttcatttcattggcgggaaacgatccaatccattcggggcttcggccaaaaacgaattcgacttgattcatagatagaatcaatgataaataaacaaaagatagatgttcgagatatcttttctttctataaaaaaagaggaatagaatagacatccctttctttagatgtctatctatccttccgattttatatcgttatatctgctctctcaatttttttttagagagagcagatagatcctatcccctatatcgaacactaattcctatctattgataggaagatcttcgtctaatagcggactttgcctttttttaggaatttctcatatccaaggcagcttaccacaagaaccccaccccatacaactagttgggggggctgttcgccttttgaatcaaacaaagattgaagtaggtaggggcttcatagctactttcattctaaaggaaagcgaagaaccaatctttagtcaataggagccctacttccctcgacctcatcacttcaattgttgcgcaaacctctttcttagtcaccgggggagcgcacctttgtcacagtatttcgagctgtttgatagtgacttcttgcgtttggtagggcgacgaaagggctacttccttcaatctaggaaacagccggaaactcgagaaggtcgcctttggaacggttcgccagtaaccaaagcctcactccttccttttgattatgtcgtgacgctgactgaatccaatctataaaaaaacccggaaactcaacaaagtgcgttcccttcgtcaagtaggtaaagtaggcatacgaaccacttttgctttgcggaataaaaca

SEQ ID NO: 8282 - DNA, 3000 bp, Unknown
  misc_feature (1)..( 3000): cDNA_ID_2123815_gDNA_ID_1971666_Annot_ID_175065 3000 nt of promoter + ATG
gctctgcctgagctggagttgtccctccagcgagagttgctttcttccttgcttgatcggtaggagttgccgagatagcaggtattagctgttagccgtcggactcatttaaaggagtcctatcgggctacactagtctaagggcagttgagtaaccgattcctacgcttcctccgcttacctccgtcgcttaactattaatacgtcgcttacccgcctccgcttacccgcctccgtcgcttgttatctgcttcccttagctaaaacgttaggcgatagtgaaagccttcactctcttatatttacgtacacgtgggaagaagacctagtaattgagtgacagcattcctggaccaattctataaacagccaatcaggcatatcatggtacaggtgaaagaaacttatccaatacagatcttatcacctgcccatcaacgctcaaccgtctgctcctctcgtgcgtgtaggaataatcaaaagaggagacagcatgcctattattaagaacccaattctactaaaaacgataacaacgattcgaggttctcaatcaaggcagaaagcaagaaacccatccagctaggaggaaagcaaatcaaggagaccaatcagacatctagattctatagtacgcgtatgtgtacgtacccaggctaaaacagcaaatcaaacttggctatcgtttgagagcaacctatcgctaaacacaaaccaatccttttacacagtccattgaaaggaagaaaacaagggtggaaattcatgttcctttttacacagacctccaaaactcgaataggccaatcttacttttcctcattctagaggttgcaagggaagaaaacaagattggttctttatgaaacctggttcaaagcaacgaactccgctctctcccgtgggcacattcctattatagtaaacggggacttctctctttattcctatgcgtgctttacttgactcctctgaattcagaacaatgacttttaggctatttttccccaccggcaagaatgaacttctatgtgttaagcaaagaagaacagaagatctattccagtagttaggtacaatcttggacggccggggacctacttcgcgggaccgcctaaaaggacttggtccacacgcggcgaagtttctttgggcggcgttttatcgattgatatctaaagtgactggaattcgaatcttcttatataaggaattatcgattataaacttcttatataaggaattatcgattataaacgaggatgaaagaagttaggaataaaaacccgatgttgtgttctcatgcccggtcgaagtccaaggccaacccggtctgttgccaatgagttgtgaggaagtccaccgtcaagtgcgggatgtgaggccacgtcaactgtgtatgttgctgcgaaggtcaaccaagtcgaggaatgcgctgcggaaaaaataaaagtcactgaggatttgccttcgcggataccaattgcttggatggatgcgtttgaaagcctcgagatgacttgcagaaaaaatgctttctaggtttgtcttgtgtctccgtaacaaatggtccatttattgattaatgggcgaacgacgggaattgaacccgcgcatggtggattcacaatccactgccttgatccacttggctacatccgcccctaccctccccgcccttaattttgtttcactgtcataaaacctattaaacaactcatttacatttgtatcttagcaccaaactaaaatgaaattattctctgcctaatcattaataatcattaatgaaggggcccgcctcaccactccacttcccctttttatggaagcaaccaaactcaccatgacaagggccagcgctcttacagcgaaaggctccttttctctagccaaaaacattatgccatcaagccaagccagctcccgaatgtctttaatcgagagaggtacagaatagtcgaagaaagtaagcaactgcgacaagaaaggacttataagataacatggaaaatgagatttcacttctagttatccgccaaggaaatgccggaggaattctatatatagctgagcgatgaccgtttcgttgtgcatcttggatacagtaccgaaggtctgctctactaaaactttgtcataatgagagcggggatcatgaagattgaaactattcatgttgttttctataaactccaaggcttctggtcttatggcccagggtgattgagatcaaattttgattaggcgcgcatccggttcgtttaccaataaagtaaaaagtttattttgtaaatgtgctttccgctccattattataatgtcgaatagctcgttgtttagggcactttgatagtgatgaatgttgactgcgtggtccaaataatctctgaaaaaggtttcgtatttaccgaagtggaggcaatccatgaactaatttttgaggtttcgtatgcgcgaaaagagtttcgctctcaacttcgacgttctctgccctatattgtccagccagggatgtaaatcaagttggctggttaaaaacattggtccagcttaagcttgacgttgaatgggaatttagagttccaatccagctagaagaagcgttgttagaagcggcaaaagctatgagattcgaatcataggcaaggagttgtgtcaagaaaaaacaaaagacaatcgaaatggacaatcgacggatggcaaaaagatccaataactgagaaagacaaaacaaagattcttttcgataaaatacaaataagacaagatatatgagcaagaaatctgccaaaggtcttcgagattttgtatttatatgtcgctctattaacagagccgtgtataccggaaaaaaaaataaaagcgttatcgggtttgaacaactgagttgttataatgttctttttcattttaataaagtgactccgtcgcgatgttttttttcctcttcttatgaaatatgaaattttcattttatttcttcaccgggcttggacc

SEQ ID NO: 8283 - DNA, 3000 bp, Unknown
  misc_feature (1)..( 3000): cDNA_ID_3046100_gDNA_ID_1971666_Annot_ID_175059 3000 nt of promoter + ATG
catatgtactatcttctattctttctattctattggattattggatttctatcttctatttcatttcaacattccttctaattattgttattggatttcagcaatctaagcagaaaagcatgaagttaaggaaagcacggaagaagaaaaggccaatgcgaagtagtttgccaacctttgactagtcccattctatcggttaaggaggccaggaaagatcctcaggtagaactcagtttgggaacaaaaacttttccgagcccagcaaaataatcgcaaggagcccagcttcaaactaatagcccagctccataacaggcgagcagccaacaaactatgacccgaggcaaggaacattccccatccagctcagcccggcaagtgaaacataaaacacaatttgcactcttccagccgacttctcagcatagcaggaccaaccaatcagcacatttggcacttacgccagcaaagcatatatgcaagtcaggctcaagattcacacccaaactaggctcagcagcataaagatgcccgtggtatagactactcgacttagactaagaaggaaccgagaaagtaagccaagcggcgtagaccaataatcaatgtagactttgacacctaacaattgcactagattcaaggaaacctaccaaggaacaatcacatcgggattagcaagtcaggctccgcattcgtactaccaagctaagcagaaagattaccggtaaatggattcctttacttagaagtccactcacccgagcaaggaagaaaagcaatgcaaggaccaatccaactaaggacaatcaaacaataccagcatgggagaaaaaggagactcatcacattccatcagtcactcgagtcaaagcataaagcagagcaatcgtactccactcaagaataatcccatcaaacaaaaatgggcgattcacatttcccttccctcgacctggctctcttcaacttgtttcgaccggcttctatattctgaatgtttcaaccaatttaactttcacccttatcgttctaaatgatctttctctttgacttcgagtttcagtattcgtgtgacttatgctccacttgattagcgtagctgccttagcttgccccgacttgactgattggctgggttcgcttcacctcgctcggcttagttggaggactacagaaagagaagcatgacaagcatgacgttccttaattatatctatatatagttaactatccgtatatcatagtaaggaaccgaaaagtagttacccattcacgtacatcggttgtgtcgaatatttgtaatcaatcggtcaaccagacatcacgtaactattcagatccaacttctagaaataggtttcagtcagctcgatgaaatagactaatattgaccatttatgtcagatccaatagcttgcctcgaatgccagcatgaaacctaattacgatagcggtggcgaagacttgaagtaatcactttttcctggacaatcggccagctaaaggtcagacccaataatagcataatttcacccatcagtggttggtaccagtccgtaaaagtccagcacttaggtagcagccccatcaactgtacaataccgacctaacaggaccagtatccaccataaaaaccgtagcataacaagctaggttcccatagcatataaaggtagggcctagtctaatagactgaagcactaatcacaaggaatcacaaatagcatcccatggacaagtatttcaccaacatacagaggagcggaccaatttcaacgagtagacaaatccatttgaaaagacaactaaagatttattaaatttccggttaacttatgatcccggcctagctcgtcttttcttctataatagcttttggtcaccgctaatcatcaggtgacgctggtcaagatcagtactcttattaactttctgattggcattagtatagaatgggcgactaatataatagaagcatcaatctaaaatcaacaatcacaagtatctacatgtttactcaatgcctggaccaccttaactactatgtctagtcttcaaaatgcctggctacgctataataaaggcttgcaatgattgtgatctcttattgtatttgatcctattaaagtatcatgagaaagctacgaatgttactatgcacgcataaaaagaagtgagtcgaatatcttgagtgagaaatatggtagctttacgtgctagaatggaccaatacattataaaaaaggatctctctttgaaacctttatagaccccaggcttcaaaccggaccttagaaccctccaagctcaagagtacttatctagacatcgcaagtcaggctcaacagtcgtactacaagctcagcagcaatatgaccatggaatggagtcattgagaagaaagggagatcctacctccaatacgagagggaatcgtacgaaaggaacaaactcaacttcaagctcttagcccagcagcaacaaactatgggattggtccgagacaaagaagacagaaacagcccggcccagtaccaatatcatctaacgaattgtacgagaaagctaccaatccagcccggctcagcaaggcgtggaaaatgaagcacatcgggtccacatgggacagcgcaagttagactcaagattcgtaccatccacgactgagtgaagtaggacgaaagcaaccaatctaactaaactagatagaataatgtttcaactaattaaactataaaccttgttcgttctgaactatctcctttcttcgacgttcactgggttggcgtgactggcttaaactctctgaaacctgctattatatcaaccgatgaactaactatctcttacatatctctatatagaatagattatctataatgtttgattcttagtctactgcccgtttaattcccttgacttggccttacttcttttcctttcttcgcttgggcgttcctatcaaaagaatctgtcatgccaaagacccaatcc

SEQ ID NO: 8284 - DNA, 3000 bp, Unknown
  misc_feature (1)..( 3000): cDNA_ID_2123774_gDNA_ID_1971666_Annot_ID_175034 3000 nt of promoter + ATG
ttagtaaggtaagccaggtaagccatgtcagttggtaagaaagtaatcccttccagagttgtaaggttagtaagcttttcccgtttataggaatgggtttctaagcctaggaagtcaaggaagttgtgttggtctttcccctggttccttgttcccctgttgcctttctcttcatttcattgacgggttggagaaatgttcacgacgtaagtcagtggaagcaaacgggcaatcggctgcctaaaggaccccatttgtggttgaaggctaagttcattcttcgatatatatcactccgctatgctagaagactgagcagcttcagtttattaccaacctcgagttcaacaactattgggtaaagcctaaaccttactcctttccttctatcggaactggcaacagatctctagatccgatgcaactagaagtcagtcgattccgtctgaaaatggtttcagtccaaaccttttttgtcgagtgaaactccgcttcttaagagcttctttggacagactcactcccttactcgctgggttggcgtatccaaggtagcgccagcagcaagcgtaggggttactacgtaagtgcgttcgttagcgcgttacgttttctcgcttgctagacacgacaactaaggatagacgcgctgggatagcaagcaagtttgttgaaagaggggcagtagattctagatctgctgaaaaccaggttatagggctatatctttattccatggtagggctaggggcagggtggtttaaaataactccttttactttccctcctacaattacaatgggaagggacgagacaaagccttcttttaaactaaataaagtaggattccgctttcactgttctcaaggtatctcctgactcgaagattagggcttcttcccagccggaggcatccgaaactggagaatcatcaaccctcgcataaagaaacaactaaactatacgcggcaggttggtcaaaaagggaaagaaaaaggtgacatacattctattcggggacataatagtgattcctatcgagcacactctgttatatcgatcccaatcaatagtttttgggggaagtcgatggtcccccccatgctttatgacatcttttctcttctccgtagtgatcagtgtatgcacgtagcatcacagtcaatcttttatgcttggttccggtcgcgctcttcttctaactgcaggagcccgacagggctgtcttactctttttgttgctaatgaataacctttttcttggtgattcatttccaagggaataaaagaaagacctgtgactcattgtctcaatcataacttcaaacagaacctcactgtagagagggagacccccgaaagcgtaagaacgacgatttttgagcctgagggtgaggttctccatcgacgagtgagaaaagggcctggtctcggaagagatgcagctaacgtgagtaatagctgaacagttgcctaatgcatgtggtcagcatcagacaaggttataaaatacatctttacatcccggtcaaagtaacgaaaaaagacgagttttagcaactttttcatacagttttgccctcttttatataaaaaactaacttacgcaaatagtaaatgagaggaccttagcacttttcgttatggagtgattcatctaaaattcccggggttttgtgaatgaattcaactagaaaatctcaattgcacgggattcgcgattcggtgtaagttcaaaatttatcgtgctggacgaccacggttgagttttgttgtggatccaactccaagcgtttgcgggattttggatagatggaatactcttgcaacggagcttgtctgtcaaatctggtctggtatggtagcggttcacaatggcagctcattttcctggaatccgggtgaaagatcttttctttccaaggtctttgctttctattcgacttagcgatggagtcgggtcggaaataaatactaagtaaaggcagacttacaataatacgcaaacaagggtcccgcgatgtcttgtacattctaagtactttgcctgctaagacgtgacaaacaatcgctgattctttactaacgagcccagtagccactaaggcgatccgaatgaggaaacgccggagtgaccgagtgtcttcaaaaacactgcgccaagagaccaagcggagcctctcggtgaatgtggtaaacaaattgaaagccatatcaatcggtataaaatgacaaaccttttggtatgtaccacaaaacactaagaaagaccccgccggttctactctccttgacccgtggacaaacgccacgtgatggacggcgcccggctctgacgaagaaccagtaagattaggtattgcctaatccgtaaggttgtcatacccttatcagctttctgaccaaacctctgtgttgccactttggtaaggaaagtccaccaaccgggcatagtacctcgttagcaggaccactattgctccttttaaagctttgtgctcaagtgatctgggagggtgtcaaacctcccccagccccttattcaggggatggtgccagggagtttgaactgttaacaaaagattttctcgatacaaagaagagccccactcctagaatagttagccactcagtccacagattcggcttagtgaaaatagccctagaaagatcaaggtgcggaaggataatttcctccgttaatgatagctataccatagagttttccatcaaggaaagacaatgccttctcttctccatcctccaggtaccagggaagaactctatattccgggtccaaggatgatggttgcaacgccccgcgcttccaccaataagaggtgcgggggatggtgatatcccttgaaagacataactaacttacaagacttaaaatgaaaagtaaactaacggaacaaggcgccggaggaacccccttctaaaagtctaagagctagaaggcggggtacagcggttgcttcctgtaagatttgaatagtc

SEQ ID NO: 8285 - DNA, 3000 bp, Unknown
  misc_feature (1)..( 3000): cDNA_ID_3046124_gDNA_ID_1971666_Annot_ID_175037 3000 nt of promoter + ATG
ttgttatcaaaaaggaagttgttgggtaaagcaaactccctccttggacgagcacggggcttagtcaagtagaaccgggttgcgctgcttgatgctccgatcgaaaacaaatcagtggggccatgccggtacgactgaatatgcgttagaaaggtcaatccctcccctacgacaccaaaaaaaccgggccgaacttctaacagcccgcccgcttccatagaaaaatatcgcggcaacgtagacctaagtggtcatattggatccttgggaaccatcacaagtacggccggcctatatttgaacgagaatgccgtgtcgttcagcggagcctaaaagaaggtgactcgcgcagacagctgactccttttcaatagaaaggaatagccaaaccaacccagctggctgatcaatctcagagatcttatcggccggcaaaccggagacggacgaccacggttccgaccttaccagcaccagaggtgtactaatcaatgaacccccgaaaccaactttattttctgacaaaatccaccaagtctaagcggtcacgacatcttgttgatattgattgaggactttcgctgactgactccatccataaacctagaccccggtaaccttcgtaaccaaagcgtcacgacaacatccaaagtttacctttggattctgaagtagggggcaaggaggagcgcgtaggaatgtcgaccaccacataagccactagtggctgagagaaagcgagcagcaccttgtataggttgggcagagcttgaagaagcaagcccctatcagagcagagaaagccattgcgcgctagcctaactagctagcatttttcagctggctgttatttagttgtagcgcgccttccctccttctataactttggaaagatttagcagtattttcttatgatgacctggtcgagagagtacgatacatcggtgtaaaaggttgagtgggatctgtaaggttggttatagtcaggcctggccggaaagtgttcttgcctctatcattagctcgggtagcccctgtttctggtcttttagtcaccttccaatggctcttttcccaatcacatccctgggtaaggggtctctaactctgctttctaaatctctgtttccacacttctttagtgttgccatttcaaactaaaataacaaatgataggatcaaacccgccttcccctactttatggtcttgtgaacggagtcgagatagggtatggacagtctcccataacaagaataggaatacgcgagccttcccgatgtctttgatttcctactagagaaagacggcttctatcacgagtttaggtccttttcccggggatggggttttaaaatcttccattttttggttagaaaacgagcttctggcaagacaccggggggagcatctataatttcataacctgcattggtgcggtagagtggcacctcatatgctcgatccatagagaaagagggagtaccaagtcgttcaggagtggaaaattaccacgtatccatcaatcagtcatcccatttcattcctctttgacacccatttagtagtgctttgggcagttatccggtcattccaatctttcgtatgcgaatctgtaatatctatatctgaataagacgcttcaggagaggttgaaataactcgactgaaaggagagaggtaatcaacaggcgaagcaagcaagtcctgcttgaacggttctatcttggtagttctccgatctcttggaaaactaggaaacaaccaacagtgtcaaggtcttccgccgaagccgagtatagatctatggcgtttgctttgtgcgagcttaaatggttcaaggagttacttctctcgtttggtatcaaacatgacgaaccaatgaagtgattttgtgatagcaagtctgctatgaatattgctgccaatcctgtgtttcatggagcgcacgaagcacattgaatctgattgtcatcaggtgcgtgatgcggttcaagacaaactcattacaaccgaacacatctctactaaagaacaacctgccgatttgctcaccaaggcgttaccagctccgacttttttttatttgcttttaaaatttggaagattgtgaccctgtcctgcttttcactggctcagctgctcgataggaataggaaaccgttccaaccacttccacaactaggaggattggcatttggccaagtccaactggaattaaaatctctgccacgaacgggctactccgaatcaggtggccttgggagctcttgatggaagcttgatggaagcaagtgtagctaagaaaacaaactgtactagcatggcctgaatgccgagtctttctcccgccgttccctgttcgcttatttttcaatgacggtaacgccgtttccactttaaagaaaggataggacgagtatcggacgagatattgactctgacctctcctacttggcgcttcggcccctgagaattttccgtacctgtctctggcccaaaaaggagttttttccaatcaattcggaaatcagaaagttgactctcccagcgggcctggttcgtgccgagaatacgctgtttgaaaggtctcggaatttattgtccgattgaaatggtagaaacgacttctccgactgatccgcggctgctgtttctaactaactactgttgctaagctcccttcgggagagtgagctacacttgcttgtattctttttaaggtctctacgagcggggttccatactgttgacatggttagctcagcaacacatgcttaacacagcaaaggaccgtagcgcgcagctgccttcctggcttgcttgggataccaactagaatccctacccatcaccgccaattgatcaaagtgcgggatgatcgggcagatcagttggtccgattgtatctttcttggttctcagtgtgtcggattattaaattggcgaagcctataaaggctagcacattccgtaccattgtgactcccattaaagatatg

SEQ ID NO: 8286 - DNA, 1973 bp, Unknown; identical to SEQ ID NO: 4634
  misc_feature (1)..( 1973): cDNA_ID_1397552_gDNA_ID_1971690_Annot_ID_175069 3000 nt of promoter + ATG

SEQ ID NO: 8287 - DNA, 3000 bp, Unknown; identical to SEQ ID NO: 4641
  misc_feature (1)..( 3000): cDNA_ID_3073833_gDNA_ID_1971690_Annot_ID_175076 3000 nt of promoter + ATG

SEQ ID NO: 8288 - DNA, 3000 bp, Unknown; identical to SEQ ID NO: 4640
  misc_feature (1)..( 3000): cDNA_ID_2170372_gDNA_ID_1971690_Annot_ID_175079 3000 nt of promoter + ATG

SEQ ID NO: 8289 - DNA, 3000 bp, Unknown; identical to SEQ ID NO: 4639
  misc_feature (1)..( 3000): cDNA_ID_1824949_gDNA_ID_1971690_Annot_ID_175080 3000 nt of promoter + ATG

SEQ ID NO: 8290 - DNA, 3000 bp, Unknown; identical to SEQ ID NO: 4638
  misc_feature (1)..( 3000): cDNA_ID_1824945_gDNA_ID_1971690_Annot_ID_175081 3000 nt of promoter + ATG

SEQ ID NO: 8291 - DNA, 3000 bp, Unknown; identical to SEQ ID NO: 4642
  misc_feature (1)..( 3000): cDNA_ID_3092020_gDNA_ID_1971690_Annot_ID_175073 3000 nt of promoter + ATG

SEQ ID NO: 8292 - DNA, 3000 bp, Unknown; identical to SEQ ID NO: 4635
  misc_feature (1)..( 3000): cDNA_ID_1824977_gDNA_ID_1971690_Annot_ID_175070 3000 nt of promoter + ATG

SEQ ID NO: 8293 - DNA, 3000 bp, Unknown
  misc_feature (1)..( 3000): cDNA_ID_3092108_gDNA_ID_1971693_Annot_ID_175089 3000 nt of promoter + ATG
ctgattctgtctcctccctaaatcatcattcatcgcagcgacatgttagattgttgaatatatgcttgtgtttatgaaaatggcagcataatgatcattacctaagagtattgataacagaatgagaggtgaaaatctggattgcagagaggtaaggaacatagtattggaccaatgtttcgcccgtttccgatacaatggggacacctgcaccgtaagcactccactcgtcgaaacaatcccaaaaatctcccaacctgaaatactcgacgctctggctctccaacggataccatagaggattaaggttcttgatctgtgtctgccaaaaaacacacagtttcagatcctaaattcagagaattgttttaagaaaaagaaaaaggcgtaaacctttgggagggaataggcaggcacaatcggtgtagtgcagcgtaagaatcggtctaggttagattcactgtcaaaaaccatcattatccaacaaagaaccaaacttcgacccagaaaaaaaaaaaaaagagagaggagagagtattgcgggattctctttccctgacgtttcaaagagcttagttttcggacaaaagtgttagctttattagacgagcatttgagactttcacggcaatgtcagaaacagggaaagattgaacgaaaagggacaaactttttaaagaaaactccaacggaactctgttttgagcaatgagaaaaaaaacaagtaaaattgtatctactttgagataaaagaaagtaaggaaataggtttatataatcaaccaaactccatgagacccattcttctaaggcaggagattattggtagattcacctgtctttctcacaactctccaccttctccatttattttcattttcatttaataaaatatagtttcgtttctctaactttgtcggatgagattgagttttgtttgtttgggtttagtataaaacgttatggcttcttaatatcttcattttgcatagttcgtgaacaacacaacaaaacagagctattattcctaagtcttagatgatgacatctcccaatacaaagtctccttcttttggatacatcttgaaagaagagaaactaggtcgatcacatataacaagatttcaagagaaactgggtcaatgacttttttgtttacatattataattcatatggtttaaaagaatcattaacataaaaggacatgtgtgacaggatcagtcggcaatgttgtaatccaagttaaactaaatatctactatagaagtttgacacattcaaatagtacgacgacatggggataataaaagtacggaaacactctttgacttttatggatttcttacaaatttctatcagacaactgtagaatatgccgctagtcacgtaaatgtaattattaaaacattatcaaaagattgatcggagaagaaaactcaagaaatggtcaaatatgttttaccaacttcgtaaagaataaagagaaagtaaaagaaatcaaactctttcaaagtggaagccgtcgtctctcgctgacttcttcttcatcggtttttctgttacttgtatgtgaagccaaataaacctgcagaattcacggtttgaatatgagaagaaagtaggattttaaataataaaagaaaagtgagagagaagacaaagacctcgttgcacaaaagcccatcacaaccaaaattactaattagacatgtgtggcaaatgttatgactgatcatcatgcaataattcaccgccaataccatagatgctaccagactttgtaggctctctctctttagtaaataaagcactttgtttatgttcgtttaatgtacccataattagctttaactatttcactctactctatatattacacacactatctcttccatcttccctccacaaaccacacattcaagctcttaccttttatcctcaactaacacaacaatggcttatactctgcaaaatctgacagccacaattgttctggtaagcctgattcttggatgtacagaggaagtaaccggaatgcgttacattcccatttcccccactcccagtgagagcaaacattcagactttcctgtaaacatggtgcctcaaccatctagtctcattcctggttttggaaggttcttgctacctcccacacctaagctgccattccttccttacaaagatccccttgctgttgccccagccacttcaaatggaactcctagtaataaagcccgcagtccgagttcaggagaagatgaagttccaccagtgccacaaccatgacctgtcaacaaataagcttttgctagatgcagaagggtattcaattctggttcacataacaagtatactagtcatttcatcatagtcatatatcttcatgatctctctctatatatacttaagaggatattgaataaattccagagcttttgcttacatactatctaaaaataatatttccaaataaaatgtaatgactcacattgctgcaaatgtattgagtcacaaaagagtagaaatatgtagaaactcttcaattgaatcattattgccatgattgagtcaaaagagaaactctctttacaaagtctgaaattttgtcaagatatgtaaaatctcaaagtttcaaagtaatctcagcattagcatttagcattaacaaaaccaacgacaactacgatgtattaacaaatcaaatttggaaacttctaaaacaatgcgatgataatggacaaagagatgtcttggaaaagtctattggaattgaagtttctgtctatccatagcgaattggaaaaaacgatcaccatgaccaaaaaccaaatcgatgaaggttcgttcaaacacccaataccttgaagatgatataacaaagaaagcagaaaaatataaagaggaaaagataatcaacgaacacgaagaagttcgtggatccatggtttcggtttttcatcttcgtcttcttcttgtcctctgactcgtcctcatca

SEQ ID NO: 8294 - DNA, 3000 bp, Unknown
  misc_feature (1)..( 3000): cDNA_ID_3092098_gDNA_ID_1971693_Annot_ID_175093 3000 nt of
tcaaaaaagtgttttagagtataactagactcataaagtagtacatcgactcctgttctgttacaaccaaaattcatatcttaaggatcacataactgaaacctgcatccacaaatacgaggcaaacatagtgtttccttcatcatacatactagactacctataaatcagagatcaaactatgaaatccgcggattcattcagagtctttctcgcacgccaatacactccattggctgtctctgatgttcccagctgcaataaacatcagaaagattgtcagttagcatacttgacactaagtcatagtattggttttggtcagggtattaagaatccactttacctttgtctccaatgagtagtaattcttccacagctccacgtcttgaccgtaacttgcaacagcagaatcatacagcttccgggcattactgagaccatctttatcacctactgatatgaggttggtctctatttcaatgcaacctttgtatagaacaagactgggaccaggaagagccaagaacctgcagttttacggtaacagtggtgagaataaagtccatgtgtgactcaagggactggaggagtagtgactcacctcttgtatatcttcctcgcactgtgggccccttttgtttcaagaacaaatttcaccactgtggaagcaagagaaaacacatggtcgctcccatggcttttggttgctgataggatggacatctctacaagtttgtccaaataagttcgctgatgagcaaagaaattaaaagcctgcaatacaataagcattttattagtgtagtcttaacaaactagtgtattgtctagaaaatatattagtcacataccattagccacaagctctcagattctgagatcggtactttcctcaaagcatttgaaaggagctcaaagactgtctgaaaatctgctttactaggagatgagttctctgaaagtgatcttatttcaatggaaactcttgaaagccacaacttagctgatccagcaaatttttcagagcagagcttttctgctagcttctgagcttcatgagtcttttccagtttcaagtacagagaaacatattcatcagcaagctcttcagtcaaacagccagtttcatcagccttttggtacacgtttatgatatgtgaaatgatcggattagacaaagaggagatttcattctcgtcgccgtttgactgtacaatagcctccatcagaaaatttatataaatctcaaacatagaacttgacgtaacagtttgcaagccttcttcaaaaacctgcattcaggggacaagatttaagacctatcagatattgtactttctagtttctactactaagccgaaacagattgtggtaaagcaagttagtatagtcctaaagaaaagcccccccataaccaatgttccacctgtcctctccgacattattaaactaggcaatttgacttcaggttcaaaccaaaaagagtgagcgtaaaatcaagactaaagatttgatctatgttaaggaaatgcagcacaactatggccgccacattctttaacagatttcagcatttaataaatttctaacccctagtcataagttaagatttgtttacctgaatagccttttgcatttgaggatttgcaaactctaggcctgcctcattgctaatacaaccactcatttcatgtcttgcaagccaattccagtattcaggttcattgcaaaaatcacgcttcaggtcacttagaatggtattgcgcatttcatctgaatgcgctaagtctgttgcctctagaatctccaaaaaacgcttcctcaagtcaaaactagatggaatagcctcaacggctccactatagatggtctgaagaacattggaccctttctcttttaagaaatcaactttctcagtcacatcctcaacatcttcgacaatagagtcctcgtcattctcttctttttcatttccttctttctcatctagcgacataaataactctttgttctcatctttccattgctcatcctcaacggttttcgtgtcacgcaccaaacttcctttatcttcaccaagggcaactttacgagctttcagcttatttagaaaagtaagttccattcgcagatactcaacccacaggtcttcagagtttgaacacactctcagcccattcagcataagagcacgagctgctgtaacattcaagtttctatcaaattcccaagatgcagcatatatccacactccagccacttttggatgaaaccttattgcttgagccaatgcctacacatgtttcagataatataaacgcaattaaacatcgacatatacccaccaaagacaaatcattaacaaagcaaccagcaaatttcaaatcttttacctttttcattcttccatgcctcttctgtttacaaaactcgagatacctaaaccacaaattgatatcacctttatacctcatcgtcgccaatctataaatctcaacaatcctagccacaccggcgaaatcagatactgatttcttctttctcttcttagtcacacgcgccaccgatttcctccgtagctgacggagctcatcgagcttaacctcatagtcaatataggctatgaaatcttctttgagtgggcttggacgcttgagccggtactcaaacttacgccgctgcttcacgatctcagctatctcagcacgagtgaagatttctcttcgttctagatcatcaagctcgtcaaccatccgctcgaggcggtattgaactacgtcggccatggctgctgcttctcgattctcggcggggactgataacggtagggcaaacgcttaatgcttcttcttctttcttcagttattatataatgggccgtaagagtaagaagctattgggcctacgtctaattttatcacggcccaatgttaaaactcttgctatgagctatttgttgttgttctgggggaaaagctttagaagttgaagacgacg

SEQ ID NO: 8295 - DNA, 3000 bp, Unknown
  misc_feature (1)..( 3000): cDNA_ID_3046196_gDNA_ID_1971693_Annot_ID_175100 3000 nt of promoter + ATG
cacacccatcaccggatcaggcattctatacatgtaacgttgactctccccttctcctaaacgttgaccaactcctcttaagtcataaaccggaccagttggtctgctcggtacatttgaaccggactggggagctttctgtcctcgtccgtagatcgggacaagcgtagcctcggagacatcagatttgcataccggacattttggtggttccctcttatgatcgtattgatcgactcgttgtcttgaattgttggacgcataagtccacttgtgaatgcagggccaacaaaacaggtggccacataaagtcacgaccgggtctcgaacctgatccaaacatatgttgcagtcgaagtctcctccagaatcaaccaatgttgtgtcgtcctcatccttctcaatctccattttactaaaacatacaagacaaacaaccattcacttgaccagtcgttgtttatttaatgagatttcacctaaataagtaaatagtaaatactaaagtctaattccaattagagatttataaaatcaatgatacttcatagaaacaagaaatatcatcaaaatatgaagatcaatatagattataacagaattgttgtgtatatacttagcatgatcgatcttgaatttaaaacttacactaaccaaaaaaaaaaaagaagaagattagacgcaaaaaagtaaggatcatattctttaacaagttgaagttacgaagacttgacctaatcactttctgtttccgacgctttgctctgttttcacttaatcccaaagcacgttattgtttaagaaaaaaagctaaataattaaagacaaaggagtggttgattaaacaaacaagtgatattatgatcctttaaaaaatgacatggtatatcgaaaacaatcatcttcttgcgtagcaactcaaaaacggtgcagatctactactaattcgatgcctttagatagacacacgcaacaatatataataagagtgatgattccagaaaaaagaaacgtactctttggaaagattgtaagtaccgatggatctcttctgtctttaagcctttggaaacttgagagagcttgtacaggttcatgcgacaatggcagaagaacagagaaaatgatttatttgggttaagagaatggggtaagaatgtttagatcgagggtggtgcagaagcaggagaccttattatacacacatacacaattatttttattcttattttcttaaggtgtgcaaaattaaaatccggacaagttatgattttaaagaggaagaaacgtctacctaattaaaaataagtagataaagtaacgaaacgccattcatcttttttttcttacatgtctgtctttatttcatgaaaaggtcagcaacggatagcatcgttttaaaaaaaagtaaacaagataatataattatttatacacaactaaatatatatttatagaaaaatatttattttagtttgaataaaattgtatgttgaaaaaaaagtatgaattggaaatatgccctaatgagtccatgagaccatgacttttgtaggggaaatatacacagaaattgcaaaattcccccataactttatcccaatatcatattcataagataagaatttggctctgaaaaaaacaaaagataagaatttggcagtttctgtttctggcaacacaatagtagatactgaaccaagctcgatgacgtggcactccatggctgcaccgttactccatcaaattcacttgaaaaaaaaaacaaaaaaaaaatgctagtaattttgaaaattctgcttattttggtactttacttttttttttatggaaattgtaactattaggtgttgagtgaataacaatggcaatttggtaagttgtttattcaaagttggaactggagaatactaagtttgcgactaaagccttaatcaaaggccttatcaaccaatagttgaattagtttatagaccacaaagataattaggttacacgtcacggaagcaaggagctattggtgtcaccagaccatagtatttaatttcaagtctattaattgtagaaggcaacccaaaatccactccttgaaataataaaacactgtcttaaattcgtatttgttgagtccttcaccaccattatgtctgattctgcttatatacaaatttaagtaaggttgttagacggttcatgtctccgaatctttgatcaattgtaaagtgtaatgtaaaatagttttttttttttttaattttaaatttgcgactactatatctaaaagtctactatcaactacaacttcacttgtaaattgtaatactctcgaatagatcatttttgatgaaacaagttagacaatcatccaaaattaatcaccaatttgagtgcctccgaatttattcacaatattcattattgaaaagcatttttggatatggccaaccaataaaatgaaaattgaactttaaaaaaaaaaaactactataccaacaatgtaaaaacaatgtgtgtgttcaccatcattagaacaagatctactcaatgttttaaatgtatatataatatgttttgcgcaaaaaaacgtatatgtaatattatatatatcacgttcatgataatgttttcaaattctcatatgaaattattggagcaagttgcatttacgatccggagaactgagccaagaaatgggcggttctcaatttattatgggtattattaaccagtggtggttgaaccaaaattaatctattcattttctctatcaaactttttgttactttgatggtttgtctcaatcgattaaaatagtaactagttattttgttttggcatgtcactgaattgatgttgtttcttctaatttatgatccgctatatccgcagcatttttctctcctcctataactctaatggaaacaggaaaaagaaaaaacaagaaacgattagaaactcaaatgtgacaaaaagtcaaaaaatagaggaggaaacaaaaac

SEQ ID NO: 8296 - DNA, 3000 bp, Unknown
  misc_feature (1)..( 3000): cDNA_ID_3092101_gDNA_ID_1971693_Annot_ID_175092 3000 nt of promoter + ATG
caaatgtgtaagaatacacaaacacactctcaatgagcaattcccaaatgtgatttttttgttcacccacaacaagaacttagctaaagatacagaacaagctaatcagaaatactacagttaaagttaggaaaatattgagattaaaggcggcaaaagtcaaagattcgagatacatcggatttgagaaaaggaaaacatctaagaaaggtcccgacttttggaaagcgatgacaaagtgaacattgaaaggcaatgaaacctgagagtgccgaggaggaggagcttagaggcaagtggagcagatcgagaggctcttccgagagaggaaagtaatgtcattttggtgaaaagtcttcagaggtttgattctgagaagacaaagttgaagagatccaagagaaacctctgaccgagttcaagtactgagctttagtagcgacttttcactaattaaaaacgcttagtgtctccataatccagatgtcgtggatacaaagtctcctttttttatctggtcgattgattattcaagttacatacaattgattagcttaagttagttacaattgattagcttgtgccattcggaaatcgtgcaaccaattatgtgtgattaaataagaactattatattgatgttgcacatggatatgtcgtcagattcaagtttatgtcgcaacacaaaatttggtagaagggtcagtttataaatcagcacacatccaaggtccaaagcccacaagaatggcaacactctattaatcccacaaattcaagctgtcctcgtttttgtttgtttagcaatcgatccaattcacatcgaattcaaccgggtcaagaacaagcgactattttgattcacagattccaaatgattttgctcataattagccagtttcagacaaatgccaaatctggaaaacaaaaaacaaaggcaaaaacgaataaatgaaaatgaagtggtttagcggataattttagaggctaaactatgatgaacaagtatgcctccacgttaacaccgcagttcaatatatgcctcgaagactagctttgtttccgtggttttatatcgaaaacaagctaaaggtgatgtgaggcaatctaaaaacaaatcctttctcccccaaaacagtaaaaccatgtacacaggtgaaaaataactatagaaatcgaacaatacaaagaaaatgcggactaaatgagatgttaggaggaggaagaagaaggtggtgacgctccgttatatagggtcattgtgaagccctaattacagctgaaatctacttagatggcttctagctaagaaatagcccaccaccagttctcgaaatgggccgtattaactaacattatccaaacagagaaacaaaacctttttcttgtatcatcaaaaatttctcttcaaacattggggaaaggtacaacaagttacaacacaaactagttttgttcgtctctaaagttctttgtttcagcagagaatcaaacaatcatccaagtcaagtgtctgtatccagcccattttgcagcaagtcggacgccaatggctaatgctgcagccaacaacggcattggtggtgccctccttaagatctgactctcttcttctgaggaggtcttcgttgaattgtgatacatggctagagccagataccctgtgatagccaccactctcacccatggctcccctactcctgccagaacagctgcagaaggaagagccgaggtcacatcgtctctcttctttatcaaccgcgagtacccatacaaacctaacaagacagtccagaagaacggctctgagatataactctgcaccgctgcataccccaccagacccgcaatagttaccacatacggctgcttgctgattgactctggtgcaactgcttctcctatagcaagcactgaggatgcaagaagaattaccgtggttaactctctcacaggcgtgtaagccacaatcccggagtagaacgccctaacactgtacattgcagtctctacaaggctgatgagagaagtgatgggatcgcctataaagtggaagacaagagccaatgcaaacttcgaaaggtctcccacaaacgcaaggatagcgaaagccgcttttctccagttggatagctcaaacaaaacagctctccacgcataaacgagaaaccccagcgctacaacagaagatcaagatgttacttcatttatccaaagcttattcgaactatgcaacaaggtatacaaaactcgaattcactagactactattcaaatgctaaaccagagtatagtccctaaattccaatctcagggtcttgagtcagaaatgcttcagcgattgagaacaagaacaaaaatttgattttgctacaagacttatgattcacggtaactaaaacgaagccaaaagtaagcagaaacgtaccaacaaaccatggccatataattggactatctggagcttctttggtcaaatatctgaatctatcaggcatcgtgctctctcgtctcgcaaatcgctccgcgtcatcttcaatcccacctttgggtgcattttctttctcgcacctcgtcaaaaccctaagtctcacacttggaaacttccccggagccacaaaacgacggagactcgcgccggcatttaaaaactgtggcggagaatttgtaagcttattatcaccattaagagaagaaatacgcgacacaggagagaaacgaatacgagaattgcggcagaagaaggaaggagaagacagagaagaagagagagctaaaagcgtcatcgtcgtcttcaacttctaaagcttttcccccagaacaacaacaaatagctcatagcaagagttttaacattgggccgtgataaaattagacgtaggcccaatagcttcttactcttacggcccattatataataactgaagaaagaagaagaagcattaagcgtttgccctaccgttatcagtccccgccgagaatcgagaagcagcagccatg

SEQ ID NO: 8297 - DNA, 229 bp, Unknown
  misc_feature (1)..( 229): cDNA_ID_2999495_gDNA_ID_1971712_Annot_ID_175114 3000 nt of promoter + ATG
gatagtgagtgactatgttttcgaagattgttgtccatattttgggataatagcaattatgaatagaaagttggaatcttagtctgacatggcagttggaattcattgtatttaatgccaacagagacatgcatctatgcctgtatatagcaatagaaatacataaagtggttttcttaagtatgtctcgtaggcgtggcatagccatgcaacgaaagagagatcaatg

SEQ ID NO: 8298 - DNA, 3000 bp, Unknown
  misc_feature (1)..( 3000): cDNA_ID_1534390_gDNA_ID_1971712_Annot_ID_175123 3000 nt of promoter + ATG
actaccgataacacatttctgtagtgactatcctatccaagacatgatgcatacacaaatattttaccaaaccaggctcatatctatcactaacagatatcgaaacagtaacacaaaagatcaatcaaggccttacatattcgacttcgtactgaagctggaagatggcttgattagccggtgttctgaggtcgagcaccctatagttcaaacgtgtatcctgattgacacgagcagctggagatggagtctgcaacagtcatgaaaacaacaactcctatgaacagattgaccaccataatagtatcagaagaacacaagttatcagaattcacagcacaattgtaccaggtccaacaaaatctccaaatcttgaaacagcaaactatacctgaagagatgcttcgatatctgcttcactccgagcagcatcctccacactaagtggtaatttggccaaggatttgttgatgcagtacacttttctcacttgaatttcaacctacaattaaaattatcgatacacacacaaacatgagttaaagcaaacgagaaatctggaggagaagaagaagacaaggaaactaaacctgctgcgtagttcccgtcagcggctccttggggagagtgacgacaccgataacatcgacaaaggattcgcgactcagctgcttgaggtatttaaccatgttggcacctactttggtcttctctgattggctaaccacgcactgaacagttgatccgctctccctcaagaccacaaaccccaatttgttagacgttggacgattcgtgtgcactcggcctctgatcagaacctctgattccaacatctcttccaccaaatcgctcacatcggtccactcctttccctcaacagcctctatccacttcccggctttcggatccgccgacgattgcaactcggtaagagtcacgtcgccgtagttattggaaaactcgtcattctcttccagagagatcgaagctgttcgacgcgttgcttcctcttgttcttgacgacgtcttaacttctctagcttggcagcttccttcttagccgctttcttgctggtcttctctccagattcctccgctgcggcggttgatgacgacaacggcgggatttcagattccgacgacatgatgagaatgaatgaatagtcagtccactgaaacgaaacactaggttttatgtaagtaggttataaaaactagataaattcaaaaaggcccctttaatatttatttaattcgttttgaccccaatacttaagaattggaggttatttagagaaacgaaaagaaaaatagaaagcgtgaaccagaagctacaacgcgccgcctcatacaatcaggaacataaacaaagtcacaaacagtttatgttagcaaaagaatcataacactaagacacaacaaaagagatacttaaacaaattacaaaaccaaaataaataatcgattatttaaagtttataagtaaaccctaactctataatgctcaaaatagatacacagacataacacaagaacagtaaacaaagtacaaaaccaagataaacaatcgatattctctaattttaaagtttagattaaaccataatcctataatgctcaaaatcaatacacatacacaacagagtaaccgtaagcaaagcacaaaatcatagataaaacaacagaggtagatcttagcgagcaaacaacaaaacaaactattaaacaaaaaaaacgattaagaaaggagaaagaagaagaccttacccctatgagaaggagcaacagatgatgactcggatcccgatgatgatgatgagacggaagatgaagatgaagatgaagatgatgaagacgaagatgacctggatcgaattctgggactagctggagacaatagcgatagtggggatgatgaccttagcagcgacggccatgaaagtattgctctgaagctgtcccaattaataaaaaaattagggttaaaatgtgtattgctcggaatggtagagcgcgtgtgagacactttctatcggagagagtattgctcggaagctgtcccaattaataaaaaaacgaatttgccagcaaaggacggaccaaaattaaataaaaatcccaaaaaaaacaaattaataataaaaaaaaaaaagagagaaaatcggagtctggaaaaaaagagtaaatgggaagcgacgactgactcttcttcctcctcctcctccacctcttgtttaggttcttagcactgaaatttgatcagaagtaagcttgtgggttatgatcttattactttgtgggtattgattttgtcgatcggattcagagtttttctcttttcgatcgttttacttatccagtacaccaaggcaaggtttgcgtgtttcttttcatgtcatatcaagtgtttttgtgttttgtgaagctctaggtaatctatgagttcttgctttagcttatctcattatggaattatcggatctgtgtctacttttttgggttttgtgggaaatgatgattttatttttttcatccacgagttttctcatatgacctctcatttttctttgttttctttgaaataaaattatggaattcaatgatgaagttactatttttacctagttgaagctgagctgagttattaaagcatctgatttcagcttaattcacgaaaattttcattcttatactaacatgtatatatatgtttctattttagggtgttgacggtgtagagcttcacgaaacataaactttcatttcttctagcttcttgatttgctcttaaaggtaagttctttgtatttgcagttacttcaatgaaagaaaataccattttgataatagtgatttctcatatcctttcttttgtttcctttactatggtctatatttgctttaggtgcatgttgaagtgattgaaagcgatttacatgtgacttgcagctcggtcagacattatacattacactcaacacgagattggaaaggatg

SEQ ID NO: 8299 - DNA, 3000 bp, Unknown
  misc_feature (1)..( 3000): cDNA_ID_3092672_gDNA_ID_1971712_Annot_ID_175120 3000 nt of promoter + ATG
gaacagagtcggaaaaatcgaactgtaaaagaaaaacactcaccgagacgacgaatgaatctggagatttgtggcttcagagagataagagaaatcggaagatatggttagttaggttgcttagttttgattttggtttaattcgatccacttgcactgataattcggggatgagccctaaaaagtctccgagtgttgttgttgttttgggctcttcaagattctgttgaccaaaaaataaaagattccatatttatcttcttccacatgtattcatcatcttatttttctttataaaaaaatctacgtaatagagattttcaactgatttacttcctcatattattttttattctgaatatagatattactataatttacaaaataaaaatatatcttgatcgtataattatttggtataaaatattatcttcccacgtaggtatataatttaccaaaaataagtttaagatggatttaccaagaatccaatattattacttgcgatactttatatgggaagtagaataattggatatgatattggaatttctttttggaaagtacatattgaaaatgttcattatcgtatgaagcagaacttaaagactggctgggatagttagtacttttgagaaatgggattatcgaatctttgaagataatctgatgttgtatgttccaaagagtctgtcgagttttgtatgcggaagctttcactgttgtaacactttgcaacacttgttctttataaaatggtaacacttatggggatatttaaaaaaacaaagatagcaacatgtttagcttttataaaaatgtattatttgaacgataccagggaatcaggatgctagatgcattatccggtcggtgaacgatcgtgacacccaagcaacaaatatacaagaccaaaattggccacgctctctcctctacccctccagctttacttgtccttatcacttccctttatcatctgaattaatttcatctcattgatgcttctctatgtataatgatccaacacaaataaatcaatcaaatcaaaccaaccgatcactttctctttttcactcataatcattccaagcatgattttaaaatgggcttttgttgtctctcataaaaggtgatagctattcgcctcttccactttcttcttagattgttgtagtataagtttaaacctacgactacgagtggataaaatggttttggtttgacttattaggtttaatcgagtacgacaagtggacttgtgacacttgtccaaccgatacttcttatcttgtgtttttgtgttttctcgtcttctagatcacgttttggcatattgaatttattatataagaataagattcgattgttgaatttttaataagtatggctttgttatattacacgtaagaattgaaaacattacttgatcaaagaaataaaagattttatgtgtggtgactgataatgttgttgaggaagatcagagtcattaatgcagactcagtgaccagtggacaatcttgtataaagaaagacattacagagttatattcaaaaacgtggaaaagtatgcattaccttcttgagatggaaatcttaacaaaaacaagcttttaaaattgagtgcatgtccaagtcatttttagatttggtgtttagtgcttcaatatttcacaatatccaaaaaactcataaaaagatttcagagatagaccaagaaaagttatttgagtctctaagaagggattgaccattattcttaattatactatttgatgtttcaactcacttccaatatgaaagtcttaaacataatcatattatagatattaacctgtgaataaaatgccaatcatccaactctcaaaaatataaatgggccgagaatgggctcacacagtaagggagagtaacgagagaggcttgaaggagaataaatgttacttcaccaaccggacctgccgacctctttcattctctgtttgactcactattccttcacacaaaaaagggaacatttaagtttttttacattttcattcaactttaattctgagagcatcaggtaacactgctccacaatctttcaaagattcctcctttttttgttgttctctctttttatttggcttacacgtccgcttgacctcacccacatgcccctgcctcacatcaaaccatctttatttcgtaatagctaaatcttagacaggcaaaatctatcaaattttagaaagtactattcaaaattaatactctctcatgttactaccatacttgctgattataataactgtaaactataacaaagatggtaaacccaaatctatatttatgattgattaattattttaaagtatatattgatgattttttctttataaattatcatgattgccgtatcgtataattaatagatttgagtggtattgtgaagagctactacagctaaggaagtagacaacacctaacgtagtaaattaaaacattaacgtttctcttttagtccctttttttttgttaatcgttttcataatattctgctaattaaatttcgattgggggtaccaatcaaaaagcaaacaccgcctttcaggtcactgggacagacaataaaaaaacctttttcgtttatgttccatgtctgaaattaaaacattttcaagtctcgtgtatttcagattctccatcttagttcttgtaacctctccctcttcttctccaaattccacctgagagaagagaacttattccacccaaaaagcaataatatatagtaccgtactttgattttttcgataatctgttgattgaagttaagccaaaactcagctctgttcttattcttcttcaaacccaagtttcccacttcactgattctttcatcttagctcgttttaaccacaaagttcagttcttttttggtgtgtttctttttcgttattggcttttgccttttttgggtatagggtgtttacgatttatctctcggttccg

SEQ ID NO: 8300 - DNA, 3000 bp, Unknown
  misc_feature (1)..( 3000): cDNA_ID_3055700_gDNA_ID_1971712_Annot_ID_175116 3000 nt of promoter + ATG
cataaacaaccttgtgggagttggttgcagcagcaaggtgtcgttggagcatataaagcaaaacatggtgggatgtgagttgaactgcagtacgactaacgcgtcggatagcaacagcatccctttcttcgacaaaacggggtgctctttttcttatactttcgcccaggtttgtacaggaaacaaaccggaagatatgggatgcgatggtaggggatgttgtcaagcgagtctacctagagagcctcaacaagttattggtatcagaatagagagcaatgatggaaagtcaacaacaagtggagactgtagagtcgccttcttaactgatgaattcttcagtttgtcgaagctgaccaaaccagaacagttacatgctaagagatatgctacattaagtctaggatggataatgcagacgaggaatacttccttcgtcaactccttggcctgcaaaatcagaaaagacacggacactgcttactctaatgaccagagtataaagtgtatatgcgactacaccatgagcatcatttctgatattaggtatgccaattgtgaatgcaacctaggttacaaaggtaacccatatgattcggacggatgtagaggtcagtattatgttctttccttatgccctcctctttttttgtgtgtggaagcaagcatcctttctagagaagtttctttcatcgtttgactatcgtattttcatctttcaattatagatattgatgaatgtaaagagaatcccaaatattgtaaagaaacagacacttgtgtgaatttcgagggaggctatcgctgtgtgggcgataagactaaagcaataatgataggtaggtcactgatttttgttccacaaatttagagcttttaaaaagcaagtgatgatcaacctataatattcttgtgcggtttggcaggggcgggtactggttttggggtcttagtcctagttggtggagtatggtggttgagaaagtttctagtgaagagaaggatggcaaagaggaagaagaagttcttcaaacgtaatggaggactactgttgcaacaagaattgaatacaagacaaggcgttgtcgaaaaagcaagaatcttcacctcgaaagagctagagaaagccactgaaaacttcagcgaaaacagagttcttggacatggtggtcaaggtactgtgtacaaaggtatgcttgtagatggtagaaccgttgcagtcaagaaatcaaaagttatagatgaagacaaacttcaagagttcatcaatgaggtcgtgattctctcccagataaaccatagacatgtagtcaaactcttgggatgttgtcttgagacagaagttcctattctggtttacgagtttatcatcaacggaaacctctttaagcatatccacgaagaagaagctgatgattacactatgatatggggaatgcgtctacgcattgctgtggatattgcaggagctctttcttatcttcattctgctgcatcttctccaatttatcatagagacatcaagtcaacaaatatattactagacgaaaagtaccgagccaaggtggctgattttggaacatcaaggtcagtaaccatagatcaaactcattggacaacggttatttcaggtacggttgggtatgtggatccagagtattaccggtccagccaatatactgaaaagagtgatgtttatagctttggagtcattctagcggaacttatcactggagataagcctgtcataatggtacaaaacactcaagaaataatagccttggcagagcatttcagagttgccatgaaagagagaagactttctgacatcatggatgctagaataagagatgatagcaaaccggaacaagtgatggcagtagcaaatctggcaatgaagtgtttgagttctagaggaaggaatcgtccgaatatgagagaagtttttacagagttggaaaggatttgtacgtctccggaagattcacaggtgcagaaccggattgacgaagaagaagaagaagatggagtagaagaagaagaagaagttgtgacaatagtacacagaggagattcttggagcattggtgttactgctccagcctcaagtattgtggcttcacctccatcttcagatgttgaaccattgaatcctcttctcacatggtgacactcaatcagatcttaaagtaatgatgatgaatgaatttgatgtatctcgttagaaatgttttctgtaataaatttgagtagttgttagtctgtgtttcccgcttaagaacgtttgttgtgtgtttattattcctaacgttcacctttgtgcctcaccgatcacagactctctgccattgattgaaaccagcatagtggttaatagcagctgtcgagtagtgaacgtggaaatagccccactctagaaataaacagaggaagctgcgactgctgcgaccggtactcgttcagataatctgtttttgctaacgtagtcactcttgaatttggatcattttcgattttaattctaggagcctaaagtttcctcgtgtttttctcgtgttagtttattttattcagaaatgaataaagttagttatggacggtgtttttatacccaactctgcttttcaagtttttattttttatttttttgtattatacgatttcatgatgatatgaatatgacttttgcaagaaactgcatttttgccagagtagtttttttatctttcttctgtaatcaattaccaacaatgtctttccaaaaagaattgatgatctccactttacagactttcaacaatatttaaaccagtaaaagagaagctttccgccatataattgatctgatcaagaaacacaaagagaggtatcaataaaatatccaaagatgaagaccattagcacaaggaatcttatcctctgtctccacttacaaaggccatctgctttatagttaatacaattaactcaggaagatcaactttgctctagtagagaaac

SEQ ID NO: 8301 - DNA, 3000 bp, Unknown
  misc_feature (1)..( 3000): cDNA_ID_3092676_gDNA_ID_1971712_Annot_ID_175118 3000 nt of promoter + ATG
attcagatgataaagggaagtgataaggacaagtaaagctggaggggtagaggagagagcgtggccaattttggtcttgtatatttgttgcttgggtgtcacgatcgttcaccgaccggataatgcatctagcatcctgattccctggtatcgttcaaataatacatttttataaaagctaaacatgttgctatctttgtttttttaaatatccccataagtgttaccattttataaagaacaagtgttgcaaagtgttacaacagtgaaagcttccgcatacaaaactcgacagactctttggaacatacaacatcagattatcttcaaagattcgataatcccatttctcaaaagtactaactatcccagccagtctttaagttctgcttcatacgataatgaacattttcaatatgtactttccaaaaagaaattccaatatcatatccaattattctacttcccatataaagtatcgcaagtaataatattggattcttggtaaatccatcttaaacttatttttggtaaattatatacctacgtgggaagataatattttataccaaataattatacgatcaagatatatttttattttgtaaattatagtaatatctatattcagaataaaaaataatatgaggaagtaaatcagttgaaaatctctattacgtagatttttttataaagaaaaataagatgatgaatacatgtggaagaagataaatatggaatcttttattttttggtcaacagaatcttgaagagcccaaaacaacaacaacactcggagactttttagggctcatccccgaattatcagtgcaagtggatcgaattaaaccaaaatcaaaactaagcaacctaactaaccatatcttccgatttctcttatctctctgaagccacaaatctccagattcattcgtcgtctcggtgagtgtttttcttttacagttcgatttttccgactctgttcgttgattcgattttcaaatctgatttatgttttgggggaaatcgaatttgatatctgtgtgctctcggatatattatataggttaaggttagacggagaagaagatacaacaaatatggcggttagtatgaaacaaatgtcgttggtcgtctctgctttgggcgtcttatcctttgttttgggagttatcgccgagaacaagaaggtacaaaaaaaagtcgtctccttttgattatttcgtgagaaaactttaaatttcctgtttgttttcgatgatgatttttgttcttcttctttgtgtttatctactactaccacataaacaattcctgttgctttttggcgcaagttagttttttttttgcacaggaaataatcactctggaattgtatgtatcaaacagtgatctaactatggatgaatcaattgttttgatttcctgtttctttaggatgctttggttgttatttgtgctattctctgtgaatggaggatgtcaaatttgttttagtcacaggactatgactctgatattgtgatattgttggattgtatgaaaaaatgtgatcttctcacagcttcataattgtatctaatgatgggaaaccaatgtgatcttaactgacccgtagctaaatcttactctttctacacaattgtttgacctcatcattgtcactgatctctctaggataccgtatgtcaagagcttttcataagtgggtaaaccacttcggctttcttattcttatgtgttactgattgtgtgatttgtttctgttctttgtgttttcatcttagcctgcgtctgggactccaataagtggaaaaggagtagttatctgcaaatacccatctgatccaactgttgccttgggatacctttctgctgcttttctccttgcctgcactgtagcaggatacaaatccttgttcatctcttacaagggaaagtctgttcctaactctgtcttgttcaaaagcaccagcttctctgtgttcttcaacattgccttgtaagcatttcctcttcttttcaagaacacagtagctagaccattacaaatattcttggattccggtattataaagcctaaaaataggagtctttttgtgacctatggttattgtcgtgtaggataacatctggactggccttgtctctgttgctctggccaaccattacagaacaacttcacttgacccgtaatgttcaccgaaacttagaaaccagttgccccacggctaagaccggtctgcttggtggaggtgcctttgtgtctttggactcgtgccttttctggttggttgctctgatgctcgctgataacgcccgtgaagaccattttgatgaagttgaaagcagaagcatcgatgggaactcttcctccagggatgtgaatctcaagattgatgcttgagagaatgatatgcttttattggtattgggtataagaagggtttttcatttgttttctacttgtttgattaggaaaataataatttgtttcttctgttgttttttttttttttaatgattggctagaatgttatgaaacccatctctgcaccttgatgcattgtgattcataagctgtatctgtgaaaaataatcttttggttatatctcttacatttgacataattgatatgagaaagcacttcaaatcacacactatatcaacatttttctttctaagaatatgtaaatattcacttgaattcgggtggctactagtagtctagtactactatcacaaaccataagactcttttatgtcaaaaccaattaacatgtttagagccaatggttggagcttgggatggcataaatgggctaggtatagcatatcataaagcccattagaaaagcccgatataaactacagatcagtaaaattaaaccctgtcaaaaaccctttcgttttcgtcgtccgctcgagaaaagaagattcacttccatctgcaaattccttcactccctgtgagctcaatagagagagaagaagagatg

SEQ ID NO: 8302 - DNA, 3000 bp, Unknown
  misc_feature (1)..( 3000): cDNA_ID_3092222_gDNA_ID_1971713_Annot_ID_175134 3000 nt of promoter + ATG
ttcaactttaagaactcaccccccctcaagaaaaagtgaatccgcgagaaagtcgagaactttggggattctaactaagtacagtaaccaaaaaggctcgaaatttcagaatcgaaattgacaaattaaacaattcaaaaccctaaaatcagatcgaatcacaaacccaattgaagtaataaggaagatcaagaaacagagagggataaagaagagacctttgagaatcagagaaagaagaagagaaaaagagaaagccgacagccatggccgcctcgaaattcttcagacttattccaattcgaagcaatcaagcaaaggaaaaggaaacaatccacccaaaattaaaagaaaaatctgatctttcttcttcttcttctttagttttttttttcacccttttactttctctcctctgccttttgcctttgtcgctttctgcatcgttgtgagtgagttttcttcttttttattgcctctttgtttggttgatgttttcttcttcactaatacccaaaaaaaatccgattaaaaaaaaatgtgtaatttgagactgcaggacaagaagagtgcaggcgaataaaaacagcagatggaattatttcgaagctttaggaacacgagaagagactggtctttagttaaaaaccaaacatatgtactcgaaagccatttattacctttttatttttcttatttccgcgtgttgaaaatgtcaggtcccttgatctttggtttttcattaattacttctttttgtatttctcaattatttattccataatctttgatactagtggtcagcaaaacattaaatattaataaagtggtatataaaatgatggagcatgtgaaattaacaacatatcatgattcatttaaatttgttagtttttaattgtagatgttttagatattttaccatttatatttctaatagttgttactattaacatgaaaaaagtgaattttaaaatacattatgtatcttgaaggttgaattatttttgtcattttttaatctattaatatgtgtggagacatctaatcgagggagtactgactcttgttagttgttaggtagatgtttaggttataaagttggacattataaggatgtatagaaagtagatattgaataaataaaactagctgtcaattggtaaaatgtagaaaatcaacttccaaatttgaagtttaatatatggttaattacatcatttagatatatttatcaaaaacatctcatccatacttagtaagttaatattcatatcaatctttaatatatattatgaatatatgtcataataacatggcagacgtgagacgaccaataataaaaataacttaatgccaaaacaaatttatatgatgagatttatgagtagactcgttaaaatattcctcagtgaaaaagtattgcatacctcaatgaaattggtgtgaggtccataaaagagagttcaagaaagaaagtacacatatttacattttgagtcatcgaagttccattttacaaatattaatacgtcactgaaaaatgaaaatacctacaagaagatatatgtgtactgtgtaactgtaacagattgggtgtaagaaatcgagaattcttttacttcttattaataaagaagataaaaacacatgcttttatgcaaactatataaaagaaacacaaaacaaaattacattcacacatggaaccaactatacaataaaacattgcagttttcaatgggccacgagtcttaatgcatgtgaaaccagtgatcagtgaccacgtgttaggctttaatttgtgaattccatatgatccaacaatttaacaatatcatctattctaacttgtataaatttatttcgtctaaactgagccttcttaaccccaaagatttggcaatcgagtttatgaactccgattttatcttactcacacattctaaactataggaagaatttctttatatcttccacccattgacaaagatcgtactatgtaataaattagaccgcaaacaattaactttataagaatataccttggataaaaataaaaacaataagagaacaatgtcaaaaacaatcactaaaaacttttcttttatttcacaaaacaaaaacttttcttgaaggtaagtgaaaaatatttaattgattgtagaaaagacgttgttctttttgtttacgggtttcgggctacaccgtcgtcacctgaggcggtctatatgtttgtgtcttcgaggctgtcatgatactaaaagattagaaatagaatcgaaaaattcactttgtagaaaagttatatattagctcgaaacaaaacagttagacaatagacgtacctcgaattaatacgtcatccttattagattctttttcttgtgtgtgcgaaaccttattaggttcttcacaccgtttttcacaaaggtaacgtaagagacgacaaatcaacacggcacagaacaccaacaaaaacacaatgcatcccaaaataatcttctccatatcgtgtctgcttcttcttcttgcatacaaattatatttaaacactagtatgtgtactgttaacgagtttacattttgaggtcagaaaatattccattttaggatcttatgactatgtaaagtttacatattttatcaatgtttctaatttgtgatcacattatggatattgtgatcacataacgaaatgggaaaatgccaaaaaaagaacatatccaactttaaaatttgccaaaaatatttcaaatttttcattaacggaggcgaggagctaggtatatgaaattatgaatatttcaaacgacgctgtttcgattatataaactaaaccaagtatcgggaaagataaccgatccaaatcaaggacagtaacacaaaccgaaataatccaaaccgggattatacagacaaagtggattataagagcaaaaactcagttaccaaaaatttctgcgaatttcgttttgaatttaggaaacgagagaaatg

SEQ ID NO: 8303 - DNA, 3000 bp, Unknown
  misc_feature (1)..( 3000): cDNA_ID_3092203_gDNA_ID_1971713_Annot_ID_175141 3000 nt of promoter + ATG
aaatcagagaaatcatgagctcgcaaagaaacacgatttataccgattcgtttccgataaatctcgttacagtttcggattcagcattataccgaaaattacgggaaattttccttattcaagctacatgcaacacgaagatttcaactaccaattcgacgaatcaaaagtgcgaaattagggttttttcgcgtacctgagcgaggaacatttcgttgagaatggttgacagaagttaaagaaccaatcgaccgaacacaagccatatctgtgatgtctgagtgcacgaggagttagagacacagagagtaagaaggagatgaagcaaaaagctgtggtgtggtggcgggagaatcgtgacgtgtcactaccaaagccgttccttcatttggataccgtcatcgtctcaacttatgggcttttacctttaggcccgagatgtttataataagcccattttggtcaaattgtcatataataaacccattttggctttagacagagtcagagagtctcttgctgtctcagaggtttttaagatgcatgaaacacacgtggcacatgcgtgtagatcgtaaggaaaagctggactctcaagtctgtgatgccatagcgaatcccatggcctgatccctgatggccatgtgacgaatcgtcagcatacatacttacttgttaatatattaattagtatggtattaataatataacccaacaaaacaccatttgcaaagagtttaggtacttatttgtgggattaggtttctctctctgataatacagaaattaatactaaattaagtcactataggtgctgatccacatgcatcccattaagccttcaaacctcttgtaagtgtttatttctttatgatctatagtctataaaatctcctataaaccatccattgttcttttgggtaataattgattattataatatttatggtgtagatcaaatttatttattttcctaagatattgtatatatcagtgatcagtcgaaagattcaaaactgaaaagtgtattctatcaattatataaaaaaaaattacttactgagtaatcgtagaatttaaggtattttatccaacgatcgaaaggataattaagcaaatgaagaacttaactacggatcggaatgttttctaaaaacaacaaataataagaaagaaaaaacaattgtataaaagacaggtccacatgagtgcatgtgaagcaacagtttgtgtttagtactgtaataagaaggatggaaacatgaaatcagtaagaggagtgggtaattgttggagtattacaataattgttttgatgaatattatgcgtgtgcatttctctgccattttcccacaaatcatttagcatttagcttatcttatcctttatcaaattgatcagttagtttacctcgacccgttcttgatacatacatatctgtttgagtttttaaacatcttggtgttgaatttgtcacggttattatttatcaagtttggattctttttagtgatatcaaattactatgctatgctaattgggcagtctgaaaaaaaaataaaaattatattctctcgtttgacgtacgttttttttattccgtctccattttactttaccttaaaggcattggcactgactttgggtgtatacgtctacacatgcttttagtcttttagacatcaggtagaaagtttacgaaattagaattttatatctgaagaacgtttaagaaagtagcattttaattagggacaatttgctgatacattcaagaagtgatacaattaaccactttatttaatttttatttgttatattatcaacaatattatactatacctatattacactgccataaatctgtaacatgggaagattcttatctaatcaatcatgcaaacgaaagaacagtaacaagcctgcactctctgcagtggcatacattatagtattcacacttttgttacgcatcaaggtaagtatgattgaactaaagaaatatgttttcacgtataatggccatgagtgggctcgatcttaattttttttaaccaaccaaatagaaagaagcttttcgaaattcaaaaggggtaagaagaaacgtgaagatcgatcgtgggaatatcttcattattgctgattttaattaataatgaaatttatttggacctatctgatatttaaatatgctgcagagcatagggtaataggatcatctgttcttcttcatcacatgtgcaggtcacccattcttatatgcttcgaacgttcacctcggtggctatatcctaaatacgagatttacaatataatcactgattcatcattaatatgtaatgtaatcgaatattgctaagagctaatggtatattttttgtttttcttccttagaaggcaagcgttaaaagacacaaaaggaaaaaggtgggaaaatagataaagacattctacaaaagctgaattagaatgaagttaagcataagctacctctatgccacacaccaagtgtatgtataaaaaatagtaattatattagtattagtttaagcttaagctatctatggcacattcacaaatcactatacagcaaatcaatagttgacttaattaattttaaaacaccgaacacatttttggattagttgtaattgtgaagaaaacacattctctcttcacatgttcaatgtcttaagaaatttctcaaatacttccaagatcttgtttatttctttttttcttagaacatgtaaccctacatactctttgatcactacatccatataaaaccaagattcatttttatatatctctgtgtttatatgtcacatatatataacataataaacacagaacaagcatatacttacagagtttcttcttattctactctcttcctccaccacctccttgcatgttcactagtctcgttcttggtaatgaactaaggagtcaagtttcagttgaagctgttgagacagaggaagaagttgaagatg

SEQ ID NO: 8304 - DNA, 3000 bp, Unknown
  misc_feature (1)..( 3000): cDNA_ID_1024037_gDNA_ID_1971713_Annot_ID_175142 3000 nt of promoter + ATG
gaatctgagattttgcctgtgagattcatccccgccaggtcgagcttctcaacattgccatttgagttgcaccgaacaccggtccaattacagtgatcgctggtgtctgaaagcttccagtctttgagaaagttgagaggatccacaagagttgatttcaccgacagcaaaacagagagctcgttgacattgtcgatggaagctaaaacagaggaagtagaaccaatgtaacagtagtaaaggaagagaactattatcttcatcttcatcttcaacttcttcctctgtctcaacagcttcaactgaaacttgactccttagttcattaccaagaacgagactagtgaacatgcaaggaggtggtggaggaagagagtagaataagaagaaactctgtaagtatatgcttgttctgtgtttattatgttatatatatgtgacatataaacacagagatatataaaaatgaatcttggttttatatggatgtagtgatcaaagagtatgtagggttacatgttctaagaaaaaaagaaataaacaagatcttggaagtatttgagaaatttcttaagacattgaacatgtgaagagagaatgtgttttcttcacaattacaactaatccaaaaatgtgttcggtgttttaaaattaattaagtcaactattgatttgctgtatagtgatttgtgaatgtgccatagatagcttaagcttaaactaatactaatataattactattttttatacatacacttggtgtgtggcatagaggtagcttatgcttaacttcattctaattcagcttttgtagaatgtctttatctattttcccacctttttccttttgtgtcttttaacgcttgccttctaaggaagaaaaacaaaaaatataccattagctcttagcaatattcgattacattacatattaatgatgaatcagtgattatattgtaaatctcgtatttaggatatagccaccgaggtgaacgttcgaagcatataagaatgggtgacctgcacatgtgatgaagaagaacagatgatcctattaccctatgctctgcagcatatttaaatatcagataggtccaaataaatttcattattaattaaaatcagcaataatgaagatattcccacgatcgatcttcacgtttcttcttaccccttttgaatttcgaaaagcttctttctatttggttggttaaaaaaaattaagatcgagcccactcatggccattatacgtgaaaacatatttctttagttcaatcatacttaccttgatgcgtaacaaaagtgtgaatactataatgtatgccactgcagagagtgcaggcttgttactgttctttcgtttgcatgattgattagataagaatcttcccatgttacagatttatggcagtgtaatataggtatagtataatattgttgataatataacaaataaaaattaaataaagtggttaattgtatcacttcttgaatgtatcagcaaattgtccctaattaaaatgctactttcttaaacgttcttcagatataaaattctaatttcgtaaactttctacctgatgtctaaaagactaaaagcatgtgtagacgtatacacccaaagtcagtgccaatgcctttaaggtaaagtaaaatggagacggaataaaaaaaacgtacgtcaaacgagagaatataatttttatttttttttcagactgcccaattagcatagcatagtaatttgatatcactaaaaagaatccaaacttgataaataataaccgtgacaaattcaacaccaagatgtttaaaaactcaaacagatatgtatgtatcaagaacgggtcgaggtaaactaactgatcaatttgataaaggataagataagctaaatgctaaatgatttgtgggaaaatggcagagaaatgcacacgcataatattcatcaaaacaattattgtaatactccaacaattacccactcctcttactgatttcatgtttccatccttcttattacagtactaaacacaaactgttgcttcacatgcactcatgtggacctgtcttttatacaattgttttttctttcttattatttgttgtttttagaaaacattccgatccgtagttaagttcttcatttgcttaattatcctttcgatcgttggataaaataccttaaattctacgattactcagtaagtaatttttttttatataattgatagaatacacttttcagttttgaatctttcgactgatcactgatatatacaatatcttaggaaaataaataaatttgatctacaccataaatattataataatcaattattacccaaaagaacaatggatggtttataggagattttatagactatagatcataaagaaataaacacttacaagaggtttgaaggcttaatgggatgcatgtggatcagcacctatagtgacttaatttagtattaatttctgtattatcagagagagaaacctaatcccacaaataagtacctaaactctttgcaaatggtgttttgttgggttatattattaataccatactaattaatatattaacaagtaagtatgtatgctgacgattcgtcacatggccatcagggatcaggccatgggattcgctatggcatcacagacttgagagtccagcttttccttacgatctacacgcatgtgccacgtgtgtttcatgcatcttaaaaacctctgagacagcaagagactctctgactctgtctaaagccaaaatgggtttattatatgacaatttgaccaaaatgggcttattataaacatctcgggcctaaaggtaaaagcccataagttgagacgatgacggtatccaaatgaaggaacggctttggtagtgacacgtcacgattctcccgccaccacaccacagctttttgcttcatctccttcttactctctgtgtctctaactcctcgtgcactcagacatcacagat

SEQ ID NO: 8305 - DNA, 3000 bp, Unknown
  misc_feature (1)..( 3000): cDNA_ID_3046243_gDNA_ID_1971713_Annot_ID_175140 3000 nt of promoter + ATG
ataacaacaaaatgtaagagaacaattctagtcaaaatggcaacttacagtatcttgagggacaactccaatgcagcttcgaagactctctagtgtcacttcctttatatcttgaccatcaatcctaacattaccagaatctgtgtcaaagaacctgaaaatcattctaagaatcgtcgatttgccgcttccgctactaccaacaatcgctacacttttccctgccggtacctcaaatgaaatcccatccaaaatctttctctctggcagataactaaaatgtacattctcaaaactgatgcttccacctctcagaacaagaggaggtagctttgtctctgtatctttatctccaatatcggatctctcctctagcaactggaacaatgatttcatatcaacaagaccctgaacggtttcacggtaaacaccaccgagaaagtaaagaggaagagacaattgaaagagaagaccattcaccatcaccaaatcaccaactgtcatctctccattcataatcccttgagaacacaacaccattgatgttgacaaagctgtactaaatataaaactctgtccaaaatctaaaaacgcaagactcttctgagtttgcaatgcagcatcttcatatcttccgagtaaatcatcgtactttctcgcttcgtaatcttcgttgttaaaatacttaacagtctcgtagtttacaagagaatcaatagctcttgtgcttgcatcattatcagcttggttcatagcttttctaaacttagttctatactgtgtcacaaccaatgtgaaagctatgtatgatccaacggaaagagaagtgatcaaagcaaaaacaggtccaaaattgtatgctaatatacctgtgaccattgatatctccaagatcgttggaacaacattgaaaaccatagcagagaggatcgtgttaatcgcgcgacttccacggtcaatgattctattcaaagctcctgtttctcgattcaaatggtaacgaagatcaagatcatgtaaatgcgagagcactttacgagaaacagatcgtattgtgcggagagatactttggagaaaacagcagtacgaagctcgttaaaagctgaagatccagatcgagcaatgccatagccaatgagaacggaagaaggagtagcgaaagcagcaagtagataaggatttgaatcagtgattgttgaagatgaatatgaagagagtaaatcgatagataatttgaagaggaaaggaacttgaacattcaagaacttagctcctatgagacacgctaaagcagcgatgactctgaatcggagttctgggttgtctttcatccatagatagcttgaaatcgtgcggaggatcttcttagatgatgctgttttggtttgatcttgatttggagttgaagttgaagttgagaagaagaagactcgtgcgttgactggagatggagatggagatggatcggtgaagaatgcattgatagctggtgatctctgaattgagctacgtttgataaaactggagaaactgtgatggtgatgatcagagcgaagacggtgatacagagaagcgcgagagaggagaaaccgagatcccctcatcatcgcttcttgtccgaacgaatcacatacaatttggtctaaatcgattctttaattctctgttttgttctctctgtactacagagtagcttaacaagaagacgaggaagaagatatcaactcggaaataaccggttttggttttctgtttttattaagataatgaaattagctatctcggagataaccggtactggtttgattgcaactgggcttgagagaatcagatacggtggtacacaccgcagcgaatctcagagtattcattctctcacatggactctttcgaaaattcaactcttctactatatgcaattaattaaaaaattgaacggtttatttggaaagtgaaaagaagcaacggtcggttatgtcttccctccagacgacagggtttttattcggacaccactaaaaatggacagctaaactcctttattgccttaaaaattcaattttaattacgtgattaaagattagattgccacttgattttaaaatactaattaaacctatatagtgatggtatctaactatcaatagctttaaaccggaactaatcagcaccgtccgatttggaaagatggatggaccaaaggacgtgtgggcacgagtcccccctctctgtacacgtgggtcccactaagccttctaagtaatctttttctagccgtccgattgaatcccatgaagctgacatgtgagcccccacttcttgaaaatatatatttgtatgaattttgtttttattttattttccagccttttaaaaatgtttttattaataccacggatactaccgttttgatatcaaattttctttgaaatctatccgatcttatatcagattttggagtcaaataccaactacaaaaatctgaacattaatacaataatatacattttgaaaaatcatgttgtccattatattttttggcatctaatcctatcgttaattgattataagtttataaatatattacaacggaatttcgcataattgtaaaacttccctatataaacttacgaaaaattgaaataattataccaaaagtccacatattttattttaaaaacttacataagtggatattgttaaaagaaggaaaaaaaaagagtttctagtaaatatagtcacggaataatgtgagaaatttattattggatcaaaaaaatgataaaattgggcgagaaataagactaaaagttagggaagtgaaaaagagacaaatcccacccgtcgtgtcttcttgttcatcctttgtttccctttttctttctcactgtttctgccttacttaaagtctcaatctttgcttcaaattcaacccatctctttttcctcccttccctcacaatcaaaatcttaattctcagcttctggttttgtcgaaa

SEQ ID NO: 8306 - DNA, 3000 bp, Unknown
  misc_feature (1)..( 3000): cDNA_ID_3092211_gDNA_ID_1971713_Annot_ID_175138 3000 nt of promoter + ATG
gaattaaagaatcgatttagaccaaattgtatgtgattcgttcggacaagaagcgatgatgaggggatctcggtttctcctctctcgcgcttctctgtatcaccgtcttcgctctgatcatcaccatcacagtttctccagttttatcaaacgtagctcaattcagagatcaccagctatcaatgcattcttcaccgatccatctccatctccatctccagtcaacgcacgagtcttcttcttctcaacttcaacttcaactccaaatcaagatcaaaccaaaacagcatcatctaagaagatcctccgcacgatttcaagctatctatggatgaaagacaacccagaactccgattcagagtcatcgctgctttagcgtgtctcataggagctaagttcttgaatgttcaagttcctttcctcttcaaattatctatcgatttactctcttcatattcatcttcaacaatcactgattcaaatccttatctacttgctgctttcgctactccttcttccgttctcattggctatggcattgctcgatctggatcttcagcttttaacgagcttcgtactgctgttttctccaaagtatctctccgcacaatacgatctgtttctcgtaaagtgctctcgcatttacatgatcttgatcttcgttaccatttgaatcgagaaacaggagctttgaatagaatcattgaccgtggaagtcgcgcgattaacacgatcctctctgctatggttttcaatgttgttccaacgatcttggagatatcaatggtcacaggtatattagcatacaattttggacctgtttttgctttgatcacttctctttccgttggatcatacatagctttcacattggttgtgacacagtatagaactaagtttagaaaagctatgaaccaagctgataatgatgcaagcacaagagctattgattctcttgtaaactacgagactgttaagtattttaacaacgaagattacgaagcgagaaagtacgatgatttactcggaagatatgaagatgctgcattgcaaactcagaagagtcttgcgtttttagattttggacagagttttatatttagtacagctttgtcaacatcaatggtgttgtgttctcaagggattatgaatggagagatgacagttggtgatttggtgatggtgaatggtcttctctttcaattgtctcttcctctttactttctcggtggtgtttaccgtgaaaccgttcagggtcttgttgatatgaaatcattgttccagttgctagaggagagatccgatattggagataaagatacagagacaaagctacctcctcttgttctgagaggtggaagcatcagttttgagaatgtacattttagttatctgccagagagaaagattttggatgggatttcatttgaggtaccggcagggaaaagtgtagcgattgttggtagtagcggaagcggcaaatcgacgattcttagaatgattttcaggttctttgacacagattctggtaatgttaggattgatggtcaagatataaaggaagtgacactagagagtcttcgaagctgcattggagttgtccctcaagatactgtaagttgccattttgactagaattgttctcttacattttgttgttattagtctaaaccgtgacaaattaggtaaaatgttagttatctacttagggcttattggaaaaatctatttagggtattttaaacttttttgttattcagtcacaatttctacataaatcacatgcagatgacattttacactccaaaagtgattctgattaaacctgatgatcttaattttcattttaatatcaaatcgatttaatggttataacttgcatacttaaagataaactagactaatcatagcctcaattgactcctggaattatggcaggtgctcttcaatgacacaatatttcacaacattcactatggaaacctttcagcaacagaagaagaggtgtacgatgcagctaggcgagcagtgattcacgatacgatcatgaaatttccggataaatattcgaccgcggtgggagaaagagggctgatgctgagtggtggagaaaaacaaagagtggcacttgctcgtgcctttctgaaatcaccagcgattctcttgtgtgacgaagcaacgaatgcgcttgatagtaaaaccgaggcagagataatgaaaacgttcaggtcgctagcgagtaacagaacatgcattttcattgcacataggctgaccactgcgatgcaatgtgatgagataatagtaatggagaaagggaaagtggtggaaaaagggacacaccaagtgttgttggagaaatctggcagatacgctaaattatggacacaacaaaacagtacactggaggtgtgaatctcaagagctagacagctagtgtttgggttctgttttcgcctcactaattctttttttttgctgacttcccttatttttggaatcatatatttgcaaatatcattgatggtactttgtagccttgttacaaaaaataaaacatatttgtaaccttgggaaaatcatttatagtcgtagaggtaccaaaccgattttttcaattaccttttgacaaatcaaaaagtttcgttattcggttttaaagtaagctatttgtattacctttggaatcattgaattggataaaaaccaatagtccttgaagtatccggttctcatgcctaaaacacgtggcaatcgaaccaggaccggttatctccgagatatctaattcataatcttattgtaaacaaagactggggaggttattaacaagttgagatctccaagcaagaggtaattttttaatcttattcttcttcaggtgctatggtacgaaactggattcagaaagaggtcgagcaaaaagtcaaacagacgactctacagaaatataagaaacgaaccagacgaaactgtatatgttaggacaagaagcaatg

SEQ ID NO: 8307 - DNA, 3000 bp, Unknown
  misc_feature (1)..( 3000): cDNA_ID_3092900_gDNA_ID_1971714_Annot_ID_175150 3000 nt of promoter + ATG
atacatattttttgtgccaaattagtaagtcgaatacctattggtacttgtatatatctttcgctgacatctgcgaactgaaattgaaaatctgaatatatatattttttgtgcacaaaaaatctgtttattcatttttaaaaaaaatgctagacactagttgactatatcactacaaataatgaaaaataaacagtaaaaccgcttaaggtgctgagttgacatatcatatatgaacatgttttcacttagaaataaaaaaaaaagaaatggaattcaccggcattttaatgaagaagggaaataaccaataatgattgaaggaagtgattattcttaagactagagacacatatcagatgagacaaacaaatgtggcaaacatatggacccaaatcgcagttttatattacaaggaatctcttgttaattagctagttgtccacggagttttgtactatataattcataattcgaatatggaaaactaatatgatatgaagatttagatacttttcattttcccttttgaacttctttccattttcccaattgggtatatggactaggaagaagaataatagaaggccatgtactcaaaccaataacatatatgtatatacaaaagggtagaattacatagcgaccaagataaataaacgttattctcttcttttctttttgaggtaaaaaaaaaatgtatatacattaataatagagaaatattccgacatacttatgaacaatcatgaaaataccttggataatatatataaaccatttcttgttgtaatattcatattaaaaatctaaatagtactattagagatattccacattttttgcaaggatatgcgtacttgataagtatatgaattttaattagaaaagtacaatttcattaaataaacaatatggtaaaattttagttttgaaaaggttaatagtattttagatatttagtaaataattgaaatgtattagtcaaaacatttgagttttctaaatggacgatgatttgaataattgtctaatactaatgtaaagatagagaaagtatcttatgcaaaaatttataaacattaaaaaaatatttgtatgagaaacttcttgtcgaggaccattatgaaaaaaaaatgtagtaactagttattatataaaagaataataggcttaatcgcatattatttaaaataaaatttcagttgacgcaaaaaaataatagaaaaatatattaaaattaataaaaaaagttctctctatattctttaaaacatatagaataatttaaaagaaaattagttgtaaataaattctctaaaaaaactaattgagaaaataaatatatgtcagtatttctatatattgacggttatcaaaatgtaagacattttactgtcatacaaatagacagacatatatgcatgacatgtttcatacaaacattctatgattgtatttatgtttttatatgtaaacgttacgtgtagaacaacgtttaagataatggtcatatcaatcaacctttaaatagatgaatcaaaggtgcttcctttgtttgaacttctaaatccacacaaaaatacaagaaaagtcaaataatgtggtctttatcatatttgtttgctccgaaaatatagtgtcacttgaacaaaactcttgacaaactggcctatactggttttttttcttaaccaatttatccgttaattttcaatgccgtattgggttcacttcgaagcatttcctgtcagtcattataatccaccaataatgtcagtttctctctctcgcccaaaaacgaacgatcgaggtgaatataaatgaaacatgtacattaattaatatatttatatcaaagttttttccggctttgaagcttgaaaatactccatatattatatacttctttgtgctaatttgtcgacgctttggccattttcatctatcatcgaggattcacaatttttggtgcgtatcgtttacatgatcgaagaaatagatatctgtaggatattatgacaatgtaaattaaatatagtttttctttagtctgttgattatctttatgcttagtttaagaaatagtgtaaacgcttaatatactcactttgcatgacccatataaacagtgtaaacgctaaaatataactcttcatcacccatattgatttaccttaaaatcacattcaccattgcgtctgatggaagtaatatttaagtatagaatacacccatatatatgtatatttattcataatattatatcaatatatattcatatatacgcgttgacaaaacagaaattcattctaacacgtacgtttatttaactttgataatgctagagtattattgacaggtataccgtgtacatggaattaatgtttttactcgctgctaataaaatgtatcttaccaccaatttaagcgaacgtatatcgtattattttaacaatagtttcagcagctgcaggtttccaacgactaatcttttaaattttggaatagcgatcatattcatcatatatcgttaataatcatgaaccaaatatgatttggtcgccaaaatctataatatcatcgttagaacttgtcgctatttttaaacctatcattaacttaacataagacaaacaagacttggttcttggttacaaccactagtgattgtaaaacgaattatcttaactatgaaagaggtatcctacaaattaaaaccgcatcaaaacttaccgtcaaacttcttttaaataattatcgtcatttacgcgtatctaaaaaatgaatatattatatcaacttgaataagaatccatcatttgtaacaagatcccttaagcgagaccctataaatacatcacatgcgtagcaccaaacattcactaaaacttcatttactttcttgaacttgtcttgtgccctctttccaatacactgaaatccacttcaaaatatttatttaataaaaagaaaagaaaagaaaaaaactctgccagg

SEQ ID NO: 8308 - DNA, 3000 bp, Unknown
  misc_feature (1)..( 3000): cDNA_ID_3092894_gDNA_ID_1971714_Annot_ID_175152 3000 nt of promoter + ATG
gtttccgatctcggccccaatgtcttgtaagcttttctaactccaaaattttcaaggcagtctcacgactcaatacatgttcacatttattagcaatatattctagaagcaagtgacccatatgatacgcaccataattttctaaattttccttcacaaaattagaaacgacggcgtgttcagaaattggatcagattcttcattgcagaaagaaccagcagactctctgtcaaaaccccttttaaggacaaatttctcaagatattgaaggatgtcactgctaggatccttactgttatcaaattctaacccttccttctcaggtttctggttccgaagccgttcaagacgagtactccgcctctcttgggggtgttcttcagaaaacacaggctctttttcttttacagaaccaccactttctctctcgatgttgcaatccttaacagacacattacttgaatctgaatccacacaatgatccttctttttcataccttgcataacagcctctgtactaagggataattcaatggttatcggtatatcagctgatatgcccacagtttcacgcgaaggatgcactatcccaattagaatatttagcagtgccacccatgaagcttcaggaagtttaaattgcactctttttcttaacttcttggaggtagcatccatgtcctgattcatgtcagacacctttcttttgccaagaaatttgagccgaacgtgctgaggttcaagtttatctatacccttgggagcaaaaggagctgaatctgtgtcttcaatacaatgtttaacatgcaaagcacgagaatgtgatggccaatgccttaaaatcagatttgcaactgaaagacaggaaacttcatcacctacggcaatgagaacttctagaagtttctccatgcagttccctgcacattagccaattcaattttcaagagggagggaagggtaaatgcaatagtccataccacatatgagtaatgtgaacccaaaaacagagagagaaagaggagaacagtgcgtacagttattggggctgcagagaagtccctgttcaaatgcccatcgtgaaatactcagtaatcccatagaacatgatagggttccaagatggttccagagcacagaatcttttgcatctaagtctatagcttgaagataacagtttagagcattctcgtagtgacttgaaccaagctcaagaaagacagtggcaagattcttcagagccaaaaatctgcaaacagaaattatttataggcgagaccacagcactaatgaactaaaaatatatgaactagacaaaatcaattagtagacatgtaaccaataactagatgaattaaaacgatggagcttgacctgagatgatggagatgattgtcgtttgcaatagtctccacctggacataatgtcaataagaaggtcattcatcatccaaagaaatcatcagagtaagtgaagaagatgattttactttggagttggttataataggatctttaaggatagattctagcagctcccgagccttgtcatagtctttagcttgcagcttgagaagaccatcatgatatgtttgtgacagatgaaactcctgaagagggcaatttaaaaaaaaaaacagttcaatatatttttcaacaatgagctaatctaacttctttataccaaattgagaagaaagaagccctgaatcagaagaaaacctgagcttctttgctaggagctaaaggttcccacttctctgtggactccgtatcattgatcgctgcaatcgaaaactgaaaaaaaaaaaagcgaaacaaatgcaaaaaaaatcaaaaactaaccgattaaaagggggatcaaaattaaatctttgcccgaaattatcattaccatcttgatactcgaagctggtaatggttggggttttcgagttcttggcgcgaaattggtcaatcttcttcttcttctaactagggttgatgatgcacgttaaacacattactagagttttagatttcacagaattcttttctttgtttggtctgttcgtcctctactgtgtttttcttttgttttggctattttgccgtctgttaaaaaattggggttttccgataatgtattgtatatgcctgaattatggaaatatcactaaaaacacttttttgcacttttgtatatattgcaattaagatttaatttttctattttgaagactttttgttaaaagagagatttgctaactcaaaattaccggagttaataagttcgttctcatcagattagcaaaacattcatctttaaagaaatctgtttatctcacgtaaaattctactaattggcagcagcacactactttaatgggcctattactatttcaatatgcactgaaaacttcattggactgtccaataacattataacattattaaaactaaactacatttgtatttgggttacaattttataaagagtaagactcaagatactaattgggctgcagacaactttaaaagccttactacaaaaatcaaaaccattcttaattaactaacaaccaggtaaaaatctcagtacaatatttacactaaaaataggtgccacccactatgcaaaagtttagggccacgaacaaaaaaacctgtaaattgttatgtcttcacaatatgtgttttaatacacatgaattttagctacggttaatgtaaattttgtagttaaattaaggctaaacaatctcaaatataaattggtcaggtccacagacaacagcctggcaagtggcaagcactaaaaattcgaccgttattttttgcccctttttttaatatttcgaaattgtatcttttagttttattttaaagctttttagcccgctcctcctccgctccacctttaattttttcaccaattggatttggatctgtcaaaaatattggcctctttctctctttctctcttgctctctttctttgttgggttgatctcttcttcc

SEQ ID NO: 8309 - DNA, 3000 bp, Unknown
  misc_feature (1)..( 3000): cDNA_ID_3092887_gDNA_ID_1971714_Annot_ID_175154 3000 nt of promoter + ATG
cacacacgatctccctgataactgtattaagcccggggcataggccaccacaagtgacaatacaggcacgcacatcagatggcttgaagtacacctaaacacaatatataatcatatatcagcagtttttacatcatcaaatacagaagctgcagagcaaaggaaactcatggagtagatgaagtaccttttggcgcgggcctgcacgtctaaaatgtgtccctctaggagaatccttgtgaacaacaatctatacatcacacgaaagggaaaatgagcaatgtgctaaacatatcacatgatcacttacgaagagaacaaatgtaagaaaggaaagcgtcagtgagtttcaccttttcctggactgtatcatcctcatcaacaaaatactgcctgaaaatcacacagaatatgaaccctattaactaaccgtcatctttcaatcaatcaagttcataagtacaacatcaacttaccttactactgaataagcagcatttgattgcaacgggtttggataagtctgttagagaaggtatcagcaaaagtgaataaagtataaaatgaaacgaagctatagcatgatttgaaatatgaaccaaaaagcttttttttttctccatggcaagactaatttacaatccaattcttccattactctacatgtataagaacctcattacattagcatcaaatttagaaaatagtaagtgattaatagatctaatcaaacattcggtgacgagtaagcatatgtgcaccaatcaatttccacgttgacattgatttaacatttcacatttgtatgcactaatacgaatataaatatttatgtaattctctccctgatagagaccaggatctcatcaacagtccgaatcaacatataggctaaaaataggcgaaaccaattatacaaacacaacttttgcatttgctatacacgaaccaccaaatcggcaacaatatcaaattcgtaaatcgtataaccaccgatccatgaaaatgtcgatttcaaagaataatcgatggaatcgtatagagatagagagaggaagtagtacggggagatcgagaatgtaatcgctcaaatgaggaacatcttcgagtacataaccagcaggtccttccaccaacttaatctgctcgtccacgccattagaagccatcgaagaaaaccttattcttctgagtgtttttctctccggtgacgtaaagcgactgtgaatttgaagcgtatgtatgtatgtgagttttaattctcagagctcagagtggtatagaagtaaggaacgagaaagcgacgtcgttttggctcaccgttactttatgatatacggacattaccgaaataccagcgtaaacggcggctggtttttccttttgtcaatttccggttttcagataattgattcgtggataaatgcagaagtatggataaaatctcattaattatctttattatacctttaaagaaaatgacaaaaattaaacgataagaatatcttaatatttacgaaatatattcttagtaatttctctatttggtgtcaaaaatatataggcaatttttctattctttaatttcttaagattttttttttttaaaatcattttttcttagtatatggtattgttcatgacaaagagagaaatatcatatcctgttgagaaatagcatttataaaaactgatttgttttgtaaaaataataatgtcaagctaatgtatagatcgaatagttattttagcttaaaaatcaaatttctgagaggagaaaatttatcttacaaatctttataacgcttaagtataaaaaaaagatcttaatacacaattgtccgaaaaaatcatttttaaactatcaaattatcggtttaaactttttatttgattaacaaatcaatctaaactttacaaatcttcatgaatcaatttaggatttaaatatcaaacaagtggattctaaaataataaagtttcctctccaattaggagtataatgaattacatatttggaaagaaaagattcgagtattaataaattttagatgaatttgataagttttagacagttaggaaagttgttactatttgttattaaaaatatttgcaatctccctcactaaaaaaaaataatatttgcaatctcacaaaaccatgagaattgggtctttgtaatttttaatcaaggaaatccattattacatcactaattgaaattcatgtttgtatatacagcctaaacttttgtatatacagcctaaacttttgtatcttttatttaaaaacactttaatatgttaaaatccaatatagtatcaaaattatatcaaaatctaataaacaacacaccagttttcaactttatcaattaaaattaacagatggtgattttaaatcagttggtttccatcgacacatgatttctagttaccaataatcccactaaccccattaaaatctttaaattaaaaatctgaacaaaattatctaatttagatttgttttcaaaatgattacaatgttttcttgttttgaacggagacttatcggctccctccgtaaaataatcatacacattaatccactaatcaaaatttaattataaaatcgaatcgccgtgtacctaatatcttccccaacctttgctctctctctctctccatctccctcatacctccttcttcttcttgatccatcatctctctctctttctctcttctctctgttcctagtccatcgatttaacctctttcagattctccttcttctttgactttttttgacaccgtagtctctttccccttccatcgatttagggtttccgattttcaaaatctcctttttatttgtttcctctccttgtgcaattcccgtctcgaatccatcttgacctgggggtctgatccgatctccctctaatcatatcgtgaagcgagattatgtttttgtgctgcgcttctgctttgatcgcttaggattatcaatcgtgttatg

SEQ ID NO: 8310 - DNA, 1270 bp, Unknown
  misc_feature (1)..( 1270): cDNA_ID_3092878_gDNA_ID_1971714_Annot_ID_175157 3000 nt of promoter + ATG
atagcacagagatgacaactccggtggcaacaacaatggccaccacattggattagaagggcaaaagaagttctaataaggagcaaactaatagccatgaaaattatgaatttaccatactgaaaacaaaggaattaaggttttgaattcaatacttgttttgttatatatgatgttgatgtgacgtatttgtgcgtttctcatagtgactttgaaaggaaggctaaacgaatttgcagtaaaagtaacagaagaaacacttcaaaattgaattaaaatgaagaaaaaaaagaatgagaaaaagtgagaagtggtggttgtctggtattaagggtactcacttctctccttttcaacacagcccgacacacatgtctctttttttttttttcatacacacatttctatttattagtttcctaaaataaaaattataaaacaaaaagcacacccacccataaactaaagcttttctctctcatcccactacaaatcttatatacaagtttcgcaaatcttgactcttcacgttgtggatctatctagagagataagtaagagagaggaagagtaaggaagaaagtggttgaactgtagcagagtctgaggtttgaatcttgtagttcccattgaagcatgcttcaccgttttttccgaaggaagttactcatccactgagagagaaagagggatttggagatagagaaagaaatttctcagatgggtttgtgagaattcacagcaagagcaagaaactcctatatcttcctttgcttccagagaccagcgtgatcaaaaacaaatatttttacggtatctataagaatcctcccctctttttctttttccttaaagagaatttttttgcatctttcttaggttccaataaatatgcagaagaaagttaaaatttttgtaccgtcgttgaaccttttaaagacctaattaagagacaagatcatactaagctcataaatcactttctatttacacatatataggttattaatcttaaacaagatctatattttatctttgagatttttcaagatttcatcaagtgtcacgttcattcattgattacatttcaaatttcactaagaaagttaaaacacggatctttttgagaatatcaagaaagttctttgaaatataccaaaagaaatcagtactttcaagaatacataactttttaggttgtgttaaataatatttgcttttgtaataaaggaacaaaattaaatagagagatcggagaggatcaaagatg

SEQ ID NO: 8311 - DNA, 3000 bp, Unknown
  misc_feature (1)..( 3000): cDNA_ID_3046255_gDNA_ID_1971714_Annot_ID_175151 3000 nt of promoter + ATG
atgaattagcgaaaaataatagtaagaaagaatacagttttgggtttctagataacagttttggtcgagattggcgagaacagtaagcgttttgtttttaaactctgtagattccagaaggatcagcgttttgcacgatccacggatgctccagaagcttgtgcaatggcagacgttgcgaagactccttgacaagcatctatacatacaattgagaaaatatgtgagacttcagattcaataactagcacttgcatcaaagtgtatctgttagattgaaggtatagaatataacctggctaataagatcctttgcagatgcagagattattggtttgggagggaacttgagatccacttgcacaatcctgatatagatcattggtggtaacaaatatcatcaaacaaaccccacaagaaacagactataattgtagatttcaaatgctgtttaccttctgtatgtgtctgagtgctccatggcttcaaaaggaggtacaccataaagaaactcgtaacagagaatcccaaggctccagatatctacactagcatcatgttctacgctttcgactgtaaaacaatccaaaaggtcactgttaaaaagaatttagatcccaccagaactaactttttagcaagccttcaactttacccatctcaggaggaaggtaatctagtgtgccacacatggtccttcttcggttaaatgtgtgtaccgaccaaccaaagtctgcaatcttgagctcaccctgaatagttaaggatccatgaataataatattagctagtttcataatcaaatggatagatgtaaaggaaaaggtaaagcttatatcatcacctgagcaccaattagcagattctctggtttaatatctctgtgtatcacatgcttgccatggcaatagatgagagccctcgccaatgaggcaacatactggcacaatgaacatagaaaggatatcagttttcatacaagaaatcagtttgagaggtcaaaatgtggaaggaatgactaacagtagcagctcgtctttcgctgaagtatttgcatttctgaagatccttgtaaagttcgcctctagcagcatactcaagtatcaaataaactcttttctgcaacaaatgaagaacttaatcatgctcaagagtagattggataacaattatctgtgaataaaaaaggagaaaaatgaaaagttacttgatcatagaaatagccataaagccggagtatgttggggtgacgaagatgagactgaatctcaacttctcttctgagctgatgttcaacttgggattgttgaagctggctcttgaaaagaacctttagagcgacaacgtgattgctctgtttcacattttgcatgtatgtgtgagattggtggaaggaaaaacaatcaaggatctaaaacaaatgcttcttaagtttggattttaacaacaaaaatttgaaagatggtggaagatgatagattgttatatactgacccgtttttctctggcgagatagacgtgaccgaatttgcctctgccaagaggcttaccgatgtcgaaatcgcttaaagtccatctcttttgtgcagctgctgcagaagcatctgaagcctcctgataaaaaccaattttcagatcatcgctagaaacgaatctgctttgaaattgagcaatttttgaacatctgccctaattgattctctttctattccaaacataaatcgattgttcaaattcacaaaagtttcaaaccctaaaatcgtgcaaaagaaaaggaagaacaaagaaaaatcgaaagaaacggaaaaaagatttggctaaaaacgacacgaaggaatcatggaatggtgaaagagtaccttctcctggtgttgtgtctccgtagggatcgccatggaagaagagatcaacccaacaaagaaagagagcaagagagaaagagagaaagaggccaatatttttgacagatccaaatccaattggtgaaaaaattaaaggtggagcggaggaggagcgggctaaaaagctttaaaataaaactaaaagatacaatttcgaaatattaaaaaaaggggcaaaaaataacggtcgaatttttagtgcttgccacttgccaggctgttgtctgtggacctgaccaatttatatttgagattgtttagccttaatttaactacaaaatttacattaaccgtagctaaaattcatgtgtattaaaacacatattgtgaagacataacaatttacaggtttttttgttcgtggccctaaacttttgcatagtgggtggcacctatttttagtgtaaatattgtactgagatttttacctggttgttagttaattaagaatggttttgatttttgtagtaaggcttttaaagttgtctgcagcccaattagtatcttgagtcttactctttataaaattgtaacccaaatacaaatgtagtttagttttaataatgttataatgttattggacagtccaatgaagttttcagtgcatattgaaatagtaataggcccattaaagtagtgtgctgctgccaattagtagaattttacgtgagataaacagatttctttaaagatgaatgttttgctaatctgatgagaacgaacttattaactccggtaattttgagttagcaaatctctcttttaacaaaaagtcttcaaaatagaaaaattaaatcttaattgcaatatatacaaaagtgcaaaaaagtgtttttagtgatatttccataattcaggcatatacaatacattatcggaaaaccccaattttttaacagacggcaaaatagccaaaacaaaagaaaaacacagtagaggacgaacagaccaaacaaagaaaagaattctgtgaaatctaaaactctagtaatgtgtttaacgtgcatcatcaaccctagttagaagaagaagaagattgaccaatttcgcgccaagaactcgaaaaccccaaccattaccagcttcgagtatcaagatg

SEQ ID NO: 8312 - DNA, 3000 bp, Unknown
  misc_feature (1)..( 3000): cDNA_ID_1823758_gDNA_ID_1971715_Annot_ID_175164 3000 nt of promoter + ATG
taaaattagggttaaaaatcagaatcacaaacctagctaaaccttcgagttttggttgtaaaaagctcttaatcttctttgatgtaagagcgtaacctacaataatggatttcttcaccggaaaagcttcgattactaacgaacacggcgacgatgtctcttgctctgtcgtctccatttctcgagttccgttcatggtgatctcttcgttgtccgttagcttcatcttgtggaaaaatcaacgaaacaattttggggattatggaagtggagaatgcgagatcggaggaagaaattttctgggtttgatgcgttcacaacggagtaaaatttgggattggttttaccgggtcgggtttagatccgaattgttttagtcggtgcttgtgatattttgggtgggttatgagagagtagggagaggtctgaaatatttatagcggcgtgagggacatgtgtacacatgtatgtgtctaacggttgttttttttttttttttggtaaagaaacatgttttaattatgagaaatgtatattgcaatttgaacatattcttggaactgcactgttttatttttgtctgagccaagccgatatatagctagttgtgatttgttgttgtttaagaacgtgaatgatctaggttggaattttttaaaatgttagatagatcgatctggtttgagtttggagagtttattgttggtcgggatttgaaatcaatgtattgacaagtttgagagacgattaaattttttagatataattcgcaaaatgaatgttttaggagaaaatcatgtagctaattttctttcaaataatatagttagcaaaaaaacaaattaatatttttgtataattttattaggtaaaataattttttatcaatttatcaaaactcaacaactatttatatgaccaaaacggttgtataaatgatattagtgaatgtttgtgaataaaacttaggtagaatttcattaaaaagaatatatattctatgtataaaaagacttaataaattattttatttcaaaaaagcagatctcacatacttttaaattttaaaattggtaactttcttcaaaattcctcttaaaatagtacgtctttccctttataaacggctaagttactacatcactttaactttgagctttttggtcctccgaatacgtcctcacattcttagtgacttaactagaactcatcttcccaactcatcttcccatgctttcgagaaaactttgttttggctttttgagaattgatgatcttaccatttcttcaaagagtcctataagattctcaacaaaaagccatactacttcaaccattggttctttgatttggagagatgcatgttgtagatgtgtttcttaataccatgatatcttggattcacatagaagtcatcccctcccaactctagatggaagagatcttttgcaactttggaaactcttgtcacaaactactttcgagtattcgagcagttaatgctccggtttcaagaatctaaattacaatttgagtagatgcattatcccttaaggtttaggaagaatacacaaatctcaactagtgagactgtgtggatctctttaacgtattagaaactctacttatgatgttctaaatggcataatatttttcatgaagatgattcttgctccttcaagtgagagtctcatagtgaaggtcgcattactagaaagtccctattgtgcaccgcaaggatttgttcacgaagttatagattagctggactattactctttcccgatttacaatgatacccatatacgtacacattcctcgtgttagagaccatatcttgccccatcaccacccgagccaatcatcccttctagagattatcgatcttaaaacgcagatggtaaactgcctctaaatattggggaagcgtagagacgaatgaattttaaacctcatacttttttgtcttcattctcgaacgaaataacattagatccctaatagtgcttgagatggtgttagggattattcggatgaagattaggagagaaaatcatcatgatgaaacatagctctctcattgggagacttctccacaccctcaaaagagtaaaagtttgataccattaaagcttgtgaaacgaacattaacaaccataatgaaaaaagcagataaaatattttaattttcattgaaaattttgaaaaatatgaaaataattcaatcgagtactatgcatatttttaataatcaagagaatcagctaagatataaagcattaatcaaatgtaatctcatctaataaattatcgaatcaatggtttaattaaagattttcgaaaataaatcaaatctaaatgattacaatctctccttaagatcacatttgaatagtgtttcatattaaatcaatcaacaaacgatgtatagaaaactagttattgttcttaaaattaattacattccttaaagtgacgtgcaaaatttccttattctaaaactgaaattaatgatttgcttaatttaacgagaatattattattaaatacttttaatatatttcattacaaaaaaaaaaaaaaaacttagtgcccatattcgattctcgccacgtcagcaaacaacacctcaacaacggcaccgatttttctgtcctcttcgttcaagtcattccaatattaataaaaaaacgaaattagtaaattaaaatttttaaacgaaaaaaaaaaaaactttggcctctccggtgactcttccttcttctgctaccgaacttttcgcttccttctctgaccaatttttttcaacaacctctcttcttcaacaaattctcttctcaaatcctccaaatcctctctgccatgaacgctactttcttcctcctctccaccaccgtctccaccgtcacaatcaccggattcaacggtctcgatttctcatcttagaaccacatgcatcccttctgttgcgttacaactgtctccgatcactctccttcg

SEQ ID NO: 8313 - DNA, 3000 bp, Unknown
  misc_feature (1)..( 3000): cDNA_ID_3046272_gDNA_ID_1971715_Annot_ID_175174 3000 nt of promoter + ATG
ttaagaaatgggttatagctgaaccagagacaaagatctcgagagttgagcatgaccatgagttcttaatcttggcatcacatggtttatgggataaggtaagtaaccaagaagcagtagacattgctcgtcccttctgcttacgaaccgagaagccattgttgttagcagcttgtaagaagcttgttgatctctcggcttcacgaggctcgtttgatgatatcagtgtgatgttgatcccattgcgccagttcgtatagaaaagagaggcatcttagaagattttagatatatgacattagaatttctatgatttagtccttttgttttacttaattcactcattccaaggttttttcgagtcattttcaaggtttcatcctcaaaggcgaattcaatagaaagggacattgctataagtgtgacaagggatggtcgtttcagatcttatttagctagaggaggccctggatggttactttccagaattgaagaagacaagcgaagatgactttgtggaattttcttttctttacctttggaattttcttttctttacctttggttattgtttggagttttcatgctctgtttttttatggatgtatgctctatactttgttttgacttttcaattaatattataccagacggcaaaaaaaaaattgagtgaacaaagctaaactcaatgtggcttaagttgatcttgtcttgtataaacattgagctttatgatggtgctaagaatttgatcgagttggactccaatgttaatgttgaatgagcaaacaaaaaagtgttaattttatcgagctataaacacattcgcagcaaatcaaagacatacttgtccattaatgaatgtccaagaagtccagtccatatggttatctagtgactcacatggtagtttcatactaatacataagtttatacatgaacaagaaactatccaagcagtctagtccatatggtcatctaatgactcacatgatcgtttcatactaatacataagtttatacgaggaacaataaacgtcaatccaaagtacattatccattatgaccatttatccatatgtgtatagacagttaagtaacaatgatatgtaaccaagtttcttgatgtgcatctcaggtctcaaagtatactctaacactttacaagtagccatccacaagcgaccatttcgtgttgaccatatatagttatacttgtacggatcaattacaaattgaagaatagttatgatttataaggataagcaaaacccaaaattattaaatttaaatggacaccatcaattgaaaaaaagagattgaaaaaatagttatttgagttaatagtcgatggaaactattttgggtacaaaagaggaaaccaacatacaaaaatggtcaccaaacctgcaaaagtacattgttcatatggacaatacaaaatggataccacaaaattggaaatagaagcatataatgaattttttggtgttcaattaatctatattggatcatacacttgaaatggttcatttgatatgaatactttggcattgacgagacgttaaatactcaaaaagccatataatttgacagcaaacttagagacaagttcaagtaaagtacgagaggaaggtaaagagaaacgtgtccaaatatcgttgtccacaaagctctgttcatttaacactgctagatcttctcgattggattttaagttttaaatacaagtcaaagtttgattttaaataccaaacatctcaagatataacataaatgatcacaagttcaagggactaatctcttcaccggtgcgaaggtttaataaatacacaattatcaatagtcaatctcgtttcattatctttaatcatgttacgagaatggtgagtccataacacaatccgttacacaaccgtcaattacaatttcaaatactaatttgtctataacatatccatgataacaagtccacataaatttgttcacataaacgtctcccatgattctttcaaacaaaccatattcagatatgatagaagtcttaaatataatcctgaagtcacaaagctggtcctagatacctggaaagctgaccatcgtattacacataaatttcaaatactttttctctctctcccatgattcttacgcacactaaaaaatctctctctctctctctttcgagagagagagagagagagagagagagagagagagagagagagagagagagagagagagagagagagagagagagagagagagagagagagagagagagagagagtattttagttaagaggatattttagtaaaaaaacatagagaaagtgtctactcctttggaagtgcctaaacacggaaataatttttaaaaagtgtctaagagtgtaatattctttatttttaatatgatttgtctacaaaaaaaaaaaaaaaaacagtaaatatgtttatttcgaatataaatcaaaatattttgtatttttcaatttgttagagataaaacaaaaaattcaccataaatcgaatgccattaattgaaaaatacaaaatactttaacaataaaatataaatgaaaatattaatgttataaatatattccgatattttctcatttaccaaatataataaattaagtatatatccaaaaaaatattcgacatacattccatccaaatattttgtttttgtcatatcttaatatgtaaacaattaatagtataaatgtaaacgttaaattattagcaattatactaaaaccatctatttttgtttaataaatcaaatatatagtactgctctttcttcttcttctcccaccaaaacgagatatttgacataatagagaaataattgttcgagtattagggaaaaatttctctcccaagcacggtatccaaagaggatattatcagtatgtctcccgcttttaaccagatctattttacttttacatcccaaaagtagaaatttttaacggttattacccaaac

SEQ ID NO: 8314 - DNA, 1085 bp, Unknown
  misc_feature (1)..( 1085): cDNA_ID_2177299_gDNA_ID_1971715_Annot_ID_175182 3000 nt of promoter + ATG
tcaacttttttcttaaaccagaaaatctggtttcattgttgtccaatgaagtaaacaaattaacaagtgaaataggtttaaagctatcatcatcatcatctcttgaagaatctgaattaagtttaaaagcttctcttaaacattctctagcaacctcaagaccttcttcgtcaacacctggagcaacctcaactacaataacaacaacaaaatacatagaagaagatttaaaaaccctaaatatctctaaatcaaaacagaaatgaaaatcgagaaacgtgattggtggtgattaccggaatcaagaaaatttaagaaagaacggacgattttccggcagagaggagagtctgttgttagtttcgccattggaggaagagagaaagagagaaggagaagaatctggtttcttcttctctgcgatgaaagtgttcgttgaaggaggcaattgaaaagtctgtctggatacaaggttattatagttctggttgggtatagagttatattaagctgattaacaaacaaataaactatataattttacgtccttgtcctcatctggttccgctaattttagcctgttggacgtcctcgcgtcccagactgaagaagtgatgagtagggctgggaaaaaaacccgaaaccaacaacccgaatcgaaattggcccgaaaagttggatctaaaaccgaatctgaattcgaagatttattctattaggtcttaaattcttctatccgaaaaatcaaacccgaacccaaaactaaaaatacccgaatattttaattgaaaatctaaattttacctaaaacctgaaattttactcaaaaatccggatatttacccgaagttccaaaatagggcccaaaaatctatacccaaactaatccgaacccgattagatgcgaaccgaaatcgaaccgatattttagatttatccacctgggttctaaacttttctacccgaaaaatctgtaaccgatcgggttttaaccgaacccgacccgcttacccgaatgcccatcccactgacgagtgtatatcacagagattaccactggacttgcccttcttctgagagaaatg

SEQ ID NO: 8315 - DNA, 3000 bp, Unknown
  misc_feature (1)..( 3000): cDNA_ID_3088959_gDNA_ID_1971715_Annot_ID_175169 3000 nt of promoter + ATG
tcatccaaaaaacatccaaaaatttggatgagtttaaatggtgtagtcagatagagatgattcttccaaaaattgcaaatattcaaatttccctcaattacaattgggaaaaatgtcatttaaatcatcagtttaccattttcgttggtttaaaggatgaactctagacatagtgatttaaattcctaattttatgttgactttcaatttaatcacgaactctcgttaactaagtcaattaacgcacatcgttagaaattccttaatcaaaaaccccaaatcaccaaaatcagttttcaattttttctctctttttttcttcggattctctcatcttcttctttgaattcaaagtaattatcgtctctagatcgactaatggcgtaaaaacgagaggatttgtgcctcaattggcttagtcaacaagaattcatgattaaattcaaagtcaacataaaattgaggatttaaatcacccggtccagagttcatgctttaaaccaacaaaaatggtaaactaataatttaaatgacatttttcccaattataattatatatcaaatattgttaatttctcattttatatttaaaaattctatatctgcactaattttcttccaaaatatcgtaaatcacaaattataattttccgttaaaattgcaaaattgcgttttacgaaaatcttaaaaagcttgtttccgaacaatttttttgggtcaaaattgtgttttttgcgaaaaaattgcataataacatttcaacgaaaacaaaaaaatcacgattttggcggaaaaataacggaattgtttttcactatgaccagaaaaattggagaataaagtttttgtcaaaacctttcaagtcgtaaatttcgctaaaaccgtaattctgccaaaactataaaatcatgattttcacggaaaattatggaattatcttttctcatcaaaatcaaaaaatcgaattatgtttttgtcaaaaccgtaaaatcacatttttttcaccaaaattgcggaatcatatttccttaccaaaactgtaaaatcatgttttcccgccaaaaccacaatatcatattttccaccaataccgtaaaattatattttctgccaaatcatattttccgtaagaaacacaaaatcttatatttttcggcaaaaccacaaaattatatttttttgtcaaaacccaaaaaaataatttatatgttcaaaataataatttgaaaaatatttagttgtaaatatatttaaagcagtaattcaattaatatagctaagactaaaattaaaattaaaagttgattaaagtatagatattttagtcattttctggttaaaattatttaaatagagatgaaaatttataaaaattacccaaacaaacaaaaatttattgaatatccaaaaatggaaacgaacaatatttattaaaacatttggattgaattttttgatagacaaaccctttaacaaaaaaaaaaaaagaatattttgtagaccagaccatttagattataaaacgaatcaaatcatcttcctgccaatttattcacgtaatgaaacagaaatttaaagaatgggaaaacagaaggatcacagtttccaatgagagtatgccacgtgacaaatccacgtagacgtcgcgaaacttctaacacaaacacgtcaaagagtcaaaagagacgatataaaatctaccttaatcgctatttggaggataattaattgatctctggagatttgctgttgacgaataagaagaagaacccagaattctactttaatggcgtacgtcgaaggaggtatgagattctcttctctctctctgtttcttttcgatttctggatttcttttttggcatcaatttggttaaattcgatctgattgttcgtttttcaatcaaacctgtaattgttctttccttgaacatagattcataactattaagctttgattgttacagaatttgtgaatttgatgtatatgtaaaagttaggttttatattcctgaatttggattgatcatgaatctttaaattaggtcaattagattcataactatagtaatgctatattcattgtctctacagaatttttgctttagtatatctatgaagttaggttttatgtgtcagaattcggattgagcatgaatgtttagagggttttgaggttttatacgggatgatgtgtcaccattatgggaaactttataggtttatggaagatggaaattagataaggtcaataatcattccattattatatgattctcagaaaactgatatgaatacaaagctcgatgagcattccatagcaggagacatttctagactttgaatatctaaatggctaagcttaaacgaagttaaaacttttgagatttatagtgggaaaagttagtgaaagagtgttgattatggctgagtaattgtaaggtgacattgtttctataaagttagcgtaaagcgagatcatgttcaatagtttgtgatcatagaagctcaattcgatattaatgtatgactgtggacaagcaacagcgttttggacaaatgcaataagcgcattaaccgagttcgtgttctatattcacgtctcacgttcttctagcattgtagagatttgtcgtcggagtttaggagggatttttgggtcttatagggaatgtagaagcttcttcaaatctgtgtatcttgtttttttggggttttaattgatagctggagatatattctgaaaacagagatagatggtgcatatattaactgtatttgacattgaaaaacactggaacatgtaccaggtgtggttaaagcgaagaggccaatatggagactaaggacgatcaaagatttcttcttgtccatcattaatctaatacaagtcttctttgtaaccatgttttcggtatgattctgctttcgtttcttggatttaggttccataagctgtctcaagctttgactgacctaagagtgttattggacagatg

SEQ ID NO: 8316 - DNA, 3000 bp, Unknown
  misc_feature (1)..( 3000): cDNA_ID_1823730_gDNA_ID_1971715_Annot_ID_175172 3000 nt of promoter + ATG
accaaggttttctatatcgttttatggacttgctacatcagttctcagccatattcgactctctagaggcaggcctttcaatcgctaacccggcccgtggctttgttgagcgtgtttttatcggtccttgggttgctaattggttgacgcgtatcaccgctaatgatgcagaagtcgagagctttgcttcgtggccacagtggttagagactaatgggttcaaacccttggaagtgagctttaccaaccgttgtcaagcaaaactccttttgagtttgtttaatgatggatttagagtggaagaattgggccaaaacgggctcgttttgggatggaaatctcggcgtcttgtgtcggcctccttttgggcctcgtgccagacgaatcagtaaattctcgtttttgcattctcgagtacattacataagatagtccctttttttccttttttgatataatggtttatgaagacatcaaattatgtgaatatcgaacgtgtaatttctcaaaaatgacagtttagtttaatatgacaagtaattgagccacgacattgcattgtatgttgaatctttaatcttctatataaattaaaatgagaaactcgacaatcgttttacacaagactatgtttgaatatacgtgttaatatgttgtagtaattttggtagcggaccaagccatacttgggtacaagcggaccaaggccatacttgtagccgcaaacaacataaataatatttttggtcaaagtttcatcattggaattggtaactctcttaattgaagtggtggaactagggttccaaccttcctcttttcataaagcttgtttaatttatttattttatctgcttgcagcctataatagtttaagctgcatagaagcggaaacggaaacgctcggaattgctcgaaatcgtctcagaatcgcgattcctaaaatgatgtgtttggaaacgtggaggaaacggacaattcagcttttgaagcgtcggtggttgagatcgacaatgtctctaccgtaaatcaaagatgaaacaagtcaaaaacatctttttgggcttataattgataaaaatacatcaagttatgtttgggccaaatagctcattttgtaaacaaagtaaaagttaaaacctaatctatatatacattattggagattttgtggccaaaagatcatttgcttatgcatttattacaattccctttgcattaaataatttgtgtctgcattaaatatacaaaatgggctaattatcaatattattatctacatatacatttttgcagtcattttagcaaataaatcctcaagttggaacttatttacaaagaatgccattagcattaatcattatcaattaattaatattcctaattattagtatttctttatctaatatttctccatcaattctaattacttttaaaaatgagaaatcttaggactttattaatatgatactttattaaagataaatattatggttatttaaagtttataaaatatttagagtatttaatgaaaaacgtttagaatatatataataaatacaatctataaaatcaaataaccatttcaaaagatttattttaaaattgatttgaattataaatcttttaataaaaatattattagaacaaaaaataataatgtttaattttaccgaactagattagatggtgggacgagtttagaatactatagtatatggatttttataacaattaaataaccatttgaaagaaaaaaataaattactttgaattatatatttttaaattaaagtattattaaaacaaaaataacaaaaaaaaaaatgtttaatttcactgaacattatagatatgtttaattgtaggacgggtttggtcgatagtaatacgagacggtataccacaggtgaaatctattagatatgtttaattttactgaacgagattagatggtatgacgggtttggattgatagtaatacgaaacgatatagtacggatgaaatcctaaatataacaattaaaatacaattatattatattaaacactaaacaaaacaaacaatattaataaaataaatataatttaaatttaaattatatagttataatctagattttaacttaataaactgtatgttattgtttccatattttttaaacagcaaaaatcaaacatattaattgtatactaaaaaaatagatataagagttgtacatttagaaaatacaaagcattaaatcatatatatctttaatctactaaacaaattaaatttttagtttcttaaaaaatcaccgaatggattaaaaccatatgtatttatttcataacggctaaatacatatactactcttacgacattccagagttcttgtatttttcacaaactatatagtctaaaatcaagtaaaataaattgaattttacataatatagtttatcgtgcttttattagatgcactatacattttaaccgtaatcccaactaacatactaagaaaacacatattataaatatatttgattcggatccttcattaatcttttgctaaaagccaaaaacaaataacgacattaaataatccaatatattccgagatttgcttcgtcaatatttttaagggaatgtgacacgtttacgcacttttagactatcttattcctttgggaatgttacactattaggcacttttagaaaatctttttacgtttgaggcactttccaaggttcaggcacttttccttgtttctggaagataaaaagacaattatatcctttccaaattaaaccataaattgtttaaccagttcgattggttttgttttctgtgttatctaataaaacacacgtgtaatacatgttccttctatttcgtgtcggttgagatcttgagatgagaaagagagttatctcacaattacagcaaataaatggatatttttaaaaaataaataatatatagtgtcgctcttcatctctaaaaccaaattctt

SEQ ID NO: 8317 - DNA, 3000 bp, Unknown
  misc_feature (1)..( 3000): cDNA_ID_3089546_gDNA_ID_1971724_Annot_ID_175190 3000 nt of promoter + ATG
tttgattaaaaggctcgttttgtttttcaagcttatcgatttcaattttaaaagaaacaaatcggagttgtggatgatggttttttctagtgcctttggattgagttcaacataattgtggttatttcttcccaccgatctatgaagatgattgctttcttttatgtttttagttgttggttggaagctttattggcttaatctctaagcggatgttactcggttaaaacagttcatggtttgaatgtgctttaggttcctaattaaaagctttagttgttgtgtagatcttgaattaccttttcgtcgttgttgtcaaggaatcagagattcaattggttaagaatcagtcgtgagcaaatcagtatggtgatctgcgattgtcattacggtgagaaacagaagatttgattgctcgaacttagttttccggtgacgatctaaaattcatcggaagttggatctcttgcggtggaggttgtgaaatcaacatgtgtcgtaatctcatctttaccgtctgacgcgtcttgtgatatgaagatagtttgctttgctgtctcttttctttctttggagggtttaatcttgggtctatctttgtggactatatattcgttttgttagctcttaaaatattgtcttgtaagaataccttgtgccgtagactttcgatcaataaaaaaacatttacgagaaaaaaatatgggtgaattgcaaaactaactgtttttgataatttatttaagaaactaacactataatatacaaaatgtagaaactaacactagagggtagtaaacttactaaattagtctttttgattggagatggtagtggtggtgatggttgtggccggcggtggtggatggagttgatggtggtcggaagtgttggtgatcggtgtggtggttgccggcggtggtggtggtggccggtggtggtggtggccggtggtggtggtggtgaccggcggggtgatggtcggcggtggtggtggtggtggtggtggtggtggtggtgaccggcggtggtggtggtggccggcggtggtggtggtgaccggcggggtgatggtcggcggtggtggtggtggtggtggtggtggtggtggtgaccggcggtggtggtggtggccggtggtggtgatggccgacagtggtggtggcggtggtggtggtggccgaagttggtggtggccggagttggtggtggccggatttgatggtggccgacagtgacggtgaccggtgttggtggtgaccggaatagatggtggccgaagttggcggtgatggccggcggtggtggcaggcagtggtggccggcggtggtggcaggcagtgatggccggcggtggtgaccggtggtggtgaccggtggtggccggcggtggtgaccggcggtggtggccggcggtggtggccagcggtggtggttgctactgaaggtattgaggcaacaagggcaaattgagtaatattacatataatacagagaatattataattacatagttaggatggttagttagtgaattatagtttttttgttagttatttctgcaaatttcccaaaaaaatatatcaatttccactaattttttttatgtacatgttggattctagaaaatcaatgaatttaacaaaacaaattcatgatcatcgcacaaattggctaaaatattgttgattttggaattggatggaaggttaattgtagattataacggaatttaaattgtttgaatcttggagtaactcaaaaatatagatcaaaatgattacatatggctatgttctattgcaaatcgtgagcgacagttccgacaaaaaaaatacgtcgatagtaaaataattcaaaaataatctgttatattaattttccatcacatatttccaatgccttgcttaaatatatattttgaactgtataatgttcttatactcttgttacttacctagtataattaagaaaaaaacagttaaaagtaagctaacaatccctatttgtaatagaaaaaatcatattcaaattttcaatttttttatataaatgcaataatcataattaattttttttatatgaatttataattgcccaattataaatattaaagcgggttaacacaattatactttaaaaaaaatttaattgaataacatcagattctatattacactttaagtcattaaaactcttttgaaatcataaaccaataacacccttttacagttgaattttttacctttcatgattttatgtaaatcaattgtttttttgaaatgaatttttgtagtggcattttatgtaatatttaatatgttgttggctatttacttaaatgtatgtttagttaataatatagaaatatcaaagttaattgctaaaaatattattaaacaaaatatagagagtatattgtaaatgataattcgaaaatgaaatccataaattttgttgatctcaattgaatcacatcccagtattagacaaattgggttttataaacactaagaagataaaacggggtcatttcgaaaccgtaagaaaataggatgatttctgcaaatatgggtaatatatatgtagaacgataatattaataccagaaaccctagagttgcttccgcttcgcttctcgtctctcttatcagtcttctcttttcacggctacaaggttagtcctaagtttcggctctgttcttgcatcagtgattggatctctactgccttttaatcaaatctcattgaattgatctgggttagggtttgggtcaggttatcgaatctttctgtgttattttgattctatgaaatgaatttagggtttgggcaagttttttctggtctatgtagcttccatccttttctgagatatctgattgggtttttcggattctggtgatctctgtaacaaaatcgcttctctgtgtttttcaggctaattgagagtgtcccttgcgttagagtttgttactagcttttttcgtctgaaacatg

SEQ ID NO: 8318 - DNA, 3000 bp, Unknown
  misc_feature (1)..( 3000): cDNA_ID_3089622_gDNA_ID_1971724_Annot_ID_175199 3000 nt of promoter + ATG
tagacatggccagattgttgtatggtacgttattccaacatttctttctctggattttgtttggaaggacaagaaaaaataaacgtttacgagttaatttgtacctaacaaaagccttgactatttcctctttggtatgttatgagcttagatacttttaagttccaagatgtccttattgttgctaatgagtcatatacttgcaaatgtacagaccctgcaaaacaaggtgaactagattggacaagacggtacaatatcattggggggattgctcgaggaattctatatcttcatcaagatttacggcttacaatcatacaccgtgatctcaaagcgagtaatattctcttagatgtcgacatgaaacccaaaattgcagattttggcatggctaggatttacagaattgatcaaagtcatgccaattacacaattagaatcgttggaacatagtgattttttttttctcttaacttataaccttacaaatacaaactatatttggtggttacttctaggctaaaaagtctaatccttatttgcagtggttatatgtctccagaatatgcaatgcgtagtcatttctccatgaaatctgatgtctatagctttggtgtaatgattctagagattataagtggtaaaacgaatcgcagcttctactacattgatggttctcctagcaatttggtcactcatgtgagtatatgatcgttcaagttatatgagtgtatatgattaagccaaaggatattaatttatttgatcacttttgttaggcttggaagctttggagaacagggtcaccttttgaacttgtggatccgacaatgggagagagttctcggagtaacgaggctattattagatgcatccatatcgcacttttatgcgttcaagaagatcctgtagatcgaccaatgttgcctgcagcaatagtcgtgatgctcactagtaacatagacaattaccgtttgcctctcaaacatgaatgaccaatccacaagcaggtctattccttgttctaattaacaatgatgtatcaacacagttctagatcctcgttgaagaatggtttttttcttgatattggaactgtattgaatatatggaagtatctacatcatctcttgttcttctcattactctactttatgagacatttaaacaagtatatcagatagtaacattgtacaacaagattcacgttttaaacatattttcagtaaccagaattggttcagacataattaggcattggtgtttcatgtttgtgaagccaataactgaattcatagtttgtataatttaggaaatagacataagaaaatagtttgaactaaacgaacgcaaaacattagttttttttatccatggggcttggttacattgttataattgaaactgttttttagtttttgttgtattatatcatctttcgaggaagagctggtggatctggaccacgacatctctttgatttttcacatcctcgatggtacggattcgccggttgatcgggtggacagttgccatgatcacatcctggttggcgatcgccgcgtcccattcctggatagccaatctcatttgcaactgctacgttcatgttgttgcttatgaacacacatgctatgaacattgccacgaccataaacctttttgtttctttcaaaatgctcatgatgattgatgcctttttcttatgtcaaatatgagtttagatagttcaagagtgttttatgagtgtaatagaaggtttcactttgtgatatttatagagaatgaaaattctgaaagacaatgatccatacatatcaaaacagtgatatttgttgtataatatggaaggaatctcggggagtttgatttgtcttaatctttagaagcattgtgtcatgaaactatttgttggtaatactaaaaatattatgatgatatcttttcgttttagttttacttaaacagagatttgaataggataactgaaattggcagtagaaataaactactaaatatatagatgccataatagttaatagtaaaatttttacttttatattatataaagcttgatttggttttcaaagttgttaattcacgtgatcgtgacacgtctcacatctgtcagttagattatgacacatgttgaaagattttaacattttttaactaaatagaaaaattaaaaagaaaaaagtacatatctacaaatactatttctaaaccaactgagctctattatcttaatccaaaaagtatactagaagaaattaacatatactaatttacatgtgtgttatagagaactcttaaaattgtgttccttaacccaaaaaacaaaaacgaacaaaaattaacatacatactaatttatgtgtgtatagaaaactcttaaaactgttttttcttaacccaacaaaacaaaaactgaaaaaaatgtttttactaatgtttctaatttttattatcggtttacacgtggaaggagttatatgactagaaaccgtgtgtaaaccgataatagataaagagtcatattttcccaaagatattagagaaggagtcatattttgcagttcttttttgtgctagttttactcatttcataatcaaattcaagatgttcaggtatcaatatttgatcaaattaccagtcatgattctataacttgtgtactgaatgcaaatggcaaattctgactagtataaatgggtttgattaaaatgtgttatccggttgggttttgttggttttgtgtggtctaagtttgtttgttgacttccattagagctattgactcagtcaactttaatttttcaaaggcatttgcataattttccttagaccatctctttcaattaagaatgtatgacaaattcagtgaaccagtcaaatctgccaagagaacctacatagtttgagttattgatgcccaaacaaaacttcttgattctaatatctaaacacaatcttttttttctgatcttgagaga

SEQ ID NO: 8319 - DNA, 3000 bp, Unknown
  misc_feature (1)..( 3000): cDNA_ID_2992718_gDNA_ID_1971724_Annot_ID_175202 3000 nt of promoter + ATG
ctcagcttggtgatctcaacctccgtttgagccgcatgaacccgaagaatttgttctttcacttcaattcctatgtacaaacagaggatctcatgtttgctgctgagaggtaactttcatcttttatttaatgaatcatagttaaagtcgtatacaagaggaggatctcatttgtttgttttgtttctcaggatgccaaacatagagaagcttgttttaccggtctggtgctataaaactgaggactcatttcagtttgcgtttagtcaatggaagaatcttaaaacactaatcatcgctcaagactatcagcttcgcaaactcagaagcttgaaaaattaatcaaatgtactaaaatattgaaaagctttgtttgttgtttcgaacgaatgatcagctaaaatgttcaaatcaaatgatatataacgtacacaacattaaaactaggagtatacattttatatttatccctcgtttaacttgttccaattatacacagaaactataacattttgtgaattacacgaggaagaatccaaatccataaaactgtacaacattacagaagatcacttccatcagaaatcatcaactgctacagccgatgaaggcagctcacgctcatcttccttttccatctccaattccggttcgaactctgtcaaatcggtatcagcaagtttcttcaaatcgataatcgataactcgtctagtcttcttaccaccagctcagctgcaccaagctcataaatcgggtgtttactcgccacagccacacatttcatcctcccatcgtgagctgcctctatggtctggtttgagtttccaaatacaatgcaacgttccggtatgaaatcaagaagctgtgctgcgtaaatgaacatctcaggatctggtttacctctgtaaacatcttccgatgcaactatcacactgaagaactttctgatacctatcgatccaactgcattctccaatgtttcccgaggacgagtcgataccaaagccatagggatcttattattcatcaagacattgacaaattcctgcgacccatctcttagtctatacactcctccatgtagagctttaaagatctcttctttacgcttagccatccttctcacttgaacaggatctctcgaccaacacagaacctcagatatggcctgctcgttcttcatcccttcgacacgtctgagcataaaagccggaggaggagatttcccttcttcttgagctaaagtaagccatgattggttatccaagtcaggattgtcttcaatcaatactccttcccactcaaatatagcacctaaccaaccacaacccatccgctcttgcctaagtaaaggattatgcaatgaaggcttatcagctttgttctcaggaggccataaactaggcttatcatcagcaccagaatcaagataattccaagttttcggtaaccgatcgtctttcttcttctctttcgtcaattccatagcaagagccctgatcggaaacaccgacattcgattctttttcacactctgcgtcatcaaatgagagagaacacctttcgcactataatctaccttcaccggaaagcgaacaatgctctgtgatttctgcgttttcaattcattcttcactgtaatcctcacaattgaaggtcgatgacccaccaaagatacagcaccaatagcctccgccatgattacacaatcaagaaactcccaaatcactaccaatctatgattatcaatcaaaacctagtacaattccaaaacctgtgagaaagctgcaagtgacgttaatcaagatagaattctagaaccaaacagctttccccaccgctaaaatcttaaaccctaatcgatcaattacccagagaatccattagaaaagagagaaacttcacaagtaaaacaaccctaaaagtctaaaactttacaagacccagatgacgaaacttgaagatcgagctatgtacaatgaaacccagatcaaatcgaaaagaaagagagggaattttcgactgaaacctgagaatggaaacaaccgatagatgaatgaaaaactcaaagatgaaatctttttcctgaattgggtttaattgtgattctcttaaattcgagcttttttcttcaattatactatttcttttccttgattttaatattcttttttgtggatcgtaattattcacaggaaattgttaatccagatatttctcgtttttttaatcttcacggttaataaatcatccacgtgtccaaaatctgtgatgtctacgaaaaagattattctacgctgaaatagcggtacaagagaggagattactgttttgccacgtctcttgaatcttttaaagtcacgtgtcttttaagacaacacgtatcagttatcaaaaagcagaatatcggcccatttaggttcaggcccattaattgtagtttatggccattttcctttgtgctgggtacaaagatgatgtctgttacacttttttttccggcccaatatgttttataaagcccatctgattttaggagtcttattcagtcataagttttagtagaatatcatctataaaaataattagaaaatatatttgtataaaattaattttaatcatcaatttcaagttagtggataattttggtgtgtaaatacatttaatatatttgatgaaaatacaaaaaaaaaaaatcaattaaccacataagtttacccatttatttaattaattataaaaaatttcatattcattgtataagaaaaataatttaagctaacaatgaaaattttctagtaaaccctttaaaaaagggactaatttacgaaatagtcatagatgtaaacaattttttttctcactaaattggtaaaagaaaagagatagggtgaaaagtgaaaagtgaaaacattataaataggcagagagaaaccacttctcatattaaacaaataaaaagatccaattttttgataattctggaagaggaagcaatg

SEQ ID NO: 8320 - DNA, 3000 bp, Unknown
  misc_feature (1)..( 3000): cDNA_ID_3089615_gDNA_ID_1971724_Annot_ID_175201 3000 nt of promoter + ATG
ctcagctctttacatctgctctttaaactgcgtagatggtttttggtatccgaagatcgtttctggtatcaaaaaacgtcaaccagcaaagtgaagattgctcgttaaaatccaaaagttatgtttgtgatgttgtatgtacttccagtaattctgttcattaaaaccccaaaagtgtattaattttcattcaatgtattaagatgattttcttgttacttgtcttcttaacagtcatcgtcgcgttcttttatttctcttttctttcttcttaaaacttgagtaataatattattgttcttgggaaggatcttgatgctcgagaagtgaatatttttattttgtaacaggaaactatattagactgtgaccatactagaatgtttgtgcctgtatgctccgtttttatgacagtttatatatgagtttcatgagacatggttaaattagaataccttaggaatggtttattactgtacttcacatccaaacaataatatgcttgtctatatttgtgagcttgtgtggaggttgtcgtaaacatcattttagcgtttctcctaagtgttgaattgtaatttcatttttgttgtgtctgcagaacactgcactgctggctagacgactgctcaatggcgagttagagcctgcaaagattttgaacaatatcctccttctctgtgcaaataaatctagggatcctaataatcacattttgattctgttcttgcatctagctggagtgtgttgactgtggctattcctggtatgcttcaagggatgaggcatcctaataatcacattttgattctgttcttgcatctagctggagtctgttgactgtggctattcctggtatgcttcaagggatgaggcatcaactctgacaataagcacagaaaacctgcccaaggcacagagaaggaggatattgagaagaatttgaccagatctggtgaaaccgagaaacctcaagacgaagccttgaagaccaatgactcaaatgcctccaagaatgggcgaagacatggggagtctcctaactcgggtactcatctggttcaacggatcgataaacaagtaaggaacagaatctcagtaatcaacgcaagtggagactgccggtatgacaaggccctccaatattggtttcaatctagaatgggaactaactagcaaatagataaaatctctttttaaactctttcggcaaaagtcgcacttgatgtacaaacgctatttttcttttgagtttaatttaacattacattcaaaaaaaaaaaacaaatgcctccaagaaactagagtaaagggtttccaacttttaacttttatgtttagagtttcgagtctgaattcaaactgggtttcacttttaacagttgattaaccgtatagtttaagtcgggtaaagcttatcatgacaacaaaacgaagaccttggttatcatttccctgttatttccgtgtactatctttatcaataatcgtctctttatgtttatcgaccataaaagatctaaggcagccacaacatggccaagtagagaagtacgtggatagagagagaagcacaagttagtggcacaagacacaaagcccataatctattattgtctttctcttgtgctcaaaaccttacttaaatcatgactgtctcagtagtcaatacgattgtcacttgcaccatatacttcaccgtcatcataactcttttaaccttttacctctcccacttcctcagaatatacccatttccaaaatttctaccttttgacagattctgattttgaaagaacggaatggacgaaggcacggggagacaccaacaccggctcccacgttctcaaagcaaattaataagaatgtgaggaaccggcttagtctttcgttaaggctggggtcatcattcgaaatagggctgcaatattggtttagtacccatactcgcggttgaatttttcatgttgtgactatccatctcaaatgtgtttcagatttttgatactctgatgcattcttttggtgaataaatttgacattcatacaaaaaaaaatttgtttttcttctagtcaatttatgtactttgcttagttatttaactaataaaccataaatgtttttaatagaattgttattggatgagcactacgagcatctttcagattaaacaaagacatttaagtagagagagaacgaccatggactttctcagattgagcatagttttgacttttgagatctcagatttcttagcaaaaaaaaaagatctcagattccattttctcttcttctttcttcttctttttttcacttcttcttcttatcaaatcttgtagtatacgaccatggagttagagggagtgtcactaccgttgatccacaagcatcttatgatgccttggaatgatctaaagagaggtgattgctgtggacgctctggatttaccactggtggctattactgcaaaagatgtgacttttatgtccacaagaaatgtgttgatgagtgcttagaatatattgaacacccatctcacacagttcacgcttgttggtcgataattgagttctgtctatattaaagtttcatgtattaagtggttacttgtcaagggacacaagtacgaagagacacaactcattgtgtgttgtgtctatttgttttctatataaaccccttgtatcgtcatgtaaataccaacaagtttcagtttcaataaaacaaagttttgttcttgtcttcttcacaagagaagagatatgtctctcttactctgtttttcttctctctctcaataatccaacatggtatcagagccgatggttgtccttggttgtctctacaaaaataagatgtcttctgctgcgaaaagaaaaagagagatggagacaacaaatctatggtgagatgaagaggaagaagaagagggaagaagaagaaataagaggtggtaacaagagaaagtaccatcagttttcacaaacacattcacatg

SEQ ID NO: 8321 - DNA, 3000 bp, Unknown
  misc_feature (1)..( 3000): cDNA_ID_3000008_gDNA_ID_1971724_Annot_ID_175193 3000 nt of promoter + ATG
caggacaatcaatagctttttggagtatcatgaataacattttctaaatcaacgcgactctctgagtacttgaagaagcaattgattgaaatggatgatcactgtgataaatctgaggactacattttcttgagttattttgtaaattatagaaaacaaacaaaatgcaaacttcattgcactttgcaaagtttctttttaccaaaaggtttttggtccaaaacatgctcgcttgaaccagaaagaaacgcattaactatagcacaatataccgactcaacacggataactagagaggttctagtaaacatgaacagaagtacagaaccgtagcatccaagtaatctaataacataatgtttcatcatcaaaggccaaaacagaagaacatttgtgtttttgtttggtatatcggccttaccgagcaaagtagtgatttgagaagcggagaacagctgttagatacattgactgctttaaaatgtctctgcaacttcaagtcttcccggaagtttcagcatacacttccaccgaattgacagaaagcgagtggttgcttgcttcagattaaacagtgcagctgaccaaaagaattccaaaaatcagaaagaaacaacacaaaacacaaaagacatcaatcttaacctgaagagaaaagaaaaagagccacctactcaaagtgattaataacagtttactttgaagcagaagatgattcggaaactgaaacactctttatataagtcatgtctcatgtcttctatatacgattcaattcttaatttggccaacaatggctcctttagtctctatcacaaacatttctaaaaccagatactccgaatcaatatcagatccaaagaaacctcaccctcattagctatgtcgcaagaagcatcttcacaagaagcagtctttctcaaacacttccatgagcaaaaccctttggcttaatcccaccaatctgaaaacccttttgttcttctttatgacaagttatatcatttgctctgacttctttcctcactagaaacttcatctgtgagattcccagacatggccatacccgaaaagttcaagagacatgggtatcgcgcaacgtcggaaacaccatcgccttcaacaatgttttcgagtaatgcaaatccaaacgccaatctatctaaacactgtcgtttcgtaatattattcaccatcatcgcctgaaactacttcggaaacaccatattcatcgtcgccgtcgttcccttaaccaaaactctgccgtttataatttaaaaacgccggctttaaacgttgtcgtctcaacttaccaatacgcagtcatttatcgacctaaacgctgtcgttttatttatgcaaaacgacagtgtttcaaataaaaaaactgaagctataaatctcgccgttcgatattttagcacggcgtcgttcaattaaacacaccaatttttttaatgcagcctatgcaggcaataatctagattaatcttgtacatactgtcaaaattagtctagatttcaccgttcataatcaaagggcaaacatacacaaacacaaacacaaacacaaactttaaactttcttctccaaaatactaaatggagtcaccaaattaatttatacgagtgacgagtcattcaatcccaaatccctataaactaatttttgtcttttaccaatttggaccaaaatgttttaaagttgaaagtttggtcaaaagtgggtcttcccaattacgatgcggcccattatggatagaaaactagctatcagagtatattgtttaatagtaatcttaaaaaaattaagtataccacttccaataaatcacacaagtattaatttcataaactcttttcgaaataaaattaaaattaacatagagtcgaaagattttaattggggataggaatcccacatgaacttcccgagaaacaagtaaataatattttttgtggttcacgaaccgatccaaaattttaattaatctctctcagtgtctcaccagatttgtttacttaaatgacgaaactacccttctatatattttagcgacaatttctgacaaagggtaagattgtcttaggtcacacacaacacttcattgaagtgaaaaaaacctttgtttgatagaacaagtgaaaaagaaacagacaacaaaaaagctaaagcaaaagtacagtgtgtgagagatagtgactgcgagagagagagagagagagagatagatttttgcacactcgaagagggaaataaagaaacaaaatgatgccttgatggagaaaactaattgattgcttttttttcttctctatctttttgtttacattacaaagaacatgatcggtttctcttattaccaccttcagtgttttgtaatctctattgcttcttcttcttctccatgtcgatgaagaaatgtttgagatttacacactctgtttctcactgtaactcgggtatgttttgtttttttctcttatgtctctatctgtgtctcttattagatctctttttttctctaaatctttaaaaaataaaaattgattctttgcttaatgctatctgattcttttggtttgttgttcttctttgactgctattttgggttctttctgattttctagggttgttttgatacactctttactactaattgggttttttgtttgctctatcaaccttatatgagatctacattgtgtatgaatcaaaagatcattacttttgcatgtgtagtttgtgttttggaagcttaatttgaatccttttgaagcttttatgacattctattcattagatctactaatcactgattaaaactctaatctgttactatcattacaagaagttgtttagtaaattttcagagatttcattttagcatgtttcatctactaatcattgaaagtgtctttatttaggaggactaaactgttttcttgtattgtgtaatgttttacagatgttttgaagtggtgattggagtggaaatg

SEQ ID NO: 8322 - DNA, 3000 bp, Unknown
  misc_feature (1)..( 3000): cDNA_ID_3445840_gDNA_ID_1971730_Annot_ID_175213 3000 nt of promoter + ATG
cctctccccgaaacgcatcgatttcatcatgggaggatctcagctctgcatagactcaatcaattcgatcaaaactcatcagaggaaggccaattcatacacaaaaggcaaaagcccgatgatggcacctgatcaccagatcacattttgggaaagtgaaaccactgacctcgataaacctcacgatgatgctctcgttatccgaatcgacgtagccaactacgaactctcccgtataatgatcgacacgggaagctcagttgacgtactcttctatgactcacctccccacgtcaacggctcctcccccaccagggaagtcccgttaccggacctggatggaaccaactctaataaaaaatagctcctccacgtcaacggctcctccaatccacaaggatccggattcggaatacaactcacctcccccaccggggaagtcatcgaacaatcgttccgacttggattcaacgcatcaaacaataagtctgagtacgaagccctcaattctggcattaagctagctcaagaaatggggatccgcgaaatacacgcccatagcgactcccaactcgtcaccagccagttcgaatcgtttgaactaaccaggatccccagaggagaaaacacctcggcagacgccttggcagctcttgcttctaaaacctcttttaggagaaaatgggtataagtgttgtctaaatactcctaattcatctctaactcttataattagtcaaaggctttggattgtgacacattttaaccatagaaacaataacaaagctatttactgtttctaagcaattttttgttcgttttagcctcttttgggagaaaatgggtataagtgttgtctaaacactcctaatccatctttaactcttacaattagtcaaatgcattggattgggacatattttgatcatagaaacactaacatatatattgactgcttctatgcaattttttgttggttttagccccttttgggagaaaattggtataagtgttgtctaataactcctaatccatctttaactcttataattagtcaaatgcattggattgtgacacattttgaccataaaacttacaaaacttacatctcatgaatctcattagactcaggaatatcaggatccggaaagacggttgatatcgggccttcggtgctaacacgtacgttctttggaccatcaaaataacggtcaatcttccaccacccaagaacaccgacaataactccaccatcatatcgacgataattatgatcaaagtcaagagcttccttcttagtagctagacattccaaaacacgatttctaaacagataatcaaaaatagtattagaacagtttaatttaggtaattcaaattaaactctcaaagaaggaaacttactcattgtcacttattttgaaagttagcgtcaaatcaacgacgtggttttgcttaggtattgtgtttatcaattctccaacatcatagatcgctcccaccaagtctccaaaaattacaaaaattaattaaaataaatcagagtcaaatatatacaattgatattgaaaatgacaaaactaatgaacactaagatgcatgatataaaataatgaacacaacaaattcataaaaatctcaccgactaaaacagatttatcgatttcatcatcgataatcgaaaagaaggatggtagaagatagtgaggaatagtgggtaccagacttgttaatctgacgacagtgtcaacagaaaattcaattttgaaggtatgagttgttggcctgacaggacccgagttctcatcaactccaaaccttgttatcgttgcccattctcttttattaataaaatctttttagtgatctgacatcttgtatccaacagtagcttcaatagtcataccctacggatcaaacatactaatcaaaactctaaaacatgcaaacctaaaattatcattacaaaacagtcaatacttacatgttcgtcgacgagaagcaaacccataacctttgaagatggaaccagcggaactaagaatgtcctcacaactctcacacgaatacaccatcctgtaatagacggtttcaacagtgtaagaggatgaaacgattccatcttttcgctgaaatttcttagttattttttgtattcgttttatgagatgctaatgataccgatatatatatataagagagagaaatacatcgtagaggcatgttagatgcaacttttaaaaaagtaataatagtcatgatgtttcaagtcatttcgtaatcttgaatattctgtaatatattttgaataactcaattattaataaaattaaaaatttggcgagtcttacattttagagaaataatagaaatattttttcgttattattaattagagttgttatataaataccaattgtcttaactgcgtggataaattagtaacaatcacatgatcctataatgtttgagacatttaataacaaaatttccataaaatttaataattatggagagaaataagtaataaatatttttcatattttttataatggaagtgattacaaattaggaaacaatatatatgcaaatatattgctaacaaaagaatctataatttaattctattatggcacaacatacagaatggatattctaatttagttttctactctattattggggaaattggaacacaaattaagggatgcttgattaagagataagagttgaaataatttattttttcaacttagaaggttcctctatgaaggtgattttacgacatatttctttggacaaatcttttaataaactcctaggggttgggttttggtgttcttttgtttaataaggttagatatctaactctttatttgcgtgtccgatgggatacaatatttgccgccccatacctctttgtttaaccccgcgcgattttcaccctaattgttagactcacaaaaggcagcagttgactcagaggtttacaagggcttg

SEQ ID NO: 8323 - DNA, 3000 bp, Unknown
  misc_feature (1)..( 3000): cDNA_ID_3046312_gDNA_ID_1971730_Annot_ID_175215 3000 nt of promoter + ATG
ggtttctactcagattgaaatttcagttgttggactcgaccattcggctggatctcgctttcaaactaagtccaccttggacgagaaagcagccatcattgagaggatggttaaacgattcaagccagcaccgttaccttcacgtgctctcccatggaaattcaggaaagcgtggatagaaagatacaagtctcttgtagagaagcagcttgataagatggaagcggtgatgcctctgatagaagttctcaacctaatcccggacccgcacaaagatgtgagaaattcaattctggaaaggattcatatgacgaatgtgatgctaatccttctagagctactgtcaagaggattattcaagaaaagctggaagatcgtgatctttcactctaccatgttccattgggcaattggctttcagcagttgtttgtgtgacttaggagcttcagtaagcttaatgccactttttgtggcaaggaagctggaattcactcagtacaggccttgcgaccttactttgatctttgctgataggttttcaagaaaacctttcggcctgctaaaagatctaccagtaatgattaatggagtggaagtgcctacgtatttcgttgtgcttgatatggaagcagaacctaaggatcctctaatcctaggatcaaagtcaggtcgaattgtaaaagcctaagtagtgtttccttgttagaagatgcaaagccaaagactcatacggagtcctgctacaccatcaaagctttgagaagcaggaagaaacttggtaaatgttttcgagtcaaatatgacaaaatgtcatgtggatgattgaatataagacttagaaccgcaaccggatcttaaaagcctagtgtttccttgttagaagatacaaagccaaagattcatacgaattttggatacaccatcaaagcttggagaagcaagaagaaacttgattgtgttttggagtcaaatatgacatgatggcatgtgtataattgagtataagaactataaccgaaaccggatcttataagcctaagtagtgtatccttgttagcagatacaaattcaaagactcatacagatttttgctacaccatcaaagctttgagaagcaagaagatgctttgttatattgttggaatcgaatatgactagatgtcatgtgtatgattgagtataagaactagaatcgcaaccggatcttaaaagccgaactaatgtttccttcttagaagatagaaagccaaagactcatatggacttcaactacaccatcaaagcgttgagaaccaagaagaagcttggttagtgttttggagtcaaatatgactaaatgtcatgtgtatgattgagtataagaactagaagcgcaaccgaatcgtaaaagcctaatagttttttcttgttagaagatgcaaagccaatgactcatacggacttctgctacaccatcaaagctttgagaagcacgaagaagcttggttagtgttttcgagtcaaatatgactagatgtcatgtgtatgattgagtataagaactagaaccgcaactgaatcgtaaaagcataagtagtgtttccttgttagaagatgcaaagccaaagcctcatacggacttcggctacaccatcaaagttttgagaagcaggaagaagcttggttagttttctagtcaaatatgacaagatgtcttgtgtatgattgagtataagacttagaatcgcaacatgatcttaaaagcctagtgtttccttgttagaagatacaaagccaaatattcatacagatttcggctacgccatcaaagcttggagaagcaagaagaaacttgttagtgtattggagtcaaatatgactagatagtatgtgtataattgcgtataagaactagaaccgaaaccggatcttaaatacctatgtaatgtttccatgttagaagatacaaatcgaacgacaaataagaactatggcaacacgagcaaagcttcaagaaccaagaagaagcctttttagtgttttggagtaaaatatgactagatatcatgtttatgatttagaataagaactagaaccgcaactggatcttaaaagcctaagtagtgttgacttgttagaagataccaattcaaagactcatactgacttcagctacaccatcaaagcttcgagaagcaagaagaagcttggttagtgttttataatcaaatatgactagattgcaactggaccttaaaagccttagtagtgtttgcttgttacaagatacaaagtcaaagactcgtacggtctttgactacaccattaaagcttttagaagcaagaagaagcttggtttgtggtttggagtcaaaaatgacttgatgtcatgtgtatgattaagtataagacttagaaccgcaaccgaaagccaaagtagtgtttccttgttagaagatagaaagcccaagactcatacggacttcggctacaccttcaaagctatgagaagcaaaaagaagctttgttagattgttggagtcaaatatgactagatgtcatgtgtatgaatgagtatatgatgcagcgcatcttaagagttcatgggcttctcgtctacgtatcatgggcttcacgtatatgagaatcctttagaatgttcaattacgttttctcctttttcttaggttattaggataatactaaatcttcgatatgattagctttagagtattcgttgttatctctttattccctaaaagtagccttcattcatcatcgttgtaatcacgctttagataataaaattcagtttacattaaagagcttcttaaccctgaggagaggatcctcatccctttgttgctttctcgatcattatcatcgagataagtaagatccaagctcgagtttgttgtttcctggagatctcaaacccctgcttgttactttgcttccgcctctctatcagttggtatcagattctagtttttcttggcttgaaatttgaatcaacaatg

SEQ ID NO: 8324 - DNA, 3000 bp, Unknown
  misc_feature (1)..( 3000): cDNA_ID_3046303_gDNA_ID_1971730_Annot_ID_175218 3000 nt of promoter + ATG
gctcttcctcaacttattagcttgttttagattctgtataagcttgtgttaggttgcaacaatgattagcttgtgttaggttgagatcctctagcttgttgtcttgagttgcttgtcttaggttgcagcaataattagcttgtgttaggttgtgtcttgattagcttgttgtcttgatctgcttgtgttagattgtggtggattgtgtcttgattagcttgttgtcttgatgagcttgtgttagattttgatcgattgctattgtgtgaacataaagctcatgtcttgatgagcttgtgttctgttgtggtggcttactctcttgtgttctgttgtggtggcttgctatcctgtgttagattgtggtggattgctcttgtgtccgctttgttaatttgttgtgaacatatattgtgtcttgatctgcttgtattagattgtttcattggattgtgtcttgattagcttctgtaatactactgtcttgatgagcttgtgttagattgtggtcgcttgctatcttgtgtgaacattgtggtcatgtcttgatgagcttgtgttctgttgtggtggcttactctcttgtgttctgttgtggcggtttgttctgttgtggtggcttgctatcttgtgttctgttgtggtggcttgctatcttgtgttctgttgtggtggcttactctcttgtgttctgttgtggcggtttgttctgttgtggtggcttgcttacttgtgttctgttgtggtcgcttgctatatcttctgtgaacatagtggtcatgtctagcatacttgtgttctgttgtggtggcttgctctcttgtgttctgttgtggtgacttgctattctttatgttgagtagtttcactaatgtaacatgtttttatctttcattgtttcatgtgtttggaggtttactcgcgacaggggatcaaagttggttagaaagatcactcggatttttacacaaatgctccctactataactggtcatgtgtaccagtgaataaaagagagaggttatttcttgagtttgcggtaagctgtcatgcatttctcttactttcttaactttccagcttaatcttttaaatttcactaactcaagctacaattttttgtagaaaactcacagttgggatcccttaataacagagactgtgcagtattacttcaatgaggtttgtaaacggcgcttgaaagacatggttagcaccgcaaggagaactagggtgcagctgttatgtgcgcttactgggacaccgaaccagcacaaaaacggagtcggacctattccaaagcttgtctctctgaccgtaacggtctcggtcctcacatccacttctctgggccaaagtcttttcaggaaatccaagacgaattagtaagtttttctgttacctctttcagttacctcacatgtaagtttttgagtatttgagctgtgttggtttcagtgcaggaggagaaattgggaagaacagtcactcttggtgaggtgtttgtagagactcatactaagtcggatggtacgtatgttgatcggaaggcggagatgattgctcaaacttatgagcagaatgtgagagatagattgtcacagctagaggcggaagcttctgctgacaaatgaggagttgacaaccatctttctccaggtaaaatgttgcaatctaaacctcttgactttgagtttttggttattcattcactaatctcttctttatttcttttcagtccaccgaaagggattccagaggcaatccttatggacttggcagtctcaaagacacattaggctgtgccaactgcaatctccctggacaatcatcatcttccttcctagatttagaagaatggctgaagaaatcgcaacgcaagattgaggagcaggcagcctacaatgagaagcgtgattctgagattgttgcgcgtgaagcttagactgcccgaatctttggaattccttgacttgtcgttagtggagaagtatctccgacaaacagatccgcaattccttgacttcatggcctctcaatcttcgacaaccacagagcctctaccagctactccacataatgatcaataggtttagatttcagtcccttttcacttgaactttgaacaataatgtttgtgtgtgtgtttagtactttgaaccttaagtgtaagttgtgttttatgtatttgataggattttcaataaaaatgtgtttttgttatactttatagcatttagaacaacaaacaaaccgaattctcagaatcgatgaccaaccaacaaagaaatcaagatatgaccaaattcttatttggacacaaaatgtcgtcgtcaaattgtcgtccaatagtcgtcgtatagtcgtatcatagtcgtaaaatagtcaccaatattaacgactatcgtctgacaatataagagagtcgttaggtagtcgtaaaggcgtcgtacattagtcgtatattatttagcgactaagatacgacaaccagaatagtgcccagagtttaatacaattgatcgtaaactagtcgcaaagtagtcgtcaatggaagtacgactagtttacgactacacgaataatcccccataaacaggttaattaatcgtatcgtagtcgccaaatgttacgaccaatcgacgactatttcatgccgattgttacgtagtcgtaagttagtcgtaactttacgactaacatacgactatgttgcttagcgactatatatatacgactactctgattagtcgtctattagtcgtattatttctgtttacgactatgaaacgactagtgttgtagtcggtaaacgcctgttttcttgtagtggaggcatatgtattctaagaaggatactaaaccaagactattgagatggatacttctgttgtagaagtttgacatggaaacagaagacaagaaagcattgaaaatggtgcagctgaccatctgtcaaggatgagaattgaagaacctattcagatagacgactcaatg

SEQ ID NO: 8325 - DNA, 3000 bp, Unknown
  misc_feature (1)..( 3000): cDNA_ID_2038917_gDNA_ID_1971748_Annot_ID_175228 3000 nt of promoter + ATG
ttcacttcaagtggtacagagtctttttttttttttttttttttttgttaaaccttgctttcattcaatggaacatagaacaattacaagaaatagagtttaagaactcaaagattaaagcattacaacaaacggtattccccaataccataaaaagaaagataaagtgcatcgatttgaattccatgagagctttgaggcataagcaaagaagcacagtgcaacatgtgaggtcacagtaaatcgaaggatcatcctcgaaatagtcgaaggacaacaggttggtcacggtcaagggacgtagtgacgttgacaaagacatcgaagctatagatctcaccggggctagctgcaatacccacggaaaaaggatagcaaggattcgaaggactatggttctatagtcggttaaggttagctttaggatccaacacaaaaggcaaacaaatctccgatcaatagcggcatacactatgagacaatgaaacatgatgatggacatagtgatgagcttgaaggcgatagatgagctacttggtgaccattgagcgatgaaaacccataattcaaagccacatttgacacaaaggcaagtacaattcagaaaaattagagagaaggtcttcaagactttggaatgaggccacacattcctagatatagctaaaaccaggattcgcaaatgataaatgaagaaccaaaacctccatggtgatatctctatcaaatggtgtccatggccattgataagaggagatcgacacaaaaagattaatgggcctaacatagaattaaagaaatcagatctgagaataaaagccttacaagttctaaaacaacagatgggcttgggcctgaaaggaagaaatgggccagcgaaagaaactaggtccactggggaaaaccctagtttcatgtcgaggtgccaaaacgctgaggtagagcggcggctgtccaagaaaggcgagatgatttgcagcgcaggagtcatctccgatgagtgaaagatcgttggaagcagactatgaccatggctcaagtaggtggcaaagatccagggggtcgcatccttttctacatgggatagctccgagcacgaatctgtccaaagagctgcagcagaggaatgggagaaggagagagcatgttgcttcaaccttccttccttgatttgtgttgaagagcgtcctggtagagatgcaaggtgaggtagattggttaacaagttatgggctggaataacaaggggaataacaagaggggaaaggatgggaaaaagcttcaaaaggggaaaaataaagaaggaaactaaggtaacgaaatagcgacgaaaagaagagaagttggggtcccgatgccggtgaacagaggcttcaccggcgccggaaagagtagtcgatgagagagcttcgataatcggacctgaaagagaaatagtttttactttagttagttttgtggtacagagtctctgaattggaattgacgttttagatatacaatggtatccatatatatatataccaaattaccaatggtataataccatcataaattcattatcacatcacttttattttagtgaatgaagatgtaaatatgctattatgaaaaaaatttgatggaaaacaaaatcattgatataattgttttcactcgtacttaggaagactccctaatagtaaagcaaagttagacgatattgttttcgtctttggacacgaaatattttgaaaaccttccgacataaattaacggtgaaggccttttaaaagttttgtcgttaaaaatatgatttgacaaatcgacttagttagtgggtttctggagatgtgtactatcatggaaaagaacgagaaagatttttttttttaaaagttgatgtgattgggcccaattagaaaagttttcggtccatacaaaagcctagtaaggttgtgttaactagatcattattaaaaatatttttggttgattagtattattattaattggccgattgactgaaaaataatctgatatggttttgccatcttttttgaaataatcgttaaatcattttataaaactatccacatgtaaaacaatgcatgaatatatacagttgttaatcgtctaatattgttagtttattttgataattgaattgtactattcttgcagctgtttgaatggttagatgttgaatcttacctggtacacaaatcattactggttagagcacagaaatcatatatggaccggcacaacattgaaataagaaccatcttctctaatcaggtaactaaaaaggaggtcacgaaacctcaacgaagatgtgaacgcaaactaactctctcgtcacaactcttaaactcagtctctcgtcagtcgtcacaactctcaaggttttgttttagatttatatgtatgtaatacatgaatcttttgtttttgaacttatgtatacatgaatctaaaacgtgcatttttctaatctaatcaatatcttacctcctttttccaaatatttaatcgacatagtccaaaaactgtatgttcatccataattaataacaacaataggtcttgtaaaacccctttagtatgttgtaaaacctagcaaatctactagatcgcatctaacatatctgtttatcaaatttaacatgtgtaattatctagatttaaaagaatctctctcattttctaaaaaacaaattttatttttctttaacagacttttattttctaaacatcagatttaaattgtatttttaattatcttgatgctatatattgggaaccacgatactaacagactttcgttgtcgcatgtaaaatgttttttttttgtaatcagacttccaaccaccaacttagaaaagtatctataaaacagagaccaatcaagaatacacttatctcttttcttaaaagaatcttttttttttttttacttcattgactctttttctctatctctctagatcgaaagggaaaaggagatagagattgaag

SEQ ID NO: 8326 - DNA, 3000 bp, Unknown
  misc_feature (1)..( 3000): cDNA_ID_3045028_gDNA_ID_1971748_Annot_ID_175256 3000 nt of promoter + ATG
ccacggagatctgctgcctttatctctgtctacggtttgttaccgctacggaaccagtctcacgctggtttactctcagtaggagaagtggaagtgttttggttccttctgatcattctctcccatattcaaattcaaccgtaacgatgggttcgaaaatatatggtgaacatatgggtgacgcttttggtccgtcttcagctatatggatatatgactgttttactcgctcgtggggcgatgtccccaacatgaagatgaagagggaaaacgcctccgcatgtgttttggatgacaagatttatgtaatgggaggatgtgactctgggggcatcaattggttcgaaatgttcgatgtaaagactcagtgttggagacctctaccggcgaatcctgacgttaaggtgatgacggaagataatgttcgaaaaatcgatgtggtgggaggaaagatttacgtaaagactggggctgagtttatggattggatttatgatgtgaagcgaggtaagtggagtgctgcagatgagtatatgagtttactatggtcgaactcttggtgcgtgatagagaatgtgatgtattgttactcttgctctagatataggtggtatgatttagaggctagaatgtggagagaagtgaaaggtttgaaatatttgaaaagatacagtagtgctagtaatgataatcgtaatcgtatggttgaattagttaactttggtgggaaacttgctattctttgggataggttcgagcggcctggtcgtagtgagaacaagaatatttggtgtgcgatggttgcgctcaacagagactttgaaggtgaaatttgggggacggttgagtggcttaatgttgttcttacagtccccaagtcatataatttcttgcgtcctatagccgtttcggtttgatgatctcttagtcaccttgtagagtcatccttttgcttttaccaaacttaaatgctttgtcttgtgtttgttgtgagtctttttttcttttttctttctacaatttgttgtgagtctgtaaaatcctaaatgaattcatctgatttctagactttgtattgtttcaatttgcattctgcattatgaccatctcctatcgttttgttggtttaattctggttacagtaaacactaagtccttgtgaggcaaatctctttgttctttctaggtcttcatctaaataatgccagtagaagaatttgagtaccttttgatttcactttaaagtgaagtgagattctcctaaacttaatatattattttatatatgccttggtgagatttacattcaagattagatggtttaacatttcagtgttccactttaatatgcttttcctctcttcctctgtttctaagaagaaagagtcatctcgtattcggtcaagttcaaaaccctttagtggctacaaacatttgctatattgtacgtatggttaagacttaagataaaatggataatggtttgtgttgtttcgatatgtagagaatagttgttacttgtcaccggctcataaaatatttagttttccggccgactaatcccggactttccagtagactcttgatttaggtttagctaatcatattttttcatctttttgtggagagtggaaatgtgcagagcaaattcgtcagttatacacttttgtcattatgaaattcgccaaaatggtataacacaagtgagacaaattgagtaatttcgtaagcttttacgttttatgtgttctgtttaatagatcatatacgattattatatatatcactagttcgttagatatctttttttttttttttaatcaaatttttgaaagtagtttgggattcaccgttcaagaataattgaaactttggaaaattaaagatttactagattttcacccgcggtataccgcgaggacaaattatattttaaagttagtatatataaaagtttgtaatttgtaacaatctatgtaactatctataaatatttttattttatagtttagaattgttattaagtaacgtcctgtcaaacccgtcccgccaacccgtcccgtaaaaaaaactcatttattttattaatgttgatcttatttatcatatgtttatgaatcattatctaaatattttgtaattttgtagtaattaaatgctatcaaatatttctgcggtttgatgattataattgaattgtaatagtcatgtagaaaaacaataataatgataattttgtagtaattaaatgatattaaatattttgaaagttttattttaataaccaatcgtgtagttaatgtagagagattttaggaagattgttaaatgtcaaatatttaattcgaagattttttttctaattatcaaaaacaaatattaaaatccagtgacaaccattgtaaataagtcccaactacaagatttatttcacaaaatggctgcaaaaatgtatatatagacatttgtaaagaatgtgcataattacagttataaccttaaacgatgcacatcctttataaaatttacttaactttgttttattatatagttctaaattactaaataagatttcatttggaaataacttacaattttctagtaaagttcccaatttaaaaaaaataaatagaaaaagtgaaaaagaagattttttttgtttgtggaaaaaaagttcagattttttttgaaataaatacaaaagtcgtaaatctaacaaattaatatttttatacatgttaggaataataatttttgtaatgtaatgttaaactaaactaattaagaaatttgtttagaaacgtgtcgaattggggttaaactcatccaaactataaaacaattccgaggaagtccaaaacacgtatctttttcctccgtcgccggagacgattctctttatcaccggaataatcagattccatgttcgaattcagctgagtattataagttataaccccaatcgaaggacaaagaattttaatttttaaaaagtcttcg

SEQ ID NO: 8327 - DNA, 3000 bp, Unknown
  misc_feature (1)..( 3000): cDNA_ID_1010357_gDNA_ID_1971748_Annot_ID_175254 3000 nt of promoter + ATG
aacaacattaagccactcaaccgtcccccaaatttcaccttcaaagtctctgttgagcgcaaccatcgcacaccaaatattcttgttctcactacgaccaggccgctcgaacctatcccaaagaatagcaagtttcccaccaaagttaactaattcaaccatacgattacgattatcattactagcactactgtatcttttcaaatatttcaaacctttcacttctctccacattctagcctctaaatcataccacctatatctagagcaagagtaacaatacatcacattctctatcacgcaccaagagttcgaccatagtaaactcatatactcatctgcagcactccacttacctcgcttcacatcataaatccaatccataaactcagccccagtctttacgtaaatctttcctcccaccacatcgatttttcgaacattatcttccgtcatcaccttaacgtcaggattcgccggtagaggtctccaacactgagtctttacatcgaacatttcgaaccaattgatgcccccagagtcacatcctcccattacataaatcttgtcatccaaaacacatgcggaggcgttttccctcttcatcttcatgttggggacatcgccccacgagcgagtaaaacagtcatatatccatatagctgaagacggaccaaaagcgtcacccatatgttcaccatatattttcgaacccatcgttacggttgaatttgaatatgggagagaatgatcagaaggaaccaaaacacttccacttctcctactgagagtaaaccagcgtgagactggttccgtagcggtaacaaaccgtagacagagataaaggcagcagatctccgtggttccgagttgatatcgcgcggagtagaggggttgagagtggaggagagaacgaaaggttttgcagacgagggagagtgaacggtaagacgatttagagagacgtgccaagcagttcaccaggatctcgtcgggaagttgcaagaacaacgacgtctcacatggtaacgacggaagcttcgtttttttctgcggccgctcaacttcttctttggggatcatctttggtggtgatggagacaaaaatcatgaaatggggttcaaatatatagaaatccttctccctgatgtaaagaaagatagtaatgtagtcaaaagaaaaatcaaagggaaaatttatcaagtttccattggaaaagagatatcttactataatctaaattttatttctcaagatatgtacaatagataggcaaactaatagctatattccacgcgctagagtcgcgcgtggatctaacttgcggacggttttctctttcaaatcttctttcttttgatcacaagaggtttactaatagctcaattctagctgcctttatttttaatattaaatttgattaatacaaaagcaagactatatatatcaaaaccttacaataaaactgtgaccagtggagattgaaccaaagataaaaaagctacacaaacctttgaatttcattgaaacaatgctttccagataaaagcatggtcaaaatttacttctagtgttttatcgttctaattaactattgttgataatttaactcaatcatatttttgtatgatatcttcgtaaaatttctatttcaaaatattaaaaaaaaaaaagggacattcaatctccaagagactaaataagagagagtcatcaaaccgaaagacttatacaatgctggaattgatatgactcgtattgtgtaaccatagcatcagaccaccactcagccttaccctaaacctcacttccattgcatcttgtttctaaggaaatctcggcataaaaaattgttgttcccgctctggctttggggttccacataaccattggggagattggtgctcaggcaattctaagcagaaatattcttagaattttgagatcgtgtagtgtagatttggggagaaatattctttttgaataaaaaaaagtaaaatagaaatattctttctaaatttttgaagtcaaaatgttaagagaatcgagaagaaattcaccgttgtttttcaaaaaaagattcactgtagttaatgggttaatgcccaaagaaaaataggagaagaaacccaattggcccacgcccactcaaatcaagaaattaacttggtacgacattatcatctttaataaaattttgtatacagtaccttcattgccatgatcaaatccatattagatacatcgtttgaattatacccttattaggctcaaactcttattatcattgttccaagcaatagatcatcttgattttaagtaagcctttataatgttccacatgttctcatcaactacttatgacactgcttaaaatctgataaaactagtagccagacccaaaaacaacttatgcttgtgcactctaaaattccaaaacaacatactggatttacattttcaaatggtaaaaaatcaaatgtaagaaattgcaattactttggtaaatacaaaaattgcattgagtggagattggaccgttaaaaaaaaaaaaaaaaaaaaaaagcagaccactgtggtctgtctgtactgtagtactctttgcactcgaacccatttatctttttaatattattttttattattataaatctaaaaaagtttttttttttttttttttttgttctcgaagcagtaaaatctactacaacagtcaaagagagagagcaaacatgctcgcttaattcacggaatcgagacgtttctacaaactcaattttatattttcagctggaatccgaactctgatatagaaagcacacaacgttcacctccagtgacttctctctatctctaaatctctcttgcgtcacttaaaaagtcggtgcttcctacttaagtgttcttgagagtgagacgtttcatttctgggttcaagggtgtagaataaacacttgagtgaagtttaaagcttgagaaagacagaggaaagaaaaatg

SEQ ID NO: 8328 - DNA, 3000 bp, Unknown
  misc_feature (1)..( 3000): cDNA_ID_2990205_gDNA_ID_1971748_Annot_ID_175267 3000 nt of promoter + ATG
ttaataaaccagtgcttatttagttacctatcccactgaagaaaatgccataattcattcctctgtacacggttggtatcactgttgaataagggcattccttggaaaatccaaccttttggttgttagattcttggattgattgtttaagctcgtttacgcaacgctggaactgcttgtggcagtcaacataagtcatacctgtaaaaaagcaccaaatgcagcattctcagatccaagatgcagagtgcaattagatttgtagtggacaaagtagttaaaagatgttaacttcactttgtgtttctctgtttatagaatagttttacgtagatattcttgattggtttaccttttaaatcaacacaattatcatgagtcatacaacaatcatcaagatcatcacaaggtggctctccaggacatccaaagtaacctatcccacaatacttcccatagcgaataccgagaactgaaacagagataggttttgcttcagaaatgttctccatgttcaaaggaatgcataagaaaaatgaaaatctcaccattgcatttctgtgcaatgcaggttttgctgcacttttcctgacattttgatccaacccatcagaaagaactagcaataaccatcatttggaataaaccacaacgcacaaacatgaacaaagaacagtaagtgatatgtatcaacctggctgtgaacgacggcaaggaggaggaagacggttaagcctaaagcaacatgtgtcaaagcaccaccgcggatcatgtttctatcttaccttctccagtagaagtttgttgttttgttctttcaaattctgaccccaagaattataattgtgtctctttggaatggaaggtcccattcttggtcctcctgctttctcgtccctcctctttctcatatgtaaaaaaagaagacgtttcatgattaccaatcaaccaccaaattttatggccgttctttatcaaaaaataaaaattatggatgttaagaacagagtatcatgaagatctacataatcttttagaaacgatatttattagattgcaaatgataatatggtttcaaattttgtatcattgctgatattgatattaaacaaggacaaaaacattatagtgaaagcaatttcctgggaaattttgttcttattgagagcaacctttatcaaagagttatagcaaaatggatttttctcagcttcaaagcctccgtttcagggataaactggaaaaaaaattgattcaagagagaatcatgaaaactaaaaacggaggggattacacaatcttcaagttattgttactctccttcatgggtaatagcctgtgaaggtgaatcctctgccggcgatttcacctgcgcaataccatgcaaagcattcgagaccaaacaatgcagcgattcctgcatcttctaccttcagaccggatctgttcttccataggttctttgcgtagtctacttccttccagaaggtttcatagcgtccgggaatgctgtaataaggagtggaagagtgttagatacttaacactatgggcaaaatcaagattgcaaaatgtgaatcaccaaaactcttcaattcatggcaaaacaaaaggtggtgatagaactcgcatatgtataaacttttcaagattaaggaacaggacatgctctaaagccgtcatcaagaaaaaggcaatatactgagacctcttttgtacccgaaaatatggaccgtaaaagattaagagtcaggttattgtataatctaagacttagtagactggaatgatcgttgcaaatgggcttattagagattaataatcgaacaaacttaagattgactactttaatacacaatcctgcaacttatgaaaacagattaaacaagacaaacagctcaacaaaaagatagcatcacgaggtcatagaaataagaggatagaataaaggattcatagtatgccattttcagttccatgaacagccaagttttgtatgagctcagcattccctggctatcttatacctcaaagaagatgctttattgacaaaagtctctttctaaccagaatctagataaggtaactatgaccagggaaatgttcatatagaaggaaaagagagatatcgacctagcaagacgggtgtagagcaactgcttagacaactcttggcacttctcaacagtggcaggttcctggatatactgcttgttcttctccaacagctgtctgtagtaggaagttccatgcttagccacaaactttgaagcctcacatgcctttgattgaacttgtatcaacttcgatgccatcttcacaaccaaatccttcaaatacaaaaagagattctttgaatcataaaatttaaattaatcaaattttgacattgaaaattttgtaaatttccctactacagcaaacaagagacgtttcagtgaattcacacaaatcaagcttaaagacttaaaaagcctaaaaccccaaatcctatattccataacgatagatcgaacaaactacagtgtgaatcaatcaagcaaatcaaaattacaaatcagtcactcctagaacgaacaaatcgttatcgaagcaagaagagatcacagatatagatctaaaagtcaaaccacaaagcatagcatatacaagagaagcaggagcaaaagcctcgacccaattgagaaacatcggtcagagaccagaaactcgccgtaccttcctgcagttttgataatgcagcaccggtgagctgagagatgagtcgattcgagatttcgggccactggttcaacaacaactgcgtaatacttctcttctttatgttagaacgacggcgtaatatgcgtttcgattggaacgatgtcgtttctttcacactcttagaacgacgtcgtatatattcgttttcctcgagttctataaaaacgacagcgttttggatatttggctttattattaggccttgccggaaaaacaaaaaactagctcatcgtcgtc

SEQ ID NO: 8329 - DNA, 3000 bp, Unknown
  misc_feature (1)..( 3000): cDNA_ID_2038813_gDNA_ID_1971748_Annot_ID_175265 3000 nt of promoter + ATG
caaatctccagagaaagtgaagaagaaaggatgaaatgtcaaaacctcaaagctggcaggttttgagaagttactgctgtcagtattaagaccatgcaagagatacaacaggggctttccagatcccttaaattgttcattaaagacttgaataatctcatccacatagaaaaccatgtcaaccatatatgtttcctgcaacaagaagcacaaactgcaatcactataaactcactgaacaaattaacaagacttaaaaaagttcaaatatttaccttaaaatgcgacaatggcttaatctctcccaaccaaacagcataatcatcaggcaaccttggaataaaaaggatagatttcccacttccaatgtccttccaatatcgaaagtgactcaatgtcattggttaagcaacaatcaacatatatagaatgaaaatggtgaacgggtcatatgttcttaagaaatggagatatagctagcaaaactcacaatagctccatagaaatctggctctctgactccaaacaagtaagcaaaataactctcttgcctacaagtcagttcaatatcatcttatttccactcaatacattgaacagattgaaagagaagaaacctcgagataaaatttcaaatcaatacctgaagagctcggtgtgatcagtacagtatcgatttttctcctcgccaccctatcgtccagaatcaagaaaattacaaactaaacacaatgaaagcgagctcggaatcggatcatcgatacgtgttggaaattatgtatataagagctaatcaagggtacctgtagaagaacaaatccatcgagagaacgattggaactagataactgacggcgtattgattctagtaactttttccggttaccggcgtggagttccattggaatcggtggaggagacagagacgacatgacgacgatgagctagttttttgtttttccggcaaggcctaataataaagccaaatatccaaaacgctgtcgtttttatagaactcgaggaaaacgaatatatacgacgtcgttctaagagtgtgaaagaaacgacatcgttccaatcgaaacgcatattacgccgtcgttctaacataaagaagagaagtattacgcagttgttgttgaaccagtggcccgaaatctcgaatcgactcatctctcagctcaccggtgctgcattatcaaaactgcaggaaggtacggcgagtttctggtctctgaccgatgtttctcaattgggtcgaggcttttgctcctgcttctcttgtatatgctatgctttgtggtttgacttttagatctatatctgtgatctcttcttgcttcgataacgatttgttcgttctaggagtgactgatttgtaattttgatttgcttgattgattcacactgtagtttgttcgatctatcgttatggaatataggatttggggttttaggctttttaagtctttaagcttgatttgtgtgaattcactgaaacgtctcttgtttgctgtagtagggaaatttacaaaattttcaatgtcaaaatttgattaatttaaattttatgattcaaagaatctctttttgtatttgaaggatttggttgtgaagatggcatcgaagttgatacaagttcaatcaaaggcatgtgaggcttcaaagtttgtggctaagcatggaacttcctactacagacagctgttggagaagaacaagcagtatatccaggaacctgccactgttgagaagtgccaagagttgtctaagcagttgctctacacccgtcttgctaggtcgatatctctcttttccttctatatgaacatttccctggtcatagttaccttatctagattctggttagaaagagacttttgtcaataaagcatcttctttgaggtataagatagccagggaatgctgagctcatacaaaacttggctgttcatggaactgaaaatggcatactatgaatcctttattctatcctcttatttctatgacctcgtgatgctatctttttgttgagctgtttgtcttgtttaatctgttttcataagttgcaggattgtgtattaaagtagtcaatcttaagtttgttcgattattaatctctaataagcccatttgcaacgatcattccagtctactaagtcttagattatacaataacctgactcttaatcttttacggtccatattttcgggtacaaaagaggtctcagtatattgcctttttcttgatgacggctttagagcatgtcctgttccttaatcttgaaaagtttatacatatgcgagttctatcaccaccttttgttttgccatgaattgaagagttttggtgattcacattttgcaatcttgattttgcccatagtgttaagtatctaacactcttccactccttattacagcattcccggacgctatgaaaccttctggaaggaagtagactacgcaaagaacctatggaagaacagatccggtctgaaggtagaagatgcaggaatcgctgcattgtttggtctcgaatgctttgcatggtattgcgcaggtgaaatcgccggcagaggattcaccttcacaggctattacccatgaaggagagtaacaataacttgaagattgtgtaatcccctccgtttttagttttcatgattctctcttgaatcaattttttttccagtttatccctgaaacggaggctttgaagctgagaaaaatccattttgctataactctttgataaaggttgctctcaataagaacaaaatttcccaggaaattgctttcactataatgtttttgtccttgtttaatatcaatatcagcaatgatacaaaatttgaaaccatattatcatttgcaatctaataaatatcgtttctaaaagattatgtagatcttcatgatactctgttcttaacatccataatttttattttttgataaagaacggccataaaatttggtggttgattggtaatcatg

SEQ ID NO: 8330 - DNA, 3000 bp, Unknown
  misc_feature (1)..( 3000): cDNA_ID_2038824_gDNA_ID_1971748_Annot_ID_175263 3000 nt of promoter + ATG
acttactgttctttgttcatgtttgtgcgttgtggtttattccaaatgatggttattgctagttctttctgatgggttggatcaaaatgtcaggaaaagtgcagcaaaacctgcattgcacagaaatgcaatggtgagattttcatttttcttatgcattcctttgaacatggagaacatttctgaagcaaaacctatctctgtttcagttctcggtattcgctatgggaagtattgtgggataggttactttggatgtcctggagagccaccttgtgatgatcttgatgattgttgtatgactcatgataattgtgttgatttaaaaggtaaaccaatcaagaatatctacgtaaaactattctataaacagagaaacacaaagtgaagttaacatcttttaactactttgtccactacaaatctaattgcactctgcatcttggatctgagaatgctgcatttggtgcttttttacaggtatgacttatgttgactgccacaagcagttccagcgttgcgtaaacgagcttaaacaatcaatccaagaatctaacaaccaaaaggttggattttccaaggaatgcccttattcaacagtgataccaaccgtgtacagaggaatgaattatggcattttcttcagtgggataggtaactaaataagcactggtttattaataacactatgagaatcacttatagacttcggaaaccataagctagtgatgaaaccgaattacttatgttacattgttttgtgacattttgtattatagcacttactatactgtcttctaatgttacactgcaaatagcttagtttagctagtgttaaaatctgataagatgcgaataatctcgcgcaggtaatatcattatacctaagaagccagcaagtgccgggcctgtcgtggaggtggatctggcacggagtaaagcggacacaaaagatggccttggaacaaatcaaggccctcaaacaaaagatggctccaaagtctctgttccgatgaacccttctccttcttgatcattaggtgactcataactctcaagttttgtagattatttaactttgttgtcttatgaaaaatgatcaagatcttgaattctctcaggttcatgattcccatgtattttatacattacattagtttctcttttactctagatatgagaggattcaaaacgaattcatacttatataagaaatcaaatgtagaaaagaagaaaaagtgtatatggattttttttttctaataaatcaaacataaattctgttgtttcttgatgtaaaaatcagcaatgatacgaaaatcgaaacatattaatctgcaatctatttgtaacagattgcattaagaaaatcattagccgttgcgaatacatagcttaaacgtgttctgttccaagaggtaacaaaaatgatactctgtttttaccgtccatgataatgcttcttcgagaaggaacgtccataaaatatgatgatttgattggtagtcatgcaacttcttcattttttaaattcttgtgtacgtaaaagagagagagaggggaaggacaagaaagcaggaggaccaaccaaaaatgggatattccattccagagagagccaaaaatagtttgggacagaatttgaaagaacacaaaacccaaaaacttcaaccagagagcgagatttagaaagatgatcaccgggcttgctttgtcacgtgttgctttcggtttaaccgccttcctcctcctcgccgtcgttagcagccaggagaagtgcagcaacacctgcattgcacagaactgcaacagtaagattgtttttttcttatcatcttagttcttatgccttcctttgattttggagaaaaaaacttgtgcatgcattatatgttttgatccaatctttgttttcaggtcttggtattcgctatgggaagtattgtgggataggttactttggatgtcctggagagccaccttgtgatgatcttgatgcttgttgtatgactcatgacaattgtgttgatttaaaaggtaaaccaatcaacaacataatctatgcatgaaaaccattcttgagttaatatttggtttttattaggtatgacttacgttaactgccacaagcagttcaaacgttgcgtaaacaagctaagcaaatctattaaacactctaacggagaaaagattggattctccacacaatgcccttattcgatagtgataccaaccgtgttcaatggaatggattacggcattttcttcagtgggataggtaattattgagctctgattttgtgacattcaatataagctagtactagtgatgaaaccacatgactctttttctgttacattgtgacatttcttatgataagatatatgtgaataatctctgcgcaggtaatatatttaatcccccggtgctgggaagcgtgcccgtcgtggaggtggatctcgctcggagtaaagtggacacaaaggatggccttggaacaaaactaggccttcaaacaaaagaaggctccaaagtctctgcttctttaaatatatgagcccttctagtactatttcttgatcatcttctaaagtgactactctctgtaacttcgttgttatagaaaattcataaaacaaaaaaagactttgaattctgtcccagatcaaaatcaactggcaatcaatgactcagtctatgtattttatctattattttggatgttaatcacatctttaataacttcactaaagtcaaaacgtgacattgtcactaattccatcttataaaatccaggttgtcttcctgtccttagtgggaaatatatatagttactgagccaatgatgaaagaaaagtctacaaacacctggctaataccataaagagtagactttgcactttttggcttttaattaagcttatcttactcgcacgtagtctgtttttttcctgaagatggtaagctgaagaacttctgaaaaaagagagaagaaaatg

SEQ ID NO: 8331 - DNA, 3000 bp, Unknown
  misc_feature (1)..( 3000): cDNA_ID_2038828_gDNA_ID_1971748_Annot_ID_175262 3000 nt of promoter + ATG
gaaagtcctgtaagtaagcacaaatatacacagtgttggtctatttaaataatgaatttgcctcttgacacatttacttgtgttgtaaggaatttgaaaggaaacaattttactgggtttatcccaaaatcccttatgaaaaagttaaaggccggtttacttacgctcaggtaacagtttctagcattattcagaaagttattcaacacaagcactctctctgaatcttgtgatttcctctgttttgcagtgcggatgagcaaaacctttgtaactcatgtcaagaaaagaagaagaagaagagcatggtcgtgccaatagctgtagcagcatcagtgatcgttctcgttgtcgtcttggttatcatatggatcatactaaggcaaagaaaaaaaggttagatggctggaatatttacttcaggattaatgaattgaagttgttttatgctgagaaaaacgagtgttttgatttcaggagcctattcaggaccactcctgccttcagggaagagaaggttcacatataatgaggtctctagcataacaaacaacttcaataaagtgattggtaaaggagggtttggtattgtgtaccttggttcccttgaagatgggactaaaattgctgtaaagatgataaacgattcttcattggcaaaacctaaaggaacttcatcatcatcattatcccgggcttctaaccaattccaagtcgaggtgatctaaagaacaccaaaaacatgatcaaatattttagaaattaaaatgcttaagtactgtaaaatgtttgcaggcagagcttcttttgacagtgcatcaccgtaacttagcttcatttgttggatactgcgatgatgatcgtagcatggctctcatctacgagtacatggccaacggcaacttgcaggcttatctttcaagtcatcttattatctctctatatatctctgttaccaattgttgctttgcttcctatgagctcacgggtgttatgtttatggacatgcaggtgagaatgcagaggatcttagttgggaaaagagactccatatagccatagattctgcacaaggttggtcccggttttggcaaccttgattcctcagggcttaaccaagaaaccaaacctggtttagcctagttctgtattgtgaaacctggttttatttcccccttggcaggtttggagtatttgcacgatggatgcagaccagcaatagtacatagagacgttaaaacagcaaacattctaataaacgataacttggaagccaagattgctgatttcggcctttctaaggtcttccctgaagacgatctcagccacgtcgtgactaccgtcatgggcactcccggctacgttgatcctgagtaagttccttttcacaatcaatacagatcacatgttctggctggtagcttcacaaaccagagcggtttagtgagactagggttagggttggccaattcagttcggaccctttttaagtttatcaggaatacatggtaaccaatttgcgacgtgtggtgacagatactacagaacatttgtgctgaacgagaagagcgacgtgtacagttttggggtcgttcttcttgaactcatcactggccagcgagccatcatcaaaacagaagaaggagacaatatcagcgttattcactacgtttggccgttctttgaggctagagaactagacggcgtcgtggacccgctgcttcggggagacttctcgcaggactcagcttggaagtttgtggatgtggcaatgtcttgcgtcagagataaaggatcgaatagaccaacgatgaaccagatcgtagcggagctgaaacagtgcctagctgctgagctggaccgtgagccacagagccagtgaaagtcaaagagattacggagaagtaggacgaagccaaatggattaaaagaggtttggataatttctatataggttatttgtgttgtatggtcagattcatattatgattgactacaatttctaaaaggtttctactcaaattcttttgtataaaattcgatcgttgtcgattccgttaaaatcctacttgtaatagttttgtgatgaaatgaatgattcatatttctcataattgctgatctaggaaattaacgtactatagatcaaattgataagctttgaattgagtgatgaatcatatatttctattaaattgtatagagttttatcatgttatttttgttgaaaataaatcaattaatttcttcttaaacaattgttttttttgtctaatacaaaaaatgctaattttgaaatttagttttatggtatttcagttatctgttgtcggtgtctctacatttaaagacatttcaaaacatgtgacccactaactctagacatatacaaaaaatcggttataattatttaatacatatctagttattttgtaacgctttaaattttattagcttaattattattttttcaagattgttttgatattaatgaagatctgataaaaatcattgtttatatattaaatgattcggggattaattggagtaacgaaagatattcaaagttggaaaatctaatatttgaataaccttacaaaatcaataatgttaatatacaagatttttgtttaaattactgtcgacatgacacatgtctttttcattaactcgtttttctgagtttttgttttcttacatgattgtcattttgacgcgttaatcaaaatcttctaacactatttaacccgtttttgccaaaagtcaatttttcttttttatcgtctctatttcacctcttcttctgcgtcttctccaaaattgatacttttcttcgtgtcacgtgaaggtccatttcctcagatcacaaaatttccatctgatttcctcaacaaaaacccttaaagcccagatttttcgtttcaattgtgtgtactcggagactccacaagacctcaaaaggcttgacctttcgtttctctaatcaagtttcgctcaatg

SEQ ID NO: 8332 - DNA, 3000 bp, Unknown
  misc_feature (1)..( 3000): cDNA_ID_1027990_gDNA_ID_1971748_Annot_ID_175261 3000 nt of promoter + ATG
catcctcgagaactccttcttgaggatagacttgttaacagagagcttaggcttgttttgtctcttagtcttggtggttccgagtacaacaccttggtccttgccagccgcctgaatggtcactgtctttttgttggccaaacctataatcatataaaaaagactcaaacttcaatcacattatcagatactaatacaaatccaatcacccaatagcatgtaaccaacaaaaagatagtcatcaattcaacaagttgttaattttcccaattacatttagctagacatataaaggtaatgacttgtgttcatatcaacagattcaacaaaagaacaaacttgagataaatctagagtaagcaacagttgtgtattaccagagtgcttgtacgagttgatgttgacgaggttgttgctctctttgctgaactgaaccttggcattacctctaccgaattgcttcaccaagaaacagttgtttctcttcacgatctcccagatcaactgtcctggaactgtggccatttcgagctccttcactgattattgaagaagaaagcatttagtaacacaacatatatgaagcggtaaaacaagggctacacagattgaagaacaaagaacggcaaattggtttgtaaagagatgattcaagctcaccttgatattagcagacctagatgacggcggtaaagagaagagaacgagactcgtgccggagttaagttatgatttatgtcgatgcgttaatatatatacattctctgcaaaaccctagtttggttctcggaggcaatgtttataagtcaaatataagtaaaccagacttttatcaaaagggcgtttggtctagtggtatgattctcgctttgggtgcgagaggtcccgagttcgattctcggaacgccccttctaaaatcatttttttttctgccaactaaactttgtttttcttcacccttgctaaattttccaaacaactctgcatccattagactcaaattgaccacttaactggataaatgaaaatcatcatcagacataattttcacttcaatggagcaaatccaaatcttgttttatatggtgaagctatagatcttacatggtgaataactatctatatttgaatacaaactcttcatgaagcattataactccctgaaaagcatcagcacaacacaacaacatatgaaaacactcttgacacattctttgttaccatcatcatcatcatcacagaagattccaagtttcagacttgaatgttcggacttagacccacatatcttcacctccttcagcccacattccccatttccatctcactctcgggttactcatcatacatgtcgatatcagattgcttcttactctaggatctttgtcctggtgaatcatcagtctcatgtctgtcaaacctctgtacttattaacaatagacctgatgaaagaaactgtttgatgaacattggtatgatctgacatctgtacacgtgctgttatttgcttcaggctgtctgttcccttcatatcacctaggccgccttggctttggaaatgtgtttcgatatctgaccaagtcctgggactcaaactaagagaagtaatgccagggaatgctttgaggattgttgccagtccaagttctaacctctcagattgttctatagactttactgaatccactgcaagctttttgatcttgttgccaaaactgatgttgctgattaatctgtacatatcaggagatacgagctctaaagtcttcagatcttgaaactccccaaaactaacaccttcagcgtcctccacagaaagatggcattgcaccaacttgggcgtttcaactagaagagatttaggcttgttgcattttagcttcagttcaagcaggtttggcgccacgatagccaaggaaagtggagcattcgacacagtccaatgacaactctttaggtgaagaaaatggattcttggttccttaagtcctccaacaccaatcaaattcagctcttgaagaaaagggaaacaatcattgaccttctctagattctcatcatcaagtctgatgaattcaagtgtcaagtatctgagattaggcatctcagtcaggccaactacagagagccaagcattcttcacctctagtttcactaacttactacctgcaagatacaaatagacttaatctagttactatcatatatcatcatcatcatcatcatcatcatcatcgtcttccaataaaaaacttctatttcaaacgaatccgaaacgaaactagaggaaatgatgatggagaaaaaaaacttacagtttgaagaaatgagcgccaaaatatccgattttctccagcaagattgaatccagaaatccgaaattgacaaattctccaggtcttcacgaaccctaggcaaccactccttcacaaattcgacatcggtcaggtacaaatccttggaatcttcttcattgaagtcgtcaaacgacattcccttaagcgccttatcgactccgactgagattgagcgaattttgctagagttctcgattaggcttctgaagatcgtcttgaacggtgtgacaacgacgatggaccgcgattttaagtaccgagaccaggtacagatgagattcacggcgcgaacctctcgagaaagcgagttcaatgtcttggaagcgactctacatcgtgctagggattcggaatcgttgattcgactcagaattttgatccagagctctggtggtaactcgtccatggtgtttcttgatttgggaaattgaaggaaaggaagaagacgaaggagagaaggagttatagaaatttggaggtacgtgtggttaaaatcccgcacgtgttaaaattgtaaacgactaaactacccttatgaattctggaaaataacaaacgtgtcatagagtgaagaaaaacccttattgttttctagatttctccgatttgtgtagtatcgtcgggattttttgaccggagaa

SEQ ID NO: 8333 - DNA, 3000 bp, Unknown
  misc_feature (1)..( 3000): cDNA_ID_1010681_gDNA_ID_1971748_Annot_ID_175259 3000 nt of promoter + ATG
cttacaactataataaccatttgaaatcgctatctagcaacattacccaaaaaaaaatccatttagcagaagaattatctaaccatccttaatatgaatcaacaggtatatatatacataagtagaacaaagcaactcagaccactgatagcatcataaaagcaaaaacataaacttggaagcaaaaaacattaaactttgtttcaagtttcaaactttcaaatgttgtagcttcacaagtaagtaagcccaacaatctcacgaactaattgcagcttctaaaatactactaaatctagtgtccatgagaattgatgagcttccgatcccaaaaatgataaatgggtaagcatcaagaaccaattagaaaacaaaagggagaaaaatttcacctttctccttcatgattctcaagaacgaagacataacggtggagattggtttgagctccaccgaagcttttcctcgtctctcagcattcacaatcgtcctcaacgcatcgttcaaaatcctcctccccatttctccggtcaaaaaatcccgacgatactacacaaatcggagaaatctagaaaacaataagggtttttcttcactctatgacacgtttgttattttccagaattcataagggtagtttagtcgtttacaattttaacacgtgcgggattttaaccacacgtacctccaaatttctataactccttctctccttcgtcttcttcctttccttcaatttcccaaatcaagaaacaccatggacgagttaccaccagagctctggatcaaaattctgagtcgaatcaacgattccgaatccctagcacgatgtagagtcgcttccaagacattgaactcgctttctcgagaggttcgcgccgtgaatctcatctgtacctggtctcggtacttaaaatcgcggtccatcgtcgttgtcacaccgttcaagacgatcttcagaagcctaatcgagaactctagcaaaattcgctcaatctcagtcggagtcgataaggcgcttaagggaatgtcgtttgacgacttcaatgaagaagattccaaggatttgtacctgaccgatgtcgaatttgtgaaggagtggttgcctagggttcgtgaagacctggagaatttgtcaatttcggatttctggattcaatcttgctggagaaaatcggatattttggcgctcatttcttcaaactgtaagttttttttctccatcatcatttcctctagtttcgtttcggattcgtttgaaatagaagttttttattggaagacgatgatgatgatgatgatgatgatgatgatatatgatagtaactagattaagtctatttgtatcttgcaggtagtaagttagtgaaactagaggtgaagaatgcttggctctctgtagttggcctgactgagatgcctaatctcagatacttgacacttgaattcatcagacttgatgatgagaatctagagaaggtcaatgattgtttcccttttcttcaagagctgaatttgattggtgttggaggacttaaggaaccaagaatccattttcttcacctaaagagttgtcattggactgtgtcgaatgctccactttccttggctatcgtggcgccaaacctgcttgaactgaagctaaaatgcaacaagcctaaatctcttctagttgaaacgcccaagttggtgcaatgccatctttctgtggaggacgctgaaggtgttagttttggggagtttcaagatctgaagactttagagctcgtatctcctgatatgtacagattaatcagcaacatcagttttggcaacaagatcaaaaagcttgcagtggattcagtaaagtctatagaacaatctgagaggttagaacttggactggcaacaatcctcaaagcattccctggcattacttctcttagtttgagtcccaggacttggtcagatatcgaaacacatttccaaagccaaggcggcctaggtgatatgaagggaacagacagcctgaagcaaataacagcacgtgtacagatgtcagatcataccaatgttcatcaaacagtttctttcatcaggtctattgttaataagtacagaggtttgacagacatgagactgatgattcaccaggacaaagatcctagagtaagaagcaatctgatatcgacatgtatgatgagtaacccgagagtgagatggaaatggggaatgtgggctgaaggaggtgaagatatgtgggtctaagtccgaacattcaagtctgaaacttggaatcttctgtgatgatgatgatgatggtaacaaagaatgtgtcaagagtgttttcatatgttgttgtgttgtgctgatgcttttcagggagttataatgcttcatgaagagtttgtattcaaatatagatagttattcaccatgtaagatctatagcttcaccatataaaacaagatttggatttgctccattgaagtgaaaattatgtctgatgatgattttcatttatccagttaagtggtcaatttgagtctaatggatgcagagttgtttggaaaatttagcaagggtgaagaaaaacaaagtttagttggcagaaaaaaaaatgattttagaaggggcgttccgagaatcgaactcgggacctctcgcacccaaagcgagaatcataccactagaccaaacgcccttttgataaaagtctggtttacttatatttgacttataaacattgcctccgagaaccaaactagggttttgcagagaatgtatatatattaacgcatcgacataaatcataacttaactccggcacgagtctcgttctcttctctttaccgccgtcatctaggtctgctaatatcaaggtgagcttgaatcatctctttacaaaccaatttgccgttctttgttcttcaatctgtgtagcccttgttttaccgcttcatatatgttgtgttactaaatgctttcttcttcaataatcagtgaaggagctcgaaatg

SEQ ID NO: 8334 - DNA, 3000 bp, Unknown
  misc_feature (1)..( 3000): cDNA_ID_2038840_gDNA_ID_1971748_Annot_ID_175257 3000 nt of promoter + ATG
atgagaaagctaacacgtaagaagaagtactcctttgtggtgtatttcttcaatgaaatacatttgttacgcttggcttctgagttaatagtaatatgaattattgtagcatacctagaatttgagattacttttatttagtctgcaattcgtacctatcagtgatgagaaagctaacacgtaagaagaggtactcctttgtggtgtatttcttctatgaaatatatttgttacgcttggcttctgagataaatctttcttctgtgcaccatttcatattgcatctgttttgttttctatcagtaaaagtactaaccgattgattgtcttcaacttttcaggtagtggacaactactacaggcctgatttgaagaaagcagcacttgctaggcttagcgctatcagcaaaggtcttagagtagccaagtcgggtcccaagaggagaaacagacaggcttgaagaatccactactgaatatcttgtttactttttctaaaaagcttgttgtgagccattaagagtttctgacagcagcttgtaggttaagatttttcctgaacagctcaaggattgtaccaccatccttttttcactaaatgatattaaaactaccatcattggcttttatcaaaaaagatctattcttggctgcctgctctcacttctcaatacttgtcattgcgcaagtgctacaaagattaactgaacgagaaaatatgattctaatttcccataatatcactctgctctgatttctcaatacttgtaattgcgctagtgctacaaagatgtaattgaacatgaagatgtgattctaattttccataatatatcacagtgcaaatctaaataaacacatatgtgaactcttgtggcctctgaaacagctgtaatctaatgggtgtgtgtataagatgttaaatcttgtggactctgaaaccagattcctcggatgtcatattctccttccagctctcgaactcagatccaccaaacacaactttctttatcccgacataactagaaacaaccaaaacaaataccacgttagagcttacacacatttcaaacatgtccatctcaaaagcttaattcagttaataaacatacagagagaaggagagaattgaactcactctgagctgatttgtgtcaatgcgtttatcagaacatcgagaatcaacggctccgaggtcccaatatcgagcctgtcaaaaccatcatttatgtgatgagtaacaacaagacttgcaaaaaatgtttttagggtgtagtgagagttatcaccatattcgagcgacattgtcttgaacctcaagatccccgatgttataaaacgtggtgggctcgacattagctccaagtatggcatcatagtttggcctcttatccagtggtgcttgtgataactgcaccatacgagcaaaagataaaaaaacagcttaatgcttataatgcgagaaaacaaaaggaaaccgaatagataaatgctttcactttctcaatcatagacatacttgcatattcatggagttgtatccaccaagtcgtccaaggatatgccaggaccggattgtctgcaagattttagccatcaaaacaaaacagtgagtgatttgttaagattttccctatctcctcagattagtataggaatgcaaagattcagtttgaggactcacatcagagatcaaggctatgtctttgtccagcggtgtgttgtaaaactccaaccacatgtatgaattcgaatactcaaatcttacagaacaacaaaaccaagagtttaataaacaatgagaagaacaaggcactgaacatcaacaactactgaacaagcagatcaaatgagcaagcaaaatcaaccaagagaatcacatataacttcaaaagcaacataggatcactcacttgttaaacgtcactggcatcgaagttgcagaaccagtcttagtatgaagaattttgttcctcttcttcctcaatctctcttccatctaaaaagagttcattgataaacaacccatttcaaaataacaatcaaaatcaaaagctactcaaaaatttcagctcaataaacgttactttgtcaatacatcagctcaacaacagcttctcgatcgaaatggtaagatccaaagatcaaagtttaaaacttcaccttcttttgagctttatctgggttatctaaacaatctccaagaatatccgcaaactcagggtctttatcgtaatcaatcttctctttcttcgctctgtaaacgcctctcttcttcgccgagaactcatcttctacctcatcatcatctccatcatctacttcttcgaattcttccacaccttcttccatttctctacctattccatttactcgcaactttccactctccctcgaccgattcgcacgtaactcctggatcttctgtacaggaatcgtgtcggtgacccgaaacggcgccaaattgtgtaaacaaatattcgagtggttgctgttgttcttcgccatagaaggctgaagaaggtgaagaaaacattgaaaccttagcattattttttcttcttcttacttaacctctgactctgttgcttgcaagtattttagagaagactgaagaagctaatgggtttttgtaagagatgatagtgaaggggtttatcatagctaacggtgagcttgcgcgtacacgaatattaagctgacgtggctaacaaaaataactagtgagatttgatctaaaccatctgttactgtcacaatcggaccgatatcaacccaactaactaggaatctaaatttcgttgcacaggcttccaaatgataacaatataggcccattaagaaaccactaatgggccgtatcagtacagatcgtcttcatcacttaaatatcagtcatagaaaaccctaatctctgagaagagttaaaagcgttgccgtacactataaccggagagagcgccgattccgtcgtcagaagaatcctcgtaaacaatcatg

SEQ ID NO: 8335 - DNA, 3000 bp, Unknown
  misc_feature (1)..( 3000): cDNA_ID_3045046_gDNA_ID_1971748_Annot_ID_175232 3000 nt of promoter + ATG
actttgtgataggaaatgggataaaacggagctcaaattctattaagttctaaagacttctaaaacaagaattatggcaaagatatgataatacccagacaaagaggcaatcataggcatctatatgttttattcaagacatgtctttggcccctccatgatttcattctttgactctataaattattttgaattttcttcttttatttaagaaataatataattatgatgggtattctataaatacacaagattatatatatgtatgtattatatatgaatttctttgcctctctttttggtttggtggcgttctaacgttgggattgagattgtcatttttttttgttaaaggaatgagattgtcttttgtatatccttaacttgagttgtccaaaaaaaaaaaaaaaaaaaagtatatccttcacttgaaactcttgacgttaaagttacaatccttgagaaatcgaaatgaattttaatttataaatctagctagctatttagattcttttttgctgtggttatgttttcaatctaaacaaaccatttattatctcaaattatttttaacatttcggtcccgcttaattattatttttagcaatatatttttttttttactgatttagtgattttcaaatcataatgaatagtttaatttatgttacaagaaaagctgaagtataattttggcagtttatcttagatttcagaaccataagaatataaaatgttcaaagagagttccaagacctaaacacttcaatccaatcgaaagatctcaaattcaaggatggacccagagtttgtgggggctacgttaatcttatttcatactacatcatataagagccgtataagcatattacacctgacactttctagactaaaccgcttctaatcaaaaaatttaaaatgcagcgtgaccggaaatcaagaaaagcaaaatactatttttgttgttacaattaggattaaggcttatgtaaaaatgaatctatttttcttacacttcattcgagaattttaagtgtacgatacagttttcttctattctttttttttcctttggtagttttgaccatctattgatttttctttctcaaataagttgacgtaaaccacattacatagattatacgatagaactcataatcattacagtcaagatactcaagattgttatgaattattatatgatagatatgtttaaagaacgaacacaaattcagttaataggcgtaataatttcaggattccttcattaaacatttttatggcaaaaggaaacgattgtctgatttgaaacatatgtaaaaaagtatagttgccatgatttcataattcatgctgatgtaaacaaatctccaaagagaccatataataataataaaaaacaaaatcataattaaaaatattcgcttttctatacaatacgagagacatgattttatttatttcaaaagaaaataaaaaatacgaaagatatattataaattagaaaataagagatggtgtggtccatatgatgggtcgctgctcaaattgccttacttctcaagcaacctcttaattcctttttttttatctgcagaaattaaaataaaataacaaaacgaaaaaaagaagaaaaatgaataacaaaagaataatgatcacttcctccagctcgatgcccatgtgatctctcttccttcttctcgtctttttttctctcttcatcttttttactttttttgttttgtttattctcttctgttcttattaactttctacaaaaacttacgtttatcctagaaaaattagatgtttatagtatagtgtgaactaagaagtgaagtatattattttaatatatcatagatatagaccaagaatacaaaatccatgtagtaaataagttataaattttttttgtccaaatttacttatatatatatatatatatgtatttatttatacacatcatctaaaggatagtagaatacacaatgttaaagttaatagcgatgaaaatttccaatctattccagcatgaaacttacattatattataaagatacatagatggtaaaaaaaaaacttctgatattattttattttcaaaaattcatatctccactctattataaatactaaatttgtaatgaattttcgatgttttaaggatagctaaaatgagaagttaaagaaaaagagtagcaaaaaggaaaaggaataagttagaatgtagaaacctatactatacatacaaataaataaataaatatttttattataaaaaagtatagaatttgtagataaatgtaaacaaaccgcttgaaagactcatagcggcttcttaaaccagcaaaggcaaaataaaaggtgggtcagtgaatgggtttcagagccacctttcccttttttctcgcttacttcttcagttaaagtttgagatagacacatattatacatcatatagtatacatatttatgttatatactatcttaattccctcaacaaaaaatctctcgaatgtttttttttaattaatttatatacctttcacatcccaaactctcacactttctcttcttcttcgtcttctcctcctccttcgtcttcgtcgtttattaactctctctctctctccttgttctctctctctctctttttcctgatttgcagtactgtctaagatcttattccgctcgaccaagtttgttctttttagcataatttgggggagtttttccccattaattctcactttgtcttcttcttgtgtcggttaggttttcaagaaaaaccctcttttgtcttgtctcctcaaaatcagttgcttcttctctataataatagagggtttattcatatcttcactatctagcttcttcttctatcatatgtactccaactctcggatatgatcgaaagagctttgttattattatctttacaacttcacgcagacgcataagagagagagttgatcaaagatattcgagattgag

SEQ ID NO: 8336 - DNA, 3000 bp, Unknown
  misc_feature (1)..( 3000): cDNA_ID_2038856_gDNA_ID_1971748_Annot_ID_175250 3000 nt of promoter + ATG
aataactctggatgcaaatggccgaacattgtttttcaaaaccaaattggaatcagtgggttgaacgaatccgaccaatatccatatcaaaactgattctgaataaatcggacctagtgcctagtatagtagcttggccctagcgcatagctagtaaattgattgttcgaggttttgttttcatttgcgagaagagtattattacttacatgcattggttattttgtttccttcattttttatctctttttttgtcaaagccatagatgcattgaatattcatcaggaaaaaaagaaaaaattagcaacttgggcaaatgtcttcttaaaacattaatgtattaccaaatgcgaaatagaagagaaacttgttacgtcctttcatagacattaaaaaatagagagacatatctatttcaagatctttgcacgtgatcgagatgtttttattgtttttggctaacatatatccaagttagagcagaagatatcaaaagaatattatggatggcaatgaatcattttcagtgaagcaaatagtacgttccttaaatcaattagggtactaaagttttgcaataatccattcaataatagtatctctctctcttttctttaccaaaaggcttttattgtcctataacttatgaacatcaagagaggtaagtgcattttatcacctacaatattagtatggaacgtaacatatagaccttctaaattggtacataagtcctaattactctaaccaaacagcggaataaaatgtaaaattctatatgaaatgcgaattaccataaatttactcgagcttatatgtctatttttctttataatttttgtcgtcaattaatgtataaaggatttcgtagcatattacatgcatgtggccgtaatacggaaagaaccaaatcactaatttttaataaccaagtctcctctttaatgggaggacccattatcgaacaacataatatattaactatcgaaataccataagtttattgaaattacctagagtaatcataaactctagggtcgtcaaatgaattacgcaatgtcaaatatgagatatatagtgttcatgtttggtaacaattcatttcgaccatgaccaacatcgtagacaagacatataattacagttaaacacaaatatcgacttgttctctctttttttggttgataagtattaagtagtaatgatttttttttcctccgctaataaattccttcacctcattaaaagaagcttcatatacaagttcgtttatccttaaaccaaaagaaagtgaaaaggtttctattataaaaataaaagtcaactatgtggatatgtacgtgaacttgctgttttagcactgatttcagttaaaacgttttctcttttggttttccagtgagctattgtattgtacaagaatcaatcatatggtatgaatgagtcttgcatgcctatatataattgcaattattattgtgatactatatacttacatcatattgttttaacaattacacgggattggagtttattcttggttagtctgtatatttaaccatctaaacacaaattttcattaattagtttcaatctaaagtttttcttttgctttgggagtaagccaacacatttcatggtcggtctctctaacatcatgttcatgctgaacgtgtgctcctttgtgttattttagttttccaaaaagttttgcgcctagtactatagttttggacctatgtctataattctttcggaccagagagactcaaagattgaaaactagtctgactatctattgttgaacatgaagaaagtttctaaatatgattagtgttgtcttgtgaatcattaaaataaattagcgaaagagttaattgattcgagtaattatttaattcacaattatacactaattcaccatttataaatataacagtcaaacgccactaccaactaccagtctacgagcgccgtcaacaaacagaagatctagagcgccgaacaaatcggacggaaaacgacaaaaaaacagccagcgaaatgccacgtcgctcctccttctctcccgccgacgatcctgacggcgttacggtgacggactaatatatgataattagtggcccaatacttagcccaaaattaccgtaacgccaccaacgaacaactcaacacagctggaatttgggtccatgcaaacttatctctttctctgtttcgtttcttccatcaatttcatttaatctatttcccatcaatttcatttttcccaaataaaccaaatccatttttgtatggttttgttaatattttcaattaataaggtgtgaaaaggtggagttttttcttgcggttacatatcatttagtatataatctttcgtaattaatatcatttaattattataaaaaaagacttttagtatcctaacattttttttttaatacaaatttaacacgtaatatctggattgtctcaataacaatgattaactaaaattttaagaaaggtttttcttattaaattcaaaagaaaggtctaaaaataatataatataatacattaaaaaaaaagttttgtttataatcaaagtatgcaagattcatgaatcatgatacatttgtgcttcacctagaaaaattaaacaaaacctttaattaaaaaaaagaccaaataatgaaaaatgatgaattgttttattgtgccgccgaatttcccgcgattaaaaataaaataaaacaataccaccaatcaaaaattataatctcaaaataaaaacaaacttaattgtcatagaacccctgggccccactgactctcatgttgctacaaaaacgagaaccatcaagaagacgacgaacaacgacctctgcctctcatgacaaatattcaactgattccttcttcatcttcaaattctctctaattcgaatctctcaaagttcaaatttcaaattccgaagaagaagaagaagaaacactcgaaggtttttgtgatg

SEQ ID NO: 8337 - DNA, 3000 bp, Unknown
  misc_feature (1)..( 3000): cDNA_ID_3045036_gDNA_ID_1971748_Annot_ID_175252 3000 nt of promoter + ATG
gcacttacctctcttgatgttcataagttataggacaataaaagccttttggtaaagaaaagagagagagatactattattgaatggattattgcaaaactttagtaccctaattgatttaaggaacgtactatttgcttcactgaaaatgattcattgccatccataatattcttttgatatcttctgctctaacttggatatatgttagccaaaaacaataaaaacatctcgatcacgtgcaaagatcttgaaatagatatgtctctctattttttaatgtctatgaaaggacgtaacaagtttctcttctatttcgcatttggtaatacattaatgttttaagaagacatttgcccaagttgctaattttttctttttttcctgatgaatattcaatgcatctatggctttgacaaaaaaagagataaaaaatgaaggaaacaaaataaccaatgcatgtaagtaataatactcttctcgcaaatgaaaacaaaacctcgaacaatcaatttactagctatgcgctagggccaagctactatactaggcactaggtccgatttattcagaatcagttttgatatggatattggtcggattcgttcaacccactgattccaatttggttttgaaaaacaatgttcggccatttgcatccagagttatttaaatcacgaaaaatatagtttgctatttatcatatacatacggaatttgcatgttaacactattgatcaactagatttttctaatgttatattttttttggtggggaagtattgaacttaccttaccactctttttcgattcaaatactaagaatcacatttatcagttgtgagtttagctaaatatgtgggtggttttaaatttgtgagtattaaatttgtcatttctatcacaaaacaatgggagaaaaaaacgaaaaactagtttcccgacattaaacatgcgaattactgaaacatggataggtccaccatttttgccatttgacaagctcggtctcttgttttccttgttcataaatgattttagtttgtttgcttttttaaacgcatctttctatcacttttttcttttggttgcaaatatgtcgttttctctcctccctccttttccgggatttaacttatcacaatgtaatgaaatttgcatgttcctctctcgccattggcaagttccattgcgatgtctctatcgataggtcaaacaatccaaaagaaccaaaaccttttttcttttcttttccactcacatttaatctagggaccctttaatcttattcattttctcaacgataatgtaaaaaagtatagttagtaaactgttaactgtgtagattatacatgttttttaatcaatcatataattagaaggggtatttagccgtccaaaagctgttttcgcgtgactatgcatgaaacccacttacgtagcctccaacgtaacgaccaataaaaagctctaacttaggaacattacaacgaactaatatttaataagttatataaggtcatgaaatgaaatcttataacgtatctaacaactcacatgatctataccatgtcacattttttatcaaacatatgttaaccacctaagcactaacactactctttgatcaaacttatatttcgcatatactccaaaagaaaccaagtggcatattggcatatctcgtaatgtggtgccaaaaatgcttatcaacttaattatagttcagatattgtctccgtatcgtatcttaatatttgtattcaacaataggtattatgttgtattagctaggtgtgatttgtaacgagaagagatatctcgttctattgtgaggtaaaaataaaataaagcagtacaagaacataacggtataaacggtttttactgttaaaaaacttgtaattgtttatgtaccaaccctattgattgtgtttaagaaattatttttaaatcttgagattcttattcaaatataaacattgaagatcgatattgctcaatatcacaataatctttctaagttatgaaaagaacgtctactactatttgtttaaaactacataggacaacatcaaatcagttttgaaattcattgtaaaattcttttaatactaaaattgtttacagttaatgagaaattacaatattatttttagcagattataattagaaaatacattattattattgatcaatttaccttgcagttccacgcaaaaccaacaaaataacaaataacaaagcattgtgtggaatgacgtaaggatgagtcagcagacaaggagtgagatcgaatcgggtcaagattatctggttgggacccgtcacatgcacatggaccctctcccgtacctaatccaggttaaataatcttgattttctgtttaattaccttaaaaacacattattattgaaactaataataaatctcggatctttggttccgaccatacttgcgaaagatcattgctttaatgctaatgtttctctaattttgatattccttgagattagattccctttgcattgtcttttcttgttaatttgttagggttcatattcttacattattttttttggcaaagaaaaaaacatttataaacatatctaattcgagcctgatctattaatgggtcaaataaaagcctctttggcccaattcaataaactggccaactggggatcatcatagagacagactactagagagtagagacgcatcagaaagaagagaaattgatcccacaagtttaaacacgattacaaattaaaacgtgccacgtattcaagacggtgaattaacacgacgtggcaaggtatgattggataacttacgcagctgcctaacaaaaacaagtgatttgagttttcagatgattagaaggaaaaaaaattctggaactttcgagcttctgttttgcggtgctctcaaagcttatatcggatctcgaatcttgaatcggactcagaacctcggatcttcgaaaatcgacgaac

SEQ ID NO: 8338 - DNA, 3000 bp, Unknown
  misc_feature (1)..( 3000): cDNA_ID_3045032_gDNA_ID_1971748_Annot_ID_175253 3000 nt of promoter + ATG
cacgtattcaagacggtgaattaacacgacgtggcaaggtatgattggataacttacgcagctgcctaacaaaaacaagtgatttgagttttcagatgattagaaggaaaaaaaattctggaactttcgagcttctgttttgcggtgctctcaaagcttatatcggatctcgaatcttgaatcggactcagaacctcggatcttcgaaaatcgacgaacatgtcttctcctggcgagtgagttccgttcccctctattgaaactttgcttcgattcgattttgatcgagagattcttagcttggtcttcgtacccaggattttgagtccttaggttaataattttcatgattcgtttagcttgtataggggtttttgaagcattcaactgttgattcttctcaattcgagcgtaattttgcaacaccaagcgagttctgtgaacttgagctaacgctatttttagtatatagttatcaatttgcattgtcatcatttgatattttggtgatttgagatgtaaagaaacatcttttatgccatggaagttagtacaagtcaactggtagttagttcttgaaatatggaatctcatagtgtcttgaagcaaaactgttctcgtttgctgtatcatagttacaaggctactttgattctcctagctacgatagtctaaaatatctctgcgtaggcttgtctcttgtggtaaagttttatgctttagctgatcttgatgacatttcctgattagaaatttatagatggatggaatatgtatgattttgattgtttatctgtcaaattgtttcttagatcgcttgttattgattgcagattctataactcacttccacctataaccaaggcttatggtacgttgtgctttttcactacagtagccacgcagcttggcttagttgctcccgttcacattgctttaattcctgaacttgtacttaagcagttccaggtatatgatttattcttttttatgattttcctttctttctcacaaatctctgtcatcctaagttcctaattcattctgcaatttttgatctatttggtgtttgtagatctggaggctgataacaaacttgtttttcctcggtggtttctctatcaattttggaatacgtcttttgatgatgtgagcatactattttcacatatatagatgaacaaagctaatttcgatttttattatcttaacatactcttttaaatgattgtgcagagcaagatatggagttcaactcgagaaagggccatttgaaaggcggacagcagactttttgtggatgatgatctttggatccttcactctattggtatgtaaagcctcccctgtattctattcttactgatcattgttattggttctttgagaaccccagtactagtatgtggtatgccacaaagtagataatcgctggtacataatatcccaaagctgagaagatcagaagctctcaaagaattgaatcagggttgcattttattaaagcgagacaaaattttggaaggtattcatactagtaaatccgtgtgttaaaacagttaccttgttcaaatttcaggtattatcagtcataccatttttctggacaccgtttcttggtgtttcacttgtgttcatgcttctttatctctggagccgagaatttccaaatgccaacatcagcctatacggtcttgtcactcttaaggtattgaaagtgtttcttttgtaatcaaatccactccttggtatatataatgttaatggtgaaagttggaattactccacaggctttctacctcccatgggcaatgctagcacttgatgttatcttcggttctccgatcatgccagatcttcttggcatcatagctggacatctatactacttcctaacagtccttcatcctcttgctaccggaaaaaactacctgaaaaccccaaaatgggtgtatcctttattcaaattctcgattatttccagatgattgtttctctcgcttctcagtttttgttttgctgttgtaccttgacattctcaacagtaataaaatcgtagcaagatggcgaattggagctccagttgcaagtgttcgacaagcaggtggtgtaggagcagcaggacccggagctggaggaggagtaggaggaggaggagcttattcaagcgctcgtgccccacccgagagttcaaacacagcattcagaggtcgatcatatcgtctcaccgactgaaatagaaatcttctcgagtttctttgttttcatcatatcaaatctttttcaaacaatgccactaactaatcccaggtagctttgtgttttcgaacagtacagtttttgaatatatgactctgtaggaagaatctttgaggttttaatacaatgttcttttcaaaatgtggttcatgtttctatgtttttgtttttgtctagcaatcatctccttactaaattgaattcgataaactatagccactatgaatataatcaaatgaaatttgtgacataagaatttggacgtaacgagtttgaatatctatctagataagttattaaattcgtgaccaaagagtttggtcgtaacaagtttgaattttttaggacataatattattattggctaacaagattacgactaacgagtaaataatcattccttcggtccttcctctaaaatgccgttggtgatcgtttataaataggggaaataggaaaagggaagaaagtagacgtggcaaatagcgaaacaatgattgagctataacaaaggcgaaacttgagcggcactaattgaaaatcactccttgtttttttgaagaaaaagtaagatgtagggctgagaattcgtctatgtgatccaacggttttaaaatgatccttgttccttcctctcctatttatctgaaggacgaagtccccacgctgcacataaccggggcacttaacgtatagatcataaacaaagaagaagaaaaaaaataagaaaagaagaagaag

SEQ ID NO: 8339 - DNA, 3000 bp, Unknown
  misc_feature (1)..( 3000): cDNA_ID_3045044_gDNA_ID_1971748_Annot_ID_175238 3000 nt of promoter + ATG
tctttaaaaatacccatagaattcaaattaaccttttcatgataaatatatataatttgaaattttcctaaaagctaaggacatacatactaacaaaattagggggtagtgttaattaatctataaatatggtgatgaataggatagaaaacagtcaaacacaatagttttgctagctacagtgtgataagagaatcatgggataatattaattaatctagtattatttgtttgaactttgaatacattttttaagtatggaaatggatagagatacacatgaaaaaaaaaaaaaatctatgtattaagttaactgctatagttttaagttttaacactttgagaaggtgcatatagtaatcaatgtagtcaagtcaacactacatttttcaacatttatttacttactttttacttttatttctgcttagatgtttttattatgtgaataataaagaaaagtcatgtatacctcgatatatattaacacaagcattacataacaataaagcaaagaaaatagcttttcatttttcatctctaatttacaaaacattagtattctgttgttgtgaattgtgatatatttgatcatggccaacatatcatggtctcattttcttatactcatgcttgtgttctcaggtaatttcatgtttcccacttccaaacatcaaaaagtagttttcatctttacattacattacacatctaagcgtgtacacatatacactatattgtttcacatcataacatatggtattttactttttaatattttcagtggttaagaagggtaagggagatcagactgataagtattgtactataatcattgatccaagaactccatgtgaccttgttgattgtcgcctaagctgctatacggggtacaatggagttgggaaatgtattgcatccaaagctagtagaactcctaattgtgtgtgtacttataattgttaaagtggcaaattctaaataataatgttttataattaagaaaatattttccataataatctatatgaataaataaaattggaagttcttcagcccttcttgtaattgaatatttaatggaaacattgaggtgatgatttcagccaccttattgttaattttcaaaattataaaattaatcaaacatatatagtaatgattggaaactttatagagataattttttaccaactctcaaaactatataaagatgcaaaaagagggagcttataacctaaccactaatgaatacattgctttgccatgttcaaaaacgctgccaaagtgaccgcatctgattagcgtcgtcatagcgcgtgtaatgacaatttgaacaataattcattaaaatatggttatagtataatttttggaaatgttttgatttacctctattattaccaaatcaaattcagccagtgaagacgttgtagttctcaacaaaaatcacgtgggagtgtaaatacgacaataatgttccatctttctatattttaaattcgcgacctatcttcttctttcatccaatagttgaaaaacagaaaaagcctctccaatgactttttctcgtagcagctcgattacgttcttcatcgttgctttattcaccgtcttaattaatccggcgatctcttctcgcgccgcgtccttcatcaagctgcctcggtcttccatcgcttcatactgcgagagttggagattagccgctgagaccaacaatgttggaccctggaaggtgattccgtcccaatgcgaaaactatattaaaaactacatcaacggaggccagttcgacaaagactacgatgtagtcgctagttacgccattgactacgctaaaacggtcaaggttggcggagacggcaaggacgcgtgggtctttgacatcgatgagacgcttctctccaatattgagtactacaaggctaatggttacgggtaaatgctctctcatgttattattaccgttagattctgttttatcaacgaataatatgattgtattgtttgactaacttcgttgaccatgcattaaaccgggagatttgtggattcagatctggttcttggtttgagatttcttttgtgttatttttcgatattgtaccgagtgatttgttgatggtggatttaggtctgaaccgtacgatagtattaaatacaatgaggtggtggaaaaaggaaaagacccaggttatgatgcgagcttgaggctctacaaagctctcaagaaacttggtttcactatcattttactaactggccgagacgaaggtcatagaagtgtcaccgagaaaaatcttcgggatgccggttatttcggttggaaccgactcctcttgaggtaaaaagctataccaaaccacttctcttgttttgtttaccaatctactaactaatttactaaacttatgaaccggtaaatgcaggggtcaaaatgatcaagggaaaacagcaacacaatacaaatcagagcagcgatcacaagttgtaaaagaaggctacacaatccatggtaatactggagatcaatggagtgacttgctaggttttgccgtggcttctcgttctttcaaagtcccaaatcccatgtactatgttgcttgatcaccatctgccattgatatattgcatgataatttatcatttatgtatgaataaggatttatgaatgtatcccataattcaccgaatgtagccattcttaatgtaccacgtcctatatttttagtaggattcatacgtcactggtatgtaagaaaaggggactgattaaccaaataattttgatcataattgtgaaacaaaatccagataatgcttagatagtagttatactctaatccaattgatttgatcaacatttttctatatataaaattcttgattctgctaactaattaactaattaaagtttttggtttggtaagagttgcgaaacgataaccaataataaatgggagacatcattatctctttttctaaatctctccaatg

SEQ ID NO: 8340 - DNA, 3000 bp, Unknown
  misc_feature (1)..( 3000): cDNA_ID_3593350_gDNA_ID_1971748_Annot_ID_175229 3000 nt of promoter + ATG
aaaaagatgaagagagaaaaaaagacgagaagaaggaagagagatcacatgggcatcgagctggaggaagtgatcattattcttttgttattcatttttcttctttttttcgttttgttattttattttaatttctgcagataaaaaaaaaggaattaagaggttgcttgagaagtaaggcaatttgagcagcgacccatcatatggaccacaccatctcttattttctaatttataatatatctttcgtattttttattttcttttgaaataaataaaatcatgtctctcgtattgtatagaaaagcgaatatttttaattatgattttgttttttattattattatatggtctctttggagatttgtttacatcagcatgaattatgaaatcatggcaactatacttttttacatatgtttcaaatcagacaatcgtttccttttgccataaaaatgtttaatgaaggaatcctgaaattattacgcctattaactgaatttgtgttcgttctttaaacatatctatcatataataattcataacaatcttgagtatcttgactgtaatgattatgagttctatcgtataatctatgtaatgtggtttacgtcaacttatttgagaaagaaaaatcaatagatggtcaaaactaccaaaggaaaaaaaaagaatagaagaaaactgtatcgtacacttaaaattctcgaatgaagtgtaagaaaaatagattcatttttacataagccttaatcctaattgtaacaacaaaaatagtattttgcttttcttgatttccggtcacgctgcattttaaattttttgattagaagcggtttagtctagaaagtgtcaggtgtaatatgcttatacggctcttatatgatgtagtatgaaataagattaacgtagcccccacaaactctgggtccatccttgaatttgagatctttcgattggattgaagtgtttaggtcttggaactctctttgaacattttatattcttatggttctgaaatctaagataaactgccaaaattatacttcagcttttcttgtaacataaattaaactattcattatgatttgaaaatcactaaatcagtaaaaaaaaaaatatattgctaaaaataataattaagcgggaccgaaatgttaaaaataatttgagataataaatggtttgtttagattgaaaacataaccacagcaaaaaagaatctaaatagctagctagatttataaattaaaattcatttcgatttctcaaggattgtaactttaacgtcaagagtttcaagtgaaggatatacttttttttttttttttttttggacaactcaagttaaggatatacaaaagacaatctcattcctttaacaaaaaaaaatgacaatctcaatcccaacgttagaacgccaccaaaccaaaaagagaggcaaagaaattcatatataatacatacatatatataatcttgtgtatttatagaatacccatcataattatattatttcttaaataaaagaagaaaattcaaaataatttatagagtcaaagaatgaaatcatggaggggccaaagacatgtcttgaataaaacatatagatgcctatgattgcctctttgtctgggtattatcatatctttgccataattcttgttttagaagtctttagaacttaatagaatttgagctccgttttatcccatttcctatcacaaagttctactagatcaaattcagttttaattttttggatgctaaatgaagagagatataagaaacaaaaacaaattaggttatttatcttagctgattgtcaaaggttacaaatgcatattagatatattattaaccaatttgtaaccatagacatgtaataaacttttgcatgatggaagatattcttacagaaaacacaactttgatcgaatagatttgtattctaacggtaaagtctcttgcattggtaaacacatgaaagaaatcttagaacatgggcaaattgtggttggtcaattggttcagaaatcagaatattagtgggcttatgagctttacccattttaaattagatgttctgtcatgtgggccggacatacttagttctttcccttacacatttttgtgtcaatttcccttaagcctagtcttacgcaatatgaaaataaatgtaattagggaaatcaagcccaattagggaaatatgttttgacttacaatttatgtcaaatgagaaacatgccggtgtaggctagagcatagttcatgccgtatcctaaaatttctataactagaaacctactccaataaccaaaacacccactccaaaaaaattaatatcaaaatcattctctttttaaaataaaaaaaaaacatcaaaaatcagtcctttattaataattattacacacagcccaaatctttcaacgaattttaaatataactcttcaattattgaaatggtcaattttgcaccaaagtaattaaaaccttctcttctgaaatgtctcgtatcttctcatcattaaaagcaaaaaccacaaacatatcgccacttgttcattatcttcttcatccatacattcaccaccagcccgtgatggcctgatctgcttcctcctcctccttacttcttgtttccatcttggtttcaaatttcttcaaaggtgaattattttctaaagtttccatttttgttaacaatataaaaaaaaaaattgaagtcaaagaagactgttccattttttgggtttcatataaaaaaaaaatgggtgatgacattttctgtaatctttcattgtatggatttgtttagattccgatcatcttcacgtcggagtacacaatctgaaaccgatcatcatcatcatcaattggggtttttaatccctagaatcagtagaaaatatcgatcattgagcttcgattctggtctccgtttgattgtttcggacaatcagagctttgagtctccgaaaaggttggttatg

SEQ ID NO: 8341 - DNA, 3000 bp, Unknown
  misc_feature (1)..( 3000): cDNA_ID_1397961_gDNA_ID_1971751_Annot_ID_175291 3000 nt of promoter + ATG
tttttggattacctggttgatgaagaagggatgacttttgcatattttagtgtgttttgtgagagtattctcgtttgcagtattcgttgttaataagtcttgatgaacctcctgaactaggctatggagattttggctcatactttggagagtgagtcaaatttaaagaggagggtggacttatttttccttgtggattctatcgctcagtgctccaaaggtctgaaaggtatgtcgtatgtgcaatgagttttgataagccgcatcagcaaagttctaaatgcggaattgaccttgaatactaccctatttttcaggtgatactggttgtgtttatctttcagccattcaagtaattttacctcgtctattggcggctgctgtacctgctggagctaccacacaagaaaatcggaaacagtgcttaaaggtatgcaataatatttgctagctctttcggatcgttattgtttctcaacctctctgctatttataggttttgaagctttggcttgaaagacggatcctgcctgaatctattgttcgtcaccatataagagaacttgattcacatagtatagttcctgcttgcctctattctcggcgctcagctcgaacagaaaggtcgttggatgatcctgtgagagatatggaggatatgctggtggatgaatatggaaggttagatttttcgttttttatttaatctatatatgtacccctgtctctagattcgttaaaactaattcatctttacttatcagtaactcaactctccagctccctggattttgcatgcccgcattgcttaaggatgaggagggagggagtgactcggagggagggtgtgactcggagggaggcagtgactcggatggaggggatttcgagtctgtcacccctgaacatgagtccagaatccttgaagaaaatgtctcgtcatccacggctgaaaggcatacgcttatattggaagatgttgatggtgagcttgaaatggaagatgtggctccgccttggggaactgaaaactgcacacacactgatcaagctgataatacaaaggtttccaattgtcagcttggacagcagcatcggcccgtctttggcacttcacatcagcatatgtccttgtcatctccaccactgccatcttcctcgccaccaccgccaccagctcccccttcacagcagggggagtgtgccatgcctgattcctacttgaatgggtttgaaaatggaggatatcgcaacgtgcatgtacgtttgtttgttgtaaaatcgttttacaagaaagatgatgatatatcttgatatggtcacttatcctattgttattggtaaatatgcagggagatcaacaggctggtcctcttaggatgaacccgccactgtctggaagcacaatgcattatcaaggtccggagtcgtcttatatttctggtgtacaacttacgaatagtattccacaggcagatggttctaatttccagcataggccttatccctctcatcctcatccacatcctcctccccctccaccgccaccacagcatcaattctcatttagagagccgggccacgttttgaagtcgcatagggacgctccatcgtactcccacagatctcattatgtgccgaattgtgatgaaagaaattttcatgataaccatgagagaatgaggcatgcaccattcgagaatagagataattggagatatccaccatcttcttcttatggtgaggccttttacagtcatgcgtgtgttaattatatatatatatatatatatgctttctaatgtaatgatgcgggaatgggaagtctgatatgatcgtctcctcgcaggttcgagatatcaagatgaacacaaagctccttatccatccagttcatacaatggtgtccggtgggataatcctcctcgccaatataataacagaccctcttttcatccgaagccgcattctgaaggtcctgctccagttggaatgagaggtaaggaggttggagacgtttataatccttggccttgtaagtatttaagtagtttccttgctatcgaggaacccactcgtgctcagaatgaacaaccgtagggacatgaaaggctaattattttactcatcttctagtgagccatgcgcaacattcatatggtaggatataaattttagtggaatcatattataggtcgttttctgacatttgaggtttatttggcatttaatgatgaagtaatatagggaataaccccgagtatcatttgtttatttgcagatccgggaatgtggcatcagagaagtgactagagaaacttgagagagttataaactggtaaacgaagagggtggtgtgaagcaaaaaagccaaaacaccgaggtgatgtggctctaatttaaaaagagaacggttatgttgttgaggtgaaatagtgatatgataaagaagtgagagtgtacatacatgatttcggaatcagaatcacatgcaatgcagattgtgaggagatggttaaaaaaaagaaagccatttgtagagatcgagttagtatttatatgcactcctttgcttattcattgttttttttttttgtgtcaacattattttgttatgtgggttttgaccttgaagtgtatgatgtatatcagtatattcatctcttataataatattcctactaaaaagttggttttttcttttttgaaatggaatgatagggacttttctcttgaatatagtacagactagagagagagagagagagagattgttgagaatactttcaatttttttttctataataaggcaataatgcaatttcacatttatgtaagaatgaagtaaaaaggagagaagactagaaaaacaaggaggaagtctttccctttaaaaagggtcaaagagggttccttaaataaaaggttggttcctcgtgagagaaagtctttccctctaatttctctagagagacagagagagagagatagctagagatg

SEQ ID NO: 8342 - DNA, 3000 bp, Unknown
  misc_feature (1)..( 3000): cDNA_ID_3045094_gDNA_ID_1971751_Annot_ID_175317 3000 nt of promoter + ATG
tttaattcttttaatcaaagcatgatttaatgtaaaattatactactgtatgactacttttcttaaaaatataacctaggcaacttgttcatgtgggtctactcgttaggtgcttcattttgaatgatcatgtttaattgcgtaacgagataagtaaactggttaattgcttgtgtgacaaaagatacatatcaaatttaattaatcattaactttgattaaagaagtaggcggcatccccaaagtcaacaaataaaatcaaaggtttctggtttaatccacgcgttgccccatccatattccctttatttctaaacgaaagcgaccgccatttccgtattttgtctccctagcaccaaaattacatgaccatttatttacttacgtggttctttttttctttgcagcagaattatataaatatgcaacactggttagtctaacgctatagatatggatgatattttagatatctatatatacatttttgcagccattttgtaaaataaatcctagagttagaatttatttacagtggctgccactgacatttaataattgtttttgataattaaaaagaaaatctttgaattaaatatttgacaatcttcccaaaatctctccacattaattacacgattagttactaaaataaaacttcccaaaatatttaatcttatttaattactacaaaattatcatttttgatattgtttttctacatgactataataattcgattataatcatcaaaccgcagagatatttgatagcatttaattattacaaaattaaaaaatatttagacaatgattcataaacatatcataaataaaatcagtgagttttttttacaggacggattgacgggacgagtttgacaggacgttacttaataacaatcgtaaactataaaataaaaatattttatagataaatataatttgcaaacttttatatatagtaactttaaaaaataaattgtcttcgcggtataccgcgggttaaaatctagtaagacctaatagagtaccaaggctagaacaattaatacgagtatcgcgtatgaaaaagaatatacatgtattctgataactatataaagtagtagatgaaatgattttgattcatgaatctctatgttgagtgagaaaatgaatagcctgagacaacacaagtgtaatagctttcacgcttggacttgtgtctgaattttggaactgatgatgtttgctgctctttctagaagacctgttgaaaaaagcataaatacgctctgttttcaaatttggcaattgatatttgtttttgtacgtgtctatttaatttttggtaaagaacgcacgttgtttatacttacacaccgcccttctagaagaacaggctctcacgtcatttgcatacaacttccatcttctggaaccaatggatccctgttacaaaagttgctcttaaaacataaacaaaaacaaaagaaaagaaaacatttttatatttgtcgtcaataataatggccactttctgcttacatgtatatgaatgtatatattactataatacgtagctgctcgtgtttcttgtctaagttctctgttatagttaggagacaaataaagagaattagagaacagaagaccagaaaaataaagatgaacacaaccaacaacgtgtttgatgtgtcaccgttcttgcttttagaagcatctgcagattccgaagctggccacgacagcgttgacgatgataaatgcgttaaggattacgatcttggtcatgagtcttctagtgccagttcttgcgagacgtcttgcgtgagtcagagaacgagtttgttaggttttgacctgcaggacgatacggtgaatcatgaagaaagagacgccggagatgaagaagacgaagacggagaaggagaagtgaatagctacataagatgtgggagaagccaacgtgaaaatctggctgtggattctgctgcggyggtgagtgagatggatcaaaatcgaatgttctgggaagcttgtctcgcatcttgatctgtctttattaattaatgtcatctcatcatcaacagagaaaacaaaatagtatatatctagcttagcgtagtgttcttgtctgtgtttcccctttggcttttaatgcacaactaatcgatatgatatctacccattaaccttaattagtcccctttagcgtagtgtaaatttgttttgattcgtcaagagaaaaaaagtggtctaagggactgactagttggagaagaatccgtataaaatctgttaaaaggagaaacaatatactatactagtcttttctcgtagaggaggatgttatactaacattactaatttatgctcacccagtttaaataaaataaaatcaatacttttttggtttgtactaattaacatatatatatatatatattcccaaaattaaagattccatggctaacagacctaaagaagaagaagaacaaacacaataagagattggtgtagttttacttttactatattcatctttgtctttattgaccaataaagtaatttctcccctttatctatttgatagtggtatactttaagttgctttttaattgctggtgtacaattatattggactcaccaacaagaatctgtgtgcagtcagtgtgcttgttactattgttttatctcattaattgatgatcactttttcaccttcatacatgagagctgaattcatcactttgttagttatataagttgggctattctattattaacagtttgatttttgacagtaaatttgtctgccagaataacttatacacattaccacccaaaaaaaaaaaaaagaagaaccatttttggacattacgtggttttgggtttgtctagcgaccttttatgggccaatgatatgaggcccagtaaggaaacaaagaacggcccattataatgtaaacatatttagtacaaggaaaaggggtaaaaaaggaacaaggggaaagaa

SEQ ID NO: 8343 - DNA, 3000 bp, Unknown
  misc_feature (1)..( 3000): cDNA_ID_2994335_gDNA_ID_1971751_Annot_ID_175321 3000 nt of promoter + ATG
atctttcttgttaacattaaaagacgtgactgttgatacagcgatcttgcttatgtaactcgatcgttccttcttctttcagaaagattttgtttataaaaatttgagtaaaaagaaaagaaaagaatgtaagataacccacccaccaaaatgtcattgcaaagttgattaatgacgttagcagagaaatcaccggagcggatcaatcaaagtgttgcacactcacacatggatatcttcatggacctccgcatctttcgtgtctttttccaacaaaagcttttgtcgtggtctgacatttgataccaatgtgaaatgtgtgtatatatatatttctaagcctgtataatattgcatccaaagctgttacaacaagatgagtttattggaaaaagcaactgtacttacataagtgacagaagaagcatcaaagaatgaaatgaatgcacactaaattaatatctacaacatacatatctcatctaagtggtattcgtgttccctgaggggccatcacctccgaatgagaaggcctgatatcccgtggggctagtgagcttccctgagccactgctgctactaacagagcggtcaatctcttccctacaagccaccagagggattggccgttgaggtatggctataacagtgaactcattgctctccagcattttcaccacttgatccattgttggccttgcgtggagctgagggtgagagcacagcactgctatcagcacatacttctccagaacctctgggggtcccttctctggcatcccgtcttccaccacatccaatgtctggccttctcttaccagcgaccacgcccagtctgccaccgacacaggctgcccctcctcgtctgtcacaatcgcctttctcctgctcagaagctctagaagcaccaccccaaagctgtacacgtcgcttttctcagtcagttgcccgtacagtgcgtactctggagcaacgtatcccatagtgcctgcgacccgcgtgctcatatgagtcattccttcggggttgaacttggccagcccgaaatccgcaaccttggcctcaaacctctcgtccaagagaatgttgctggccttgatatccctgtggatgatggagggttgtgcgccgtagtgtagataagccagtcctctggccatgccaagggcgatcctctgcctaagaggccaggcaagctgagcctccaagtcgccaaagagatggtcatgaaggctaccgttactgacaagatcacagacaatgatcctctggtgaccttcatagggcgtggttgcagtacagtagcctctgagggcaaggagattgacgtggcggatgctggcgatgacctcgacctcatgagcgaagttggcgtcccctccagcagaacagttcttgaacctcttgaaggcaacctgggtgccgtcgggcagggcgcccttgaagacgttcccgtaacctccccggccaatgatgttgtggcgtgagaaattgttggtggctttcttgatctcgtcgaagctgaatttgacaagagtggtgctctcgctcatggaatcaagtctagactgcgtgccagcttctaaactagtatcccgaggcttgagaagcttgcttttcttcctccggcagtaccagaaccaagcggtgataaccagaacagaggcgacgagcaaaacagagaaagaagaaactagaactttgactttgttagcaccggagctagtgggagaagccaaatcgagctgaaacaagcatttggcggtgcctttgtcggtggggcccaaggaattggcgaaagcagcggcgtagatagagggaaaagaagcacagtcggagacattaccgagggatggaccggagagatagggctgaaacgcggagaggctctgagtgcaggaggcgcaaggggtattgctctcgagagaggtgttacagcgcatggcggtggtggcgagggaggagttagggataagggattcgaattgagacctggtggtgatgtccatgcacccctgcgaaatccacggcgtctggaaaccgcaggtggatcggacgtcaaagcgagggaggaaaccggcgacggaagactggagagcagcccagcaagaagcagcagactcaggtggcgggagaaaggaacccgtctgacggagatggtgagagtagaggaggcgtagcccttggaggaggtactggcaggtggtggcgccatcgggtttcggacgccggaacggttcaaggacggaaaagtccagaggacacgtggagttctgagcggcggagaaagaggtgaagacaaagaagacgacggcgattcgacggagaaacaacatctaattcgaagaaaattactaattgacaataaagacataacataacactctctctctctctctctttgtttcttacactcattgacccactagtaatattttggtcattagttaaatatatatatactcttaagtgtattattgattgtgttatttacttgatttacttgaaacggtcaaaacatgtcatgaacctaattgagtctcatccacgaagttgcacgagaactttcctttcactttttgtttcattttcatactattcaatcaatagtggtaatctggtgagagatgataatatttaaaattcttgattggatcctgaagaggtcttacctactcatgtttctgtttcgtatttaataacaagcctaattgcattatctaataaatccaaacgtgtcttagtcttatcatagctctgctgctcacaattactaatctacacgtgatggccgccggaacatgcgaagaaaagaatctgtgttaagtgtgtattctaagaaattctatattccaccgtttgacttcaaaccaacaaaaataaatggacatttcaaatgggccgagaaatgacgaaaaggcccaaatagaaccgaaagggccgaatcatcacccttgactttgagagagagcatctcaattgctcctcctagtctccatg

SEQ ID NO: 8344 - DNA, 3000 bp, Unknown
  misc_feature (1)..( 3000): cDNA_ID_3045090_gDNA_ID_1971751_Annot_ID_175319 3000 nt of promoter + ATG
tgtatggaccaaaactttgcaatggctagtcgaagctgattcatcactaaaccgtttttattatacaaggaactgacaccatcgaaactcttgcagatgttacccaggattgaagcatttggctccaatgatttccaattggtatgacaaactgaccacctcctaagagctctcatccttcttagaatgtaaaatctgatatatatctatttgcagaatcttattgcctccaagctgggagtccagaaaatcgctgggatcacggccttggacacaagagagaaaaaaacctacgaacttgttccagatatggaggtcagtgtactaaccttttttgtatatcttctgggttctaggtccctctctttagtgaaaacaggaaattggttcaccataatcgatattgttgttggcattatactgcagatatttgtagagacagactaagttataagacagcctccccgagtggtgttcttcctcgacaggttttgttattgcacctcctctgtgttgttaattgtttttgtttcttagtagaaaataatttggctcctttgtagaagaagaaaaaaactaaacggctttaacatatggactacgccgtttgtatcttgttgttacaaaccattaaacgttactgtttgatcaatatgttaattcagaactgtttggtttaaagcataagtattgaagtcgtcaaatgaacaacttgcaatcttttgctttgtatgagatacaaataaaatcgtggtccgtttataaaatagctttctccaaacaatttcaattcccttttaactaacacaacaaacgacccggcccgtcaaaagaagaccaacagacgatgaaataaaaggaaaaactcaattttctaaactatttttgggggtcgtaaataagtgaaaagcctgccgacgaaaaaagaagaagtgaaaaaagaagtgaaaagcccttgtcttatttgtcttttactatttttctgatttaaaataaagaaacaaacatttacagtatttgtttataacgggggctaagtagagaatcatgagaagattaaaatccctaaaagttttgggggaaagaagaaagaaggaagacgatgatgatgctcagaatccgaagcagagatggactggagagagtcacagcggagggagctcatatcactgtttcccagctcaaaaccttgatcgcggatcagcttcagatccctctccataagcagaccttatccaccaatcgtgatctcctcctcgccaaaactcccgctgatctactcgccttcaccgacctcacggacccaaacctccccctctcctctctcaacctcggccatggctctatgctctacctcgcctacgatggcgagcgctccattcctggagctcctcccgttactcctgccggatccttcgggaggaagatgaccgtcgatgacttgatcgcccgccagatgcgcgtcactcgtcaggagacgtctcactgcgactccgtctccttcgatcgcgatgccgccaacgctttccagcactacgtcaatgagtctctagcttttgccgtcaagcgcggcggctttatgtacggcaccgtcaccgaggaaggacaggtggaagttgatttcatttacgagccgccccagcaaggcacggaggctaatcttattctgatgagagatgctgatgaagagaagcgcgtggacgcaatcgccatgggcttggggatgaggagggtcggtttcatttttaaccagaccgtggtgcaggacaagactgaatacactctgtccaacgccgaggtgctacaggcggcggagcttcacgccgagagcgagctgaaggagtgggtcacggcggtggtgaagcttgaggtgaatgaggatggtggcgccgatgtccatttcgaggcgtttcaaatgagtgatatgtgcatcaggctgttcaaggaagagtggttcgagacggagattatgccggacgatgatccaaagctctctaagatgaagaaggaggtggttgttggtgtgaaggatcttaaggaggtagataacgatttcttcctcgttctcgtcaggatcttggatcaccaggttcgtgtttttctctctacccttcctttgcatcaatcatcattgttctttgtactaatgctctgcttgggcaaataaagtaattgaatctggagcttttaagtcttaggttaatgaagcttgtcagtgtttgctttccatgagataattgaaaattagcatttcgtcaatggtccctgtgttttaacattaggctgctgtgatcaggggcctctgtcatcaacattcccaatagagaaccggagcagtcgagcaacgatgcgggctctaaaaacacatctggaccgggcaaagagcttgccgttggtgaagaagatgtcagattttcatctgcttctctttgtggctcagtttctggacgtgtcatcggacgtccctgctttagccgagtgtgtgcgtctgcagtcgcctgtcccagagggctatgcgttgctcatcgaatcaatggccaacacttgttaatttttgtgtcattgttttttggttcttgatacagtatatcatgttcgttttatggtccagaaaatcttttttactagttgacaaatgaaaaatctctagtgtactcgtgatgtatttgattcaagtttgggggttaatttaagttatcaacaacttgtagaaacaaagttaattcacagagtaataaatcattctaataggtatgctcaggggcaaattggcaaaacataaaaataaaaagagagctactaaagttttcgagcgaaagcgaaaatgaaaattttataattcgagcgaaatgttaaaaagctgaaaattgggggaagaagagagaagagtttcatcgtcactggaatcaatagagtcaattggcgggagaggttagtctcgaaaagaagtggaagccctagggggaaactttctcgctcactcgctcgtctgcaaacacc

SEQ ID NO: 8345 - DNA, 3000 bp, Unknown
  misc_feature (1)..( 3000): cDNA_ID_1376179_gDNA_ID_1971751_Annot_ID_175312 3000 nt of promoter + ATG
tatctgtaagcaaggagataaatcacctggaacccaagacgttaagctcatatgagatatgtgctacaggatagttgccagatggaattctcgggctcacttgtttcaaactgagaagtctgcttgaacgggttctggtaacctgagttccaggattcgtcggctgagcgtcatagacagtgaacttggtccccagaaagttagatctgaaagaaagttaagataagagaaaggttatggcaaatatatgaaaaaaccatggggtcaatctgtagctaagtacctaagctttccgatataggtattgcttcctcgagagacatcatcgcagtttaaggagatgatgtagtcagtgcaagttggcctccgaaacctcttggcagcaagaaggaactttccatcatcatttgaagctgctgctggaccagaaaaagtaaacctttgagtgttattcagaaagagattaggtatgcaaagagaaaagaagaagcatctgttagtttcaccttggtttaacccgaggtatagatagtaggtttgattgctgcggtttctcataatatagcattgaacaagtgatcctctaggacccggctaaaaggaagtagggaaaaacgattagcctggataagcacacaagtcatttataaagtaaagagagaatgtgatgggatactcaacctgtttgagggagataggaaaagtgagtttgctagaaagctcaggaactctgacgatctctttgacgatttctcgccagttcctgcagacaccagcgcaagaaacaacatttttcctagacggccaagtgtcttcggattgctcaatcctcataagaacatctctcaggagctccggaggcatactagcccagcagctctgcttgaaagcatcaacaggaacagaagtatcctgaacaacacgttgagacctggatctaccatacccgaatctgacatcgaatccctttctggatatactcccaagctctcctctcatgtcctgaatgagactcttgaaggacatggctctgaattctaactaataacgaactagaagcagtctctatatatttcttggtaatgcacctaattcaaagttgcagactttttcaagaaccctaataaacccacattcggaacgaacgagatctcaacgaactaaaacacaagctcctccaaattattaaaaaaaaaaaacacgcttcttattacattcagatcaagagtactaacccaataggtacaagatccgattatagatagagatccggatacagagaataaatacctaagaaatcccaagcgaaattaaaaaggccgcatcgattcacaagttatacgagcttcacatcaataagaatccaggtggagcttgggaacagtacccaggtcccagattggggcatcgaaatcgacaaccaacactcgaaagcgaatgccttttacaacccacagaagaagaagcggtcagaggaaatagattttagggtttgacgggggagtgaatatgtatgtctgtctctgtgttatccaatcgcttccttccttgtctcatttttaattgttgtcagtcagtcattttattattttatcattattttcttcaaactaaatttggtaacaaagttttacatttcattctaattgaccgtattcttaccgatttatcttctgcctttttaattaagggatatatataaagaaagcttttcaattatagaaataaattaagctgccacatgataacgaaattaaagtgtgctttctatgtatttctctttctcgttgttatcttttgttttggtaatgtttctagaaatgttggaacttcaccgaaataaacatggtaactgactagattctaaaaaatcttgttcaaaattcatcatataaaatagacatctgaagataagaagacttacaaatagaatactttggtttaatggaaactttctttccgtttttcctctttttacgcaattgtatttgacaaaacaaaactaagcagagtaagctttttgttgccgtgatcacagcactttcgccgctttaatgggccaaaaggtgttttaacgttttactttatataattaagatgaaatcttccttctttggatataaataatgatttggacaactactgatttggtcaaaacgtaaacaaaaacaaacaaacaaaggaaaacgtcaaaaaaaaaaaaaggtgttatgagttataaaaaataacattattgggccgtaagaatcctttttttcgtctatatgggccgaattgaagtctaaatgggtctcgatcttaactatgcctacacagcataaagaagttaatcactacaacaaaatcatcatttggccttataatagatattcattctcaggcactctaagacactgtgaagtggatcttttgacgcttatgttcatcttactagattgcataggtgagctttttctctcaaatcatattatctttgccactgctatggtagagaccttggggacttatctttgccaaggaatgttccattgcatagctatttaaactttaaagtgagcagaattctcagtctttgagctacttacttacaaagcctctattgtgcaactcctttgacccggtacgaccttggaagacaaagaaggcctcactgcttgcaaggggcaatggcgaagaagaagatcagagacggtcaagcttgcagatgctcctgaaacacctcaccaacagtgaaggagattcgacaatgcctacatctacatgagaccgaggaggctgacttgagttgaaaacattccacattaaagaagagagctcttcatttttctgaacgattgaagaaatgcattctgcttaacatttgaaacctttacgacagacagcaaaatatatgtatttgtgcggtgaaggaaaaaaggataaaatggaaagaaatgaagaaaaggccaaaagaagaggataaaaagaagactaagacacaaagagagatagcgtctgtga

SEQ ID NO: 8346 - DNA, 3000 bp, Unknown
  misc_feature (1)..( 3000): cDNA_ID_2038801_gDNA_ID_1971751_Annot_ID_175295 3000 nt of promoter + ATG
ttacaagtagatataatctccccctcctgagaggagtgacagctgatgcatgattctcaaatcctgacaggaacgtaacaatccgaaacaaaaacaacgaagaagaaagaaagaaagaaaacatagtggaatcagaatccgatccctttctaacatcactcttccttttttgaaaaacttgtaaaagtttccaactttcctcttttcaacaagttgtaatttcttcgcttgttgcatgttgaaacacgttattctgcaattaacaaagataaatcacatagattttgcattataaaaagctcgttaatgtcactatcttctctgcacagatcacctttagtacttcccaaggtgacatccatggcaaagaactcatcatcacagagtagtagcaagaagaagcaagaaaacagagtgtgcgagaagatcttcagagcagtgactagtcctgtccgaaccgttcgtcgcatctccaccaaatcttcaccagcagaggctgttcgcgtcaaatttgcagagacatcggctaggcctagggcagccaaacccattacaaaggtggaaccggtgatcgctcgagtggatactacgatcaaaacggacgagaggttcaccgagtatataaagaaagcgaagctgaagataagggcgatgacgaatgtcggtgatatgatgaaggaggatgcgtgggagacaagtgatgaaacagatcagacacgtcatgatcatcttcaccaccatgtgcctatctctcacgtaggtagtagtggccggagatcatcagatcagttctctgagtacataaagaaggcaaagatgaagctcagttcctcttccaccattgctcgtgctaacccgactttcaagtgatggatttcgacaaattaatgatttgaataatcctctggcctgagagattgatatatatgtatatgttttgtggtgtgtgttgacaagtacggacatggatttgtcgttttaatgaaaactataatactagtgatcattttaataattttgttgttacatcggtagcgagtggtttcttttcttaagaatcattatatgggctgtgaatgggccgccaaagaagagtctgtttaagttgataaagatgataataaaatgataatgatgagaaagcttggaattataacgaaatgacatgcacgatcgttaaatccgttattaaacaataccccgatcggctctgattctgaaaatgggcggttttagtcgtacgtaacatgacgtcgtgacctgtactgaatattcattcattcattatgaagcgataactcttttttaatctgaagcccccttaaccaaaaaagggcagattcagttgagatttccttttcttaattaaatacgattgatttcctttgacaatttcttttctttctcggtttttctcctttcccagttaatatactgtctgtcgcagtatattttttcatatatgtttctactagctactgatttaatttttccaatggataacttattcgtttattcacaatataccataaatgagaggtgtttctgaagttgtgtcgataactcacaatttttgtttacgtccattataatacataaatggagaagtccctttccgacgatcaagagtcaagtttgactccagcagatgcataatatgcacaatagacaaaatcgatcgtatatttaaattaaaaacaaaaatgaatacgacgaatctcatgattggcccttatgcaatttaaattcaaattaagtaataaaactacattcatatgtcaactaaatctgacgttaccaaactggtttgaaaaggaagaaaaaaactcgaggacgcctagtgtttagactattttacaatttagcaaacgcagacaaattaatgttttgtttcctacattttattatgagcaatcgggaataatttggtttgataaatcaagtagtcgacatggtgtaagcgaggcactggacggtggcacgataggtgagtcatgatgactcaagaaggcctcacgttactcacagtggctggatcattttattatataattactctctgagttgtataaatcctaatctataattaacaaatgtatagtctatatataatttgtctgttcgttcactcagtatctatcgtcaatgcccttacaaaaggcaggcacaaaaattacgaacaaatcaatgacccctcagtgacagagagaccaatcaaaatcgctttatttatttatctggtgaactcattgtgctcttcatacataaaaaaaagagttttatatattgagaaaagaaaagtttactacctacacgtggaaaacgtagagggaagtcgactttatggatgattagaaaaaggtgtagaaaaattgcaacaggtcttgaatctttctttaattgagtaaaaaaaacgtaggaaaatgttttggaaccgtgaaaattacgaaagagagagaggcagtcatattatagcagattaggagacaataataaagatatatagagagaggcaaggccagttatggtagataattagttccaaaccatgcatctctgtaaccatggatggatggatggatgatacgaacgaaaacggcctagtagagaaaagaaagagatttttgtcttttccggcaagcgagaggactcttctcctgaggggcaatgtgggaagaagaaagctaaatgatatggccacaacagactcgatcgaaggacttgttctcctcactttcctccaacttaattttatttttttaagttatggtttagtcaataattacgatggagtcgagtcgagttgagtttgtccctcccccccccctacctatatttaaacatcatccatgcctagagctttttacttgtattattaattttgtggctaaaccaaaaccaaagaaacatttattattacaaattttagtatccaacaaagcattcaagcccttaaaccccccaaaacctcctccgatcccattctttcgttaactgatg

SEQ ID NO: 8347 - DNA, 3000 bp, Unknown
  misc_feature (1)..( 3000): cDNA_ID_2038951_gDNA_ID_1971751_Annot_ID_175298 3000 nt of promoter + ATG
tttcgcaggccctaattaagacattcaagaaaacaagaagaagcataagaagaggcctaaatgcccagagaattaaacaaatgggcctttaacaatattttaaacaacactgaacaatagatgagatctcaacttcgaaaagctaaagccttaatataaaaccaaacatcaatctctcgccgttaaggttacatctgtcgccgccgctgagaccgccacttaaggccgtctcctccgctctatccatatccaaaacagctataaagataaacttccagagcttggtgaaggagcagcaaccctagttttcaatccctaaaggtgaagtttttgttcttctttttctttgattctactcttttttcgtcacaatagcgcagtagcgatctgggttggcgtttttattgacggattttggtgggtttgggttcgtgttagattttactttcacagattcaggtatgtatttgatcttatttagctttggtaatactcaaaccaactagtatttgatcttaattaggtgacgttgatattttgtgtgttgtgggtcaatcatccactctaggttgatctgcgtctatgtttagtcctaattttgaagaatcattctaattgctgatgtttatttatgacaattttatgtcttacttcgaatttagctaagataataaatctagacgagtgcctttataaacagtttatgtatgaacaatgcttcgcttgtgggattgttgatttcactacatttgattaagaatgtacatactattacaaatgttatcgattaaaaacgtcattttcagatattagttctccagcgagttgacacaaaacccgattacgtttcatccggcgactcgctttgatattccatggattctcagttgaatccttccaagagacgcaagataaggttcgcgtctctcatcttttccccagttttttttcttattcgaatcacttaaggcttgagaaattagtggttagggtgtgtaaattgcgtttgatatagtgtcaggcacagatgcgttgcgtgctataagatgttcaatagacgagaacacctcgttgagcacatgaagatttcctaccactcacttcaccagcctcgctgtggggtttgcctcaagcactgtaaatccttcgaatccgtgagggaacaccttaacggtatgtttgtatttgtattcgttttccaccacacatcgtatgaatatggtggttgttgatgtttgtttgattccgtctttccaactatttcagttccagaccatctttccaaaggaaactgcaaagccattttcactaaacgaggctgtactctctgtcttcaaatctttgaggaggcctttgctctcgccgagcataaaaacaagtgtcacctctccccacctcgtcctcttgtaagttttgttgggaattatttagataatgtggactatatatgctctgccgcctccaatattcccgagtctattctttctgattattgaaatatcagcagttttccccttaaatgatctgattagtgctttattcatatcagggaacatctacccaaaggaatccttctagttcacttgctggttcacgtctcaaggctatggcacttgactgtgaaatggttggtggtggtgctgatgggactattgatcagtgcgcatcggtttgcctggttgacgatgacgagaatgtgatcttctccactcacgttcaaccactgctccctgtcaccgattacaggttctgcttgtggaccatttgtgcttgttttgttttataattcttccttttaaatctcaccccgcctcatgttcaggcacgagataactggattgactaaggaagatttgaaggatggtatgccacttgagcatgtacgagagagagttttttcgttcttgtgcggtggacagaatgatggggctggaaggcttcttcttgttggtcatgaccttaggcatgatatgagttgcttgaagcttgaataccctagccatttgttgaggtaactaactgacccgtttttgttgactctttgcttgaaatctaatgtaattgctatgcttcacctcagagacacagcaaaatacgtgccgttgatgaagacaaatcttgtaagccaatcgctcaagtacctcacaaagtcatatctcgggtaagttatgcttgggctttgatttgttgacattggattatgaaaacttggaacatgagatagaaactggttttgtttgtatgtgtagatacaagatccagtgcgggaagcacgaggtttacgaggactgtgtatctgcgatgagactgtacaagagaatgcgggatcaagagcatgtttgtagtggaaaggcagaagggaatggtctgaactcgcggaaacagagcgatctagagaagatgaatgcggaagagctgtaccaaaaatcaacgtcagagtaccggtgctggtgccttgaccgactcagcaatccatgaaatgaaatcccaatttctcttttaaaagaaagctccttctcttcctcccttaagtctctttttgttcgatgggaggattaagaagacttgttaagagcttttccggctagtttttggataatcaaatatgatatggcttcattcaacaacaactctccctttgggaactcgtataaaaagttactacttaagcttcaaatctgtgtaactaaaatggataaagtctgatgcatctgaggtcttggaatctgttgctcatagttgtggataccagcaacatcaaacattattacttgtttaccaaacccactctcagcttccatttcatcagtttgaagtcaagtggataaaaagactgtctacataactcaaatactgtagtattatattcacatataaatgagaaattgacatttcctctagaaaaagaaaagcaatcgtgtgagaagaaacaagtaaaaggctgaggaagaagacgactattagtccccgtcgaacttgtttctcccggtcgtccaacaa

SEQ ID NO: 8348 - DNA, 3000 bp, Unknown
  misc_feature (1)..( 3000): cDNA_ID_3024907_gDNA_ID_1971751_Annot_ID_175308 3000 nt of promoter + ATG
acgagatcgacaacgacccggactgccgtgagatcgagaaggctcttctccggctcggctgttccacggcggttccagctgtctttgtcggaggcaagcttgttggctccaccaatgaagtcatgtcccttcaccttagtggctctcttgtcccattgatcaaaccctatcagtccatcctttactagcaaaattaaaccaactcaatatataatatctaattattagctagtgagaataaacacagttacagctagagtgtgagctagctagatattcagtgaggacttcgtctgaattaatgtttatcgtttgtatgttctattgtttagcttctctcgtgtttcagtttagttaatcaactggtgtatgttgatgtatgactctctgtttatgctaatgaaaatagtattgaaacttttacattttttcccacacaattagtaacgatctcttgtgtatgttgagtaatttagggctttccatataataaggcaagaaaccgtttatacttgtctgtttttaacatggtatcagaaggaggctacacacaaaccattttcttatttagaaatattcacatacactgacagtagctagaataaaaatgtgaatggccaacacatgcatgaactcgtcttctaattatcaagatgtaatgtataagttggcttcatcattattagttagacctattgatagttaacattatatcgggcgatatacagatttagcctttgtgatgttgtgtttagagcgtacttttgaatcaaggataaatcagtgcccattagagtatatataaatcgaatgtgaaaaatattagatcagaatagacttaattagtctccaccatacaaatttggtaagaagaaaaacaatgataagataccagtggcctaatgcaactaaagcagtttgaggaagaggatggaagatctttcgcggtccaagtatatcatggctacacaaaatcactgctctttttgcgttcctttattcttgagtatcttcacgtttaatttactattattttctaatgaaaaattgtacacctttttatatatatgaactctttgttttttcgttagttgctcgtgtagtaaattaaacatatatgctcataatcaataaaaacatacaatgttagaagaaaaaaatacaattttttttactaacgaatcatatgaatagttgttttatatacggtacattaacgatcctctcatcagctttatagataacgaagcatattattctccttagttccgctttttatcacttgagattaaactctactcacaggtttaagcacgtaaattagttactaaataatggatttgacatttacgctttgcatgcttatatatgttacccataattatttccctttagttacttaaagttaccaaaatcaactacttcaagattctccaatcaaaagaagcgtgtaaaagcctctatagttatatagtagtatatagaccttgaagatttctttttgaagaaaatatgattatactgagttcaaaaggtcgaaaagaaataataaaggtagaatccctttacatgatgtgtggaacaacttttcttgacctccaacttcttgggatcgtgggaaatatataggagaatctaatcggaagttgtacagaacgtgtaagaactaagaaccatattcactttgttgtcattgttataagattcaagattctttgaccggcgcgtgaaaaaagcatccacctataggctcaagattcgtgtccaagaaaatatcgagaaccgatgattacttggaaagtggaccattttttaaaaaatcaaaaattaaaaaaggaacgtagctcatgcgaatagtttagtccaccaaagtgaaatggtagaacatttggtttcagtttagttgtgtgtatttttattaaaggcttcagaatcaatttcgatttttgaaaaatgagtttttatagccatgttagtatgttacgaggatggaaaagcaacctagctagattatcttgtgatatgtgttattgttcaagagaagtaggggcagtagttgtcgagatcatgttattagtgtcgctggaatgttagatattgcccatcctgtctctttttccccatcgtgccctaaaagtcaaactatgcatggtattagctaatcttgaataggtttaattcagtacggaaactctaattgaaaactaccttcatggagtaatagttatcgaggaacgatgatgaggtattagtggagataagcagatttggactcaatatcaaaaattaatggtgggatccatttccgtttcacctaatatacatagtggcaaacaaaaaacaaatataagaagaaaagattcagtatcgagcattctagctatgtcggtaacgtgacaaagtcctttttttcgtttgtctgtttctttaaagttaatcaaatcggccaacgctgcctcaacaacgagcttcctttttctaacgtccctaatttgccacgtccattttctggactagtcccggtttaaaaaatcttcagagatgtattcgtggtcaacttcattaactctttctcttgagcccttcattagttatgatcttatttactttttaaaaatctaaccaagtactgtatattatatatgtggtagccaaaatattatgttaaattctaggctaatccgatatatcaagaaaaatcaatatataaaaatggagagctatttttcacgagttaagtgagagagatgagtaaagaaaggcacgggaaggtgaagagagtgtaggtttccagcttcttccccaagaaataaaatgtatttgactttgtctaagcaaatatgtcgtcactttaacgtcattcattacctagaatgcaattaagatatggcttttacataagccaccaaatttggttttgttgccccaaaatatcccaagaaaagatcaacttcttcttcttaccaaaactgtcggcgtcgtctcctctaagctcctccc

SEQ ID NO: 8349 - DNA, 3000 bp, Unknown
  misc_feature (1)..( 3000): cDNA_ID_1836253_gDNA_ID_1971751_Annot_ID_175303 3000 nt of promoter + ATG
ggggcaatgcaaatttggtataacctgtaaatttcatcatcctcagcctgctggtactactgtcccaccaccaccagcatctgcacctcagttttatccatcggtgcagtcacttatgcctgaccagtatggaggtccatcttctagcttgagagttgcaagaactcttcttcctggttcttatatgcaaggcgcctatggtccaatgctattaacccccggggtcgttcctattccaggctggagtccttactcggtgacctttttttttattgatgtatcatcaatacatttgttattcaccacagtctcttactgtctcacttttgcttttgcttcaggcacctgtgagccctgctctatctcctggtgcgcagcacgctgttggggcaacttctttatatggagttacacagctcacttccaccactccttcgcttcccggggtttatccatctctgtcctctcctacaggtgttatacagaaagaacaggcctttccagagagacctggtgaaccagagtgccaatactatttgaaaacaggagattgtaagtttggaacatcttgtaagtttcatcatcctcgagatcgggttccaccaagagcgaattgcgtcctcagccccattggtcttcctctacgcccggtatgctctgtgttaatatgtcataaaggttgttgatcatagttataacatttctgtctctaaatccgttgtttatcttgggttgaaaacagggtgtgcaacggtgcactttctacgtacaaaacggcttctgtaagtttggatcaacatgtaagtttgatcatccaatgggaacgatcagatacaatccttctgcgtcctctctagctgatgcaccggtggctccttacccagtgagctctctcttgggtgctctggcagctgccccttcttcttcatcgacagagctcatagcaggcggtgcaaaagatgcttacatgaccggtgtgcctacatcaagaagcacatcaaacatctcggcaggtttgattttctcccagagcggtgggtcaattccattctcagagctgcaactctcgagccagagctctcttcctctaacaggtagcagaatcacaagacaagggcgtgaaattcgtcgatccttttgaatagatcacctcagaaaagggtacgcatacgcaggtcctctggatcaccttttagcaattcttaatctatatgactattattatatagaagcatgtgatgtgaatttatatatataatcttcgtaccttgagaagaagaaaaagcctatttgagtagaagacctgagtgagaatcacatatatctgagaggaaatctatatgtgcatataccaaaaaagataacaagaaaaggcttcttctttttttttttggaatttgtgtataatgtttgtatagagacagacaaggtttctttgtcttgtccgtacttctacttcagacccattccggctgagacacaaaaacaaaaaaaaaaaaactgagacaaagaactcaattctcctcttcttttagtctgccaattggtgtacttctcgtgtgttaaggtttgttcttattgtagatgaatgatgtgtgttgttaattttgttatgttactgcttcacacattacatgtgttatggtgatgaaacaacctacatttcaagactagttttgaaggttggcaccattatcttgaatatatttatttccttaaaaaaaatggttttgaaatgaagttgagcggaagcacactaatcctagaatcgatcaatagcatcgggaaagtggtacaaaaaaagagacgagagaaatgatggcctagaaacaagttttaaaacaatatggagaaggaagtaatctttagagaaaaccctacctgagaaaagaaactatcatgctcaatttaatatgcttcgccatcatttgctcttatttgccttccccacttgtctctctctctctacactcttacttttctttttgtcaaaagcccaaggaagaagatgaaatcaactaaacttggacatccggctttggatttggattttgtagagtgggaaattgtagtttgttgtgaaatctaacaacaaaatatttaccaaaatatagatttgcttaagtgagatatgtagtattttaatgaattgcgtattaataggttaggagtagtaaactttttgtttttcttgttaactcgtttgagctacttccggaattgaaaagaaaaagaagagagacatagaggtatgattacaacccccaaaagtaatgcaaccattcacatttcctgcagtatagttttcttttaaaaaaaatataaataacctggtgtaaaataaacaaagagaagacacgataagagacctttttaacttttcaccgaaaagcataagtaataaacagcacacttaattgactttttacgcatatatgcatacatatattgcttttcaattacaaaaatagaaaagtacagaacatttagcaaactacctctgtatatatattgatatcctgtaagaaaaatctaaatattattaatatcacctttgaaacaaaccaaaaaaagaaagaaagaaagaaagacatttgtatcacctgacgtgtgtgtggactgtgggctgagatcatgtactcatacaagcattctcagactacctatagcaagcgagattagtgtcctaattcccggagaataaagttatatatatatattcacctaattttttattagtatatgatatgcacataaagaactgtttatttttatgaagaaagtcataattccactttaatcctgcatgaattcatgtgtgtttttaactctcactccatggcacaatctttcatatttgaaaagcagacagagagagagagcatttgcagccgacagtaaggaacatttttgggagaaacacaaaaacatatttgcagtaacacaaaaagaggtttacaactttatttggggagaagagatagataataataagatcca

SEQ ID NO: 8350 - DNA, 3000 bp, Unknown
  misc_feature (1)..( 3000): cDNA_ID_3045117_gDNA_ID_1971751_Annot_ID_175292 3000 nt of promoter + ATG
cctctggtgatgctagctccggcgcccaagaggctagacgctggcactggagttttcttgccgtggacaccgccagtgtcaagaaaaccagccaagcatctcccgccgcgtgtccagaggctgcgtctcttgtcatcatcaaagtcagtggcagatagtgagtcatcgtcgccagagataggagtgagttgagttggaaagtgtcacacacggaagctctttctttttcctttactttttttttttaaagcagagtcttttggttgtacacttgagagtttagtgggtttttcttgtttcttcctaacattttgctttccttttatttggtcaattttatagaacgaagattagggtattatgctacatcatctactgttgttacatgattcactatttgtattaaaaatctttaggatatgccccaccacttgccattaatttcaaatatcttcagcttcaatcaagaaaagaggaaacttgattgatacaaatattcctgaaactgcttctcagttaaagtaaaagaggatgaagaaggaagcagagagattctggttttcttcttcttttattggataaaacgacacatagcttccactggctcaatttccccatctaacaaaagcgtagaatcaaagcaaacccgatataccactactcatttcttcatatacaccaaaaccactcctcaagcacaataatcctggagagaaaagaaaaatacctttctgtttctgcagtcttctttttgacagagaatgcacataagagaggatgatgacagcatcagctctctgcggcctcggggcatttgccgtcggctgtttcgatttgtggtggctaaactatggatattaggagacaaagagatgaatgaagataagcctgagaggaacaaactgatcaagaagggatcaatgtctgacatcactattcatttcaagcaattagaagactcggaggataacaattcccctgcctcgtcaagtccagaatcagagagagagacaatgattacactagttaatggtagtaacggcccaaagaagaggttacaggagaacggggaaaagagcatgctgggtgagcccagccctaagcaacaaatcactcagcctgaagcagggaaaccaccacagcctcatagacgcctggggcccctactaaatgatataaataagaaatcagatgcttttatcgaaagtacactcgagaagatgaggaaaggcttagcctagaactaaacacatgagcctccttcttctctcgctttctctgtcgaatagaagaaccaacagacactgggatgcaagaattatctatatactcaattcttttactttgtttaaatttaccagctgcattcttgataacaaaacgtatatgtactcccacttgtattttgaacaataattcatctcagaactttaagatttacaagaaatattccttaaggggctagttcatatatcattctagagcaatgttcacattcatttgccttaaacccacgtacctaacacgataagctgaatgaagtaccattctaaggaagaaaagacaaagaatcttcatgctctaatcccatcatgattcacgagtagtccctactctgttctttccagccatccaagctgaagtaagaggcaaaaagtgaaaaaaataatctgagcaagcacatataactatataagcgcccctcaataattaccattcgacataccttccaggcatacatagcaaagaaggcaaccgtgtcagcagaccagacaagagcaaatgatttccaaaagaagggaatagcaacattgagcaaggggacgatgagaaagaggtagttaagagcctctttctctttacttggacagtctcgtgcccgaagagaaggaatagctggaaagaaagtaaaggattaggggcaaaaatgcagccttggaataaataaagttagaagaaagtagagaaggagacatactgaacatccaaatggaccacatgcccatcaacctccataaatcaggttcgctggagggaaagaggaggttgaaagaaaggacacctccgaggaacatcgatgcatagccttgaacctcaaaaactttgtaaagagtagttccagggagagcagggtttttactggcggtggaagctctaggggcaaaggttgcagcagtcttgttaacaacctgcttgaattgaaaagtcataagcttgagcaactctttcaacaggttcaagcactagagaccaatctaacatggtgcattttcattttcatgtcttcctatggtttcaacagaaaaatcgtaaatgatatagaaaaaaggcggacctttttcaagtctttaccgagagcagaggatgaggaagggagaggagattccggcgggtcgtccttgggttctaatccgtcagaggtggcgaaaatacggaaggtggatcttcttctatggcgaaagccataagtgagagctatggaagaggagaccccatgggtgctgcagagagaccaactcattctctcctccaataatcgcgataaggaagaagaaacttgttggctttattgaaccggtccaattctcaaccgaactccggtattccaaattaaaagccagcaatcaataattgaatctcgagcccacgacggtttgattggtttagccatttctcggcgctaaatataatttattaaaatgatgattattgcgagaagaaaagatctttctttgatttttgcttgtggatttggatttccagtttccaattctctcaaatttgcaatccaccttcaaattcacacacatcttcaacagctaccttttcgggaacttgctagaattcgtgagaattggaaatttttatcctccgttttagtctccggcgggctgatttcgttggccttttggaagaaattgaggtcggagctagagaggggatctattgaattcgatgagaattgggatatggtgatcgttaagacaaaagtttccaatg

SEQ ID NO: 8351 - DNA, 3000 bp, Unknown
  misc_feature (1)..( 3000): cDNA_ID_3045295_gDNA_ID_1971772_Annot_ID_175380 3000 nt of promoter + ATG
ccagaaacccaagtttccggtttgtaaatcgtacatgtgaacaagcccatcctggaatacaagacaaagaggaatgagaaaatggttacatgatctaaccataagagtgttaacagaggaaaaaagattgcttgcagttttatagttaatgaaaaacaaaagctcaggcattagaaaggataggaagatcaaaagtacctgaccaccggtacctaaatgtcgaccacatggctcaatatcaaagaatacacgctgtttgtgttctcagttgctctgtacaatctgatcacacatataaatgatccatttcaaacacatgtcaacattataagagcttcaacatctaccatttctcaagctaagacttctattaacttgaacattgatgtaacgttaatcttaagctgctcatggctcattaagcattaatcttgtttacagcacttgttcttgcttctagattatattgtaaaacaagtatgagcttagaaaccaaagactacccaaaccaaaataaagaagtaaatactcacttatagactatttcaacagatttccgaatatcccagcaaagaatgtaaggatcctgaaaaagagcaaacaaaaaaagaaacatttttttggtgaggttaggacaattcatcatcctattacatatcatactctaatattggacaccaacgagaatatctctggacagacgatactttcctccaaaaagggttatccttaaaatggaagtcaagttgcgatataatatgctcaacattcagagggtaaaatgtttataacagtatgttactcttgcgacctcctgtatataaatagttcccatcctttgaaaactggacctaaaagcaccaaaaattcgatcaataattgatcatatcccaatggacaaaaattaaggcacatttagtggtcaatgcttacatgtgtaacaccgccttcttgaccatgtaaaacaatacaatagctccatgttgtcttctctataaatcccagtagtttgcccgtaagaccccacagccaacattccagaattagttggggagaaagcaagagtagataatatacctggaaattatgaaccagttaaggttgttcttgtttctgtataatctgtaataatattgttatgcagcgtctgagtggaaaagaaagaaaaaaacctgcttggccctctttgtttttctgtagagttgaatactgctctaaaatctcttctcaggacgatgaagatcaaacactctgatggagctgttgtaaccagcaaagatcctaaagacataacacaggcaaatgaacatagaccacttttaatcaattctttaccgtgtgggaagatggatacaacttagatgaagtttttgcttacttggttccatcaggattgaatccaactgaaaatgcagcagttatttcatccatagcatcatagagccggtatgtgcatcgaagctgacattgtgttattcacatgtaaataaacaaaaaaggatggtagaaaaaatctccagtaaacatgttaagtttcatggaaaaaatcagcacctcaccagaagtactatcccaaagatgtatcggatggtctctagtggaggtagcgaagacgcatgttaaagggtctgatatcaatcagtgaacagccaaaatcagtaattcaactgatgaaatcattaagccaaaaaattgaaccccttatgatgagcttatctattacctgaaactgacatgtatggataccaacagaaatcatagacagattcaccctcattcactagaagactcgcaccatacgaatctacaattccaataaacacaccatgaatcacaaaattacttcacacatattttacagcatttgccacaacatacaaatgctagatggaaaagctaaccttcttcagggactggcactccatagccattagaatcccctccatcttgtggcctgatggggcaaatttgcaaaactaaagattcaacagagaactaaaactacacaaacatacaaaattattgatacttaagctacaaaaatatttcaattgaaattattcaacttacagatgaaacagactaagtgtattatcttcagagcttgcaaaacatgaaccatcaggtgacctatataagaaacagtaacaaaatcagtacctcaaaagttaggcaaaaagaaaaaaccaaactttgagaaagaacaaaactctactcaagagattgatttgaaacaagaagaaaagggtaccacttaagacccttgaggaaattattagggtttcgagctgtcctgaactgcttagagaaatggtgcgttctataaggagagacatcaaatctcatagtaggccaggatgattttttgttctcctgattctaccttaagtccaccattttcttctgctactgcttcttcttcacccatcttcttcgtcagagcttctggaaaaaagcagcagagagaggtttactttcgttctaaaccccagtcaaaatctccaaaacctgaaccaggttttcaatctcagaccgacaaattgaaccgaacttaaaccaaaaaccgattagggattttgattggaatttggaagaaaagcccgccaggtttgtcattagtgcgtctctctcttctcccggcggatcggcgaatcccggcgaccaccgtcttctttcctttatccactctctacagctttcttctcaagtgtttctctctagttacttccttcctacagctttgctagatattgaaaattagaatattaacccctaatcccaaaaacctcggaatgtcggaaatgagcgagtgacgaggaagaaaatatcattcctttccagctccagttcgacaagcccataccttttcaggttttggttctactcctgctcaaagttcgtgtcttttttatgcttttaaggatttagatgtttatatatgttcaatttcattagattaagatagctgagtggaacccggagaaggatttactggcaatg

SEQ ID NO: 8352 - DNA, 3000 bp, Unknown
  misc_feature (1)..( 3000): cDNA_ID_3045275_gDNA_ID_1971772_Annot_ID_175386 3000 nt of promoter + ATG
tgtaaacttgggtttgatgataatgaattgttcatgttaaggactaataaaaacagagaagaaagtgtactaaaatcgaaatttgagctctccaattactaaatcggtgctaaatgaaccggtcggtcgtttctatatttgattcgttcggtttatcctttaaccggtcgaaccgaagcttcttttgttcgtatgaagaaaactaaaatccaaatctctctctggtacaccatgagaggagctctgttcagaaatgcatctctctgcgctcgcagaatcattctttcttctaggatctcccccaatgttccctttctcactccaatcgccgctccggctcctcccaaattcagatttttcagttccgaatccggtgagaactcgactactgccactgagtcttcgccgactgattcatccgataagaaggatctcgttgtagaggatgtcagcaacaaaggtaacagactctatcctctcttcaagcttgtttggttacctcacacttgaaatggccttgtattagttgaaatgtgtgagtctaattctcatctcgccatttctgaatgcctcacagttttcaattgatccttcgatataagattcgtagcttcttatctcctgaactactaggtaatcgtttgaaattgactttataatgttggattttgtggtctcagagcttaaaagccgtatagacaagtctttcaatgagggtaatgaagatgctttacctggagttattgaagcacttctacagagaagacttgtagacaaacacgcagagactgatgatgaattgatggaaaaaatcgagagtctacctttcaaagatgatgtcaaggatgaagattttgaatccgatttcgaagaagcgcattctactgacgaagaacttgaggattttgtacaactctcccgagtatgtagctgaaaagatgaggaagaaagaatttttcaacatggacgataacaagtgggatcacaatgattagagaaggtatccaacatggctgatcttaccgatactaaacaatgcgaggagattctcgaggatatgctcaaatgggaccagcttcttcctggtaatgctcttttatttttcaatcttcccgttcatcgactcacatccttagacatagattaggttgattaatagactattgtagcctcgttatagctaaacacactctcttagtggaacttatcttttgtagttaacctttctatttggattttaatgaatcatggtagtagaaccattcttcttttcttaactctttcaaggtaatgtactatgtcggatttgttgcttctcggatcagtagggctgtttagagaatatattggtttgttcctgttatgcgtatgtatgaacatcctctaactgtgtatcttcattcagatgacttgaagaaaaaagttgaagcaaagtttaatgagctcggggatatgtgtgaaagaggtgaaattgaggccgaagcagcttatgagcttttcaaaggaatttgaagatgagatggtaattcagtatggggatcagatggaagctgaagggtcctccccaatttggtgaaacagatacttctgacaggaatactgacttggatgatccctccggtaaaggcccaatcctcaggtggcaatcaaggatagtttttgctcctggaggtgatgcgtggcatccaaagaacaggaaagttaaaatgtctgttacagtgaaagagcttgggctctcaaatcatcaggctaaaaggctaagggaacttgtgggaaaaaagaataccattcagggaaagatgagcttacaatcacctgcgagaggtatataaactataaatcttaagcttttcgcgagacaagaatgttgaatcatgtaatgtttttgtcctgtcacaggtttgaacacgagaagaaaacaggaaagactgcttgagaactctttacgggttgatagaggaagctgggaaagccaacaagatcgctgaagacaataagaacttcatatgtaaaacagagactccgagccagtccagcttttatgcagaaactacaagccaagatcataaggtctaaagaatcaaatgccatcaacgcttgaaaaaaacttttcccggttcgcagcctttcttcttgtctcaccaaataatctgtggatcgtcttcttttggcaatcatttgatccggtacgggttttcagatcgatgaagaatctttgatggtaactcctattttagtttggtttgcttcttgtatctcatgaagacatgaaccttggctgtgctgttggtaactccatttgtcttcgtcgggaaactataaacagaacagtccgaccactttttcatgctaacttctagattcataatgcaatgttggtaaaaatagacaatgaatgaaactttttcatgtataaaaaatatggaaacttggggttgataatgaattgttcatgttaagactaaaataaaaaacagaagagggtgcttgtgtggttagtctcaattgttaaaatcaacaattaagttctccgattaggcgttgaattaaccggtcgcccgtttttaattttcatcgttcgattttcaacttaacctgtccaccagaaggtcccttttgtgcctaattttgatgaaatgtcgtcatttcgtcgttgaagctacaacacaaaatacaaaacgttgtagttagattgctgaatctctttgtaccggtcaaactcggtcataccgagtatcaatccgaatgatccggtaggaccgggattttaattaggaatccgaatctctaaattccagatgctaccttatacgtgtacgtcttctccgcccttcttattcatttctactctgctgcgttatttctccgtcgtcctcaactcatcgccggcgtttaccatccgctagatccgtcgcctctccggtcgactatttatatggaatcgtaaatttacagacactaataagaatagttttgacaaaatctgtagctggaataatg

SEQ ID NO: 8353 - DNA, 3000 bp, Unknown
  misc_feature (1)..( 3000): cDNA_ID_3045253_gDNA_ID_1971772_Annot_ID_175394 3000 nt of promoter + ATG
atatccaggtgaaaaaatggcgattcataaaatcagcgagctgtaaaggaaattcgggaactcacatcttcggattcaactggtgcattgagattatataactagagctagaggtaccaatcttgattcttgaccattggtaattaccctattcttctgggaaagattcagctgttgagtttcaaggagtcgtagaatgtaaaaatatatagaaataaagagacaatagctaagagaaagaaaaaaaaaagaattcatttaccattccgatgttgttggatgatataaagaagcattgatatcaaatttgatagtggataaatatcttgattatacaaaaagtctaattacatatgttggtttgttattgttgacaacctaatgatcatatatacacaacttagtacaaatattgacttgcttgggctcattttgttctaagaacaatcttaccttttgcatcgtcatgcataattggtagaactatctccggaggctgaaccctccagactttaggatcctgaaactgatgtcctaacttagccaatttatcagcgactcgatttccttctctgtaaacatggctcaacacgcagttgttcagctcaggcataaccactttgatgtaattcacatgcttatttgtcttttcacatctcaatctccccctcctcgagatgatatccattatgatcttggcatctccttcaagccatagatccgtcaacccgttctctagagccagctcgagccctcttttgagggctgcgaattctgccatggtgcttgtggcttcccctatggattctgagtacccaagaaggaactcggctttgtggtttctgaatacccctccaatgctggcttgtccttctcttcctctggatccgtcaaagtttagctttatccgtccattttcaggtttcttccacacaactttgacaggctgtttgtggtagtctcggattaacaaataaagtagcccgggtttgcagcaacccttggaatctagcaatctttgtgaaagctaacaatagggtttaatttttttggtaacagattttcttgtcgtaaaaaatggtcgactcaagatatttcttttggctctatagtcgtggtgttataccaagagtaggcaatattgtggaaggggtttgttagggaaatgatccttgcaaggaaagcaaagaatgatccttaattgaattgaaagggaaggcacatttgcagaatttagtaagcagtgttatatgaggaatgttttgaagaatgattctgttcaatggagattttaagtagaagaagttttaacgaagaaaatttaaataaacatgactacttttgtcttatccctaaaatactgaaggtctctcctcaacctcaggaggatctctctttctctctccctctctagaaacttgcaagcaaaagaaggaatgagaaacagagttacccacatttcccggaaacataataagttcttatacatgaagttattatttatgttggttctgtttacgaagcaagattcacaacatatcaaacaactaagaaatgattcaatatagagaacacttgtcatactgggccacttgtcataaaaagaaaaactgatgagtctttagtgtccaagaaacagatcgatcgatccccactaagacattgtctgatacttttttcccatacatcgtggatccattccctcttcgaccaaacttccacaggttcaaaccaaaccggaaatcacagagttcggtttacaactcaagaacctaaatttaaaaggatcctaaaaccagagacaaatagataagcaaaccgaaccgttgaccctgtcaaaaatacgtaagttcagcattaccgatccggttattatattattcgacccggtccgagattatttttgttcataaagtggaaccgtcctcactctatccctcagcttaatccgccgtcgttggttcaaacgacggtcgtattgatcttcgctgattggatctttataatccgtacaaactcccggagctcttggcctatcaatgtccgggattgatggagctatccaaaccagctgctctgttacgcacctctggaaccacggcgataagcaaaggcgtcgaattgactcatcacgggaacttcattactttgctgttatttccaagcaaagattgtgaaaaagtatgaatttcttcattatagtacatgcaggagttatgttttctgtgctgaaaaaaataacattttttcttggtttctggtttgcaaattgcaggtttctcgatttgaagaggtagctagtaaagttccaattgcatttctttgatgcattaacaaaagcattcagatttgaggtctcattcagcgagtaagatccaagacataaagatcttccacaatccgcacctcataagtataaattcaaatacagcaggagggatgtgaaaaaaaaaaggagtctctaggatgtccttaagtagtttatttcccattaatggaagattagttttagtttctagttggttaaagtttcagactttgagttcttatttggtcctggagagaaaaagaagtgagaaatataaacttattttaaatgttttcttgtaacttataacttcttatttcacacatccgttgatcctgattcgttgcaccaactcctaaatttttatattgaaatttttatatatcatcatgcaggacccaacaagcttacaatggctgtccacttgtgtctgtctgttactgaaatttataattgtttttgatcagcaacttgtgttctttcggctgtgagctagtttaaagaacacacggcttttttttaaggtcaaattaggtcgacatttaccatataaagactcatcacactggtgggtttctcatagattagagaaaaaaagcttcaagctttcatggaacatgtcagagttatcttcttctttgcttgtttcctaacgcttgctccatttcatgcctttgctcaggtagattcct

SEQ ID NO: 8354 - DNA, 3000 bp, Unknown
  misc_feature (1)..( 3000): cDNA_ID_3045245_gDNA_ID_1971772_Annot_ID_175396 3000 nt of promoter + ATG
gagattcaagagaaagaaaggtactaactacgttctttcttgatttcttagtttggttactgcatcataagatcttgttgatttacttctctttattatatgcagatgtttcaggagcatattgtggtaagaacaccgatacatcggttgttgttgctgatctgaccaagagcaaagaaactacttcagcgttttcaggatcagtagacataatgattgaagggaaagctgttaacacatccgagttacctgtcttttctctgaatgctatagccatagctactaatgatttctgcaaagaaaatgagcttggaagaggtggattcggaccagtctacaaggttggttgattactttggttatagacaagagtctttgtgtttaatttttgtgatttttttgttgatgattgtgatatttatcagggtgttctcgaagatggacgtgagatagctgtgaagagattgtctggtaaatcaggacaaggagttgatgaattcaagaatgagattattctcatagcgaagcttcaacatcggaatcttgtgagattacttggatgttgcttcgagggagaagagaaaatgcttgtttaatgagtatatgcctaacaagagcttggatttcttcctctttggtatgtttccttttttaaagatccaagaaagaataagcacttcctttcattcttcttagttttgctctttttgaatgtacagatgaaacgaaacaagcgttgatagactggaaactgcggttttcgataattgaagggattgcgagaggattgctttatcttcatagagattcaagattgagaatcattcatagagacttgaaggttagcaatgtgttgttagatgcagagatgaatccaaagatctcagattttggtatggcaaggatctttggtggtaaccaaaatgaagctaacacggttcgcgttgttggaacttagtaagaaaactgaatccaaaaaacagagcaaatgttttatttcaatgaatcatgttcttaagcaacttactttacatttgatatttgtatattgtagcggatacatgtcatcctgaatacgcgatggaaggacttttctcgagtgaaatccgatgtttacagcttcggtgtcttgttgctagagattgtaagtgggaagaggaacaaagtcttcgatcttctgaacatggaagtctcattggttatgtaagtttcccaaaaactaagagtaaaaactgttgttctctcttaatgagcatttgaaattttggtttggtttggtttataaatggtctaattagtggtggaaactgaatgcttgcaggcttggtatttgtatactcatgggagatcagaggagcttgtggatcctaagatcagggtcacatgcagtaagcgagaggccttgagatgcatacacgtagcgatgctatgtgttcaagattcggctgcggagagacccaacatggcttcagttttgcttatgttagagagtgacacagcgacgctcgctgctgcctagacaaccaacgtttacttccaccagaagaaactccattgatgtcaactttgctcttgattcgagccaacaatacatcgtttcttctaatgagatcacttcaacggttgttcttgagacgataagattcttttgtttgttcttttgtaaagtttttttttatataattgttgtgaaaacgtataatattttttggtataataatggagtaatggttgttgaaacttgaaattttgttcataaagtgaaacattacaaatgggttttattacagtatgatgttgatattttgaaaaaatcaccacactattctttttcaaaaatatcacaatggatcaatttacaagtataaacaaatgaaaacagataaaatatcaaaaagcatttatctgaaataaatcttcaaataaatcgtttatactataacaaaggtgtagtcttaaaatatttaggttagttttgaaatgaggatcataataattgttttcattctattaaatataggtgagttgtttcaaatattgtaggattattgtgtttaatttaattaaaatgtgattgatttttatgtatagagttattatatataaatcaaacgaggaacgaagaattatgaggatgttcaaaaataagacttttggagcgttgactatggtaattagtactgttttgatggtgaaaagagtattcggtcttcgtatttcatacttatataatatacctaaaaccgtgttaacataaattttcctctcctccaagctccaaagccaaaaatcgtcaaacaaaatagcataggacaacattatatttggtgatgaataattcaaatgtagactcattattaaattgaatggaatgatgaattatttagagttagagaaaaaaagaaaaagtcaggaaaacgtgaaacgacccctttcttttttgtcttcggagaatgcggaaataaattaaagtagggtttgtttgatgaatactaacattgaagttcttattgggaaggataaaaaaaaattgagttatttattacgaaaaagaacactgaaatttatataactctcgaagcaatgcatacaaaaggttgactgataataaaatacgaaaaaagcaatatattaagtaatttattaaaaaaaatggtcatcaataatatcatattttgaagaaaaattctgaatttatgaagtaaaaatgactattgaaaaggaaagaaagcctgacaaaaaaaaagaagaagaagactttttatttgctaggtcaactatgaattggactgtacacatagtacataactagatattttttccaaatgcgaacaagaagaccaagaaaagaaaaaaagcaaggtaatatattattgacagaaataaaatcggttacgtaaggttcacacattacacaaaaacatgtccgatatctccaatggaaataaactctcatacttttctcaagaaaggtgaaaacaaaaaacttggtttagagaa

SEQ ID NO: 8355 - DNA, 3000 bp, Unknown
  misc_feature (1)..( 3000): cDNA_ID_3045269_gDNA_ID_1971772_Annot_ID_175388 3000 nt of promoter + ATG
acaacatactagtaactagtacttgagtttccttagaacatacaccattcttacaatagttttgttattagatgttcccgttttgtgtataatttgattcttcttctatatggtcttgtattgtggaaaacgattattggggagcaaagaaacatacaccaaaaaaaatatgatcaaaatttttagtgtgtggaacctttcgaaaaccctacgatgttcaagtaagaaattgcaattatatgagatattatatatatatgcaattgttcttagtatttaggtgtttagaatatatactttagaccgttttaagatgtttgttaaaagttagtcttcttctaattagaaacatcttcttttgtttttatgaagtaagtgataagatatacatataatttacctcgaccaagtttgaatacttgctaggttaccatgtcatgtttaatcgtccacatgagatatctgtgtgactgtgtcttcggttcgatgtggctaattttctagaacatgttatcaaaagcaaacgtcgtcgtaattggctgatactgaggaaaatgcagtttggcaatgacaagaaccacacatatatacaatattgatatctattgaataattatacaatattaaattcctttgcattattcatttgtttcgtataaactaaaacctttgaactctaaatagttgaaaggagcagagtcagcagacaaggaccaaagatcccttcgaccacacatataaaacgatataatttgatacgaaatcgtaatggttgtgcagttgatgttgccacttaagatcacttacgtaagacttcatgcaaatataatttaatatacgtacctctttgaatttacgatgttagtttgattatatatatattggtcatttttttggtatttgctcgataatagagttgatgggaaaccttgataatattaaaaattatcatatgaattttggaggaaagacagcaacacactcgagaactctctggaaaattgcgttttcactttttttgttttccaggattagttgatctaaaatctataatatatattaataaatacaacctaataaacaaaaattatttatgtttcagttaatgtaacccattaatatagaagtaatctcgtaaatatggagttgattaaaaatatgtacttaatcaaattcatctatatatatatatatgtgtatatatatatatatatatatatatgaattatattacgtcaattatctagcttttaaaataaatttttttatcttagctcttattcaaaagtctttattccatcacaaggttatgttatcttttgtatttttattttattttatacaaggattccaagttccaacatttcaatttctaagtacatgcatatcttattaaatagtgatttaaatacacaaaaatatgaaataaattctaaacaaggtccactctataaaagaagaaaacccacaaattccaaagcccaaattaaaacaccaaaagagcccaaaatacaaactcattcttcaccactaaaatattccaaagcaaagcaacgaacataacggataagtgttatcctcatctagtcatcttcaccctctaactcaccgagaaagaaaagtaaagagagtttggtgtcactatgaacattgccattcataattaccgtcactcaaaattcatcgtaaatcctcacatagacaagacttttgcaaggactcgacaggcaagatcaaataatattacattcatgacaagtactcatggaagaagaagaacgatgggactttgtttggtaagagcaagtgccgagaccggagaagaagaatccgacgatcaaaacaagcctgagagaagaagtttcttgagcttagcagaagctggtctagtcgaaatctcaggccttggtgcacacgagaagtttctctgtcgactaacggtaaattaaatcataaatttatccctacatattataaaccctccaataccaaattttaattgcaatctattaataaatctcttacattgttttgaatattggtatggttaagataggaaatgaaacattaattttacataggaaattgaaaccatatgtagttgtgaaacaaaagaaaatcttataacacgtcctcaagaaatgaagtgtgattaacagtctaatagtaaacatatgtacattaagtaaataactggaatatcatttttcttagaagcatgtacattgatttatagatgtttcgtatgaacttcttcttatattttggaactggatttggcagatatcatcattgaatttgctaagagtgatatcagagcaagaaggatgttcaatagaagagttgaatgctggcaaaatatgtgattggttccttaaggacaagctgaagagagagcataacattgaatctgctgttcttcaatgggatgattcccgattttcctttttaaatatccttattttttacattcaagccacacaaaagtatgatcattaacaaggtgaatatgtatcgtaagtcttaattagtctattgtggtctgactaggaaaatataaaccttttgttaagtcctacaataaaacgtattcaacaattccaaatattatccatgactgaaatacataaagaaaaggtttaaattttatctagaaaccaggaaaaaagacaacagtaaacaaacaattaaaaaagaaaagactttgaaagaaaatccaaaagttgtagaagaaaagacttaaataaacacaaagagaatccaatacgctgtcgtttttgagcaaagtctctatcgacttttttccttccgttaatcaagccatcggatattaaataattacaaaattattttcagacaaaacacggacgcgaaatcaaccaattaaatccacttctctctcaccatctcacgtccgatctctcctctctgagctctcatcacgagtcaacccctttctccgtcgaaattcgcatgcttaaactctgagagaagaagatg

SEQ ID NO: 8356 - DNA, 3000 bp, Unknown
  misc_feature (1)..( 3000): cDNA_ID_3045279_gDNA_ID_1971772_Annot_ID_175385 3000 nt of promoter + ATG
cggttggcttgcaggaggttgaagatgcacagagaattcgtagtactgtcattgattcatttgagaaggcaagtttacctggactaaacgaacaagagagaaagagaatgctacattttgtagttgttggtggtggaccaacaggtgttgagtttgcttctgagcttcatgattttgttaacgaggatctagtcaaactatatcctaaagccaaaaacttagtgcagatcactcttctagaggctgcagaccacatcttgaccatgtgagattttcttactcttaaacttttgatctatatcgaagattagctcatgtcctatggtttgacaggtttgacaagagaatcacagagtttgctgaagaaaaatttactagagatggtattgatgtgaaattaggttctatggtggtcaaagtgaatgataaggaaatttctgcaaaaaccaaagcaggagaggtctcaactattccttatggaatgattgtttggtcaactggtattgggactcgtcctgtgatcaaagattttatgaaacaaattggtcaggtgagtagccaaaggtctaatgataatgctcatattttttcatagtgaacgagctttatcaactcggtctataagatgatttcttgtaaattccagggcaatagacgtgctttagcaaccgatgaatggcttcgtgttgaaggatgtgataatatatatgcacttggtgattgtgcaacaatcaaccagagaaaagtcatggtaaccaaattcagaacctagataaaaatgagctcgcttgtgtatagggtttctctgtttcttatactttggattgttatggcttttgtacaggaagacatagctgctatattcaagaaagcagataaggaaaaggaacactgacaatgaaagaatttcatgaagtaatgagtgacatatgtgatagataccctcaagtggagctctacttgaagagtaaaggtatgcatggcattaccgatcttctaaaacaagcacaagctgagaatggttccaacaagtctgtcgaactcgatatagaagaacttaaatcagctcttttgtcaagttgactcacaagtgaagctttctaccagcgacaggacaggtttgttctgtttttacttacttgaaagttttatcttcggtcacaaggtcacacactcacactcacacactttgtttgctttctcatcctttgtctggtggctttataaaggtcgctgctcaacaagggacttaccttgcaaaatgctttgatcgtatggaagtatgcgagaagaatcctgaaggtcccattaggattagaggagaaggtcgtcaccgcttccgtcccttcaggttggttcctagtatctgcatcttaggaggctttagtcacttttgagattgcatgttttgtgaatttctcaatactgattatatactttatagtaaggagacatgagacaatgaatatatatgttatacaggtatagacatttgggacaatttgctccattaggaggcgaacaaaccgcggcgcaacttccaggagactgggtttcgataggacacagcagtcaatggctgtggtactccgtttacgctaggtaacgttaaatgactaatgaaatacgaaatgtattcatatgatttttgtatttttttgtaactttttggttacaagtttttgtttttaataatacagtaagcaagtgagctggcgaacgagagtcctggtggtctcagactggatgagacgattcatcttcgggagggattcaagtcgcatttgaaaatctcatgtctctcttactctctcgtttgaattatcatggatagtcttattgctttttgttttttactttcaaataaaagcataacaacgggaagatgttaaacttcatttggttacttctgtttttggaattggtacgtgaaattgatatatttatattgctggagattggagtataatttcacaaagaatataatctactgcttttcttatagaataacgtttaacattacaagatatgtcgcctagctagtcagaaaaaaataaaaataatacaatgttagaacttttgttgtccttagattttgacaattaattccctttacatgatacagtatcaattatgggagaaagaaataggagaatcttctggcaacacgtaatacttaaattgttcatctttctattagtaaaactaaaaacaaaacctaacctaccaaaccactactctccttgacctcgactaaaatcgcaaacttacctataacttcttttctaggtaaaaggcaaccaaaaatattaattcaaatcaaccaccatacactcccgattcatatcgttaaattttttacacgttagcctgctagctaggatactaaaaataataagattactttatactaaggataaaaatgatctactattttttagagtgaatctaccaattaaaaagttttcaaaaataatgtatattgacttatgtgcctggattatttacccatttttgggtgggaatctaaagattttatttccaatttttctcaaatctctatgtattattttttaccacaaaaatgaattatcattttaagagaaaaaaagaagagaaacaacaattgacttcaaacattgttgtatataacatattccttcggttacatttcaagtgttgtttaagtgtcttacacatatataaagaaacaaacatagattgcgtaattttttttgtctttttttccattaaaacattcattcattatttagaaaaatatattcaaccaataacaaaacagtctgtctaatactaacagtcaacaaaaatatataaagtaataaaaattttaataggatagtttccctaaaacaacattaaaaaaatttaacaaaatggagtaacaacagttcatcaacttctcctctttttgtttatataaacacacattaacgattcataagccattgtctactaacaaaacagaaaaagactaaa

SEQ ID NO: 8357 - DNA, 3000 bp, Unknown
  misc_feature (1)..( 3000): cDNA_ID_1989457_gDNA_ID_1971781_Annot_ID_175405 3000 nt of promoter + ATG
ctatctggcagcttagttgcataaacccaccatggacatgtatggctgacgcacacagccgccacaacatttggcccggactttacgtaaatgaaatggaacttcctccggatcgcatgaatagcgagcttagttgaacaatcctctttattcttaaaaatgcggctgatgtaaatgtcacccccctcgtaatcagcatccttcagggctcgctgaagggcatctgcaagtcaatcaacgaatcaggcgttaacgatatgttaatgcattcgataatattattactagagagatatagaaagttgaagataaagttttcttttattaatgttgttatctgtcgctaacgataaacacatactcttctatatgtatgataatatatagatatacttttaacttcttgctttcctgacgataacaacagttgtagctatctaacaatatatttagcaagttgatttttttttttaccttccttcccttgatcgtcaaaatatggcggagcatctcggtcatacaagaccgtcgcaaccgctatatcctttacggtcattgcatttctctacatctccaatactcttgaggtattggagaccaatccaacaacttcactcggtaaggcattctctatcatgatatcttttcctttatccctcatggtgatgggttgaggattttcaatgagtgggccatcggcgtcagaataaaagtgggacagagtctcatcacctacattacgaaacacgttagtcgataaatgcgagtaacagtttaaaaacttatcagttaccaaacatgttatttgttaacaaacctatcaccgatacgctaaggctgtcggaagagtcagtatcatccattaggtcttcgctgcagaaagaaacgctcgttgatatcgaagttggcgtcccgaaggttgaatcacttgaagacaatgcgactatttgtggtccaacagcttgcgattctgcccctacaagggtcaaatgcaaattttcaatttcattgtcgtttgcatgatatgtacttccgaagtctagtgctctcgctgtcttctctttatcgcatccgtttgtttcactcggttgactcccttttagcgacatttctcttgaacacatttcacgcaacattgcttcttgttgatttgttctccacacctcgaataaacgatctttttctctctcatcgtcatctataaccttctctttgcctttcaaacttgtaattgcccctggttgtggtactttcgatggcgtctcgctagtctccgctgcaatctccgtgttttcccttatgatgacacctccatacgggttgtgttattcaatctctttacgtatgccgacgtcgttggtgtcccccatggttgctatatcttgtccgtctcctgaaatctaaatattattaacagatatccaacttatttgataacttaaatattatcattaacgtggttttgaggtttacccgagaggttacgcaacagcattctggttaacgcggtaccccatacagctcttgtttccgcacaattttagtatttatccgatatttctttcgaactcaaaccgcttagatccatgttactgcggtaactattaacgtttcgaacatttccacctcgtataatcttcactagcagatgcacttcatccagatatgccctaatagccacgaacagtgtcgtatcttcgtcatccaatatgtcaattgggttcgctcgtttccaatcaggaccgagcatccactgtggccactggtacgttaactcgatatcgtcatctggccctaacgctaatctatcttttcccgccataacaatcttcgcaaaactatctctctcacgcagtcggactccgaattcaaacccatctacatgcgagatgtgttcgaaaattccgttttcatctcttttccactccccaggtatcaatctcaccacgaacgccatttgtacctgaaatagtttcagaaataacaagttagttatcggtttctattataatcttgcaaaccctaaggtaaaaaaagtagcttccaaacatttaactatcagttacaaaatacttggatcttttacttttacgtctctgctttgaattttctgggttcctagcttttgcttgcattaaaattatcggaaatttaagttgttagtctgctagttttttgttggttgaagttagtacaacggtaataaataggataacccaatgtatatggctgatattcccgcaactcgaaatatatttgtaatgatcacaatattttcccccaatatattttatgtttccaaaatcggcgagtgaatcttcgtaaatctctacggcgttaaatgcttaaacagctacgctacaattagttatcgtttactccgggttatagggatatttttggtacaaaaatatgtcacacaagagagaagctaatttctaacttatcatgcttacttcttttattttcggttcgactgagcatagaaattaaaatagctttaaagtaatcatgataacttacatcattcatcattacttttttttaattctcttttataatatacatatatatatttttttttttttgaaaattctcctccactatacctaatattaaaaaaatcttaccaacaattaatatttttatacattttattgtttacgggaaaactgttgaaatgttttattcttaaaaaatccacgtcagcagtcaaaggtcaaaaactaaaatacatttaggtcataaatgcatttgaatctaacccaaaaaaaaaaaaagagatctcctcttactgcttcgaattcgatcgttactagaaactgcgaccacgacattggtcgtggcctcgttggggaagaagtagtcaaagtcacccgcatcgattgggacacgttcttcttcatcaacctaatcgaatcttttatcctctcttcgatcccaacatcgataaattattattaccatttgcggcgttgttgagtgatctccgcgactatg

SEQ ID NO: 8358 - DNA, 34 bp, Unknown
  misc_feature (1)..( 34): cDNA_ID_3089068_gDNA_ID_1971781_Annot_ID_175423 3000 nt of promoter + ATG
cttgctggatattcggaatatgttggaaaaaatg

SEQ ID NO: 8359 - DNA, 3000 bp, Unknown
  misc_feature (1)..( 3000): cDNA_ID_3089091_gDNA_ID_1971781_Annot_ID_175410 3000 nt of promoter + ATG
aaaactattttagttgcgtaaacaaagttaatatatgagaaccatatttaaccaaattcatgttagcttcttatgcatgtaattgttattaattaattgatgaagcaaacaatgaattagtgatatgattatggagaattatataattttcgtgaatgacgatgtaagaattaaagataatgatctatgcatatacatggttatatataaaatttgagttatattgttttttttagtaggataagatgagaacaatttgaattataatggtgaggcagaggttcaatatttatttgattataaagaagctaacatttgcaaatacaataaacaaataacaaaatctaactctttgactatttaattgattagaaagaacactaaaaattaaaatcatataatttaaatgtaggattatatatcggtaaatatatagtcacaatattttataaacataaattatcatgcagtgtattcagggctggtccgacatgtttaaatgccttacgcaaataaaaacaaattatgccatataatattttttttacaaaataacaaatgatatatagtaatatatgaaggtcctactaaaattgtagagagatttgcaaaagttcaatttttctactaccttttgcaataataccctttctttttgaccatttttaaaaatatccttttatttgaacaaaatgaccaaattacctatcatctaatgagaacatgtaatttgaaactgaaattttcccgcaaaaaaaagaatgagaattttttttcgaatttattttggcggaaaaattatatttggaatattttaggtgggaaaaatcaatagttcactttgtaaacctaaaacattttcaaaatagggataacatgttcattaaaagttaaaagagggtataaatgaaaatggtcaagaggaagaggcataattaaaacaggacagtcttgaaagagcattcttattaatttctcaaaattctatacaacatattttaatttcataaaaagtctatgagtaaaaacattagtttttaaatatagctctattttagatttttgcctgcaaaatcattgatcagactcatgtaatcgagcttttcaactataatttttttaatggatagcaaagccaacacatttacttgattaattattttttattttaaatcaaaatctaggcaccataccttacaatgtcttctatttgcaagcaatttaatgtttaacttttagaaaacacaatatatcactaaactatatccattaacaatatatttaattaacttttttattaatttaaaggcttaaattccacaaaatatggtgaaaagaaagctcaacaaaaaataaatttattgtaaagacctataatatttttattaaaatataaaagacttaaaagaaattctaaaatatacttttttttttgatgtcctaaaccatgacttcactaaatgaagttgatttgctgacggtgcaaaaaaggaaccatggctctttaacaactggtttgttgctactcatagatgggaggctgctcctattttgacttttgtcactactattgatctttgggtgcagattcgtggagttcctcttctatatgtgtgtgaagagactactttggagatagctcaagaattgggagagatcatcatgatggattatcatgatgctacctcaactcaaatagtctatattagagtaagggttcgttttggtatcactcacaaactcagatttttccagaggatcatctttgaatatggtgaaactgcaatcataagattccagtatgaacgtctcaagcgaatatgtagcatgtgtttctggtttactcagagactattgtccctatcgtcagtgtcctcacaacatagcaagagaaagggctctcttccgagatagtgttttcagatcaagtttgaattctcagtctcatatgacttagactttgtttccagctcccttgacaccgcctccaagagtagctcctcctccgctgaatcatgaagaattggcggctgcaattccatattttgccacaacaagagatgctcataacatatatggtgggagtctagtactacaagacaacaagggtcatcaaactctaacaacactccaccacgagaagcggcaaacttatctggtagtagcagagtctatgaagttggtcaatcatcaagaaggaatgaagctggagaagtacgaagagctgtaggggatccacgacttcagactcatcaacaaggtgctccaaggatgggaggaattctgaaacctccgaagaaaagataatcactctaaaaagaattatgtcataactttttgtttaaagactgcagtggaacaagtatcgtagcttcaaggcttgaataacaacacatagtttcagtatggtttttgtttaggacatacccttggcttggttatgtttgatgtttggtgtttcagtttaaatttctactaaacaatgttttttgttctgtttaccttaatcttgtaagtggaaagtccactgttacactttttgtaagatcacagtggtatgaaaaacaacttttcaggaaaaaagaccatgactttacttaaattttaattgttttataatttaaaaattaaatatattgctaattaccatttacccactcccgttcaagttctctttctttttgacacttattttttctacaccaaccagttagccacccaggttcataggcgaagcatcatgaaatttgatttaaaccattaaaccggtaattgcaaaactttccggtttagttctttcttacagaccaaaaacaaatcaattaaccgtaattgcaaaccaatccggttaaaatccaaaaacaacaccaccctcttcgaaaatcgttgagagtcctttttcacttcttcagatttctagggttcgctcaaacaaacgaagagaaactcaaattctgtaatctatagattttggaaatttccagatcggaaccctaaacg

SEQ ID NO: 8360 - DNA, 3000 bp, Unknown
  misc_feature (1)..( 3000): cDNA_ID_3089088_gDNA_ID_1971781_Annot_ID_175412 3000 nt of promoter + ATG
cccctcaagcgaattggagatagttcgtccaaggaagagtgatcatgtgaaaatccttgggggttcataccttgggcttacatgtaagctgatcggaatcgacgggttggatgctattgttaagatagatggtaatcttgacgtcaagattctggacctggccttattagccaagtttgtgcaaccatgatagttttaatgaaagtttagtttcatcttgtgagaccgtctattataatttcaaatttctctacatttgtatttgttttctacatttttagtttagcatgttggtcccctcccttgcaagatccccttactttttttccaacctattatgaataactattgatgctagatttatcaagtgaattaaagattcactatatgaccaaaacaagaacggctttcgctagtttatttgaagccattgaacaagacatatggtgtaaaaagaaaagatcgcgttggctacattgttcaatgacttcttctctttgacactcatgtatattctcattcactccatcgttcatcaaaagtttcagggtttttgaaatatgtgaataagcattctcttgaaatatgtgattctattgattttctcttccatctccccttgtttctctttaatatgatgtagtgagtttgcatcaatgtaagattgtttgttctgttatacaaacacaacaattaggggtgtcaaaatgagttgttagctcatgagctggctcagctcgacttgattatttatgagctcgagttttatttttaaaagatcatttaataaatgagtttaatgattgagttttatttagctcgagagttatacgagctagctcatgagtttggttttttttctgaagtaatatatacaaaaagttaacaataaaaaaaaatatatattttttctattaaaaagagaaatatattttagaaaatatataatttacagaataatattagaaaatatataatttatttatttgcattagctaacgagctagctcatttagcttgcgatcaagatgatctgagtctaaatttgtattttaaaacttatataataaatgagctgagcatagctccctttttctccgcgctcatcatgaattgagctaaggtgagcgaacaggctcattttgacacccctaaccacaatatgattattgtttcaatatttttagatattttcaacagatgtatgagcagggccggccttgacattttgtgggccaaagcccaaaacaaaattaaagttaatttagaagttttaaaaatttggggccaattattggaaaaatgaataaaataagggttgttttgtaaataagttttgctgaataaaaatggaggccacagcagatgtttcattttgttgtgtccacggccagccctgtgtatgagaatggtaaatcttgaataactaggaagattagagaggccattgatatgggtgtcatccggaatgtttcgcttagtcttttgccttttcacaacctccagaattttttactctaaaagataaacaaaaccagaaagttcaatattaaattgtttaattagctatattagtatcagattttgtctaaagaaaaagcagaaaagaatatgtctttgctaaactacccttgaaatttggacttccatttttttagaacatgtacaaaatgaagaatacaaactctaatattcgtaaaactctaagaaatgtattcttaatattttaaacgaggttttatcttttaaaaatttactttttcaaattaaattacaaattgtttccttcaaatcacccacattcttttaaatcacaaattgttttcttctatttcctcctttttaaatttgcttagagaagagtcaaaaattatgtaggggtatttacggcaaaaatgacaattcataataaaaatgtatatgagcaaacttttttttttttttccagttttcccatttaaatttggatacacatgtcctatattgtattgtgtatctttttttcttttcttattgaataaatttgccaaatggaaataagagtaaaattgaataaaaaattaggtcattacaaagatgtgacattgttttaaaatattgtccaaatcttgtttttaattacaaatttactcttactttaactactgtatattgggaaatatttgttttgagtgacgtgatattccgttatatgtaaaacctaaggttaagaaaaacaaaaaaaactttcgagcaccatttacgaggtctcaaatatgaaagtagatttcactctttggtccttgtttctctttttgcaagcattttgtaacctcacataacattctcaactaggtgaccactatcgctttctctctgcgattctttttctggtggtcagagatccttttaacacttatccgcaagttttatcgctccgtcggtccttcattccggtgagatttttattcttcctccgccgtttgactttgtcgtcagtgagatccatctccggaacttggcagtacagagatttgctgatgacctctcccctgtctcactttgcggtgaagacatttgtgaagagtccacttaatcgtcttgctatgtcgacaatcccaaacaaacagatccttgctaaatcagatcattattcgctgcctaaccatcttcgcggatgagaaactagggtttcctggttgggtcaagatttgagcatgtagcaagatgggcctggtgaatttaaagaccaaacaatcaatttattttgtaacccactcgccaacgttgttaaggcctgtttttcttaaaagtgataacccatgtcatttcttcctttcacgcttctagttcatcaatggatgttgaggctgtgatatcgtatttgatgaagcttcaaagaagttctgaaatgtgatggtgctaatcaagatgtacttccactctatttcgaccagcactcatgtgataagcacataaccagagtaaaccggtgtcatagaaaagagatgtggtctcgtg

SEQ ID NO: 8361 - DNA, 3000 bp, Unknown
  misc_feature (1)..( 3000): cDNA_ID_3089084_gDNA_ID_1971781_Annot_ID_175414 3000 nt of promoter + ATG
tccatatgtctacaagtctccgccttatgtctatagttcaccaccaccatatgcctatagtccaccaccgtctccatacgtctacaagtctccaccttacgtctatagttcaccaccaccatacgcctacagtccaccaccgtctccatacgtctacaagtctccaccttacgtctatagttcaccaccaccatatgcctacagtccaccaccgtctccatacgtctacaagtctccaccttacgtctatagttcaccaccaccatacgcctacagtccaccaccgtctccatacgtctacaagtctccaccttacgtctatagttctccaccaccatacacctacagcccaccaccatacgcctatagtcccccacctccatgtccagatgtttacaagcctccaccttatgtctacagttctccaccaccatacgtctacaatcccccaccatcatctcctccgccatctccaagctatagttatagctctccccctcctccaatatactaacaaatatataaatgatgaacaattatagtttcatatatcagccatcatattcatgaaataaaacttcttatctaaattatcatatgtgtaagaattgaaatgtatatctttggttacaaaccaggtgcatttttttgttgtttgattgcttcgtttgatgttgtttaactctttaattaagagatcgatgtgcttgtcctccatttttattgtctaataaactcaataaattttattgaaatatatagtatgaaaatatattaaaattatgtaatcataaagaagcaatttgtttttttcaattatagttaaatgaagaagttcttcatttagttaaatgaagaagaacagaagaacagtgaacgaaacatttttggaaatttgttataaaattaaaaaaaaaaatacctgaacatccatatttaaaattacaagatgtaatataatggagtatcaaaatttaaattgacaatttcaaagtttcatactcaaatgtaagacatattcataaactacatgtcgtataatggatgctatttaaacagcttctattctatcacaatccattcaaacataaatctgttgaaaagtaataacaacacacaaaagctgaaactatagttttattcgacgtggcaaatcctattaatttcatacaagagctgatctacttgtgaattggtcttggctgttacaagtgcccagaaaagatataaacgttgcaagaaaaagcacaacattgaaaactatagagatatacttctacgttctcacaagagataaacgttcaaaggattttaactggaaataagattcaaagtttctttataaactatagagaattttaagattataagacaaaatttatacggtctcacaagatatacttttcgttcattcgaacagtatcatggttgaacaaacttggctaataggtctaggtcatgaatcttaacgtcaagattgttgagctttccgagcccaatccaactctttctatatagttgtttttagccttcttgccaaaaggttttctactaatcggagttagatttgacttatatatcaaaagcaattattttctaatcttcccatgttagacgttgctctgtctcccaagaatcctccacttaacccaaggaccatgaatctttagcctcccctctagcgaaaccttggcacccgggaaccagcactccttattcgcgaggtctccttgagacacccttccgatcgtgtcacattgagggctcctcccacaacaaacatgcagcccaagctcaccttcataggtccacctttttgacctaggctttgatatgtaaaaattaaaatggaaatgaggtcaaagcatgcatggattcgtttgtatttcgaaagttaatggtgtgttggctgcgatgacatctaccaagatttatcccaagaatttgtttgatctccttgtttttaacttttttttgccaaggaatcatatttataggtttaacatatgttgtaaaaccaaactttttatatttctgatatttacatgcgtaacaaaaaaataaaatattaacagaccaattaattctcgtactcacattttgtagttagcattacaatatcataaataagatagatgagactcaaaattgttatgtttggtttataagcgattatcagaacttgcatgtgacgtcaaaaaaataaaagaagtgatataaaaaatacagagatcaatcaggtaatcttaattatgtatcattaagtggatggtcaaatattgaatcaacttgctgattctcttgtgtcgtggaaatcaaagaaacttgatggtctcaacgtgtctctgtccaagctatggttgctgcgttgaaaaagttgcagtgggttgagagtgtgttgggcacactgaatattatatatcacatatgcaatttatggacttatatttctagggtctgcctaaactatttctatgcctcaagcaaaacaataatatttttagcctattaacaaacaaaactctatgaaacaaatccaaaaaaagataacataaattgtaaaggagaagcttcagtcaacgacaacagagattgggtcaaaccctctgctcagctcagagtctcccaaacaaaatgctatgggccaagacaccaagcccaacaccattcaacataacgaaaagcccaacaacagaagattgcctctgcaactcacaaacgacaaagagaacagagttgcaggcgtgaaggagagagccgttgcaaaagcaacaatgctgagctgtgaaaccgtaccgaaggtagagacaaagaacagatatgacgctcttaacctcctgtgctcaaacgacatgtgttaaggcacctagggtttatgagaggttttgagttgtataaataagagagacaatcgcttgtaatcaactaagagagaagagcttaataaagttataatatttctccttcattctaagtttcttacatggtatcagagccatg

SEQ ID NO: 8362 - DNA, 3000 bp, Unknown
  misc_feature (1)..( 3000): cDNA_ID_2176755_gDNA_ID_1971781_Annot_ID_175406 3000 nt of promoter + ATG
taagtcgagagacgaaaggaactaatgttttgtggtgttgtgaacagcagaacacgagcacgttttacactcaagagccagaaatgggaggaggccagggaataccatctcagttctcaatgcctgtaaaccctgatttgatgagcatgttcatgaacatggcgggaaacacattcccgggaaatcattctcgcaataacgagggaggagcaggtggagatggtaccagaaatggtgcagatgagcctgagatacatgtaggcggaaatatcaacatagatctcggaggcacagagcaaatgccggaagatttatcgggtgcattacgatcaatgatgcagatgtttggaggatcaatgggaggcactggtaacaataatcctcaagattctaatggtgcacaaggaagaccatctgggaattaaccttggaatcattgttttattggtttttgagtttgtgccacaaaaactttgttaggttttgaattttaacgtgtagtgaaagtaacatgttattataaaatgatgatggaagactaatggcttcttgttgataaaatgttttacattacacttgaaatacagtatttgaattgttgtacacagcttttcgacaataaaattggtaaacaccaattatgaatttgagcaagaaacataaggcaaattgttgttactactatacaactgaaaagccaaaccaaccttatcaaaacagtaccaagccgataacaaacacttcatcgaagatctaaatccgaaactccgaagaagatttagaatatcggcgggtatatacagtagtagaagaagcactcacagcaaagcgaccgcagaagaaggttgaagcgagcggattctgatatcgtacttcgtaacactaccaatcctaggcgatgtcggatccgagttttgtgtaacaagtgcatactcaggagccttctcctgagaagcattgccgatataattattacatttgcgacatagaagcttcgttctgtgtcgaaacaaaccccaagagtatctagagaagtgaggcatgcattggaactcatcgacctgactgaatcttccctcgtcgatgttgaagaaagatatgatcccactcttcatggatttaccgtactttgatccgattgtcgatgtgattcgattcgtggagctcaggtttagttcatacccacaagatccacaactacaagaaagttcaaaagatatttgttcagtctaagttattatctaaaaagaacacaacaccaacaaactaaagatcaatcaacataacaatcctttatctaagtaacaaaactaatctaagtaacaaaacgagctctatgacaagacaagactacaaattagtcatcgaattatagacaagacaagacaacaactaagtataatcatcacctaccaattcacataacaataatcatcatcatcatcaacaaattaacaaattcatgattcacatgtgccttattaaaatgatgaaccaagctaaatacacaattactccaaaatcaactatcaaaaccctaaataaaaaaaacctagactacctttgagattcaatacaacaatcaaatcaaattgattactaattccttattcacatgattactctgcttccaaattagtcaccgaatgatgaaccaaactaaataaagaacaaagatttatcttttcacagttacacagaaacaagggttctgtctcaatacagatttttactaaattcagaaaaaaaaacaagaaccattagcttcattttcttactacaattactaaaataagaaccctaagccacaagattcagtaaattgacgtgtaagcaaaagatacctgtaattaacatgtctcatggaagaagaagaagaagaagaagagaaagatggcgaatagaattggttgccaccaaaacggccgtcgttaacacccaccgacgctgatctctccatagtcgcggagatcactcaacaacgccgcaaatggtaataataatttatcgatgttgggatcgaagagaggataaaagattcgattaggttgatgaagaagaacgtgtcccaatcgatgcgggtgactttgactacttcttccccaacgaggccacgaccaatgtcgtggtcgcagtttctagtaacgatcgaattcgaagcagtaagaggagatctctttttttttttttgggttagattcaaatgcatttatgacctaaatgtattttagtttttgacctttgactgctgacgtggattttttaagaataaaacatttcaacagttttcccgtaaacaataaaatgtataaaaatattaattgttggtaagatttttttaatattaggtatagtggaggagaattttcaaaaaaaaaaaaatatatatatgtatattataaaagagaattaaaaaaaagtaatgatgaatgatgtaagttatcatgattactttaaagctattttaatttctatgctcagtcgaaccgaaaataaaagaagtaagcatgataagttagaaattagcttctctcttgtgtgacatatttttgtaccaaaaatatccctataacccggagtaaacgataactaattgtagcgtagctgtttaagcatttaacgccgtagagatttacgaagattcactcgccgattttggaaacataaaatatattgggggaaaatattgtgatcattacaaatatatttcgagttgcgggaatatcagccatatacattgggttatcctatttattaccgttgtactaacttcaaccaacaaaaaactagcagactaacaacttaaatttccgataattttaatgcaagcaaaagctaggaacccagaaaattcaaagcagagacgtaaaagtaaaagatccaagtattttgtaactgatagttaaatgtttggaagctactttttttaccttagggtttgcaagattataatagaaaccgataactaacttgttatttctgaaactatttcaggtacaa

SEQ ID NO: 8363 - DNA, 1123 bp, Unknown
  misc_feature (1)..( 1123): cDNA_ID_1989414_gDNA_ID_1971785_Annot_ID_57977 3000 nt of promoter + ATG
gaattcgaggtggccaccgggaagagcgaaagtggagttgccgattgaggaacggcggcgacctaataagattgagtttccgttgagaatgaaaacgacgacggcgactcttggtatcgcttctcctgtcgacattattatcgaacacagtgaaaccctttcttgtcgtgttttagttttgttgacttaatttgagtttaaaacgatgtcgtatcggttatgcgtttatatacgtgttggcaaatgtgtcgccgtgtcggtgtgattggctgtacacaattatcgctgtttctttttccattgcacttgttttcattttatttattaaaaaatttagatgatattatataatatatgttctttatgatgttgccataacgagaacgattatgtaaaaaataacatatacatatacttttctgtttataaatgattatttttttagaaaaaatttatttctaaaatattgatttttttaagttttttatgcaatatttattggttagtattgatgaattgtaattaaaaaaaaaaaattaattatcattgttttttgagttatagaaaactgtaaaacataaaaaataatgtatttataatcaacatttattatgttttcttaaaaaatagaaggagtagtcatttgttagatagtaagacttagccaaattatatgtcatttactgtactttagtttttttttccgatcataagaatgtatgttaaaataacaatcaccaaagaggcacaaaataaattgtaggtccaaagataaaacagagttagttaaaaccagttactcctttcgtagaatttttacccaaaaaaagaaaaaaaaaaatcgtagaatttccttctcttttcttcttaattataatatatcaactgtttgttttgttgtttagtttggaaaggaagaaaattagcttaagaaataagaatatatttttttggggaaagatgactagcaccacaaatttaactacgccataatttactgcgttgaccaccataattagtaattaagcaccatagctaacaaaccatatataatcactcttcaaaatatttaactttgatcactgcaattattcattccttcaccttgttcattgatacaatg

SEQ ID NO: 8364 - DNA, 3000 bp, Unknown
  misc_feature (1)..( 3000): cDNA_ID_1989413_gDNA_ID_1971785_Annot_ID_57978 3000 nt of promoter + ATG
agataattagataatttaatctagcatgtattagtacatatagcgtagacatgcatgcatgttggtaaaattaaagttaaataaaaacaaataaagactgtgcataaccttagatgtgcgacatacacgtactttcctgaaggtgctagctaaataagtatatattctttagacttcaatagtattgtgcaaagggcatctgcttaagtctttttggtgaaaatacatattctactagacttccaataactcacatgatttagtggtagctgatacaaaacgttattaaaaactggtccaatatcaaagaaatgtatgggactcggcttataacctcctgataaaaacatatatatactttatatcaaaatattagcttatttatttccaaatataatcttacataatacattttttttgcaacggatacaacaaccattttgttaaaaaaaatcgtatagttggtacggttgcccatatttagattttagacgtataagcagtgcagttacacatattactagtttaaaagttattttcaaaaaaagttaattttgctcctaatgtgcgttaatgaaaaaacacataatgaagatggaggagcatatttcttatatctagagagactcaacgtacagatattctccatatattctaaaattgggccctatatttttctcacgacatcaaagatagtatagtattgaaggttggtatcttattcttacaaaattgattttatcaggttttgttaaagtttcccaaatgatttagagttttctgatttgattaacctactgttctacataagtgtacatcatagattcactaagttacatgtcaccggtacatatacctcatattcactaaattacatgtcaccactacatatacctcataactgtttaaggacaaaaaatgtggaactgatgtctcctaggtggtggaatatgtgaagctagaaaacaaataaatgcggtccgactcagaccatcattttcctcttgtctcattggttttaaaattaaatattatattataaaatctgttgcagtattttttttaatctcaattagagttatttatttaggtctcaacccatggtggggaaaaaaacagctattttaggtaaatttagattacaaaattgtatagtcaatatcaataataggttaaagttttaataaactgggtgaatcagtttttgtttggtcttcttggatctttgtttggtctcaatattttggattacatataaattccatcccgactattatttgggttttgccgctggactctataacacactgattttagttttatatgaattttacgttgttttacgtttgatcatgaactaaaaattcagcaatccataagaaaatattttttggactagttcgaaactcggccagacaatactaaacctattcacatatttaactttttttttttttggacaaacataattaactttagtaagtgttatatttttgtcaatattaaactagatgtggtgtttttaattgtgggaaataaaattaaagaagcaaagttccatgaaatatggactttccgtaattggaaggccgccatatgttgccttcatttgtattttccttttattgacccttttgttttcttataagataaatatatatataactaattaggcagaagctgagtggcattagttagtgaaatatatttatcattatcccaaattcctctagctgacattactttgaatttagaaatttcttatccgcaaaatttgtactaatattatgaagtagtacatcgaatagaatatatattggtgcacattatgatccactttcaatgccatccattcgaatggttgctcagaacgtacttgtagaaaccgcgtgcataaagtttcatatgagcatcgtgtgctttgttatttaattttttcttccctaaataatcagacagaaaaattcataaacttctttaataaaaccatccaaaaggggattatactacgaaaattatggcatctaaacgcaaagtttaatatatttttagtaccaatgcattgtaaaagaatggaaattaaataaaaacaatatgaaactgtttgttcccttggacaaaaaaaaaacttggtatgactatgatttttatatgcgcttttgtaattgcattgtaattttgtcgatatggaagtggattttaaagaacattaatccatgatctgataggtgaaaactcacactacttgactgctatataacatggtttggtagtatctgcatttgtaatgtgaaactatgaaatcagaatttgattggtaattcttcttctgcttcttttttcttgattctttaagatttagtatgtgtttcaaatttttcattgtcctccgaaaaaatgtagtggaaatcgagctggtccaatctaagttcactcaccttttgtgtctcttggcacctaatttctttttggtccatttcagctatcttcttccttttccacacaaaacattacaaaatacttactatttctagttctccgatttacaatacccaaattacccttacccttgcccctcatatagttcgtataacaactttcactctaagatgaaacattttgagtgttgagaaaggtatatgaagctcggtagccggaggaagcacggtggatatacactggcgagaatcaggacggtcccacacgagacaagatttacctctcccaaaagcacaagtggaaggagcataggataaaaattagtacatgaaattaggtttcaagaaggatatttgagaatgtgctttgtgaggcatcgtcagtaggagtaagcaatccagtcaaatatattcttctttttttctctgcctttgcttttgtccactataaaacaaatctcatcctcctctcttgccctacactcacaaaacaaacacactctcttcttgatcattttctcttttgagtttttgagtttaaggacttaaaagagaaaacgct

SEQ ID NO: 8365 - DNA, 3000 bp, Unknown
  misc_feature (1)..( 3000): cDNA_ID_1989412_gDNA_ID_1971785_Annot_ID_57979 3000 nt of promoter + ATG
cctttcgacaagttcaagtgatccctggccttctactactggtaattatttaccaaacaatagtcactcttcatcaagtgtttttttattctttagtaaaatttgtatacttaatctgtttgctttttttttacagggtttcttgctgatactgatttgtcccttgaacatattttacaaatcgagccgttacaggcttatatcagtcattagaaacatagttttttcacctctttacaaagttgtgatgctcgatttcttcatggctgatcaactttgtagtcaggtaataccataaattacatttccatagactaaaacagagtaaacaaaaaaaaattgattcattccatagaccctgaatcaaaatcttatctttgacaatgggctaactctactttcgcaggtaccgatgctaaggaacctagaatacatcgcctgctactatataaccggtagctatgcaacacaggactatgaatattgtatgagagtcaaatactacagagatctcgcatatgctgtttccttcctcccatactactggagagcaatgcaggtaaattaaaaaacactaaacatcattctttcttccccaagttactgtttcttctcttgcaagttagggagaaaatactgaaatatgattttgaaacagtgtgcaaggaggtggtttgatgaaggtgaaacgagccacctagtgaacctagggaagtacgtttcagctatgttagccgctggaacaaaagtggcttacgaaaaggagaggagccttggttggctctgtcttgtggtggctatgtcaagtgtagctacaatttaccaattgtattgggactttgtaaaagattggggtttacttcaacataactccaacaacccttggcttaggaaccaactcatgcttcgccaaaaatctatttactacttctctatggtacaaacccaaatcttatatccaaaaatctcaacaagaaaatgaacaaagaaaacaaaactagtgagaacaatttgattctcctcttcaatttttctcatacttatgctccgcgattcattctgatttcttttgtaggttctaaatcttgttctgaggttggcatggctacaaacagttttgcactcaagttttgagcatgtggattacagagtcacaggattgttcttggctgctcttgaagtcatcagaagaggacaatggaacttttaccggtaaaattaatctccctttaagaatcttatttggaatcagattcaggatatatactgatacttgtgtggacaaaatacaaaacatatgcagattggagaatgagcatctaaataatgcagggaaatttcgcgctgtaaagacagtgccgcttcctttcagagaagtggatgaagaagactaatctgatctggtcgatcatcatatattgtttgcttcgtcagatttgaaagaacaagagaagaaaaagaagggggaaggatttgttctttcttgatcaaccatattttgtgatcagtgatcaagaatcttcaaaattaatattattcttgttcagaaattgatgtaactaaagaattctcccatttgttttcccatcgttcatcaccaaaacattgaaggaaaaaaacaaactaaaagagttatatctttacatcaacaatcgccatgttttgagctaatatagtcccaacctactcgatcgtaagccttactcatctcgcaaccaatcaatcgagattcgacatatgaattagaaatactactaatttatagtttctgtcgaataattgaaatcataattcacatgcacataaattctagaaaatattattcttcattagaattgagaatagtttataaagaggaacataaaaattaaactgtgcaactaaaagtgcagaagcattgatgtaccgctggcccgcaaacgccttttccagtcttgtacttcgaactacacatatcaatacatggttgcttttcacatggtgctgttaattgaaaatattcatgacacagttcttgtccttgtgacataaatttatcaccagccctaatataaatatttttgttaaggcaacgagttaaagaaaattatcaaataaaagagaagatatttgaatatacgtaatgtggattcttagtttaaaatattaatgatataatatgtgaaagtgtgaatcaaacctagaacgaggacgcatgaagatagcaagaacgggagttttagagatctttgatgatataatcgaaatgaaaacttcaattaaaagtgatgggtgtgttggttcgttatgtatatacacatgaatacggtatatataagaaattagatgcatgtactaactataaaagtagaaaagaaaattagattctgaaactggctaaagatcagaatgagtgacacatgtagaaaagatctctcaaaattaattaaagtgaaagttgactacaagtggtcaaaacatatacgaagatcataaatgcaaatgaaaaaaaaaaacataatagaaaatgtagcaagataaacaataagtcaaacaaaaaacaaaaatttttaactaaagattaaaacaaacaaatcaagtggtttaattaactatagatttcacgactttttctaaaaaacaatttttaagttacgatttttctgattattgtcttctttcatcaactacaaatcacagtattaatatcctattatataaagttggattttttaaaagttgttatcttatataatcacgatacatgttaaataaaacattgaattttgccaagtatcaagttaaattttttattaaatttataagcaaaaaaatagaaaaattatgaaccctattggaaaaagaaatatatccataaataaaaagaatatgtgtttatatattcaatatatatatatattttacctttatctcttaatttttacccgaaacatagtatctaccatttacttagtttggctccaacaatccagtcaatacagagagacaaggacggaaaac

SEQ ID NO: 8366 - DNA, 3000 bp, Unknown
  misc_feature (1)..( 3000): cDNA_ID_1989410_gDNA_ID_1971785_Annot_ID_57981 3000 nt of promoter + ATG
aaaatgtgatttgagaaactaattaacgttttagatttagacttctctgtctttgacattttctttgcagcgttgatattttcttcttactaaaataagaatagtttattagttttagtagatttacctaagattataggttgtaatcgttaactaatattttcatataaagctataacaaaagaataattcattgcttattactgaagttctttagtttatagaccaataattgtactacttttgtaacctttaaattgtcaaatcctattttaccatacaaattttagtggaagattgtcttcataaatatgaaatatcatatcaatgatctttactcttttacacatcccattccaatactcttaaggacaccgttttggttaggacaacatctttgctctttttctttttcgttcttcttccttttttatgcaattatatatatttactcctgtttcattttctttttgctattctcttcccgtttttttttgttggtgtacattttgacttgattttcaatgaatccaaatgatcaaatgcttattttgttatcgtaaatttcaacgtaataccaaggatatctttaaacctaatttgtataactagaattatctttctataataagtggaaacactaacccaaaacccaaattttgtggtcggaccaaattaagaaattaccttataatatagtatagtttattcttcagcccctagctatatcttccaatcttattttttctcgcatacccaataatacatctatgtaagacatgaaataatacaaaaaacgatttactgtactacactcaattaatccattttatgatttaacattttctttctaaaactgttagtcgatctgagaaaaaaaagttgctatcttatgttacacaccattgaagagctttaattcttttagaatatatatagaaagatttgaacagagcgtctgttcaataaattgcaaatctcgaattgatgatgttcacatatcacatgtggcacagttataaaaaaaaacgaatcaaatgtctttggagaaaagagaacatgttagcaacttaggataataagtcacggacatctccacaagtaaatccatttttctccttggaataaatagaatccttatcgttaatgcactatggttttgtcctagatacaacaaagtataaaagactggtcctgattgttcataatttcatttgcttttgtgttaaatgtgttatgcgtatcttttcaaatttaaaccataaccataaaaatttcagaaaaaccctattgcctattgtaaattgcacaccagggaaaacggaagaagaatatttcatttgcataaatcaatgttgtttttatatatatatatatatattttaaaaaaatgttgtttatattttttagaaaatagttattaaaattaaagatgttcagcatttaaaaattaattttagaatatatattttccacatataaacgcaaacacataattttaaataattgagaccctgccatctacaaccaaatcccatttttgataatatctacaagactacaactttaagatcctccacaaccaaatttgaaacaatttgataaaatcccattttttatcatgagaaatttgtagcatgttctaatgagtgttacctatatgttaggttaaactaccaaatattgatggtggtctaaatttgttcaacactagaatgaagatccatgttatctcgcctatatagaaatatgtatatgtagtcgtctgaaatatttaaaaatttcacattattatattttggtttctatttttgatttcttaaaaacttaattttttgtgtgttaattccatccaatatacaaaagaaaaactaagttgcagatgaaagaaaatgaatcaacacaagcgtagacaatggaccacacatacacacgcacaaaggcaaataaagacaaggtaaaagaagaaagaaaaagagagcaagtaagaccaaaaatggaaaaagaaaacaaaaaagaaagagataagaaaaactttgccctttggcatagaaatggagagggcaaagagaggagcccaataggctagtgtccaacacatgccattacctacaaaaccttacctgtcccttataattagctatcttctacctctaaccaactttttaagtactattatccatacatacgtacattagtacatgcacataagtcacgtaacaacactattaatatacataaacgacgtcactatgttattatattatgtcttaatggaattatcaaacatcattagtttagtcacaatattataacagctattggctcaataaactgcgttaatggatacaaatacaatcaatcattcaagatattttacgtaccagttatcgtttactttttttgatattttttttaatcatttttttttctttttaaaatagtaaattcatatcgtttaattaatatcgttttttaaccgttttaaaatagtaatttagtgagaaatgagattataggtttggaacagagaaaattcatattttattttaaagatctacaaaaattttattcgattttacggtttttgtaggtcttcgattttggaaaacagaaaatttgtttcttgtaaatttggttatagaattattcaaaggaaaaaaaaattgtataaccaaatttacaagaaacaaattttctgttttccaaacatagctaaacgagtttatctgaagaagcccaacatcttatacaggcccaatcttaatctcgaactcggtcaaatcaattttaccaactcaatcaaaccggaccggtttattttacgactcgctcttgtcttgtcttcttcctctgcaaatccaacacacaatttcatattcatctccaatgttaaatctcatcgaagatcacaataatggttcccttcgtttcaaaatgaaatttcaatagattcttctatgtttgaaacaaggtacctcttctaattcaacaaaaatg

SEQ ID NO: 8367 - DNA, 3000 bp, Unknown
  misc_feature (1)..( 3000): cDNA_ID_2687430_gDNA_ID_1971785_Annot_ID_57982 3000 nt of promoter + ATG
ttatcttaggattttttagaagcttctctctcttttttttttcttttacgccggataccgacgaggcgacgaccaccaaagatatatgaagatattaaaatgttggagaaggtttatggaattaacgaattttaaaaacattttaatcaacaaatccacaaagagtttaaaaggcgaagaattatatggtataattagtgaaggtactttggctttgcatgggaatatatggggattattctaaggcatgtgatgtgtaattcgattgacattctaacaactaagttttgaattcttcgccaaagtgttgtttccctaattacctttttttccatgtcttgacatttattgagagtgtgacatctcgatgatgccactgcacacataaattcgtaccatataacaaattttattatatagattaacatttttgtagattgaatttgtcaaggattaccacaatcaacgtggctaataactcgaacaaatataaaatatacgatatttgatcttagagtatgtatacctgattatatatatataagaaaagaaaacagaatagtgttttttgataagcaaaactgatattgttatgtatggataaagtgacatgtgcaatgtgttatgttgtcatggtagttataataaaagaataagaaattattgtttaaaaaaaattccaagtgtagatactatgagaaaaccccaaaatttttattaggtacatgaattagatataggtttaaaatctaatcactaaaactttttataacgactcccaaaattttggataagccatgcaattaaatttatcgaatagaattatctcatattggaaaaaaaatacgagtctgacgatcaaagatttagataagtcatgttataaaactttttttggttcttagacatcaagtattcacctctactcgtttttcttcttgtttaggcataaagagttcatcaaagttcactcaaattcacaacattcatgacaaaatacattgaataattttattctgatctttagcagctgttaagtatactaacacgttttacgaacttgtcattgttgtaccggactaagaaccaaaaaaaggagaaaccctacaaagaatgttcaatttatatgtgatgcccataagcagaagttgattaatagttagattctaaaacatctagcgacttaatagttaataattaacttaatgtagaacctatatgatgtttttaatttcctactagtttttatagatcgtacatatgaaatgggaccggtaatatgttaaccactcggtacttgtgaacggggaattatatttagttgaaacttgaaagcaaaattcatgcattaaatgatgttcaccaaactatacaaagccggtgccatgttttatgcattaaaagtaaaagttcctctaataaccataccaaaatcctagaggttataaagtaattcaccaaactccattaccactgagaacaataaaatgaactaaccaagtgagtcattaaccaacccaaactcaattttgtggttagcattagacaaaactataattaaaaaaatatataacaaaaaatatgtatatatttaaacatatttgaaattatgatttaattattttaagtgaaagtattttcgttttctttttttaaaacttacatttatattataaattttatcttattatttgaaaacttgtagatatattagaagttaaaagttttttttaattaaatacattaattagaagttagtttttttatagcctaaactcatttctgaaacctaattttaggggagtgtacattgttcatagccaagatttggcgtacggatactagacgtatacaaatcacgtttttaaaaacagagattatttcacctaatttctctaatccaaaatgtgaataataatgacactcttaaatctctaaaaatatatgtacactcaacgtataaacatataagtagtaaatcaatgtcaaataataagaaaatgaaaaaggtagagaaatcatgcataatttgattgattgatgcatcatctaatttatatgtggtttgacccgcatttggtgtcttggtcaccttctccgccatgacggcgcatctaatgttcctccaatcgattcttcttcctcctctgattctctcctctccaaaccaaaactctcacttttctttctgagattatctgacagtaaaaaatcatcctagattagaaactgtcagatcaatctcagtctttgtctctctctttttccacagtcctgtttttgtttctttcttcacacacagcttataattgatgatcatcaaaattcccaaaaacaaaaacttttttttttctttgtttgtttgggaaaagagtttcagcattttgatttgatgttataatatttcccagtgaaactatgacttgtccaaatcttggcactttctctctgtttttttcttcttcgtcttcgtcttcccaatttgtttggatgagatgagaatttttcgctataaaaaaaaacagagcatatcgaaaaatttatgagatctctctctctcactcaaaactctaaaaatctcaactttcttaaagatcataactttttatagatacccttcacctctcactcactcactccgatctctgatcttttcccgagaaaattcctcattttcccgagaaaactaaaaaaatttagataaccggaaaattgcaaacaacgaggtcggaaccgaccagtcacggtcttctctctgcttttctctgttcggttggtttcacggtactgtctttttttttttttttctcttttctttttctttttttccactttataaaaaacaatttttttttctttcttggtttcttcgttttaaattgttctcgcgggtatttaaaaaaagatttgtttttatataatttcaaggtttcttgaatatctgaagaatctgaaattgttttttttttgtttcagtaaaaaataaaactttgaggttca

SEQ ID NO: 8368 - DNA, 3000 bp, Unknown
  misc_feature (1)..( 3000): cDNA_ID_1989407_gDNA_ID_1971785_Annot_ID_57984 3000 nt of promoter + ATG
actataaaccatctatgtataccaaactgaggagttgaagaaagtttgcttgtagttgttgattcaggtagtttagatttctataaaagtcatgtgcggtgtagagatttactcatgatggttttgcagtaaattgtaatagtttggtagcttagagaacctcaagattactgttggtagtgagagcaaatattcaacatttcagcgattgttgttaagaatagtttgagctgatgatgtttcctaatgttgttaagcttcgatttgacataagtagagtctactactatgtggatttggagagtaggaacattcatttgctactctgtggaatattttgataatctctatggaatgtgttattttgttttgattgttccttatagataaatcacagaacggatatatatgatgcagagagcaaatgaaaaactgggagttgcagtcagtcaacaagatctcaatattttctcagattgtctttcagataaataatttttgccttttgggtttaaacctatttgacacatgaactatggatttttccttatgaacccatttagtcatcttgtaatgtatcatcttttttacatttttcaatctcgttcttgatttttccatgtcttgaatgtgaaaactagagtggagagcaaaattagtttgcgtaatatgcatcgacatgaacacatgtttatgatatgggcaaggatcatatatttattatactgctaatatataataaaatagagtcaatatagcaacagattctggtaacatctaagtggagacagcattagaggtggcaggttgtttgcgagttacacctcttgtgcaatgatgatggatcgaacaagtgcgttctttcattataaattatatttgtttttaacgtcaagatccttacttagctctcacaccacatgtccaagtaaaaagaacatttaaatattttccctcttctttaattttttgacttgttcacaagtaatgatggagtaatggcacgtggtgagataagagtgtgagtgtgtaaataaaaaaccaaaaaaaaagtggcatagacaagaagtagttggaatgtcttgggatcacggattagtgaatgttcttttgggggtttaaggtattgacggcgacacgtatttcatgttactctcctcaagtgtctctccctttcaccgtaggccgtagcattttccttttctttgtgaaactttttgcatttatgatggatatttgggaccgaaatccataggaatactagtttttaaacaagacacaaaagagaaagaaaacaaaaaactcaaaatactagccaaaacaaaggataaacaagacttggaagagagttaaagaaaaacgatattctttagtgaacaccattactacgactcaaccatcgggtgaatctccgaaattcccacttgaattatgtggcaaatccttctattcaaatttttattatttgttggttaaccacgtgttttctattatctaacacactatccaacctgaaatattattcctcatttttctaaccaaaatatttgaccgtttcaacactaacttggctaatctcatttctgttttccaaattgatttgtagtgttcgttttcgtaaagattagcgtaaagacatccgatgatgacatatgtgctctcatcacaatatttaatgtactccctttttattatatagttttgtccttcggattgtcatgtgctacaaaatgaaagagctactaatattttggatttatcaaaattggggaaaaattatatacaacaacgaagaatttaaaactaatttttctagaggtcaagtcaaaccacatcttgagaaatatagaaaaagtcaacttgatatatttcgcagaaaatattaaaatatgtataaaattaaccgccattactattgaacaaactacttgccaataaaataaatacagaatttattgacatgctagaaaaaaattaatgtagccgatttcatcaacatcttataactccatctttgaaatcatgtacagtaaattattttcatatacgactactacatgaactacatagtagtaaaaaaaaaaaaaaatgaactacatagtaaaaccatttgagctttctttataaaccaaacctaaatttaattctcaatattcaaatcatcaaacgacgttttgtgcattaaatttttcgacataattaaagcaacacggtgttttaataaactcaatgcaaaatccagctaattttcattaaacaacaaatactcctttgcttatgacaaaagcgcgtaaaggcttacggtgaaatttggaaagtagctaatttgacttaattcggttatggaaacaaattaattttatttccttaaaaacaaacaattaaaagtttcaatttctttgaccgttgatttaacgtagcattgaagcattttctcagagagtagagaagacgctgcgaaactcagaaaattaaattttcaagctcggaaggaaactctgattcattattacagattcgaagtttcagagaagaagggacaagacaaagtttaactgcttacttgttgtgtttttgctctctggtcttcaattgctgaagttttataacggagatgtttcagttatgatcttacagatctgaggttattgcatatccactcaaattgggtaatctcagtgatctggaattttggtggaagcaaagcaaaatttgtgttttttttgctcggccgatctgggtttgatctattacatcgtcttctctgctttgtcttgaaattagctgtgttgtgatttcgaaagtttgctacttcttcacgtttagtgttcttagttggtaaagtttggtactttcaggatactgtcatactcaaagtctgggacttttaggtgtttttgattgttcatttggtgattgatcatcgtctctgatcgttacttggaggaaagattccaaatttttgaatgagaagttgatttgttgatcggaattgagatg

SEQ ID NO: 8369 - DNA, 3000 bp, Unknown
  misc_feature (1)..( 3000): cDNA_ID_3045332_gDNA_ID_1971785_Annot_ID_57985 3000 nt of promoter + ATG
gtggacctaccgttttagggttgtttaacacttgaaccgtccgtaagtcttgttaagctataatttgttagtcttggttagaaccggttcaatgtgtgtatgtatgatctacggtttatacttttttttttatttttagttggttttgtcatttctatatataaaaatgtaaatgttctttacttctttctattgtaatttgtaaatgttcgttgtctcggtatcctgcacaatctagcttcagtgacgatgttttagagaggctaaggttaggttggtaactggaatagaaaccggagcctattttcttaaaccattttcaacggaagtttcttaaatccagccactttgtgaaataaatcttggagttgagatttatttacatttgctgccactgatatttaataattgtttttgataattagaaagaaaatcttctaattaaatatttgacatttaataatcttcccaaaatctttctaccttaactacacaattaattactaaaataaaacttccaaaatatttaatatcatttaattactacaaaattatcatttttgatatttttgcttttcggcatgactataacaattcaattataatcatcaaaccgcagagatatttgatagcatttaattaccacaaaattacaaaatatttagacaataattcataaacatatcataaataagatcaacattaataaaataaatagtttttttacgggacgggttgacgggacgggtttggcaggatgttatttaataacaattgtaaactataaaataaaaatattttatagatagatacaatttgcaaacttttatgtatactaactttaaaaaataaattatttctgcggtgtaccgcgggttaaaatctagtgagtttttaaaatagaatcaagtgtaaatatagataaataatatattttaatgatgaggttcttacatttgaagaaacttagttcaattgactcttagttaagaaacaattggactaagtttcttcaaatttaagaaaccaaactaatatttaaacaatataatatttttattatatatcaagaattttgtttagaaactcccattgaaaaaactcttaacttccatgttcttggtagtttcccttggactcagagtcatatgttttatttttgtgcattgccaattgacaattattgcattaactgattaaccgtctctttttagctctaattgacactcttaactttgttgtttaattgtggctatgcaatagctattatgaagagaactccaatacatgtgttggagtcttggagatcttacttgcatcttcaaacattcataatactacaacttagacattgtttgttttcttttcccatggaaacaaattttatcatgtgctaataataaaggtaagaattgatggagccaatctcgtttaaatctatatgtcccacacctcccacataaagaccaaacatgtattagctccatcagattgagacaacaaagttctatgtgtagatttagatgttttttcttaaaacagatttgattaagaacatgtggaatgaatctgatatttgcctattatgatgatgattaaagcaataagcatgttgtaactttccatctacaagaaaacagttgatcatttcaatcgaccttcaaatagtttcatcaatcatacataagtagacccataaaataaaattttgatgatcctaatggtgattattgtgaatgaaattagtccaaaatcttgctgtatctaaaaaacacaaaaatactattatcatattcatatgcattaactcatcctatcaaggaatcgaaccaccaaagaaccgtttgtttttcttaaaaagataacgacgaaaccaataagataaatgaatatgacaaaagcagagaatctggttgcatcaattgaatatttggtcacgtgggtacgcgctctatgcgcgtgaacatttagcaaattggctcttgaggaatatgaaaggtcggatatgtaaataattaatacgcggcgtgggcaaatgtgattctcacacttccttccaaaagattcttctttctatttttttttttttttttcctcccctagaatattccttcaccaaattagctcatttccaattcaaattttaatattcgttctaaatatctgtaaaaacgtagtcgagtggtaggttacataaattgtgaatgattaacgtttggagttggaattaagatatcactaatgatatgatttattgtcattgaaagttttaaacataatttttccttatgagatagtagtagtattttaatttatttaatgaaacgcatatttgttaggtgaacgtcaatttttatgatttttggaaaagacgcataataaaaaccaaatctttaaatttgaaattctaaatcataaaatctccatttaatgaatagatttgcccatatagaaacacagaaaatcatttctattagatgatagttaagttaaatgaaggataaaacaatcgttggaaaacaaaactctggaatcttaattaggggagaagaaaaatggttgagttttcgttcttatctgaaaaaaaaaagctaaagagattggaatagtgacgtcagttccagcccatacaaagagatgcgaacctataatcgaatctgatcctccgaatattcacccatcatcttcacgatattactattttacccttctcttccaaaagagaaaaaaacattttaactctcaaagattcgttttaggtacgcgacggcccgacctcgattctcttccacttctttcttgttccaaaaacctaaaccctctctctctctctctctctctctatctcttgaaaaatcaacaaaacattggaatcaatttctctatgttttgattctattttaaagatccaatattctttctccattgagattaagcttctttctcgctgtcgtctctctatagatcttggttcttagtcccttttgaataataatgatg

SEQ ID NO: 8370 - DNA, 3000 bp, Unknown
  misc_feature (1)..( 3000): cDNA_ID_1989406_gDNA_ID_1971785_Annot_ID_57988 3000 nt of promoter + ATG
gtacctcaaagttacatgaaacagtttatatcgagctttcttctagactcatagttaaacagttattaaccagtgagaactacatgatcttgtttatttcatatagtaaactttcgtacaagtatatctaattatctgacagagttataaaaagtaagatctacagaaatgttgttgggaatagtcccggtaagaccttttgcacctactgaatccaaagctctaagaccaagtaaattttgtgttggcttataagtaatggctaatagtctctatgctcgcacagctaaatgattaaaactgtgtaacaacaacaacaacattgctttctttattcctccacatgtcaaatcatcatcaataggaagttgtagaagatttgttttggtcaaatgtaacaatctaatgtactgtatctaattatcttcggaaaagagaaacactcaagactctaaacctttttatttatgaaagaaaaaaaatggtacatatgatgcagagaaatgttctaaagattatttacttctcccaaatgtttcaaaaagaaatgagaagagaagaaagagacaagatcggattctgacgagtaaaaaacaagaaaatacccacaagactaaacagagcctagacgtcattgactctgccaaatgtactactactctcttgtccaaaaccaatttcattattggtacgtttccggtttggtgtaaaataggtatccaattctcggttatgtgtaaatatttggtaaaagaaaagtcaatgaagcctccgggagaaacgagagtttactggttttagaataggagacagtaataaattttcatttaaaaaaagttactaaaaaaactaatgctcataatagtttctacatttataatgaggaagatgtttctttcaagcaaagcttttctttttaatgctcttcttcatcggtccactgaatatcaagttaataatactgcaaaaattatttggtttttatcattaaatagggatactattagaattcatttatttgtgtatgattttataaatcaaaattaaaaatattggcagattttttaattagctttccatcaacatcacatcagcttcagagcagaaaccagccagccagactattgcctgctttatggtaactagatttcattaatatctgtttttttttttaaacttcaaattagttatatagttaaatacataaaaataatcattgagaaaataacatcttaggctaggcttttgacatttttacaggagagatgagagatgagacattgaagaaactttcaacaatacatcatgattcatgagcatatccagttatcaactaaatcgtgcattaattacgtttttataatatttgaaaattgattagagaaattcattagctttgttatttatattaaataattatatatttttttatatcttttgtgcatgggaaaaaataaaaactcagagtggcagtggtcgagaggccattttcaactttggcagacacagtaaaacaagatggaaatgacactctctgtatctgaattatccaggctctgcattacatatacatacaaattttacacatttattccatgcgtgaaggtttataattatatgaaaacaaaatagttaaagaataacaatttcaaaaacagttaaaagcaaatcataagcctaatatcttggcaaattaaaattttatttttcttcaaaccctaaattttgacttgcacaagaaaaaagaaggcttattatagaaactttaaaattaaattaaataataaatcaaatattagagaaagaaagatatgaacatactcccaagtttcaagagacacattgtcagcaaacatccaaattatcgtcattctcgattctatcttcatatcttggttaaagaccatataataattccaaatactaatgtgtcgtataacaccattatgtctcaatttaaaaactaaaccacatcttattataattcggtaacacacatgacacatatggttgatttaaaattagcatgaactcattcatattcaattttgttttgctatcttcgtattgaacgtatattgaggagtgatattttagctgctaatctagctataatacatgaaccattgtgttagaatagtttacaaaaaatgtcacaaaatatttgacatctcatataattcataagccatatgtcctaacatacaatatatacaatgtgacatgggaaagaaattgcgagatcaaacttagaaactagctttattaggcttttgataatacgtaagataattaaaagactcaataatcactaatcctaaccttttattaaaaaaaatttgtcaactaaaactaaacttacacatttttcctatacttagacactttgttgattttttcaccaaggtaagatccaaccttacatacatttaatattttgatcgtttaagatttttaaagttcttgaaaatggagtattacaatagattcattagcaaaacattattagttttattttttcctcattcattagcaaaacaaagttaactgatcattataatcccacaaaattaactacactagatgtagtaaaaatctggaaaaattagtaaatagagtaacatatttttaaaataggaaaacaaagggtacgtgggtgtgtgtgttggttattgggaaactaaaatcccaccctctcagacgcaatacatttacactttttttttattaaacataaatctcaaaatctcttctctgatttctttctctctctcacacacaatatagtaatttcgtatttattaatgatgaatcctccagccgtactgattcgccatcttttcacctctttaatgaattctctcctcactccctccttcccttttaacttcactttcttcttctgataacccaactccttaagaaagctcacttctttttcccctgattccctttgtgtcatcatctttcatcatcttcttcttctaagaatcaacaaca

SEQ ID NO: 8371 - DNA, 3000 bp, Unknown
  misc_feature (1)..( 3000): cDNA_ID_4262594_gDNA_ID_1971785_Annot_ID_57992 3000 nt of promoter + ATG
agcaagctttcaagaacaagtgaaaccagtctcgcttctgtcgcatcgttatccatgccacttgttcgttactctcttaacacttttgtcttagaatgattcaactctgtggattcttttaattgatcttgtgtgttatcagattcaggagattgttctatcagcagacatcagatgtagtgactgccaagagaaagtcgccgacataatggcgaggatgatcggtgagtatatagcttacttacttccgagatgagacacttttttgttctttcctctcacgcttgtttcctctgttttcttggagcagaaacatattcaatattggtgagtgtgttggagaagaaagtgacactaacgtgtacatattccggtgaccggagagtctctaaatcctatggtgaagctcttctctgcaaaatctcaaccatcaagcgtttgatatgtccttcaaggaaacaataactcagagttgcttgatgtttgcttttattatcattttctctttccaataaaatgaatcttttatgtcgaatgtgattggatattgtttagataaacaaaaaactctcaatagcaataataatcatagacaaagtgaattcttgaaatgcagaaatcaaaaaagagattattgagaagttaaattgccgccactttgttgccagagattgatgatatcagtggcttggtttagaagaatgatcatcttcttctgagagatccatggtttagcttcaagagtagacttaagctcttcccaagcatctttcctaggccagaagaagtaaggactaagtgggattgtgccatgtccaggtacatgttggtccaatcctaatcctatgttcttctccatccacacaaacttgagtaccactcttgatttctcatctggcttcaccacctaacacaaacaacaaagatttgtgggttttgtaacacaagagacaagaagatgaagaagaatatgttgtttttacctttattgtttgttgtggagtgttgtcggaagtatcaattccggtgactgtttcagcggtgagtgtctctggagctgctagagttatgattttccgttttacagagatgggtttggttgtttgggtatggaacaatggaggagaagcagtgatggagagttttggatgttgagagatgaaagaagagcagagggaagtagaagagagtgccattgatgacatcatttttgtgttttctcagagaacaatggagattttgtgagaatatggataaggaagatatggtcacatttttgggtggagtttcaaagtagtttgactatcaaatttatgggctttgttgacttggcccatcattaaatgggtcaagaatacagagtttattataagcccatgaatacaaacctgaagctttgagaagtagacttttaaaaatacagactctgtttcaagtattttcgagggactaattcaaagatctcaacatataagtattaatcatatcatatttaattcgaatgacatttgacagccacaagtatttatacaaaaattaaaaacctcatctttgtttagtgttcatgatttgatcaaagtcaataaatttttttgtgtgaaataaatttttgtattaatcaaaacacaatttttaacaaaatataattatcgatattgtacgctgcaagatgtcctcaatttgttttatttatttatcaaaaacaaataattgttgagaaagtggcctttacattatatatgtcacatgattctttttacattatgtcacatgattcatcttaaaaaatcgtcttctttattttcacaggtttgctgaggccaaagaagagtctttctttggacttgaagtagcactggatagatgagatgagaaagcctttaaggagaaagacaccatgatggtcattcatgaacatcattcgatgagtatatatagtaaaagtttgaaatacttcttacatcgtagttattatataatgtgcacacgatattttttattttcagcatacaataattggataaaacaatcaaactcacccaaaatacataaataattgttgtttctcaaaaaaaagtaggaaaaatctcatgtgagggtgggtacactgtgtagggtagggcttggcttttgagcatagttaggaagtagtaagatgcgatgcggtagtaagtaggagtttcaaaatgtcacattcacacaagtcacgaccatgaaacttgtcgtctctttgatacttgcaacttctccaaaactgtgggtctgtaattcaattattagagtcttgaacttgaagagactttaagatatgtgtgtaaatttgttcaccgtcacattattggtccatttacattacacacgtccactatagttaattctcaggttgtttatccatagatatctgttgttatttctgcgacacttttactggtcacaatgaattatgttgatgtttagattcaacaaaaaaacttactaaatcgggtaactatgaaaaaatattatgtagctgagccaaaaaggtaaagtctacagtttaagaaacattaacacattgaacagaaattaagaaataatataattctatttttaatttttttactgaataactaatagtcacaaaaaatcatattacggccttaccggtccatttatgcattactggtccacaaatgtaaattctcacgttttaaattccatctgtttcaaaaaatttggacacttttggtggttaatatgttaatgattagatttcaaccaaaaacatcaaagttataaatcggacaattattaaaatttgtaatgtagatgcaccaaattgtaaattttttaaaaaaacttgattatttagagatgatgaatcgaaggcatgcattaattgcgtagtacaaaacaaatcttgataaatagataaataaacatctttctattcgtaaggacgacaagaatctctcaggttctgtagaattgtcagaatcatttctaatgggaggtaaaatg

SEQ ID NO: 8372 - DNA, 3000 bp, Unknown
  misc_feature (1)..( 3000): cDNA_ID_1989401_gDNA_ID_1971785_Annot_ID_175459 3000 nt of promoter + ATG
tattagtttctgttaatgttatcaatgtttttataatttcacttactagaggttttgatgcttaatttataaaagtgtgcaaattaaaattttagtggaatcctttaaacaaatcgaaaatattaataattcattatatccaattgttgtatgttatttacttttgtcattctttgatagtataagaatttatgacttttctggtattttagaagaaaaaataatcacatgattttttttaatcacatgtttggtgctacgtataatttatatgaattatttaccgtcacataaattatagtaaagttttgttttgtaatctattttagaaagacaaaaacttcataattattaagatctctcttatgtatttttaggtctacaaatctttgtaatgtaaaacaacatttaataattaaaaaaaaaaaacatttaagtaggaattagtaatgaaataaattattatgtaacagtcgtgatgattctatcccaaaaaagaattaaaaaaaaatggtagtgatcaatatctggaatagagatttgtcttattttaatggagaaagaggcgaggcagagactggtgaggccattcctcgagaactacacttatgctttcccccataaatccatttcttgtctatctctctacttttcttcttttcatttatttaatagttaatacggctttgctttttagttgaaaacagtaaaaaccgaaataaaatgtgtttcgtcggccgatggagattgagaaagttagttaaaccaatgatgccgacacaaaacaaaaagttaatccgatgatactattttcactactgtatcaatcgattcgtcggctacgtggtatgttacgaatcttaagagttattttaatcccacaatgttgaatgatatgcaaactattgttaaaatgtcacttaattgttatattaacctgaccgaatagctataaccaagtcttcgtcaaggctgcgtggccggttttgggaacgtatgaaaattctttaattcttatattattaaattaaagaatttatttcttgttgctatttatttatttagtgttgtaaatagtgttgcatcaactatgtaaatgatgctatatcatcacattaaacttgtgtcatctttagtgtttcataagagagttttgagtgtaaactcacatcaaaattgtgttttagtgtcccatctgcttttgagcctaaaaatagaggttttgattggctaagtcctattccatttttatcctaattaaacataaaaacaataccaaagcaatataagaaaaaatcattttcacttttttatactgtcatcttgcactgctacagtttaacgttttaattatttatgtattgtttactgtaccgttaaagacttataccgctttgagttaccaatatgatttgcattttggttgaatactagaaaatgatattttctatgtatgaaaatgatattttctgtgtacgaaaatgatattttagtttgttcttatcattaacatttatttgtctgttataatatttatatttagagttcaatgttcagacttcagagtataatgccaaaaagaagccaggtgaggaatgcatctgaaatacaaatttggatctcgtgaatcattcacatcaatacagcgattaatttgtgatataatttacgattatattatttgtatagtgaaacaaaataatgtgatggtagtacttgtagacaatgtgcaactccggaatcgagatgttacatgcatgtatgaatatcgatcttggaaccttcttcatttttaataatttttcatgccctaccttaattacgcttgtcgggagtccaaaatccaaactccaaactaagattttgcatctcgttgtatcttgttaaattcagttttattgtcacggacacggagtatatattttatgcatggacaaacattttcttgaatacttcaaaagatgttacttgttagtaaaaatatggtaagggctaaataaacgtagaaattgagcatagagaggaaattagtttgggaagcgagaatcacgcttcaatttagagaccgaaatgtatggagccacgttttggaacatatcacctcctttgattttctttgtttttattaattcaatcttttttatttttgacattaacaataaacaatctattggtcatcgcattaattctcaaacaacgtaatataaagatatctggtccatgtgagcataatttttcaagatattgttataaagactagttttcaatatttattttgatgccccaaaaaaactacttgtatccaagaacaatacttaattagttaatagtttaatgatgatggcaaaatatatacacaatacacttgcctattagtgtttgcaaatattgatgataaaagaaattagtgtttgtcatgtttcatataagatagatgatagatcactacaatactcatacacacataattcttaatcacacatatacctgttgtttatgtaattattaaaaagaagagaatttactctattccactacttttcttcaaaggtttttcatttctatcacttttgtttattatttttgaatctatcatatttgtatgatagaaataagacgatttcattattctcattttcataatataatattatatattgaatgtatagttgttaaaaaaaagattatctattgagaaagagaaaaaaaagatgttacaacagtattaataaaaatgatatatgtaaacaaaaagaggataatgtgatagatccaaaagatttagggaacaaaatagtaaaaacaaaaagaaatttgtaatttgtagtagttttgttaattttccttaaaccgcaaaatcatattctactatttatatcctcgtttagtgttcacaaaacttatcaagaaccataagctaaagagggttcggttctttaaacccctccatctctctctccttcattacactgtagagtgttaaagtaccactctatagcc

SEQ ID NO: 8373 - DNA, 3000 bp, Unknown
  misc_feature (1)..( 3000): cDNA_ID_2039691_gDNA_ID_1971785_Annot_ID_175452 3000 nt of promoter + ATG
ggaaataaaaatacattcacaagcaaacaaatggttgcaccaagaccaataagcaaaatcctgtaataagcagtgcttaagaagtctcttgagttgttcccggaaacaagaacgatacaatatgtcaacttgaacactctgaatgcgtattcgtatggtttcatggacgcgtatagtttcaaataactagcaccaaaacctgacatagacaaagaaaaattaaatgttagtatcctcattgtgtgtaatgaaattgtggcgatataaatgttgcaaacctgcaaggaatatgcagattacgatgatgacttcttcaaactctcctgctaaaacagagagctgcgcgacgccgagagcaagtcctccagctaacattgtgcctaatgctctattgaatcctttaaccaaagttgctcctgaaaattgaacataagagtgactcaataagtatgagaataattgatctgaaaatgtaaataaaacagtaaaatgcaaagtcaataagtaaatctgaacagagaaaatagaaaaaatctttgaatccacttatacaaaaagatggattatacaatcaaccaattgatgtctttagttccatcaaatggattccataaacagaaaactcgaaaacagtgaaaaatattcaatccaagtaacaaacaagcaaagaaagtataagagttggtctgaaaatgtgaataatacagtaaaatgtaactcaataagtaaatccgaacccatcaaaatgaaagatggaatccaaaaaaaggaacagtcttaggattaaaagaatctttactagatttgcttcacatgcgcaagtgtcttgagttcaagattccaacaaaacataaaaacaaaactcaaagatccaatcaaaggatcataaactaggctatgagttaagaatcaataccgacgtaatactcgaaaatgagaacgacggtgagaatcgcccaaactgcgaatttactagcatcttgaagcggctctttgagaaagatgacgaaagaacagagtgccaaagcaattcccatcttgatggagaagtaaagtttcctacgatcagaatgtcccagcgcgtacaacttcgccggagcctcgtagagagccctccacgagcaacaccggaacttggagtcacggctatcagcgacgtcgcttgactgccagagaagcttctctgtgttttgctccggtactgatcccattttacctcccattagaaatgattctgacaattctacagaacctgagagattcttgtcgtccttacgaatagaaagatgtttatttatctatttatcaagatttgttttgtactacgcaattaatgcatgccttcgattcatcatctctaaataatcaagtttttttaaaaaatttacaatttggtgcatctacattacaaattttaataattgtccgatttataactttgatgtttttggttgaaatctaatcattaacatattaaccaccaaaagtgtccaaattttttgaaacagatggaatttaaaacgtgagaatttacatttgtggaccagtaatgcataaatggaccggtaaggccgtaatatgattttttgtgactattagttattcagtaaaaaaattaaaaatagaattatattatttcttaatttctgttcaatgtgttaatgtttcttaaactgtagactttacctttttggctcagctacataatattttttcatagttacccgatttagtaagtttttttgttgaatctaaacatcaacataattcattgtgaccagtaaaagtgtcgcagaaataacaacagatatctatggataaacaacctgagaattaactatagtggacgtgtgtaatgtaaatggaccaataatgtgacggtgaacaaatttacacacatatcttaaagtctcttcaagttcaagactctaataattgaattacagacccacagttttggagaagttgcaagtatcaaagagacgacaagtttcatggtcgtgacttgtgtgaatgtgacattttgaaactcctacttactaccgcatcgcatcttactacttcctaactatgctcaaaagccaagccctaccctacacagtgtacccaccctcacatgagatttttcctacttttttttgagaaacaacaattatttatgtattttgggtgagtttgattgttttatccaattattgtatgctgaaaataaaaaatatcgtgtgcacattatataataactacgatgtaagaagtatttcaaacttttactatatatactcatcgaatgatgttcatgaatgaccatcatggtgtctttctccttaaaggctttctcatctcatctatccagtgctacttcaagtccaaagaaagactcttctttggcctcagcaaacctgtgaaaataaagaagacgattttttaagatgaatcatgtgacataatgtaaaaagaatcatgtgacatatataatgtaaaggccactttctcaacaattatttgtttttgataaataaataaaacaaattgaggacatcttgcagcgtacaatatcgataattatattttgttaaaaattgtgttttgattaatacaaaaatttatttcacacaaaaaaatttattgactttgatcaaatcatgaacactaaacaaagatgaggtttttaatttttgtataaatacttgtggctgtcaaatgtcattcgaattaaatatgatatgattaatacttatatgttgagatctttgaattagtccctcgaaaatacttgaaacagagtctgtatttttaaaagtctacttctcaaagcttcaggtttgtattcatgggcttataataaactctgtattcttgacccatttaatgatgggccaagtcaacaaagcccataaatttgatagtcaaactactttgaaactccacccaaaaatgtgaccatatcttccttatccatattctcacaaaatctccattgttctctgagaaaacacaaaa

SEQ ID NO: 8374 - DNA, 3000 bp, Unknown; identical to SEQ ID NO: 8371
  misc_feature (1)..( 3000): cDNA_ID_4283694_gDNA_ID_1971785_Annot_ID_175451 3000 nt of promoter + ATG

SEQ ID NO: 8375 - DNA, 3000 bp, Unknown; identical to SEQ ID NO: 8370
  misc_feature (1)..( 3000): cDNA_ID_1989406_gDNA_ID_1971785_Annot_ID_175446 3000 nt of promoter + ATG

SEQ ID NO: 8376 - DNA, 3000 bp, Unknown
  misc_feature (1)..( 3000): cDNA_ID_3045332_gDNA_ID_1971785_Annot_ID_175442 3000 nt of promoter + ATG
aaggtggacctaccgttttagggttgtttaacacttgaaccgtccgtaagtcttgttaagctataatttgttagtcttggttagaaccggttcaatgtgtgtatgtatgatctacggtttatacttttttttttatttttagttggttttgtcatttctatatataaaaatgtaaatgttctttacttctttctattgtaatttgtaaatgttcgttgtctcggtatcctgcacaatctagcttcagtgacgatgttttagagaggctaaggttaggttggtaactggaatagaaaccggagcctattttcttaaaccattttcaacggaagtttcttaaatccagccactttgtgaaataaatcttggagttgagatttatttacatttgctgccactgatatttaataattgtttttgataattagaaagaaaatcttctaattaaatatttgacatttaataatcttcccaaaatctttctaccttaactacacaattaattactaaaataaaacttccaaaatatttaatatcatttaattactacaaaattatcatttttgatatttttgcttttcggcatgactataacaattcaattataatcatcaaaccgcagagatatttgatagcatttaattaccacaaaattacaaaatatttagacaataattcataaacatatcataaataagatcaacattaataaaataaatagtttttttacgggacgggttgacgggacgggtttggcaggatgttatttaataacaattgtaaactataaaataaaaatattttatagatagatacaatttgcaaacttttatgtatactaactttaaaaaataaattatttctgcggtgtaccgcgggttaaaatctagtgagtttttaaaatagaatcaagtgtaaatatagataaataatatattttaatgatgaggttcttacatttgaagaaacttagttcaattgactcttagttaagaaacaattggactaagtttcttcaaatttaagaaaccaaactaatatttaaacaatataatatttttattatatatcaagaattttgtttagaaactcccattgaaaaaactcttaacttccatgttcttggtagtttcccttggactcagagtcatatgttttatttttgtgcattgccaattgacaattattgcattaactgattaaccgtctctttttagctctaattgacactcttaactttgttgtttaattgtggctatgcaatagctattatgaagagaactccaatacatgtgttggagtcttggagatcttacttgcatcttcaaacattcataatactacaacttagacattgtttgttttcttttcccatggaaacaaattttatcatgtgctaataataaaggtaagaattgatggagccaatctcgtttaaatctatatgtcccacacctcccacataaagaccaaacatgtattagctccatcagattgagacaacaaagttctatgtgtagatttagatgttttttcttaaaacagatttgattaagaacatgtggaatgaatctgatatttgcctattatgatgatgattaaagcaataagcatgttgtaactttccatctacaagaaaacagttgatcatttcaatcgaccttcaaatagtttcatcaatcatacataagtagacccataaaataaaattttgatgatcctaatggtgattattgtgaatgaaattagtccaaaatcttgctgtatctaaaaaacacaaaaatactattatcatattcatatgcattaactcatcctatcaaggaatcgaaccaccaaagaaccgtttgtttttcttaaaaagataacgacgaaaccaataagataaatgaatatgacaaaagcagagaatctggttgcatcaattgaatatttggtcacgtgggtacgcgctctatgcgcgtgaacatttagcaaattggctcttgaggaatatgaaaggtcggatatgtaaataattaatacgcggcgtgggcaaatgtgattctcacacttccttccaaaagattcttctttctatttttttttttttttttcctcccctagaatattccttcaccaaattagctcatttccaattcaaattttaatattcgttctaaatatctgtaaaaacgtagtcgagtggtaggttacataaattgtgaatgattaacgtttggagttggaattaagatatcactaatgatatgatttattgtcattgaaagttttaaacataatttttccttatgagatagtagtagtattttaatttatttaatgaaacgcatatttgttaggtgaacgtcaatttttatgatttttggaaaagacgcataataaaaaccaaatctttaaatttgaaattctaaatcataaaatctccatttaatgaatagatttgcccatatagaaacacagaaaatcatttctattagatgatagttaagttaaatgaaggataaaacaatcgttggaaaacaaaactctggaatcttaattaggggagaagaaaaatggttgagttttcgttcttatctgaaaaaaaaaagctaaagagattggaatagtgacgtcagttccagcccatacaaagagatgcgaacctataatcgaatctgatcctccgaatattcacccatcatcttcacgatattactattttacccttctcttccaaaagagaaaaaaacattttaactctcaaagattcgttttaggtacgcgacggcccgacctcgattctcttccacttctttcttgttccaaaaacctaaaccctctctctctctctctctctctctatctcttgaaaaatcaacaaaacattggaatcaatttctctatgttttgattctattttaaagatccaatattctttctccattgagattaagcttctttctcgctgtcgtctctctatagatcttggttcttagtcccttttgaataataatg

SEQ ID NO: 8377 - DNA, 3000 bp, Unknown; identical to SEQ ID NO: 8366
  misc_feature (1)..( 3000): cDNA_ID_1989410_gDNA_ID_1971785_Annot_ID_175433 3000 nt of promoter + ATG

SEQ ID NO: 8378 - DNA, 3000 bp, Unknown; identical to SEQ ID NO: 8373
  misc_feature (1)..( 3000): cDNA_ID_2039691_gDNA_ID_1971785_Annot_ID_57993 3000 nt of promoter + ATG

SEQ ID NO: 8379 - DNA, 3000 bp, Unknown
  misc_feature (1)..( 3000): cDNA_ID_1989403_gDNA_ID_1971785_Annot_ID_57994 3000 nt of promoter + ATG
ataaattcagtgctaaaccggatgggagcaattggttaccggataacaatttgaaccgagggaggcttgagtatttttactggttgattactgtgttacaagctgttaatcttgtgtattatctatggtgcgccaagatttatacgtataaaccggttcaggttcatcatagcaaggaagatagtagtccggttaaggaggaattgcagttgtcaaataggagtttagttgatgaatgagtcttggcgttggatgtgtaatgtaaaattactaaattagtatagttgtaatatgtacttatcaatccaataaattagaaagaatgactttgtccattgttgtgggtgttcaatattgataaacccacctcacaatttttttatttttttgataaacctatataatccgatcggaattaaattaaaacaacattcgtaaattccaaaccaaatttactttgggttaatactaatatatttgtaaattgtaatgttgaaagaagtctgaatcgaaaaataaaaagaatcgatcatgaatgttatttatatgttaaaagtgaaaccaaaactgtattttaaactgatttcatattatatttggttgtcttttttttggggggcaaatatttggttgtctttactaggactattttttcaaaaaagaattgaagatctatgttgattaagccatattaggccgaaaataatataaatgggccaaaaggcgaatacattgatggtgaaacaatcaatcattgatttgtctaagtgttgcagaaaatttatattacaaggcttcggtggccttaaggcccattaactattaccatgttgaatattgaaaagttgaaaacatatatatatataacttttttaacatcatcaattctttattaatttaaaatcgataatacaaatgtatcaatgagtatacaaattgaagctctacaaatcatattgccgatatttaagctgaacgaaataaacgaaaaagtgaaaaacacgttgctttctgttgtagataagccttacacgctaacagattaatcaatctcttatttttctttacctccttcgtcaccggtctattttgatctccttgttgggctatcttcttttttacatagcaccaaaactttttctgaaaatcaaagggttgcgatccatcagttacatcgctaaccacacaaacatttccattacccgcgttaggcgatggttcgatattggttgtaaatatcacccgtgatagatccataatctcgattcctttgttggtatatttcaatggccagaattgaaaagattttgtaatttcttcatatgacttcgataaaaagcgattttattggtgtagtcgatgatttttttattccctcagagtaagattaactgcctccaaagccaccataacgtaccggaaaatctgtttaacaagggatttttggatccataaaatcaatctttatatccaaaaagaacagttggtagcgtaaagattttcgagcacaagaatgaaaagacgtcatcatcgaactttatccttgcttccatgagtgagagaaagaggccaatactcgctgaacatagatggagatgatgtttaacgataagatctgtctgaatcttaatcctgccatcatctaatccaacatttgagtctccaagatcctagattcgggattgtaaatcatctctcaaaaagaaattcatgtcgaaaacgaatcgacgatgtagatgagagtccattacaatcaaagaacaaagagactcacttaaatagatattcagcggaaaggcatcgacacaccaccgaaaaactcgccggattgtggtcggattgatactcatcccaaaggagaggaagattatgaagatttgaacaaagagagccaaagaatttgtggaaaacattggccaaattattaatggtttataactagaacaggggaattgaaactagaaagcagaagagaaacaaccggccgacgtcaaggaaacgatgtcggccggaaacagtagaaaacagaaacggttggtcggaaaagaaagattttgggaacgtcgtcttattcaggtcttatttttttttgaaaattttaaatgtaagcagaaccagtttattcacaactataatgatactatttgattgataaccaactttttgttatagttgaaaacatatttatctaccatgttttgtcaagaaatttaaaatgcatggattttataacaatgaaggtaaatagctgtagtgacgtagtaaaaagaaacattccatttatatagatatgatccatatccattatccaaactaaaaagtatacataagatatgtccgaaaataatttgtttctatttttgtgcaatcttttcataaacaaatcgttccatttaccaaatctgaaacctttcccaaaaattcgatcaaagtcaaaagataagaacatatatcatttccgtatttgattttctaccaagatccaaaatttaaaataaaatacaaacagatacggaaatatctaaaaaaaagaaaaattccaaaaagacgtgaaagcacagctggcatttaaatagaacaagtcttctaaaataaataaaaaactccgtaaatcacgcgtttcaatttttattacacaacttgtcttttgtctttttttccgttataaaaattccaaaatcgtgacggaagcaacccctcttaaagggtattatagtaatatgcctaacaccggaggataagaatcgtaattaacaaaatcatgctcctttcgaatcaatatacgtggatccaatcaccacccttaatcttatccccaaattcgaaaccctaattagctccctcctctgtttttttttatattattcaaattccgcctccaaaatcctctctttctgcgatttctatcacttcacgcgcattgagagcgagagagagagagacccaagcaagagctcaaattagggttatttttccgatttgagagatccattaacaatg

SEQ ID NO: 8380 - DNA, 3000 bp, Unknown; identical to SEQ ID NO: 8372
  misc_feature (1)..( 3000): cDNA_ID_1989401_gDNA_ID_1971785_Annot_ID_57996 3000 nt of promoter + ATG

SEQ ID NO: 8381 - DNA, 3000 bp, Unknown
  misc_feature (1)..( 3000): cDNA_ID_1989439_gDNA_ID_1971789_Annot_ID_58021 3000 nt of promoter + ATG
atagaaataggtgaaacgcctcatgtctttacctcaggtgatcagtcacatccacaggtaaaggaaatctatgagaagctggagaagcttgaagggaagatgagggaagctgggtaccaacccgagactgagttggccctgcatgatgtggaggaggaagaaagggagctgatggtgaaggttcacagcgagaggctagccattgcctttggactcatagctactgagccaggaactgaaatccggatcataaagaatcttcgagtctgtttagactgtcacaccgtaaccaaactcatctcaaagatcacagagagagtgattgttgtaagagatgccaaccgcttccatcacttcaaagacggtgtctgttcatgtggagattattggtagtgactcgtttttggcctcaacacaagtcatagtgtactcatcctgtaacattacctcactcataattgatttcttttttgacaataattcttgattacttgttacaatctacatgactacgcttaaaagttgaaaacctatagtatacaaaaaagttgacgaagatcttcattcaaataatctatttctatggttacaattacatggaaatgcaagaagcatattaaaaaagaaactatacagaaatttatcaaagtcacagaacattttacatcagacaattccgcatcatatatcttgtgttgcagttatatttgctgctgaaactttatcatccgctggctttttcttcttttttgggggtggttcttgcactttccgaataacttccttgtttggcaccaagacaataaacaaatttctgtcccgaaagtttttgctctcctcagtaccaagctgcatatgttgatgagtttcagtgactcaacaaaaacgatccattaaggtgcaaatccaataccaaacttgtattaggaaagagcatagagaaacaatacagacctctcctatttcagtctgaaaacgtctgaggagctcaatagcaatatttctgaactcgttttctcggcctttcatgttcacaatcactttaacctgagtgtattacaagtcacacattaacaaaatgtgacagaactcgcctataacacaaaacaaagtaagtggggacaaccttgtcaccgtcttgcaagaacttccgggctgctctcatgcgtacagaataatcatgctgatcgatgttataactaccggagaaacaaaatacaaaaaccttttgagaagaagcttttctaaacaaaagcatcacaacgacacagataaaagagatagtgaaaatggctcaaatcaccccattttaagctccttcaagtccattcgagtagctgacataagaagaaagcttcagttacacaatccattcatgtaaaatacgacacagtatacacacttatagtttcaacattatctccagttaagcagagaagaatgatcaatacttttcttctgctgttcctttttcctcttttgctgctcatatctgtatttactgataatgaagcaaaaaggaaaaagaatcattctccttgaaacttcctctacacaatgtatatgatacaaattatcatccttgagataatttacctgtaatccatcattctaacaaccggaggatctgcatccggcgaaagaatcacctgaaaaccatatgagatcaagctcagcttacaagaaaggtacttacaagttgtaaattatccaaagaaacacaaaccagatcaagctcagcatcttcagctcttcgaacagcttcttctttggaaactaaaccaatctaaacaacaaagaaactggaaaattttcaatttttgctgaaatcaaaaagtttaaacatttaaaaggcacttcattttaccatgttctgctgatcatcaataagcctaacagtggctgacctactcaatttgagatacatcaaaatcaatcataacttcagctacagaaatttcaatttctatcaattaatagtttccacaattacctaatagctgagatatcaagcgaatcatcatcctcggattctttctgcctacctctcctatcgccgggaaatctagagcctccgccaccaccgcctccgtaacggcaagtgatggcgggacaacggcgatgatgataaggggaaagagaaacaattgagaattcgggtacacagagtcgaagaccaaagagcttagatttaacaggatgcgacaccgttttggtggctccggcgagaatggcgttgaatccaacggtgctggtgatcccagccatttgcttcttcagagtccagagtctgtctctccaccaattagaatgatccgatttaaatacaaaagaacaaaaaaaaatctatcttatccataatatattgggatacatcagattaaaaaatctatactttaaagatttttaaatgaagaaatgaatttgtgaatttagcttagcttattgatagtgacataatgtacttgtaactacagtttcactaatcactgagtaatgattttttgatcatttttttatgttttacaaatttgatataaaatgtctcagtattaaaagataatcaagtttaatgttttttaataatattttccaaaatggttaagctttttgggccaaaccctaaaaatgctttggacagaagctaagagctaaaacagacaataaaacagctgcaacgctctgcgccgcgttctctctttctctcaatctctcaggtaaaagcttcttcaatttcgccacttattagatttgtttctagacggcattgttcttctttttcctaggctttgtcttaaattgtgataaacctaattatctgcgtctttatagaagaactttaccatctaaattagttgtgattcaatcggttatatctacttgctgcgttaagttgattactgtgacgttgagactctaatttagtttgtcttgtgcattttcagaaccgaacactgcttctgtctttcctgttaacgcgaacgaaagattcgagtgatg

SEQ ID NO: 8382 - DNA, 3000 bp, Unknown
  misc_feature (1)..( 3000): cDNA_ID_1989438_gDNA_ID_1971789_Annot_ID_58022 3000 nt of promoter + ATG
tggtcgtggtgatgaccggatgacccttccttgttctcttcatgttcaactagttcccgacccaaaggagtgatcgtatggcgtccgcatgaaattatgagggattgagaaagtaacaagagggagatgatcaaaaaccaaccaagaagagaagaagttctcatctttttcttattctttaaacaaaattgaatagaaaatatatttatcttgtgttttttgaacttatgagtgtgtctgtgtatttatagatttgtgtgaaagtagttgtaccatactctcttcttcgtgcacgcaaccaaacagatgagctcttccttaattaacaactaggcagtgatataatcatcaagacagctcataactgttttttcttttggaaaacttcttacttacacaagagacattttgacacgatccaggatcatatgactctgtcaacgtattaaaatctcaaattttatatgattgactacgtatgaaaaatgggaaatatccttaaatgtcatttttcaatgtataaattagtgtgatattttttaaatatctattttgaaatgctcatctgttcccattaaagtaaaccaccaacatgataaaatacaataataataataatgattatttgacaactacttgattatttaaattaaacttttcattccaagactatctataaagagtacaattcaacatattcttttctttttcctcatcttgaactcttccaaatgaataatgaactaaggcaccaaaagaaaaagcacaaaccaagaaaaagaaaacagagtaataaaactgaatctaatttcgattacaagtatgatattaactcttaacatttttcaataaatgattacaagaaagatctcacctgttttttccggcgagcgtggggtcttaaactgatcaaaacatgtattgagaagaaagaaaccacacaaactacaccaaaccacggcaagcctcaacctctactgcttccgtagtgagtagagactcactaacactcctcatcacagcttccaagactgctttcttgaaccattcgtctcccattttcattagaatctctttcaccaactcagaatccgatgctttggccataaccaaactcccaaggatctccccaaagttgtttggcgcttttggcagatcgatcccaatgtcatcgagcatagacccatagagcagacaaccattccttaagtctttaggagttagaacattcttagagaccagatgttccaagagcttcgccactggttcaacacaaggagggttcttctccaagccgagggagatagcttccttgacaagctcaggatggtaagacggggttttcagttcttctatgcattgtaatgcctcatccaatagacggacattgaaatattcctccaaaagcgagttggtctttctactgagctctactgtgttcaagctagtagtcgtaggaggagccacctcctgtggctgtggttgtggttttggcttctccacagtttgtctggtcggggaaggaacaggtttaggctgttgggaaccattaccttgcacaagggcacttggtctatcgttcagaaggcctccactgccctgaggtagcagccttgaattacctctctgagctgaagcagctgttctcgagtgaaccgcaaaagctcatgaccctcaaatcgcgagtctcctttctacaaaacacatacaagtcattagacttgaacctcagaattcgaagcaacagatgaaaaacatggttggatttactacgtataagctcaaaccaataaaatgtatataagttatatatgtaggtcctttatgagcatcaaaaactgatagagtgcccacctaaaagcctacaaatattaatctttgtccatatttacagcaaggtcacattgcttaagcgccccaccaagaattaggacattgcatactaatgttcaacaaagaaaatctaaactcttaacacataagaatcagcaaaagatccaaactttatcaataatccaagtcaaaaccacaagaagcaatccgacactcaaaatttacagctcatagaacttataagaaggttacaaacataaacaaatcaacacacaaaaaaaaaacagaggatttggataccttaacggcaaaagaaggagcgtctccgccattggtaagatcagaggaagaagataaggtaaagcgtggggcaaagcgtctgcttcctccacgaccacctccaggcctcaagctcagcattgagtcaccttgctgcatcactcgaatctttcgttcgcgttaacaggaaagacagaagcagtgttcggttctgaaaatgcacaagacaaactaaattagagtctcaacgtcacagtaatcaacttaacgcagcaagtagatataaccgattgaatcacaactaatttagatggtaaagttcttctataaagacgcagataattaggtttatcacaatttaagacaaagcctaggaaaaagaagaacaatgccgtctagaaacaaatctaataagtggcgaaattgaagaagcttttacctgagagattgagagaaagagagaacgcggcgcagagcgttgcagctgttttattgtctgttttagctcttagcttctgtccaaagcatttttagggtttggcccaaaaagcttaaccattttggaaaatattattaaaaaacattaaacttgattatcttttaatactgagacattttatatcaaatttgtaaaacataaaaaaatgatcaaaaaatcattactcagtgattagtgaaactgtagttacaagtacattatgtcactatcaataagctaagctaaattcacaaattcatttcttcatttaaaaatctttaaagtatagattttttaatctgatgtatcccaatatattatggataagatagatttttttttgttcttttgtatttaaatcggatcattctaattggtggagagacagactctggactctgaagaagcaa

SEQ ID NO: 8383 - DNA, 3000 bp, Unknown
  misc_feature (1)..( 3000): cDNA_ID_1989436_gDNA_ID_1971789_Annot_ID_58024 3000 nt of promoter + ATG
tacaaatgcgttggaaaaagatccaataacatatgatatgatcatatacagtaattcaataaaagaaataaacgttaatcttaagatttttagccaaaatgaatcattgaacggaccacgggagactagacgagtagatttatcacatatacgcataaatgtatgctaggttcaatgattctaaataaattggcagtacgtacatgtgtagccaatataaaagaacataaaacaaaatatctctaacaatacaaaagtgagaaggttgatattaataaattcataagaattccaagtggaagtaaagtttggagtacgactccacaaggtaagggacacacaaaagaatgagagacaaaggtctactatagaaagcttacgatcatatgatatgtccaaatcatctcatgtgggagcaaacctttctcataataaaaaaatgggtttattcattgtttctatttttaaattggattactttatcgtgtgtttatgtactataaacctcatactaattacggtgtttaattagtctttagagtcctcgtcgatgactagactgtatatatttattgttttttttggatacaattagccactaatcttaatatactataaacataaaatgaataagattcaagagattgaataatagaataaattaacaagaaaattatgagtaaacaaaacttagttgggccggggattagccatcgtaagtgtttggtaaatattattttcaaagtagaagaaaagaccaaataaaaaaaatagaaagaaagagaaatgaccaaacacatatcatcatgggtaaccatcataattccattttctcctaaaatttatattattttttcgatattttattcattgtcttagagcttgtttcctcgtaactcttatgaatttaggtaaggttgggtaggaaaagtaacagaatgtgtaaattagaagctttcggcgtaaaatgccaattttcaaataaaaaaagtgttataaagaaaagaaaaacaactagaagcaatgatcagtaccataatcttgtcacgtttagtctcgatccattgcaagtattatattttcttttataagtaccaccatcttaacattaaaccaaacaacaatcaatatagtaccaaagaaaactacaatctcatgatcattgataccgaagatggaaggattccggttcaaatttcatcacggtttattccggttaaaccggttttgcttactcaatttatatgtttttttttctttgttgtagagcaaaaaaggcctagagagagatttttggggtttttttattattcggattagagagaaaaataaaaagacccttttaatatcaaaattaggtggcgcgaaaataacgccctctctctctcactctttcctttttttctctctctttgatctcctcgaacccatcatcttaaatcgcccgatcaattctatctccggcggtctagcatttttcatcgccggcgaaacattttttaccaattctccagcttggctaatcaactccgatcacgttccgtattcccaaattcgatctcgaagggggacatagagaagtctttcgcgaaggagaatcacgagactttgattacttttggcactcttatgttttcttactggtatgattctctatctcccaacctcagattcattggatctctgattttaagcttctacatttggtttcatcaatcccaattttgattctaattcaaaatcagaagaaccctagattttttttctgggtaataataaatgcgatctgacgttcatgagttagatcattgatagaaactatgaatgaatctcatttcgtttataatttgtgaggattttgcaatttcatggaaaaattactaaatttgattggataaaaagagtctgtgtcattgagagacacaagtcgtggtgtcagtaactgacaaaatttccgttttggattcttcgtcagaaccatctcattcactttgaagaaacataataagtttgtgtttttttcattaccagattttcttctttcatcatccttcactttctcgagattatttctcaaatgatcaaaatttaatcaatcatcaaccggtgattttctctcggagagtgggcaccggttcttgattcttcaatccacgtggtcccatttttggagaaaacaccaaatatctgtcaaaatgtccatttttgctaagtgttaaactagttctatatattactactactacaaaagtacaaatctaacattgtgacactaattattaactttgtaagtttactgtttgcaaagtgataaaggaagtttcttttgttatcttttgaggtgttgtgatgttgatgtaaagaagaagaagaagattggtatatagattgaatcgaaaatcttcatttaattttccagcacatctgaccatggcacttccgtgacactgtaaaagattctttctctgaaaatcttgtttttaaaaaaaaatattcctgatattctgaaactgtagcagctaactagttagaactcaacccacctttctctccttttttgtctgtctctcttgtttgaccactgttttcctagttctacaccattttcttatctctttcactgttaagctctttcttgattattatagtttggatttgcttctttttttttgttttcttcattgtaatgatgatgaaattgtcattagtttgttccccttagataatacatgtgggagtggtttttgttgttgtaaaggtagaatcttatttacttttctttatctgggctgtctaatattctttgctctttttccgcatggcctatctgtgaggtatcttactttgtctcctgggttttgggtttcttgcagaataaagggacttcatttacagcaactggagctgtttttattgtttacctccaagcgcataattaaacgagaggcatgaagaactgctgaattcaatcaatgcaagtttgtttcgttagcttgaatg

SEQ ID NO: 8384 - DNA, 3000 bp, Unknown
  misc_feature (1)..( 3000): cDNA_ID_1989435_gDNA_ID_1971789_Annot_ID_58025 3000 nt of promoter + ATG
tcacacaacaaaatgacatatgtcattcgatattttttaaattaataaaactaataaaattaaataagcaaattaaatgtataatcaatcctactcttaactgatttctccaaagtaaaaaaaaaaaaaaaaaaattatgtaaacaaattaagtactactttcattatattctttttattttcttattttttattatcaatgactaatttttttttgtgttgtagttgtttgctacctaacctcttattagtttagtaatttaattttgagtctttgataactttgacattcaagttttttcaaataataaaccttcaaaatattagacctaccaaataatgtgatacacgatcatttctcttatattgatatatgcaatgacagaagatctaaaagtattgactttaatgatactttaatttttgctttctttttattcttttcatatgaatactcttgaaatcttatttattttatatcaattctatatatttaatcatgagcctataacaatgttgttggagtattatatctggagaataaataaaaccataaatagtttatttataatcaagttgaacaatttttaaatcatcaaggacacaatcatttctctaatattgatatatgcaatggcaaaagatctaaaagtgttgatttcaatgacgatcaatttttgctatctttttatttttttgtacgaatactcttcagacatttgtcagttgatgttaatgcaaactttaattatgagtgtatcacaatgttgttgaagtacataaaataaggaattgatttatttataatcgagttaggaaaattttaaaccacaaaagtaacataattacacagaattgtatcaaaatatcattattgttgttatatgtattcatgaaatgaaaaaatattaaaatcttataaataataagctttatacacaaaatatataaattgatatttcgagtcacaaataaatctaaccataaaaattgtaactattatgaatctaattttattaacaatacaaaaattaacaaatagaaaatataaattagcataaagaacaatcaatgtaatttttttaacaattttcaaaacaaacctacgcgtagcgtgggtattcatctagttctttaaacagaagcttggatcttggtgacaaggcttcaaggggtataccaacttcagggcctggaatggggccgtctcttaggagaatgtccttttacaaaatgccttgcttgattaaataatgccttgattaactaactaaggttcttttggatatatatgctgtgttggatcaaactctccagaaccaagatatagagaccattttacctgcttggataacaaagatatagagaccattttacctgcttgaataacgggttttgtagtgatacacagaaactagattgaagaacgagagacaagggaaaatccattttgcttctctatagcaatctgaagaaaaccacagcaaaaaaagtaccatatatagagaggctcgaacacaatttccagctcatttcaaacaaaagtatctctctaaccgaagataacaaagttacttctaaacaaaaaggatctaaggatctaagtctctctcaagtgatccaagtctcttcagtttcttagagtaggtttctcaggagtgcctgccaacgaagatgcacattatttgaaaatcttggacctcctctttctgtgtacatcctatcccatctccatacatgcatcacctcatacgctaaatcatttctgtgatattcaaaataactgaacaggtaatattcaattacttttgtttctattgctaatcaatactcaatagttactttgtccggaagtttaatccttatattagcacgtttataacatatacatcatttatagattgatcttcttttatcctttcgaagaaggtaacaacctcggtggatatagcgcaaatatagataactttttggtttgataacaatataaacacatgtgtactaactacaaatgcgttggaaaaagatccaataacatatgatatgatcatatacagtaattcaataaaagaaataaacgttaatcttaagattttaatttagccaaattgaggactactcaatccctgaaagtgccgatccttttttgatatacgagaaaatcaaaacagctattgtcaagcattctcttttaaggagtagcaaagtgaccatcctgatttacggtggtgctgagacgaaatggttgactgaatcgcaagacagactttgggattctggatttcaagtctttctctgcaaaggtgatcaattccttctctaactcaatatttaaaccctcgaatttatcttgtataactaagtaatctattgtatcttgtgtaactaagtaattttttttttcttgcaggggataaacgtgccttattcaacatgattataacccaacttgttttctggtcatggaactggaaggctccaacaaatttggcggtactcacagaaaacaaggaggagatggaacaagaccccaaatttttcagatttcgtcaagctttagaaaataaaggtttctttgttgccgtagaacaccctgagacactcatcaaccaagaaactgccgttgaagagccgccagatgactccccaataccttactatcaatatgcaagtgacaacactcttaagttggcttactggagcaaagaagatgatgaagctttcagatctaaacatgaagaagtttgaggttaagaacgcccctgacaacaatcgaacctctttttccttggcgcagacaaatcttaagttgtataatctttttttttggcttttacagtattgcgtttgtgctattttaagactgtcgctttgaaatacaattcttaagtcatccatcacacttcttgattgtggatttgacatgagcactcttagagtgtgtaggtacgttctgaaagacttctcttttacattgatcaactaagatttcagaaaatg

SEQ ID NO: 8385 - DNA, 3000 bp, Unknown
  misc_feature (1)..( 3000): cDNA_ID_2134074_gDNA_ID_1971789_Annot_ID_175535 3000 nt of promoter + ATG
ctgatagaatggagtatgcaggagtgctttgtctgcaagcaaagaacacaatggcggtgtgttaagtgtccaatggctgctcatgataaacattctccatggtcaaaagaaatacttcacttaaaagaccaaccaggaagagcagtttgttggaggcatccaactgattggcggctagacacaaaggttgattttttagtttaccgctttcataagatacttcttgaagcttcttacgatttgtactttcatagagttttactcacaggactgacaaaatctctgttgattgagcagcatgcagttgcacagagtgagattgaggtcagtgtttctttgccacgtgccaaatgtgactgtagtaaaggaaactaattcttacatagacttgccgctcgaaaatcaaaaagagggaagagatttgaaagctggatattttgtttttatcttacacaatttcaagagctaggcactgaatgtttatctactttcttattcaggaagtcttttgccagttgcctttgccatatgtggaagaggagtttaagattgacttagcatggaaagattctgttgtgaaggaagatccgccttcttatgtgcacattagacgcagtatcctttatagtttccacattcaatatttctgccttaaaagtacataattctcattttttcacaacattagtgtgtcttttccttgactgagttaagatatttacctcgttaagaaaaagcgtgataatgctaatgatggtgttgggtgcacaaattgtggccctaattgcgatagaagctgtgtttgcaggtatatttgttaattaaccaaacaaattttctctgttaacattcatttcgttttgaatagtttccgttttgaaaaatttctctcagggttcaatgcataagctgttcaaagggatgcagctgtcctgaaagttgtggaaacagaccattccgcaaagagaaaaagatcaaaattgttaaggtaaaactagtctctagtttatgattcttgcattacactcttcttgtgtttttttatcttgacatgtcatgttattggttttacagactgaacattgcggttggggagttgaggcagcagaatcaatcaacaaagaggacttcattgtcgaatacattggtgaaggtaaactatcttgatttggtctttgagccttatgtttgtggtggaaagcgacagagtttttagtgatttgttttcactctatccacagtgattagtgatgctcaatgtgagcaaaggctttgggatatgaaacacaaaggcatgaaagacttttacatgtgtgagattcaaaaagacttcacgattgatgctaccttcaaagggaacgcctctcggtttctgaaccacagttgcaacccaaactgtgtattggaaaagtggtaaagcatatattatttcatataaatatgtcgatgatgctcgagtaagagagcatgagtcagtttgattattttgttctaacaggcaagttgaaggtgagacccgtgtgggtgtctttgcagctcgtcaaatagaagcaggagagccacttacatatgactacaggtcaagttcttgaccatttgtttcttttatgtgcttataattagcctaagtaatctgagattctgatatattagcttctctctttgtgtaatggcagatttgtgcagtttggtcctgaagtaaagtgcaattgtggttctgaaaactgtcaaggttatcttgggacaaagaggaaagaaccaaactgtttggttgtatcttggggagcaaaacgcagaagattgtttcaccgacctatagcccgtaaaccgcagcaagattagctgcaaaatatctataaacaatgtgctttgatagtttgtctgttgtcgttatctagtaatctctgtggagatatagaaccaatcgtgcttgtaaccgaagcttaggcccacaattgtataactgctagctgaagccacgggatagaccggtcggttataccatacattctttcagttccattacaacacaattattatttaacccttgtcaaatttgaatctgatttaagaaaatacattcccttaaaaaaaactatctaaagatctcgcactatcatggcagaaaattcgacagaacaaattttttgatataaccaaacagaagaaaacaaattatataaagactacaatcatattacaaaatcgctatagcaatctaagtatcaagtttcatcatgtgactggtttcgctctgccttgagctcatcaggtgatcgagtttcagatcacgaccagttgattaagggtcggcctagtcccctttttttgtttttattacagaaaatacaaaagttacagagaatacaaggtcgggttgcagatcacgacgttacggatcatcgtggaatgtgggtagaaagactcataagactccatgaattcgatatgtacctcaatggtgcgaggatcaggtttcgggatacgtctttgttgttgttgaagtttctcgactttgttgtttgatgaaaatatgaaattaatgtattattgatagataagtaaacaacaaaatagtaaaacccaaagatgaaccaagtgacaaattgtgacaactacatggtagctatcctaattatcgaacataaatttttcatcaaaagtctttaacgaaccaagtgaatgacatgtttcaaagtcgaatactaattattgtactggtttaaaagatttgttccaaattgatatgatttaaaccagaagtctccgtatgaaacggagacttactcttcggcaagagaaggttttagtcaaaatccccattttttaaaaattctcaacaaaacgcctaaaaactgaaagtgcttattcctcttctccggcgaaccaaagatcaaacctttgcgagagaatttccctctttttcggcaacgagtatatccaatcagcaaggaattttatgatcgcttgataaattgaaactatttggagtgggtagtg

SEQ ID NO: 8386 - DNA, 3000 bp, Unknown
  misc_feature (1)..( 3000): cDNA_ID_2106236_gDNA_ID_1971789_Annot_ID_175534 3000 nt of promoter + ATG
gttaccatttagcactactgctaattgcaatcagcacacaacaaaaatgggatttgttatttgaaagcacttatgttgcatgtctactacttaaattagaataaacaatgtcacagaataaaaaaggaagaatctttacgtgatgcagagtttgatcgctggagaagtaaacatcttttgacattgccattgacggccatggccagcgaattgttgctctgtcattaggacccacaaatcccccaaaaagattgaaatttgtttaattttcctcaaaacaaaaaatgacgattttgacctcgagatttttcttacccggagagaaggctaacaaagccggcgaggccaagctccgtcgtctccattgaactcacaaccatcatccaagtaaatatcgcaaatccacacaaatgcctgccaaatttcaaaaccccgtttacaaattttcaaccaagggaaaaaaaaatcagaagaaaacgaaaacatacgtccagatgttgagagtctcattgtgccatgagaaagcgctgaggaaagtttctttgattgaccactcacatcgataatgattgtgtatgaactcgttatctttcaaatacctaggtaactcctcgaacttcatcaatctcttctcagatctcttcttttcgccggaatccatacctttaccatttcttatcttcgtagattccttcaccgttctccgtttctgcatgattcccctccctctctcgcacagctcgtcggggggaaaaggaggagaaatctagctacgaaattgaactccggcgaatcacccaccaccgtagatttctctcttcttctttttattttcagtatttgagaatctgatttgttttttttcgatcttcgtggtatgcttcgtcgcctacttatacggagatgaaacctctttgaattttaaaaacgagcaagcttcgtgacttttatctacgtagcgtctttgaccggtcttttttacacgtgtctcttccttattagtatgttagtttcgccttagtgtgagggaggatacacctgattatttttacccgccgtgtcaatttgaaacaaatattaaagttacagttggaaggtgagaaatgcagaatttgtgggtctctgtttaaacctatagtctataattattaaatcgagaactttgtttttacccctcaagatttttttgttgcctgacccttaataacattgttgagtaactaaaacatatattttcgtttcatttatacgtttcctaaatgatttgataatatggggagtgttgatcaaaacagattaaacgaacgaggtaaattgaaagagtaggtaactttttattggctttatggcataagattctccaaggagggttgattcataagacaagacaacacgtacatacatatctatatttaattggtatgaacatggattatgttattgatttatttaaaacgcgtcaaacaattggatataataattaaaaactgaatgaatggttcgcttaccaaagcaaaatatagttggcccagaattcgatgttggcatgttacgactacattgctacattgttatcatcaatgtttcagattatttttaatttgtactttcatagtaattcaccgcaatgaacgatgaggaaccatcgaatcggactaaacgagggtaacaaattttgagtagtaaagtgtagtaacaacaaatgagtgaacaaaaatcgaatggaaccgtacgaatatagtaataatttttgttgttcgcctgctgaatctcaaatgataacctttaggatctttttagcaaatgataatcagtttgtaatctagatttatttggagttcttcattttaaaatcaagataacgtggatccggtttgatccggtctaattcaaatttcataatataaatacaagaatatttcaacattagcctaaaaatacattaaagaaaagagtgtagtattttcaaaagatttgttgtatatcatacaaaatgaatgtatattgttttgtgtataattatatacaaagttgtcgtgaagtgaacatatattctagtttgcttagttggtccgtttttcatctaaatcgattcttagacgccataatttcttgctaagaggattaagtataaactatgtgtacatggatgagtaaattctttggattatttaacgattactcattatctttgtaaagtgtataaagaaaggtgagtattgcgtggtgaactgtggaaacctagactcaaagatcaatactttattagattttgttgctaaatatggtctaacaaagcaatttacgctaggtattttgtttgagtatagtaatcaaatgaaaactgaattatcgaaatttagacaatagacactaacgaaatgaaaaaaaaaaacgaaattaagatgttatacaaactgattaatccatttatctttcactagatgaaatcatagatcatttttcgtgagtctgtaaagatgtatgataaaaaaaagagagtaattaattaaaacatacctagaaagcatataatttgatttaagttgtgacataacgaacctaaaatgacatgtaaacatatccaaaaacgaaaacgaaatatcttgtttataactaacaaaccgaacactgatcaatacgatatactttcaaatcatgatttgattaattttagctatttgttcagttccgttttgggaaccggcattaatcattgcgtgtagcactgttattggtagatatgaatgtgggggattttagttggtaaagaaatttaactagcagaaaaaatgtttgggggcaattaaaacaatatttaaaatacaaggacctttttgtataatattttaggacaaatctcccgccttaaattccctccatattttttcatgtctcttcgcttttcgcctacccaacaaagacaaaacgtaactgtcttcttcttcttactcttccatcttttgtactttcgagtttaggatgttagatctgggaaac

SEQ ID NO: 8387 - DNA, 3000 bp, Unknown
  misc_feature (1)..( 3000): cDNA_ID_2134078_gDNA_ID_1971789_Annot_ID_175533 3000 nt of promoter + ATG
gccgcgaacagaacacgataagtcttcccccgggtacaccggcttatggcaaacaagacaatcaacctgacaccaaatcccatatagtcattatgtcaataaatctaataacttagtcactaattgacttgaagattcgaatgactttaaaagtaaactagtagtcaaacaatatctaaatgaatatgagatcttacacggacatcactaaagccaaaaaaaggtgatgaattcaattcacagatgcaatatacttcaaacaaacttcataactcaagatattatgtatatcctaaaatccaaatcccatgtagtctatatgtcaataaatctaaaaacttcacaagtcattaatttgacataacaaacaacataccattttcttggcaccaacaagaaaaggaaggaaacatgtcgactctgaaacaccagaagccactcttctcttgacccaatccttcacatgatcatccaagacaaaccctttcttgactctgtcagacggattctgtttccgggtaaaagcagtgactccattagcaattttaatgtccttgacctcttcctccggtggaatcattggtaaatgtttcccattgcattctccggctagattttccggggaattgatagatttggctaattcagggcctgaagccgccggaagaaaagaagggcaacaagtgagagcaacagatgcagacatagacatgtttcccagatctaacatcctaaactcgaaagtacaaaagatggaagagtaagaagaagaagacagttacgttttgtctttgttgggtaggcgaaaagcgaagagacatgaaaaaatatggagggaatttaaggcgggagatttgtcctaaaatattatacaaaaaggtccttgtattttaaatattgttttaattgcccccaaacattttttctgctagttaaatttctttaccaactaaaatcccccacattcatatctaccaataacagtgctacacgcaatgattaatgccggttcccaaaacggaactgaacaaatagctaaaattaatcaaatcatgatttgaaagtatatcgtattgatcagtgttcggtttgttagttataaacaagatatttcgttttcgtttttggatatgtttacatgtcattttaggttcgttatgtcacaacttaaatcaaattatatgctttctaggtatgttttaattaattactctcttttttttatcatacatctttacagactcacgaaaaatgatctatgatttcatctagtgaaagataaatggattaatcagtttgtataacatcttaatttcgtttttttttttcatttcgttagtgtctattgtctaaatttcgataattcagttttcatttgattactatactcaaacaaaatacctagcgtaaattgctttgttagaccatatttagcaacaaaatctaataaagtattgatctttgagtctaggtttccacagttcaccacgcaatactcacctttctttatacactttacaaagataatgagtaatcgttaaataatccaaagaatttactcatccatgtacacatagtttatacttaatcctcttagcaagaaattatggcgtctaagaatcgatttagatgaaaaacggaccaactaagcaaactagaatatatgttcacttcacgacaactttgtatataattatacacaaaacaatatacattcattttgtatgatatacaacaaatcttttgaaaatactacactcttttctttaatgtatttttaggctaatgttgaaatattcttgtatttatattatgaaatttgaattagaccggatcaaaccggatccacgttatcttgattttaaaatgaagaactccaaataaatctagattacaaactgattatcatttgctaaaaagatcctaaaggttatcatttgagattcagcaggcgaacaacaaaaattattactatattcgtacggttccattcgatttttgttcactcatttgttgttactacactttactactcaaaatttgttaccctcgtttagtccgattcgatggttcctcatcgttcattgcggtgaattactatgaaagtacaaattaaaaataatctgaaacattgatgataacaatgtagcaatgtagtcgtaacatgccaacatcgaattctgggccaactatattttgctttggtaagcgaaccattcattcagtttttaattattatatccaattgtttgacgcgttttaaataaatcaataacataatccatgttcataccaattaaatatagatatgtatgtacgtgttgtcttgtcttatgaatcaaccctccttggagaatcttatgccataaagccaataaaaagttacctactctttcaatttacctcgttcgtttaatctgttttgatcaacactccccatattatcaaatcatttaggaaacgtataaatgaaacgaaaatatatgttttagttactcaacaatgttattaagggtcaggcaacaaaaaaatcttgaggggtaaaaacaaagttctcgatttaataattatagactataggtttaaacagagacccacaaattctgcatttctcaccttccaactgtaactttaatatttgtttcaaattgacacggcgggtaaaaataatcaggtgtatcctccctcacactaaggcgaaactaacatactaataaggaagagacacgtgtaaaaaagaccggtcaaagacgctacgtagataaaagtcacgaagcttgctcgtttttaaaattcaaagaggtttcatctccgtataagtaggcgacgaagcataccacgaagatcgaaaaaaaacaaatcagattctcaaatactgaaaataaaaagaagaagagagaaatctacggtggtgggtgattcgccggagttcaatttcgtagctagatttctcctccttttccccccgacgagctgtgcgagagagggaggggaatcatg

SEQ ID NO: 8388 - DNA, 3000 bp, Unknown
  misc_feature (1)..( 3000): cDNA_ID_3045401_gDNA_ID_1971789_Annot_ID_175527 3000 nt of promoter + ATG
tgtttgtgacaaccgaaatagtgtcaagaacttcatatcactcggtggattactttatttgattgaatcttagttgataacgaaatcctttctttttctatgtatttcgattattaatgtaatcagaaaattttaagtattttttcacgttatccaactttgagagtactgtccttgtgttggccaataagtggttgaatatatggtaaaagtataaaagctcccatcatgttggacctactagctttgctatatataaaatgtcctgtcattgcataacgtaccactttctgaatctgttttacgtgcctatcaatgatttgtctttaacacttaccgtaatattctacaattaagttcaagtgcctagattttctaaatgtgtataaagacattatatatggcaaatgatcctttagataaccatttcatttaaatcaagcattcgattcgcattcatagataaaatactattcaccggtccagttctaactagccatccagtctggttagaaagcaaaattgtttattttattttaggttcagttttcagatcggttttctaacactgttttggtttggttctcgtatcggttcaaccggattggatagtcataaagaatttgaagtccttaattaagcccaaaacaagtagagcccatatatatactaacaaagccgtgattagggtttttggttttcgtcagaagatttcaaggtttagggtttctgcaattcaaccatggcagagcaggtttggatctacattacattgtctttatgttataattggggattgctagttgttggattctcgttttctgggttctttgattttggcttttaatgatggattggtgtgtttgcagacggagaaggcgtttcttaagcaaccaaaagttttcttaaggtaattgtcacacctcaaaaattcaactgctttgtattttggctatggtctctttatgcttatgattcaaatgttctatcagctcgaagaaatctggtaagggaaagaggcctggtaaaggaggtaatcgtttctggaagaacattggccttggtttcaaaactccaagagaggctattgaaggtactgtttttatgtctcagctctcaattttgctttaccatgtctagaagaagcttcatttgttaaaaaagttggattctttagagaacttagaggattttggtttagtgtctctaatttggttgttgagacattttctgagtaatctgattttagagtaatgccgctttgttagtattctcattgatctaagacttgggtagtagattggtggtatttgcccaattttaggagctttggggaaattgtttgacatagctatgttttttcttgattttatttgcaggaacatacattgaccagaaatgtccctttactggtacggtttcaatcaggggtcgcatcttgtctggaacttgtcacagtgcaaagatgcagaggacgatcattgttcgtagggactatcttcattttgtgaagaagtatcgaaggtaaaaggatcggttttgttattgtgttcaaattctctcagcttatttgaaaccctccagctaaatgcttaatcctaccagatatgagaaaagacactcaaacattcctgctcatgtttccccgtgcttccgtgtcaaagaaggagatcgtgttaccattgggcaatgcaggttaggagcactaatatctatatacttggtttttcgttcaaaggaattcatgctattgtataatactgcctgaactttgataccatctttatttatcacgcaagtttctaaacttatcaagttaacgattcaggccattgtcaaagacggtgaggttcaatgtcctgaaggtcattccggctggaagctcttctatcgggaaaaaagcattcactggaatgtaaaagagattcagatttgttgaaaaggtgcgaactagtattctaagagtttagaatttttctagcagagttattggattcgtttcttaagatctatgatcaaaggaaaccagattttctgtttcatttagtgattcaagtatcaagatatgtctatggttatagttttactccaatatatctagtcatgagttgctatctactagtcatgatttcgatgaaaagtggaattatgcttttgctatcttgatatttatctttgtctaatcgatatttcttgcttccattacattaatttctgaaaatgatatttaagagaaaacaatacagaagttgcataactccagggaatgctatgaacgtgcagcctcattctatgccatacatttatataaaagctccgattgcaccccttaagcttattaagtcatcttcaaaattagaaaaagaggtgcctaagtcatggcgaaaattagtcgaatgaaaacgacacaaaagattcttcatgtataatatacaaaaatatgaccccgtatttcacatggtatagttttttattacatcacttttccaaacgtaaagttaattaaacgttgagaaatgtgatgttgcttggtaacagctcaattctcgaaaacacgtgaaacctggcgcacttgcttctgtttcacatttgcatacaatttcaaccactaacacgcaaccatctccaaacgcagggccacgtttatctgcgtttgcgttaccaaagtcaatgattgacaaacaaacaaactaacactccaaccaatgacgagttttagataaggtattcgtgattttatacaatgcatcaaacagaaatcgaaccaaacacctccttaagttgtttcacggttcgaccaaccgcatcgaacgccaaattaacgagaagaggttgttgttagttgaggaccacgcacgatgggtgaaataaaaaagtccgaatcttttgggttcgttgagtagcttctgacgtcatttcgcacattctaattctaatattcagtctttaaagtcttaaaggatcttcattgtactttgaagtatagtttctgtaacaaca

SEQ ID NO: 8389 - DNA, 3000 bp, Unknown
  misc_feature (1)..( 3000): cDNA_ID_1808149_gDNA_ID_1971789_Annot_ID_175526 3000 nt of promoter + ATG
ttctttcgccttcgttgcacccagaagaatttatcctcttttttgctttttttgtttctatttaaaaaggaaaaaaaaaattaagctaaccctagaagacgcaaaagcagacgtgatacgacaaaggaacgcgattgcgtgaagagacgagtgtcaaagtcgaagaatttatccgaagccgcaacaacaaaggatcaaacttctcttcacgaaaacctctttcaccactatacttaaacaattaatatcctcaattttcttcttcttcttcttcctcttccacttcgcttcttccttttttctaataaatttttgacattttcaataatggaaagttgcgcagaagcttctaatgtaagtttactctctcacgcaaacaccagagtcgaagaaccctttcgctcttcttcatctgttgtccaagacaagacaagataaagcctgttttgttataaaaagtaattattttaatttaatatttttatgggggaacggtaattctgtaagtatttcagtttcaccccaatagttttgtaaatggtttaatttacccctaacagatttaaaatttacacaaccggttacatttggttcggtttatttactttggtttttcacaaaaaaaaacacataacgcaaccataaattgtactgtatatggttttgagtaacggtatcaacatgaatttcgaacatgtaaaatcacattggatatacacaaaaataacaacacaaaagaataacaaaattatctttttggttcctaaaaaaatctgaatcttggcgatacggacaaacaaaaaaaagttcaatacaataaaattgtggagccaataaattactttcatttcttttgataccaaaacttataaccaaccttcaaaaccagcataactctactcgttaatcttgttatattcctagatttgaaccatcgtggccatataactgaaagctgaattcattgtgtaagtaacgtatgatatgataatactatatgtgtataaataggtggacacatatatgtatataaactaaatttggcatttcctatcatatgatatgataagcttgattggcatgtgatgtggattggaccacacaaacacacacacacagaagatgtccataggccataggcggtccattattattggtaagaaatgattaaattaagtatgcaaacaacttgacattgaaaatgatcttctgaaagtgatatttcaatgttttcacacaatcttgcccgtaaatggttgcatttaattgttactagatagaaaacggaaaaaaagaacaatttttttttttgtgtttttgtttttaatctctttctaattatgtttttgtgaataactgtgtgtttgattaatatattgttttcgagattcatcatataatatttgttacactctatagatgtgatagagttatctactacaccaataagatataagaaggccacattttgattgtaattgtatatatgaatatctgtggacaaaaaggtaacacttcacataattccaaaggctacgtaacatcagattggttgagcttccacatgggaattcggcaaatctgtaatcttctgtatatgccaaatatgtaattcttagacttaggaaaaaatggtcatctcttcaataataatacttctaattaaatggtcctcactaaaacaatgtttacttaataaaacgtataaacaaatagattttgttacatataaaagtataacctaaaatgcatgcagcaaatttctggattgttagcatatagctcagaacaatcggaaacaagatgtgctgccacctgaaacaaacatactaatatatgattattaagttgacatgacctaaggggaatctcgtgagattcgttttttgacaacttagctttggatccagaatcaaacatagcccacacaaatgaaaataggataacatggattccacaaactcttcacactttttatattatatatagtacttgtgattttataatataaaataaactatatcaatgatattagctagatatttaattcgcgttgaatgtggatactacaagagtttgatagattaaattgattcaagcaaatattttagtgggaatttgtaaaacactacatcttcgttatcgacttgggtatgagactaagagacaatatatatatattctattaaaaaaactcactgttacatgcgataaatggatgaataattcttgcttaattaagtttgagtatattactttgtttgtgacaaccgaaatagtgtcaagaacttcatatcactcggtggattactttatttgattgaatcttagttgataacgaaatcctttctttttctatgtatttcgattattaatgtaatcagaaaattttaagtattttttcacgttatccaactttgagagtactgtccttgtgttggccaataagtggttgaatatatggtaaaagtataaaagctcccatcatgttggacctactagctttgctatatataaaatgtcctgtcattgcataacgtaccactttctgaatctgttttacgtgcctatcaatgatttgtctttaacacttaccgtaatattctacaattaagttcaagtgcctagattttctaaatgtgtataaagacattatatatggcaaatgatcctttagataaccatttcatttaaatcaagcattcgattcgcattcatagataaaatactattcaccggtccagttctaactagccatccagtctggttagaaagcaaaattgtttattttattttaggttcagttttcagatcggttttctaacactgttttggtttggttctcgtatcggttcaaccggattggatagtcataaagaatttgaagtccttaattaagcccaaaacaagtagagcccatatatatactaacaaagccgtgattagggtttttggttttcgtcagaagatttcaaggtttagggtttctgcaattcaacc

SEQ ID NO: 8390 - DNA, 3000 bp, Unknown
  misc_feature (1)..( 3000): cDNA_ID_3045409_gDNA_ID_1971789_Annot_ID_175523 3000 nt of promoter + ATG
ccaaaagtggcaaaagaaaacattagttgactagtgtgacacacaacacacacaaaaaagtaataatatatataatagcagagttttctctcctctaaaagtgtccacgtcactacatctttttaatgtggagcccacatgtttttactcgccttcacattttttctatgcgtgaaatagatttagtgatgtttatggggccacgatttggtcaaaaagcccatgagccaaagaaccaaatagacttagtgatgtgtatcgggccaagatttagtcaaaaaacctatgaaccgaaaggacctaagaaaacccagttaaaattgcaaacccttgatttcattttctcctattcgatcgacgcaattcagaggacgacgaaagagaaaaagagtgtttcagtcactgccctgttgatgcacgaatttcaacaaagtatatttgtaagttctttgataagggaaaaacattctcatcgcgttgaaggtcgggagttaggtcgttcttgcgataaacatagagtttattagttttatagctgcaccttgtaaaaggctgcctacgtacccttagaaaagggatcaagccatacgtagttcatattataataagtgagctaggtcatcgttggaggtaggtcgtatattgagataggcagtttagagatgaggtggcaggttggtgacgagctggcaggtaggcgaagagctggacgaacttagttacgaggcgaactggttgatagacaacgagttagacgaactgagtatttgagtgacgagctggtagccaggggccaagctcgacgaaatgtagtagagagacgagtcggacaaatcgagttgtctggtgaaaatctagacgagctgggagacgagataggcggactgtgtagtcaatggacgaactgacagctaggcgaggagatagatgagttaacttgagggacgagctgctgactaggtgaggaattggacgaactgactagctgacagctaggcgaggagatggtcgttgagtcatgtggagcttgaagacgatctgaagaacttaaagacgagctgtagagcttaaagacgagctgaggagcttgaggaccagctgaggagcttgatgacgagctgtggagcttgaagacgagctgaggaacttgaggacgagctgagtagcttgaggacgagcagaggagcttgagaacgagctaaggagattgaggacgagctgaggagcttgatggcgatctgagtaccttgaggacgagctgaggagctagagaacgagctgaggagcttgaagacgttttaatatggatttcttcctccttttttccatgcctctctatttatagaaaaactaagctcactacataaaaggtataatatggtactttaaccttgatcattgtgacgttggtctccaccatattggcatagcagctaacggaggccagcaatctacatgtatgtcatgctattattatgtagaggaaggactgaagagggaaaaacctatatgagccaacttgaatgggctaaagacaccaccatggctgaaacgtgttggaaacaaatcaaaacttcactaaatgggattagagtggcgagaaaaagattgtacatgatatcacttcgcaacatgaaaccccccgacgtgtgccatccaagagatttggacaacacatgtgagaaatgttttttctacaaacaaatgtttaagtttatttttatggtataacttaaacaaaacatttagagagttggaaactgtttttaaaaaattccctataatgtttgagcagtgaactatcacaaagactcaaaacaaagttattactcttatttcttttgctttaatgtgtgtctttccttgctgttgtaaggaaatttatatttacaataaaatcaaacttttaattaattatctaagcatatcgtactttcaatgttaatattgttataatccaactctttttggctaattcgcgaagagacgttgaaaagtgaaatcttcccaaaaccaaagagtagtttctaagattttaacagagacacaaagagaaaaaacaaatgggcgggttcatattgggccaaaattaacaatggcaacgatgtgtaaaataacttcgtcgttagtctctgttcttcgctatcctctgcagcaaccgcttaatacgagagagagagagagatttccattgtatttttaatttaaaataaaatatataaaaacaagaccaatgtaacaaatgcattgcttagatatatataactctaaaaaatattcttacaagatagtaagtttggtctattgtcctataaattctagcatataactggtaacaatatgaaaaaaaaatgtaaaactatacatagattacaaaaatgtagaaatcaaaaaataagattagcaaataacaaagatattcaccttttaatcaaagatcagtaaaaaaaatcgaagttataattacatactaacaaaaccaaaaacaaaccaccaacgcgcgtgtctcctccctagttaattaaaggcaaaaggaagacgagtaacacgtggcaaatactctatctgtagccgtcataaaaaaaattgtgggaccctacaccctataaatcaagaactactggttgttcgccagcgaattaactaaaatatttaataaacataagaaatgacaagtttagccctctttccataggcataacatggtggctaatttgggaatttcagcagcattcggagtcaaaataacgatagcgcgtgtcggtgaaatcgcggtatacgcgcgtcgatagccgccaggagaatcctttttttacacaatcaaagagagagatcccgtaaatgttttatactctgatttctagggtttgcttttgattctctttcgcgttccagataaataaatccttttgtggaataatttcgtgatttcgtttgtgggttatccgaattttgtctgaatttgagtttttgagaaggaaaggtttgttttttcggggg

SEQ ID NO: 8391 - DNA, 3000 bp, Unknown
  misc_feature (1)..( 3000): cDNA_ID_3056917_gDNA_ID_1971789_Annot_ID_175516 3000 nt of promoter + ATG
ctcttcagacatttgtcagttgatgttaatgcaaactttaattatgagtgtatcacaatgttgttgaagtacataaaataaggaattgatttatttataatcgagttaggaaaattttaaaccacaaaagtaacataattacacagaattgtatcaaaatatcattattgttgttatatgtattcatgaaatgaaaaaatattaaaatcttataaataataagctttatacacaaaatatataaattgatatttcgagtcacaaataaatctaaccataaaaattgtaactattatgaatctaattttattaacaatacaaaaattaacaaatagaaaatataaattagcataaagaacaatcaatgtaatttttttaacaattttcaaaacaaacctacgcgtagcgtgggtattcatctagttctttaaacagaagcttggatcttggtgacaaggcttcaaggggtataccaacttcagggcctggaatggggccgtctcttaggagaatgtccttttacaaaatgccttgcttgattaaataatgccttgattaactaactaaggttcttttggatatatatgctgtgttggatcaaactctccagaaccaagatatagagaccattttacctgcttggataacaaagatatagagaccattttacctgcttgaataacgggttttgtagtgatacacagaaactagattgaagaacgagagacaagggaaaatccattttgcttctctatagcaatctgaagaaaaccacagcaaaaaaagtaccatatatagagaggctcgaacacaatttccagctcatttcaaacaaaagtatctctctaaccgaagataacaaagttacttctaaacaaaaaggatctaaggatctaagtctctctcaagtgatccaagtctcttcagtttcttagagtaggtttctcaggagtgcctgccaacgaagatgcacattatttgaaaatcttggacctcctctttctgtgtacatcctatcccatctccatacatgcatcacctcatacgctaaatcatttctgtgatattcaaaataactgaacaggtaatattcaattacttttgtttctattgctaatcaatactcaatagttactttgtccggaagtttaatccttatattagcacgtttataacatatacatcatttatagattgatcttcttttatcctttcgaagaaggtaacaacctcggtggatatagcgcaaatatagataactttttggtttgataacaatataaacacatgtgtactaactacaaatgcgttggaaaaagatccaataacatatgatatgatcatatacagtaattcaataaaagaaataaacgttaatcttaagattttaatttagccaaattgaggactactcaatccctgaaagtgccgatccttttttgatatacgagaaaatcaaaacagctattgtcaagcattctcttttaaggagtagcaaagtgaccatcctgatttacggtggtgctgagacgaaatggttgactgaatcgcaagacagactttgggattctggatttcaagtctttctctgcaaaggtgatcaattccttctctaactcaatatttaaaccctcgaatttatcttgtataactaagtaatctattgtatcttgtgtaactaagtaattttttttttcttgcaggggataaacgtgccttattcaacatgattataacccaacttgttttctggtcatggaactggaaggctccaacaaatttggcggtactcacagaaaacaaggaggagatggaacaagaccccaaatttttcagatttcgtcaagctttagaaaataaaggtttctttgttgccgtagaacaccctgagacactcatcaaccaagaaactgccgttgaagagccgccagatgactccccaataccttactatcaatatgcaagtgacaacactcttaagttggcttactggagcaaagaagatgatgaagctttcagatctaaacatgaagaagtttgaggttaagaacgcccctgacaacaatcgaacctctttttccttggcgcagacaaatcttaagttgtataatctttttttttggcttttacagtattgcgtttgtgctattttaagactgtcgctttgaaatacaattcttaagtcatccatcacacttcttgattgtggatttgacatgagcactcttagagtgtgtaggtacgttctgaaagacttctcttttacattgatcaactaagatttcagaaaatggctgcttttgtctcaagtgttttgtatgtttggattctgtctccataaccaaaagctgttgtaagaggactgtttcgttatcagttgtttgaaatgagtgatgtttaaggcaccatagttgtgcttctctctgagtttaattgtttatcagttgctacataattgtcatctttatggtagattgtatatcataagcctcatgctctattcttccttgcatatatttgcatgatgtactctacgtcacctgctttctgcagattggatctatcatctctggaaagttttggtacgcgtatttagtgggatgatacattgatacccatctctattttcattattggcctactttaggcaaacaacagatttgctctgtaggaatgatgcaatcatttacgtttgctttttatttatttatagattcctgcatttggagcatacaaagcttctggtcttagtaagggattattgtcacacggttcagaggtgatcaaaattgtaagttgcatgcacttggatagtaccatcagaataaaatgaaaacttcggttctcattatacatgagaaattcaaaaacgtatcaaccgaaccggattaaaatcaacgattaatgtataaccggactcgagtcgattcaatttgaaatgaaaggataactcattagacacagagacgagctttttagtttgagctctctctcactatg

SEQ ID NO: 8392 - DNA, 3000 bp, Unknown; identical to SEQ ID NO: 8383
  misc_feature (1)..( 3000): cDNA_ID_1989436_gDNA_ID_1971789_Annot_ID_175514 3000 nt of promoter + ATG

SEQ ID NO: 8393 - DNA, 3000 bp, Unknown; identical to SEQ ID NO: 8381
  misc_feature (1)..( 3000): cDNA_ID_1989439_gDNA_ID_1971789_Annot_ID_175511 3000 nt of promoter + ATG

SEQ ID NO: 8394 - DNA, 3000 bp, Unknown; identical to SEQ ID NO: 8390
  misc_feature (1)..( 3000): cDNA_ID_1989432_gDNA_ID_1971789_Annot_ID_58031 3000 nt of promoter + ATG

SEQ ID NO: 8395 - DNA, 3000 bp, Unknown
  misc_feature (1)..( 3000): cDNA_ID_1989431_gDNA_ID_1971789_Annot_ID_58032 3000 nt of promoter + ATG
gcacgtaaaacagattcagaaagtggtacgttatgcaatgacaggacattttatatatagcaaagctagtaggtccaacatgatgggagcttttatacttttaccatatattcaaccacttattggccaacacaaggacagtactctcaaagttggataacgtgaaaaaatacttaaaattttctgattacattaataatcgaaatacatagaaaaagaaaggatttcgttatcaactaagattcaatcaaataaagtaatccaccgagtgatatgaagttcttgacactatttcggttgtcacaaacaaagtaatatactcaaacttaattaagcaagaattattcatccatttatcgcatgtaacagtgagtttttttaatagaatatatatatattgtctcttagtctcatacccaagtcgataacgaagatgtagtgttttacaaattcccactaaaatatttgcttgaatcaatttaatctatcaaactcttgtagtatccacattcaacgcgaattaaatatctagctaatatcattgatatagtttattttatattataaaatcacaagtactatatataatataaaaagtgtgaagagtttgtggaatccatgttatcctattttcatttgtgtgggctatgtttgattctggatccaaagctaagttgtcaaaaaacgaatctcacgagattccccttaggtcatgtcaacttaataatcatatattagtatgtttgtttcaggtggcagcacatcttgtttccgattgttctgagctatatgctaacaatccagaaatttgctgcatgcattttaggttatacttttatatgtaacaaaatctatttgtttatacgttttattaagtaaacattgttttagtgaggaccatttaattagaagtattattattgaagagatgaccattttttcctaagtctaagaattacatatttggcatatacagaagattacagatttgccgaattcccatgtggaagctcaaccaatctgatgttacgtagcctttggaattatgtgaagtgttacctttttgtccacagatattcatatatacaattacaatcaaaatgtggccttcttatatcttattggtgtagtagataactctatcacatctatagagtgtaacaaatattatatgatgaatctcgaaaacaatatattaatcaaacacacagttattcacaaaaacataattagaaagagattaaaaacaaaaacacaaaaaaaaaaattgttctttttttccgttttctatctagtaacaattaaatgcaaccatttacgggcaagattgtgtgaaaacattgaaatatcactttcagaagatcattttcaatgtcaagttgtttgcatacttaatttaatcatttcttaccaataataatggaccgcctatggcctatggacatcttctgtgtgtgtgtgtttgtgtggtccaatccacatcacatgccaatcaagcttatcatatcatatgataggaaatgccaaatttagtttatatacatatatgtgtccacctatttatacacatatagtattatcatatcatacgttacttacacaatgaattcagctttcagttatatggccacgatggttcaaatctaggaatataacaagattaacgagtagagttatgctggttttgaaggttggttataagttttggtatcaaaagaaatgaaagtaatttattggctccacaattttattgtattgaacttttttttgtttgtccgtatcgccaagattcagatttttttaggaaccaaaaagataattttgttattcttttgtgttgttatttttgtgtatatccaatgtgattttacatgttcgaaattcatgttgataccgttactcaaaaccatatacagtacaatttatggttgcgttatgtgtttttttttgtgaaaaaccaaagtaaataaaccgaaccaaatgtaaccggttgtgtaaattttaaatctgttaggggtaaattaaaccatttacaaaactattggggtgaaactgaaatacttacagaattaccgttcccccataaaaatattaaattaaaataattactttttataacaaaacaggctttatcttgtcttgtcttggacaacagatgaagaagagcgaaagggttcttcgactctggtgtttgcgtgagagagtaaacttacattagaagcttctgcgcaactttccattattgaaaatgtcaaaaatttattagaaaaaaggaagaagcgaagtggaagaggaagaagaagaagaagaaaattgaggatattaattgtttaagtatagtggtgaaagaggttttcgtgaagagaagtttgatcctttgttgttgcggcttcggataaattcttcgactttgacactcgtctcttcacgcaatcgcgttcctttgtcgtatcacgtctgcttttgcgtcttctagggttagcttaattttttttttcctttttaaatagaaacaaaaaaagcaaaaaagaggataaattcttctgggtgcaacgaaggcgaaagaagggggatattgattcggttgaatatttgatttggtgaatttcgcttaaatttcgagaattgagaaaatttcgtggtgggtactttgggataacattagctaacgctggattctgaatttgtgtgtatcctggtcgtgatcaggtctggatacttggggtttaaaggtcttctgtgaaacatatcaaaagctccgagattcgacgagggtttttggtgaatctggattttggtcaaggatcgaggatatagaaaagctctgtgcttttacagattcgtggttgggattttgtgttggagggcttttgattttggcagccttgcctattttggttcctaatttgattaggtgagtcacctttcttaatttggctgtgaactttggggtattgattctgtggttgaggatttttgggtcctttggtggttacgatg

SEQ ID NO: 8396 - DNA, 3000 bp, Unknown
  misc_feature (1)..( 3000): cDNA_ID_1989449_gDNA_ID_1971791_Annot_ID_58033 3000 nt of promoter + ATG
aactaacaccacaattattgagcacattcaaatgctgtcatttttattactcgtacgtacacatgaataaggtggaaatgtcatatttgggaaaacaccataaaacaatatgtatgtcgttcactttggtctcatataaacgctagccaaatcatacagaggtaatggtaatgtttttttatcgacggcaacgaaagtttatgctaatatgtttataaattacttttattgattaatatgattatctctgtatagttgtggacgtgtgtatataactgaccgtctaattaaagaaaaatttatcacatcacgtacctaaaagacgttcttcattaatccataattgctttagtgtataactaatcatctatttagaagttttttgttttacttttcctattgttaatgtttgaaagattagaatatatttataagaagaaatttataactttttagcaaaaaaaaaaaaaaaaaacttataacttatgaagtctttggtatgtatattaaatttgacctgatcacaagtaatgcacgtatattcacgatttgaggtacgaagcagatgaaaattgtactatttaacaaaattactaaactataccaattaccagacacataaaatctagataaagtggtcctaatttctgagaaagaatattcctgtgttcgttctttctatctctttccttttctgttgttacatttcccacacacaaaaaaaaaaaaaatctatttactgatctatgttaaataaaaatcaaaaggaaattgttttatgatttttattactttatattaatttaattgatgtaataaattattaaattaattcttggaaaattaatcaaattaacttaaatcaaacaaaatttagttaaactaataaacactttaaaataaaaagtttaatttgattaatttagtcagttatttattaaactaataaacactttaaaacaaatttagttaaactaataaacacttcagttaattattaaatatttatgagaattctaaaagattaatccttatgaaacagaggaaatatattttaagatagaaaagagatattaagaaatctcaaattaaaatacaactcatatttgacacccataagcaaaagatattataatactaaactacttatcaaagatatttcagtttattgatatgatcagaatttggtcaatttttctgtcaacaaagattggtctaaattaatgacctaaggaagcgaattaattcattaagaagactttttttctttctcaaaacttatgaaaattaacccacttctaattaatcatcaaaaagcttgaaattatttgtaaacgaagactagaaagagagaggggaaaaaggtatgacaaacagccttaaagttaaaggtaatagtaccttttgtttgttcttctttttttgcaaacaattttttcccttatttaattacgtttataaaccttaattcagattccttaaatacattgttaggactccataattagtaacggcattaggagcataaacaaaaattatgataaaagttttgatattatggaaataaccaaatatcttacctgtaaataaaataaagagatgtgaccaaatttaattgtggatttaattacattatctaacccttgaagaaactcaatgttttttgtgggattgttgtcctaaacctgaggttacatgtaatcaaaacattaatgggatttgaagtaaataaattagatttgcgccaaaaaaacaaaatctccattgattacagtgttttaatatggtcagataaaaccacagaagtggtaacgacataaaaaatcaccaccaaacataaaaccgtaagaaaagtttcgatttttattttctgcgatccaaaggtctagtgatgaattgaatttggtttttgtttttataattgaagaatgaagaaataaacagttgatgggttcttcgcttcttctcttgttgggttagtgataagcacgcctggcttctcatcattccctccaacctttctctctctaaaagacttcaattgttttatcagcttctctctctaaataaagctctcaattcaattctctctctttcacttttttttcctctgcttgcttcttctgttcatctttttgcttcgtcaaaattttgaccaaagttttgtacttttttgttgctgcaatttttgtgattagattggatctgggcttggagctgaatagcggatttgtataaggtaattgcttgaaacgtaccgaattgattcgtttttttgtttctctgagatttttcaatatctgggtcttagagtttggctgatctgattggttctctgagattttcatgtagataagtttgttttaaaagccaaagccttagtttttaattagtgagatagatttatgtagagagcatcaatgatcaatccttgagctttatcttgggttttgttatgttgtttattgaaaaatggtttgttcggtgagtatgatgattatgttcaatggaaatgttcttccttttctctcgaatttctgagttttgctttggtttcatataactttgtttgtttgtctggggaattgtgaaatttacataaccactacttccgatgtaatataaatatcagagcttttctttattgacagagattttttgacttgagatgaatgatgttgacccttgtggattctgagttgatttttgattctttctaattggtttctggtttctatttctattgatcagctgaatccaatcatggtcttttcagtagtgtatgctattggtgaaaatcaatattggtttcttcgccttgcttgtgatgccttgtctgctatcaaaatgtgtcatttgattggtttttgatagaattgatttgcatttgttgattcttgagattttaatcttagttgatgttgtctcataggttattattagtcttctctatcgttgcggcgttcataagttggagaaagtggtaaagactgcttaagt

SEQ ID NO: 8397 - DNA, 3000 bp, Unknown
  misc_feature (1)..( 3000): cDNA_ID_3409398_gDNA_ID_1971791_Annot_ID_58034 3000 nt of promoter + ATG
cttgagtctttgatttatttattcttggggttattttgatatcaaattgaggaaatttggtttcaaaagtcaaatttttatttagtgagatttcataaaaacaaatagactctgtaattttgttttgcagaagttgaggattgagtttttttttttttttttgtgtacagcaaagtgtacaaactaaattgtgcttcctaaacttcagatttctttattttactacattttctcataaatatagaaataccatttgttggccaaaaaagaacgaagaacgaattaccacttaaagtgtataaataaatatttttcaataactcatcaatctctttttctttgacattgtatatggtagctcatgcatgagacagacagtaacactcgaaaaggtaatactggaaaatcttgaaagtaacaacactcaaaaaggttacaaagtaagtaccgtgtaccgagaggtctaaagactaatacatagaagatgatagaaacggcgtcgttttcgataatcatggttagatgccatgtgactgattagagccgtcatgacttaaaaagttaaaactcttttattgattttgtgtattatattagtttataaaactttgatcaaataattcatgtgccaactagcgattgacctagtttttttaatcaaccgaaacatgagtcaataaaatgtgcaatgtaactctctctccctctcttttttccagagcaaattaactagttaaaatgattcataagactcatcacatattgccacatctctctatagttggacgtcttaacgaaccctaatgatttttaggctttttagcttgtcgtactctaaatgacaattatatataatgtacgaaactttctagtttagacttaatttgatcatcaagacagaactattcatctagctgaatttaatattcaacccaagcgataacacaactataatagcaattattgacatattgtcatcatgcaaattgtaaagtcactagtcattgatgtaagatctcttaacaaactcttttttcaatatatttctaatgtgaaatcggataattataatatgtagaaaagttgatacaatcatttactttcaaattaattatcgtctaattcatataaaatcatgcgtagttgtggaactttatttactactattagtaacttattttactgttataatgaaattttgcgtgaaaagcttcttacttgtgaattaattcgcatttggcattacagtgacatgccttgtcgcttttttccagtttagtgtttttttaatcgtatattcgtatgagagaatatcattaattaaaaacgttaaaacaaaacattatcaactcaattattgacaatattacagcatcaaggaacatgttcgtgaccgcgacgcccatttttttattaggataattttcttacattttgttttattgtggatcccttaataatttcatagaaaactaaaaaaactgtccctaatacggcaatcagggatttaatcattttcttaacgacgattaaaattaggtctaatacattacaatatatgtatgaaaacgttgcatcgtctcgcatgacttaattgtctcccaaacatgtagtatttgatgatctttgacgtaatttttttttgttagagtatctttgatgtatatatttatcatccaatttataattagtagtgtaatgatatcacaatacagttcttacattttgaatgacattggtttccagatttaacttcatatgtcttgccaagtaaaatttgtacgcattgatatagtatcatggtcctgactttaagcattggcgatgggtaatgatattaatgaaatatcggcgaaatttcttggataaaaagaaaagattcgtacgcatgaaaccaatatgtgatgttggttccatattcacatagcatttgtaaaatttagaataaaatcgagtttacgtcagagccatccaaccattaccattaaaaattggatgaactgatgaacaggttgaaccagaaattgtcactcaaagttagagcttggttgataggttcttaagactaaacagttcctcatcagtatgtaatataatgaaataatttaatctctttgtgtgtaaggtgttaactggactaccactagactgaatttttaattaagtcttatcctatagtcttttcaataagttcacaattgcaagtacttaataaacaaaataattaatcagttaattatgacaaattagtcaacatccgatcacattccacgttgtaaagttaaattttaaggtagatactaatcatacttgtaaaatgaataagatgagttcttcttcttgtcacctctcgatcttgttttaagtagttggtgagatgtgataaacttgtaacatgccactgagttgtcaaagacaagcatctatacagttattaaaaaaaaaggttaagcatgtaaaaatacacacacatgtcgtagtaaatatacacctttttataattaattatattgtaacgaatttgttgttttgttataatatatagattaatgcatgatgttttgcgattaaagccagacgagttgtaatatccacagccttgataagctctacatgcagtgaacaattttatacatttagaaaaaataatcactatctcgaccatatagaccaggccactacattacagctaatctctggatttacttgataattaagacaaatatagaacattaaaatactaactcgatgcctcaccttagcctcctctcaaattgtcaatatctagatggagtgttacatccacattcctaacagtttttactctttattttaatatatccttcaacagatcatcatcagaataatcatcaaatcattattatatatttaactagcccaaattgtaccatacctatcaatttaaatttctctttctatctactataaaaagtgactctctaagaactccaaagattagaacattgaattgaattagcc

SEQ ID NO: 8398 - DNA, 3000 bp, Unknown
  misc_feature (1)..( 3000): cDNA_ID_1989447_gDNA_ID_1971791_Annot_ID_58036 3000 nt of promoter + ATG
atattcgattcattttcaaattagttgaattgcaaaactacattaaattcaaatactgattggatcattgccagtttacgatatatcagatcgatgtcaagtcaatgatgtaaccgatatacatgtgtgttcttatttatgaccgtacgtactaataagattcttaagtcgaattaatacgttaaaacttgtgtgctatatatttcctttttatagaagactaattttatgaaatagcaacgcatatattacatcacgctataaaacagttttaacatcgccttcacgataatgatatccctaggattttacgagttttatattttagttaatgaaaatgtcaaatgcagattccatagatgtattgctaataatctgtatttctaattaataatactagaaatcccgtggataatataaaataaatggtataatagaatgtatgaatgtaattcatagatttataaatcacgaaacggcaacatttaccatacaaatttacagtgatgaagttctaaaatacattggttatgttcgaggactaactaataagagcaatgatctctaatcgacaagcgtgattgcaagctcatagtccacgctatcttctagtaatcatttaaatcaaataatttcacagtaattacattagttttctcttttctgaaattatcaccaccctagaatatgggttccatgattatatatgtgacgttaatcataaagattatctagcgaagttctggagttagacaaataatcggctatacacgttgttacataatagagtttcatatttaatattatattatatatatatatatatgtatatatatataaaatatctaatctataatgaagtcaagctctagcatatatatacaaaataattaaattgattttagtttcaatgcaggttgtaaatagtcgaagacaaaatgaatagaagaatataccaagtcaaaatgaagacttctaacataaatgaaagggcaacttttgaaaaagatgaatggttgcaaatttgtactaatgaggtcaacaaaatggtttttcatttttcagtcatatatgtacctatgcgactgtaaactccttgattattttaggactatgctagtagttatatgatatatggctattcagatgttcttttctatatgtatagtgtgcattaaggacaaattttgcctctttccttcatatatatgacatgataagtttttaaatgtgtttgtaagagtcatttaagtcaactagatgataatatattatatcttatattttaaataatttagttaaggttcatttgagctgcaaaattaaatacatagtgaacttattttactagattaccaaaattatattggtaaagaaatattgtggcaaactgtaaataagtgatgtctttttgtattttattcaaataaatagtatgatatatatgtaaagtatgttactgtatacaataatctaaaacttgttaccccatgataaaaaaatgtgataaataaaatcattttgtttacaatttttctatccatcatttgtgaaaagaaaagaaaagacaagaaatgattttcgtatcttgtacatattctctttacctaatttacgagacgtttgtttagacttgaacacttattaattaggacatgaatcctaagaagttaaaacgtagaggagttggaaatgacgaactttgtattattgggggacccatcacaatcaaaagtcaatttctcagtatatcttcagagggaacaaatttaattaacactatggtttttattcaattattaacatgtgacatcgttcccattgctgaccttgccatgaggcacaccttggaagggccaatattttcattatcaacgttagggccacaaataactatatatattaaaattactattctacaaattactactatataaattagtccgtcgtaactaattacgatccacaccaactgatataatgtaaaaatagtaagaaaaagtagttttcttacctgcttaatcaaggtatgtagtttttgttataagcatctctgtcaaaatttcagagatttaaagtgttttggcttggagaagtatttgtatggttgagaaagaaaaaatggaaacaaaaccgaagtaacccattattgcttatcgaaaaaacaaatttagaaaaaacgaacctaaaccagttggaaaacgattttgttaagaaaatatagtattagttgaaattttcagaaagaaatatctttctttaaacaaaacctaataggtgtccaaaaaaaaaaaaagaaaaatgaagaagaggacaggctaagcagcaagtagtatgttgcttagtcaaatataaattaaaaaatccaagcaatgtatacctccaccaaatatttctttcttgatataatgattcatgacaaaagaaagaaaaaaaacaccaaagtctatgatctagtaattaaaaaaagagatattacaaattagtttctcttataagctacttcctccttagagtcccttttcaaactactataaaacatcaaaatatctcaaaataaaaagaaaataagaattattaacggtagaaaattttgttgtttaaaatgaacaattattccataattaaagtgtaattaggacccacaaaatatatacaaatttgattcgggttcataagccaaaaatattacattaatcaacggtcaaagggtgattaagaacttaaagaggcagcaaaataaataaaaagggtaataaatatagagagactacttggtaatgggacccacatagccaaaacggcggagaaaatcgtcgtttttagtggcttataaaaagaggactcgtatcgactctgcaacagaaccacctaatctctcctcctctccttctctctattttgccggaatacatatgatcgagtgaaacggcggacaaagctgtcgtgttgagtactaattcgccgtcgtttttctcagtgaaggagtggtgagagatg

SEQ ID NO: 8399 - DNA, 3000 bp, Unknown
  misc_feature (1)..( 3000): cDNA_ID_1989446_gDNA_ID_1971791_Annot_ID_58037 3000 nt of promoter + ATG
tttcaagtttctgccgacgtaaaataaattgtttagcgtgttatgccaaaactcaggccacttttatgaaatatatgacagaaaacatatataataattaagtcaggtgtgcgtatccactagaaacaatttcacacctcccgacttcgatatgacgaaaccactagactatattcactactttttgcaaccttgtttaatctgcaactaaccacgaaatacaaaataaaataaaatgacatgttttgacgagtctaaaaagggctatggcatgaccaaatttgatcttgatatttgtttttacaaacttaattagcattctgagtttttgatctcatcatccatagtccctcgaaaagtaaaataaatactattcacgaccaatgctttatttcttgaaactaatgttatatagtttgctcaaagacaaaatattatgaaatatatgtgaatgagatttttttatcacacttttcgtacttaccccatgcaatgattcatgatttgtttttctttttttgttggtaatgccatcacaattcacaacccctttagggaccacatgagatgataacattaaaattgttatagtttaatattcttttatatatatggtatgttgccacttgccagtccacattattcaatacttccaccattaagtctaacagttttttttgcatacatatataggattctttgtcaaatacagctcgtaacaatgtaccatgcacgacttccgcataaaaaatattcattcaatcatcccaccaatacagatgatggtgttacatatattcatttatgtaaaatttattatcatcaaagtaagacctatttcgatcgtatatttcgcactactacataatgctttggatgtaaagtagccaaaaatggttgttacgacttacgactgtgcacaccgaacataaaaaaattgatctaaaattcttggacgctttgattttggctacaccgattaaacatgtcaatgaaaagtcaacgggatttttggcttacacgtacgtaggatcaaacaattttttagacataacatatttgtcattattttgaatcttaagagctgttaatttgaaaaattataaacctcactttttcaatataaacatgtatgttatccgtactaatattagctagcttttactatggcatagctatagatgattgctaactaggttaggtggagattcaataacaacaaattaaacgatacgaaagaagcatgaccatgtactttacttatcttcatatgctagctgttgctaattatatgtgtttcatttatcgtctttactaatcgctaagtctaacgtaccatatattacatatttagatcgtaagtttcatgtccagtaccttgattcatgtgaccatatctgtatactagaaacagttcgtctgacgtaacatattttggcataataaaaattatgggtacacgattgttaaccgatgtaaatacaaattaattaagagatgtagaacttttagacaataaacaaaacataaacgagaaataaactacagatacagtacttgaaactcttgaactcttcgtgatagctagaaatagaaatctgcgtcttcacagttgacaagaaacctagaaaaacagattaggtgtgctattaacggtcagattattcttatataagttcgatatgcgttctcgaatattattaatttaagctaaactagacccaaaactccaaaagaatccaacatgtttatccatatctacctaagactacttgtgatccaaataattttcgaaaaacaatatttctgtattgataaataaaggtcaaattatcaattaccactaatatatgtttttaaaaaaaaatttgctacaatgtttttgcaggtgtactgtgttaggcacatgtcgttttatacccttcaaatccaagtttttcccgtttgtgatgatagccaatgctcccgtaacacacacgtatacaaatttgccaatgtctatctaacacgtgttattacgcaacatgcttattccaaaataaacaaattaagatgagataagtgtcacataattatacaatatgaaataatatcaattgcatacctattttatatacgtgagtgactcgtaggaagtagaaatcctctttgttttattaggagcatatatcttctcaatttactttcttttcttaactctcacgaatcctcttttaatattttcttaactctcacgaaaacaattccttttaaactttgaaatttccttaaaattgaaaagttcctatatatgaaactgaaacatgatataattgaccatcttatatttcactttctactataaaacaattcaaactgtaaaaagaagaagaatttactaatcaatctcaaaaaagtaaaataaaatttaaacacacagaaaattacgaacgttacgaaaccaaaatcacagaaataacgtgaacataaaaaaagggtaaaaaattaaaataaactcttttttaccctttttgggggcccaccagaaaactgcatctcttataggcctctctctcttccatagacccatcttctttctctttctctcttcctatctcacagcgacaatctctatctctctctatctcttctccgctcacagcgaatctctctctctctctctctctctctctcttctccggtgtattccgttctccgggaatttctccgaagagggagagaggaaaaaaaaaacgtccgattcaatctcttcgttgctcgacgaatttttcttaagctttccttattgggtaactttctttccttttatacttttttcccgatctctctctctctcctctgttttattatttcactcccaaataaaagtttttatttttttccattgttttacctaatttttatgttttcttcacatcgcagagatttgaagattctgagtggttgttatgataatgtgggtttgattagttcttcacacacagcttctctacgctcatg

SEQ ID NO: 8400 - DNA, 3000 bp, Unknown
  misc_feature (1)..( 3000): cDNA_ID_1989445_gDNA_ID_1971791_Annot_ID_58038 3000 nt of promoter + ATG
tagactgtaattggttgtatattatgtctatactaatatactgttttttgctcacatatgtatacagtttttcatttctacagtagaaatgctttaattttgtttttattacttaaaccagtcgacatatggtaatttttggtgtcaactctgatagttgtcaaaatgaaaaaaggcaaaaaaacaaaacaaaaaactgatcttcgcaaacctatgaaggagttttggcatttttaattttttctgcattaagaaaaaaatattgatacttgagacttttttttcttcaaatttccaagtatttgcctcaactcaaaggacctcaaaggtctaaaaagaaacggtagggtcaagttcaatacacaaattcacaatcgaattcaaatatattgaaaataaaatgagaccaaaaaggccggtcattttcaaacaattgcagagtacaaatattttatgttaataagatgttttttcttgggcattacaaactttattttgttgataaaataacaacaaacaaaacaacaccaattgattaatacataaagtttgatgggaaatggatgaaccaagtgattaagatctgtccacgcgggaagtgttggattcatatgattcacagtttccctatcaaccactgaaaaccatattgcttcatcaatctcactacgtgggttttttattgcctttctctcatttgcattttgagcccaaccaagtctatttattaatcactttttttgtcgatatttattaatcacttttctctcatctataaaccactttgtagttatatttttttttgtcgtaaaaaaaaaaaatagcaaacaatgattgatgaaaattgtcccaaacaaaaaaaaagaggattgacgataataaagatgcaaaaacagctttctatttctgtcagcatataaggattttatagaattcaaacttatatttctacactaagaaattaaagacttataggtgtaatctattacttcacagttcacacttttgatttcttatgggaatgtgttttcgtaaagggcaatatggttttaggcattcatgtgttttggatgagacgctactaccaaaagaatatgtcgttactaaaaaactatatttttgacacatgctgttaattttggatacatagaaggtctaagagattaataggaatcgtttttatctagtttctaatttagttcaaacgttgactactccaaattttcgttgtagagttatttattgaaatagtcatcgattttaaattgggtaatactatatccgatcgaactttaatatgaaatatgaattatgctacttatgagatgcgataacaaatttctatagtttagcgatcttttgttcatgttatttagagtttggatttaaaaaagttatgaaacaaagacacgtgtgttgacgggttgtggtgtttgatttgccttgctttctttcttctttgtgatgaagaatctctttggagatccaatatattgtttttggaagtatcacgacggtgacatgtataggtcgatcgaggaaacgccaatgataaccaaattgaggctgtcgcaactaaatgatcagtcgatagtcattattaatagtatagttcgattaaaaaaaaactttccaagattattgttaccttgtattttttttgaacattttctaaaaatgatatcttctaaacttagataattcaacctatttgtggtatcattaatttgaacaactttgacatgcaagtggttggccatactccatactacaagtctacaacatgtctgcgctaggaactttcttactatacttcatttttagaccattaatgttattgcttggtcttttaaaatgatagtaaattattattttatagtatctatcgtatattattatttacatcgatcataaagtgctggtttacaaaaaatatttttaaaaagaaagagtcaaagttccttccatatttgaccaaccaagcttgaccgactcgattcaatgggtccaaagtcatagtggtcgaggtaattggtcaatcaaaacaccacgggctatatgaatctcgcttaattgctaacacgacgtattgacaaattttccattcgtaatggtgcaactattcaaaaacaacaaatacttgattttattttgaattttattagtgtttgccaaatgattttagtccaccaactaaaaaatatagaaggagcaatagcatgccgctaacaagaaaaaaatagacatcttacaaaaaaatgttttttggtttgaccttagaataaatgtatttagttagcaattctaatttaattaaaaaaaacaacgaaattatcaatatacaaaatacaaataatgctacataattcgcttaagaagaattcaactattttattttacccaaacaagttaattcttacttttttctattttgctcttaatttcccattctgattaagaaacaaatctcatatacttttctatttttgttagacatgaatttcaaatatatatcttacatttataaaattaattttcaatcaaaaatcttgtagtattatacaaccgtgatgttcctaaaaaatacctgtcatacagctgttatgcttcttaaaataagataaaattatatttactgtattaagctagattgtcaaaaattaaacagcaagataataacgtaattaaccatcgttaatatcaaacgcgttaggtcggtttgaccggtctggtttggtgagcgctggtaataatttcaccatcccaatcaatcacagacaaaattgaaaaccccaattaataatacataaaatgaaaaacatgatgaattataaattaaaactctgttctgtctcaaaaaactcaaaaggagtctctctctcacctacaccacacctaaccaaaccccctacgattcacacagagagagatcttcttcttccttcttcttccttcttctttcttcttctttcttcttctagctacaacatctacaacgcc

SEQ ID NO: 8401 - DNA, 3000 bp, Unknown
  misc_feature (1)..( 3000): cDNA_ID_1015869_gDNA_ID_1971791_Annot_ID_58039 3000 nt of promoter + ATG
aatatcgatatttcttatactaaatgacgatcctatccttcttaatcaacggcagagcaagtaaccgcgcacaatgttcgtaggaataatatagtaatttatggatgaggaacccaaaacggcgccgtagcagccacgcttgtgggcttcttgcaacttaaagcgttgagaaacctccaagaaggtgacggtgatggcgaccgagatccacgagctctcctgttagcaggagatggaaacataaccggtggaatattccggcgaatctgacggctctttatatccttgagttcgatctccggcggaaacttaaccattccaaacatgatcacataccatcttggccttacactttttacacttcccgaagacgttgtttcaggcttccccgtgtttttagtcgatgaactattttccggtggagaatgtacggtggttagaccacgtgaaagcttacgataatctaaagagcggcttgccctcataggtcccgcattgtcacgacgtgccacggtacaactaccgggacggttaagcttatggccttgtatcgcggataaggactcagaccgtgaacggattcgacggctaatgtgctcaggaggtgaaaagaaagcattttggtagtttaaagggatgagtttcccgccaaagattatattttctgccggagctacgtcgtaggaggatgaggttagaaactcaaaaagttccgttgacggttctttgtggtcttcggtggtggtgggattaggattcttggctttgaggggaagatctcggagagatagtgcgtcttctttttcttcttctaggtgatgttgaaatggttttgggagtttagtagggttttggagattagtgttttttgtagtttccatgttttttagggagagagagagagaagacaatgaagatattgaaagtattaatttttgtcaccatatatatacatggtctctagaggggtcaaatacttttacagaacttaaagtggaaactattttgttttacgggttagaattctttaggtgtatttatatacatgcatatatttgtagattgttgaccatccgaagtttccgtttgccaaatttctcatgatttaattatttcaggtcgatatatgacatattatgttggtaataacaataatacaattttaatgacaagaaagatagcaaatcttacttattatttattatttaaccacacaaagtgtctattaatattaactaactctagttttcatatatagttttaacgacaagaaagataagacaagtaactctagtcttcatatatagcattgatcatttattcatgaatctttccgatttttcagcttagaaaatttagttattcaaaagcatggtcaagaatgatagagatagaattattcaaacacaaattaataatgtttgaaaatttgagatttacatttcttcatgatgtaaaactttgattgaaatgcctatattttttaaattctttgtcaaagactatatgtttatacatatgtacataaatgtaccacgatcacacaaatttgcatagatttgtacacccaaccggtaaaataaaaagactgtgcaaaaagctaactgatggtattgtataaaatatagattcgacatgtcaccacttctatataaatatatataagaattagcgaaacacaatctaaaaatgtttagacaattttctttaggtatattttcgaaggagcaagtttacacacaaacaaactgtatgaagcatattgattgtgaaaaaagatagtcgagactaattcagaagaagactaagacattgtgacaaaagtataaaaaataagtgctgaggtatgaattgttgcgcgtaactgaggtcagctgagaaaatgactttcgcctggctgctaacatttcgtttcggacctttcggttattacaaacattaaaacgatgattataattatattctagactatagtttttgatattttcaactatccaattatagtttaggtatattaaatcgaggaagtggaagtgtagtgattaaagaaactcaattgttagagaaaaaaaaactaaaggaattagagccacaattacaaactatccactttgttttttcgttttcaacgtacatcaacttacgctgcaaggcacaagtcataagtaggttattcatatacattgcttgactacaaagtttgatttgttttccctttttataacaatttcatatggtgcgatgttactattttgcctttaaacgcaaaaaagtaagatgattcacatctatagcagttcacttcaaatgtttttttgttcaaaaaataaaaatcatgatgtagataaccttttctattagcatgctgattttataagcgttttctttatcatagtaaacatataatgacgtgaaaaaaaaagtaaacatataatgacttgtaaaaaaaataaaaatgaaaagacctcaaaaatgaaaaatactttgcactagatgatggatgacctcaacagatgagtggttcacgttcacctaattctttggtcatatatgtgatgccaatcgttttagttttgatgtaataattatagaattctaatggaattatatataatctaaactaataattggatggtcaaagagtagaaagccggctaattgttttaaaggcaagctgacaaaatttgatcattgtgtaaagatgaatgcaatataatggacttttgttctcgagaaaccattcttcttgccggttttatgtcattaggttggaatgcatgtcgtttttgtcatgtattatttgttttcacttttatggagatttcacaaagcaagccagttgaaccaataatgggccttatgagatattttcgcaggcccattatcttctgtacagcaacgaataaacccagccaaaaaccctaaatcgagagaaaccacaagcgtatcgatatttgttctcccagatcttcgtttcgtctcttcgttctcaaactcatg

SEQ ID NO: 8402 - DNA, 557 bp, Unknown
  misc_feature (1)..( 557): cDNA_ID_1444514_gDNA_ID_1971791_Annot_ID_175574 3000 nt of promoter + ATG
aaattattaaagtatatcctagcatttactaatagaagagtctaattttaattttgttattgctcaaacacagtatataattttagagatttctttggtttacgtcaaaaaagtctgtctcaattttaatattttagtcggtcatcagtatcgtccaaacaatcattttacttttgttatgataaaatacggaattcctcccctaatgacaatcaaattcgaattcaaaagagctaaacaacatatttctaacaaataatatgctcatgcatgctaatatttactgtaacatttaaaaaaattaaggatggtaaacataatctgcttaccaaatgatggagatactcaagagtccagctgtaatacatcttgcatgcaatatcttgatattagcctccttttgttcacccactctcttctcttcttcttctcatttatttatatgttaaactctctcccactatatatatctctcccccttcttctctcttcctcacattcctcaccaaaccctctccaaaacacacccacacgtacgcacacacacaaagacaatg

SEQ ID NO: 8403 - DNA, 2283 bp, Unknown
  misc_feature (1)..( 2283): cDNA_ID_1989441_gDNA_ID_1971791_Annot_ID_175573 3000 nt of promoter + ATG
aaattattaaagtatatcctagcatttactaatagaagagtctaattttaattttgttattgctcaaacacagtatataattttagagatttctttggtttacgtcaaaaaagtctgtctcaattttaatattttagtcggtcatcagtatcgtccaaacaatcattttacttttgttatgataaaatacggaattcctcccctaatgacaatcaaattcgaattcaaaagagctaaacaacatatttctaacaaataatatgctcatgcatgctaatatttactgtaacatttaaaaaaattaaggatggtaaacataatctgcttaccaaatgatggagatactcaagagtccagctgtaatacatcttgcatgcaatatcttgatattagcctccttttgttcacccactctcttctcttcttcttctcatttatttatatgttaaactctctcccactatatatatctctcccccttcttctctcttcctcacattcctcaccaaaccctctccaaaacacacccacacgtacgcacacacacaaagacaatgtctcctttcaaaatattcttcttcacgactcttctcgtggcggcgttttcagtgtcggctgctgatttcaacactgacgtcaacgtagcttggggaaatggccgtgggaagatactcaacaacggccagcttcttactctctccttagacaaatcctctggttccggttttcaatccaaaacagagtatttgtttggaaagattgatatgcagattaagcttgttcctggtaactctgcaggaacagtcacaactttttacgtgagtttatatattttctttaggagttttaagtgattttggatttggtttttatattgagacttcatcttgacatttttgtgtatttgcagctaaaatccgaaggatccacttgggatgagattgattttgagttcttgggtaatatgagtggagatccttatactttacacactaatgtttacactcaaggtaaaggtgacaaagagcaacaattccatctctggttcgacccaaccgccaatttccacacttactcaatcctctggaaccctcaaagaatcatgtaaagacaacaatctcacctttcttgctacacacgttaataaaccctaactaggttttcgatttttcttacccatctcttatctgttctgttttctatcagattgaccgtcgatgacacacccattagagagtttaaaaactatgagtctctcggtgtcttgtttccaaagaacaagccgatgaggatgtacgcgagtttatggaacgcagacgattgggcaacaagaggcggtcttgttaaaactgattggtctaaagctccattcatggcttcttacagaaacattaagattgactcgaaaccaaactccaattggtacactcaagaaatggattcaacaagccaagctagactcaaatgggttcagaagaattacatgatctacaattattgtactgaccataggaggtttccacagggagctcctaaggaatgcacaacaagctcatagaatctcaaattatattctatttatttatctacacttcctctctttcttttatgtgaaaattgtgaatgctctgtttatagcttgtctattatgtccgagaatttctttttctgtttttgattcttttcgttgtatatctttgtccaataaaggaaatgatgtgtctttactcttatagatatgtataaaaagatgtccctgttttatttgttaaaaaaaattgtttatgataatgatagttctttcttcttcttcttctttttttctcataaaaaaaaaatgatagtttcatttgctttatatatatacataattaatttacttacattgtaagaaatatgataaacgtgttgaatgcttctttttcaaatccaattattgaaaaaggtcaaaatatcaaattttatttattatagaatgtatcaaaaacttacaataaaaaactctctacctgagttttatctcaattttattaaccaatcgcatgctttcatagaatgagatattatgaaacgacgtcgtttagggtaagaacattacgtcacacgtttattttaatattattttatcatcgccctctttgtaatttcgacttctcttcttcgtcagatctgaatcttaatttcccccaaatcaaagcttttgacctaaatccgtttcccgggaaaaataaatcaacaaaccatcaccggaatcttcaatatctctccggtgaagaaaaaatg

SEQ ID NO: 8404 - DNA, 3000 bp, Unknown; identical to SEQ ID NO: 8401
  misc_feature (1)..( 3000): cDNA_ID_1015869_gDNA_ID_1971791_Annot_ID_175569 3000 nt of promoter + ATG

SEQ ID NO: 8405 - DNA, 3000 bp, Unknown; identical to SEQ ID NO: 8400
  misc_feature (1)..( 3000): cDNA_ID_1989445_gDNA_ID_1971791_Annot_ID_175568 3000 nt of promoter + ATG

SEQ ID NO: 8406 - DNA, 3000 bp, Unknown; identical to SEQ ID NO: 8399
  misc_feature (1)..( 3000): cDNA_ID_1989446_gDNA_ID_1971791_Annot_ID_175566 3000 nt of promoter + ATG

SEQ ID NO: 8407 - DNA, 3000 bp, Unknown; identical to SEQ ID NO: 8398
  misc_feature (1)..( 3000): cDNA_ID_1989447_gDNA_ID_1971791_Annot_ID_175562 3000 nt of promoter + ATG

SEQ ID NO: 8408 - DNA, 3000 bp, Unknown; identical to SEQ ID NO: 8397
  misc_feature (1)..( 3000): cDNA_ID_3409398_gDNA_ID_1971791_Annot_ID_175559 3000 nt of promoter + ATG

SEQ ID NO: 8409 - DNA, 3000 bp, Unknown
  misc_feature (1)..( 3000): cDNA_ID_3092444_gDNA_ID_1971791_Annot_ID_175556 3000 nt of promoter + ATG
gaatttaaataattatattttattttaaaaaaaagaaattcccaatgattgtcaaagctttgataggccacagtatcttgcctattcacggcggctccgaccatcagtttccacggtgccggcggctatatacgatagtcgttgtgaagaaaaaggtccttttcgtcaaatcattttacattggagccgaaagtgtgtactttactttggtcggtttttgatattttatcattactttattctgaaaataaaattaagtttgatgtattcatttcttgagactttaaagacaatagtagaatatatattctccttgttataaatatgattgggtgacatggtacgaccgcgatataaattctatatatatcatcaactctgatattaagaaaaattacgataaaacgaaaggatataaaaaaatagtcaaactttagcgatataacaaaaattattgattgtacaaagttttgtattgctgtcatattagaccgtaaaattttatgacgatcccaattcccaaccctaaactaacaccacaattattgagcacattcaaatgctgtcatttttattactcgtacgtacacatgaataaggtggaaatgtcatatttgggaaaacaccataaaacaatatgtatgtcgttcactttggtctcatataaacgctagccaaatcatacagaggtaatggtaatgtttttttatcgacggcaacgaaagtttatgctaatatgtttataaattacttttattgattaatatgattatctctgtatagttgtggacgtgtgtatataactgaccgtctaattaaagaaaaatttatcacatcacgtacctaaaagacgttcttcattaatccataattgctttagtgtataactaatcatctatttagaagttttttgttttacttttcctattgttaatgtttgaaagattagaatatatttataagaagaaatttataactttttagcaaaaaaaaaaaaaaaaaacttataacttatgaagtctttggtatgtatattaaatttgacctgatcacaagtaatgcacgtatattcacgatttgaggtacgaagcagatgaaaattgtactatttaacaaaattactaaactataccaattaccagacacataaaatctagataaagtggtcctaatttctgagaaagaatattcctgtgttcgttctttctatctctttccttttctgttgttacatttcccacacacaaaaaaaaaaaaaatctatttactgatctatgttaaataaaaatcaaaaggaaattgttttatgatttttattactttatattaatttaattgatgtaataaattattaaattaattcttggaaaattaatcaaattaacttaaatcaaacaaaatttagttaaactaataaacactttaaaataaaaagtttaatttgattaatttagtcagttatttattaaactaataaacactttaaaacaaatttagttaaactaataaacacttcagttaattattaaatatttatgagaattctaaaagattaatccttatgaaacagaggaaatatattttaagatagaaaagagatattaagaaatctcaaattaaaatacaactcatatttgacacccataagcaaaagatattataatactaaactacttatcaaagatatttcagtttattgatatgatcagaatttggtcaatttttctgtcaacaaagattggtctaaattaatgacctaaggaagcgaattaattcattaagaagactttttttctttctcaaaacttatgaaaattaacccacttctaattaatcatcaaaaagcttgaaattatttgtaaacgaagactagaaagagagaggggaaaaaggtatgacaaacagccttaaagttaaaggtaatagtaccttttgtttgttcttctttttttgcaaacaattttttcccttatttaattacgtttataaaccttaattcagattccttaaatacattgttaggactccataattagtaacggcattaggagcataaacaaaaattatgataaaagttttgatattatggaaataaccaaatatcttacctgtaaataaaataaagagatgtgaccaaatttaattgtggatttaattacattatctaacccttgaagaaactcaatgttttttgtgggattgttgtcctaaacctgaggttacatgtaatcaaaacattaatgggatttgaagtaaataaattagatttgcgccaaaaaaacaaaatctccattgattacagtgttttaatatggtcagataaaaccacagaagtggtaacgacataaaaaatcaccaccaaacataaaaccgtaagaaaagtttcgatttttattttctgcgatccaaaggtctagtgatgaattgaatttggtttttgtttttataattgaagaatgaagaaataaacagttgatgggttcttcgcttcttctcttgttgggttagtgataagcacgcctggcttctcatcattccctccaacctttctctctctaaaagacttcaattgttttatcagcttctctctctaaataaagctctcaattcaattctctctctttcacttttttttcctctgcttgcttcttctgttcatctttttgcttcgtcaaaattttgaccaaagttttgtacttttttgttgctgcaatttttgtgattagattggatctgggcttggagctgaatagcggatttgtataaggtaattgcttgaaacgtaccgaattgattcgtttttttgtttctctgagatttttcaatatctgggtcttagagtttggctgatctgattggttctctgagattttcatgtagataagtttgttttaaaagccaaagccttagtttttaattagtgagatagatttatgtagagagcatcaatgatcaatccttgagctttatcttgggttttgttatgttgtttattgaaaa

SEQ ID NO: 8410 - DNA, 2033 bp, Unknown
  misc_feature (1)..( 2033): cDNA_ID_1822689_gDNA_ID_1971791_Annot_ID_175552 3000 nt of promoter + ATG
gaattctttaacgccgtccacttgacggagaacgttacctacgatagaaacctccgatgaacagcagattccaacgacgtcgaagtaacttgtctgtaaattcatcttctttgactcttcaccttccgccatcgttgagcttgagatctcggactaaatttcgaggagatacttttacgggatgatgtcggagggaaattaattatttggtttaggcttacattattatttataacatttgaaattttcagtctctataaggaatgttatattaattgctccacgattttttactatttccaaatgtcaatgctgagattggatacgcatttaaattttattttattaaccatgtaatttttgaaagatttacatttatttaatagaaataaatattaataaacaacaattaattagtcaattatagtagattcgattttattattgaaaaaaaacacttcaaaacctatatagttttccagatgttaaagaaaaaacctatatagttgatatattaaaatcttttttagcaaataatatttgagcagatagaatctaacaaattcttctaaatcaaattcagattttgttattaaagaaagagaaaagagcctattgggccataacatgggttcatacaattctcaatcagataacttccgaggccttataatgacttgtaatataaatggcaatttcgtgattaagtgagtatgaaagggtagacatgacaaaacctaactacagtaccgaggtagccaataatttatcttggctggggccatactctgaccgcagtttccattaatttacagaaatacccacgcttgggatatatatgtatatgtaaccataagtgtaacattttattagttttcagtcgttttccaaatttatgaatccatttacatgagacaaaccaaatccttgttggtaggtccatcctttacactattagaactgaatcatttttatttttctttcacaagaatagaatatttgtcgtaagcaaagaaacaaaagtaaggttaaaaattagtaaaacaacaaagggttgcatgtaacacaaggtttagaaggaataaaataaacaaaagttatgttagtaacgtctttagttaaaaaaaaagtttcatagatgaataaaacaaacaaaattgcatgtcccacgcagctataaaataagaaaaaaaaaaattgcatgtcctaacgccacctaataataaataaagtgaaataataagacaaaccaaaacaccattgactcattgagactgatgtcaaaaaatgagaaaaaaccaatcacattgagagttgagattttaaccaatgcaaggacaatggcaaaaccgaaaataaacgtaaaaatcgaggttgataataacataactcataaaatccgtattttcatggtgtcttcttcttcttcttcaccttcttcactcatcactactcacaaatatatttttgaccgttgttcactctcaccttcttcacacgctccacatcttcttctgattgacctttaacacctgaaaggttttgtcttctctctctatcgtccaaaaatctaaacttttctggttttattttatagatttgggtccctcagtttgtttattttacctttatttatgaacaaatgtgcaaagggtttagattttagctccttgaaggctcataacgcataaagttcttggcttcatcgttttctctcttgattaatttggcattgtatatcttatgtctgattgtgtgaaaaaaccacaaatgaaaggagtttagacacaaatcacagtttaagacaaaattatagtcttgtttctttcaaattatgcaaaaaaatcaagaatctgagacataagagaaacgtttatgtctctctcttttaatcaatgctatgttgcttttctcaactgtttcaagcgttattacattactagctaaaaatcttgatgtcttgttcttatttttgcagtttctcctcttgagctttggaattgaagctaagataagaaatttagagagaaatg

SEQ ID NO: 8411 - DNA, 2058 bp, Unknown
  misc_feature (1)..( 2058): cDNA_ID_1989441_gDNA_ID_1971791_Annot_ID_58043 3000 nt of promoter + ATG
aaattattaaagtatatcctagcatttactaatagaagagtctaattttaattttgttattgctcaaacacagtatataattttagagatttctttggtttacgtcaaaaaagtctgtctcaattttaatattttagtcggtcatcagtatcgtccaaacaatcattttacttttgttatgataaaatacggaattcctcccctaatgacaatcaaattcgaattcaaaagagctaaacaacatatttctaacaaataatatgctcatgcatgctaatatttactgtaacatttaaaaaaattaaggatggtaaacataatctgcttaccaaatgatggagatactcaagagtccagctgtaatacatcttgcatgcaatatcttgatattagcctccttttgttcacccactctcttctcttcttcttctcatttatttatatgttaaactctctcccactatatatatctctcccccttcttctctcttcctcacattcctcaccaaaccctctccaaaacacacccacacgtacgcacacacacaaagacaatgtctcctttcaaaatattcttcttcacgactcttctcgtggcggcgttttcagtgtcggctgctgatttcaacactgacgtcaacgtagcttggggaaatggccgtgggaagatactcaacaacggccagcttcttactctctccttagacaaatcctctggttccggttttcaatccaaaacagagtatttgtttggaaagattgatatgcagattaagcttgttcctggtaactctgcaggaacagtcacaactttttacgtgagtttatatattttctttaggagttttaagtgattttggatttggtttttatattgagacttcatcttgacatttttgtgtatttgcagctaaaatccgaaggatccacttgggatgagattgattttgagttcttgggtaatatgagtggagatccttatactttacacactaatgtttacactcaaggtaaaggtgacaaagagcaacaattccatctctggttcgacccaaccgccaatttccacacttactcaatcctctggaaccctcaaagaatcatgtaaagacaacaatctcacctttcttgctacacacgttaataaaccctaactaggttttcgatttttcttacccatctcttatctgttctgttttctatcagattgaccgtcgatgacacacccattagagagtttaaaaactatgagtctctcggtgtcttgtttccaaagaacaagccgatgaggatgtacgcgagtttatggaacgcagacgattgggcaacaagaggcggtcttgttaaaactgattggtctaaagctccattcatggcttcttacagaaacattaagattgactcgaaaccaaactccaattggtacactcaagaaatggattcaacaagccaagctagactcaaatgggttcagaagaattacatgatctacaattattgtactgaccataggaggtttccacagggagctcctaaggaatgcacaacaagctcatagaatctcaaattatattctatttatttatctacacttcctctctttcttttatgtgaaaattgtgaatgctctgtttatagcttgtctattatgtccgagaatttctttttctgtttttgattcttttcgttgtatatctttgtccaataaaggaaatgatgtgtctttactcttatagatatgtataaaaagatgtccctgttttatttgttaaaaaaaattgtttatgataatgatagttctttcttcttcttcttctttttttctcataaaaaaaaaatgatagtttcatttgctttatatatatacataattaatttacttacattgtaagaaatatgataaacgtgttgaatgcttctttttcaaatccaattattgaaaaaggtcaaaatatcaaattttatttattatagaatgtatcaaaaacttacaataaaaaactctctacctgagttttatctcaattttattaaccaatcgcatgctttcatagaatg

SEQ ID NO: 8412 - DNA, 557 bp, Unknown; identical to SEQ ID NO: 8402
  misc_feature (1)..( 557): cDNA_ID_1444514_gDNA_ID_1971791_Annot_ID_58044 3000 nt of promoter + ATG

SEQ ID NO: 8413 - DNA, 3000 bp, Unknown; identical to SEQ ID NO: 8357
  misc_feature (1)..( 3000): cDNA_ID_1989457_gDNA_ID_1971793_Annot_ID_58046 3000 nt of promoter + ATG

SEQ ID NO: 8414 - DNA, 3000 bp, Unknown; identical to SEQ ID NO: 8362
  misc_feature (1)..( 3000): cDNA_ID_2176755_gDNA_ID_1971793_Annot_ID_175588 3000 nt of promoter + ATG

SEQ ID NO: 8415 - DNA, 3000 bp, Unknown; identical to SEQ ID NO: 8360
  misc_feature (1)..( 3000): cDNA_ID_3089088_gDNA_ID_1971793_Annot_ID_175595 3000 nt of promoter + ATG

SEQ ID NO: 8416 - DNA, 34 bp, Unknown; identical to SEQ ID NO: 8358
  misc_feature (1)..( 34): cDNA_ID_3089068_gDNA_ID_1971793_Annot_ID_175607 3000 nt of promoter + ATG

SEQ ID NO: 8417 - DNA, 3000 bp, Unknown; identical to SEQ ID NO: 8361
  misc_feature (1)..( 3000): cDNA_ID_3089084_gDNA_ID_1971793_Annot_ID_175597 3000 nt of promoter + ATG

SEQ ID NO: 8418 - DNA, 3000 bp, Unknown; identical to SEQ ID NO: 8359
  misc_feature (1)..( 3000): cDNA_ID_3089091_gDNA_ID_1971793_Annot_ID_175593 3000 nt of promoter + ATG

SEQ ID NO: 8419 - DNA, 3000 bp, Unknown; identical to SEQ ID NO: 8357
  misc_feature (1)..( 3000): cDNA_ID_1989457_gDNA_ID_1971793_Annot_ID_175586 3000 nt of promoter + ATG

SEQ ID NO: 8420 - DNA, 3000 bp, Unknown
  misc_feature (1)..( 3000): cDNA_ID_1989456_gDNA_ID_1971793_Annot_ID_58047 3000 nt of promoter + ATG
aatcaatgagtgaataacatatgatttttgtttggattttcaattccttataaatctataaaccaatgacccctcctaaatttgtaaggactaatattgaaaatagtaaatcggtgagggatttttggccaaaaaccctaccaaaaatgtatatgtagatcattcatcatcatatagataataattcttgtattctcctctacaatatctacttttcatgtatggataatgatttaacatcttaaaaatatgcaaccaaccaagctaagcaaactcttcacctaatattaaaagaacttaccaaaagtaatattttcaaattttcatacattttagcttatgtataataaaataacaaaaacaaattatacgaaatggcaaaactgttgagaaacaaatcattacaaaaatccacgtcagcagtcaaaagtaaaaaaaaacgaaaatacaattaggtcataaatgcatttgaaactaacaaaaaaagaaagagatctcttatttcttcgaatttaatcattactagaaactgtgaccacgacattggtcgtggcctaatgaggaagaagtagtcaaagtcacgtgaatcgattaagacactttcttcttcatcaacctaaagacattggtctttgcggccaattgaatatgaaaaacaagattgattcatgattcttttaataagatttgattcttaaatactactattttttatacattttaaaattgtgtatttcaaaaaaaaaatgtaatattttagtgaccaacatattttttgcccaaaatacaaaaaaagtgaccaacacattatgattatataagataatatctaataaagatcatcattcatagataatatttaataaatttagttactttttaaagctttagattgaagctcatataatttttaggaaaacaaatttagtttatcacttgtaaaatactttaaattttaaatattaaatattgtataagtttataagaacaaacaaaaataaatattttaataacaaagtaataaatatatgggagtccaaggttttatccaacaatgcaaaagaataaataattgttcatttatcaataaattttattcttcttctcaattattttaatattactataatatgctatttatccataattatcatatattttaaattcttacttagctcatactaaacttaaatttataatcaaagttaacaactcatactatataataagatgaacatcactcaagccaactgaaacaacccgacccatttttttttttttttaaatataattaaatattcccataaatatctaattaaaccaaccaataacataataattaaaccgcaagtcaaaaatattattttatgaataaataaattattcgaccaacaaaaccaagaataactgacaatcctaaccgggttccaataaccaaaaacaccaaaaataaaataaacgagtttctatatcatcctctcttccttgtcatgattccacgatcacactttatctttacctgcatcaacaacacaatgagatgcgcaagtattatcataaatacttattgaggcgatcctcccatccacgagctatacacacaagcaaataaaaaggtataatcacgaatacaatacaaacaaaccagtcattgaacaattcacccaaaacacattcaccaccctacatatcatcacacaaaacaaatcacacaacccaatcgctcagataagctcatggtcacgcactcaccttaacaaattgattctaataacaattaaactcaggagagactctccttgcgtctgaaacaatccagaaacgtcctacaacaagtcacaaccaaaagcaaccttgaaacaaactggacatgaaaaacagaaacagacaacctcaaatacgaaaccctaaaatacaaactaaccgttaactattaaatcgctccggtgaaacgctagccctagacgtcacgaagcgtcccacacaatattgtcccgatcggaaaacagacgataccacgatctcagtttcaaaccctgctggtcctaattcgcgtctgagaaaacgtgtctcacgaaactgcgaataactcaaccaagtttaatccaaatccaattctgtaaactggataataacgataaaggaattgggaataactctactaaatttcgttaccttttaccacgatttgatatgacgaaactgatttctcccaaaccctaacgattttgctccttctccttttctctctttttctcctttataaaacgaaaagtggctaactaaagccctaatttcgagtttccttcttttataggcacactctagggtttccaattaacccaaccaattaaaccggatgatttaaaaacaaaccctaaccgattttccggttcacgggcgttacaccaactaaaatacatttgcaacttgaataaaatcatggataatatcattgcgtatgcccagaggattcattatttaggtcgcatttttcttaacagttccccagctactgttaactcaaagattacgcatgtacccctatgatttcgatatcgagaggagtagagcgtagacgatattattgctagagtgtaggagttgattctctctagatttttttggggaggtgtgatgtttttttttaattagcttgttatcgaacggtcgctacttttcaagtttatatatcatgaatgacggtttggaggcggaagaaatcatcagagcaactttcccaaaaattagctttttcggcagtttttattttcgatcatcaactcgtctctcagatctgggatttttcctgacaaacgttatagtaagttcattttttcccctctttttgtcatcagtccttcatttgttgactaatggctttgtttgtttcttttgtaggaagatggcgcctctccctctccctccccgactgattgcgtttcgtgaagaaccacacgacgagagggtcaacgtgtatcagaaaatgaaaaccttatg

SEQ ID NO: 8421 - DNA, 3000 bp, Unknown; identical to SEQ ID NO: 8359
  misc_feature (1)..( 3000): cDNA_ID_1989455_gDNA_ID_1971793_Annot_ID_58048 3000 nt of promoter + ATG

SEQ ID NO: 8422 - DNA, 3000 bp, Unknown
  misc_feature (1)..( 3000): cDNA_ID_1989454_gDNA_ID_1971793_Annot_ID_58049 3000 nt of promoter + ATG
tgtactgtgaacacaatgaataatacgttaattctacgcagttatatctagagatgttgtggtgggtaaaaaagcccaacccgacctgaacccaaaataaacccgcccaccaaaaactcaactttagaaaactcagatgggtttttgattaagtgcgtaaagcccgaaaaaactgattattccgagactacccgtgggtacccaacttggtttttatcatttttttagagtttatttttaactgttaatatactattatatgtatgttgtatctatattttgcttattaatatattttaaattatatttattttctgtattacatatatatttgatgggaaaaaggttgaattgcgtttttggcgggaaaatgttaaattgcgttttttggagaaaaaatgttaaattgcgtttttggcgggaaaatgttgaatatcttttttggcgggaaaatgttaaattgcgtttttgaccggaaaatgtgaaatctttttggcgggaaaatgttgaatgtcgtttttggcgggaaaatgttaaattgcgtttttggcgggaaaatgttgaattgcgttttggcgggaaaatgttgaatatcgtttttggcgcgaaaatgttgaattgcgttttggcgggaaaatgttgaatgtcgtttttggcgggaaaatgttaaattgcgtttttggcaaaaaaaatgttgattatcattttttggcgggaaaatgttaaattgcgtttttgaccggaaaatgtgaaatctttttggcggaaaaatgttgaatgtcgtttttggcgggaaaatgttaaattgagtttttggcgggaaaatgtgaaattatttttggcggaaaatgttgaatagcgttgttggcggaaaaatgttgaattgcgttttggcgggaaaatgttgaatgtcgtttttggcgcgaaaatgttgaattgcgttttggcgggaaaatgttgattgtcgtttttgacgagaaaatgttgaatgtcttttttggcgggaaaatgttgaatgtcttttttggcggtaaactgttaaatcgcggtttaggggaaaaaatgtgaaatcttttttgacaagaaaatgttgattcacctgaaaaatgacttaaaaaaaaccgtgggtacccataacccaataaggtaaacccatatgggttttatttatttgggtacccagcccattttaaacctgtattttttttctagaaaaagtagatttatgggcttaaaattttatgtgggttttgggtacccagtgggttttaacccatcattaacatctctagttatatcaaagtgatcacataatttttaaataactatatatataatggtcaaacgcaataaagaatacgttgattctactcatttatatcaaagtgatcacattacttattgactaactatataatggtcctaagtcctaacacaatgaataatacgttgattctacacattgattctaacaaatatctaaatatcatatatcgaatatgagtatatgaaaaaacagaatggatcatgatatgctaaagaacatgatagtgagtttaagcactgtatctctgtatcatgaagaaaaaaatcacgtaaatatatatatagatctattatgaatgaattatcacgatggtatcatcacccaatcaatgtgacctttgttctcgatgatttggaattatacgataaattaaagtttaataggtctagacattcagatacacatacccaatcgttttttttttgggtttcgggtctctttgggtaggggttgacaatcttgatattctaaaatttttgtttgggttcgggttcgattattttagtaaaaaaataaataaaaaagtccaaaaataaccaaaaattccaaaatagttttgggttcggatcagattttttattcatatatactaaaatctgaccaaaatacccgattacgagaaaatacattggttactctttaccaaatgtaaacaaaaatacttaaattacttaaaagaaaaaataacattgattacttttatctcaaatatatccaaatatatatgtattactacaaaatatatagtatatccaaatttataattgtaattttgagtatttaaggtattataaatataaatataactaatatttttaaatgtatatttgtattcgggtatccacgggtattagatttggtttaggttgagttcggttttttttttttgattgtagacctattcgggtaattttaaaaattagactcggggttggctagtttttttttttgggtcaagtagtacgacatatgtaagaaaaataaagctaactattctaacattaccgttccatttttgacagctcactgtaacattataaacagacattacaaaccaaataaattctttttacaagcctaaaagtcatatttgcaagcccaacactaatctgcccagtaaacaataattagggtttcaattaaaatttggaaaaatcacggtgtcaagagtcaagacataaccaaagccgagatttggagatgaaagaaaactagatcgagtgatagaggagaggagagaaagaggagaaaaagagagaatagaaattggattaggaagtgggtttgcttttagcccacgtaagttagtttgaaagtcaacgtgttgtaatttgtaaacctaattggattagaaagtggggtttggtttatcccataacttagcacctctatttatataaaaactctagtcctaatcctattaggaaagcacttatttagataactcctaaagagatttgagcttatcacttcctaaaccataactcggttaggatctaaaccataactcggtttaagattacttttattcttatgctttctttgaagcttaatccatgttgtaatttgtaaacctaattggacttgggtttcataatcctagatagatagtcacatcaaatcattcgatttaagagagatcagttcgaggaaccaaaacctgagagacaaac

SEQ ID NO: 8423 - DNA, 3000 bp, Unknown
  misc_feature (1)..( 3000): cDNA_ID_1989460_gDNA_ID_1971796_Annot_ID_58062 3000 nt of promoter + ATG
ttgttcgtcaggaacgttgataccgatttcaatcagacgaggccaatcagactcataagctcctactctaagaaatcactcctctacgctgctgccgccgcaaaagtgaaattcgacaaattctaagatgataaaagaggcttttgaggtaaatgattaggcttttggaagttttcgataatggaaaagggtgaaaattgaagctttggcagaattgatcgtcttatgcccgtgattgcgctaaaggaagacgaaaccggtttaattgaagaaatcatcggttgggaatttggtgtaagcgattgatctcgaagtggttttgattgaagatttgataagaaaagaaaaagagccttttgtttcttggaaaaatggaagagacaaaggaacaaagaaaaggagagaaggaggtgaggacacataggagagaaagtatgggaaaaggttttcagattatgtttaattacgtaaatacccttggattgtgtctattcgtgagctctatgagatgggtcttttaagtatttacggcttgttggccgtagagactgtccatgagctaagctaagcatccgtgtttttgataagagagattgaaactaaaatacgagttaatgattggttaagcaaaagcaagcaagttcgaacttgtctatactatactacaaaaaccattgatctacgtaggaaaggaaatctaattcgatcacagaatgatggatatataaatcttcataaaaataaaattttgtttgtattataagatgccattttaaggtccatcacataaatgaaataggaatccatttctgatatcatatctctatacgaatacaataaattgcagagcgcagtcctaaatccaaaagtgatgcgatgattcatctattgcaactattaattccaaatcctaagaaaaaacaagatgagaatttataacaaacagccaccaatctgcatagaagaaatggattctcttatcctttgacagttttctctagtttttttcatcatcatataaaaattctataggcaattagcaaaacatctcacgagtcaactcaaagtcagaaagtcgattaaaacgatttagaatttaaaaaattctttctaatgcccttttcatgatgccccttttcaactctacctttttgttttatccattttcatttctaccctctttaaatttttaatgaccattttacccttatttggaaattgttttaggttaacaaaatgaaatattaatatttttcgcctaaaatattccaaaataaattttccgccaaaaaaatcccgccaaaaaatttcgaaaaaaaacattcccgccaaaattttgttttcaaaaatatttttcctgccaacttttttttttgggcgggaaatagatttacaagggattttaaagggtttttataagatttacaagggattttaaaagggtgatttacaagggattttaaaaggtttttaaaagatttacaagggattttaaaagggttttaaaagatttacagggaattttaaagggatttaaaagatttacaaaggtcttttaaagatttttaaagggtttaaaatttgtttaaaatgattttaaaatatttacaagagattttaaaagggatttacaatatttacaagggattttaaaaggctttaaaagatttaaaaagaatttttaaagatttttaaagggtttaaaagtgttttgaaaaatttataagggattttaaaaccttttaaaattactttgaaattttttttaaacccttttaaaattccttgtaaatcttttaaaacctttttaaaatctcttataaatttggaaaatttactagagtaacccatattttatacataatgacccaaaaggaatgctaaaaatatgagttatttgagtaataattatacctaaattatccttgttttcctttgcagagaaaaaaaatattacagaaatgccattactatttaattccagcaaggcaataaaaccacatttatttacgaaaatgccatcgtcgtttttggtaaatctgtggctcttgttgcgacggatttgttatcgatcaaagttttgttggtcaaccacagattttttacaacagacttgttttgtaccacagactttcctgtgttatgttacgccagattttttttttttcgcagattttttaaccgtgactaatttgtttcatatagtctccacagattttatttaaatttcaaaagtaagaatgttgaaaccaaatctgtcactgatttgtttttcggaccacagatttttctttatggtggcaacagattttctatttgcacccaaaaatctgttgtgttataacagatttgttaacctcgaaaaatgttatataggcatgacagagttgttttgtgtaatcacagatttaattaacttgttaacaaatctggtgttttacaacagatttttgttaaaaaataaaattactacacagtcacatagtgataacagatttgtttttagtgatgacagttttttttttcagtgtcaaagcataacagatttactcatgtcaatgttatggccgatttgtttatgactagaataacctttttagtaataacagactttttttggcagatttatttttaaaatttcgaaattttttgttatatgagatttattagctagccctcaattaaattatttccggtttgattgtatgttaaatccggtttgactggattttttttttttttttttggaaaacgttacgacagacttttattagccgacagatttttccgaaatattaccatatttgagtcaaggaatattctcgtaacgcctagggtttccaatgaaaaaaactgccattgtcgttttcttttttcttctgtaacgcctaccaaatctaatttcaatacaatccattattcttctacctattcgagatcttagttgcttcatctttgatacaaattcgattcccttgtttattcgattctctctttggt

SEQ ID NO: 8424 - DNA, 3000 bp, Unknown
  misc_feature (1)..( 3000): cDNA_ID_1989477_gDNA_ID_1971801_Annot_ID_58064 3000 nt of promoter + ATG
aaaaatgggaaacaatgcgctattctcttctgacgccgccatctttggagcctttaaactgagagattctattctgctgaaaggaaaagctctgttataatctcacaacatccaaaaagcttcaaggatacaaaattatcaataacatgaaaagctggatctgaggccactgaaattaattagggattctacatgacggagatcaacactaatagatctcggctaatctagtctaaaggtatatgaatccctggactcactttgagatcgacacaaaaccttagaaaacaaacaaacgaaactacgggaaggaagcaaaaccaataattggtgaaagaagatgaaatcgaacttgaaaggatattgtagaagaggaaatcgaagaagaagctcacctaggatgatagctctctataatcagagagatcgcgctgctgcagatcggcaacaaacggcgttgcagtttttttttctttatgcttctcttctcttctaatttctgatttctgattggtgagttctttcttctttacttgcttattcacttttctttaccttctcaattaaaatatttcgcaattcatttctctctttacatttttacgagttatttattttccattaaattagagtaattattaatagcaaagtttttatggtgaacgaaaacgaatttcccaaaaaaaatcacattttttataaattagaaaggaaaaagagaaaaggatatggatcaaagagggattatatgctctagagatttaatgtgatccagatattgtaatagggattgcaacaaatctcttatatgttctagagatttaatgtgatctagagattgtaaatagttacaacaaaatagagatttaaacaaaacaaatatttaatgattttaagaaaactgttttgttgtaactatttatatttcgaccagaaataaattgttctacttgcaaaatacatcaatcttcgttattattatcgatttaatcataaactgtctaattcaattaaatttataagagcatggttaccaatacttttttatctactgtaacgaaagctaataatgattttgaatgagtttggtatgatttggttattcgattcactaaaatagtcgttttaaatctagccaaatatcgtataattttacttgttttgattatattaaataatcagttatttgaaaactttgttgacatgttaatattatatataactaaaacaaaatatagatattaaaaacaaagaaaatgttattatatagctattatcgtttttcataccatttaaattttattactggctttcatattatgatattgttgtacatagacaccactgctaaaatgcttattaacttgagattttgcttgtgagatttggaggctaatttttttctcggttaagcatttctcgcatcatatgccttccacatagtttgagcttttgttcaccaaatgttcttaccactctcaagaaactggcagcacacgaatatgctttccacatggtttgagcttttctcttggacaaaaactcgttcaccaaatgttcctaccactctcaagaaactggcagcacacgcatatgccttccacatagtttgagcttctctcttggacaaaaactcgttcaccaaatgttccttccactctcaaaaaaatggcagcacacggtggagtttaccacatttgaaaacaagtaaataatgtcttacataattcacagtcactgctttcttcgatcattttcaagaattttgaccgtgaaatttgcaataccatatcttcaagaagacatctaaaaggttttcgcaatctggtgattaggttaatgctcttttgtaatacatttctttcattttatatatgatattaacatttataacaaaagaaaacaatcatagcatattgcatgtcattgcaagtttgctatatacagtagttttaaaccgagtaaacttaagatcaggtaggaaagatgcaaataaagaagcaagtgataccaaaaatatatgtaaacatttaatatagttcttcaatctaattgacgattagaaagtactgtactagatgattacgatccaagatttttgtccacactaagaatatttcacaaaataaggtttgcaacagtaggattgaaatgccagtaaacagtgacattatctcgaaaaaatccaactcagaaatcatttactagctaataatatttttcaaatagtttagaattattattgttgtttatcattaacgcatacaaagttagttgtataatctttcaacttataaataatttggttttggacggaagagctttacgcaaatgtattaatttggttttgataatttttatttgtagactcgatttgtttacgtaaattatgaaagagaggcaaaaataaatatcataagatatagtattagaagaaaaggacataaaagtagtaattaaaaaaaaaaaggaaaagaaagtgtgaaaagaaaaaaggaaaagtagagaggaacgcaaccctgggggcttcttaataaacccctctcgctctcttgtctcttccttacgacaacctctcctgctcttcgttttctctctacgacgataaaacccagatttgggttcaagcttccataactttaaacccctctcgcgatccaggtatgtttcccaatctttattcccagatcttccagatctgaagctcctcttctattttttcgtagatttgatttttaggtttgatctatttgtatgaatggctcgcgtgttctcccgtattggtgattgtaatctaaaatgttgatttgatttaggttcagtaataagactagttatctgacctgtgttaacaccaattagtcttctcctagtctgctttcattgatattccatccttgttcatctgatacttattttttttgcttttattgatctgagaaggttgctatcaaatacttgggagcccccagtattattgaataacacagcctgacaatg

SEQ ID NO: 8425 - DNA, 3000 bp, Unknown
  misc_feature (1)..( 3000): cDNA_ID_1989476_gDNA_ID_1971801_Annot_ID_58065 3000 nt of promoter + ATG
aacaaggcaattctcgtttccaaaatcaaacccgactacactcattgtcaggctgtgttattcaataatactgggggctcccaagtatttgatagcaaccttctcagatcaataaaagcaaaaaaaataagtatcagatgaacaaggatggaatatcaatgaaagcagactaggagaagactaattggtgttaacacaggtcagataactagtcttattactgaacctaaatcaaatcaacattttagattacaatcaccaatacgggagaacacgcgagccattcatacaaatagatcaaacctaaaaatcaaatctacgaaaaaatagaagaggagcttcagatctggaagatctgggaataaagattgggaaacatacctggatcgcgagaggggtttaaagttatggaagcttgaacccaaatctgggttttatcgtcgtagagagaaaacgaagagcaggagaggttgtcgtaaggaagagacaagagagcgagaggggtttattaagaagcccccagggttgcgttcctctctacttttccttttttcttttcacactttcttttcctttttttttttaattactacttttatgtccttttcttctaatactatatcttatgatatttatttttgcctctctttcataatttacgtaaacaaatcgagtctacaaataaaaattatcaaaaccaaattaatacatttgcgtaaagctcttccgtccaaaaccaaattatttataagttgaaagattatacaactaactttgtatgcgttaatgataaacaacaataataattctaaactatttgaaaaatattattagctagtaaatgatttctgagttggattttttcgagataatgtcactgtttactggcatttcaatcctactgttgcaaaccttattttgtgaaatattcttagtgtggacaaaaatcttggatcgtaatcatctagtacagtactttctaatcgtcaattagattgaagaactatattaaatgtttacatatatttttggtatcacttgcttctttatttgcatctttcctacctgatcttaagtttactcggtttaaaactactgtatatagcaaacttgcaatgacatgcaatatgctatgattgttttcttttgttataaatgttaatatcatatataaaatgaaagaaatgtattacaaaagagcattaacctaatcaccagattgcgaaaaccttttagatgtcttcttgaagatatggtattgcaaatttcacggtcaaaattcttgaaaatgatcgaagaaagcagtgactgtgaattatgtaagacattatttacttgttttcaaatgtggtaaactccaccgtgtgctgccatttttttgagagtggaaggaacatttggtgaacgagtttttgtccaagagagaagctcaaactatgtggaaggcatatgcgtgtgctgccagtttcttgagagtggtaggaacatttggtgaacgagtttttgtccaagagaaaagctcaaaccatgtggaaagcatattcgtgtgctgccagtttcttgagagtggtaagaacatttggtgaacaaaagctcaaactatgtggaaggcatatgatgcgagaaatgcttaaccgagaaaaaaattagcctccaaatctcacaagcaaaatctcaagttaataagcattttagcagtggtgtctatgtacaacaatatcataatatgaaagccagtaataaaatttaaatggtatgaaaaacgataatagctatataataacattttctttgtttttaatatctatattttgttttagttatatataatattaacatgtcaacaaagttttcaaataactgattatttaatataatcaaaacaagtaaaattatacgatatttggctagatttaaaacgactattttagtgaatcgaataaccaaatcataccaaactcattcaaaatcattattagctttcgttacagtagataaaaaagtattggtaaccatgctcttataaatttaattgaattagacagtttatgattaaatcgataataataacgaagattgatgtattttgcaagtagaacaatttatttctggtcgaaatataaatagttacaacaaaacagttttcttaaaatcattaaatatttgttttgtttaaatctctattttgttgtaactatttacaatctctagatcacattaaatctctagaacatataagagatttgttgcaatccctattacaatatctggatcacattaaatctctagagcatataatccctctttgatccatatccttttctctttttcctttctaatttataaaaaatgtgattttttttgggaaattcgttttcgttcaccataaaaactttgctattaataattactctaatttaatggaaaataaataactcgtaaaaatgtaaagagagaaatgaattgcgaaatattttaattgagaaggtaaagaaaagtgaataagcaagtaaagaagaaagaactcaccaatcagaaatcagaaattagaagagaagagaagcataaagaaaaaaaaactgcaacgccgtttgttgccgatctgcagcagcgcgatctctctgattatagagagctatcatcctaggtgagcttcttcttcgatttcctcttctacaatatcctttcaagttcgatttcatcttctttcaccaattattggttttgcttccttcccgtagtttcgtttgtttgttttctaaggttttgtgtcgatctcaaagtgagtccagggattcatatacctttagactagattagccgagatctattagtgttgatctccgtcatgtagaatccctaattaatttcagtggcctcagatccagcttttcatgttattgataattttgtatccttgaagctttttggatgttgtgagattataacagagcttttcctttcagcagaatagaatctctcagtttaaaggctccaaag

SEQ ID NO: 8426 - DNA, 3000 bp, Unknown
  misc_feature (1)..( 3000): cDNA_ID_1009376_gDNA_ID_1971801_Annot_ID_58069 3000 nt of promoter + ATG
actttacatttcagcgataagggaccaaatcaattggttggttggaaaggtaagaaagatccctaaacccataaatcctatttccaaatcaatatgtagacataatgtaatcagcactgtgttgactgtttaattcttgtttttttcgttttatctggtcattgcaaaagtgttaattaatatattcattacagatttttagtggatttagtatatattcttttgataattattttcttacgcctataatcacatacaatgtctcatataatttgtatttattatttttaaaaagttctgataaattggagaataaaaaacaagagttaaagcaaagctttgttgttgttttttctgtagtcaacaaatattgttctctttttttaagaaaaaaaatgaaaatgaaaagacttgataagtgataatgggagacacgatcactcgtaggcgttgcttccggtttttatttctaacatttttctactctcttttttttttttttttctcttatggaaaataattttgtttttataagaggaaaatacagaggcaaggcaaacaatacgagtcttgtacgtattctctctttgcttcctaaaaatcaatcaatcaatcaatcacagagtacgcaccaccagccaaattataagtgagagagaagataacgacgacaagaagaagaaggagaagctccaaaattgttcatttgcatttctccaacttgtaaaatcgagcacctgcatttgggggctttcctcttatctggaaacaaagagagccgccactgatggtaaatttgcttttcatccttaacctctctacttcttcttcttcttcttcttctactaccactactttttgagattctatctatctatagtcatccattttgactaggagactttatattattttcttcatttgaaagattctctatacatagatagtcatcgattgtgtttctgtgtgtgtctgcaatatctgtagttttgatttgaaacttgcctgaatcaaatccaaccatgaattcggtagttttgtagatcagagattattggtagagagtatcaatgttggattgattgattgaatgaagcatacattattatataacacaagatttttataaattgctactgaaaccagaaaaaggtaaaatattaatttgtgtatttttgtaggaatgagtttccgtgaatcatccacccaggtgaaaggaatcataatttggttggtcaactaataataaaaatgggtgaggcaagtgattcagattcgtctgatgagtctttgaaacacaatagcaccccaccactctttagcatctctggcttcttttgtgttgccaaaggaggagactctgatcccggtaggagccctacttctccccttgattttggagtctttggtggcctctttagccccaggtcttcttcttcttcacccctccaccgaaacaaatggctttctcacaaagtcgggctttctcttctgagctccagcttcgaactaggcgatgatccattcagaagggactacattgtgcttgcccctcaggtcaaggtcaacaatgttaatacagcaactcccaagctttccagtgatccttgtgtcattgtggaggaaccaaggagatcaagctcatcatcccctatggatatcatctccacgtactctcgctccctctctgggcgtgagatggctctctctgaggactatacctgtataatttctcatggaccaaacccaaaaacaacttatatatttggcgattgcatcctggattgtgaccccaaggacttgggaaaagaagatattgagatacacgaagaaggggatgattcttttagcacagaaaaacctcaaaatcacaggttcttctggctccaacttacaaagcagcattgagtggtctttttaaccttgaactaattacatctctgacattttatttccgtgaatgaacaatagggaagtatcagcagaaaaggaaagtgagaacgctggtgctgaagaatcatgttacgaagaggaggatctgtttcctatggcaatgcctcttaacccgtaatgagatggccagagtgaagggggtttattgtgtgggcctctccctctttgagtgtgacatttagtgttgtaaggttaggtgtggggatttttgtgtgctcaataaaaagctttgattcgggtgagttttgctgtggcctgatgccccggctcatcccttttcttcgtcttgttttttttttcttcttactttgtatgattgcgttgttactactgatcctcatttgatggacacacttgtgttttctctctatatcaattgttttagtggctcacgttgctgaataaaaatggatattatcgatagggcatcttttattctattttgggatacaagaatgattgaaacacaatattggaaagaaaagctaagttgcaaaaaaaaaagaaaaaggaaaaaaagtcgaccacagtgggagtcgaacccacgaccttttgatccgaagtcaaacgcgctaatccactgcgctatgcggtcattcttgttacttatatcatgaacaacatggtaagccaaaacttcttctttcctctttcttctttctgttttctggtcgctcgttaccaccaagacctcgtcgaggtttctctctctctgaaaaagtgcttttgctgcgtttccatgctctcggaaggaacttggctgaatcgttggagaattatcgatctggcgtcgttggtgcatctctagctgcgccaattcatcggatccggtttgatttctccctttcgcgaatctagccttccgtgatcttaggtgggttttccgaattgatctgtaattgaggatgtaaatcgaaactagggatttcctagatctcgttagctgtgtatttgattattgcagcagagtttttgtttaggtagagatatagggaattttgatatagggacacttaaattttggtgtatcaatttgctgcagcagcc

SEQ ID NO: 8427 - DNA, 3000 bp, Unknown
  misc_feature (1)..( 3000): cDNA_ID_1989473_gDNA_ID_1971801_Annot_ID_58070 3000 nt of promoter + ATG
ccttgattttggagtctttggtggcctctttagccccaggtcttcttcttcttcacccctccaccgaaacaaatggctttctcacaaagtcgggctttctcttctgagctccagcttcgaactaggcgatgatccattcagaagggactacattgtgcttgcccctcaggtcaaggtcaacaatgttaatacagcaactcccaagctttccagtgatccttgtgtcattgtggaggaaccaaggagatcaagctcatcatcccctatggatatcatctccacgtactctcgctccctctctgggcgtgagatggctctctctgaggactatacctgtataatttctcatggaccaaacccaaaaacaacttatatatttggcgattgcatcctggattgtgaccccaaggacttgggaaaagaagatattgagatacacgaagaaggggatgattcttttagcacagaaaaacctcaaaatcacaggttcttctggctccaacttacaaagcagcattgagtggtctttttaaccttgaactaattacatctctgacattttatttccgtgaatgaacaatagggaagtatcagcagaaaaggaaagtgagaacgctggtgctgaagaatcatgttacgaagaggaggatctgtttcctatggcaatgcctcttaacccgtaatgagatggccagagtgaagggggtttattgtgtgggcctctccctctttgagtgtgacatttagtgttgtaaggttaggtgtggggatttttgtgtgctcaataaaaagctttgattcgggtgagttttgctgtggcctgatgccccggctcatcccttttcttcgtcttgttttttttttcttcttactttgtatgattgcgttgttactactgatcctcatttgatggacacacttgtgttttctctctatatcaattgttttagtggctcacgttgctgaataaaaatggatattatcgatagggcatcttttattctattttgggatacaagaatgattgaaacacaatattggaaagaaaagctaagttgcaaaaaaaaaagaaaaaggaaaaaaagtcgaccacagtgggagtcgaacccacgaccttttgatccgaagtcaaacgcgctaatccactgcgctatgcggtcattcttgttacttatatcatgaacaacatggtaagccaaaacttcttctttcctctttcttctttctgttttctggtcgctcgttaccaccaagacctcgtcgaggtttctctctctctgaaaaagtgcttttgctgcgtttccatgctctcggaaggaacttggctgaatcgttggagaattatcgatctggcgtcgttggtgcatctctagctgcgccaattcatcggatccggtttgatttctccctttcgcgaatctagccttccgtgatcttaggtgggttttccgaattgatctgtaattgaggatgtaaatcgaaactagggatttcctagatctcgttagctgtgtatttgattattgcagcagagtttttgtttaggtagagatatagggaattttgatatagggacacttaaattttggtgtatcaatttgctgcagcagccatgttctatggcacagctgtatgggacccttggcttatcgttggccagattatttgcctccaatgctcttactatctcactcttggactcttcaccatggtctttcttggccttcgtgttcctcgccttagtcttgtctacttcttcgattacgctactctcactacttccaccttcaccggttggtctgttattgcctcattcctcttctcttcactcgctgggtattttgctttgccccctagtaatagtatccatccatttatttccctctttattactagtcttttcagattccttgtattcattttaattggcagggctgtgtacatgatatttttggtggagcgagcacggaaatgcttagatttctctgcaactctctacatcatacatctcttcttttgcatcatgtatggaggatggccttcctctatggcgtggtgggttgttaatggaaccggactcgctgttatggctttgctagctgagtacttgtgcattaaacgcgaacagcgagagatccctatggatcgcttccactcaagtaagatgatcattctttcttgaaatctctctgtgtgaacaagcatatctttaccttttactttctcaagactgacttaacatgaaattaaatttggctgcctatgctgctgctgcaggggtttgaagattggtgaaagaacaagtgatgaagattcttgtgggttagcagcgcgactcgtagagcctagtagagcctagtactcttaacaattgtgatgtacagagatgaaatcagaggagtagaatgggcgaaaggaagttcagctagccaagcaacaatgttggacactggtgcaccaactctgactgcaatttttagtgacttcaaatactaagactttggaatacgtttcaatttgttcttttgtatgaaaaaaacattagactcgaataggttattgatttcatgttgcttcttttttttgtttatactggattttctcttctatcctctacttggtgcagctttgtgtgttttaaaaccagtgtctcattcatcatactcttttaccaccaattgaatccttccaatttactgttttttgggggggaaaattactgtgtactaacaagtaaaaagggccgtccgtcaaaatgtaacatctcctatatacggtgcggtcaagttaaaaaaaagagcaaaaacgcgtgataaaacgacgtcgaattagagatcctactagacccagattcagatccaaatcgccaacgcgcactggaagtgggatcaccaccactgcgcttcttcttcttcgtcatctctgatcccccctgcgatcaggggccatttccgtcgataatccgatctccggttcagacattcgtttggacttgcaaag

SEQ ID NO: 8428 - DNA, 3000 bp, Unknown
  misc_feature (1)..( 3000): cDNA_ID_1989472_gDNA_ID_1971801_Annot_ID_58071 3000 nt of promoter + ATG
gtttttactcgattcttattttttgacaggacattgctgtagaggcacaaaatgaatctaaatggaagcaacttggagaattagctatgtcaagtgggaaggtgaccattttttagctgcaatcagtgttctaggattcttacaaaggttaaagctaacatgtatttttcttttcattttccttcccatgcttggactacttagctggatatggctgaggaatgcatgaggcatgctatggatttgagtggtctgctgctgctttattcttcattgggagatgcagatggaatgatgaagctggcagcacttgcaaaagagcaaggaaagaacaatgtcgcttttctttgcttgttcatgttgggtcaagtagaagactgcctgcatctgttggtggaaaggtacattgtttactatttcttacatgtggaacatatattcccgcaactaattacgtctatgctgatattaatatggttacagtaatcgaatacctgaagccgctctgatggcgagatcgtaccttccaagcaaggtctccgaaatagtggcattgtggagaaacgatttgaccaaggttagtggtagacacatccgatgcaccttgtgattgaatttcaaaccttgcctgttgagatatccacaatttttcttcatcctctgtcaatctggatatagataagtccaaaggctgctgaatctctggctgatcccgaagagtatcccaatctctttgaggagtggcaagtcgccctgtcccttgaaaatagagctgcagagacgaggtatcttttcgtcgttgccgtcattagcttattcttaaaaacagtgcttatgaggaaacctttttaattgaattgtgggacttaagccatttagagtcatgtgtctgtattacatagcaaggtagccgtcatgtatttgcttataatttgaatttatacccgtataaacataagccgaatgtcgatttcattttttcaggatcctcataaacaaagtatttttgttgacttatcttgcaggggcgtccatcctcctgctggggattattgtagtcatgcagacagagatcatacaactttagtggatgcttttagaattatgcaaatagaggaagagggtcgacttgagcaaggggatgttctcgacgaggtatgcatgtttacattacatgcattgaagaggattgtcttttacccatgatatccaatccaatggtcttggccatggtggacaatggtaggatcattaattctactgtcgctgcttcatttgttgtgaacaggttggggaagagggggaagatggagaggaagaggaggaggaggatcgtcaggaagagagtagtgatgggagacagcagaatgtggaagaagaggctgttgtggtggacgctgactctacggatggtgctgtgctagttaatggtaacgagtctgaagaacagtggggtaagattagtgaaggaaccgcatcagccttatagcatttgtggttatcaattgattataagatgtcgctgcaccaaaatatccttttgccatctgcacatatatcataggatttgcgtttgcatctgtccatcaatgtttcctcatctgtctgcctcccatcttcgtcttactgatcatcttacttttgatgttgactgtcttttaaatagtgcttctctatgccattaacttttttatcaatccgtggactgattaaatatttgtttgttgtacagttctaacaccgccacaagagtagggttggtgaagagtgaagacatacacagatagatattttcttggctttgaaacttgatacattcagcagagaaatgaggcagcacagagagagattagtttccattgttaaaaaactgatctattgatagcttccgctttgtgcttttaatacagatacatattaaaaaaaaagggggttttgggactcttatgtagctttaacttatgagagatttcacctgtagaatatctgttttgaactgagatttcacccatataatatgttttgactttcgattcaataggttatgtagttgatatcttttttttttttgcaaaactcaatagcagtagcaaaaaacttaattggaaataatcaaagtgaagggataagttgggaaagagccagaggataacgcatggtgcattattattagtattgtggaggagacgcatctcgaaacatctctcaaagcaaacaaggacccaaaacaaagttccttgcattcttccactgtccgtaatcaccatcaccatatcattattcttctacccattttgtcttggaaatgattttaaattttcttgttgcttcttactgcaaactgtgtataggttcaactactccattgagttacacacttgcatgcacctatggaagttaattttccggttttgattgatattcaagttgttgaccaatggagttatatacccttgatttatatagaaaccacatgttttatttatattaacatggtcacttttgtcaggattaatagacaacaatagttgagagaaaaagtgataaggtagagctaatttgtattaaacttatcaattagtattgttggttaaaaaaaagttaataaagtagtcaagttggataattcccaaaaactgggaaaaaagaactcaagcgtcaaatgttgtaggtgcatcatcatcagtctacaagtagtaaaaaacccattcgatttgataagaagacccaacggaaagagtcttcccgtctacaaagtaaacccaatcaatcttaataatctttaagaggttttttcttattataattatctatctctctatctatctatctgcggatctctcatgaagaaacactgaggagattctctcgctctgatctcctggtatcgtcgtctctctccgtagagatatactagtttgtcccatatccgattgattgctctattcaatttattcctcttctaggttttcggtttggccctccgatttagagggattg

SEQ ID NO: 8429 - DNA, 3000 bp, Unknown
  misc_feature (1)..( 3000): cDNA_ID_1989469_gDNA_ID_1971801_Annot_ID_58074 3000 nt of promoter + ATG
tcgcgtcaataatattttgggctttaatgggcgctataggcccatacatttgaagataataaaataactcattgtctacgatatgtaggggcagtgtaagctgaagggaaagcctttgtacgttctggtggaaccaaaccagtttgatgaattaaccttataaaagccttttctattcaacgattatgacaaataatgtaatcggtttaatcgattttgtaactaaggatttgtttgttttctattggctccatgtggaatgattcatgctagttactatgaaattcggaatacgaaggtatgcagtattatgcaccactgttcttcagatgaatgaattcaagtcgattttctagtgatttacatggcagaatttataaataatatacatcatattgtttgttagataactttactaagggggcaaaaaaggaattatcagataaacaaaatatttgaaaaaagaaaaaaacgttggcagggagtttcacgcgcaacgcaacgcgcccatgtgattaacaaaagtacgagaaagcccctgccgcttaaagatctgtatataaaaagggtaaaataaggtctcctggcctggcctttaagataaagaaaaggaaacccaatcgaaaacctaaaacccgattagattttcttagatacgaaacctctcttacgacgctccttcctcaatctctctcgatcgtcggagattctttcttcaagagtcatcttcttcttcttctccttctccctaaaccctaatttatcgcgtttggatcgaatcagctgtcaattcttgttttggttttcacggccagggccatgtctgccgtatattgcggaaccaagagatcttacttcgacgataattcttctccgccctcttctaagaggttccgatgtttttcgccttccaattctccaatctggtcctctcctccttcctcatcgctcgatcagcttcactctgcgtttcctcatattgaactcacggtaggtcttccttctattcaatccacacagatctagctttaccttgttcgcatcttgtactagaaatctcactgactaggcatttgttgacctcaaattacgcatctgtctccgatatctctcttcttcttcttcttcaccgcctgtaaattgagcatcgaaaattcacgtctcggttgcacaggttctttatgcgattggttgtaagtaaattttgtacagtatctagggtttaactagatttgcaagtctttctcaggttctcgtcaaggcactagaagataatggaagtgattttaatgctgctatgaagagcttatactctttcgcatcttctgaggagaagaaagctgaagaattggccgcaggaggtgctgctactcaggaaactgatgccgtttgtggtggaaaccccccgaccagtggtgatgactgggttgaattgttagtcagggaagtgttacaatcgtctggtacagatgatgcaaaagtacgtgcagcaagagtccttgaggccttagagaagatgttaagtgcacgtgctcgtgaagaagctggaaacaaattccaagaggtaaataaagcattgcatctttcttaatgtgtttctttcaaaatatacccttacatatgcaccttgtgcatacatactggctatcagaccatgaatagtgataatcatatttgttctttgagctctgggcatggaagacagtttcagttgctgtaggacataggttgaaccattagttacttcttatgtaggtgcatacgctcgtcactgattacaagtttgttggatctaaacacaattatgtataatggcaatgaggaatcaactgtgaaaggacaatcatcgtccatttgttctgcattaactatgatatctgaagagggtttgtttttcaatgggggaaataaagttatcatagtaattttgttcttagtaacaatctcttcttagtatttttggcatatcttgtctcaaaataacaatctcatatgattttacaggagaaagtggcagtgcagcaacaggtggagaccttggtgaaggacaacacagtcctcaaacgtgctgttgctatccagcatgagcggcagaaggcattggaggatgcgaaccatcagctaggacttttgaagcaactggttcctcagtatcaggaaaagcttagaaatctggaggtaagccttaggcgatagagagcttctgcatatcccttgctattgctttgaatggtctggtgttggttgttttaaaattgaaccaaaaacagatgttgttagaatttgatgatgcctcataaaagaaagagtgaatgacaaaaggtagaaaaaatgcaggtgaacaattacgcgttgagaatgcagctgcagcaagtggaacatggcaactcaatgccagcaagattcaatccggacgtcttctaaagctctccaagaagacaaggacacttgcagaggaggagaaggcaataaacgaaagtagagggagagagagagagagagcgatatcaaactacaaaacaaaagtgcttttgcattgtaatactgtgtagtcaggacaaacaaacattctgtttcctttccttttttttttatatatttctttggtttgctgctgtttgtctcaggcgcatttattttggaaatcaaggatgtgttttggtacatagggctgtataatttgacattgttctgaaaattcgaatcggatcaaccattagtagtatatgatatgaatgaatgattttacctgtaagaaataagcaaacgagacttttgggttacggcaaaagaagtgatggaagagaaaaataaaaaggaaagaaaggaagaaaatccacgtgagcgaggttcgcaccacaaaatcccgaatttcactctctttagcctaaaacgcttttggaatcatcgtcatcatctctcaacaatgcccgttgccaagcttctccgcgtcctcttggtagcttgagaagctcgtttgattccattttgtctctaatg

SEQ ID NO: 8430 - DNA, 3000 bp, Unknown
  misc_feature (1)..( 3000): cDNA_ID_1989468_gDNA_ID_1971801_Annot_ID_58076 3000 nt of promoter + ATG
ttccaatgattattggtttatgaatttgttgtccaggattgtatcaaaagatccatagttttacaaatttcatatctatcttcatgcattgtgaaagctgaaggaaggtacatttttattcgcataaattcagcctagaacacagtagtaagatcatctgatttgtgataaaacaagaatggattgagtatttgtgttgattttgaataattttgaagtaatatggcaaggtaaaccttatataggctgaaaatggttaaacccataccaacctactgagcccaataattggcctcaccattttgctggtcaaacctatgttccacccgagaatctaagaatgacacgccccaccactagcatatgctcatcttcttgcctctgttttattaaaaagtaaaaactgtctatcgttgtcatatttgtctgtgtgtataaagttaacttgttgacaatctggattcatagggtgccatatggttcacatctaatttaatgttttcattcgattgaaaccttcctagtagtttcaagtttgtttcaccaatgaaccaggatctcattgaattaatgttagatgtaagctggtcaccactttctcaggttgttttgagcttgagaatattgtttccttgtacatcttgagaaagtgaagaatccgctctgagagatttgtctttagataaacaatcgaattttggctcttaatgatcggattagttcttggacgagtgtaagggttttgttcttgtcttcataataaactttttgtttttttgtttttttgttcttttgtatttgctttcttggctggtaaagtgaaaaaatgcagaaacggtggaagcaagtgcagaagtagacagtgagtgtcaatctatagccaggcttgaagactttcattctcgtctattctgcattctgtgatccacgaagagtataccactcaataaagtaaagtaatccccaaggcacagccactgaggttgttacaggtcaggattctactttctaaaaaaattggtatgactgatggatctcagcatgtgggtctaatctaatattggatgtgtgatagtctcattgtcctgcatgcactggacttgtaagttacaagttgtaacaccaaaaggtgagaggatagtggatacagtgacttacactatctgccaacagtaaaaaacgcaaataagtgggatctttgattggcattttgattagagttgatgttactgttagaggagagcacagagtcacatggtcaagtccctctctttcaatcctttttatgtctttaaaaaaaaaaaaattattggaagtaaatgaaagagaggcagaggagatcttgggtagtgattgtcctcctaagatttggtgtccttctctgtctcttttgaaattaactgcacgaaagatatttgtgaggtacgcattccttgtgtttcgttttcaaacttcatcatctcttctttcaaccatttttccttttctttacttaccgtttagaaatcttgaaataaactgaccaattagatatttcagtaaaaaaatcctaacatctaaggatatagataggtgcaactcggccgcttacgaatgtattcgttgtgttcttttctgttttgaagttggatttgaaagaccactacaataatcgagtttgagtgttgttgtcgttttattgtgaaatataaggagtgacgtgtctaatgatctagagtcatagtgtgtatgtagatgaaatcatgaaaagcataagttggttcagatccgactagtggacagaaaaggataatagtctcatctgattgattttgattttgcctcttcatctgttttcagctatatatctttgaatccaattataggcttcttttgtttataagatttatttcttgtatttctgtgatgcttcaaaatgaaagctttctaatacgtctccactttgcttttcttctctgttttacaacgtataatggaactggtgatgtaatcacttatctcaaattatatggtaagaagaagtagtactagtagtagtagtagtgcggagcttaaaatgttaaaccatatatctagacgaaatctaaagccaaccaaatctctacttgtgattgaaaaaacggcatacataataacataggtggggcacaaaatatagtaaagtaatgaaatgatttgaaaatcaaacaaaaagaagaagaagaagagcaggcgtgcgcttcaacagtcgaaataggcactcgtacgtttttattttatctatctccctactctcactcacatctggaccctccttgctcctcttttaccttctttaccggttttaccattgaatcaacgttttctccccttttaacattacaactttctttggaaattgatttgtttatggaaagacagagataaatgggtcataaccactattactataaatgctcgagtttacaatttcatatcttccagaaagatttgttgattttctggtaaagaaagattcgctgtatatttttacaagtatgcgtgcatgctgtgctggcacagaatatcgatttcgttagatcaataccacaacacatttatgatttttggtaaaaatccatcacacaaaagccttgatctagaagactagaacccacaaaattaatcatattaacatgaaatctatatatagtcaaccattattggatagaatctaagatatttgaactttggttctcaatttacatagtaaatctatccaaccactatgaagtggtcgttacaagtgagctttaatttgattattctttatatatttcaatttttaaaagatatattaaaaataacaaattcggatggagacgtacgatgagtggggtgaaggaaataaatgagagatagagatagaaaggaagaattatcaatataaatgctatcataaatacagcaaaccccattctctcttcttcttcgacaaacaccaagacaaacgtaagcacaagcacgagtgagtgagagatg

SEQ ID NO: 8431 - DNA, 3000 bp, Unknown
  misc_feature (1)..( 3000): cDNA_ID_1989467_gDNA_ID_1971801_Annot_ID_58077 3000 nt of promoter + ATG
gccaatcaaagatcccacttatttgcgttttttactgttggcagatagtgtaagtcactgtatccactatcctctcaccttttggtgttacaacttgtaacttacaagtccagtgcatgcaggacaatgagactatcacacatccaatattagattagacccacatgctgagatccatcagtcataccaatttttttagaaagtagaatcctgacctgtaacaacctcagtggctgtgccttggggattactttactttattgagtggtatactcttcgtggatcacagaatgcagaatagacgagaatgaaagtcttcaagcctggctatagattgacactcactgtctacttctgcacttgcttccaccgtttctgcattttttcactttaccagccaagaaagcaaatacaaaagaacaaaaaaacaaaaaaacaaaaagtttattatgaagacaagaacaaaacccttacactcgtccaagaactaatccgatcattaagagccaaaattcgattgtttatctaaagacaaatctctcagagcggattcttcactttctcaagatgtacaaggaaacaatattctcaagctcaaaacaacctgagaaagtggtgaccagcttacatctaacattaattcaatgagatcctggttcattggtgaaacaaacttgaaactactaggaaggtttcaatcgaatgaaaacattaaattagatgtgaaccatatggcaccctatgaatccagattgtcaacaagttaactttatacacacagacaaatatgacaacgatagacagtttttactttttaataaaacagaggcaagaagatgagcatatgctagtggtggggcgtgtcattcttagattctcgggtggaacataggtttgaccagcaaaatggtgaggccaattattgggctcagtaggttggtatgggtttaaccattttcagcctatataaggtttaccttgccatattacttcaaaattattcaaaatcaacacaaatactcaatccattcttgttttatcacaaatcagatgatcttactactgtgttctaggctgaatttatgcgaataaaaatgtaccttccttcagctttcacaatgcatgaagatagatatgaaatttgtaaaactatggatcttttgatacaatcctggacaacaaattcataaaccaataatcattggaagagattaaaaaggggacataggaagaggttgtgacttacggatttacatcttgggtctgccaccgaaatgcttcaaagaaaatctggagggaccactgcgacactcgggtccttttctggaaactccccaacgtccagcatatggcaaccatcctttaattaagttaactagtctggattctgctgccggtaactcgtcttgtgctcctggataacacttctcagctacatcatccacaccgttctggttttggttttgtatttggatttcgttgacaatggatgacacatccaacctaccatacaaggattctttagcagagcattgaaatgcagagacgatataggaagattgttacaaagtacttactcgaggtaccgcttgcaactcgggctcttggatcttttgttcataggagagtggtctatcgacaaatgccttacgaaatgtaactgaaatagagtgaaagggatgttaagactttcaaaggaatgagattgcgtgcatacgattcttatatagaagtgagaaggagtttaacgaacttggtctccatcattgagaccgagataacggatgctagtcttgtcattgactaatctctggtctcgataacacaagcaaaaatgaccccagacgtgagacctgtaggcaaagatcaaagtgaacgactgtaccagaaagcttaagctgtgagaattttcatatgaaatgatgatataccatgaaatcatgccgtgaccttccagaggagaaatggtgaatacttgttccacagctcttttgagctctgccactgagcaatcctttgcaacttccacatctattgattcgttggaaaccatttaacttcttgagaggccaaatcagaaacagtaaccaaaaaactagttgatacttcatccaaaattatgtctattaaggctcttaaacaatgatttctaacagcaacaaaaaattccggattagagatcgattagggtatcaccaactgagggaaccgttgagcttgattgtaaactaaactcttaaaattgctatttcggaaactggataagcaaaatcgtaccgaaaagggagccgttgagcttaacgacggaaagcttgatacgaccctgaggaggaagtttcaggtaggaagatctccgtccagaaatcgaaccaccgtcgtttaaagcaaacgatgacaagaagcgtggatctatcaacgacctcagtcctccacttcgacgaccgtccctaaccggactatgctcttctcgcattgccgattctcccggattttcaccgacaagattctgctctctttgctcttcttcttcagccttcaggtgactgttgaggagctgagcgagcgagcgagagaatcgggagagtttgttttccggggaaaaaccgcaattactgctatatagctccccaataaatgccaaaacaaaaaatcaaattaaagtttgtcaatgggcatcacggcccaaatctaataatcaaaggcccaataacttgattcgacaatacttagcgggtttggataaccgcctaagcatctgttcgacaccgcctattttttttttttacttactcctcctgatctgctgatataaggccgaacgggaataaaaaaaaaaaaaaaggaagaagcgactcacccgaaaatgttttagggtttttctttactcgattaagctcactagttcttcgcaacgtagttagagatcgacactggcgcggtggatttagggtttttttcctccgcgactacgctcggcgtttcgatttggaaccctaagct

SEQ ID NO: 8432 - DNA, 3000 bp, Unknown
  misc_feature (1)..( 3000): cDNA_ID_3045528_gDNA_ID_1971801_Annot_ID_175722 3000 nt of promoter + ATG
cagcctaacatcatcgatcaccggaccacatagcgagccagagtgatcgcttttcatgtggtaaaacgtgctcaagaaagtgacacgtgtcctggccgacactgccttgaacacaagcctcccacgtctaaacccgccttttcctttagaagcgtagtccaccatgaccttgccctgtccagcgaacgcttccacaatcattggtccctcacaaccgtctctggcgtctcccacgttgaacgtgagggcgtagaatttgttcagtgacgtcctcactatctgagaaatggcgctctctttgcctccaacaagctcgatggctcggtgtccttcggggacagcgaagtgtgctttgtctacgtacttaacggctttgagagactcgatcatccaaccgggcaatgggctgttatcgtcctcgatgaacggtgggatcagtactccccattttgccgtgggaaacacgtaaggtccttcttcgaaattcccattctttatcagattatctgcaaacagaggtcaccacttaatcaccgaatccggtttactctaaaagattaaaagatatgaatatggtcggttccggtttacttacatccagagaatctgggagggaacaaagccttgatagccacggcgtcgatcaaaggtccgcaagccgggtgctcttcaacaccagggttatggaaccggatctcgatttcgggaccaccagctttaaaagcccatgagtatgagtcccaaccatcgctgccgtacatcgtctggatagggatcacacctgactcatgcgtcacggatatattgagcctctcgtcttgagcgcaggttcgagcggcgctgaacgttattgagtacagacggccaggtaggacggatattttctgggagattgaggcttcgttgcctagtctaacggcggaggaaccctgcggtacgaccaagaccatgtcatcttgtttctgaccggatttaatgaactccacaaagccgattatgttccagtttggtacggcggttcgttccttaaccacggatcctttcatttgggagggtttaggacccaactcgaagttgccgtttggtaataaacctgaaacaaaaaatattaagaaatgttaatttataatctcggatttgagttgaaatgagctttaactagagttactaccatcgcggactggggccgataagacgacattcgaagagatgaagaggagagctaagaggagtgctgcttcttggtacatcatgacttccttgggtgatagatgaagatcagatggtgagtactatccaaagggtgaagaaaggctgggtttttatgagtttgagaatagaagacgagcactggttttgaagaaaacaacgggaatgccactggaagcatcctgggttctattgtcaggtgccacgcagacacagacagctagctcaggaaacatttgacttcatgattagcatttccatttcttcaatgtattgtttaaggggctgccttaacaaccattatattaaactatatattcaaacgtaatttgcgtttgcctatctaaattattcacataaattttcaaagtattaaaatattttttggctttttcagaaaaacatttttgaagatcagtacatccatgcgtaaacgccaaaaaagttctttttgaaaaaaggtttacgggtaagtattccttaaaaagtgattaatctggaaaaaacatacacactaattaatataaatatatagggtacgtaacaactaatgcaaacaaacaacggaaaactaaaatatgtagagaaaaaaacatatatatcatcaccactcaactataatgccatggttttggaaaatgaaagaaatataatgtatatttgagatgtctctaagattagtcatttaacgccatgcaactcatcccaactctaatcaataaaaaataattatgattttcgtatagaatgcgacaaccaaaagttaatgacgggggaaaatatgtgctgttttggaataaatcaactcaacttaaaaatgaagtcaaaaatggtattgattgatgttagatattgatcacattgggatgaacacgtgcaggggtaggttgttttctggtgcagggcacgactgccgactttaccgcattagaagtttcgatcaatattcctaatgtccttattaacatgtcaaccattatcataatccaaactcttcccaacatctttgattaaattatgtatacattagttttaagtttcaatttgttaggcaaagtagagagggacattatggtgaaaaaaaagacaagggacattaagaaactttagttatacgtcaacatatatataaaagacaatggttgggagagagatcacgtgcgacaaggctggaaagattgatttgccgtaatttcaaagcgaaggatttaaaaaaagatgagtcagaaaaaaaagatgaggatatagttcgggggtttgaacccgacgtgaatcgaacacgcaaccttctgatctggagtcagacgcgctaccattgcgccacggatcctcaggtaattacatctatacgtttacttatttatactaacaattagtgaatgataaaaaattaaaaaccccttccgattctaatttcctggcggagcaaatttagggtttatcgtttgcatcggtctcgcgtctcgtttcccacagacacatctctcgaatcttttgaaggccttcattgcaatagattgctcgtaagggataggtaggcctttatgttctgccgcttaatttcttcgccggattctgtttgattcattttaaggtgagtgaccccatcgcttttagattacagacaagtatgtatttatggtttgaatgatgcttattgtcttgttgttagcttagattttacattcagccattaatttagtattaataagcttcggttctacttgttttaagcagttaaatgctttaatctctgaatctttgaaacttgctcctctcttaggaattagg

SEQ ID NO: 8433 - DNA, 3000 bp, Unknown
  misc_feature (1)..( 3000): cDNA_ID_1989479_gDNA_ID_1971801_Annot_ID_175720 3000 nt of promoter + ATG
gaatgcgtcgccgatcaattgcatttacccggaattacccttttgtaaaagtactttcttccttgactatttttgcactttaaggatttataatcagtactattcatgatatgaccccatgcttttagaatagtttatgatcaccctaagaaatttttaccatagttgcattttcaagtaccaccaatgtcagagatgacgaaggaagcggtatactcgtttggtcttcaaacaacgcaacttcaccaatcaaatgaagaaaccgtaactttaattaaatatgaaccatacaataatacaacttttcaaaattttgtccagagaccacaaagtaagctaattttgctatatactctacgtattaaggacaccatcctcaattacaaacatttgcaaccaaccaccgttcatcagaaagaatgaccaaacaccagagaatatgaggatcaagattcaagaccatgctctgcattctccgccaactccatcttcttgtgctcctgctgatgagcatcctgatttcttcctctcactgtccgtcgttaagcagccggacttccccaccgcaacaggtagcttctaccgcctccttcaaacacaaaaggaaagcataaatatctagcatcaaatactctaaggtccttccgctaactgtataccaaccttttccgtgctttcttttttgatttgttgtcgcagatttgagtcagaatctcctcaatgtctacagcatcatctacatgcgttttcaacaaattgcagttatccaaaagcctgagttgatgaacaacactcggagcaagagaagtatcattttgtacccttttcctcgcgtgctccattagcacaagccctgcagaataacatactggattcataaggtcaaagatggaaagcttcacaaagcaaccctgatgtctaatcatagaagaattttcatgattgtgcaacattttgaaaagtctaaggaagcaagaagagaaccgagagatcggagcaacttaagatcaaatttgtcagctagttcttggtgaccacttattttggcgcgttgaatggctagcttctttaagctgatgagcaaatcctgcaaaacaagttcagcggatatctcggtaattcatcgatcgattaatgtttgcttgactgacggaagaagcagaatttaccagttcagattcagagagagagcaaaaccaagtgagatcatctgtcctattgttcttcaagatttgggttaattcctccatcctaattcctaagagaggagcaagtttcaaagattcagagattaaagcatttaactgcttaaaacaagtagaaccgaagcttattaatactaaattaatggctgaatgtaaaatctaagctaacaacaagacaataagcatcattcaaaccataaatacatacttgtctgtaatctaaaagcgatggggtcactcaccttaaaatgaatcaaacagaatccggcgaagaaattaagcggcagaacataaaggcctacctatcccttacgagcaatctattgcaatgaaggccttcaaaagattcgagagatgtgtctgtgggaaacgagacgcgagaccgatgcaaacgataaaccctaaatttgctccgccaggaaattagaatcggaaggggtttttaattttttatcattcactaattgttagtataaataagtaaacgtatagatgtaattacctgaggatccgtggcgcaatggtagcgcgtctgactccagatcagaaggttgcgtgttcgattcacgtcgggttcaaacccccgaactatatcctcatcttttttttctgactcatctttttttaaatccttcgctttgaaattacggcaaatcaatctttccagccttgtcgcacgtgatctctctcccaaccattgtcttttatatatatgttgacgtataactaaagtttcttaatgtcccttgtcttttttttcaccataatgtccctctctactttgcctaacaaattgaaacttaaaactaatgtatacataatttaatcaaagatgttgggaagagtttggattatgataatggttgacatgttaataaggacattaggaatattgatcgaaacttctaatgcggtaaagtcggcagtcgtgccctgcaccagaaaacaacctacccctgcacgtgttcatcccaatgtgatcaatatctaacatcaatcaataccatttttgacttcatttttaagttgagttgatttattccaaaacagcacatattttcccccgtcattaacttttggttgtcgcattctatacgaaaatcataattattttttattgattagagttgggatgagttgcatggcgttaaatgactaatcttagagacatctcaaatatacattatatttctttcattttccaaaaccatggcattatagttgagtggtgatgatatatatgtttttttctctacatattttagttttccgttgtttgtttgcattagttgttacgtaccctatatatttatattaattagtgtgtatgttttttccagattaatcactttttaaggaatacttacccgtaaaccttttttcaaaaagaacttttttggcgtttacgcatggatgtactgatcttcaaaaatgtttttctgaaaaagccaaaaaatattttaatactttgaaaatttatgtgaataatttagataggcaaacgcaaattacgtttgaatatatagtttaatataatggttgttaaggcagccccttaaacaatacattgaagaaatggaaatgctaatcatgaagtcaaatgtttcctgagctagctgtctgtgtctgcgtggcacctgacaatagaacccaggatgcttccagtggcattcccgttgttttcttcaaaaccagtgctcgtcttctattctcaaactcataaaaacccagcctttcttcaccctttggatagtactcaccatctgatcttcatctatcacccaaggaagtcatg

SEQ ID NO: 8434 - DNA, 3000 bp, Unknown
  misc_feature (1)..( 3000): cDNA_ID_3000102_gDNA_ID_1971801_Annot_ID_175719 3000 nt of promoter + ATG
ctcatcttttttttctgactcatctttttttaaatccttcgctttgaaattacggcaaatcaatctttccagccttgtcgcacgtgatctctctcccaaccattgtcttttatatatatgttgacgtataactaaagtttcttaatgtcccttgtcttttttttcaccataatgtccctctctactttgcctaacaaattgaaacttaaaactaatgtatacataatttaatcaaagatgttgggaagagtttggattatgataatggttgacatgttaataaggacattaggaatattgatcgaaacttctaatgcggtaaagtcggcagtcgtgccctgcaccagaaaacaacctacccctgcacgtgttcatcccaatgtgatcaatatctaacatcaatcaataccatttttgacttcatttttaagttgagttgatttattccaaaacagcacatattttcccccgtcattaacttttggttgtcgcattctatacgaaaatcataattattttttattgattagagttgggatgagttgcatggcgttaaatgactaatcttagagacatctcaaatatacattatatttctttcattttccaaaaccatggcattatagttgagtggtgatgatatatatgtttttttctctacatattttagttttccgttgtttgtttgcattagttgttacgtaccctatatatttatattaattagtgtgtatgttttttccagattaatcactttttaaggaatacttacccgtaaaccttttttcaaaaagaacttttttggcgtttacgcatggatgtactgatcttcaaaaatgtttttctgaaaaagccaaaaaatattttaatactttgaaaatttatgtgaataatttagataggcaaacgcaaattacgtttgaatatatagtttaatataatggttgttaaggcagccccttaaacaatacattgaagaaatggaaatgctaatcatgaagtcaaatgtttcctgagctagctgtctgtgtctgcgtggcacctgacaatagaacccaggatgcttccagtggcattcccgttgttttcttcaaaaccagtgctcgtcttctattctcaaactcataaaaacccagcctttcttcaccctttggatagtactcaccatctgatcttcatctatcacccaaggaagtcatgatgtaccaagaagcagcactcctcttagctctcctcttcatctcttcgaatgtcgtcttatcggccccagtccgcgatggtagtaactctagttaaagctcatttcaactcaaatccgagattataaattaacatttcttaatattttttgtttcaggtttattaccaaacggcaacttcgagttgggtcctaaaccctcccaaatgaaaggatccgtggttaaggaacgaaccgccgtaccaaactggaacataatcggctttgtggagttcattaaatccggtcagaaacaagatgacatggtcttggtcgtaccgcagggttcctccgccgttagactaggcaacgaagcctcaatctcccagaaaatatccgtcctacctggccgtctgtactcaataacgttcagcgccgctcgaacctgcgctcaagacgagaggctcaatatatccgtgacgcatgagtcaggtgtgatccctatccagacgatgtacggcagcgatggttgggactcatactcatgggcttttaaagctggtggtcccgaaatcgagatccggttccataaccctggtgttgaagagcacccggcttgcggacctttgatcgacgccgtggctatcaaggctttgttccctcccagattctctggatgtaagtaaaccggaaccgaccatattcatatcttttaatcttttagagtaaaccggattcggtgattaagtggtgacctctgtttgcagataatctgataaagaatgggaatttcgaagaaggaccttacgtgtttcccacggcaaaatggggagtactgatcccaccgttcatcgaggacgataacagcccattgcccggttggatgatcgagtctctcaaagccgttaagtacgtagacaaagcacacttcgctgtccccgaaggacaccgagccatcgagcttgttggaggcaaagagagcgccatttctcagatagtgaggacgtcactgaacaaattctacgccctcacgttcaacgtgggagacgccagagacggttgtgagggaccaatgattgtggaagcgttcgctggacagggcaaggtcatggtggactacgcttctaaaggaaaaggcgggtttagacgtgggaggcttgtgttcaaggcagtgtcggccaggacacgtgtcactttcttgagcacgttttaccacatgaaaagcgatcactctggctcgctatgtggtccggtgatcgatgatgttaggctggtagcggttgggaaactccgaggatgaaagttggggtcgttgactcattcggttgaatatactacattaatggataattgtaattcatgttacataataaaaatgtaatttacgaactagtcccacaaaatttattaactagttaatcaccgtttcaacatatattatatataacggagtttcattttttcttctgagaagtcttaactcaactttacgagccaataaaatctaataagagatagtattagatcatatgcgttaattaatttttaagaaaatatatatcctacaaaaatttatttaatcatcgacagaagtttttactttaatcttgttacatattgattttgatttttgtttcaaattagataatgggtcaacaagtcgcatgatccaggcccaacaggccgtcgccaaaaagtcgaagtcttgttcaatcttcaatttattcaattcatttccgtttgaaggaggtagtcggagactgagaatcatctgagatcggaaacgacaaacctaattttcccgaagaatcgagaccattatg

SEQ ID NO: 8435 - DNA, 3000 bp, Unknown
  misc_feature (1)..( 3000): cDNA_ID_3045538_gDNA_ID_1971801_Annot_ID_175715 3000 nt of promoter + ATG
agaaagaggaatattttggttctgagaaaagacataaaaaaaacaatagagaaaccttgtaaaatcccgccaaaattttcacagaacccctaaaaaagtttgagtgttgccgccatccatagatttattccaccatcttcatctctggaaatccttcgccgccgcgagaattgacattgttttgattgcatataaatctccgcaacagtatggtacgttttgtttagatctacggttttgttatcatccgttaattcggcgacatcagcaacgatttgcttcatccacaaaccgaataggttcggtttaaacataagcctgggatttgagtcaattatttgcatttgcctacttttttcaattttctgggcacgccagatgtttgatgaattgctcgaatagatagatgtcaaagtgaagcgaggagacccgccgattcgacatgtacgggagaaaagggtatcagcttatcaaagattttgccaccggagagaagggtcagctcaaacctttcaacgtaagacttcaagctcccacctttatgacactaaatctctcaatttatacaggctattgaaatttttgagtatctgtaatctaacgtatatcaatcttgcaagtttggccagtaggttttgattataggtgacggaatgttagcaaatttccagtcctgggttgataatatccaattctgtaattagaaagtattatcttggttagctatgaggtagattagttctttaacctcttgtatttctaacagagcaaactctttgatgaaacaatcgaagagtgtgaccagaatcaccatcttatccagtccttgataaggtattgatccccttttttacactgttgcattttttcaatccatcacaaaagacttacttctgattcattgaggttgatgtttccatttacaggaaaatgcaacaagaaggtttggatgttcagaacaacagaaacgctgaccactatggagcactaattcaccaccttgctttgatccggaacaagcgctgcctcatggcttatgtgtgagaaccacgtttcctatcagtaacactatatctggacactcaatttcttaaaaatagctgcaattggtgtcgctatgcaggtacaaccgagcagaaattgtgcgtgatttggcatggagagtagggcttgaacttctcgaccttccctctgaaatccaagagaagctcactacactagagaaggaatacttcaaaaaccattcggttgctctaaaatcatacatgggaaaagtaggaatcgagttgaatgtcgtaagtcctctttccaccaccctggcttttattaattaattggatttttcttgtttggtggacttgtaactagtaatctcctcttgatccatttcttgaaggatatggtccctcctaaagatccttatatcaaggtcagaattttggatgatattgatgaaggaatcgtgctgagtgacaaaacaacaaattttgcccgtcattctatgcatttcctcaaacgtactgatgcggaaccatacattgctcgggtcagtctttttcgttattccttccctaaaactagaatgatctaaagcccataaacttccacgaactgagaaattcaaagaatgagccttgctcaaattcgcagagatgtagatagaaccttgattacagccttccctagcaggtttaataggaaaaaagaagactgcttaagatagattataactgaaaaaacgaaactatagaattcctgaaagatctgaatagtgatgcaaatagaagttttaggtttagaatatgcgtgaagtgtaatctgaagaattgacttttgtcacatttcttggtaccgtcaagattacataaggtcgaaacatttcataaactgtgagtgtattggattctttggttttccatgtgatgtttgtcatagtatgccaaaggagttgctaagcaaatgcagtctgattctactgcctagcttaaaaggggtctcgtgtcccatcatttggataaagagtttctaattgttgagatgtgaatgggataacagggccaaatggaggagctgacaggatgattgatctaatcagaagctgtggtgggctcagatgaatcacggtcgggtctgtgatcaaagaatgtaagcttacttagccttgtataattgtaagacaggaacatgaaaccagaaacctcatactcaaactcatgtaacaattatttatcttacaaagttacttctgtagtgcataacattcactagcaataatgcagttttgacaagctcaaaattaccttttttccaatggacaatctttcaaggcttcaatactcagtctttttgttacttgctggcttttcactatagaagtgaacctgcagctaaaaagataagaatctgccacaaatgctgcagaaaaatgagaatatgtcatctacaaaacatacctcaagattagcttgtaagatctgaatagtgatgaggcatttactcgaacgatgatcattgtcacatctctgattaatgtaaacgataaacggatttttgatgtttccatatagtttgatattgtctctttccttaggcgttttcaaaaccataaacataggtgaatgttatttacaatgtctctatagttatgattaatttgagttgctactcatcttgtttctgaaaggaggaattcttgcatcttttgaggattagttttttgacttgcatacagaaaatgtgttcttagtctcttgccttcttagttgttaccaccactgcttcgtcaatattttattattggattcacaacaaaaaaattcctctttattttttatgagaaaaggggaaaaaacacttaaaaccttttgtgttgaccagaaaaaaaaagagggataaaacgtgggggtattaatgggaatggggatgttccacatatttctgaaatttttttccctctgctacgaaacctttgaaatttgtgtcatcgaaatcgaaaccaaa

SEQ ID NO: 8436 - DNA, 3000 bp, Unknown
  misc_feature (1)..( 3000): cDNA_ID_2040042_gDNA_ID_1971801_Annot_ID_175709 3000 nt of promoter + ATG
gtattgattctgtctcctctctctgctcttttgctcacggctccgcacaaggcatcattcgacctttatcctgtttctaactattttagtaatttgtaaagttttggggtgtaaattgaattactatgtaaatgcaggggtcatattggaataaacaacaatgttttagttaaaaggcctgtataacaatgcaggcccaaacaaaaagatatgagcccaatagtcactgaaattgttttctcaaacccaaaaaacctaaaaccttaaacctccgtatgtgttccgtcgttagcctcctgctaatctccatctcagatcgcaatttctcccttttccggtcactgctccggcttacgactatagcgttccgagataaagttcggctgtgttaattaaattcgccgtcggagggattttacggatatggctgttgttgaatcgcatggggatttaggttattgtcgattgaggtaaatggatgtcgagggtttgctcaactcttcgctctccttatctttgaagctggttctatagattggttagtagatcttacaaattgcaaagattggagatttgggggatttgaataagctacatgttattcgggtatgtttaggctcgagggaggccctggatcatgctatctctgcgacacattcgcagattctgccattttccttcctctgcagccactggtattgcatatgtttcaacagagtccaatcagatccagggtttgaaaccgctcgaggaacctgcccttgtgaagcttaaatctgagcgagaccctgagaagctatacaatctctttaaagctaatgccactaaccgtttggtgattgaaaatcgatttgcttttgaagatacggtctctagattagctggggcaggtcggcttgatttcattgaggatctgcttgagcatcagaagacacttccacaaggtaggcgtgagggtttcattgttaggattataatgttgtatggcaaggctggaatgacgaagcaagcacttgatactttcttcaatatggatttatacggttgcaaaagatctgttaagtccttcaatgccgctcttcaagtcttatctttcaatcctgatctccacaccatctgggagttccttcacgacgccccatcgaagtatggcattgatattgatgcggtttcttttaacattgccattaaatctttctgtgagctgggtattcttgacggggcctatatggcaatgagggagatggagaaatcagggttaacaccagatgtagttacatatactacacttatatcggcgttatacaagcacgagaggtgtgtgattggaaatggattgtggaaccttatggtcctcaagggctgtaagccgaacctcaccacttttaatgttaggattcagtttttagtgaataggagacgagcttgggatgcaaatgatctgttgctgttgatgcctaaactccaggtggaaccggacagcataacatataacatggttatcaaagggtttttccttgcgaggttccctgacatggcggaaagagtttatacagcgatgcatggtaaggggtacaaacccaatttgaagatataccagacgatgattcactatttgtgcaaggcaggaaattttgatttggcttatacaatgtgcaaggattgtatgagaaagaagtggtacccaaacttggacacagttgagatgttgctcaaagggcttgtgaaaaaggggcagcttgatcaggctaagtcgatcatggagttagttcacagaagagtacctcctttcaggtcaaaacagttgctctcccttaagtccattttgtaatgtttacatgaaatggaacaaatttgctacatgtacacgacaatgcggccaaaagaattctttctttctttctcctgagtttattttgtatagctgtggtggaactggaaatgggatgtagcctcatattaggaggcacacttatcttccaatcagattcaactatttgttgttcaatgtgaataaagcttaggatgatttggaaacttcaatggagggatacccagtaagtcatggatgcctctacaatcttaagttgtgatagcacagaactagtttaccttttgtaatgctacttacaaaacatgttgttgatttcagctggagagcaaaatggcatacacaaagcagggaccatgtgctgaagaaaccaaaaggatcttcgtctgacgatgcaaaagctcttgagcacctggaaaaatgagttatgttgtaagcttcatctagccaaattaaaagcactaaacatataacaaaggatatcaacgttgatagctttttcttgatatagcacgaatgtaaacaacagagaatagaacagagacaacattaccagcaatgaatatttttattattatgtcgaataaatacattttcccacaagtgacagagcaaacaaaattcacatatttttgtctattacactttggtgtcagactgacttgttacgtagatttatggcggtggattataacattgtaactttaaatatcttttaacgtaagaaacaaaactccaaaattggtgtttatttttaaaaataaaaatttgagggggcatgtatgtttgtttagttgattcacgtgttctttgtgtctgaaaattctgaatttgatgattttgaaaaaggaaaaaaagatacgaggtatcctcaattccaaaaggatgaatgatacaactcatatatacaagattatagtaaaaagaagggatgcatataaagaaacatagacatcatcgccatccatcctcagatcagttccgtagtttactggatcacgacacacacacatatacacgtgtacatataagccattcttatcaaaatgaccaccttcctcctgaattctcattcattatataggcgtatatttcggaattctaagttttgttgctacgatcgagccagcgttctgtttctgtacgtctctctgggtaagaaagaaaaa

SEQ ID NO: 8437 - DNA, 3000 bp, Unknown
  misc_feature (1)..( 3000): cDNA_ID_1989485_gDNA_ID_1971801_Annot_ID_175703 3000 nt of promoter + ATG
ggccttgaatattgtttggggacatgagcaaagatactggcactggatctctctccctaacaccaggtctcctttttttctgtgttacaaactagacttcctcttctgcattgctttattataagatactaaatgtttttgtgtgcacaaacaaacaggttcggagaagtggctgagctcatcatggtctggtggcttgagatcactggcaagatcaacattacccttctctctgatgacaccctctacgccgcttacttcgtctttaagtggaaccatagtccttacggttttcgccagcctgtagaaacctcccttgtcttggctgacaccgagagcactgacaatgttgttcagccttccatgattagtctcatgcaagattcaggcggcgaagaaggtcagtcccctgtgctgagaagagacggttggtacgaggttgaattgggacagttctttaaaaggagaggagatttgggtgaaatagagatgagcctcaaggagacaaagggtccttatgagaagaagggccttattgtttatggcatcgagattagaccagtgccctaattgtatcctactcctaaatacctttgcggtttccagtgttctcttgattctcaaccctgtgttgttatcttctctttccctgccttcttcttcttttccttttctatattgatgcagaagaataatgtttttttgaaaaatgtttttatatgatcagctttttgattatgacattactatatatgcttgaatttttgtcttggtttgcaataatgtctgattgaaagagaaatacaggcaaataagacggtagtttagcagtttgtgtttatatcgttgttgtattaacgcctaagctaaaaaaatcttcatgatacatgcatgttaatatgttatgtgatttgaagaagaagaaaaatatgatattggcacggttctaattttgagaaaattgagagcacatgcattagatatgatcattctcatagatagtgctggaggttagagaccgactttaccaacgtgttcattacgttttctactcgctttccatttttctttactcaatcaggtcagatcgaaacgttggactcatagttccaaaattagctaaaattagatacttatttattaaaacaatcctgtacttttgacctaattagatatttcggcaaaatatctaacaaatatccccttctgatcttttggtattttctcaaaataaactaatccaaaccgaaactaaaattatttgatggaacgtacattcgttaaatgaatttcgcagacataaataactttactttattaaaagagagtaataaattggaattcaattatataaaacttctaactctttattattaaatgaaagttataagattttcacaatccatgatactgcttaaaaaatttcactgcactgttatcatacaaacaaagaagaaaatactatgcaatttctgtaagaattgatgactgatgggaacgttatgattatgttatcttcaactatggagtgaggatctttatttccatactatacaggccactcgatgggtctatttgaaataatgcaatagatagatagatgtatatatacacacacaacaaatatgtgtattgtttatacgctccgggataaacacacattttccacacttttaattcgttaccgtttcaggaccaattttaaaaagaaggttggtactatactattgactagctagctggtcagggaccttgatggtacatggaagtttcatattttatacagaaacaaaataatagagagtataagaatatcaacgacgagatctgagaagatttgttttctcttttttttgttatcaaatatgagaagattttgtaaatctgtaagttttaatttataaaagttgagatgcaatccagtgactccattcttttaaaatccactagtacttagttaccctaatgttaaacgttgaaaaatgagatttagattagttaacaagactttatagttaactaatcatataggggaatcaataatatatatgcaacttttgatgaccacactgttagatgctttgtttaaataaaactaaagatagaaagaaaagtacccttttgatctgtactgattgtataatcgttctataatatgtggaatattgtaaagaatcgaaaaaaggagtgaaggagaaacagtgatcggaaagaaataagtaatgtaaggttataatgttgcctaagaccgtcaaacaagaatcttcaaaagtatacacgaatatatatgtaacaactcaagtgattaatatcaaaacggaaaaacaactaaatgttgtaaatatttatgttgtttgtcaacatgcgagtttaaatatggatggtaccacatggatgataatgacaacacatactaatatatgtcttggccaaatgtatgtctcctaatagattgggagtaattgagcaattattacctatatttgataagatatgtcattatgtgtagtatcatttaacaagctataattaacatactttatatatactggttagagtaataaaccaaaagctcacttcacccaataagtgaaacagaactttaaatacgtataagccaattcaaagaagaagaatgaaaaatattgatagttaaaacacgaaatcatcatcccctacgtttgttaaactcttgaattgtatcgcacataagatatgtttaacgtgacgtagtaaaaaataacggtgaagaagtgaagcgcatctatatgtacttaaactttttgaacataagttgaagcgacgagtcagcggcacgtgtcaagttagcattagcttaaacagtaaaattcgcgagtcgtcgtcttataaatgctgtactcgttgtcttcctttccccaaccttcactttcctctcaaatctccaataagtaaactctctcatcgaaagcttaaaagcatcatcaccacaagaaagaaaagaaaagagtagaatcgaac

SEQ ID NO: 8438 - DNA, 3000 bp, Unknown
  misc_feature (1)..( 3000): cDNA_ID_1989486_gDNA_ID_1971801_Annot_ID_175702 3000 nt of promoter + ATG
atttacaataatatttagctattttcatatatcattctatactagctcacaataattacatatgagcacgcttttttgtgttcaaatattataaatcttcgttagttaccgctgctttttataattatgtatactttctggttccaggagactaattaaggaagattattagaggcttcttatacgtgccatatgattatttatttatgtactgtcatggttcatatatagcgatgtgataccaatataccaatcaccaaagttatgagaaaatcacgtaaccagaggtgttggtacatacattttctgttaaaaatagttaagaggacttgtaatcttttgtgtttaactattgataattttttactttattcggtgaaacaatttacgcatgtttctgtgttgtgcttgtgtttcttgtattcttcttgtgtatagctttccttataagaaagaaaaagaagaagattaattgattagatcgagaaagagaaaggccttttgagatagaaatggagaaaggatggattgaatttgaagcatagagaatagcgaacactcactgcaaagttagtgggaaagtcgcgcgtcatacgagggagcaacaaagtgtgggcttttcttttacagtctcagaaactaatgcatgctcacatttaaaaaaaaaaaaaaaaaaaacaattcttgtgttaaatcaagagtggattaattatgagataatctaatgtacattactgttatatgattataacttgacagaccaaataatcatcttaatcagacctgataaaagaaaagagattaatttcaacagtgagaaattaaagatagaaagtacatattattggtgtaaaagttgttgatttaatttaaggcagatgtattaagttaaatatgtaaatgtagaggctgcgggaagggtgaccagctggtctgacagggtacgccggttgtcgggaggaagaacgccgctattggcagagtcacgcggggtaaccggctggcggctgtagccggtcacagagtgtattaatatggtcgtacaatacttgtagagtgctttttcctgtgacggtcccgtttattccccacaccctcctcgattctttcacttaaaagtgggggaaaaaggtaacctgactcttagaaaatttgaatacaattgtgggtcacctcatctcatgtagtcatgtctatacaattataaatacctctcaacaaacccaaaatcgaattataagccttctctagctagaatttgaagcaagacctgttcacattagtaaaaacaaatatatagaaagaggaaagattgaagcggaaaacgggacaagacgggtgtgccgttgtggatgttggggttgggtgtggaccggcttcaagccgacatcaaccggctcctagcctctcttttccaccagggagtgctggacgagcagttcttgcagcttcagcagcttcaagatgagacttcaccaaactttgtgtatgatgtcattaatatctactttgatgaatccgagaagttactccgcaaccttagattattgttgtgagtttcttcctttgttaatgtgttccatagttgtatgttgtttggttccaaaatgtatacgtatatatatgttatgaatgatgacgaatgtaaataaataaatgaacaggatggatagagaattctcggactataagaaaataggattacacctgaatcagctggtgggaagcagttcaagcattggtgctcgtagggttcgtaacgtctgcgttgcctttcgttctgcttccgagcttagcaaccgcccagggtacaaattaaacgagctatatatatatatatatatatatatatatatatacttctttgtattaatatataggtcaatatttaagtcaatataatgcttcataaatgtgacgatgcttcaggtgcttgagaggactggaggtagtagagcatgagtatcattacctcaagaacatgatgcatgaactcttccaggtacttacttgttttgttaatatattactcacattcacacaaacagaaggcaaaaacgtgagctaaatatacacatatatattgatagtaatatatgttaacaattatgtgggatttaatattttgagtggttgcagctggagcagcagagaatattagctgcaggagtcagatatccaatgtaaaattagaattttgtcataaaaatcagagaaaacctaattagtgtgtgatgatagtgtgttataagctaccgaagcgaaaccctttagtttcttctaatgatgttttgttgttaatctctccataaattcgagatacattaccttttgtattttcaagtgagatttacccatgtcaaaagtatctttacatgaacataaaacatttagtacccaaaaaaacagaaaaaagaaactgggctataaaatgaccgacagaaacggaagaaagtaggcccaatgtacggcccgttcatctcaaataaatgatttagttttgtttttgtttttttcattttagcaaagataacgatttctgagcaaaaagaattggaaaatgatagaatataaagccgaaaaaatattctgtgtttattttcaaaatcttagaatcataaatgtgtctcgaatgtaaccattaactgattttctggattgtcccaaaaaaaaaaaaactgattttctggataaaattagtaaagagaaggggacaggtgggtgttgcttactctagtagtcagtcatgaggaaagtaatctgaaaaaaacgagtaaggaatagacacgtgtggcttcatccctaagtatccgtttttacttaactaatcaatgcacgacttccacgtctctcttttttttactagtataaaactcattaaatgtgagcgatactttgctcgatcgaacaagtcgtatctatataatcgagaaagaggaaaagatcttttaaaccccaaaataatcaatcaagcaaataagcaatcaatcggaggaagca

SEQ ID NO: 8439 - DNA, 3000 bp, Unknown; identical to SEQ ID NO: 8431
  misc_feature (1)..( 3000): cDNA_ID_2040066_gDNA_ID_1971801_Annot_ID_175698 3000 nt of promoter + ATG

SEQ ID NO: 8440 - DNA, 3000 bp, Unknown
  misc_feature (1)..( 3000): cDNA_ID_2040070_gDNA_ID_1971801_Annot_ID_175697 3000 nt of promoter + ATG
ggaaaaacaaccataccctccacattggagcccaaaatccacaccctggacccttacccaccggaccagtattgaaacggtaatatatcaagtgctttaaatccttgcacatccgaatctgcctcatcagtctgtatttataacgatacatacccgtcaactggccaacatgagagaaaatatactgcagaccatcagccaattggaaggcatcgacattaccaagtcggaattggacatttgcatcaactacaagttttgtcaggcggaggatctcacggcacagatggaaagcgttcccaaaacgtgacttctttcgctctttggtggtcaaagttttcacaggcttgaggttgaagttgtagtcaagatgcaggtagtttaaattcttcctatgaatcagcagattcagcatattatatccctgccgacagacttgcagacccacttcaacccaatccagttcggtactttggaaaaactttgtagctgcaagagatcgaaacaagtgcttcttcttctgagctttaggcggtctatggtgcaactcattcagcacatagcacttcaatagcttttggtaactaacccgaactttaaccggataggctggaggactgcagttaatgagttcacaatatgtattaggacggtcaccagtaaatttcaaaacggtaaagaggaccaaagtagaataaaaacaaatagcttaccagtgctctttgaaccactctgacaccaagggaatatcttctgcgcggcgcgtcctcccagacctcatattgaaaggtcgtggggcaaacaacaatgatatgccagcagctgtagtgtcagtgtagagttgggtatctcttagcaaaggttccacaccttctggtaaggcgaagtcatcctcatcatcataaaccttcctttcacgtttttccttgttggtgttgcttattgggtgaatcaacggatcataataaaatgcaggaagatcgggatcctcggtctttatatacatgatcataggactgtgatacacacagagttttactttcctgggccgattattgtagagatggggaaaagctattctgtactcagtacgcagaggggaacgaataatgagcttgttgatgtcattaaactcattccagtcctcatcccctttctccatatcacggtacaaaggttcaaacttgggtccacctggaaaagagtaggagaatgcattaaaagcaatggacccgcagcaaaaatataaaaactggagcatagaaggaaaatggcgtaccaggtatgcacatgttcagagcttttgctgtgaagaaagatggcatgtcaaataagtagaagtagttgcgatcaatcaaatcagacagcaactggcctgcaagcctgtgaagggttgccatgattggaagtgagaggttccacctccggtaactgggaccattaatcagttttgttttaacgagtggcttgtggtcgtaaaaccaagtgtggacagcagaatcttcttcctcatctagctccaattgaattggctccagaggatccacgtccagcaagttgtctgcatagtctagtggaggctcctcatcatcaaaaggtgggaaccgcattctcttgaaatgacgacgatccctcttctcccttcgcatcataatccacatagtaccccactgcaaaacaagaatggaataaccatcaaaagctattgaaaatccatcagcgcacagagacagtaaataagagataagactaatcaccaacctgagccatgtaaataggttccacaacccatggtatctcgttcacaaatgtaatagctccggtgatgtggtacaaaacttttacatctcggacctgaaagaaaatgaggatttagataaatgaacagacgatgaaaacagctgaagctaaaggaaaaaaaatgtacctgctcccagggcataggcatgttctccaagagcttgaaaactgcgtgagggacgaatttaagggctccaaggtatacacgtttgtcgtgacggaatttcttggatgacatatcaccatgatctctgaagtaagaaagaaatcgcagcttcagtctcaaaataagtaaatcctaaccaaatcttagaaacctagccagaaaataattatcaagtaaactgtatttcgaaatggtagagaaagaagagaagaaaactagcctgatgatcttcctgacgtgctcaggtggcatgtcctccttctgagtttcaacgaatccaaacttcctcttgtcgccgtaccgtttggaatttagctgcatccattttcgggccttctcctcaagcttagcctccgcttcctcaggagtaggctcgaccggaggagtcggattagaaggcggcggaagcgccgtgtaagaaggatgagcagcgggaggtggcggcatcatggacccgccagtaccaggaggagctaagggcataccatcgttgttgttccacatagcttagggttccaaatcgaaacgccgagcgtagtcgcggaggaaaaaaaccctaaatccaccgcgccagtgtcgatctctaactacgttgcgaagaactagtgagcttaatcgagtaaagaaaaaccctaaaacattttcgggtgagtcgcttcttcctttttttttttttttattcccgttcggccttatatcagcagatcaggaggagtaagtaaaaaaaaaaaataggcggtgtcgaacagatgcttaggcggttatccaaacccgctaagtattgtcgaatcaagttattgggcctttgattattagatttgggccgtgatgcccattgacaaactttaatttgattttttgttttggcatttattggggagctatatagcagtaattgcggtttttccccggaaaacaaactctcccgattctctcgctcgctcgctcagctcctcaacagtcacctgaaggctgaagaagaagagcaaagagagcagaatcttgtcggtgaaaatccgggagaatcggcaatg

SEQ ID NO: 8441 - DNA, 3000 bp, Unknown; identical to SEQ ID NO: 8430
  misc_feature (1)..( 3000): cDNA_ID_3045555_gDNA_ID_1971801_Annot_ID_175694 3000 nt of promoter + ATG

SEQ ID NO: 8442 - DNA, 3000 bp, Unknown; identical to SEQ ID NO: 8429
  misc_feature (1)..( 3000): cDNA_ID_3045559_gDNA_ID_1971801_Annot_ID_175692 3000 nt of promoter + ATG

SEQ ID NO: 8443 - DNA, 3000 bp, Unknown; identical to SEQ ID NO: 8428
  misc_feature (1)..( 3000): cDNA_ID_1989472_gDNA_ID_1971801_Annot_ID_175689 3000 nt of promoter + ATG

SEQ ID NO: 8444 - DNA, 3000 bp, Unknown; identical to SEQ ID NO: 8427
  misc_feature (1)..( 3000): cDNA_ID_3045563_gDNA_ID_1971801_Annot_ID_175688 3000 nt of promoter + ATG

SEQ ID NO: 8445 - DNA, 3000 bp, Unknown; identical to SEQ ID NO: 8424
  misc_feature (1)..( 3000): cDNA_ID_3045581_gDNA_ID_1971801_Annot_ID_175681 3000 nt of promoter + ATG

SEQ ID NO: 8446 - DNA, 3000 bp, Unknown; identical to SEQ ID NO: 8438
  misc_feature (1)..( 3000): cDNA_ID_1989486_gDNA_ID_1971801_Annot_ID_58081 3000 nt of promoter + ATG

SEQ ID NO: 8447 - DNA, 3000 bp, Unknown; identical to SEQ ID NO: 8437
  misc_feature (1)..( 3000): cDNA_ID_1989485_gDNA_ID_1971801_Annot_ID_58082 3000 nt of promoter + ATG

SEQ ID NO: 8448 - DNA, 3000 bp, Unknown
  misc_feature (1)..( 3000): cDNA_ID_1989483_gDNA_ID_1971801_Annot_ID_58085 3000 nt of promoter + ATG
ctgcgaatcctaaagtcatttttgctgtggttcttggattgagtcaagcaatgtaaaatgcggcgggtgctgattcttgaatcattgatcttcatgctaaacaagacacgttattttttgtgataagagataaaacagagcaacttaatatcatcatacttcttgattaatctttttattaatttgaaatattaacttcgatttaaaaacaaatgcctatttcctttattgctggaaaattcattgaactttcaagaatcagtacacagaatccttggatggcactccgatattagaggaaaattaagtctacaaatgaaatacattcagagaatatatccataaatagatacctaaaaatttaagaaaaccaaacagagtgcatgcatttatatccaatgctgttatgttactaatgtgatatttgaatcaatcccttatgttgtgtgtttatatataccttaagacaatctgaaagtaatccactattcaactctgcttagatcgatccatttctcgttaaaatggtaagactcgttgcctatatctactaacattgaacctgatttttaaaatattaatcctctttttgtacatatgtgtaggattggtttttgatcgtactcgttgcaattttaggatttcccgggttaagctatagtgaatcagtgatgaaatatggagcggtcggggatggaattgtcgatgatacatctgtaagttattggtgtatatatattatatatcagtacaagcagcataattgtttagtcatcatataaaaaaaattaaacttttgcatggtatatgtgggcaaaaaaaaacaaggcgttccaaaaggcgtgggaggatgcttgtaagggaagctccaaaatgggaagtgtaaacgtaccagcagggaaggtgttcctcctcaactcccttcacttcacgggtccttgcatacccaaacctctccttttcattgtaaatccctccaccactttacttgattgatattacatgaatactcgaatatgaacctactcctccaagttaattataaagttacttttgctgatatatgtatatatagatcgatggagagatgatagcgcagagtgatccacagaagtggggaaatggtgagaacggggtaataccatggctcatattcgatcaagtagatggacttgcaatcgtagggcgcggcttgttggacggccaaggcaaatcatggtgggatattcattgtagagaccatcccggacccgtaagtttccttttttttaactttttatttttcttgggttataatgtatcctaacaaaccatctctatgtgataatacattttgtaacctataacgtgtcacagaattgcatctgccttgcaccaacggtaagtttgctatttacaaaaggaagtacgtagtatgtatataataacttggacgtctctataactatagatatatttctcgcagatgatgacatttagcaactgcggaaatgtaacattaaagagtttgagatttagaaatagtgcacaaacacatgttcttgtgatgggaagccaaaatgtgtatatcgatgatatcaaaataacatcaccggaggctagccctaacaccgacggtattcacatcacatcttccaccgccgtttctatcaatcattctgacatcgccactggtatatttccttacctaaccatataaaagatcaaacaaaagtttaatttgtttatttattctcacaattaattaaacaggtgatgattgtgtgtcgatcggagatcaagtgaataatttgaatgttacttttatgaattgcggacctggtcacggtgtgaggtgattaccatctccttatcgacctcgtaatcttatatttttcataataaaaaaatgagaactaataagaaattagagacagcattgggagtttaggtagaggaggaacagaggtaacagtggaaaacatacgtgtgtcgcacgttaacttcactggaacaacaaacggagctcgaatcaagacttggcctggaggaactggttacgtccgaggaatcgagttcttcgatatccgtttctcgtctgtacaaaaccccatcatcattgatcagttctacggttgtgcccctacatgcgttgagactgtgagaacctttttctttctatctttcaagttaatattaaatgtaaatgagctaatgtttgaatgtaatgtatcagatgaagggagttcacatagagaaagtgagatacatgaagatgagtggaacatcggcgacaaaggtggctatgaaactcgagtgttcaggggagagtgttccatgttccaaccttttcatgagagacattgacttatctccggccgatggtattgattctgtctcctctctctgctcttttgctcacggctccgcacaaggcatcattcgacctttatcctgtttctaactattttagtaatttgtaaagttttggggtgtaaattgaattactatgtaaatgcaggggtcatattggaataaacaacaatgttttagttaaaaggcctgtataacaatgcaggcccaaacaaaaagatatgagcccaatagtcactgaaattgttttctcaaacccaaaaaacctaaaaccttaaacctccgtatgtgttccgtcgttagcctcctgctaatctccatctcagatcgcaatttctcccttttccggtcactgctccggcttacgactatagcgttccgagataaagttcggctgtgttaattaaattcgccgtcggagggattttacggatatggctgttgttgaatcgcatggggatttaggttattgtcgattgaggtaaatggatgtcgagggtttgctcaactcttcgctctccttatctttgaagctggttctatagattggttagtagatcttacaaattgcaaagattggagatttgggggatttgaataagctacatgttattcgggtatgtttaggctcgagggaggccctggatc

SEQ ID NO: 8449 - DNA, 3000 bp, Unknown
  misc_feature (1)..( 3000): cDNA_ID_2040042_gDNA_ID_1971801_Annot_ID_58086 3000 nt of promoter + ATG
tgagatacatgaagatgagtggaacatcggcgacaaaggtggctatgaaactcgagtgttcaggggagagtgttccatgttccaaccttttcatgagagacattgacttatctccggccgatggtattgattctgtctcctctctctgctcttttgctcacggctccgcacaaggcatcattcgacctttatcctgtttctaactattttagtaatttgtaaagttttggggtgtaaattgaattactatgtaaatgcaggggtcatattggaataaacaacaatgttttagttaaaaggcctgtataacaatgcaggcccaaacaaaaagatatgagcccaatagtcactgaaattgttttctcaaacccaaaaaacctaaaaccttaaacctccgtatgtgttccgtcgttagcctcctgctaatctccatctcagatcgcaatttctcccttttccggtcactgctccggcttacgactatagcgttccgagataaagttcggctgtgttaattaaattcgccgtcggagggattttacggatatggctgttgttgaatcgcatggggatttaggttattgtcgattgaggtaaatggatgtcgagggtttgctcaactcttcgctctccttatctttgaagctggttctatagattggttagtagatcttacaaattgcaaagattggagatttgggggatttgaataagctacatgttattcgggtatgtttaggctcgagggaggccctggatcatgctatctctgcgacacattcgcagattctgccattttccttcctctgcagccactggtattgcatatgtttcaacagagtccaatcagatccagggtttgaaaccgctcgaggaacctgcccttgtgaagcttaaatctgagcgagaccctgagaagctatacaatctctttaaagctaatgccactaaccgtttggtgattgaaaatcgatttgcttttgaagatacggtctctagattagctggggcaggtcggcttgatttcattgaggatctgcttgagcatcagaagacacttccacaaggtaggcgtgagggtttcattgttaggattataatgttgtatggcaaggctggaatgacgaagcaagcacttgatactttcttcaatatggatttatacggttgcaaaagatctgttaagtccttcaatgccgctcttcaagtcttatctttcaatcctgatctccacaccatctgggagttccttcacgacgccccatcgaagtatggcattgatattgatgcggtttcttttaacattgccattaaatctttctgtgagctgggtattcttgacggggcctatatggcaatgagggagatggagaaatcagggttaacaccagatgtagttacatatactacacttatatcggcgttatacaagcacgagaggtgtgtgattggaaatggattgtggaaccttatggtcctcaagggctgtaagccgaacctcaccacttttaatgttaggattcagtttttagtgaataggagacgagcttgggatgcaaatgatctgttgctgttgatgcctaaactccaggtggaaccggacagcataacatataacatggttatcaaagggtttttccttgcgaggttccctgacatggcggaaagagtttatacagcgatgcatggtaaggggtacaaacccaatttgaagatataccagacgatgattcactatttgtgcaaggcaggaaattttgatttggcttatacaatgtgcaaggattgtatgagaaagaagtggtacccaaacttggacacagttgagatgttgctcaaagggcttgtgaaaaaggggcagcttgatcaggctaagtcgatcatggagttagttcacagaagagtacctcctttcaggtcaaaacagttgctctcccttaagtccattttgtaatgtttacatgaaatggaacaaatttgctacatgtacacgacaatgcggccaaaagaattctttctttctttctcctgagtttattttgtatagctgtggtggaactggaaatgggatgtagcctcatattaggaggcacacttatcttccaatcagattcaactatttgttgttcaatgtgaataaagcttaggatgatttggaaacttcaatggagggatacccagtaagtcatggatgcctctacaatcttaagttgtgatagcacagaactagtttaccttttgtaatgctacttacaaaacatgttgttgatttcagctggagagcaaaatggcatacacaaagcagggaccatgtgctgaagaaaccaaaaggatcttcgtctgacgatgcaaaagctcttgagcacctggaaaaatgagttatgttgtaagcttcatctagccaaattaaaagcactaaacatataacaaaggatatcaacgttgatagctttttcttgatatagcacgaatgtaaacaacagagaatagaacagagacaacattaccagcaatgaatatttttattattatgtcgaataaatacattttcccacaagtgacagagcaaacaaaattcacatatttttgtctattacactttggtgtcagactgacttgttacgtagatttatggcggtggattataacattgtaactttaaatatcttttaacgtaagaaacaaaactccaaaattggtgtttatttttaaaaataaaaatttgagggggcatgtatgtttgtttagttgattcacgtgttctttgtgtctgaaaattctgaatttgatgattttgaaaaaggaaaaaaagatacgaggtatcctcaattccaaaaggatgaatgatacaactcatatatacaagattatagtaaaaagaagggatgcatataaagaaacatagacatcatcgccatccatcctcagatcagttccgtagtttactggatcacgacacacacacatatacacgtgtacatataagccattcttatcaaa

SEQ ID NO: 8450 - DNA, 3000 bp, Unknown
  misc_feature (1)..( 3000): cDNA_ID_1989482_gDNA_ID_1971801_Annot_ID_58087 3000 nt of promoter + ATG
ttcttattattttgttttgtttatatgcactatatctttagatggctaacaattaacaaaaaaaaaacccgttgatcatgttggttttgccaaaataaccatcaccaaaaaaaattgatagaaaatatttggtgttccatcaaatctacacttacggataagacgctcttatttttccaattatttgctttctctttctgacaatcatcaaatttttaaagctaaatgccgttttcttcgcatgcttacgttttagctgcttcaataatcaactcaaggacttccataattgtagcgagatttgaaatgcatgggtatattagatttgcgatgtagatttaattggggattaattacgatatgaacacgcaaattttgttgtccatatgaaaaaagtagcacatgaatggattgtctccacattacacaaatgggatggtccagcaagccatatagcaagatatcttacaaaataaaataatccacacctctcaaagttgagccattatatttcaggaaatattaggttcgagttttgcgtgattattattttaaaactcgatgaatcagtcatctactaatacttgtaagtttcaactttgaactaaccaaatcaagcatgaacaacgacgagtcaccaacgcttgatttccttaagaaatattaaaaaaaattaagccatgctggattatggttgataaaactatatgctatgcgatgatctttgcctgaaacgtgaaaagaaaaataatcatttttggcagataattaagtggctatagctaaatttaatgttaaaaaaaaagataattgaaatttcaacacataccacccaaaaacgttgtttgtactattctactcccataattacccgctgctttgacccagttttttctctcccgtttaaaatacgtaacaaataaaatacaatgattacgcatctaaacatgataatcgcgattatatttggttggataattcgagaaccagaagaaaaaaaacatataaaattgaaataataagacgacaaaagaaaattaattagaaaagacacaagtgccttctaataaagagataagaaagaggaggaagaaatgaactagtctgaaacacaatgatgaaccacttttagcaacacacatcaaaaacgacgaaaacagagtaaaagaagaagaaaaaaacggaggaggaacagttagcgccgtccatggcgggtcttcagagatccaccatctctttccgtcgacagggctcttcgggtatagtctgggacgatcgtctcatcgccgagctaagccaacaagcggccaacgaccggaaaggcgagactctacaacaggacgaacaggccaagctgattacgtcggaagtacaggatcagacaaccaaacctatcgccggagaaggactcaaacctatcagaactgacggaggtatggagaggagtcgatccaacggaggaggagccatccgccaccatcgaaacacagggagagtgtctccggcggtggacccgccgtcgccgagactgtcggcgtttgggtgctgctctgccttcgggaagaaacagccggggaagaaggttaatcagaggaaaaggccagcgaagcgtagatccagataggcatgaactaaagtctaaagtaaagaagaagaacacacacaaagatgagaaaacaaaacaaaacaaaaagagagtatatatacttatactgcttcttatgaatctttttctttctgtttttgtttgtgtttttttgtttgtgctttaatgttaaaactgtttaaactcagagactatatatatgtttatatttgttttgtttttgttgcagactgatcttagattttcatgtatattcttgttttattctatctctctttctttcccgagagaattccaaatatttccaagtaagattaaagcagaggatcaacaatcttcttcgtctcctatgattaatccatcgagtaattaaatttgataatcttaatgaattcaaaactgggcagctgactgcggcggctaaagtggacctgagcctgacattctgacaaattagttgcaacaacatcagattcttcattcctaggataaaggaccaatgccattttctcatctctaatttctgattaaatatattttaatttttcatcagccgatacaaatccctcacggactcgcttctgtgttatgtccaaatcaagcatggcaccacagttcccacccatccactgctatttttttttccaaaaagttggagcctttgcaaaaaaaaaagtgaaaaataaaactatacacatattttgcaaccaataataaacacttaatttatttgtttgatacgtaaataactactagtttgcgtgaggtgtgagatatagatatagtgatcatataccagtatgagaatgtttcttgaaagttggaaggtttacatagtccatccattgtaaaagttttattgggcgtaatcatatgggcttagtttagtgcaacatataataccctgattatctgggctttagcccataaccatcaaactttttttttatttctaaattagtgataaaagggtttatcacatacatttatttcttttttttttttttttttgggtcaaaacacatacatttatttcatcttgcaattttctgtttgattatatgattgatcacctacattaatcaatcaataatgtatggaaaattttcaaagaatgtcattactaaatcccctgaaaactagaaactatcttgccatttttctttgtggctaaacataacgtcatttcaccataatcactacaatcaggaaaactaaatctcactctcaaggtagagaggagggaatctagatctgttgtaattctgattataaatagactctatctatattcatttgtttattctaaaatcatacataagcctaattatagtatcttgagtttaatgtctataaatccattcggttcctaaaaattaaaaatctaaattatg

SEQ ID NO: 8451 - DNA, 3000 bp, Unknown
  misc_feature (1)..( 3000): cDNA_ID_1989481_gDNA_ID_1971801_Annot_ID_58089 3000 nt of promoter + ATG
gatttggacataacacagaagcgagtccgtgagggatttgtatcggctgatgaaaaattaaaatatatttaatcagaaattagagatgagaaaatggcattggtcctttatcctaggaatgaagaatctgatgttgttgcaactaatttgtcagaatgtcaggctcaggtccactttagccgccgcagtcagctgcccagttttgaattcattaagattatcaaatttaattactcgatggattaatcataggagacgaagaagattgttgatcctctgctttaatcttacttggaaatatttggaattctctcgggaaagaaagagagatagaataaaacaagaatatacatgaaaatctaagatcagtctgcaacaaaaacaaaacaaatataaacatatatatagtctctgagtttaaacagttttaacattaaagcacaaacaaaaaaacacaaacaaaaacagaaagaaaaagattcataagaagcagtataagtatatatactctctttttgttttgttttgttttctcatctttgtgtgtgttcttcttctttactttagactttagttcatgcctatctggatctacgcttcgctggccttttcctctgattaaccttcttccccggctgtttcttcccgaaggcagagcagcacccaaacgccgacagtctcggcgacggcgggtccaccgccggagacactctccctgtgtttcgatggtggcggatggctcctcctccgttggatcgactcctctccatacctccgtcagttctgataggtttgagtccttctccggcgataggtttggttgtctgatcctgtacttccgacgtaatcagcttggcctgttcgtcctgttgtagagtctcgcctttccggtcgttggccgcttgttggcttagctcggcgatgagacgatcgtcccagactatacccgaagagccctgtcgacggaaagagatggtggatctctgaagacccgccatggacggcgctaactgttcctcctccgtttttttcttcttcttttactctgttttcgtcgtttttgatgtgtgttgctaaaagtggttcatcattgtgtttcagactagttcatttcttcctcctctttcttatctctttattagaaggcacttgtgtcttttctaattaattttcttttgtcgtcttattatttcaattttatatgttttttttcttctggttctcgaattatccaaccaaatataatcgcgattatcatgtttagatgcgtaatcattgtattttatttgttacgtattttaaacgggagagaaaaaactgggtcaaagcagcgggtaattatgggagtagaatagtacaaacaacgtttttgggtggtatgtgttgaaatttcaattatctttttttttaacattaaatttagctatagccacttaattatctgccaaaaatgattatttttcttttcacgtttcaggcaaagatcatcgcatagcatatagttttatcaaccataatccagcatggcttaattttttttaatatttcttaaggaaatcaagcgttggtgactcgtcgttgttcatgcttgatttggttagttcaaagttgaaacttacaagtattagtagatgactgattcatcgagttttaaaataataatcacgcaaaactcgaacctaatatttcctgaaatataatggctcaactttgagaggtgtggattattttattttgtaagatatcttgctatatggcttgctggaccatcccatttgtgtaatgtggagacaatccattcatgtgctacttttttcatatggacaacaaaatttgcgtgttcatatcgtaattaatccccaattaaatctacatcgcaaatctaatatacccatgcatttcaaatctcgctacaattatggaagtccttgagttgattattgaagcagctaaaacgtaagcatgcgaagaaaacggcatttagctttaaaaatttgatgattgtcagaaagagaaagcaaataattggaaaaataagagcgtcttatccgtaagtgtagatttgatggaacaccaaatattttctatcaattttttttggtgatggttattttggcaaaaccaacatgatcaacgggttttttttttgttaattgttagccatctaaagatatagtgcatataaacaaaacaaaataataagaataaaagaaagtgacacaatgtcaatcgcatcagtaccagtcaaatggatcatccttatcctcagacccaaaagatttacttacattagggagtagtattcggatacatgtacacgcatataacttccaaatgttgaaagatgtataaaaacatgttagacatttaccagtgacttaaaaaaatataagtgatttatggtagtatatatcacactatattatgagtcatgacactcaaattcaaaatccgtttagtacaaaaggttacaagtctagaatcgatttttgtaatttttttagtatatatgacattggtttgactgtgttacaaagtcaaagtaaaatcccaaaaaaagaaagaggaatattttggttctgagaaaagacataaaaaaaacaatagagaaaccttgtaaaatcccgccaaaattttcacagaacccctaaaaaagtttgagtgttgccgccatccatagatttattccaccatcttcatctctggaaatccttcgccgccgcgagaattgacattgttttgattgcatataaatctccgcaacagtatggtacgttttgtttagatctacggttttgttatcatccgttaattcggcgacatcagcaacgatttgcttcatccacaaaccgaataggttcggtttaaacataagcctgggatttgagtcaattatttgcatttgcctacttttttcaattttctgggcacgccagatgtttgatgaattgctcgaatagatagatgtcaaagtgaagcgaggagacccgccgattcgac

SEQ ID NO: 8452 - DNA, 3000 bp, Unknown; identical to SEQ ID NO: 8434
  misc_feature (1)..( 3000): cDNA_ID_3000102_gDNA_ID_1971801_Annot_ID_58091 3000 nt of promoter + ATG

SEQ ID NO: 8453 - DNA, 3000 bp, Unknown; identical to SEQ ID NO: 8433
  misc_feature (1)..( 3000): cDNA_ID_1989479_gDNA_ID_1971801_Annot_ID_58092 3000 nt of promoter + ATG

SEQ ID NO: 8454 - DNA, 3000 bp, Unknown
  misc_feature (1)..( 3000): cDNA_ID_1989478_gDNA_ID_1971801_Annot_ID_58093 3000 nt of promoter + ATG
aacacgcttcttcacagcagtatccgctggaacaaacacaaatcaaccccatcgtcatatttttgtttaaaactacagaaccaggttacacaattccaaaacgtagtagtatcgtatatgtcaaatccagagaccaaacccattcaaaatcaaagacaagcacacaataaatcatcaaatagcaatctggatctgtaaattacctgcagcggagccgattaaacgagagaatatggaggaatatgcgggaatggaggatgcacgagtcgagagagaaaggtgagtggactctacgacggcgtgcctgcacgacggagccgcgcaggacccgacggcggagatggatttaagatgcgatgaaacgattctcctccacataatggtctcgattcttcgggaaaattaggtttgtcgtttccgatctcagatgattctcagtctccgactacctccttcaaacggaaatgaattgaataaattgaagattgaacaagacttcgactttttggcgacggcctgttgggcctggatcatgcgacttgttgacccattatctaatttgaaacaaaaatcaaaatcaatatgtaacaagattaaagtaaaaacttctgtcgatgattaaataaatttttgtaggatatatattttcttaaaaattaattaacgcatatgatctaatactatctcttattagattttattggctcgtaaagttgagttaagacttctcagaagaaaaaatgaaactccgttatatataatatatgttgaaacggtgattaactagttaataaattttgtgggactagttcgtaaattacatttttattatgtaacatgaattacaattatccattaatgtagtatattcaaccgaatgagtcaacgaccccaactttcatcctcggagtttcccaaccgctaccagcctaacatcatcgatcaccggaccacatagcgagccagagtgatcgcttttcatgtggtaaaacgtgctcaagaaagtgacacgtgtcctggccgacactgccttgaacacaagcctcccacgtctaaacccgccttttcctttagaagcgtagtccaccatgaccttgccctgtccagcgaacgcttccacaatcattggtccctcacaaccgtctctggcgtctcccacgttgaacgtgagggcgtagaatttgttcagtgacgtcctcactatctgagaaatggcgctctctttgcctccaacaagctcgatggctcggtgtccttcggggacagcgaagtgtgctttgtctacgtacttaacggctttgagagactcgatcatccaaccgggcaatgggctgttatcgtcctcgatgaacggtgggatcagtactccccattttgccgtgggaaacacgtaaggtccttcttcgaaattcccattctttatcagattatctgcaaacagaggtcaccacttaatcaccgaatccggtttactctaaaagattaaaagatatgaatatggtcggttccggtttacttacatccagagaatctgggagggaacaaagccttgatagccacggcgtcgatcaaaggtccgcaagccgggtgctcttcaacaccagggttatggaaccggatctcgatttcgggaccaccagctttaaaagcccatgagtatgagtcccaaccatcgctgccgtacatcgtctggatagggatcacacctgactcatgcgtcacggatatattgagcctctcgtcttgagcgcaggttcgagcggcgctgaacgttattgagtacagacggccaggtaggacggatattttctgggagattgaggcttcgttgcctagtctaacggcggaggaaccctgcggtacgaccaagaccatgtcatcttgtttctgaccggatttaatgaactccacaaagccgattatgttccagtttggtacggcggttcgttccttaaccacggatcctttcatttgggagggtttaggacccaactcgaagttgccgtttggtaataaacctgaaacaaaaaatattaagaaatgttaatttataatctcggatttgagttgaaatgagctttaactagagttactaccatcgcggactggggccgataagacgacattcgaagagatgaagaggagagctaagaggagtgctgcttcttggtacatcatgacttccttgggtgatagatgaagatcagatggtgagtactatccaaagggtgaagaaaggctgggtttttatgagtttgagaatagaagacgagcactggttttgaagaaaacaacgggaatgccactggaagcatcctgggttctattgtcaggtgccacgcagacacagacagctagctcaggaaacatttgacttcatgattagcatttccatttcttcaatgtattgtttaaggggctgccttaacaaccattatattaaactatatattcaaacgtaatttgcgtttgcctatctaaattattcacataaattttcaaagtattaaaatattttttggctttttcagaaaaacatttttgaagatcagtacatccatgcgtaaacgccaaaaaagttctttttgaaaaaaggtttacgggtaagtattccttaaaaagtgattaatctggaaaaaacatacacactaattaatataaatatatagggtacgtaacaactaatgcaaacaaacaacggaaaactaaaatatgtagagaaaaaaacatatatatcatcaccactcaactataatgccatggttttggaaaatgaaagaaatataatgtatatttgagatgtctctaagattagtcatttaacgccatgcaactcatcccaactctaatcaataaaaaataattatgattttcgtatagaatgcgacaaccaaaagttaatgacgggggaaaatatgtgctgttttggaataaatcaactcaacttaaaaatgaagtcaaaaatggtattgattgatgttagatattgatcacattggg

SEQ ID NO: 8455 - DNA, 3000 bp, Unknown
  misc_feature (1)..( 3000): cDNA_ID_1989489_gDNA_ID_1971811_Annot_ID_58095 3000 nt of promoter + ATG
cctctttcatttacttggtataaatctgacaatatatgctatacttcaaaaattgttaagtattaatacaatttgtttttgttttaggctttttggtattttcaagtgcaaagcagttaaaaacatgtacctcggtcataaaacttggccacccatgtgatattgaatcatgcctaaacgagtgttttcgagtttacaataccggatttgcaacttgtcgcggagacaagtactcacaactttgtacttgtgagtacaattgctaagcttagacgtactcctcatgtatgctgttaaactaaagcaaaaaatctttaatgttaagtaccttattctattccatgtaactggaggatatggtcaaatatatatgaataaaaaaacttttaaatattctatatgactgcaatatagaccgggtttcatgtaattgacctgtttcttcttagaaatatcaaatgtcttttgagcgagaatataactttgaatagatgtatgggatgcctgaattttcaaccctatactagttagaatttcaactttccaccctaaatttttaaccactcgaaaaaccaccataaacaattttaatctcgataaaactacatgtactttcggatttgttcttaaaactacgcctccaattgaaccgaccagttaaccgataattatacattcggtttgacttacccataatttaaccgaaattaatacgattttgactttattttagcctaattttgacccaaacaaaatgtaaataaattgtcttattaagaagtaaaattatttttattaatttttatttgtgatatttgtgataaacaattaaaaatattaaattataacttaattttagcaaaaattattatgacaaaatataccccaaattatattttgagctacattttgttataaaattttgataatatacaaacatatatattttccttttggcaatcatttatattttttataaatataaagctatgtctttattttaaacaaaatattcatttttcttgaaatcataatatatgacctttgaactttatatatgtaatgaaattcaaaatatatgccaaatttatttttatatatatccgtaaacatcataatcaaagtatatattatggtatttataaatttatttttctttatagattcagttttctttttatatatttcaagatgagttatatatgtatatatatatatatatatatttatatatgattatggtgttttaaaaaagaaaatgacctttgaattattaaatttagagtatataccatatacatttatatatatatatatataacaccattgtaattataaaaggaatttgttgtctattttgttatattattttgcggtatattttgtttattaccaaaatatatactaaaattttattatataattttgtgtggtattttttttttattttattattttggtaaaattaatttatttatttttaagtttttatcaaaaataaataaaaagtatttttcttctagagaatatattttttgagtctaaattgggttaaaatagagtcgaaatcgaataagttcggttaaattttgggtaagtcaaaccggatgtataatttttggttaactggtcggttcaattggaggtgtagttttaagaacaaatctgaaagtacatgtagttttatcgagattaaaattgtttatggtggtttttcaagtggctaaaaatttaggatggaaagttgagattccaactagtatagggctgaaaattcaggcaaccctagatgtataaattatcttacttttaaagcagataacaaatcgccgtgaatctagtttattttttcgtaatagcggtatgtaattagtctaatgtggatttgttctatttttttctaaaagaactatttctggttaattgaacctcaaccgaaccaaacaagaaaaaccaaaatgggacgtttcgacattagaaccaaaatcaaacactgaaccaaaatcaaagatccaaaacaatttgaaaccttttagctcactttcttattagcatcaccaaagaatttgccttttaatttgcataagaatcttgagttcagtgtttctactttctatactgactgatcttaagatctctataaacatgttattggctcaatatgaaatggttcaaatatggcgaagcagcctctcaggaacaagctccagtattggttaaagtgggatggtgtagacttttggttaacatatgatgtatacgtttcgtttgacttagcaatcaagagcctagacttgccttgtacacttttgcttaacaatgatgtatatgtttcgttttgactaagaaattaagagcctagacttgactagttaggttgggattttctcggatcggtctgaggactatactataatcgaaattttggtctactatgcagattttgatttaaaccaagattttctccaaaaggtactccgaatccaaatgttgctttagatgagctggtgaagatcaaagagctggtggacaaaggccaactcgtgaccattcccatctcctacaagctagagacatccgatgtgagattgcttaaacaagagtttggtactaacttcaaggttctagctgatgaaagtgagcaaccccgagactaaaattgggagactctaaatctttccttttacgtagagtccatcaaatgcatatgcctatgacgttaacatgatcttagacgtgaggaacttgcttcaagagttcagtgcaggctgtggaaccatgttaaaattgttcgcatgttcggtaagagaaattgattacaagagttcacaaatattgaaaccaaacctcgattattgttttactaattgcttgtctttaattggttaaacagaccagtgagaggtggcattttaagatacactctcaattgcaacgaattcaaataaatcagatcggatcgccgttagattccgacggaggagagagttattggcgatg

SEQ ID NO: 8456 - DNA, 3000 bp, Unknown
  misc_feature (1)..( 3000): cDNA_ID_1807255_gDNA_ID_1971811_Annot_ID_58097 3000 nt of promoter + ATG
ttgttagaatctcgatcacgagatcgaaaggaatatatggcatcggttcgtggctcttgcacatgtctcttcgtcttcttcttcttattgttactcttgatttcctcttcattcttctctcccgttggaagatgacggctaggtcaaaagaaaaggccataatatcacacaaatacttgttgatcgaaaacctcacaaacttatactacgttttatatcatctctctatctatcacaagctctattatccaaaaagtaaaaaaaaaaaaaaaaaagttataaaaacactattcctccctaacatgaaaaattccttaatcatattgaaaataaaagaatttttcctaaacttttatttgggtgattttgaaaattgccctaattttgagtttttgtttgaaaaatatactctaccctatttttaattaaaatatataattttaaatatgttaaatgacaattctgtccagatttaaaacaaaagaaaaatatttttcataaaattaaattaaatacgattttttttaataaagaataaacttaatttaaaattttaattattatttttttaaccattttaagatgaatacaatttatatattttaaatattaaaatctaacatgatattatcaaaacaatattcttaagtttatcacttcatatttcccacattatataaagaaatcaatctaactccaaacacataattctttaactctacacttttttttaaatctaaaattctttaactctacattattaaccaagttttgaactaatttagctttgtttgtaaatatttgtaatttcaattataattcaattataagaacatgaatacatgataatgaaattctgcatggtgtaacatatatatatgtatggtgtaatttatacatatatatacgactaacttttttcttttaaagaataattcttgttttttctttgtgttgtaacaatatttttcttaaaaaatatatttaagataaaattttatgtaaaattgttagttagttagttacgtcaaatatttttaaattaaattataattttttttggtgtcgataaaaaataaaataaaaaaatgatttttgttttaaatataaatgttttaaaattattagtaaattttaataaggatatatttataattttatatttcttttatattttagaaaatatattttaaaagagaaaaaatggataggttatttttcaaacaaaagcttagaaaagagacatttttccaaattttctctttttatttttccccttagtaaattttcctaaacaagttaacaaatttatccctttctttttcctctagccactttctatttctatgactatatgtctatattgatcgatcattttcaacttgtttgaaaatttgatgttcaattatctgtatttaaaacagagagaataaatacagatttacagtttcagaaaggtagtagggcataaaaattaaaattctgtttacaattttgctttgtaaatgctacagatttttttagatattttgtgttgtaggaaaaggtttgaattgattccaaattttatttcggttaggttttaagactttccttttcattaggacgttggtttgaattggttttagataaaattagtacgaaagttcatttaattggttatatttagttaatgtaataattttttttgtatttcaagattataagatgtttaattttctttttattatgaaatcttgtttacttcacataatcacattgatcaaatttcgtttggttcggttcggtttcacaatgtccgttagttttttgttttttcaccctcgtaaatagtgtatcttttgaaaacagaggtacgcaaacgcccttgtgatcttctcttaaaggtttgcagaatcagagaggtgcttacgcgaggcggtgaagatagctgagcgagtaagggaagggagactcgtagcaatccctgtcttctatgtgggtttccagaaattactattacaattcttcttcaactgaaatctcagtaagaaatattacattttaggatcagtataaagtaaagaaaccaaatagtgatagttgacttgtcgtcttctcgagtcattttaccaactttttaacgcagataacaaaatatcaataaaagtaaatagaaagagttcatatactttgttgacccaaaaacgaattttccctaaaactaaatatcaactcactaataattccatatgtaagcagtaagctcctagaatggaggtggaattctcttggcagcgaaaatgaatttcgtcgattgatcgcggaaacttcttccttgcgaatatcataattgtagttttgtgttgttgggatggtctatgactgactgattatctctacaaaataaagacttttgtatgggtgtagactccggtaacgctttgtggatatgtacaaataatagatacatattctattggtgttaccaaccgcaatgttgatcatgattttatattaccttttctttagttttatattactttcttaatgggatctaattggaaatttcccaaccactgtagtggactagcgattaaaacatatgaatgaggttaacttttggaaaacaacaaatggttggaatgagcagagtagattgaacattgaacttttcaaattaacttttgtaaattaattagtaatgatttccaaaattaattaacttttgtaagtattctggatagtaagagaaaatggaatccttattcaaaatatgaaagcataaataagaaaagacgaagaagattcatcaaaatgtcattagtattaacgtatttatattacaagagaaataataatattggacgtctgtatatttttaaataaaaccaatgactctataaggctatacagtcgcagaggtaattaaacacaaaacataatcaccaatcattttatgaaatttatttgttctctttttgcctatatatcaaacttcgtctacgtcccatgacgatg

SEQ ID NO: 8457 - DNA, 3000 bp, Unknown
  misc_feature (1)..( 3000): cDNA_ID_1820484_gDNA_ID_1971811_Annot_ID_58100 3000 nt of promoter + ATG
ccgtgtgcttgtgattttcgatactcattctgaagaatttagtatgctccaagtacctggagatatcttttggaaatataatggtcttctagaatacggtgggaaaatagctattttaaactataccaaagttgatatcgaaggtgtgatggaactatgggttgtggaagatgaagagaagaatctttggagcagtaagatattggtggtcaatcctttgcaactgcagatggtcaatagcattattagtttgacggtactaggaacaactcgaaacggcgaagttatcttggtacctggtcctgaagacaaaactgttttcaacattttactctatgatttacaaaagaatcatattagaaaaatcgaaatcaaaggaggaccagaccgctatcttaacaatatttgggaagtcgttggaatggatgatgttgagaacttaatgtatctttaagttcattggcttgtgtgttaattttttttcttttttaccaatttgtttttctattattttagttgttttgttatgctacctaatttaattgtgaagaattcgaaaaatattggacacgattagggttgtcaatcgggcctccccgcgcccaaatggaccatccgcatcctgcccgcttttcttctgatccgcgacggacctgcctgccaacgaccgcggtcttgaaaagcgagtcctaacccgccccgcagagcccatcggttagacgggctggcccgcggacattagtaaaactcctttttttaatcctccgtctgctgctttctagtgtcctgacttgtgcgaaatagggatgagcttgtcatcaattcataaaaccaatttaaccaatgtagttcttgattggtttaatcaaggttcaacattgaggggtccgaattcttgattaaaccaatttagattagctaaatagaatcgaagcataatctcaagccaaaaactaattcgattttggtagattctcaacaaaaaccgaatcactcaggaacatcataactatttcaataccaaaactcggaatcaaaagtgatcaagcacaaaaacagatcaacattagtaatatttcacaaacatcaatcgatcttgctagagtaacataatttttggcaagaatcaatcacagatctaagatcaatcagctatgtgatcgattgtaagtatattagagcatcgaaagcataatctcaacacaatttggtcgaatctagcaaaaaaacacccaaaatttcacacaaaaacctatcaattttggtagatttcaacaattagaactcaaagaagctaaatctactctttagaaccatgatcgatccctattacaccaaatttcgaaacaaaaacgcaaaatctgatggaattttggatcaaattcaactttggatctatctacatgaatcatcaagcttccacaatcgaattgaacaatatattatccaaaactgaagagaaatggttaccagaagaacttgggagagaatttctcttcatggcttccttgagagagagtgagaattagaaattttgaaatttgtttctgagagagagagtgcgcttaacggcaaatgaaagtttctcgtctcagatatttatttggcttaagcgggaaagcccacactttatttttccgtacaacagaaaaaacaaaaataaatactattgtttcagacggacacgtgtaatatcgcattagcccagtggctttgatacctcgtctgcccagccctgggttcgaatctggtttaatacccatattcgttatctttttccttcttccacgctcaaactatttcctcttttaaaaactcatacaatatcatattcgaaaaacaaaatgcgacctctttttttttttttttccctgtttctaccattttttaaaaacacatgaaagaaaagaagaaatgcaaagtctccttttaattcaaatatatctacaaatatccaaaaaatatgaataaaaacaaaccagattcaaagctacacatcaaacaaaaagcaagacaacgatccaataatcatttgatctctcatattggcaacgttgtcaatacttaggaaacgttggagagaagaagcaacatatttgatgagatggtttccctgtttatatagaggaggatattttccaaatttttttggaaaaagcagagcataaaggctaataaagctcgcaaacaaaaatcaaaagcaaaaaaaaaatagtttttctgcattttcaaaagtttgatttttatgtcacaacttgttaatgtttggagctgatgttgcgctgagttttgaatgttttgatttaaatgattcgcttccttatctgaagctgttttgcttgcaattttgaggtttttgtgctctgattttgctgactccaagtttgttgtacgcgatatggaagcaagaaaagagaggaaaggaaaggacatagatgctggttcagttaaagaccggatttaacatccctctcaagcaagaaaacggaaaccctttttgaaatactaaatttttaagtccactactacaaaaattaaaactcattccttttatatgtagtctcgattcatattttcaaaaaatttaaacaattgaaacaaatagtatctgtataaattaataaaatattatgatccaacagtaataatttatagaatttttacggtgtagtgttaaaaaaaagttttactgtatataccacttcttatatcaatctaggaatgaataaatattattatcctgagttatttattcttgccatcatatatatatatatataatatttttttctgatcaacttattaatcttgttctctaatttgtattaagtaataaactaattatttcctaatatagaattggtctctatcccaataaagaaaatgaagtcaccttcttcttcctcttttctcctgtgttgatgaaaaagcttcaagattcaatcaaatcatcaaaaaaaaaaactataacttctattgatcttgatatctaaatccgcc

SEQ ID NO: 8458 - DNA, 3000 bp, Unknown
  misc_feature (1)..( 3000): cDNA_ID_1820480_gDNA_ID_1971811_Annot_ID_58101 3000 nt of promoter + ATG
tgtgttttactatgtttgcaagagttttcatcatcaggagattgataaatccgctttgcacgatcatctcggtgggtatctcggtgaatatgtgcctcttaagagcaacattcaaatggagaactttgaagtttgactgcatcatcaaacagagtaaatcaggttttttgcagtttgaaaatgtctttgtatgtttgtaatatttgtaatcttttcactaagtgaatttttgttttttacttgcatatccaatgtaacgagggaagagacttgtttttacagagtttctgttacttgttagatacttcttgttcttgcattcaggttatacaatgatatgagagaatattttgacaaaagaaaatgggctatataatggttcaagagtctggttgtgttctgtttcattgagctaattagtttcaagatgaatactctgcttcattctacattatacttgggagatatatgactttgatcttgtaggtatgagttgtgaattacttccatgaatgctcattattaatgtattaccatgtacaagcaatgactcaaagagtggcaacaacaaattcctcaaaagaacttgacttggggactgtgagcaaaatatcacaccactcaactttcccatacgtaggaagccaacgagactgaggcggaaaactacgacttgtaccgacaccattagattccttgttgtgcgactcttactagactaaaacgggaagtgaaccatcttgaactagggctggggattcgagttggtccacggctcagagtaaaccaacgtggcttagagctaccatggaacattaaacagagataaggacaactctcggtgcttcctaatagtctccgggtacggggtatcgtgaagatccgtggaggcgaggagagagcagaatatcttggaagctaaggagagagttgggtagtacaacctcgaaaggcgggctaaacagttcatccgtatatgttaatttaccatagttttgtttttcgtagtttttctattgaatggactcaaattaatatcgtgtgaaacttttgaaaatactgaaaaggcccttttagtgcaataattcaaattgaatatgaccttgaattgttttaaaatcatttttcttctcttgattgaacctaattgaactacaaaactatggtcaaaatatatgaatggtattgagtctattgagttttgtcctactcatataatttggcagttcatgaaaagaaatggatcttaagtggaatatgcgtcacctgtcataattataggttgaatgatgaatgtttagttttatttgtcaactatttttttttcgaggataatgtttgttttttgtcttttccagtacgataatgcttaaactaacattctcaactatcaaaacattccaacgtataccgaaatgaaagttgacgtgataaatccgatcaagaacacagcttcttaacgtggctactgtcgtcgaccgacgtttattaaattaagttttcttatatacataaaattcgttcaatttaaattaatgtggtgaattcgcaagtttaaaatttcacagaaaaaatgttttttataactataaacgcttaatctcatgcacgttctcttttcaggagatatgtaactaactaatgtattccatgatgaatgtttgggaaaattaattatagtggatacttgttataaaacttgtatgagtcaatggccttaatatttgataagtatacttaaaactttatttggacattaaaccgccactaattttccatagcacatatagtcaacttaacaaattataggttagtgttgtttggtaataaattagtaatttagtaaaccaaacaatttataaccattttattcaatcagtgtaggcaaagaatcttgaaatagtgttttctattcttatgtatatatttgacaacgtggtgttttgtcaaccaataaaattttctaacaccataacataaatctaaacttgacatgttaaatttccttagcttagtgaaacttgattaaattatgcccttccaatttttctcaccatttttaccctccaaaatttcttaaacattccacacatcaactatttcacagctttacaatgacgagccatcactttcgtacaacaacaaaagtaataatagattttctggtacatgtatcgaaaagttgtgcggcctgcgtcagaaaaatctaagaaaaaaacaaagagtaaacaaaaatatccaaacagtgaatctaataataaattctgtttactttctgcaaaaaataggataaaatcgaatttaattctttttatcgaaagtcggaaatatatcctatgtcgcaatcaattaatgtacatatgcaagaaatttaaattaaaaaaaaaagaacgcaaaaaaagaaaaagaaaaagagagagagaaagaaagaaatcgagtttaactgctcgtgtctctctgtgccactcgtcttcagttttgtcagcgtcttcataacttataaagtcctatcgatctctcttcttctttctttggccactctctgtgtctttctttgttaataatatctcaaagaataagaaaaaaaaaaagaaaagaacaaaaaaaagcacaagtttcttgaaaccgtgttgttttcgtgtaatatacacagttgttacagattctctccttttgggtttctttttgtaatcatcatttgattgactgattctctgttctttttttcccaaaaagagagtccttttattacaaaaaaaatattaaggttctgttttgtttggtttagcttttttatccaattccatcagaaccagagttgtttgttgctgctctgtaatatactcgagtcaatctttatacttaaggaaaaaaaaagtttcaatctttggtttcatctcaggcgaaaattgctacaaatggtaatcgatttctagggctctgactggttttgattaaaggaatcaattcaggggaatttcgagttcttttgttacaaaa

SEQ ID NO: 8459 - DNA, 3000 bp, Unknown
  misc_feature (1)..( 3000): cDNA_ID_1820476_gDNA_ID_1971811_Annot_ID_58102 3000 nt of promoter + ATG
gcatactgtggacaagctgcttatcttgtgattcataaggaacattatcaagacgcgttctatgcatctatcccgggtttgccttaaatctttttaaaacattactggtcttgaagtcatcatacatagtgctcttataaaacagtgaaactcttttttgctttgactccacagatagtgtctattggccaatgtttatagtcgcgacaggagctgctattgttgggagccaagctacgatctccgggacttattcgatcgtcaagcaggccgtggctcatggatgttttcctcgagtaaaaattgttcatacttccaagaagttcctcggtcagatctattgtcctgatattaactggatactcatgctcggctgcatcgcggttactgctagtttcaaaaagcagagccaaataggaaatgcatacggtaagatgacaacaacttcaaaatacaagaaaaattattttagtcaatgttaatcgttttaagttagttatcataagaatttttggataatctgtactaaaagaattttggtttatgataatgataatctttaaccgtgactgttttgttttcttggacaaattagggactgcggttgttctcgtgatgcttgtgaccacattactaatggtgctgataatgctactcgtgtggcattgccactggatccttgtccttatattcacctttctctccttctttgtggagttatcgtacttctcagccgtgatctttaaaatcgatgaaggaggatgggtgccgctcatcatagcagcgatatctcttttagtaatgtcagtctggcattacgcaacagtcaagaaatatgagtttgaaatgcacagtaaagtgtccatgagttggatactcggcctcggtcccagcctcgggcttgtccgtgtcccggggatcgggttagtctacacggaattagcaagtggtgttcctcacattttctctcatttcatcaccaacctccccgcgattcattcggttgtagtctttgtctgcgtcaagtaccttccggtttacaccgtccctgaagaagagaggtttcttgtgaagagaatcggaccaaaaacattccggatgttccgatgtgtagccaggtactgtactttattcttctctgttctttagtagggttgacaaaatcaataaggagttttaagacccttgaaatatctcaaacatttttaacagatatggttacaaagatctacacaagaaagacgatgatttcgagaacaaactgctgactaaactctcctcattcattcgaatcgaaactatgatggagccaacttcaaactcaagcacctacagcagcacgtattccgtcaaccatacacaagattccaccgtagacttgatccacaacaacaacaaccacaaccacaacaacaacatggatatgttctcatcgatggtggactacacggtatcaactttagacacgatagtttccgctgaatcactgcataacacggtgagtttcagtcaggacaacacggtagaggaggaggagacggatgagttggagtttctaaagacttgtaaagagtcaggtgttgttcatataatggggaacaccgtggtgaaagcaagaactggatcatggcttccaaaaaagattgcgattgattatgtttatgcatttcttgctaagatttgtagggccaatagtgttatcttacatgttcctcatgaaacccttttaaacgttggacaagtcttttatgtttagtttagtttttattattttgctttgtaaaacaattacagagaaagggtaataaaaggataccaaatttaagatcataccactgaaactgttactggcctaggtcacgtagaagttctctattgaaagtcctgacccaatccaatcacgcccaagaagcaatccgatcatgtaaaaaacttaagttttatttatcataacatttgcaacatttagtaatttacattatatgcgaactttatatctctagttacatttagatcaccatatttatatttaagactttcatcataaaggttttcacttttcacttgttttggaccaaaacttttggtaattcacaacagtcaagtcaacatgtccgattcaatctataaccacaagaatatgatgtcttatttaggagaggtcaacattataatcaatctttaacttttccctacgcaaattcaactagaggaccaatagaaacaggtatacacaattgccatttttcttagagcttttcctagttgaatattgtagcgaattattgacctttcaacgctatgtaactatatcgttacgatcccctaaaccgaacagtttaaactggcagtagttaaccgattaagcccctacagctgaaccgttgtacttgttgtagcatattataccaaattgggaacagaacctacggataccgagtttaagagaaatgtgatatagttacgtctacctagaatccgaatttgtacggttccctagatcttggtttggtaattatattattaattaagccactaatgactagtttcttagtctcgctaatcgaccaatatgaagtaatctcactcaaatacaattttcccaatcggttcgtcagaacgtgattgtcagaaatcaaaatcgtttacttttctcgccatagcactgatattttcgataaaaacaaatctgttcgcgtattatattgttttattatgctcatttcgacacacaacaaaaccgaaccggtaaaaaatatatgaaccggtttggtcatcatattacactgatatgtatattcaaaggaaacttcccatgcggaagaagaaaatatcttcattaagttacaatcacaatattcgttacaattttcttgacaagttaagttatataattaagggaaataggaaaacaaaattcaaaagaaaaatcaagactattaaatgaggctatataagtaacatgtacaaagaaggaaaaagggattcatagccaaaacc

SEQ ID NO: 8460 - DNA, 3000 bp, Unknown
  misc_feature (1)..( 3000): cDNA_ID_1820473_gDNA_ID_1971811_Annot_ID_58103 3000 nt of promoter + ATG
gttcccctgacatctgcagaacaatcatcgcgtgcctacaaagaaaacctttcaactcaaacaatcgacaagaacagacaacttcagatgattcagagttccagaccacaacgaaagaacggttctgttcataatcttgaaccctgaaagtcctcttgttaaccccatcttcttcactttctttcttcggatgacaagcaactcctcccaacacctccacctgaaacttcttgaacatctcacgagtgtatacctcagccatttgcttcccaaatggtgaaggtgacttaagtcccggttgtttatacaatgtctcaatctccgatttctcttcctcttcgtacctctcttgtatcatcttcttgtactgctcaagaaatgctttaaatgtagttttcctttgaatgtatttatctaaaccagagttcacactgtctgatctctgagctgtacacattcccgctagagatacatctttcatatatacaggaacccaatattccctatcttcatacaacgactgaagccacacgttgtctctcatatgaaacctatcaactacctcccaccaattcttttcaaagtcctcgctctggcaagacccgtaaatagcatcatttatctcatccacaagttttttctctagtctgataacatgaccaagcttttccggcatctggccaagagtatcccacatataaaagcaatgtctagaagatgggaacacctccaagacagcttccttgagcatttggtcatgcttagtaagtataactctaggtctgcatccgtgcatcgcttttaaccatgcccggaaaagccaaacaaatccagatttagactcatccgttagtaataatccaaaaccaagcaacaggaactgtccatggtggttcacgccagtaaaagcaacaagaggcagtttatactcattcttgatgaatgtagtgtcaatagatacaacatcagagaaacaagtataatcaaatctaccttttgcatcaacccaaaagatgtttcttaaactctgctcctcactgagatcaatggaataaaagaagaaaggattctcaacttgcatatcagtaaagaagtttaaaagtctttcaacatccccatcctcaagcttcctgcttttcacctctttaacaatagcaccgtttagtttctcgagttttctcctcccactcaattctcttaaggaatcagcttgaccagtgaagatttcatggttatgttcttttaccaaactacgaacaacccacctcccatcttgccttctcttaacatgtaaaaaagctttacaatcggttttcgacgatgaccggttaattctaccacgttttcttgcttgaggaatgttaaatccatcagtacctaaaccagtatctatgtcttctttcttgcttccatatcgcgtacaaacaaacttggcatcaataaatttcccggtcattcttgaacgacgactagctttaataatggtagtaaaaccaacagagttagcatattctttgtagaactcaaaagcttcctcttttgattcaaattctctcccttcatcaatctctaagttattcttcctatgatcatctaactgcacattgctacactctcctgacgacatttcgaaatcaatacctgattagttaaaagtcttcacccctctaaaccaaagcttgtttgatcaaattatacctgttgaaacactatgatcagtttccaagttgcaaacttttatgaaaaacataaatttgagtatcaatggaccagatgaaacttataatcagcaaaatcagaatactaaaacctcaaaatgtaagcaaaaacaacttcaaatacataaatgaatcatctttaacatgataagtcaaccattcaaaaccaacaaagtcagctccaatcttcatcacttaaaatagaaacaaatttaggaaccaaagcaaaaacccagaaatgatatttaagcaaactcaaaatgaagatcgagagactatttacagaattacagtatgaaatagacaaaatcagaaactaattaactaaagtgcaaagatgatataattgggagggcaaaaaaggaaaggtttattacatgatgaagaagacttgggaagttgagaaacgaccggaagcgagtacagagtcagatctttgggcaaagagtcttcgtcctcgccgtcgtactcgcttttttatactcgcggttatgttggtttcttcttctctcctcttcctccggttatcgttgcttaaacctgtttttattttcgataaccggatccatttcgtcgataaccggataatttttcttgcacgagaaaaaatcttgagccacacatttttttggtgttcttcttcttcacctctgctgatggaaaaatcgtgagtttagaagcaaaaatggttgattttcttcgagaaatttgacagaactttccccaggtttcatatttttatcattaatcagataattcatagagatttacgcttatggtagttagtattctcatgaaattttgagtcttggaatgttgattgagctcgatttctgagaaatttgcaatcttttgttcattgtaaacgtaaaaattgaatctttgagtagaatgtgtattttgtttagtctatagtttctcttcaagaaataactctttgatagatttctgtaaggtttggtaattggtactgtgagttttgattatcatgtcatgtttcctgattagatggtgcattattgtgtgaccaagattgcttaaggaaatgggtttggtgggttgtgttggtaagtcttctcttgtatctatggagttgaggtgggcaaggaggagaaaatctgataatgctgcatcggcattgcctcgatcgatacctatatatatctctacgttgaagaaagacataaatctagaggaattgaggaatttgtattcactttgtaaccattcttgcaaccgtttgtctgagaaagacagcaacgttgaaaagattgttgacatg

SEQ ID NO: 8461 - DNA, 3000 bp, Unknown; identical to SEQ ID NO: 3418
  misc_feature (1)..( 3000): cDNA_ID_3071141_gDNA_ID_1971811_Annot_ID_175762 3000 nt of promoter + ATG

SEQ ID NO: 8462 - DNA, 3000 bp, Unknown; identical to SEQ ID NO: 3405
  misc_feature (1)..( 3000): cDNA_ID_1820436_gDNA_ID_1971811_Annot_ID_175761 3000 nt of promoter + ATG

SEQ ID NO: 8463 - DNA, 3000 bp, Unknown
  misc_feature (1)..( 3000): cDNA_ID_2176867_gDNA_ID_1971811_Annot_ID_175758 3000 nt of promoter + ATG
cttccaaatagttgttgtttttatggaatcttggaactcttatgaatgaaagatttttcagtatctcttgatgcaaaattggttttcttcttctatgcatgttgaatatgagcttagatctgctgttctcaatcacttccctctgttgtggtcttcgctgctcacatgttgtgtattgacagtgttcttaattaatgatgtggtttggcttaacgcgcatagatttgtattccaaattagggtttgaatcttaagttccaagtctcttaaaagtttattaatatagggtttatatatttgccaagaaatgggtaacggaatgtggaagcaagaagccagagacttggtcgaggaaccatcgcagagtaatgagaagctggaagatcagagaccacaagaatcttcatcctccatcccacgacatgtttgggctaatcgggtaattggatttgattgtggatgtatgaactttaggtctcatcactcatagagatatttgcattttaaagcttatagattctgtgttttgtttagagagaagaaaagtttgattataacaaatactacattaaacaaagggctgacattgcaaaatatggaggacctcatccaaatataatcctcttcggtagagttggacttcattgctacaatctgcaaaatgtaatatattcctacacgttcgttctagtacgattcaagtgaactttgtttctgtcggagtactctcaccagatccttatttttgtctttgcttcttttgatcttgtagggcacaaacttacaatttctgactgtacacaattttgactcatggataacctcgattctttctcatttcataagtttggaggcaatggatccagtagacaattcgatctgtgagttcgaaacgcacgttaggtatgccgttgagaataaacactgcttgagcacaattacaacgggaggcagaataaagcccaaaattccaggtaaatgtaaatgcacctttgttttccgtcatacctagttagttcatacggctatattagttatgtcaacttgtgtctcttagaggaggaagacacatattttggatggaacaaagatctcgtggatgatttcttcaaaggtggtatgcccgagtggatgccggaagatgcactaacgggaagggacaagctgcaatactatgaggtgagatttttcatgtgttaaagattaaaatattaaggatttgatgttgttgatatggtacagatgaaagattcagagttagaagaagagaaggaatggcttcatctatacgcggaactcgcattgttctccaaactggtaaggaaaaaagacttgatcaccgaaagaaagaggggattttgtttattaggctatatatgatctgtttaaagaaacttggtttttggtgttgtcttgtgtaaacgcagcatgcgcatgcgctggagtctgcaaagccatttgagatgaagaagatagttgtgagaaccaaagcaaacgtggagtcgaagaagaaggtgaaggcggagaatgcaatcttctacactagcttcagaacccgttgtggtcgagactgcaattgtataataaggagaacgactgatggaaagcgagaccatttttctcttgaagtcaaatgtttcttgtgagagtagtagtccccaaagttatacaataaataacatattatatataactagataaggcccgcctatttaggcgggtgtacccgaaattttcaaatactcgaacggatctaaactttaaaactcgaaaaactcaaacccaaacccgaataagtatccaaacatatctcaaatataagtatatattagttatatttatacttatatatagaaaatattaggatttttttggatattttagttatttttgtgtatttttagatatattcaagcaaaactactcatgttgttttgagaatttttgaaaatttcaagtaatttaatagatttgcacacaaaatttgatatttcaatatataaataactcgaacccgaacccgacccgataatttttttttgtttaaaaatacatacaaccaaaatcttatttctacccaatttctttaagtaataattatattaataaaacctacagtctaatttttacagcaataaaacttacaactacagtcatcacacctacaacaaaaattctacagcagtaaatctacagttacagacgaaccaatcacccacgtaatctcgtaagttaattttacatcatgcaaattaatattaaatgagttaaaattaataaatgaaaaaaattgaaaagttaaatcctataagctaagctatttttctcaaagtgttctattttcacttatgattacatgagttaaagacaaatttgttaattttgtttttgttgaataaatgttaattgtttataaatatatagacatataaattagtatatataaatttgtttactttttaagattttctatttttttagagaataaaaaagttaaattttgaatgacacatgtaaacatctgatcgtttgatttgacacgtggcacaatcctatgagttagcaattttgaaaaccatatattttatataataagatccccaaaattattatgtatatgagattatttaccatttggatttgattacataaattttataaattaaaaaaattattggtaaatgaattagaaaatttcactttttaatagtaattaagaagtaattaatcaattaattgagaggaaacaaaaaaattgaaatttattgataactcttagtggcgaagaagagaagaagcagaaatcaaatgtcatcgtttatcaacaaacctctaaattgatcgaatatcttcttcaatcttcatctctctttcaaatctgcaaatgagagagctgtaagagttgcatcatctctatctctttctctctctctcttgcgaaaacaccaaacttttgaaatccccaaataagggtttaagcataaaccctacgagttcatg

SEQ ID NO: 8464 - DNA, 3000 bp, Unknown
  misc_feature (1)..( 3000): cDNA_ID_1820456_gDNA_ID_1971811_Annot_ID_175755 3000 nt of promoter + ATG
cttttaagataacagtagctggaagaaacattagattgaaacagctagaaaagaatttttaaagtattgattaaattaagagcaaccctgagagataacgacaccatcaaacgaggttattaatcatgttggtcaaacgagaaaacaaacattccaaggcatatgtcataagaaggtataaaagtgtatagatttgacattaaattacagattgaagagtacaatcttaaaaacagagtataagtgaaagctaagcaatttgaatttattttttgttgggttgatgaatacctgtccaagctcgtgtaatcttgctacagcttcgtcccttaggatcgcctgatgcagatcatgcttcgtcccttctgtttcaccgattcctatttcgacaattgttacaaatgtaatcaaattggtaaaaaacagagtaaagagatgtagctacacagaatctaacgaatgagagaatgttccggaatcaaaatcacttttttaagaagtgggtatattaagattcgattgataaaatagatagagaaagaatacaaatttacctaaagagatatgggaggacgatgatgacgacgagtctgaggaagaagaagaagacgaagatgatgatgagagagcgagaggagataatagagaaaacacgaggcaccagaagagcacaagcgatggatgattatgatgatgatgatgatggaagctagtgtgatagacatgggagaggaaaggatgagatctagaggaggaagaagaaggatgaggaaccgccatggctgccgatttaagaggttgagattaaacgatgataaacaaagacagccacggaacggaactacaacaacacaaccactggctcttgggaatgagagacaagaaggagaaagagctattctttatggcttccatggctgagaagagaagagagaggaggcagctgttgggacccagtagtccaacttggacgtcagatggggcccatataaattgatgacgtggtgattctcagtggaatcttgtggagacggtcacatttggggtgaggaatcatgtgcatgcgaagtcgacaataacaatgttttattgtttttgtttattcacttactgtgaaaatgcacactaatcttgaatctaatgtgtaaaaaaaatataaagtgataggtgttaagcatttcgtcaattatcgtctaacgcataaaagttttatatactattttgaaacgatttaaactgtgagtataatatagtaacatgatttaataatggcattcaaatctcaaaatgatataatttaaatttaaactaaagtataaataaaaattataatttgtaaacgtgaaattttataattattaaatttaatagattagcaacacaaacttaaacatcaaatcgtttttgtatttatatgttttttctctaacaaaaaaatagtattttatattttttcgactattgattcatttcttttttatacaatatttttgtgatctgtctttaaaatagtagttttcatattaaaatgtctagtgaatcgtgatgcattttgcctttcacttataaagcaaaaaacgggatcaccaccataccataccatataacgaagaagattctaccatccaaccactatcacacgtgatcgacgcacgtgacaccctacctttgtctctgtctgtgtgggataaattaacattcttattcgtctattttcagtagaaattgataaaacaatactactattggtttagaagtgtttattatatgtattttgttaacaaacaaaaaacaaatagaaggatttgttatcagtttcaatgagagatcaaatagtctaaacttaaattccatttcagaaagaccactacaacttttttttatccgatgaatctgatccatgctctttaagcatcaagaatacctcaaggcatgtttatcttagctttgaaaaatataaatttctatttgattctaataccaagaagaaaaaaaaatcacataatttcaccacgatgggagtatttggtttcagttcaatttcaagtgatcaaatatcataatgccaccacgagcaacttttggagtctaacaaacaaatattaaagatctaaaattagttccaaatccataaatttcggatatatattttcaatttaacaagtaacttaattttgggttgttctcttaaatattattatcaacttacgccgacacgtaaaccattttgttaatttgaataatccgagtctatatgtttgtaaattgtccaactgttgaagaaaacatatataattgcccgactttagttattgcttacctagtcatgcacattaacattcgttaaatataataaactaaaaggccatataattgtacatgaacatgtttgttgttgatacgacaaatccattttcaggataatccacatatattattaccaaaaacgaatgcttaatttatcaagattgcattgccagacctaggatgagtgttagcttactcatcacttagtgcggaagcaattaaaatgtaatcctatataattaaacgagacaacttacaatcatattaacaagcctacaagttacaaagaaaattaaaatacagttttagtcacaatataataaacgaaatcattattgtacgattgtagtctaaaaaaaaagaagttgtgttattgtgcaaaccaaaaggacctacgaaagtataaaaacctaaagatacaaggcccaatagtggtgagcccatcacgatcgcgtattctcttaaaccggatcacttacctgaaccgaaccggaatcggcagctaataatttgaagtcgggtttggtcctcgattgaatttttatgttctgtaaattcgtgagaagaggcttcttcatctgcgtatggcgtgaaaattcgtaatctttcgtttgacagaactcttctatttatcatcaatctccggtttcttcttctttgtaagccctaagaagccaaaaagtgctaaccatg

SEQ ID NO: 8465 - DNA, 3000 bp, Unknown
  misc_feature (1)..( 3000): cDNA_ID_2176859_gDNA_ID_1971811_Annot_ID_175753 3000 nt of promoter + ATG
agatgaagatctgattgaaatgagtaacaagctgtttcatcatgctataaagtctggtaagaagccggacgtctcaggtcgatttgattgggccaagagtggtgtttctacggttgtgcagttcgaaccaaacgagagaggacaagggttttcaagctgcttgttagacgtttcgcgtttcccggttggttcatatcaaataaaatggctaagctgttgcgttgatcaacatggttcttactggaatcttctacctctcaatggcaaacctgtgtttacggttaagaaagcgtcatgactagaataagtgttggttttgacatggcggaagagtaaaaagatctaaggaggatctagttcgggagcaagcaagaaatgagacagagattggctttaagactaatctcgaaatatgcagctacacataagagagatgtttgcttcaacactatttaggtgaactaatttttattggtatgttgttatgttatgttaactagattgtagactaaaatccatgaaaattaaagcttgaaaagctaaagtcaattccatctaacactgatatgtgataattagctaataagtaataattaaagcttttaatgaaagtaaaatttttgttggtgaccaaatattactcaaatatatatttactattgttcagattattatacaaatacaagaacggttcagaaataacagagataaaaaactgatattaaaaatttaattttctttcccaaatcagtacctcatttttccattaaaatgataatgtaatagtaataatactcaaccaaatgaataattgttttcagtcaatgaaaatcattttaggggaatgaattgagttagtcaaaatgaataatgcattgaattgaatatctttgaatgggaaacaaatcaaatttacttggaataggaagattattcacaggacttccaaaaccaagggcagaaaaacacataaaatcagattaaatagaaatgaacttgttgacaacaacaacaaccaaatttgttttgctttgaaaataaaagcaaatgtgtgaaatatatgactgaaggaagaagaagaagaagccaaaattaagtttcgtgtaagtacttttcattgttttgtttgattttaagttttcttttcgtttctaaactaatttgtgaaaattgatcataactgaaattctttgcaacttatatcgtttgctatgcgactgttctttttattgaggtgaaaattattagttgggaaactatcaacgcacattaacttttcgttttgtgtaataattttcataggtataaactttatcttgcctcaattaattttttatttttttgtcattactaattaacacgagttaatatggggaaaaacgttaccgtatgatcattaccgttgattttggtttgcatttaattaacttcgtgtaacctacttactttgcatccattttcatatgtttttctttgttttggttgctaattaactataaggtacatataaataggtagatttgggaacctaattgttttaccacctaacatgactctagactaacttttcaattttgctatgaaaataaaaggccaatttcatatatctggtaagtaatcccaacatttccccatttcattacctatcattctttttttttgctaagaaattacctatcattctttgattaaaattttctctgtttttttttaattcttttaagatgaagaagcctctttcattgtccaacagagaaaccttttatttgtatatcatataacagcatgatttctttctttgtagatacattatacacatacattctctatatatacatgttcttttgaatttcttacttttaatcaatttttccaaattaaaagtgcttcttttctacatctgatttattcgatttgcaatatccatccttatatatagagttttttttattgcttatgcagtaatatcaaataggtaattaacttttcgtttggctctgttttacattcacaggcctcaagtataaccccattcgaatccctaaacaatagagaatctcacaatcaagatcaattcagaggtaacgttttactttttttcttgctttaaaaatatatattataatccgttttctgatatttaactagacgagagaaagtaatgtttcttatgtcaatgtcatattaaaaatcagttttatatatgaaaattttcatttttttatttatgaaaaatgtgcaaatgcaggtaaccaaacacaaaaaaaaaagttttgtttcatcctccattgttcttaaaagcattagtagttatcaacataataagttactccattcttaagcatttcaataaatcttaactttggaaatcagaaaaagaaagagtggacgaaaatacctttagttggaagaaatattcaaataaagaagaaaaaactctaccaaaaacctatccaccactcaaacctccccaaccaaaaccccatgacctggtttacccttttacatacaatatctaatctcataatgcatgaatctatacctttatgcacttttgcggatctttttccaacttccgcatactaactagcatatctatctctaagtcctccctatatatttaaattaacaaattaaatcaacgtaaaaatgtcaaaaatatatattaatgttttgaagagaggtaggtttcaaggtaagttatatgatagagtttagtattcataacaaagattcattatagtacaaataataagttatagcgtaaaccggtagagaaatagagaggaaaaagaggatcaaaaatgtacaagagtgcgaaatgtgtgactcccattagaaaagacacaagtttgtataatgtttcattggtaaccttagttaggcctttctctttccatgtgctaacaacaacatacgtatatatataaatgtctcacaaacattaccttcagccattctcttatttggctcattcgattattataggaggaaaccatg

SEQ ID NO: 8466 - DNA, 3000 bp, Unknown
  misc_feature (1)..( 3000): cDNA_ID_3091118_gDNA_ID_1971811_Annot_ID_175750 3000 nt of promoter + ATG
tttgccttttaatacatatacacacacgcacatatctacctgcatcttcttcataatcattcctaagaaattctctctctcacacactcaagaacaagacaagagtcaagaaaaatcagatgagtctctatagcttcattagcttgttgttactgtttctcatcacgatttcaatggagtttaaagagacatcatccttaagaagagacatgaccaagcttttaaagctccaagagaagattcaagaaagactcgcagtcactcccactctctcaccagtgtcttctccttcttctcactctcccaaaatggtaaagtcctcttgttcagtttctaatgtattacaggcacgtgtgtgtgatttgtgagcgtgtgtgagtttggtttgtgcaggttgggaaggtgatatacccgattggttacggagctgaccctacaggtggacaagacagtagtgacgcaatacttgaagctttaactgatgcttttcagttacaaactggacttgagatgctgccacgtgtcgctgatttaggtggtctagttattgatctccaaggtggcagttacatgatcggaaaacctctcaggttcccttcctccggtggcggaaatcttgtggttagtccctcattttaaaatttgacttaagaaacttatgaaaaggtttgagtcttttaagacattgttcggtgtaattcaggtgaaaggtgggactttccgggcatcagaactgtttcctggtgataggcatttagttgagcttgtagcatcaaacgctaagaaaccaatgaaaatgtcgccagaggagtctttctccgatcagaaagaccagagctctgggatcttctatgaggatgtgaccttccaagatgttctcttcgactcaagattccgaggaggtggtattttggtgattgactcagctcgtatccgtataaccaattgttatttcctccatttcacaacgcaagggattaaagtccaaggaggtcatgagacatacatttcaaactccttcttggggcaacattcaacggtaggaggagacagagaagaaagaggatttactgggacaggaatcgatatctcgagtaacgacaatgccattacggatgtagtgattttctcggctggtatcggtatctctttgaatggtggtgcaaatatggttacgggtgtgcattgctacaataaagctacatggtttggtggcattggcattctagtgaaatcacatttaacgaggatagataattgttaccttgattacacaggtatagtcatagaagaccctgtccatgttcatgtcaccaatgctttgttcttaggagatgcaaacatcgtcttgagatcggtacacgggaagatttccggtgtaaacatcgtcaacaacatgtttagcggtaccgccaaaaacaacttcccgattgtcaagctagaaggagagtttcatgatattaatcaagttgtgattgatcaaaacaatgcagaagggatgatgctgaaatcaacaaccggaaaggccatggtttccgcaaatggaacacgatggatcgctgatttttcccctgttttggtattccctaaccggataaaccattaccagcattcgtttttcgctcaatccggacagatccctgcaaatgcagtgaccaatgtctccaacaatatggtggttgtagaaaccgatagagctgtaactggaaccgtgtcaataattgcttatcagtaaaacaacattcttcacattgatcatattcctaataagaaagcatgatttgacatctgatttatacaagttcagttacagtttggtgagcttgatactaacaactaataccagcaatcagcaacctcatcattagcggcttcttctggctcatccgacttctcaggtggaccagaagtcctaggcagtccttggaaatcacgtttacctggtttcgcaatgtctatataaatcattctgccattgtacatctgcaacagaggaatgggaaacatttaggttgatttcaagacataaaaatgtaaacttgtgattgaaagaagcttttacccgacggtccatggtctctatggcaagaaaagcatcatcttgagacgtgaattgaataaaagcataaccttttgatctcttcattgcctcatctttgataagcttaactgttttgaagtataagagtgaacatatcaatgccataaaactgaaccttaaagcaacaaaacagagtaaaattgaaaccgcaaacataccttcagctatctctccaaaagctgaaaactctctctttagaaaatcttcacttgtagaaaacggtaaatctacaaattcaaagtgaagaaacatcagaaccgtagagtaattaccaagttgaagttacaaccaacttcaacttcactaatgattgctacaagagcttagagctatcacatatgactaccgtcacaatcctgactcaaatcaactaatttcaatcaaaccagaatcataaattacttttggaacaataacagaaccatgtcctaatctcagctagaagcgaattcaaatataaaccaaaagataatctgaatcttacttctgaccatgattttgctcgctagagggtaattaaagagcgaagctttaatctttggaaacctaaggttcctgtaattaggtagagaagatgaagaagccacaaaagaagggaaagataacgtcgccgaccacataattcacagtcgccggaaatagagagggagaagaagaagaaacaaacagagagttataaaacgacagcggtatagtaaaaagctaaggcctaagttttttggcccagtgataaatttgaaactttaggcggaaactaaaaacatttgaaacaataaggacttaaaaagtaatttactatttatttagatattgtaaaacccacacaaaaaccctaatttcatttctccaaagctttccagaatactctccactccttcataatttctctggcaacgatg

SEQ ID NO: 8467 - DNA, 3000 bp, Unknown
  misc_feature (1)..( 3000): cDNA_ID_2176847_gDNA_ID_1971811_Annot_ID_175747 3000 nt of promoter + ATG
agattttgaatttaagaagatgatcgatcttaaccaagttcatacaactctttggaatctgaaaaagaaattaccaatatttactatatattataaatatataatagctaaccacatcaagaatgtactcataaagcatacaagcaaaataaagtaaatataaactatagtcttaaatcctcatcaagtcatcatcattgaccaaaagtatatacataattacatatagccttagtgtgtaaagcacgtgatcagcaatgtaattagcactgcccatcatttgaaccatcaaacttgttaataacaaattattatgtcaagactcgagagaattcactataagatattatagttgcttattcttctaatcgaagacaacttatattcttaagaaagttttgttggctctcattcatcactttgtttagaacaattctgcaaatttcctcaaaagataaataaacgggggaataagagagtgactagtgaataaaagtcaaacatgggactaagtagatttcccttacatggaaagagataagaaggaaaaaagagagtaaaccactagatatcaattccaaatgcaagaaagactctgaatctttggcctttctcgttggtcatcatttagagatcaatataacttgctttgacctgcagtttctgaagatccatcagcattctcgctttgcttttatgcctccaagctctttgtgaacatcattgttgtggaacccatcctgtcatctccaaacccacatgctttgaagaatggcctgacaaaaatgtttctttctcatcagtacaaatgcataaggattctgcattcactaaaatcaatcccacacatattgtagatatcattagtaagctactatcaccaaattcttggtcagaatagatcacactactatatccttcgatcctaaacctagtgtgaaaggacacaacaaagaactgacaagctactaaagatgggtattagttatctcagaggaaaaagcggtacctttcatcctcgaagcagagagctgctatgtcgtaaatgtctctgcttgtgagtagcctattgtaacagtttttgatgaatgaggatctaacctttaagagaagtttaagggttttaagtaaagcaaaatcatagtggaaaataccatcagacctgacaattctgtttactatcagtttaccaatccccatcctttgtagtgaaggtaaaacctggaaaacactgagaccaaatcacatatcttagcaccaaacagaagctattacagctcgactagaccaggtaatgaagcgaattccactatataacctgttaaacttgtgctataggtaaaagtaccattagatcatggatagaagcggtcaagccataatcagaataagcacgaccgaatccaacaagctgtccattggaaggagtgagaggcaccgcattctgaaacaagtctcccagaaaactatcatccttattttgtctcccaaattctgaagtatacaaagaagaagataaactttcttcttctgaatacaaaaccgcatcatcaacatccacgtgttgtggtttgcaaaacacagatacaataacatcactgcgagagatagctctacgcagctttttcatgtcaacaatcttttcaacgttgctgtctttctcagacaaacggttgcaagaatggttacaaagtgaatacaaattcctcaattcctctagatttatgtctttcttcaacgtagagatatatataggtatcgatcgaggcaatgccgatgcagcattatcagattttctcctccttgcccacctcaactccatagatacaagagaagacttaccaacacaacccaccaaacccatttccttaagcaatcttggtcacacaataatgcaccatctaatcaggaaacatgacatgataatcaaaactcacagtaccaattaccaaaccttacagaaatctatcaaagagttatttcttgaagagaaactatagactaaacaaaatacacattctactcaaagattcaatttttacgtttacaatgaacaaaagattgcaaatttctcagaaatcgagctcaatcaacattccaagactcaaaatttcatgagaatactaactaccataagcgtaaatctctatgaattatctgattaatgataaaaatatgaaacctggggaaagttctgtcaaatttctcgaagaaaatcaaccatttttgcttctaaactcacgatttttccatcagcagaggtgaagaagaagaacaccaaaaaaatgtgtggctcaagattttttctcgtgcaagaaaaattatccggttatcgacgaaatggatccggttatcgaaaataaaaacaggtttaagcaacgataaccggaggaagaggagagaagaagaaaccaacataaccgcgagtataaaaaagcgagtacgacggcgaggacgaagactctttgcccaaagatctgactctgtactcgcttccggtcgtttctcaacttcccaagtcttcttcatcatgtaataaacctttccttttttgccctcccaattatatcatctttgcactttagttaattagtttctgattttgtctatttcatactgtaattctgtaaatagtctctcgatcttcattttgagtttgcttaaatatcatttctgggtttttgctttggttcctaaatttgtttctattttaagtgatgaagattggagctgactttgttggttttgaatggttgacttatcatgttaaagatgattcatttatgtatttgaagttgtttttgcttacattttgaggttttagtattctgattttgctgattataagtttcatctggtccattgatactcaaatttatgtttttcataaaagtttgcaacttggaaactgatcatagtgtttcaacaggtataatttgatcaaacaagctttggtttagaggggtgaagacttttaactaatcaggtattgatttcgaa

SEQ ID NO: 8468 - DNA, 3000 bp, Unknown; identical to SEQ ID NO: 8459
  misc_feature (1)..( 3000): cDNA_ID_3045591_gDNA_ID_1971811_Annot_ID_175742 3000 nt of promoter + ATG

SEQ ID NO: 8469 - DNA, 3000 bp, Unknown; identical to SEQ ID NO: 8458
  misc_feature (1)..( 3000): cDNA_ID_3091133_gDNA_ID_1971811_Annot_ID_175741 3000 nt of promoter + ATG

SEQ ID NO: 8470 - DNA, 3000 bp, Unknown
  misc_feature (1)..( 3000): cDNA_ID_1017589_gDNA_ID_1971811_Annot_ID_175731 3000 nt of promoter + ATG
caaagcttttaactttgatcctgttttgattttggtgaagcagctattttgcataccctgcaatagaagatgagagatcgcagcaagacgaatcgttcaagaagatactcaatgagtccttaacgttccatttctggaacagcgtaacttcctcactgatccctgaacctgagagccttgtggctaagttccttgatcatagttgtatcagatgctccgatgtattataaaactatttttttgataaaatcatttatatataaagattacatttttgcaactctgtctcacactcaagaggacgagccattaaagctccaatgttatctcttcttcttcctaagtcgaatcgattccttcttagaacttttgagatacccaattctctctgttctcttttcttcttcagattgatctcttccgatcatgaatccagtgatttgtctcttccttcttctccatcatcgtcaccttctcaatgtctcgttaaatcggtctgttcattggtttgtacttcctatcttcgtcaaaaccatgtcgtatcatccccacaccgagtcaatctcgacttcgatgctaattctcttacccacgagcaagcgatcactgtggtggcttcactcgcgagcgaatctggttcgatggttgctctgtgcttcttctattgggcagtgggtttcgaaaagttccgacatttcatgagattgtatctcgtaaccgctgattctttgcttgctaatgggaatttgcagaaagctcacgaggttatgcgatgcatgcttagaaatttctcggagattgggagattgaatgaggctgttggtatggttatggatatgcagaatcaggggttaacacctagctcgataactatgaattgtgttctcgaaattgccgttgagttgggtttgattgaatatgcagagaatgtgttcgacgaaatgtctgtgagaggagtagttccggattctagttcttataagcttatggttattggttgttttagagatggtaagattcaggaagctgatagatggttaactggaatgattcaaagaggatttattcctgataacgctacatgtaccttgattctcactgcattgtgtgagaatggtttagtgaatagagcgatttggtatttccgtaagatgattgatctagggtttaagccaaacttgataaattttacgtctttgattgatgggttatgcaagaagggtagtatcaagcaggcttttgaaatgttagaggaaatggttagaaatgggtggaagccaaatgtgtatacacacacggctttaattgatgggctatgtaaaagaggatggactgagaaagcgtttaggctgttcctgaaactcgttcgtagtgatacttacaaacccaatgtgcatacttatacttcgatgattggtgggtattgcaaggaagataagttgaaccgtgcagagatgttgtttagtagaatgaaagaacagggtttgtttccgaacgtgaacacgtatacaacactcatcaatggtcactgtaaagcaggaagcttcggtagagcgtacgagttgatgaatttgatgggtgatgaaggttttatgccgaatatttatacgtataatgcagctattgacagtctctgtaagaaatcaagggcacctgaggcatatgagttgctgaataaagcattttcttgtggattagaagctgatggagttacttacactattcttattcaagaacagtgtaagcaaaatgacattaaccaagctcttgcttttttctgtcggatgaataagactggttttgaagccgatatgcgcctgaacaacatactgatagctgcattttgtaggcaaaagaaaatgaaggaaagtgagaggctttttcagttggtggtgagtcttggattgattccaacgaaggagacttatacgtctatgataagctgttattgtaaagaaggcgacattgatctggctttgaaatattttcacaacatgaagaggcatggttgtgttcctgatagcttcacttatggttcactaataagcggtctctgcaagaagtccatggtagatgaagcttgtaagctttacgaagcgatgattgacagaggtttatctcctcctgaggtaactcgagtcacattagcatatgagtattgtaagaggaatgattcagccaatgcaatgattctgcttgaacctttagataagaagctgtggattagaacggttaggacacttgttagaaagttatgtagcgagaagaaagttggagtggcagctctgttctttcagaaattgttggagaaggacagtagtgctgatcgtgttaccttagctgctttcactacagcttgttctgagtctggcaaaaacaaccttgttactgatttgactgagagaatctccagaggagtaggctagtagtgattacatctcccacagttgctttgtactctctgtttgaatagcaaatccacattgtggtggatcaagaaaccgtggaatgtagccgcgttgaggcaatgacatggtatgcttttgctgcgttttttgtcgcctgttcagtagattctaaagactggagagtgggatttagactattatcaccaagtgaagggtatgaatctatctatcaagattctagacatgaacaacaaaaccaatgttcttcactctgtggtgattaagttgttactgatgtaaaagtacaaaagttttgacaaaatagaagtgggattttctctaagtggccagttttaaacagggacactaattaagtagcaaaaatgtgaactttttttttttttttattgcaaaggtttgtactttttttgaattgaatattcctccgaaagcaaccaaattatcacaggttgggcatgacagaagcagtgacatattaatacgtcgccgaaattgactctgaagccttgtggactatgtatatagataatggatcaggtgaatcttcaacttatatagctcctggttgatg

SEQ ID NO: 8471 - DNA, 3000 bp, Unknown; identical to SEQ ID NO: 8467
  misc_feature (1)..( 3000): cDNA_ID_1820469_gDNA_ID_1971811_Annot_ID_58104 3000 nt of promoter + ATG

SEQ ID NO: 8472 - DNA, 3000 bp, Unknown; identical to SEQ ID NO: 8465
  misc_feature (1)..( 3000): cDNA_ID_2176859_gDNA_ID_1971811_Annot_ID_58110 3000 nt of promoter + ATG

SEQ ID NO: 8473 - DNA, 3000 bp, Unknown; identical to SEQ ID NO: 8464
  misc_feature (1)..( 3000): cDNA_ID_1820456_gDNA_ID_1971811_Annot_ID_58111 3000 nt of promoter + ATG

SEQ ID NO: 8474 - DNA, 3000 bp, Unknown; identical to SEQ ID NO: 3405
  misc_feature (1)..( 3000): cDNA_ID_1820436_gDNA_ID_1971811_Annot_ID_58116 3000 nt of promoter + ATG

SEQ ID NO: 8475 - DNA, 3000 bp, Unknown; identical to SEQ ID NO: 3406
  misc_feature (1)..( 3000): cDNA_ID_1820728_gDNA_ID_1971811_Annot_ID_58118 3000 nt of promoter + ATG

SEQ ID NO: 8476 - DNA, 3000 bp, Unknown; identical to SEQ ID NO: 3407
  misc_feature (1)..( 3000): cDNA_ID_1820724_gDNA_ID_1971811_Annot_ID_58119 3000 nt of promoter + ATG

SEQ ID NO: 8477 - DNA, 3000 bp, Unknown
  misc_feature (1)..( 3000): cDNA_ID_1819489_gDNA_ID_1971812_Annot_ID_58125 3000 nt of promoter + ATG
tgcttgccatcaacttgtcattgctcgtgactcctttgctctttttcattaattactttttagtcttaaaggcatctccaaccataacactattttggtgctgaaataacactatatttggtgtagattcaacactaaaatattttcaatctccaaccacaacactatatatcacactaaaaataatattttctattattatattattaaaccaaatattatttttaatatttaatatttttaatttattgattaatacaaattacaatctatatatcaaaatagctttaaattttgtaagtttatattttcaatggttaattgaattttattatgtaatttcaataaatcttttgttataatttttatatcttctactgattaatatttcataatcatattatcaaaattaaaaatacataaatagttttgatattttttttttttacttacaaaattcaattaaattattagatgacaatacaaatcatatttaatatgctatacctaaataagctatattcatatgtaataattttaaagtaaaaaaaaatatatatttaattttaccgttgctacagtagcacgccaaatatagtggagtactgtacaaaataaaggaatcacactattatagtgtaatatttacagttgggttggagtgaaaaagtatattgcatcacatcaaaatacagttttaccgttacgttggagatggcctaagtatagtaattagaataagtatgctttttttgtgtgtgtgacaacaattagaataagtatgctattctttgacatttataccatctgttacccaaccaataaaaatattcgtaccactgctaaatagaacacatctttgattccaagtttcttataacgtacaacacaatttgtgtgtttgtctacacatgccttttattatccgacactaataaatattttgtagtagtactatccacattccacacttgcctttatctctatatatttgtgtagtactatcaacattccacacttgccttattctctctatatatggtgtacttaagtatatatatcaactaacacacgttgtgtaatatgtctaattttgtgtttatatgacttcaataacactacaagttaacgaaggactcaattcgtcctactccgaccacaatagttgggacccaaattagttgaaacaatatatttcatctttatcaaagtaatttttaaattccatgtagaagttattcacaaccaataataaaccacattatatgttacaaattttaacatttttatacgtatttgcgattacatgtaggttatctacaatttttggttatctatgatttctataatgtaattaggttattgatccttttttttttactgtgtcttagtcttactggatgtgaatactatagcagaattaattttaatttaaaacattttaaattgatttttggtattggaatattgtaatatagcgttgacggggacagtgaactaagcacatacgtgtgcatttttctttaaagaaatatcaatattgtgcaacgatcgaaccggattaataccacaatgttcttttacctcaaacagtagtgaattaatgttggacatgaatttagaaatcccgtttcaatagcatttgaataagctaagtagtgatcttacactaacatatattaataagctaagcactttaatatttcaggtttgatccgactttttcttgcactaacgatactgccttaattcaatctttgtttacgtatgcacatcaaaattatttaaaaaaaacattcagatgttcgacagaaaaaaaaaccccaaaagaaaaaactaaaggaggcatgatatttaccaaatgccaaacacaattgaatatccttcaaaacaagacttttcgatttcgtgtcctccaaataaaaatcaaagacttttctttagtttataaaccccaaaaagagatcaacaacgaattttcttacggccataaatgcttctacattaacaaacaaacaagatctctatgcttatattcattgactattcacatttttatataattgaaagaaataaactttatgccaaaaacagctctatcattatctcatggggtgattttgataataataaaataataaaacattccaccaaacccaatctttgtaaaactatgaaacagctgttctgttctgattcgtacttgcttcatcaacctttttgtaatcaaaagctaaatcgtataatcacaaatccctcagaaactgttcgttttttgttatcgtttacgcgtttttaatcgctaatcagttatataaaaaatcgacgaaaggtttgacgaatcgtcgtcgtcgtaaatccccaccgggtcaatcgactcgtttacttttctacggtcttctctcctcaaagagtctctctctctctctctgatatttccgcagcaataatggtatagatagagatacagaagcagacaaattattgctgcttgaaattctcttgtctgattaaaatatatatacccaagtccagaagctgtttaggttcgagaagcagagagggttcgagaagctaataagggtttcttctttttgattttaatgctaaaagggttctagattcgttgaattttacaagggttttaggggttcttagaagcttttgcttgattgtcttttatttagaaacagtggtgagtttttagtctttcactttgttcaagttcgaagctttttttggagggaattttgggcttctgattttgatcgaaacttactgatagtaagttctttgagtcctccttaactgtagtttctgtgtactgaagttattgaattgaaagtttttatcttttttggttattgaaactttcatagtttgatcaaaagagtctcttgctctgtttttggctctgtttttgtgagtgtgattgtaagctttgttgtgagtagattgaatcaaggagtgtgagagttgttaaaagtgttttcagagatg

SEQ ID NO: 8478 - DNA, 3000 bp, Unknown
  misc_feature (1)..( 3000): cDNA_ID_1819485_gDNA_ID_1971812_Annot_ID_58127 3000 nt of promoter + ATG
tgggtttagattcctttgtacaacgatcgaggtaaaccttttttttttcttgctcacatgttttttttctttacttttcagactgacactttctctgaaattcgaattttgctttttgttgaatcataacttttcttcatttgcttacgttcacacttacattaacataagataactaacctgtcaaaaagactcaaattttagcttatgttgctgtggatttagtatttaccagaaaaagctatattgtgtcaagaaaataaaaaagggacttgggattcttggctcgtgtgattcagtagtttccatgagtgtttatttttgttttgttatatacttaaattagtactatgttaactgtcttaattcttgtttagctggtcaatggtgagactgaagaaatgatttccccttttgccaacatctaatgatgatgtttggattttgcttgtgtggggataaataaaatggaattattcattgtttgaccattagatgccaaagaaaatcattgttcttttacttttttctttccttagttgcatctggattttcaatttttcaatcattgtgtcatcttgttcgttgctcaccagcttttgcatttcgtaaaatggaaaaagaaaaaaaaaacacatttttatgtaaataatctatgaggtattctcgatccatttagcaaagattagttctttgagcactatataccaaataaaatcattgttttttctcacttttttgcttaggtgcattttggttttcaactatcaatcatagtgctatcttgttcatgctctacagctcttacatttcgttaaaaagaaagaaaaaaaaacattttatgctctttttgttgttgttgataatctattagaaaagattgttcttttgagatcttctgatccatccattagcaaatgttgttctttgaccattataaaacgaaacagaatcattgttctttacttttttttttcctttgtgcatttggattttctattatcaatcataatgtctttttgtttgttgctcaccagcttttgcattatgtaattaatccactagcaaaagattgagagagtctcagctccaaatggattgtgttggttacattttgtgatatttcttacacaatttgcaataaactattgtgtagggatgcaaaccaatggatcgaatggacctcatgaatggttctacttcagctagtccatgctcatcgtatcaacatagccctcgtgcttcctacaatccaagcccttcgtcttcatcattcccgagtcctacaaacccatttggtgatgctaactcactaatcccatggctcaagaacctctcttcaaactcaccttccaagcttcccttcttccatggaaattcaataagcgctcccgtgactccgccattggctcgaagccctactcgtgatcaagtaaccatccctgactctggatggctctcaggaatgcaaactccgcagagcggaccgtcttctcctactttcagtttagtttcaagaaacccgtttttcgacaaagaggcttttaaaatgggagattgtaattcaccaatgtggactcctggacaaagtggaaactgctctccagctattcctgctggtgttgatcagaactctgatgtgccaatggctgatggaatgacggctgagtttgcgtttggttgtaacgcaatggctgcgaatggaatggtgaagccttgggaaggagaaaggatacatggagaatgtgtttcagatgatttagaacttacacttggaaactcaagaaccagatgatcatttcagagaagaatcaaagtcgtttgctatcattaagtcttcttttttgtctgtcttttttttccagtgtgatgtttaaaggtgactcagaggaaaaaaaggagaatagaaagagaaacaaaaaaagaacattttgagctctgttttcttttttttttttctttttttttttgttggcttttgactaaagttgtagttagaatctattttatatcttgaagcttctttaaaaaaaaagttatttgtggaaattcgatttgagattagtgatgttagtataatgaattttatataaaatattgaagccagattggactttagtaaccattgtgaacgtgagaaaatatcagtatctatcgctgaaaattttatatttttctatacatttaaaagataacagaaaagtggattacgttgaaagaccaaagatatgtccaagaagtcatgcgtaacccaatagaaagtcaactaacaatgaggaccacatgtgattggtcttgttaattagcgtacgtaaaacgcgacactatgacaactcgtacgtaatttcgcgaataatatgaatagtaacttcaactggactattttacaagtcaacaaattacttagtggatccaatttaaatgtccaattgttcttatttggctaaaaatgaggcccatatatacataatttttttatatgatttattttttaatgaatttatttaagagtatgtaaacagaaccctcgctctctctcgctaatttggatagatacctccgagcaagggttaagtgtaagcctcgtttgtatttgtaacgtaagttgtcatcatcgtaaagagttaatcaggttaattattttctttagtaaggaatgtgttttacccgattcttctatcattatgttatctttgttgttgaacctctcgattctcgaccttggattttgaaaattggtataattattatttgaccctttttgtttgttatgcttttctttgtgtgtgtgtgtgtgtgtttatttggttattgtaatctttgggaattcttgttttgagtggttttggaagatgtgtcgtgttagatggggatttcgttagggtttctgtgagctaaaaaagggtgtatgtttctttccctaattgattttcgtttgtaaatttattttgcagaatgataactacattttcatggataccaaaaggggttgcaaaggcc

SEQ ID NO: 8479 - DNA, 3000 bp, Unknown
  misc_feature (1)..( 3000): cDNA_ID_1819481_gDNA_ID_1971812_Annot_ID_58129 3000 nt of promoter + ATG
gtattctaagaagtatatatatcaaaattaatgcttaacccattcaagaattcattcgttttattacaattgtatattacatattttcaaaaattcaatattttgtaccaaaatctggtgagaacataaaaacagagatatatgttttctcttgacaaaaaaaaaacagagagatattgtagttttcttaatagagccagcaatggtcaaatatatcatgtgaaatagtttctaaaatacatcatccttttcttcttaattaataaaatagtcaaataaaaaatcgtctccaatctttttctctctctggatttgccaataaattggggataaccagctaccaaactcattcacacaaagtcataacagtcgtttaaagtctgatccttttcatttttctttagtgtgtgaaaagagaaatacagttatggcggagatctcgggaaacggtggtgatgctagagacggagctgtggtggtcaatctcaaggaagaagacgaacaacaacaacaacaacaagctattcataaacccttgaagaaacaagactctctcctctctatctctgtccctttcttacaaaaggttttttacttttgtctttactcctgtaactctcaatctccaaaacctctttagttttgaagaagaaaaaatatgtcttacaaatctttagttttgctctgttttttaaattgtcaaattgctctgttttcagttgatggcggaggttttgggaacatacttcttgatattcgccggttgtgccgcggtggctgtaaacacacaacatgacaaagccgtgactcttccagggatcgccatcgtttggggacttaccgtcatggtccttgtttactctctcggtcacatctccggtgctcatttcaatccggccgtcacaatcgcattcgcttcttgcggccgtttccctcttaaacaggtctatactctatatccctatataaattataaactataaggattgatcaagtgttgcatttaagtatgatttttgagtttgataaaccaacattagacattattgtctttgtgtttgataggtttagtttaaccgtcgtttgattctttttgcacgaaactataggttataataaaagttataatgttttttaataattctttattggattttaaagaagttgcatcttttaagtttttcttgtgttgtatagtgtatactgtatacaacctttaaatcatttatatctttcactaatgactttattttttattagaattctttcagtaatgaatttgtacgatagacgtatttatgagcatatgcgagtcatgagtgattgagtgtagataatttcaaatgtatgcgtctacgactctacggtgatatatgagtatagccggaaaactagggggaatttgttttttgtttaactatttgttaaaaagttaaatgtatttttgttagtttccaaattgaaaattttaaaagtgtgtgtttaccatgtaacatttgtccgtatatataacttctccacacaaacaaagtcaaacaaaattgtgttatataaacgtcaaaatcttcacaatcttccaaaattgggtccctagttaatatgatatcgcatatcaaataattggtcactaaattttatttcttatatttttgtaggttccggcttatgtgatatcacaagtgatcggatcaacgctagcggcggcgactttacggctcttgttcggacttgatcaagatgtttgtagtgggaaacacgatgtgttcgtcggaacattaccatctggatcgaatttgcagtcgtttgtgatcgagtttatcattactttctacctaatgttcgttatttctggcgttgccaccgataatagagcggttagtattcgaaatcttcttatgttgcacgaaatgatataataatcaaatttgatggatatatgttagggattctaactattgtaagcaatgttcgttttaacttcagctaatgtgttatcctttttatactctagatcggagaacttgctggactagcagtaggatcaacagtgctacttaacgtgataattgccgggtaatatactattattaattactatcattttcttttttatatagttttctttatcgacagaaaatttgaaaatgatatatggttatgtttatctttatattaggccggtatcgggagcatcgatgaatccaggacgaagtttaggacctgcaatggtctacagttgctacagaggactttggatctacatagtttctccaattgttggtgcagtttcgggtgcgtgggtttataacatggttcgatatactgataagccattacgagaaataactaaaagcggttcttttttaaagacagtgcgaaacggtagctctcgttaagaaaaagaaaaacatgactatgttgtactagtcatcggaggttaagttgtatcactaaagaagtaactggaatattttgtattaaagtgtttttaaatttggattaccgcaaatggataaacatttatggtatgtgacgaatatgtaactgatctataacgagtttggccatatctaattacgtgctatatggttgtattaactgctatattatatctttctctttttatgcgaaagataatgtcgtcatatttatggtgctactgtatcgttacacctttgaaatcattaatgcaattttggatagaaagatccttagtttacgcaaaaattgtcaaaagttgcaatttagaactcgtcaaacaaagcacaaaagccggtgtcgcaaacattgccaagtgtgcaatactttgtccaagagcttaaaatccggccacgtgtcattttgtcgccattgttcgccacatcatcaatccgaatgacgtgtcacgcatggaatcattcacgtcatgctttcctcatgcaaacatcactcctctcttataagaccaaaagcaaaacactcgaaccaaactaaagaacaagaaaaaagggtgttgttacg

SEQ ID NO: 8480 - DNA, 3000 bp, Unknown
  misc_feature (1)..( 3000): cDNA_ID_1819477_gDNA_ID_1971812_Annot_ID_58130 3000 nt of promoter + ATG
cggagaacttgctggactagcagtaggatcaacagtgctacttaacgtgataattgccgggtaatatactattattaattactatcattttcttttttatatagttttctttatcgacagaaaatttgaaaatgatatatggttatgtttatctttatattaggccggtatcgggagcatcgatgaatccaggacgaagtttaggacctgcaatggtctacagttgctacagaggactttggatctacatagtttctccaattgttggtgcagtttcgggtgcgtgggtttataacatggttcgatatactgataagccattacgagaaataactaaaagcggttcttttttaaagacagtgcgaaacggtagctctcgttaagaaaaagaaaaacatgactatgttgtactagtcatcggaggttaagttgtatcactaaagaagtaactggaatattttgtattaaagtgtttttaaatttggattaccgcaaatggataaacatttatggtatgtgacgaatatgtaactgatctataacgagtttggccatatctaattacgtgctatatggttgtattaactgctatattatatctttctctttttatgcgaaagataatgtcgtcatatttatggtgctactgtatcgttacacctttgaaatcattaatgcaattttggatagaaagatccttagtttacgcaaaaattgtcaaaagttgcaatttagaactcgtcaaacaaagcacaaaagccggtgtcgcaaacattgccaagtgtgcaatactttgtccaagagcttaaaatccggccacgtgtcattttgtcgccattgttcgccacatcatcaatccgaatgacgtgtcacgcatggaatcattcacgtcatgctttcctcatgcaaacatcactcctctcttataagaccaaaagcaaaacactcgaaccaaactaaagaacaagaaaaaagggtgttgttacgatggcatcgagtgataaggttccggtggcgtgtccggcaagcagtggagatggaaaggagccaatgggaaatccgacgaaaaccactacggcgatgctagagaaaggaacggctatgatgcaatcgatgaaaccgatcaggcaaatgagcctccacgtgtgttcattcgcttgctatagccatgatcccggtcgtcagatcgaagttcatatttacggccaccgtgtaaaccaggatttcctccaatgtgctgtctacgattccaattcctctaaggctcatctcataggtaaatatacttcgacttcgatagtttgtttacatttttttgagttaagtttcattagctaccaattaaaaaacaatgcaatatatggattgatcacgtctcttatatactattccatgtcctctaatgtgtgttggatcctatgaggttgcgttgtgtttgtttattcgtttcacacattcacaattttatatgaaaataaaataaaactaaacttcatttttttcgtatgcactattaattttaggtttatataggcggtaaattaatggccatgcatattttttatgcgtataaatgttttctaagtttgagcattgaagctttttgctagagactaatgacttctgaattttgtttgttattgtattgaatctatagggatcgaatatatagtgtcggaaaagttattcgaaagtctctcaccggaggaacaaaagctttggcactcgcatgattacgaggttcatgattttcgatacattgtccgatatgtttattatttatctgaaaaacgaaaatgatcgaatgagagttgtttttagatccaaatggctcttctagtaactccaagggtccctgagctcgttgcgaaaccggagcttaaaaatcttgccaaatcttacgggaaattttggtgtacatggcagattgaccgaggtaataaactcatcttaatatgattttttttatatatttgatatgattatagatgatatgagtttagtaacttaggttttttgttgtcttgttataggggataaattaccactaggtgtaccatcactaatggtatcgccacaagacgtgaatctcgggagaatcaaaccggagttggtgaaaaagagagatgaagaacatggaatctcgactgaatcgttgaagccgtcaagagatgggatctgtggaccagagaagaagaacctggttgctgattattgggttaggtttaggaaaggctttgcgcttgatgttgttgaaacagatatgaagagaacagctcccttcccctaacttttgtgtgtgctttttttctcagacattaattatataagttttcgtaagcttacactagatgggttgtgtacttattatgttatggagtatgataatgtcataaacatgagaattttttcgctctttgttactcattcactcactctaaataggttgtgtaccctttttttttctggtttaagcaaaagagaaagacatgcatctagaagcccaaaaactctttgtgacaactgacaatgtagccttttaccttttgcatatcagtttcctaaaaagccttttcttaatatagaggtccattgcactccaaaggtgtgcgttcatgagcccatgtagttgataacttcatcgtatgtttatgtttactacatacgtcgtcgtcaagatggaattcacatctgattaaattcatttcctttgaaaaaaagattccttccaacatggctacaatccaacaccttcacttagaaaatttactactgaccaaaaccaagagcattttggtcgtattttaatatccttagtcgttgtctatgaataattaatatgacttacagctcgttggtcgtattttcatatctttattcgttgtctattaataattactatgacttattaacgtattccctgattagtacaactaatataaaatgttaatcttcttctcataatattcttgaagcaaattagcactgaccgatcgatcc

SEQ ID NO: 8481 - DNA, 3000 bp, Unknown
  misc_feature (1)..( 3000): cDNA_ID_1819463_gDNA_ID_1971812_Annot_ID_58134 3000 nt of promoter + ATG
ctttacattaaaagtttttagtttaactaaaatataagcctacctgcggtatactgcaggttaatatctagattatagggcttattggatctaaagacgggtcatcaaacatttcctaaactgaagcaaaatatactgaatattcaaatatctatctgttaccaaattataaacaaataagttcgtaaaacaatttaatattttatatacgaaatcaattaaatcttaatcacataaaaattagcaaaaaaaaaagtattcaacaattaaaaaattatcaaatctctgtgttatataagttttgatactatattcgaataaagtataatataccttttcaatttgtattctttaactaatttaagctaactaatatatttgttttttggtggatttgggtaaaagtgtattcgggtcatatggtacattctcctattaaataaatatggtgtactcctatgttattagctaaaatgtttagattataattcagagtcatatcattaataaaattaatattaataaaataaattattttttggcaagacggatttgaagggacgggtttttgaatcaacattaataaaaaaagtaaaatataattaatccaccatttcaatacgggttaaatctttaatttattattttttaagaccactaatattaaacatatcaaatcatcctaatttagaaaagattatataaaaccaaaaatgttatgtggtatgtataatgttactatatataaaattaaactataaaatttaaatatattagagaatgatacaatttgcaaaatttttatatataaaaaataattcttcaattttaaaaattactactttgaaaaaaaaatcacgggacgggtaaagaaattacagaacgggttttattttggaattgggttatatgatggatgtatttgaatcaatatttataaaatattaaaatattattaatatgatgttttaataggggttaaaactttagttttttaacaattgtctcatggattcgtggtataacgatacttaataacaattataaactgtaaaatatcaatattttataaaaataaaatttgcaagttttaatatatattacttaaaaaaaataaatcgtcccgcggtatagcgcgagttaaaatctagtactcaatatttagcccagcgtgaccattttcgtttctaacgatgtatgttgtaatgacacgaaattttgtattaataatgatgtgttgtgtttttatgtgatcaaagcaaaaaaaaaagtactataaatacatcatcgctcatacatttaattaatatagctcaatgttgaaacagttcggccttaaataagatatagttcagtgttggaacaattcggtgaaactgaaattcgtgcatatcctactagctagatataattaaattgaagagggacaatgaaaatggacaaagaggtagacagatagagtcgaatgaattagacagaggacgaattggggtaatcatagatgcatagttttgtgctaaagacaatgacttagccaaaattttgggtacctttggacaagtgtggttcctactcttagtggtccatttgatcatttccagagaaaattaacttctatgtacacatggttttcgcaagcatatttttactctccaataatttcttgatattttgttgggttccatgtctcttatatttttttgctaaattagtcataattttgaaaccatctctttatctatatcacaaggaaaaaatcccaaaaaaatattcatccactttttatttggctatttagtacttaaagtgttttttgttggaataaaaatatttcatttaagtagatttagtctaaaagtatttcatttgaattgttagacaattcgaatgtgcgacttaacagccgttaacggcattatacgtttatactctccttttcctaaagctttttttctttagtcgtaacatgcatgaatcatagcgattgtcagggactcaaggcaacttggattatatccgaatgagtttagatgatattaagacagacatttgattgggtacgataggtggaaatagagataaggttttccttttcttgattagttcaatatcaatttgtatgggaccttcttaattacatcgacgttgatgttgcctaagaggttttttcttggtcgtgctaattatttttctaattatctattcaaccttttttcataaacttaccgacatggaaaccaatttgctaataatcgtgattaagagaagttagaaaagtttgagatagtaaatgaaattttaactaaataatcaagtactaataactcaatcatatacataaagaaagaaaagttatgctatttgagtacttgacaatcaaaaatcaagtatggcagaactttcaataactcgtttctctctgttgggctagatttgtctaaaaaggcccattaatatattcacgttctagactccaccactaggcactaacccattacaaactgacagtgacactaaattcattcggttattgatcggttctgtaattggctaaaccaattttcctcggtttactaagaaatccctaaactcgattcttctctctcaaactcaatcgatcatcgtgcaatctctctctagcaattattactcgattgattctgtgaaactctgaatgtgtttttgttcttgctgcatcgtattacttccaaatctgctctgttttgagtaaaggtatcacctttatcccttatcttcaacaactccagtttcaaaaatttaccatttcataaaattcaaattcagttcttcgttgtgttactggaagtgaaagtaatggcgctctgtaacttgaatccaactcaagggatattcccattgcaaggcttatcagtgagttactttattctctccatcaaatatttcagtcttgagataagattgtatatatgtattcagatgtgaattcttcaaattgcagaaatctcaagaatttatatg

SEQ ID NO: 8482 - DNA, 3000 bp, Unknown
  misc_feature (1)..( 3000): cDNA_ID_1819460_gDNA_ID_1971812_Annot_ID_58135 3000 nt of promoter + ATG
gtgccaagggatgagacagttgggtttgtgattgatggcaaattgtaaacaaatgatgaattgttagggccagttgcataatcttgatcatgtgtcctgtgtcctgggaagtaatcgaacagctcagattgattctggttgggttcaaattgacgatgaagaatgatgttgaggtatggatgcatgtattaatggaggtagatggcaaaaataacattaaatggcaagaggaaacactatgtcatgaagatgaacatcatgattgacataatgtggtagttggaagttcataaattctgtgtctttttgttcatgcatcttcttcttcttcagtgacacagtaagaaaataatcactttgggaataaattgtgaagcatttgtccacaaagattctacctttctgtactaagtagccacccaaaggatatataagacgattttaaaatagatttggtaagtaatgatgtagagtggaccagtagaaaaacttataaatgaatttgttgttataatgtgactttgaggtttggagtcagtgactcataaatttgaagcatgatcttgtggggttttgtgacagagcaaataagttaaagcagccatgctggattctttttcaaataaagaaacatttcaaaaaatagaacagaaaaaatgatcatatctactacactaccaaccacatgcaaggaattatgaacactataaagcatgagtgtcattgaacatttgacaattcgtttgttttctcgagaataaaagataactttataaatggagattcattttaccatcttcttgatgaattcacaaattagaaattacaatcaagggtaaaaaacttgggggtaacttctacatatacatgtgtgtggttgtgtgtgttcataagaatgaaatcaactatcttcagagaaatatcttttgactctaacccgctcaccattgaagtagatgtatttgtattcagagaggtaccttctaaggatcagttttcgattttcttcttggttgagttccctgaaggctcgtgccactctcctcgcagagtcttcgtctgggctcaccttcagctcttccatgtctgcaaagacctaaaagagaacaaccgaaagaaaatgtatcttagaaccacgtcatacttcttgcagagaggtgtagagtatcttgaggagtatcttaagtgtaagatcaagataaattctcgagggaagaaagaaccttgttttacctcgataaccttatcgtgaaggtcatggtgagcatacaacgctatcatcctagcgaacaagcgtcttgggatggatcgtgtatgtgtgtgcagaatcatgttccataaggactctgcctcatcagccctttcgtccatatcaaatgccaataagaggatatcgtatgttcccattgtagcaccttgccctttgcttaacatccacttagccaactgagtttgtcactaaaccaatcaactcaggacaccatatttagcaaaactttacacttgacataggaagccgtattacttacttgaatcacacgatgccactgacttctctttcttaagatttgcaacgccttagctgcagcaataatgggaaattcaacctcccaagctacccatttattcaaagctccataaacagcctctttttcatttgggagtccagagagctacatatcaacaaggactactttatcatcgtttcacttatgaaaacatatgttttaacagaacttttcctcacttaccattcgaacaagattaagtgctttctgtccagacccagcagagtcattcttcttccacaagtgatgctctttcttccccactttctttatttccttgctacaatatcaacattcaacacaaaaacttactggtgaatcaaacagaaaaaaacaatgtcaaatgattactcaagaaagatatgcaaccaaacataagttaatttacatatattatatatataacttgaaatgtaacaaacaacaaacctgttcacagtggcaacataacctctgtccaatttcccagcttccttctctgagaacttcaaaacaatatcaccattatgacatgttgtaattcatttcacaagctatatagccattaaacagaaagtaactacaaaaacattttttttttacctttgatctgatgcaaaagccaaaccttttcgtcttcaacgaggagtaacttccgcaacgtggagattgaagcaaagaaaagcatataaattcttgagatttctgcaatttgaagaattcacatctgaatacatatatacaatcttatctcaagactgaaatatttgatggagagaataaagtaactcactgataagccttgcaatgggaatatcccttgagttggattcaagttacagagcgccattactttcacttccagtaacacaacgaagaactgaatttgaattttatgaaatggtaaatttttgaaactggagttgttgaagataagggataaaggtgatacctttactcaaaacagagcagatttggaagtaatacgatgcagcaagaacaaaaacacattcagagtttcacagaatcaatcgagtaataattgctagagagagattgcacgatgatcgattgagtttgagagagaagaatcgagtttagggatttcttagtaaaccgaggaaaattggtttagccaattacagaaccgatcaataaccgaatgaatttagtgtcactgtcagtttgtaatgggttagtgcctagtggtggagtctagaacgtgaatatattaatgggcctttttagacaaatctagcccaacagagagaaacgagttattgaaagttctgccatacttgatttttgattgtcaagtactcaaatagcataacttttctttctttatgtatatgattgagttattagtacttgattatttagttaaaatttcatttactatctcaaacttttctaacttctcttaatcacgattattagcaaattggtttcc

SEQ ID NO: 8483 - DNA, 3000 bp, Unknown
  misc_feature (1)..( 3000): cDNA_ID_1819448_gDNA_ID_1971812_Annot_ID_58138 3000 nt of promoter + ATG
aatagaagagacgccttttgtcatgattagtagcctgccgttccattatctacaaacattagacaaatgagtaactagttgttgcagcgcaaacaattagacaaacaaaagagaagaacttgtatacacactgtatccgttgctctgtaaaaccactgaactcggaagtagctttctccatctgttgtcttaaaaaactctactatctggccaacatgggtttcttcttcttcaccctgtaccatattggagatgaacatgtaattagctatatatgttcttctcacaaacgcattacattctagaaaatccaaggctcttgaatgaaaaagttgtttggtccaatgaaaaagtgaaaagcagcgcagggatactgagctaaaaaataccatattcatgataagcatggtttacctttatgtaggcaaagtctccaaggctaaaggtgtgaccgtcgacttttgcttgcgaataatggcattctacatttgcaacaatcttgtcttcgtcatcccttcaaaaacattgctcaggatattgaatatacagtaaaacaaaccacatatgaaggaagagaatattgtagaaaaaaaacagtgagttgacaaagaaccagtacttactctgattgttggcctctactcttagatttgcgttcctgaaaattagtgaaattcataatcagaaatgaagcggatattttgagagtgaaaagaaagatatgaggtccttttatgttggattacaaatatatacttaagactatgcaatctctactgctcaaactaacttaacaattttttaagctaaagcagtcaagtgcaaagaaattaatcaactaccttaagttcatatctccagcgccatctttcttgagcctcctcgcaagaaagtggctctccaatgaaaaaacagatactacgtttgttctgctcttggacagcagtccgggttacccgtttaccctttctcttggttgatttcgttggattattcagatccagtgaaacgattccctcattacccccagaggagagggcagatccactttcgacttgtgtcaaattatctccatttaaatattcaatagaagacggttcatcgctgtcagagagatagatcacagtagaatttacatgcatttcccgagtttttcccttatcagcagcaccacaagcactagttttaccctgaagtaaagactccattgcatcttgctccactaacgcagtcgtcatagttaatccattactagtatcatttttgctaattttcaaagagctagtgtgaatatcatccgtatttaggccagaagatctgggttttcctaacgttctgtccctacaaccatttacagttttcttgatgcaacccgaaggaaaaactaatagctcttgcttggatgaaactaggccatcaccttcacatttcttcatagcctcacaacagtgatccttcttactaatttgcaccagcctctcagttcccctcacctgttctgcaccacataatgccgggccacaatcttttcttctgttcaaagtttctgtgttgccagtttccacagttccagatagccttgtagatcttcgaaatgagcaagatgccagagacatcccttttcctttagacttgcctagattttcttctccctcattctccgttcccttcatgaatctttgagatctcctcattcgtttattgcttccgagactctgtttagaactattgatgcttgaatataataatgtatcactatcaactttcctcttggctggatcttgcaatcttgatctaccttcagcaacgttgttcttatattggcactcggaaattatttccatctccaggctcttggcaattacagctatatctctgcatcaattttaacataaaacagtatttgagaactaaaatccccatttcaaggatgatttcccaagcaaaaaatacaataacaaatgctgtgaagcttttttacttacttgaatgtcagtccctcagaatctgagctttccttctgcatcaacccaaaaaaaagaacgacgattatactttccaatctctaactaagctgcattgcattgcgtggctactaacaagaacaaacaaaaaaattggcgagtaaccttatcgagagcactattactctttctcttcctcgacccaaactttccagtcaccggaaccgagcatacactgtcaaaatttccatccaccgccctaaatctcggcgacctccgaagctgacaaccgttcgtcaaagtaagcagcggctgtgacttaccacgagagaacttcctctgcgaaactccccctttggtaaccggaaccgagcatacattgtcgaaatttgcatgcagggccctaaatctcggcgacctccgaagctgacaaccgttcgtcaacataagcagcggctgtgacttaccacgagatgacttcctctgcgaaactctcccttctcctccgttctcttcaggcgaattacaattaagcgtcgtggatctcctcaaactcatctctccgttgtcggggagctttatgagttctctagtagaggacggagcagcttcttcaggattgggacaccagaggacaagagagagacattccggttcagatctagaagaagaatggagatccaatggagcttgagcctcttctgactcacatttggccggcgataacatcagagaatataaagaatctaaaagggatccaaagtagccaatagggaaacaaaactgaaaaagggaagaaatcaagtgagtgtgtattttttgactattgtactttttttgctaacagactgtcacgtgtcacacgtgatcttcttgcactctctgttcttcgaaatcaattaattgcaattagtacataataatagtgttacaactaaattaattattttactaaactattccgtcgttggtttatttcccgatcagaagtaaatattgatcgctgcagaatcttaaactctgcttctctctaatg

SEQ ID NO: 8484 - DNA, 3000 bp, Unknown
  misc_feature (1)..( 3000): cDNA_ID_1819444_gDNA_ID_1971812_Annot_ID_58139 3000 nt of promoter + ATG
ctaaaattacattttgggctcagaaagaatttttgtttccgtattgggttacaatgctttattcactgagaatcaaagaatgtgtctgtttatttcttttgatgctacaaaaccaatgaattgagttatgaaggctatattagtggatctctctgtctgctacttattaccaaacaaatgaagaaagaatcatagtcttgaagaaacagagtttgtaagaattctctttagttcctttctcaatatcttcccagttggagattttggtatagagttgaccatcaccactttcctcaccttcctgtagggtgcaacctagaacacgtaatgtataataatgtattacattaatgatcagtgttttgaaatgggaaaagccattttgaattagtgggaacctaacctgagaagctacatagcttattacatcttcttctgaaagtgttgtttcttgtctccggacaacgaatgctaccggaatctctccacattcttcatttggggcactgaaatggaaagtttggatactttcagtagagtaacagactctgtcgaattctccaaaactggatttgcagtatctttcacttattaaactagtttagtaaatgatcaagatttgttttttcgaacttacgctgttactgcagcgtcgataatcaagggatgtgaaacaagaacagcctccaaatctgctggagcgatctgcaaaaaccataaatgcaaagaattaatatttcctaatttagagttggctgaaagagaaactgctgttcctttacctgaaagcctttgtactttataatctccttaatacggtcaacaataaacaagtaaccatcttcatcaaaataagcaatatccccagtacgtagccaactatcttcaactatactcatctgagttgcttttgggttattcaagtatcctgacagacaaatgaacggtgttcagattctctccaagtaaaattaaaactgttccataaaaatatgtagcacaaaatcaagaacaagataataagcctaatctatcaacacaagcaccaaataagccccacgaaagttggaagatccaatctatatttacatttattaggatgcaagtgtttctcagtgatttgaaccattgacaaaagactttattcatgaactgagaaggaaaatctcaactattttggtaaagaagtacagtaggaagaatctatctacctttcatgacaccgggaccttgtatccagagctctcctcggtttcctggtggaaggaaagaaccagagctccaatctactaccttggcttgcatattaggagccagtagtcccacagaagaatacctactaagcttttccgagttgaagccccgtgttccaactgcagttgattcagtcattccatatccctgcaacaaaatgtgatccattttatacacactttcagctaaatgtaaagaaaataatagtgtgagtcaaaaagtcatggcctcgttaaatcaattttagttgtttcttttgggaagagatgtcaaatttttctaaaaaatgtagattctacttcttattgagtttatgaatgaataacatttaattcagttttctaaaacgacatccaaaagtaaaattcagagacctgaatcaaatcgacatgaggaagagtctgaaggaaatcttcaatgaacttcctactcaaaggagctgctccagaagaaacttgcttcaaacttttaaacacttcaccacaaactccttttgccttctttgtcaatgccatcaacataggtggaacaaccgggaaatgagtgatcttaaacctttcaattacattaacaacatcagaagcatcaaacctcttcataacaacaatagttgatcccagagacaacaatcccatcacaaagagtgataacccgtagatatggcacaaaggcaaagctgctagataaacattactcgatcccggatattcgtactgagaagcttcaaacctcacaaaaagctccattgatgctatcaaattcctatgagttaacaaaactcctttactagctccagttgttccagatgaatacataattgcagctacatcgtcttgcttaatcaacggttttggtacaaacccaaaactttctttcataatggagtaaaacttcgggttttcgatacgaatcgaatcaaaatcgtaactttcagatacactaatcacactaacccccaaagaactcagcttctcaacgttttcagtagaagtaaaagctaatccaacactacactcactaacttgcttcttaatctctcctaaactactcgaaggattcatggtagtaacaatagcaccaagcgagatcaaagagaggaaaatcatcggaaaatagacggaattaggcaagacgagtgatacaacgtcaccttgacgaacacctaaaacgtgatagatcccagccgccattgattgaaccataatctgtagctcagtgtgagatattgagaacccggttaaggaatcgatgagcgctgtatcgccgtggtgtttgtgtgagaaaagagcggagacggcgtcgagatttgggtcgacggggaggtgtagggaagggaatttgctggtgtagattcctgttttagaagagaaccaaaagggagggttttggtgagacgtttgggttttaggatttggcggtatgtgaagatgtgtcgccgccattagagagaagcagagtttaagattctgcagcgatcaatatttacttctgatcgggaaataaaccaacgacggaatagtttagtaaaataattaatttagttgtaacactattattatgtactaattgcaattaattgatttcgaagaacagagagtgcaagaagatcacgtgtgacacgtgacagtctgttagcaaaaaaagtacaatagtcaaaaaatacacactcacttgatttcttccctttttcagttttgtttccctattggctactttggatcccttttagattctttatattctctg

SEQ ID NO: 8485 - DNA, 3000 bp, Unknown
  misc_feature (1)..( 3000): cDNA_ID_1819440_gDNA_ID_1971812_Annot_ID_58141 3000 nt of promoter + ATG
caggaatactattgggcctgaaacccaaactcctacccagcccacaaaagctacagacacagtttaatctctctgttcttcttcacacgacgaggatgaagaaacaaaatttccgctgatcttatattatctcaccgttaataattatccaagtcttgaactttgacagagcttgtaattcgaaacttttcaaaatggttactttgtgttgtgttgtgtgaactcttaaaataaagaataaatgaatgttattttatttttagtcgtcttcaagttttggtctgcgatcgtgaaatttacgcagagagagatcagaatcgaagaaaacattgcaatataaaagagtcaccttcgagttcgtgtctcactccgataaagcaatgagtctattcgggcttggaaggtgaattactgattcctctccgtaatttgtccgaaaaaagagagtattttttctagagatttcgagattgtttgttatctcagatctttcgaatagttattcctgattgggtattaatatttcaatatgttgatttttgtggatttgctgagtaatggttgtgaatgaagatttgattgttcaatttttctattattcagaacttgatggaaccaatgttaacttactaccattgtcaatgtgtcctgaatgattcttgtcaaaatcttgttcaagttaatgtagaatttgcttatctgattctatgaatttgcattgtttatgttcatctgattagaaatcaaaagactttccgtcctaagaagagcgcaccatcaggaaccaaggtttgtagattcgattatttgacttgtttcttttacaaatgtgattcatgtttttgtagccttataaagcgtgttgttttgatctttttagggagcagagcttcgaaagcatatagatgcaactttaggtagtggtaatcttagagaagccgtcaaacttcctccgggagaggatttaaacgaatggcttgcagttaacagtgagcttataactacaccatcactttttcctcatggtttcactctgttgattaagttgttgtttttcttcagctgtggatttcttcaatcaggtgaatctgttatttggtacacttaccgagttttgcaccccggagaactgttctacaatgactgctggtcccaagtacagatttctcttcttcattatataagtaattttggtgctcatgattgatatagtaatttgatcactgttttctcttaagatcttgaatacaaaaaactttgaaactgctggagcaatatgggcatttgtaaagtggaaaagagtctttgtttttgagtgacaattatctcgatgatcaactactgactcatatgtaactattccattggtgaaatgcgtcggttgcaacgtttcaggtacgaatacagatgggccgatggtgtacaaatcaagaagcctattgaggtttcagctccaaagtatgttgaatacttgatggattggatcgagacacaactcgatgatgagaccatatttcctcaaaaacttggtaaaataaccttactctggcatatctttgatgattatggataaaaagacattggtctcaatccatggtaaattctgacaggtgcagcttttcctccaaacttcaaggaagtggtgaagacaatctttaaacgactattccgagtttacgcacacatataccactctcatttccagaaaatagttagtctcaaagaggaagctcatctcaacacttgcttcaaacacttcatcctcttcactcatgtatctataaaccctcttttactcatcattaatcttccattctagtcttttatcagtcactgagtttgttgatttttgatttttattggtctggttttgttttgcaggagtttgttctcattgacaagaaagaactcgctcctcttcaagaactcatagaatctatcattgcaccttactaaaccaaacaaaacccaaatcctctgtccaattacaagacttttttttttcaatcacattcatggtaataagttttaaccccaactgtaaaaaattgctgtttctgtttgtaaaaaaagaatatgcaatacactgctgaaccttggattttatttaaatggttacattcgaaatttcactggattacatatatgactcgtttacataattgctatgaagtttgttgatcaataactttgaagttttggctttcgttgaaaaggaaaagactaactttttgtatgtttgcataaatgttgtggtgttgtactgttgtcttacttaaaaactaagaataaagacgtcagccaattattgtggttcacgtgtatgtggttaacacgtcagctattttgttgatacggcgtcgttttcttctctgcctaacggaataagatggccgtcagcgaccttctcaatggattgcttcgtcacctaacgacaaaataccaaaatgcggttttgaactgatttggcatgactttaattaattaatgactcctccattaaattaaattaaaacattattcatcatttatgtttgtttaactgactaaacttacgtctttggcgtgattagttattttaatttatttatttattttgagtatacacagatatttctctctctgctgttttatttttttatagaaaatattaatttagctttggatttttttctttttttttctctgtcaaagttgaattgctttttctcttgtttttcgtcgaagtggaaaatttgattttattttttccggaattttgaaaatctgtgagctcataaatcttcgctaatcgcagagacgaatctgcgaaaattccaacaccagattccggcgccggagcgccgatgaacaatcaggtcgtttagtaaaattcgatgaatctcccgcggaaataattagattcgatttcgatttccgtggggaagttttgtgccatttgatttgttttcgttcgtccccgttggagattttttgtaatttctggggacagaaacaatg

SEQ ID NO: 8486 - DNA, 3000 bp, Unknown; identical to SEQ ID NO: 8484
  misc_feature (1)..( 3000): cDNA_ID_2176935_gDNA_ID_1971812_Annot_ID_175794 3000 nt of promoter + ATG

SEQ ID NO: 8487 - DNA, 3000 bp, Unknown
  misc_feature (1)..( 3000): cDNA_ID_2991765_gDNA_ID_1971812_Annot_ID_175792 3000 nt of promoter + ATG
tagtacataataatagtgttacaactaaattaattattttactaaactattccgtcgttggtttatttcccgatcagaagtaaatattgatcgctgcagaatcttaaactctgcttctctctaatggcggcgacacatcttcacataccgccaaatcctaaaacccaaacgtctcaccaaaaccctcccttttggttctcttctaaaacaggaatctacaccagcaaattcccttccctacacctccccgtcgacccaaatctcgacgccgtctccgctcttttctcacacaaacaccacggcgatacagcgctcatcgattccttaaccgggttctcaatatctcacactgagctacagattatggttcaatcaatggcggctgggatctatcacgttttaggtgttcgtcaaggtgacgttgtatcactcgtcttgcctaattccgtctattttccgatgattttcctctctttgatctcgcttggtgctattgttactaccatgaatccttcgagtagtttaggagagattaagaagcaagttagtgagtgtagtgttggattagcttttacttctactgaaaacgttgagaagctgagttctttgggggttagtgtgattagtgtatctgaaagttacgattttgattcgattcgtatcgaaaacccgaagttttactccattatgaaagaaagttttgggtttgtaccaaaaccgttgattaagcaagacgatgtagctgcaattatgtattcatctggaacaactggagctagtaaaggagttttgttaactcataggaatttgatagcatcaatggagctttttgtgaggtttgaagcttctcagtacgaatatccgggatcgagtaatgtttatctagcagctttgcctttgtgccatatctacgggttatcactctttgtgatgggattgttgtctctgggatcaactattgttgttatgaagaggtttgatgcttctgatgttgttaatgtaattgaaaggtttaagatcactcatttcccggttgttccacctatgttgatggcattgacaaagaaggcaaaaggagtttgtggtgaagtgtttaaaagtttgaagcaagtttcttctggagcagctcctttgagtaggaagttcattgaagatttccttcagactcttcctcatgtcgatttgattcaggtctctgaattttacttttggatgtcgttttagaaaactgaattaaatgttattcattcataaactcaataagaagtagaatctacattttttagaaaaatttgacatctcttcccaaaagaaacaactaaaattgatttaacgaggccatgactttttgactcacactattattttctttacatttagctgaaagtgtgtataaaatggatcacattttgttgcagggatatggaatgactgaatcaactgcagttggaacacggggcttcaactcggaaaagcttagtaggtattcttctgtgggactactggctcctaatatgcaagccaaggtagtagattggagctctggttctttccttccaccaggaaaccgaggagagctctggatacaaggtcccggtgtcatgaaaggtagatagattcttcctactgtacttctttaccaaaatagttgagattttccttctcagttcatgaataaagtcttttgtcaatggttcaaatcactgagaaacacttgcatcctaataaatgtaaatatagattggatcttccaactttcgtggggcttatttggtgcttgtgttgatagattaggcttattatcttgttcttgattttgtgctacatatttttatggaacagttttaattttacttggagagaatctgaacaccgttcatttgtctgtcaggatacttgaataacccaaaagcaactcagatgagtatagttgaagatagttggctacgtactggggatattgcttattttgatgaagatggttacttgtttattgttgaccgtattaaggagattataaagtacaaaggctttcaggtaaaggaacagcagtttctctttcagccaactctaaattaggaaatattaattctttgcatttatggtttttgcagatcgctccagcagatttggaggctgttcttgtttcacatcccttgattatcgacgctgcagtaacagcgtaagttcgaaaaaacaaatcttgatcatttactaaactagtttaataagtgaaagatactgcaaatccagttttggagaattcgacagagtctgttactctactgaaagtatccaaactttccatttcagtgccccaaatgaagaatgtggagagattccggtagcattcgttgtccggagacaagaaacaacactttcagaagaagatgtaataagctatgtagcttctcaggttaggttcccactaattcaaaatggcttttcccatttcaaaacactgatcattaatgtaatacattattatacattacgtgttctaggttgcaccctacaggaaggtgaggaaagtggtgatggtcaactctataccaaaatctccaactgggaagatattgagaaaggaactaaagagaattcttacaaactctgtttcttcaagactatgattctttcttcatttgtttggtaataagtagcagacagagagatccactaatatagccttcataactcaattcattggttttgtagcatcaaaagaaataaacagacacattctttgattctcagtgaataaagcattgtaacccaatacggaaacaaaaattctttctgagcccaaaatgtaattttagccttagtattttatttacataaaagtccttttaatcgttggctattgcatttatcgcccaatacttgtctttgagctcaagaaatatagtttactaaaaggctgggtttttctggatttcttactcccaaaccgatacaagatcgaagctttgccttctgtttcttcgaaaatctaccatg

SEQ ID NO: 8488 - DNA, 3000 bp, Unknown
  misc_feature (1)..( 3000): cDNA_ID_2176923_gDNA_ID_1971812_Annot_ID_175786 3000 nt of promoter + ATG
aagctggtatactacaggtgaaactcttaaattaacaatcaaactacaagtgtataatcttaaacactaaacaatatagataatatcaacaaaacatatacaactcacagtttactatacatttaaaatcaaataaaataatatcatatatttttaaatcatctttacattaaaagtttttagtttaactaaaatataagcctacctgcggtatactgcaggttaatatctagattatagggcttattggatctaaagacgggtcatcaaacatttcctaaactgaagcaaaatatactgaatattcaaatatctatctgttaccaaattataaacaaataagttcgtaaaacaatttaatattttatatacgaaatcaattaaatcttaatcacataaaaattagcaaaaaaaaaagtattcaacaattaaaaaattatcaaatctctgtgttatataagttttgatactatattcgaataaagtataatataccttttcaatttgtattctttaactaatttaagctaactaatatatttgttttttggtggatttgggtaaaagtgtattcgggtcatatggtacattctcctattaaataaatatggtgtactcctatgttattagctaaaatgtttagattataattcagagtcatatcattaataaaattaatattaataaaataaattattttttggcaagacggatttgaagggacgggtttttgaatcaacattaataaaaaaagtaaaatataattaatccaccatttcaatacgggttaaatctttaatttattattttttaagaccactaatattaaacatatcaaatcatcctaatttagaaaagattatataaaaccaaaaatgttatgtggtatgtataatgttactatatataaaattaaactataaaatttaaatatattagagaatgatacaatttgcaaaatttttatatataaaaaataattcttcaattttaaaaattactactttgaaaaaaaaatcacgggacgggtaaagaaattacagaacgggttttattttggaattgggttatatgatggatgtatttgaatcaatatttataaaatattaaaatattattaatatgatgttttaataggggttaaaactttagttttttaacaattgtctcatggattcgtggtataacgatacttaataacaattataaactgtaaaatatcaatattttataaaaataaaatttgcaagttttaatatatattacttaaaaaaaataaatcgtcccgcggtatagcgcgagttaaaatctagtactcaatatttagcccagcgtgaccattttcgtttctaacgatgtatgttgtaatgacacgaaattttgtattaataatgatgtgttgtgtttttatgtgatcaaagcaaaaaaaaaagtactataaatacatcatcgctcatacatttaattaatatagctcaatgttgaaacagttcggccttaaataagatatagttcagtgttggaacaattcggtgaaactgaaattcgtgcatatcctactagctagatataattaaattgaagagggacaatgaaaatggacaaagaggtagacagatagagtcgaatgaattagacagaggacgaattggggtaatcatagatgcatagttttgtgctaaagacaatgacttagccaaaattttgggtacctttggacaagtgtggttcctactcttagtggtccatttgatcatttccagagaaaattaacttctatgtacacatggttttcgcaagcatatttttactctccaataatttcttgatattttgttgggttccatgtctcttatatttttttgctaaattagtcataattttgaaaccatctctttatctatatcacaaggaaaaaatcccaaaaaaatattcatccactttttatttggctatttagtacttaaagtgttttttgttggaataaaaatatttcatttaagtagatttagtctaaaagtatttcatttgaattgttagacaattcgaatgtgcgacttaacagccgttaacggcattatacgtttatactctccttttcctaaagctttttttctttagtcgtaacatgcatgaatcatagcgattgtcagggactcaaggcaacttggattatatccgaatgagtttagatgatattaagacagacatttgattgggtacgataggtggaaatagagataaggttttccttttcttgattagttcaatatcaatttgtatgggaccttcttaattacatcgacgttgatgttgcctaagaggttttttcttggtcgtgctaattatttttctaattatctattcaaccttttttcataaacttaccgacatggaaaccaatttgctaataatcgtgattaagagaagttagaaaagtttgagatagtaaatgaaattttaactaaataatcaagtactaataactcaatcatatacataaagaaagaaaagttatgctatttgagtacttgacaatcaaaaatcaagtatggcagaactttcaataactcgtttctctctgttgggctagatttgtctaaaaaggcccattaatatattcacgttctagactccaccactaggcactaacccattacaaactgacagtgacactaaattcattcggttattgatcggttctgtaattggctaaaccaattttcctcggtttactaagaaatccctaaactcgattcttctctctcaaactcaatcgatcatcgtgcaatctctctctagcaattattactcgattgattctgtgaaactctgaatgtgtttttgttcttgctgcatcgtattacttccaaatctgctctgttttgagtaaaggtatcacctttatcccttatcttcaacaactccagtttcaaaaatttaccatttcataaaattcaaattcagttcttcgttgtgttactggaagtgaaagtaatg

SEQ ID NO: 8489 - DNA, 3000 bp, Unknown
  misc_feature (1)..( 3000): cDNA_ID_2106682_gDNA_ID_1971812_Annot_ID_175785 3000 nt of promoter + ATG
atcgtattacttccaaatctgctctgttttgagtaaaggtatcacctttatcccttatcttcaacaactccagtttcaaaaatttaccatttcataaaattcaaattcagttcttcgttgtgttactggaagtgaaagtaatggcgctctgtaacttgaatccaactcaagggatattcccattgcaaggcttatcagtgagttactttattctctccatcaaatatttcagtcttgagataagattgtatatatgtattcagatgtgaattcttcaaattgcagaaatctcaagaatttatatgcttttctttgcttcaatctccacgttgcggaagttactcctcgttgaagacgaaaaggtttggcttttgcatcagatcaaaggtaaaaaaaaaatgtttttgtagttactttctgtttaatggctatatagcttgtgaaatgaattacaacatgtcataatggtgatattgttttgaagttctcagagaaggaagctgggaaattggacagaggttatgttgccactgtgaacaggtttgttgtttgttacatttcaagttatatatataatatatgtaaattaacttatgtttggttgcatatctttcttgagtaatcatttgacattgtttttttctgtttgattcaccagtaagtttttgtgttgaatgttgatattgtagcaaggaaataaagaaagtggggaagaaagagcatcacttgtggaagaagaatgactctgctgggtctggacagaaagcacttaatcttgttcgaatggtaagtgaggaaaagttctgttaaaacatatgttttcataagtgaaacgatgataaagtagtccttgttgatatgtagctctctggactcccaaatgaaaaagaggctgtttatggagctttgaataaatgggtagcttgggaggttgaatttcccattattgctgcagctaaggcgttgcaaatcttaagaaagagaagtcagtggcatcgtgtgattcaagtaagtaatacggcttcctatgtcaagtgtaaagttttgctaaatatggtgtcctgagttgattggtttagtgacaaactcagttggctaagtggatgttaagcaaagggcaaggtgctacaatgggaacatacgatatcctcttattggcatttgatatggacgaaagggctgatgaggcagagtccttatggaacatgattctgcacacacatacacgatccatcccaagacgcttgttcgctaggatgatagcgttgtatgctcaccatgaccttcacgataaggttatcgaggtaaaacaaggttctttcttccctcgagaatttatcttgatcttacacttaagatactcctcaagatactctacacctctctgcaagaagtatgacgtggttctaagatacattttctttcggttgttctcttttaggtctttgcagacatggaagagctgaaggtgagcccagacgaagactctgcgaggagagtggcacgagccttcagggaactcaaccaagaagaaaatcgaaaactgatccttagaaggtacctctctgaatacaaatacatctacttcaatggtgagcgggttagagtcaaaagatatttctctgaagatagttgatttcattcttatgaacacacacaaccacacacatgtatatgtagaagttacccccaagttttttacccttgattgtaatttctaatttgtgaattcatcaagaagatggtaaaatgaatctccatttataaagttatcttttattctcgagaaaacaaacgaattgtcaaatgttcaatgacactcatgctttatagtgttcataattccttgcatgtggttggtagtgtagtagatatgatcattttttctgttctattttttgaaatgtttctttatttgaaaaagaatccagcatggctgctttaacttatttgctctgtcacaaaaccccacaagatcatgcttcaaatttatgagtcactgactccaaacctcaaagtcacattataacaacaaattcatttataagtttttctactggtccactctacatcattacttaccaaatctattttaaaatcgtcttatatatcctttgggtggctacttagtacagaaaggtagaatctttgtggacaaatgcttcacaatttattcccaaagtgattattttcttactgtgtcactgaagaagaagaagatgcatgaacaaaaagacacagaatttatgaacttccaactaccacattatgtcaatcatgatgttcatcttcatgacatagtgtttcctcttgccatttaatgttatttttgccatctacctccattaatacatgcatccatacctcaacatcattcttcatcgtcaatttgaacccaaccagaatcaatctgagctgttcgattacttcccaggacacaggacacatgatcaagattatgcaactggccctaacaattcatcatttgtttacaatttgccatcaatcacaaacccaactgtctcatcccttggcacactagcaaattaatctaaataagctaaagggtaacttagtcggtgtctccatctcaatccttgtttcaaatctcaaatctctaatcctttaaatgtccaaacatatggttccctctgaagacaactttttctggtaaactataataacagaatgatcagtttagtcgtttagacacacaagttggtcccaacactgtaaaaaaacagagtattatcaattctctcccactcgttatgtctccacataattatacagttactttacatatctacacataaacattatcaccgcgtgacatttaatgcttcttcaactgtctaaagctcaaaacttgttttgtcattccctccatattcttctgacctttattatatacatccatttacattcttcacgttatcagaccaatctctctcttcttcttcttcacgttctctctctttccggataagggtagagatg

SEQ ID NO: 8490 - DNA, 3000 bp, Unknown
  misc_feature (1)..( 3000): cDNA_ID_2176921_gDNA_ID_1971812_Annot_ID_175784 3000 nt of promoter + ATG
gcttcaaaatcactccggtactcatttttcttaccatcttttgtttgtattcaaatatcaaatgtttttttttgttgctaaaataattgaataatgcatcgacctaaacgaatagataaagaatcactagactaacacacacctgtggttcttgtcattggatctcatgtgagtgttactatacttttctatcaaaggcttaccctaaattgtgaatcctgtaaaaccacatgaaattttatgtctatcacaaaagaatacatacaccaagattcaagaatatgaaaacacacatataatatagacatttttaagagggtcccaaaaacaggctcttgatctggaaactgtattaatttgtatccaattataacctcatgggccacttttccctggctatgcacattatcataggttatacgattaagttcgtgatggaaaatatgatttattaaagttttcttcccgagtttgcaacgattttcctttcttcaaaatctaaaatttattcgattaacaaaaaaaacaattatcgacaagcaattcaaaggaaaaattgtgaaaaaacaaaagaataaggagagaatatgtcctccttctgtttttttttactaagagagaatatatctttaataggggatgcttcttgctcgaagccatcattgagaagaccttcatacttgcgggagtctatgatagatatctcaagagttaactttagatacttttatgcgatttcattttatttttaatgacttactataataattattattttttcatctaaataattcaattcacgaaatcatcttaattattatttatataaatacatggacaaatagaagtggaagaacaatgtttagaaaacaaatcgaaaaagatcgccgacctttattgatcgaggaagagaattctggtgggattttagagggaggtaagagcataggtgctagagagtgttcggagctcggaaaatgattaaaattggttttgattacacttaattagtttaatcttctagtaacacacaaatatgctaaaataaacacataatacattcatgcaaacacaaaacttggcttaatattggccaataatttgagtggcacaatcacaatcaagccaaaagcagcactgatttctctttttttttttctttctaattagtcttaattcggtccaaaaccaaacaaaaatatctttaaattatattggaacctgacgaaaacaaatcttaaattcccacaaaatgctatatatatagtatctaagtttgaatgccaattccatatttttacggaatttataaaagtacgcagaatctatttctagcagtttggaaaattttcaaaatatttgaaaattttcaaatggtttgtggtctgttgatctactaatcacgtcatactaattttgggatggaatgttacagaatatataatttcaaaacagagagagtattcttttgttttctgtgaactgattttattctaggtaatataatgtatccattttttttaatgacgaggaagaaaaattaaggaacaaaagaatatgcattaaatttgattaggtagtgtcatttaagtgatcccttctccaacacaaaatgtatgattcgacgtcaaattaatgttttaaatatttattgcttttattgatcatatataatttaatatttataatcattattacgtgggaacttatctagtacacattctatgtctttgtgaacttagtacacgagtaacggtttttctattaaattaaaaccttcaaaacaacatttgatgaaaatttcatagattttacaccaaaatttcgtaagaaaaattgttggagttcgtattgttttcttgtagtagatgacattaaaaaaatacattaagatacactaaacaagaattatgcatattgttttttggtcaaaatcgagcctttaccaaattgatcgatacattttttctgatgatacgtttagactagttggataaaatattaatctgtcctcaaaaccaatttgcagtggatcaatccatatatcttctatattattaggatctttgtctaacttccgatgtgtgatattgttattcctaagataaaacaccattgaaaaacagtattttaaatcgggtaaataattcagcgagtcacatatttttgttttaataaaaactcaaatcaaaagtgatcaaaatatggtagaaagcaaccttcgattgtggtccatcatgtaagatacgagaagattttatggtttttaaaacccacttcgaccatgaaagcttgacccaaagcaattgagttgtttcttttataaatgacctaatcaatttccatacatacaagcatacatgtgacgtaaaggaaatctaattatgtactaatttgtaaattttactagtattcaattcagtaattcttactaaacttactttaactcttgctaattaaatatactactagagaaggtaaattacatgcagttaagctatactattttttctaattgcaagaaagaaagaaaaagtacaaaagaaaagaaagcacattgcaagtggatgtatatatagttatagggaaataaatatgaatatggactgtatatacatataggtttctcttatctctatcaaattaccttaaatgggttcataaagatggagatcaaagactacacatcacatgctactctccctcttcttttggcataaccttactccatttatacattgtgctcctcaattattcaacattttttaaaaataacttatttaacaaaatgttagaaaatatctacccaatttttttcttccacatacgagctacaaagatctttatcaaataaaacaagaaagattattaatccatattttgggttaaattttaatccatttagccaattaggagaactattttaacagttagatacttttcaacaaaatttattaagtagtcacctatgtatattcatatagtagtttcacaaacaat

SEQ ID NO: 8491 - DNA, 3000 bp, Unknown; identical to SEQ ID NO: 8480
  misc_feature (1)..( 3000): cDNA_ID_1819477_gDNA_ID_1971812_Annot_ID_175781 3000 nt of promoter + ATG

SEQ ID NO: 8492 - DNA, 3000 bp, Unknown; identical to SEQ ID NO: 8479
  misc_feature (1)..( 3000): cDNA_ID_2176910_gDNA_ID_1971812_Annot_ID_175780 3000 nt of promoter + ATG

SEQ ID NO: 8493 - DNA, 3000 bp, Unknown
  misc_feature (1)..( 3000): cDNA_ID_3011901_gDNA_ID_1971812_Annot_ID_175778 3000 nt of promoter + ATG
atttagtgaggtattatagaaaatgtgtaagctttgagaatttttctttttgtgtttttctttggtcacacaaccttttgctttataattgaaactttaggacacgtctgtttcacgaaaactgccattggtaatgggtttagattcctttgtacaacgatcgaggtaaaccttttttttttcttgctcacatgttttttttctttacttttcagactgacactttctctgaaattcgaattttgctttttgttgaatcataacttttcttcatttgcttacgttcacacttacattaacataagataactaacctgtcaaaaagactcaaattttagcttatgttgctgtggatttagtatttaccagaaaaagctatattgtgtcaagaaaataaaaaagggacttgggattcttggctcgtgtgattcagtagtttccatgagtgtttatttttgttttgttatatacttaaattagtactatgttaactgtcttaattcttgtttagctggtcaatggtgagactgaagaaatgatttccccttttgccaacatctaatgatgatgtttggattttgcttgtgtggggataaataaaatggaattattcattgtttgaccattagatgccaaagaaaatcattgttcttttacttttttctttccttagttgcatctggattttcaatttttcaatcattgtgtcatcttgttcgttgctcaccagcttttgcatttcgtaaaatggaaaaagaaaaaaaaaacacatttttatgtaaataatctatgaggtattctcgatccatttagcaaagattagttctttgagcactatataccaaataaaatcattgttttttctcacttttttgcttaggtgcattttggttttcaactatcaatcatagtgctatcttgttcatgctctacagctcttacatttcgttaaaaagaaagaaaaaaaaacattttatgctctttttgttgttgttgataatctattagaaaagattgttcttttgagatcttctgatccatccattagcaaatgttgttctttgaccattataaaacgaaacagaatcattgttctttacttttttttttcctttgtgcatttggattttctattatcaatcataatgtctttttgtttgttgctcaccagcttttgcattatgtaattaatccactagcaaaagattgagagagtctcagctccaaatggattgtgttggttacattttgtgatatttcttacacaatttgcaataaactattgtgtagggatgcaaaccaatggatcgaatggacctcatgaatggttctacttcagctagtccatgctcatcgtatcaacatagccctcgtgcttcctacaatccaagcccttcgtcttcatcattcccgagtcctacaaacccatttggtgatgctaactcactaatcccatggctcaagaacctctcttcaaactcaccttccaagcttcccttcttccatggaaattcaataagcgctcccgtgactccgccattggctcgaagccctactcgtgatcaagtaaccatccctgactctggatggctctcaggaatgcaaactccgcagagcggaccgtcttctcctactttcagtttagtttcaagaaacccgtttttcgacaaagaggcttttaaaatgggagattgtaattcaccaatgtggactcctggacaaagtggaaactgctctccagctattcctgctggtgttgatcagaactctgatgtgccaatggctgatggaatgacggctgagtttgcgtttggttgtaacgcaatggctgcgaatggaatggtgaagccttgggaaggagaaaggatacatggagaatgtgtttcagatgatttagaacttacacttggaaactcaagaaccagatgatcatttcagagaagaatcaaagtcgtttgctatcattaagtcttcttttttgtctgtcttttttttccagtgtgatgtttaaaggtgactcagaggaaaaaaaggagaatagaaagagaaacaaaaaaagaacattttgagctctgttttcttttttttttttctttttttttttgttggcttttgactaaagttgtagttagaatctattttatatcttgaagcttctttaaaaaaaaagttatttgtggaaattcgatttgagattagtgatgttagtataatgaattttatataaaatattgaagccagattggactttagtaaccattgtgaacgtgagaaaatatcagtatctatcgctgaaaattttatatttttctatacatttaaaagataacagaaaagtggattacgttgaaagaccaaagatatgtccaagaagtcatgcgtaacccaatagaaagtcaactaacaatgaggaccacatgtgattggtcttgttaattagcgtacgtaaaacgcgacactatgacaactcgtacgtaatttcgcgaataatatgaatagtaacttcaactggactattttacaagtcaacaaattacttagtggatccaatttaaatgtccaattgttcttatttggctaaaaatgaggcccatatatacataatttttttatatgatttattttttaatgaatttatttaagagtatgtaaacagaaccctcgctctctctcgctaatttggatagatacctccgagcaagggttaagtgtaagcctcgtttgtatttgtaacgtaagttgtcatcatcgtaaagagttaatcaggttaattattttctttagtaaggaatgtgttttacccgattcttctatcattatgttatctttgttgttgaacctctcgattctcgaccttggattttgaaaattggtataattattatttgaccctttttgtttgttatgcttttctttgtgtgtgtgtgtgtgtgtttatttggttattgtaatctttgggaattcttgttttgagtggttttggaagatgtgtcgtgttag

SEQ ID NO: 8494 - DNA, 3000 bp, Unknown; identical to SEQ ID NO: 8485
  misc_feature (1)..( 3000): cDNA_ID_2176945_gDNA_ID_1971812_Annot_ID_175797 3000 nt of promoter + ATG

SEQ ID NO: 8495 - DNA, 3000 bp, Unknown; identical to SEQ ID NO: 8477
  misc_feature (1)..( 3000): cDNA_ID_1819489_gDNA_ID_1971812_Annot_ID_175776 3000 nt of promoter + ATG

SEQ ID NO: 8496 - DNA, 3000 bp, Unknown; identical to SEQ ID NO: 4458
  misc_feature (1)..( 3000): cDNA_ID_1824332_gDNA_ID_1971812_Annot_ID_58142 3000 nt of promoter + ATG

SEQ ID NO: 8497 - DNA, 3000 bp, Unknown; identical to SEQ ID NO: 4459
  misc_feature (1)..( 3000): cDNA_ID_1824328_gDNA_ID_1971812_Annot_ID_58146 3000 nt of promoter + ATG

SEQ ID NO: 8498 - DNA, 3000 bp, Unknown
  misc_feature (1)..( 3000): cDNA_ID_1821561_gDNA_ID_1971813_Annot_ID_58152 3000 nt of promoter + ATG
gcacatattaattaattcctccctctaatgcattagtactttcattatccatttagaagactttttttgtttctgtttcaaaaaaccagttaactaaaatttaatttatatgcatggttaaacggtcaacaaaattattttacattcactcgtgttgattttctagtcggtaaaaactaaaaaggaacctcgtcaataatagtaacatcagttagtcgttacatcatgagtaagtatcgtaattggcgccgtacgtttgttgattaaccatacaaaaaaaaagaatgataattatgtgatttcttatacactaactaacattcagtaattaaatctttgtttataccacagcgatataaattatgtgaatgataattatgtgatttcttatgttttgaatccgtaataattaaccgaacatgtttgataatcatatttaacaaaatctttgtttataccacagcgatataaattaaatgattagggacggtactaatattacagttgaatatgtattatagtttgtaagagatttgatgtgcatgtgtttatttatagtttgtacattcattttcccttgagcgtaaggacagcgtcactatgacatcacatcggtccgtgagaatgatagtataacgaatatgcacgtaactcgtaatgacataggtttctttttaaaccgttgatgttcgtgtgtgtttagtatcatatgatttacatttggccaaaacgacggaaattggaatttactaaaaaaaattggggaaaaagttttttttttataagtaataatatgaatctgtttaatgggccttcagaagtggggaagagattggagtgtgggttggcgaatgtaatcatttcgtttttattatatttttactttgtttttgttcgtatatgtatttgaaattttacattattcgttttcacatccatcacctttcttcctctcgctttacacagtttcaataattacattttcagtgatctctgtacaattgctagtttcattttaagctttatgtctaactaggaccgtaactacgactagttttgtccggttcgttcggactgttcccatagatttgagtaaccggcaaatcggataggattgacaaacaaaacttgtggtttgtttacgaaatctagaatcagcaatttggtgcctagacgagttgaaaataaaacagtaataatgagttacttagaaccgtaaacaattcagtttagcgagtgaagctggaggaatgagtccattgtctacacatgtatctaatctaatactaaaaaacattgatctcgttgactttctaacaaacaaaaaaatcggaacacaacatacttataaagttgacttttgggttaatcacaactaatgaaacccaccaaaaagggaataatagaatctttatcgtacaaatttacaacacatatatatgtgcataacaatttataaagatttagtttaatataagggacagctaaggaaagaaaagaagatttttaaaaggaagaagatttttttctgaaagaaatataagagcggggcatgaagataaatgatgacaccatgcggggactctgcgtctgttaagagttataatttgacaacattatattgatccgaccatccaaagctgtcttgtaatgtccttcctctgtcactttatgcgacttctctcaatgcctctcttatttcttctctacgcctatctctttgcatatagttttcttttgtcatatccgtaaaaaaactacagattttttttcgggttcatttaagtccaaaaatatatgttgatggttctacataactctcattgttcctttttaagtaataagtaccttcttatatttatttatttgctctaattaagcaagtaacttcaaattaaaacattaggtaccaacaattatggtcttgagggtaaaaaagacgataaaaaagcctcagtgacaaatgtcaaaacatgggaaaagaattgtaacactaattaatccacaatcaagtgaaactgaaaaccctaacatggagggaccaacaaatgattggacataactgcaccaatcaaaaacttaattctgagtttattttggcataatttagtttggtgatacgcaactgggtcccattttaatatgacataatttagagtaaattatactatgaataaaaaaaagaccttaccataaaagtcattcgttattattacttatgtttgccattacaagtttatatccatttcctttattttcccggaaatattttttcaacgaccaagcagagaagttacgttacagtattatacaaagaacatttacacacattacccaaggaaggtgcaggctcgggccacttatgggccattgaacttgtacaaatatttatttagcccatgtaagaaatatcgaggagatattttgtttacataaagcccagaaagcccaattagtttggttgataattttttataacaaaaaaaacaaaattccacgtaagcacagaaacagacgactgacacggtggtccgtgaaggcgtgaaccgaatcatcgacggaggaaaccaccaatgatttctccatctcacgtcgtcaaatgtttcatcatcatcttcatcatctttcgtacgacttctttttttttttttttggtttttttttcccttcccaatcgaagtagcgatgccttcgcgatagctctctgcttcatctcgccactcatctcaacctcttgatttgggtctctcttgctcttgctcttgctcttgatctctctcaaggtattttattgttctctgaattgtttccctggatcgaatttgttctagggttttaaggttatagctcgaaatcgccgttgctcgctgttttagcatctccttttcacgttactgtgttcgttggtgctgtgattggtgttgagttgggttataagttcgttgttcttattgaattttgatatgtgcttttgcttgtgtatagtgttaagcaaatagg

SEQ ID NO: 8499 - DNA, 3000 bp, Unknown
  misc_feature (1)..( 3000): cDNA_ID_1821549_gDNA_ID_1971813_Annot_ID_58155 3000 nt of promoter + ATG
ggagaggatatctcttatcgaggtataacatttcctaatcattacttgtcgtaagggtatcatggttctgtatgatgctaactttatttaacttcttcgttgcttgaccctgtgacaaaaaagaggctttatcctagcagccacttttgggaaacatatcttgctcgtcgaaaggaactccttaaagctgcactaccttttgactccagtgaaattagcttgcaccttggggggtcgtctttgtttcagcatctcaagattgagtgtggtgaggttgatggtgttgttctaggttcttggactaaaatcaatgagagtgcatctgagcatgcacctgatgaaaccgatgcagttgctggctactgggctgcagcagctgtgtggtcaaatgcttgggatcagagaacatttgatcatgtaagaagttttctatagtcattctttctcgttaccctctaaatgcctgaatatttatctaattgcaccatcccattatactaatacatccgtaccttggggacgttcgaattgatttcaacgtactctgcatgtattggaattggaccagttggattatctcttgatctgtatagcttaacagtgtttgtagtcttacactggttagaggattttgttcagttgttttcttgttttataaagaacgagacaaatacatacgataaggcatctgtgcttatttctcgagtagctaccctctgcttatcttttcctcttaatgaaagtgtagatgaaatgtagatctgtatttaatgattgtgctcttaactagattctatttaatgatggtccttaatcttgggttgcattttatatctttttacttgaattagcacattgtagagcattagagggctgctactgccatctgttagtcctataaacacccttaatttggaagtcgacattattagatttcagtggtgagagtaacagtgatacatttgattgaaggttaaagactatacatatcaacattttttttgttttgttttgtattattccatgaacttactcaggcgaaggttgttttgttcgtttcagataacgtctgcatttgttggtttttgagtaatgtttcttgttgaatattttgtgcagatagtcttggatcagcccttagtcatgggtgttcatgttccatgggattctcagctggagtattatatgtgtcacaatgactgggatgaagttcttaagctgttggatctcattcctgaggatgttttatatgatggaagtttgcaaattgctttggatggtccgaaacagtcttctggcgtaaattattcagtttcttcccgtagcgagtatatatgctccatcgaagaagtggatgctgtacttatggatgttccttatatcaagatatttagattgcctggagatatccggtgctccttgtggctaacaacactcatggagcaggaactagcaagaaaacttatatttttaaaagaatattgggaaaacgctctagatgtagtatatcttctggcccgggcaggtgtcatccttggtaattgtgaagtttcatttaaggaggaaacttgtacgccatcgttagatctttgtttgtccataaagaagggaggagcaaatgttgataccctgaatgctgtacacaagctattcatacattactgcacacagtataatctgccaaaccttctggatctgtaccttgatcatcacgaattggtcctagataatgattcactcagttcattgcaggaagctgtggtaagtgctttccacgtccgtaatatatttgtgtccataagtctgttctttgtacgcctatggtttgtcttttgaagacttaatttttactgagaatgccaagaatctgtccatgtattcagggtgattctcactgggcaaaatggttgctactctccaggatcaagggccgggagtatgatgcttcattttcaaacgcacgctcaattatgtcacgtaacggggcaccaaatagtgaacccagtgttccagagattgatgaaatggtttgtactgttgatgacattgccgatggggcaggagaaatggcagctttagcaactatgatgtgtgctccagtgccaattcaaaaatccttgagtactggcagtgtgaacaggcacactaactcttctgcgcagtgcactttggagaatttgagatcatttcttcagagattccctaccttatggagtaagcttgttagtgcttgtcttggggaagatatatccgggaaccttttgcggaccaagactaagaatggttaagcctggtccaccacactttttcttttattctgtgtatagtgaggacatactcgctctgactctatggtttatcagtcttgtcagagtatttgaattggcgtgacggtgtattcttctcaacggcacgtgatacctcactcctccagatgttgccttgttggtttcctaaggcggttcgtagattagttcagctttatattcaggtatctatttctgttttatctgttgtatgtgctcttctgagttgtacaacactccttcaactttctggaattgaggatctagttgaactcaatacttgcactgtaatcggcgatataacaagtttaagaatttctatgaaataatttgatggttgtgaagaggcagacataggcaaaccatttggggaatgactactaagatttagggagaaaggaaaaacacatcaaatttgttctacatcaatctttaccattttacaaaagaaatttgaggcactataccaaaagtggtagaatggaactgtaactctggtctactcaattattagtgttttttttaggtgctggcttctgtttcgtctatacaattagtaggtattctcctcatgcatcttcttccagattttccgagaatgcatagcttgcttgttgttggttctctttgacttggagaccttgaattaaccctctgatatggcctccttgtgttggttcatcatagcagaaaa

SEQ ID NO: 8500 - DNA, 3000 bp, Unknown
  misc_feature (1)..( 3000): cDNA_ID_2107183_gDNA_ID_1971813_Annot_ID_58162 3000 nt of promoter + ATG
agcaacattttgatcaatttgtattcgagagctggtggtatggtttatgcacgtaaggtgttcgagaaaatgcctgagagaaacttagtttcttggtctaccatggtttcagcttgcaaccatcatgggatttatgaggaatctttggtggttttcttagagttctggagaactagaaaagacagtccgaatgaatatattttgtcgagttttattcaagcttgctcaggcttagatggtcgtgggcgttggatggtgtttcaactacaaagttttcttgtcaagagtgggtttgatagggatgtttatgttggtaccttgttgattgatttttatttgaaggatggtaatatcgattatgcgaggcttgtgtttgatgctttaccagagaaatctactgtgacttggacgaccatgatcagtgggtgtgtaaaaatgggaagaagctacgtttcattacagctgttctaccaactaatggaagacaatgttgttccagatggctacatcctttcgacggttctaagtgcatgttcaatacttccgtttcttgaaggtgggaagcagattcatgcgcacatcttaagatatggacttgagatggatgcctcactgatgaatgtgcttatagattcttatgtgaagtgtggcagagttatagcggctcataagctattcaatggaatgccgaataaaaacatcatttcgtggaccactttgctctctggttataagcagaacgctcttcataaagaagccatggaattgtttaccagtatgtcaaagtttggtttaaagccggatatgtatgcttgctctagcatactcacatcttgtgcctcacttcatgctttgggatttggaacacaagttcatgcttacactatcaaagccaatcttggcaatgatagctatgtgactaacagcttgattgacatgtatgcgaaatgtgactgtttgaccgatgccagaaaagtttttgatattttcgctgctgctgatgtggttttattcaatgcaatgattgaaggttactcgagacttgggacacaatgggaactacatgaagcattgaacatctttcgtgacatgaggttcagattgattcgacctagcctattgacttttgttagccttctacgtgcatctgcttctttaacaagcttgggactgagtaaacaaatccatggattgatgttcaaatatgggttaaacttagatatatttgctggaagcgctttgattgatgtttactcaaattgctactgcctcaaggattccaggcttgtgtttgatgaaatgaaagtgaaagatcttgttatctggaattctatgtttgcaggttatgttcaacaatcagagaacgaagaagctctcaacctgtttctggaattacagttatcaagagaaagacctgacgaattcacgtttgccaacatggttacagcagctggcaacctagcaagtgttcaattgggtcaagagttccattgccagcttctgaaaagaggcttggaatgtaatccgtatattacaaatgctctactagatatgtacgccaaatgtggtagtcccgaagacgctcataaggcttttgattcagcagcttcaagagatgtagtttgttggaattctgtcatctcatcttatgcgaatcatggagaaggcaaaaaggctcttcagatgcttgaaaaaatgatgagtgagggaatagagcctaactacatcacctttgttggagttctatcagcgtgtagccatgctggtcttgtagaagatggacttaagcaatttgagttaatgcttcgatttggaattgaacctgaaactgagcactatgtttgtatggtatctcttttaggccgtgctggtagattgaacaaagcaagggagttaattgagaaaatgccgacaaaaccagctgctatagtatggaggagcttgctgagtggatgcgcaaaggccggtaacgtcgagttagctgaacatgctgctgaaatggctattttgtctgatcccaaggacagtggatcgtttactatgctttctaatatttacgcgtccaagggtatgtggactgaagctaagaaggtgagagaaagaatgaaggttgaaggtgtggtgaaagaacctggacgtagttggattgggattaataaggaggttcatatatttttgtctaaggataaatctcactgcaaggctaatcaaatttatgaagtgttagacgacttacttgtgcagatcagaggagttagttaataactaccatacaagaactcattttctattggagtgatggactctatttggttaaagaccaatgcagcagatgaagcttaaaagcgagccaaagaagaaagaataagccatggttaatatcgagaagctgaaggggtagctagctcaggagagcaaagatgttgctattaagttttgtaatcaagggaaaatcgattctgttccgttcaaatccgaaggaagactcaaaaattaaccccggttcagttctcagtttcttctcatcatctcctaaaaccgggttgagagagaagttgtaatggtgaatgcatgaatggtatgttgtacatgattcatttgaatttagttaaaccgtttttgaaatcaactaaaaccgaaaaacaccaattcaaaacaaaacaaaacaaaaattcagaacagggtttattgtatataaccaaactaaattctcattctgttgtaaattttattaaaccggaaaaccaaatcggacatatatgggcctaaaatgttgttgggtcaggccgaattctagacagttctgttctagttttttctcctttgtcgtaatcaggtggacgaaacgaaaaccctcgggattcctctgcttctgtctcgtccgtcgtcgtcaatttctctgcatcagagattccggtgtccttcttcctttcactcgcgtataacctcttttccttgacgttgtctccgtgagctctctgtgctttgactgcaaccatg

SEQ ID NO: 8501 - DNA, 3000 bp, Unknown
  misc_feature (1)..( 3000): cDNA_ID_1821517_gDNA_ID_1971813_Annot_ID_58166 3000 nt of promoter + ATG
gagctctctaagccgcatttcaagattgtattacccaactttctctcttgtctccaagagtttccgctctctaattgcttcaccagagctttatcagactcgctccatcctcggccgcaccgagagttgtctttatgtgtccttacggttacttaacgactctaacctccgatggtacactctctgtcgagttccggatcgaaaactaacaaatttctcaggtggtcatttattggttccgatcttatctcgctatgctcctcctgctcattggtcgagtgtggtcgctgttgattataatatctacgctattggagggcctatcaatgatgcaccatcctctagcgtctcggtcttggattgtcagtgtgagaaatggcgtgaagctccgtccatgcgggtggcacgaaactaccccactgcgaccgttcttgatgggaagatatatgtagcaggaggctgtgaagattgcacttcattggattgtatagaagtgtttgatcctaagactcaaacttgggactctgtggcaagtcctggcaccgagagatgcgagagacttgtatacaagagcgtagggatcgaaggaaagtatcacttgtttggcggtgcgggtcatgtggcttacgacccgaaagaaggtagatgggactcagttggaatggatatggagatgggtcggacatgggtttcatattgtgtgataaacaatatattgttctattataatgatagagagtttaaatggtatgactataaaggaagattttggagaaagttgatggggttggaacggctaatcaagtttctatgctatagccgtgttaacttggcggcttacggtgagaagatggcggttttatgggatacttttgtgccttctagctctaagaacaagatgatttggtgtgcggagattacgattgaaaggcacgacatatacgagatttgcggtaagactgaatggtttgatgttgtgcttagagttcccaaatcatatgaattggtacatgttcttgctgctactgtttgattcatgatgatttggagagtttgtgtagtattgggctatttaatttgatggatgattgtttattgtttctatattgaggcccattaaaaaatgatttatatattaagcccacaattgaattatcacacactcgcaatctgaacgagtaaagcaaacgcgttcgagaactctcatagcagtgaagtgaagtcaaatccctagattgacttgctcaacggcgatttcatctcgataattagccaatgtcttcaccggagaggaagaggaagagggtgacgtcgacgaagaatccatcggttaagaagaagaagaagatttcaccggtgccgacgccgataccgtcacttcctgatgatttgcttgtaagtatcttcgcacgagtctccagattgtattatccgattctctctcttgtctccaagagctttagatctctcctccgttcaccggagctttacgagacacggtcactattaggccgaaccgagagttgtctgtatttgtgtttacaggagggaaatcctgatccgaaccctctctggttcactctctgcatgaaacctgacagaaccctaaaaaatggcaagaagaagaagaagaagaagatgtcaagtggtaatcttttgatcccaattccagttcctaatccccctcttgagcactggtcaggtcacgcgtctgttggttccgatatctacttctttggcggatacatggaggagaatgtgcgttcctctagagtcgtgatcctagactgccggtctcacacgttgcgtgaggctccaagcctgcagatggaaaggtcggaccctgctgctagtgttattgatggaaagatttatgtagctggaggtgtcgacggtgatgatgcagattccttgtacccgatagaagtgttcgacataaagacccaaatttgggatcataggcccatcccttactgggagaaagactggggcgctctatcaagaagcgcgtatgttgatggaaagttctacttgacgattgggatgaaggttatggcttatgatctagaggaaagtagatgggactttgctggatatcagatgggtcagagttggttttggtcttgtaattgtgttatagagaatgttttgtactgttatggtgatgctttccgatggtttgacactaagctgagattgtggaaagttatgaaggtgaaaggactacctaagttgtcccgtaatgtcgatgttaagatagcagattatggtggaaagatggcgattttttgggacaatccttccccttctgcttccgatacgaacaaaataattcggtgcgcggtgattgcccttgaaaggcccaacagtgaagagatttgggggacggtcgagtggcatgaggcagtgcttacagttcctgtgtcatatgagtttgaacatgctctagctgttaccgtttgatgaatgacagacttgaatgtggtgaatctttaatggtttgtgggtatttgatcattttgttgtatgattgtgtcttgtctttttagctcttatgacttatgctattgacattgtttcacttgtaaacctttgatggttagctttctttctgctgctacagtcagacctatgaaacactgttttggttgaaaagaaagtttaatactttcattgtgcaagtatgtctcatgtcattgtacgttatggaatcatccaatgatgcagtagcagtactgttagagttgaaattaaacttttcaaatgtatttatagaaacgaaatccagtgtaatgaattgtgcattcttcttcaaattaacaaatttaatgctttgaggcccattaagaatttattaatgtgaaggataaacgcagaagcaacaaagtccattacgctcgataaggcttagcagtcaaaatccctaaaatcctctttgactttggttctctgcagtcgataattttattttcgccaatgtcatcgccggtgaagaagatg

SEQ ID NO: 8502 - DNA, 3000 bp, Unknown
  misc_feature (1)..( 3000): cDNA_ID_1821502_gDNA_ID_1971813_Annot_ID_58172 3000 nt of promoter + ATG
ttttttgtgtcaggccaaccaaaagatatagatctatggaatctaatagatacataatacatgtaccggattcggctcagaaaaccaacagttgaagtatgtataattcatctacaatgtgtttgagtcttgtcgtgtacgtttatgtttggatttgatcaaaaccagtatcgcttaacccaaatcgaaccgcattataattatagtaaacacatcaatctcattattttgatggcaaataaataaactgaaactgaaatcatcgtaacaacttaataaatgaaaatccatcaataagatcttttgctagaattaaaacaatattgagattaataaaagattgatttaaataagatcttgtctttcaaacgttagaaacaacaggtgactctctcgttaagatttttctctcgaagatagccttaaaacgcatcttcttcgtttgaccgtctctaagagtcttaccagacgagaacatggactattcttcaaaaagaatagataacgcatgcaaattaaaagagttggggacgactttttcttcgttagagaaaccttattgtatgactataaatacaccttctctccaaaagaaatcaaaaatcattttctaagacaaatacaaattgacatagaccaaaatatttggcttatgaacgatttatgcattgtaaaactcattatttaattaaaatcaaaatgtatcaccgcctggtttggttaattgctttgattgttctattgttcgttggatcatcaaacatagaacaagtaagtttctagttattgataaactttattcatttctcaaaccaaattaaagttatttattttattaatatattcattgtatatattcatgaaaatttcatttcaaaaagggtgcatgcatgttaactgtgaaaatgaattttatttttttctcattcatgaattcacatcttttctgcacggacgatcattagaaagcatccgtatgactctcaacatggtaattttaaatattcaaaaatattgatggttttcaatgtttactaattgtatgtgaagaaaaggaagaaagggtttgggataaaattgtgatcaaagaaatcaagattgatgttggtggaagtaattcaagacgtgcaggtcaaggaaatgcatcagatccaggcaccaagatctagcgacagtttaccaatgattattattactaactcggacaatttagaagagttccgtagattcaaattcattccattttttaaactaaaagatatatgtctataagttttgtcaattaaacctcctcctatccaatgtcatcacatacatttcctttcaggacgaagaagtgtgtatatacacacacttacaattcaatctttttataaagatcgagagattaacaacgaaagaacaacaaaaaattcttacaattatcctaaacaatagtatataacgtcgacgaccaccgccgtttccggtcatttacatacacgttacattaatttgaaccataacaaaataagtcaaactctcacaaagaaaaagctaagttcgggtccattattcccttcaggactcaacatataaaaagtctctgaatctttagacccaataactctctcaaaataagctctcatatacgccatttcgccgtcgggtccttccgactccgagtttcccggcaaaactccggcgcccatagacaccggacgtaacaactccatcacgttaagatcttcttcggtcgcttctcgtttcacaccgtaacccgttttctctcctttacaatacattgtccataacggttcttccaaaatatctgtcttcttctcggttttagaattgttattatcagctcgaggctgtttctcagtctcgagagctattctcaccattcccgtgcttagctctttttgaagcgttgtggtttgcatggcgagctccacgactaaagaaggtaaacatttagggttttcttgaatggaaagacttactcggcctttacggtatccgaataacgttccggtgattcttgacgtgttgtgatgtggatccggtaagcctaaaccgggatgtataaccgggattttgcatgctacggatggtgttgtaaagattgggaaagatcgaaacacggtgcgtaagactctgaaaacgtttgttctgtttttcttcttttttgaagatggtggctggaggagaggatgttgacgtggcggagtggttgtggacgtcggagagggtgttggagacgaaggaggaattgaggaggaggaggaagaagaacttgtagccattggatttgatgattctcccattagacgacgatcgtacggcgaagaaagaaggagaagatctttcttcgacgaccgacgacgactaaaagaaccaacgtccttgtagaaatgtagtcttttttctttttctttagctctctattcctcctccttattgaattgataattttctcctagtaccaatccttatccttgaatttgatttttttgtttttcttttctaaatttcgtttttgttaatttcttttttaagagaagttaattagggatttcaatggtggttaaaaccgaagctatatttgcaagcaacaaatcgcatttttatgttagtttttctaagcttggtcatattttataaatgtgtagtggttgctattgtttgcataatcacttgttatgaaacttttatccggttaagtatatataatgaagccaacagtacaacaggatccgtggcgcaatggtagcgcgtctgactccagatcagaaggttgcgtgttcgattcacgtcgggttcaaataccccgaaaattagatccttaacttttttattcctgtatttatagaaacggcccaattgttttgctgtatttacaaaacggcccaacttgtttgctgcttcactgaatgtaccctcaaaacttttttggttgcaactgtaaaaaccttatccgccattaaaggattaggaaaagaaaaaaacttttcgtca

SEQ ID NO: 8503 - DNA, 3000 bp, Unknown
  misc_feature (1)..( 3000): cDNA_ID_3045616_gDNA_ID_1971813_Annot_ID_175858 3000 nt of promoter + ATG
agattagctttgatttcggacttggactatacataaatatatttatgttctctggtcggaagacgaagataaccaagtaccgtcattattatgttcatgatcggagccaccgtagcttccattatcaccggtgtttatgttcccgttagccgctgccgttgtagtaggaggattagtagatggagtctgcatcataccaagaccaaactgatcgtgctcattgcttctagggtttgaaatatgagcttgaagaagagcttgcagattcatatcctcgaaaccgttgttagggttttgatattgctgaatttgtgatccggataagagaggagtcgctggagtgagtttttgagcaaacggtcgtaacaagagattgttggtgttgtaagtgtttggcgaagaagaagacaagccgaggaaagtgttgaggcgcgtggtgttcacgatggagttgttgttgaatagcggtggagctgggattccggtaaactcttgaaccatcgctcggaagttggaagtatccgtcgttagaaccgtcgttggtgctcttcttgatgctcgagatcttttctttgttttcttgattactcctatattgttagtaggagggagtgatgacgtggcggaggaggttcggaggtcgagttgagaaatcgggtcgggttgttggtttacgggtaagaacgtgttgttgttaaagtagtttggtggtattagagagttgttgttgttatggtcgaaatggaggaggttgcgatggttttgttgcggcgtgggtatagatgacacgtggttgttgtggtggtcgaagaaggcggaaatggattgatctgcggcgcgtgaatcgtattcttcttctcctcctccgccaccgccgcttgaagattgcatgctactactattaccggactccatctcgtgacaaagaaaaaaagactttgacgagagaaaacgtaagaaattgatttagaggtgagaatggatacttgagtttagggagctattgtttgtttaaggagtttatgagatagggtatcatggtaaataagacatttggtgtgacatgattttttaataattttgttttgtttttgtgtgaaagggagaaaaacagggaaggtgaaatcgcattaagtggttccactaccaccatccactattgtctactctatatcccaatattatatacatgtatctaaggtttagtttatattagatttattccttttggtgatagtcaaaattcactttgattgtagatatttggttcggctaatgctttgttttgtttctctaccactgcaggatgttacgtttacaaatcttatgatggtattacttttacttttcctgataaatggtacttacttttcttcgtgatttgtgcgtatattcatatcaaaatcaattatgcgataaaaatgttagaacaagttttaattttccgtgtgcacaaacaatcatttaacttcctctcgttattctctaaagatatagaataatttgaataatctactaatctcttacatgatgacataattaggtcagttaattcggaccaaattcaataatatatatcataattattagatgtcatcatatagctagttccaccaagataagttttttagctgattaatctttcttttcaattgaataatttcgaaatcaccaatttaaaagatgcaacaaagatatgtacatactcatttctacttatttcacccgattaatttgcaagtggaaattaatggtttgagtgtatattttgatagagatactaggtttggtcggaaaataagaatcaatcatataatatactattaattatcaaggaaaattcaaaatttatgggcccattaaccaaaatgccataaccctattatcactttacccatacggcttagttttgtttggttacccacactcatttataattgtgtttttttcgttttttttctaaatatcaaaatttcagttgacttgtaaattcgtatgaaattgattatcattgcattgcaaataagaaaaagaaacatttagtaaaaccaaccactacattcgattaactattatcactattaaatgttttgttagtgtttgataaaaaaaaaattgccgtgttagtaaaattttttacgggtgatcaatgatcatcatataattaaccaaaataatgtaagtctacatagttttagtattgaagatcacaaggatatcaaaaactaaagaatcatcactctctataatttagtaagctatgggtttgatcaaatttccagcatgtagtttttttgctacgtgtgcattttgttataacaagataaatatataaatgggcttacgcttcttcttttttgtgcaacaatgggcttacgctttatgcccaatatttacctataccaaggctccatataattagtatttgttatttataagcccacacacttttgagaagaagatgtctaaaaatgaaaatgctgagaagaagtaacaatttgtttttacaaatataaattatacctggccataaaataataaaaatctgacagcaaatatataagcaaataaaaatgggaagaattacttattctcaatataaatttgaattattcttaatatagacaaaaccatcaaaaatttcgtagtcattaataaggaaaatttcatacaatccagtggactatttttcttggtccgtaagctgccagagagagagagacttaaaaggataatttcgtaaatctaccaacccatcatataccgactcgccgagtaatcgccaagcctctcaaattatccatctcaattctcacatcacaacagataagagtcagccacgtcaacattacacgctactccgaataacacgtgattattaccccaattgttaattcccaataataacccttccctcaaataatattcgcatctattaatacacctctgcagaaaaaaaatcagagaaaaaatacaaatcgttcaccggaaaaaaacaaa

SEQ ID NO: 8504 - DNA, 3000 bp, Unknown
  misc_feature (1)..( 3000): cDNA_ID_2177149_gDNA_ID_1971813_Annot_ID_175856 3000 nt of promoter + ATG
gaaaagtaagtaccatttatcaggaaaagtaaaagtaataccatcataagatttgtaaacgtaacatcctgcagtggtagagaaacaaaacaaagcattagccgaaccaaatatctacaatcaaagtgaattttgactatcaccaaaaggaataaatctaatataaactaaaccttagatacatgtatataatattgggatatagagtagacaatagtggatggtggtagtggaaccacttaatgcgatttcaccttccctgtttttctccctttcacacaaaaacaaaacaaaattattaaaaaatcatgtcacaccaaatgtcttatttaccatgataccctatctcataaactccttaaacaaacaatagctccctaaactcaagtatccattctcacctctaaatcaatttcttacgttttctctcgtcaaagtctttttttctttgtcacgagatggagtccggtaatagtagtagcatgcaatcttcaagcggcggtggcggaggaggagaagaagaatacgattcacgcgccgcagatcaatccatttccgccttcttcgaccaccacaacaaccacgtgtcatctatacccacgccgcaacaaaaccatcgcaacctcctccatttcgaccataacaacaacaactctctaataccaccaaactactttaacaacaacacgttcttacccgtaaaccaacaacccgacccgatttctcaactcgacctccgaacctcctccgccacgtcatcactccctcctactaacaatataggagtaatcaagaaaacaaagaaaagatctcgagcatcaagaagagcaccaacgacggttctaacgacggatacttccaacttccgagcgatggttcaagagtttaccggaatcccagctccaccgctattcaacaacaactccatcgtgaacaccacgcgcctcaacactttcctcggcttgtcttcttcttcgccaaacacttacaacaccaacaatctcttgttacgaccgtttgctcaaaaactcactccagcgactcctctcttatccggatcacaaattcagcaatatcaaaaccctaacaacggtttcgaggatatgaatctgcaagctcttcttcaagctcatatttcaaaccctagaagcaatgagcacgatcagtttggtcttggtatgatgcagactccatctactaatcctcctactacaacggcagcggctaacgggaacataaacaccggtgataatggaagctacggtggctccgatcatgaacataataatgacggtacttggttatcttcgtcttccgaccagagaacataaatatatttatgtatagtccaagtccgaaatcaaagctaatctcttgacatgattactcaacaaattaaacatagcacatatagcatgatgaagttactcgtttatatattctatatttcagtataaaccactttaaaacttttttcgtgtagggtttgttaattatttaatacttaattaatatgcttgttatttgttaatcttagttttttccataactatatgttggtaagtattagttagtagatggatctcaccatttgaatcagattttcttggtatattttcttataattatatagaacttttaaattttaatgacaacgatgacttgcgatatgaaattttaatttttcaacaatcaatatacagtacgtggttttgggatcactacggttaatatttctcctaattaatattggagtgaatggtggcgaaatttggggaatcttccacggccgccggattgtggaatatggttttgggaccatagtatataattattaattaattatagacttgtggtgatttgaaatttgataaattactgttctcccatgtgcttattcatttttggtgtatcatctacattaacgtcaatttttattgacttgactctcattttaccataccaacagatttgaaatttgaaaatttcccaagcaaaagaaaaacaggtaatcaataatgataattatacatacattttggttttgacctacttttgtcatatgacaatttatctttatagacacttttacttctattattataagtctctttgtttgtgaataggggcaaatttcatttgaccgcctccgacaaccattgaccttgtcacggctctgaatgtgatgcgtctacaaaattcctaacttttttcagtcttctcattaaccaatcaatcgttagaatattcagcttaatttatatctctttctagtctctagcttaacaacacttcagaatgaaatgtcagttctttgtaagcggggttttcaataatatcatttgctactgtatagtataatagtaactcttaaaaataataattcttgtttttcacaataagatttgatgatggattgatggtcgcaaaacaaataatgacatttgatgaaaaatcttttgcttgttcttgtgtatacaaaagttcaaatgattttgatatttttttgtccacggaccagttacacttaagtcaccaatgcactgtataacctatacacatcacttacataaactatcaacaatgtgcatatatgtgtatctctatctaaatggaatatataataatgggtgatgatgatggtttaatattatggtggtggttatggtggaccatgatatcaagctattgtcgcactgatgggttttctatgtattcagatgatactcggtttcatagttgagtgataactaggtctggccattatcttactatccaaataattcgattcgggttctcaattttgtgggccgattggctccaaaagtttcattattatttttgttctgttgaaaatagaaatccaaaaaaatacgggtgggtcccataatcatatccattgtaccgttgcacactcaaaagacaaaagattcagaccaaaggctctggcttcacgcagataaggaagcagagatcgaaacgaagactcaaagaagaatg

SEQ ID NO: 8505 - DNA, 3000 bp, Unknown
  misc_feature (1)..( 3000): cDNA_ID_3084324_gDNA_ID_1971813_Annot_ID_175854 3000 nt of promoter + ATG
agctgcaacttgctcctctgacaagggtaagtaatatatcctggggatcgcttttgtcttcttgaatagatcatcaagagtgacaatgggaggttcttgttcctcaggggctataggaggagggggaggcagaggaagacgttctacaacgtgaggtggtttggccagaggtggtggtggtggaagagcagttggaggtggccgcgaaagagtctgagcttgtggctgatgctgaggctgaggaggcagaggagcttccagtttttcttttacttcttctgctctaacaaattcagctatcagatggcggcctccattaggtggccactggaggttatacactgcttctcttgttgctgctgcttcttcaaccgagggatactgcagtcacgtcacaactcactcatgttacacaaaattctttggatatttagataattgaattcgaaagtacacaaacagaatcaacatttttgtaaatcaaaaggatttgaagaagcggtcttaccgatacatagcagtgggtcttaatgtggtccatccagaaactagtgacatttccggttttacccaggagctcctgaacagctttcagtgtgaacggcctaaggaaacggtcaatcctgagggaatttgtaggctcctttggagatggaggaactgccaataaatattgaacacatctatcaaacaaagctttaagacaatgaataagagatggaaacatacatagagggggtgctgtattacatacccacacgttccttgggtccatcttcactaaccgaagagtcagaccttgagaagtcgcgcttcagaccagtcgaccttggtgttgtagtgggtgtagcactattagtgatctgtgcttcaggaactttaatactattagagttccatcggcgcctctttgcaggttcattgtttccaacagcttcttgatctacattgagttacaaagaaagacatttcagcatacatagctagaatttcaaaacagatgcttcaaaagccaatatatataagaagtagccataaacgacaaagatgaaacaactattaaacactaccagtatatgcctcaaacaccaacattacagattaaacacagtaaaagatttgattaataaaacaaatgaatatgagaggaattaccattagcaggaagctttcttttgtcagaagccaccagtgggtgacttttattttcaggggatttccctttccccgcatccatatcagcacggctttcctccttagaaagcatttcaatttttgcactcttatcatcagatgtaattgactcggattgctttgtctccggctcatcctccatagactcatcaccagaacttctatctaaattcaacttttctgagtcgcctgcatcgataatattattttctttgatcatatctgcgtttgcagcattgctgtcatccccacctccaacagatgtcttctgctcaagtggctcctcgacatccattggatgcgattcgccaacgactgttgatggctcttggaacttattaacattttgttctaatttgacattatcagcaattttgttatcctttagttctattttttcattatttgacacagaatcagtagaaatacaatcagattttacctcaaaccctgtaacggggatgacctcagatacctggttgtacatagcagatttttcaagcactgcctctgatggttgagccttagaatccccaccatccaacccactaaatggttcattattctcagatttgtgctcactagacgccacttgcacaactgctgcatcacgtgcaaccactgaactatcaagaccagctatgtctctaacatcatcaactttctctttctcatcttcatcactagcgaatggcacagcgttaacctctggttctgaaaacaccggggctggtgtagtctcaacaccagctgaagcttcagttgttatcttggtctgagttggttctggggttttctcagctgtaacaggagttgtctcagtgctaaatgccgcttcaacaggagtaacaggagtggtttgattacgatcacctacagtaacaggaaacatctgaggctcttgattggctttttcagcagcagcaacagtagcactattgatcctttcagactcttcttgctcagcacgaagtgcttcatcaagacgcctaaccaattcctccttcaagcctcttgttgttagtctccgtcttttaagctcttctttcaattccgtaaccttccacttatcaattggtcggttgtccaagactggaaaaggcgatgacgacatcttagcttatgagagagctgattctgaaaaaatattgaatataaaattagagaaacccatcgcagaggacaaaacctaaatcagacaaattagcaaagcaacgcagcaaatctatataatttaaaaccaaagcttaaatctttaacaaacccaatccaaaagagctagaagtttaaagatgacttacaacaaaatggcttgaaacttcctctgatgggtaaaagaaggcaggaaaaatgtaaaaccctaaattcgtagcataagaagaatgaaacaattagagagacaagacaacaatcaaaacccagtacggaagattacaaatttatcaaatttccgactcaaaatagattcttcaacaccagattttactctcttaagacgaagaagaaaaagaagaacgcaaaccttaaaaacgaaatccagaagcaatggaacggagagagagtgacctttggttgaagaattctaatcgagaatgaaagataaagcggacattgggaatttttctatcccgtcattacaaaaattgggaattttggaaagaggaggcgaattctagggttcttgttcgtcgagtggttttgatattggggaaaaactcgaggacctgaagtgataatgggtcgcattgtattgtgaaatgtctaaattaccctttttctcaagtaattttgtacggcgtcgtttca

SEQ ID NO: 8506 - DNA, 3000 bp, Unknown
  misc_feature (1)..( 3000): cDNA_ID_1824449_gDNA_ID_1971813_Annot_ID_175853 3000 nt of promoter + ATG
acatatgtcctggactgagtaatcaagtagagataaaaagataaacgcaccttatccaatattgctgcctcctctatacgcattagctcacgtgccctaaggtctcttaactcattttcatacttctcctgagtacaatcaaaacaattggcagtagtgtatacgttaaaacctcttataaagcaaagacactacagaaataaatactcatacgacatattctgtcttttaaccaaccttcaaggctcgtaattcttcagcaaaaacctgggcatctaaatgggcctgttgcttctcagctgcatgaatggcagccagaaaatcaagtaccaactttccatcctcagtcatgtaactatctttcagcccctcggttgagttaggaaaggcctaattcacgaaactatccagattaagaacacttttctgcaaattatcaatcaatataaagcactgaagtaaggaacagagacaggaatatcaagtattaaacctcagtttctttagttatttgctcccctattgacgaggacccagtgctttcagtatcactgccttctagattatattccttaaggagagaacctggtaattgtacttcccgctcaatgccatcctgtaagagagtgattgattagatattcatcatctcaggtaacttatataggccatagaaaaatcaagtatttaagaggggtttgaattcaactaaagcttcataagaacctcccgctttccttagagagtaataggtatctaattcaactaattttagttccctacattccttcttaaaaaatcagtttctatcagaatttgattcaggacagttaacataatgtccatatgaatatcccatttcaaccaatataataagaatttgcacaaaacaaaggagtgcttttaactccaacaatgtagcagaatccctttacataggtgtatcccctttcaaaatacaagcattctggtccaatgcaggaaaaggacgagacaagaaaaatttcatgaaacaaggaatactgagacattcatcttctgatttttaaatctgtaagctattcatttcattacttgtagttctttttcaagttcagcaaaggaaattttagtacctcaggtgtctttagagcggcaggatcctttggtgaagcagattccgtttcgctttctctatgaaccgaactagactgggcattaacaataataggactatccccaggtttgggtacagcttccaacttcacactttctgcctcagaaataatttctgatggcatgtccggcttagctcctgaatcttcagatgcagaaataggcaagtttatctctgctctatcaatgacagtttcttgaggtgtctcctcttggttagaagaaatatatgtaaaacggtcagatgatagatcagactcgggttgcagttctatgtcactctgcactccctcggaagcttcagaatgagtaacttgaggttgcgtttcaacttttccatctttttcagtagaatcttcaacaccggaaggtacattcaaatgatgagcctcctccagcttttcagttagagcatcagaatgaattcgctcacttaatttctgctgttctttccccagatattgatccaaatagccagtctgatacgctaccagaaaagccccagcgattgcaacacctcctataaccacttttgaagaatttcctttagtaggaggaggaggagtcacttttggaggatcaacttttgaggcatctggtttcccaacgggtttagctccagggagaccatttttaccagatgtagatgcatttctcgaagagctcaaatgaaacctctgatgcataacataacacaatcaatccaagagagtactcacaagacgctaactaagaatcacaactaaattcataactcacctgagctcccaaattcctcgggaatctctttattgacaaacgagaagacagctcgagaaccgacctaagcaaaagagcaacaacataaaccacattcggtatgattcacaagagaatcaaagtcacaaatagctctcaatttagaggaatcaataaaatcagacccgaaagctacgcaacgagattgatggaacaagagaagccaaaattcaacaagatggattgagataataaacttagggttcaggaaacatacttccgaagcattatcgcgtcgcgtctctggtgatacaaacgccgaacgagagagcgaagatgttacgacggacggagaagactcggagcctccggtgagtaaaataatagtattctctgaaaaccccaaaagcattgaaacgacgccgtacaaaattacttgagaaaaagggtaatttagacatttcacaatacaatgcgacccattatcacttcaggtcctcgagtttttccccaatatcaaaaccactcgacgaacaagaaccctagaattcgcctcctctttccaaaattcccaatttttgtaatgacgggatagaaaaattcccaatgtccgctttatctttcattctcgattagaattcttcaaccaaaggtcactctctctccgttccattgcttctggatttcgtttttaaggtttgcgttcttctttttcttcttcgtcttaagagagtaaaatctggtgttgaagaatctattttgagtcggaaatttgataaatttgtaatcttccgtactgggttttgattgttgtcttgtctctctaattgtttcattcttcttatgctacgaatttagggttttacatttttcctgccttcttttacccatcagaggaagtttcaagccattttgttgtaagtcatctttaaacttctagctcttttggattgggtttgttaaagatttaagctttggttttaaattatatagatttgctgcgttgctttgctaatttgtctgatttaggttttgtcctctgcgatgggtttctctaattttatattcaatattttttcagaatcagctctctcataagctaagatg

SEQ ID NO: 8507 - DNA, 3000 bp, Unknown
  misc_feature (1)..( 3000): cDNA_ID_2177138_gDNA_ID_1971813_Annot_ID_175850 3000 nt of promoter + ATG
caaagtattgttgcgtatcacggtgcggttgcgacagacgatggacggtgttctgcaatagggacgaatgttcttcgtcaaggaggaaacgcgattgatgcgtcggtggctgctgctctttgtttgggcgttgtcagtcccgcatctagcggtataggcggtggagcgtttacaatgattaagctagctaatggcacggaagttgcttatgattccagagaaaccgctcctctaagcgccactgaggtaagtaacacgttttacagtaataacgtctttctttttactcttcccaaaatgagcattttggataacgtacgtttttgagttatggacagtgtttttttaatcaaagatatttattggctgtttctcttgatgtaggatatgtatggtgataatcctgagcgaaagaagaaaggatccttgtcagtaggcgttcccggggaagtcgcgggtctatacacggcttggacacaacacgggaagttaccgtggaagcagttagtagaacctgctgagaaacttgcagctgaaggattcaagatttcaaaatatctctatatgcagatgaatgcgactagaagcgatatcttagcggacaaaggtctctctgagctatttgtttcaaatggagagctcaagaaaccaggggcgatttgccgtaacccgaaattggctgatacactaagccaaatcgctgaatacggtccaaaagcgttttacaatggcacggttgggtttaacctagtgagtgatatacaaaaagccggagggataataactttgaaagatttgcagaattacaacgttaaggttaaagaaccattatctacggagattcttggataccgattactcggcatgcctcctccttcatctggtggccctgcaatgatgcttgtaagtaaagtatttttgtgaaaatttcacatttcatcaaacctaggtttatcttttggagtttctcttgtgttgcagattttgaacattcttgctcaatatggtattccatcgggtgtttccggccccctcggtgttcatcgactagttgaggctctcaaacatgcattcgcagttagaatgaacctcggggatccagattttgtccctgaagttactaatgttgttgcagatatgttatctccaaagtttgcacaagacttgaagagcaagataaacgatgagaagacctttgatccaaaatattacggtggcaagtaggttttttcaatctttttccgcaaatcttttttcttcgattctggatatctcaatctttttctcctattcgtagatggggtcagatcaaggatcatgggacgagccatttatcgataatagattctgagagaaatgctgtttcaatgactagtacaatcaacggatactttggggcaataatgctgtctccgagcaccggaatcgttctaaacaacgaaatggacgatttctcgatcccgacgaaatccggaggtgacccagatgtgcccccaccagcaccggctaacttcatccgaccggggaaacgacctttgtcctctatgactcccaccattgtactcaaggcaagaaaaaagaaaaaaccctagctcttgtgctacaagtaactctgagtactttaggttctaaacgatggttacttctgtgttggtttacacaggacggtaaagtgaaagcagcattgggtgcgagtggaggaatgtacatcatcgccggtacaacacaagtttacttaaatcatttcttcctcaacatggatcctctctcttccgttgttgctccaagaatctaccaccaggtttttgctattttttgtccttgtacccaagatagaaactttcttgttctttgctaattttacttttgtaacctcatttgtagctgataccgaacaaagcttcgtatgagaattggacgacagtgtatagtgaccatttcgagattcctgaagagataagacttgtgttggagaagaaaggtcaagtcctaacgccgatcgccggagggacgatttctcagctcatagttgaacaatccgatggaaaatccggtggaattagtaagcttgtggcggttagtgatccaaggaaaggagggttcccttcaggatattgaaatttggatttgactttgttttcaattatatatcatcgaacttgtgatgtactagtatgaacctttatattcgatgaatataatatgaaagtaataaagtttgtttgcgataatgttgttgatccagagatttttctttaatcataaattcataatagttagtatggtgaatattggaattaaactactaaaccttttgctcttgcattagtgggggtcgtggtatgagtcgatgaccagtaaaagacaaaattaataaagatcttaatgtaaatgcgttggttgttatggacgacagctctattagcataattaattagcatgacttgatgatccttcgtcaagtgatagtcatgtacacgtctaagaccaaatgtgaaaattgtgataatcttgaaacctatatagtactatttcatattttatatacaatgttaattagctcggagttaggtccactaactaagtctaattactaaaataatacaatcttctaacttaacaactaatcatggtgcacatgcaaaattaaaattaaaaaaaaagatttggaggattaatactccaaagtccaaaccttggatactccgcctctagtcagtgacacgtcatataattagcagacgataatcggaagagatttgttacagtgtcactgtcggttgcttaatcagcaatctcattcaaatggaatcttaatacatgtaggaatctttttcctaagaatcatatttgacacgtcatcatttcttaaaaatcttttgatcctcctacttaagtagcactaatcaatccctcactaaactctagtcttaatcacactatatatatatagtactagtgtgatttgcccaacttgtcatcattatctctatctaataa

SEQ ID NO: 8508 - DNA, 3000 bp, Unknown
  misc_feature (1)..( 3000): cDNA_ID_2177130_gDNA_ID_1971813_Annot_ID_175848 3000 nt of promoter + ATG
catatatatataaacaaaacatcattgttgttggaattaccctagcatgctgaagaagaacacacataacaaacatatctggtttttggaacacaaggtttaaccattacaatttgaaagtgtctgaatcgttgaagcttttcaactgttttcctctgcaaaatcaattcattcacataagaacaaatttctgtttgtatctcataggaggaagcaagaacaaagaaagacagtgatctagaaacataccatttattgctcccatgttgtggtcttctttgtagacccccaaaggagagccatgcacagagagcatcatctctccagcttttggtagcctcagagtctttggagtcattccaaaagaaagtctttgcccattaacctgcaaaatataaaagtttcattgtagagtctctccttgtatgcccaaaatctatcattgaaatgctcattctgcaacagagaatgtaattgataaatgtcgaaaccataaactcaatttcttctctctagatcaatgtacaaacaaaatctcgaaggagaaaacatgctaaagaatcaaacaaagaattctagagtaggtacgagataatttgcatcaagacagaaatagggaatataatcataaatacataccccaggagtctgaaaagcatcatggcctggaagcatttggttctcagatgtcccctgaaagacctaataaccattggaaaatagcaaattagcgttttctacttactgtcctgaagtagttttgcatacttttggaaggccgaagaaaaatacaaggttgacaaaattaaaattgataaaacctaaacatcactaaaagaaacaagtaaaggcactactcagtttggtgaaagcctgcaaaattgataaaagcagatgacaaattcactaaatgttctacaacagttgtatctaatcattcaagtctgttctaataggattaagggaaccaccagaaagaaaatggcaggaagacaagatataaacttacaagattatcgagctgtgggttatcagttcctaacaggttagctttcactgccaccaaagacaaaaataaaagtaaaattcaaagtcaaattcctaacaaaagaacctaagtgagctttacataccgttgtcaggtaaatcatagccaccaagagatgacctactgtataaatcggtaaaacgcatcgacaagcgtttcaaaatagaataattcatgtcaacgccattctcatttccagcaaacgaatcaccattttcgtctctccactttaactcaatctccccagtttcttcgtttctcgatatcgataaatccggaagattctctttaaagaagtctaacacaggagtgtgtagctgttcctcagtaaaatacgaacgaagcaaccgcaatgcagttaacatttgttcaatctcaacatcacggattgctctaatcgcagcaatttgtctttcgactacacaatgttacccaatacaccaaaaatcagatcatgataatcctaaatttctgagttgggtattggaataattgataccttcttcgtcgacgaagtcttctttcttctcttcgattcgaattcgtttctcgtcgttcctatcttcttcagtgagtttgacacactcctttgcttttcgcttcggcattatcgatttctttcgaagaattagatgctcaattcgaggaattgattgcaatttcaaatcacaatctgaaattcaaaaccctagaaacagtgaggaagatgaaaaacccccaaaatcaaaaggggttttgaaaataatattaaataaataaatgggcgggagttacgcttaaacgaaattaaagaaacgaaattacgaaaatatccataaagttgaatacggcccatgggctcaataatattatgatcaccaaataacatttctaaataaagcccgaattgtgatatttttttaaaaatagttatgtttctaataaattcgatgtatttaaaagttgtggtgacaaaagatcggaaaaagaaaaagaatgttctttctttcacggtgtccacaaggctgacaagcatgattaagacgaccactaaagttttcttgacaccaacattgtacttactttagatgctcttcacgagtttgcttcaaatgtaataaaaaaacttcttttagttacatgaatcgagatcttattactgaactaattatgggagaatattccccatttttctaatattaatggcgaggtatcaatctacatctatagccaatttagccacgtgtgtgggccaacttttatccgttgaataagtgcttcaacgtataattaaagacttttgaaactcttatatggacatataattaaatgacttggcctcaacgtatacatcatagttttatatctcatctctaccttccatagaaactcatttgaaacttttgggcagagagtctgaacaatcgctttgttgtcgtcaagaacgatacgtccctataaatgtaagttattttgtttctctaaattcagaaatatcccacctaaaaattcgactgtttggtatttttagtaacaagcttcatgaataatattggagattttcttggataaattattgattttcatctaagttattccaagtttatgaatttcccactcatcatatttagaagaactttgattttttttcttgggtggcttttgggtcaaaacaaaagaatgataaagtctcattattattttgagcttttgttcatgtactgtgtggtcaaagacagtaacataaagtctttgttggctttgagttttagcgtatacgcgtaagactggttttaacattttcaatagttgactaatctctattttcaattttgttttcgggaaagttcgaggattcttcaaaatttattgtttatatgaatctgtttctgtttaaacgttgaacatcattttctttttgtgtttatcctctgtgattaatctctttgtttgtttctctatcaatagtagca

SEQ ID NO: 8509 - DNA, 3000 bp, Unknown; identical to SEQ ID NO: 8502
  misc_feature (1)..( 3000): cDNA_ID_3045638_gDNA_ID_1971813_Annot_ID_175846 3000 nt of promoter + ATG

SEQ ID NO: 8510 - DNA, 3000 bp, Unknown; identical to SEQ ID NO: 8500
  misc_feature (1)..( 3000): cDNA_ID_2107183_gDNA_ID_1971813_Annot_ID_175836 3000 nt of promoter + ATG

SEQ ID NO: 8511 - DNA, 3000 bp, Unknown; identical to SEQ ID NO: 8498
  misc_feature (1)..( 3000): cDNA_ID_3094008_gDNA_ID_1971813_Annot_ID_175829 3000 nt of promoter + ATG

SEQ ID NO: 8512 - DNA, 1350 bp, Unknown
  misc_feature (1)..( 1350): cDNA_ID_2177068_gDNA_ID_1971813_Annot_ID_175817 3000 nt of promoter + ATG
attagggttttagatttgggactaagttattcaatgtcccattagcagaattgatttctcttagtgcttaataggattgaacaaagtccctcaaatcttgatccatctgtcactttgtcagcagtcttaattggtttcttgctgatcattatatgatgggaaataacatataatctcgattttgattaattggtagaattgcttaatattggtcgatgaggataagatgaaggcttgtttctcaaaacattcgcagtggccgcctaaggctttcgcctttcgccgggcttgagagcttatgatgtttttatccttccttggatgtctgagaccaattatgttttagttagatgattgttgctgttagttttcggttgatgaggattatattaaggcttgtttctcaaaacattcgcagtggccgcctaaagctttcgcctttcgccaggcttgagagctaatgcagctttatccttccttggatgtctgaaaccgatgaatgttttaattctcgtttttatgtttttgtctgtaagaaagatcaatgatgataaacttaaggcttgtttctcaaaacattcgcagtggccgcctaaagctttcgcctttcgccgggcttgagagttaatgcagcttttatccttccttggatgtctgagatctttattcactctatcgattatcttgtctgtttaggttattccttctagtagattattatcgtctattttttgtgttgaatttgcaggtaatttcttggtggtagcttcttcgctttactggcttttggagaaagagttccttacgtttcctgtaatttcctttaatctgtaaaaatcattgtcagatttatttacaatctgtaaagagttctttgttgtaaacaattttgttcattggtgatgaaattttgttctcattatgaattttatttgtgatgaaataccgtgattcctttatttatcaactttgaaagcttattactgaaaactttgtttgagcttcaaagaatcaatgatctctgaaagctgtaatccacattcaacaaataacactcttatatacaaaaaaaaaatactcgaaatttagaaattctatgtttacaagttacaatagttaggaaattgtaatttcaaatcaaataagctaaaaagatgttattattaaaatgttcagacgaattaaaccggacctaatttgcttggtcttttggccgctgaccttgtctgattgatcgggatttttgtacggcgaatcaaaatccaccgaacaaaccggaaggctaggatgctcaagctttacggattgacttagagagagatcgatttgaactgtgtcattttgagcatg

SEQ ID NO: 8513 - DNA, 3000 bp, Unknown
  misc_feature (1)..( 3000): cDNA_ID_3045962_gDNA_ID_1971814_Annot_ID_58173 3000 nt of promoter + ATG
atgcatgccagttaagtaacagatctagtactacttttctcttaaatgtacgtaaagagagattaaggagttgttattagattgaggtttttaatggacttgaattggcttgataatatgtgggtttgattttaaagttcaatgttttacgtacattttgaaatacttgataaaatgtttggattgttttttcatcttttatgaataaaaatacattcaaatcctataagattttgattatttttaattagaaaaaaattaaaccctaagagaaaataaggaacccaagcaacaatttataaaaatttttagttctagtttgtaagtttaacgaaattattaataataatggtgtgattcgagggaagatgtttgtgaagttgatgtagacaaagaaataagatgtgagaggtgaaagataaaaagtagtcggagaagatcgcatgagcttagaaacgaagtctcggagaattcctataagaaccacacgacggagagagggatcaaaacccagtctcagatcgccgtgtcaagcaccagatctcccgccattgataagtctcttttaacggtctcttacctcaatccaatatcaaatcgagacacaaccaaattggaccaaaagaaccgaacttaaaccgaagaatcagaattcgatagaaataaaccgaattaatttcggttcggatcaattttatcaacccgaaccaacaaaaacccggaaacatttacagctaaagacttctcatgtctcaacactcgagagctggactcgaaaattcatctctcaaatcctctgaaaccctaattcctctctaacgtcaattttcttccggagaacagaaatggcggaatgtccgacggatctcatcaacgaaatgtttctccgtctcagagcaactacgctcgtaaagtgtcgcgtcctctcaaagccttgcttctctttgatcgacagtcccgagttcgtctcatctcatctccgtcgcagactcgaaacgggagaacatctcatgatcttactccgaggacctcgtcttctacgcacggtggagctagactcgcctgagaacgtctccgacatccctcatcctttacaagccggaggttttacagaggtttttggttcatttaacggtgtcatagggttatgtaactctcctgttgatctagcgatctttaatccttcgactaggaagattcaccgtttaccaattgagccaattgatttcccagaacgtgacatcactcgtgagtatgtgttttacggtttgggttatgattctgtgggcgatgactttaaagttgtgaggattgttcagtgtaagcttaaagaaggtaaaaagaaatttccttgccctgttgaagtcaaagttttcagcttgaagaagaattcgtggaagagagtgtgtcttatgttcgagtttcagattctttggatttcgtactattaccatctcttgcctcgtcgtggctatggtgtggttgttaacaaccatcttcactggattttgcctcgaaggcagggagtcattgcctttaacgcgataatcaaatatgatcttgcctctgatgacattggagtcctcagtttcccacaggagctttacattgaagataacatggatattggtgtgttagatggctgcgtttgtttgatgtgttacgacgagtatagccatgttgatgtttgggttttgaaagagtatgaggattataaatcttggactaagctgtatagggtgccgaaaccagagagtgttgaatcggttgagttcattagacctctgatctgttccaaggacaggagcaagattttgctggagattaacaatgcggcgaatctcatgtggtttgatttggaaagtcagagtcttacaactgccggaatagagtgtgatagttcatttaccgcagacatcctcgtgagtagccttgttttgggatgtaaaggagatcctactcaagctcagcgcagtaaagatcagaagatgatgccaaagagtactaaaaggtggtatgcccttctctagttagtgttttcttacgcagtttgtttccatgaagaattgtagaaagggtttaaccgtatcaacatgcttaaacatcttgtgttacattctcagggatggttttctgtccaagggattcaagctgaagctatgagcaaagcaagggaaacttctgagcccaaacattagattaaggtaagtgaaatggatctaaagatcttgagtatttccttaagttggcatcttcttttctttcgatgtgagatttccaatcttatcatagtttaacataaacaagcttaggagctttatctaaaatctgactatttcaagtgtttttgagtttgaaacatgtagaagaaaatcttgatctgtgtttgatttcaggtacagtaacagtagcagtggcagggggaaaggatatggcaaaatcctaaacccatgtgagatcttagtactaataagcttaaccctatgtacgtagtatgatgtcgtaaggaaataataagatagtgttcttctatatgtaatcgactgaaatttatatgtaaaactcttatcagtatggtcttttgcaatttgatatgacttgaaactatcaatctcaatcaaaagtaaatctagtcgcaaatattgttgatgaagaggatctactagagtttagagaacgcaatgttatgaacgtaaatcgtctatagctaaacctaaacacaacatcgtttatttaaaagagatgtcaaatagtccaaattggacaaacataaaccgaactaaaccgaaataattgaaataagacagaaataaccgacatcaaaggtcggtttggtcccagattcaccaatccgaagcgaaacccgaaaacccgacccgagtcatgtttctatatatataccttcttctttttttgggttaaggacagatttgtaaacattctcaaatccttcaaaaaccctaatttctttctgtgagcttattgagaacgaagaagatg

SEQ ID NO: 8514 - DNA, 3000 bp, Unknown
  misc_feature (1)..( 3000): cDNA_ID_2040236_gDNA_ID_1971814_Annot_ID_58180 3000 nt of promoter + ATG
ctatatgaaaactagatgtgtgtttcttatatcctttctacacttgtcagtgatgatatgtaagaattaatatcactaaatgtacctctaaagtcgaccaaaactagaactcacatctttatcaacaacatagagaaccttacgttttttggtttcataggtaggtacaatggtaagtcagtcgcaaggagcaagtgctttattttgggagagaatttacagcagccttggttgtcttgcagatggtaagtgtatcagacaaatctttgaaatcgtcccttgacaagtacacaccgtagtccaaaagtctagtaatctgagcctttcttcattgtccatttcatctaccgtttgccaaaatcagatgataacgtcatcgttcttatcaaatccatcatagaatgtatgcgctctccactagtctggacatatattttctcataaaatcaaacgactctacactctttggtttcgatacacttttagtacaatcatcttcttcattaggacacgaaggaattgtcattctagttgatcgtatgcttactcatatctgtttttattgccataaacttctttttgcatgtcatggctaatatgtgaacattagtacaatcatttaagttctttttttcctacactgataaccaatttattagtctttagccaaattaaataaaatataataactaattttgaaacatgtaatgactgaaaatgcaaagaaagaagacaaagatggtatacaataatagccttttaacaatttggaattttgatgataagaatgtttggatttctatatgggaactgtgctggcctagcagacataaatatagttaagatatttttcaaaataaaaaaataaaatgaagatccttatttcgaaagtaaatgtaataaagaaatttattttaatttgattttaatttaattttaactatcaaatttttataagacgaagaaaaaattgagaaattagcatttgtccctgtgctaggtttgaaaacatttttaaaatctggatccgacgtttaaaattctgattttttttatttatagatatgaaatatttaactcatttaagttctacttctagcaaagaaaaaaaaaaaaaagtttctacttctagcgaatcagttcacttgaaaatgccaaattgagttcacgggaccatgcacatgtatgtatatagtttacgtgacaattaaaaaaaacaaattaaactatattgatgtgaatgatttactatataactaccacattcacatcaattcaaatctgaattactacaaaacaattgattaactagggattatctgctaacaagaaagaattataacaagctaatgacagttcatcgcaagaatgatgtaaaatttcactgtactagtgcatgatgtaaaatgatagtatgatatttctgttgggtaatgggtctatcagttagaaagcagaaacaaaatgttttggagatcagaattgagagagtacgttcattttgagacaaactccaaacttggaaatccaaattaaggtcctgtttgtttgtccatttggatgaaccatctcaatgaaaatgaaaattgttgtttgtttttcatgttttaatagatcatttgaatgattcagttgaatgcttttatctaaactcatccaaaaaataaaaaaaatctgactgagtttgatttgttcattctgctgaagctgatttagccaaaattataaaatgtcaataataccctaatctaatatatggaattacacccaaaaaccacatctcttcttcaccctctcctcgacacaaaacactcaaaattgagattcatagccgtcaatgatgctgattcttcgccggtgatctcgccgtcgccgattcttcactggagactcgtcggatccatcgccggagtgtagcaggtttgtgtttctctctctctctctctccctctcttgcttcctctctctcgctccatgtctctctcgttgtttctctttgtatccttgttgcaatcacttgttcttgggtttgatccaccatggttacattgtttaattgtgggtttgctttactttgctttgtgttgcttttgattcttcgattagctttagtttacggcttgtgttccttatattgctttgtgttgctttgcttgctttgtgttgcttttgagtcttcgatttgctcttaagaggctttgttgtctctacattaggagcaacagaaccatttggtgctgcgactttagcatctgcactttagccctctttagattgaccatccatagttacaaacctcagctgcctccttgacgtgttcaattgcatccaaagtggaattgtttttgtgtttataggtcttttgtatttttgatgcagaaagctaggatccagattgtgttatctgatttgttttgagatacaatgattgatgatgttgtgactcgtgtatagctcattgatgaaaaactttgcattagtctctatttagtctcgaagaacaagtttggctctgagttttgttgattgatgatgttgtgactcgtgtatagcttataactgcttatttataagggagaatttcatcttataaaagattttttctcttcagtccttgtttcagcaagttttgtctccaagtaagaaagctttggtttctcaggtatgtcctctataaatatattgctttcgatattcaatagtattaattagtggttgcatttggctttctgtagtagtagcatgagttcgtctaaggtttgagttcaaatactgtagaaatagtcaagaataatatctcatgattgttcaatatcaaatagtttttctttgctttgctttgttatctctgatctttgtacacgttttatttgctttgctttgttatcataagttgtgtattgtttgctttgttatctctgatctttgttttatttgtttggtatctttgatcttgttctaacacaactacaaaacgtttgttttcattgtgtgctacag

SEQ ID NO: 8515 - DNA, 3000 bp, Unknown
  misc_feature (1)..( 3000): cDNA_ID_1823032_gDNA_ID_1971814_Annot_ID_58186 3000 nt of promoter + ATG
gccgattggtactccaagctcgccgctctctcccaccgtcacaatctcgcttgggacgccggaaccggaaacggccaagctgccatcggagtatgtattttctcctccctctctttcttctttcttacatttcccgatctgaaatctcgtaacgcgaatctctgattttttacgacttgttgcttagatcgcggaacactacgaaagagtcgttgcgacggacgttagcgagacgatgttgaatctcggaaaaccgcatccgaaagtaacgtaccaccacacgccctcgtcgatgacggaagatgaaatggtagatcttattggaggagagaactctgtggatttgataacggtggctaccgccgtacactggttcgatctcccgagattctacgcgatcgcgaatcgtctcctccgtaaaccaggaggaatcatcgccgtgtggagctacaacactgacatggtggtgaatcccgagttcgactcggtgatgactcggttcatcgctgaaacgttgccgtattgtaaattcccagagagtcagtattttttggacggatataagacgttgccgtttccgtttgagagcgtgggtttgggctcagagggaaagcccatggaactggagatgaagaaaacggtgtcgtttgaaggattcttgcggatgctaagatcgtggtctgccgttggtgctgctaaagaaaaaggagtagacttattgtcggacaatgtagtcaaagagctcgagacggcttggggtggttatgagctggttcgaaccattgtttacaagacgtttatgctcgcaggaaccgttccttagaaactagcttctttttaatttggtatggctaagtctgaaacttgatatcttaagggtatttgaaacctcatgaaataacaaaaacaggataaacataaaaagtttattttaccttttcatcgaacatcaaaacgaacatgtgaaaacgtttgtaatgttttcgctttatttcaacaaacatagattgtgataaagacgcatatgattattagagaaacatactttgcaccgatatatattactgaactggtttgcttatttagtcttatgagaagattaagggcatctgaaaccaagtgggggaattatacggcagagtctaagaacttggttaactctcacattgatagtcaagaaattaaagattgtgattctaacggcattgcagatgcaggcagatgccgtagcagcgtcaagcccagtcactagagtgcaacatggcaatactgattgattgttgatgaggattaagctgaggttaagcacgttagtacaagataggaattgggtcgagtctctgggacacaccggagcttgaggtggaggagcttgggcctttgtgaagacaaggaagacgaggttaatggtgaggaagagagctatagcgtttttcatcatgttctttgaagccatgttttgaaaatgttaattatgctctctctcttttgtttagttctgagaggagtattgagtatttagtttgggaggtgagagtttgtatttatagttgttagaacatttggttagattactgtttgatatttcttttggatgaaagtttacaaaaataaaaaataatgccaacttttcggaaaattaatttgaatttcgcattttagccaaaagtaaaaaaagaagaagaagatactatataatcaactctcaagatatttaaaccttatctactcatctagagaagaggttaggcaaggaacaatttgtcaatgcccaaaacaatacaaactctatcaaagttgttattcttgctgaacgcacactattagtattaatttaacaaatgtcttacaatagagttttggtgaccaaggtgtaatttgaaaatttgccaagtctacgaataaaaggtttggcgatgaaattaatgtaaaacgtctacccaaataaagtcaaattccacattccataacgtacttaatcggtcatcaaaatttgcaatagaattagtgatttactcatattcatatccaaagttctattgaatatgaataaatttactcatatgagtcatatccaaagtcccatttagtcgataatttagtaaatttctataatatatatggatgaacatctcagtattattatttttaattctgattagttaaaaattgttatagatgctaactgtctactcttattgtgattgaacaaaataaacaattaacactggccaacgtcaattcttcttcctttgttttttttcataactcagggttttgttgacgaatgagttttgttgaattaaaacatttattccctacgatactacccctaatcaggactttataaaggatacaatttacattcatctctttaaaatctttgttgaactcattgctgtaaatctgctaaaaaaagctcttagcatgggattattcagtttcttacttacatttaatgtgggaagcaatctctaggaagaggtatatgttctaattgatattaccaatcaaaattgctccagagacaacctagtggaaacatgtattttttgccttttccacttctctcattgctccagagaatgtaattctcggtgactagctttttgagctcattaattatgacacttggtagatgctagcatgtagagcaattttcgacgttcggctggtacagtgatgtttgtttgtggtaggcatttggttcaatcaaacatgaaaaagatagtaatagctagaacagccgagcatgtgaaacacaatccaagattcatttatttcaaacataacataaagacataattacttttttttttaaacacatatagttgcaccatgaaccgatattacggaacttgtatacttattttagtgatcttattacatataagattctgcatattgtttacttataaaaggcagttgaaaccaggttgtaccggcaaacgacagagaccaaggagcccattaagcctcaaattgaggttgacggtgatg

SEQ ID NO: 8516 - DNA, 3000 bp, Unknown
  misc_feature (1)..( 3000): cDNA_ID_1823020_gDNA_ID_1971814_Annot_ID_58189 3000 nt of promoter + ATG
aagaaaaaaataaattatcgtggcgactgactgatagacagaggctcaaagctagtgacaaaaacaagaaagcgtggggagtggaaagccgagcctcacagaattacatagacccaagtgtacttctaaatatagacttctttgaacaattacattcatcatatagtttcacactttttgtttgtttttcaatactttcacaaacctctaaatatggacatctaaattctagtgaattttatgagtttagattattttttttcagaaatatcgtgtctggaatgagcttttgaggtaacattcactacctgaaatagatgacaaaaaaaatacactacctgaaatatatatctgcatttatggaaaatgacaatatattatagtataagtttttggtattgaccaaatatttttaaaatggactggtttgtttactttaatgttaattttgtttgatacgatactttaggttatgataatcttatttagatttaatttgtgatttcttatcataactatgaaaagtgcatatatcaatttggttactagacaaaataatatcaatcatctcttgtaatttaagattgaaataattattggctatagttttagtaatttatattaaattttcaataaatagtattaattctaataattatttttgaatgacaataatgaagctgtaataaaaaatctaattagtagttttaatattaccggaaaccaaacgaatctaagttatgttggataagattatataatattacaatggtatctaagttatgttggctgcaagagaatagagaaagaaaaaattgaactctggcccgtgtgagacagtgggacaacaagccagtaccgggtcctccacgccacgccacgccggtccactgcctcaaacatcccacggtccatgctatttttgtaataaatgagaataacaaacattatgcttttatacatctgacatcaaatttataatttactgtcttattacattttgttgactccacagcttttattactcttttcaaatctatggctactcttttcttgtaaataatgcgaaaaatatactcacattgactagacaaattactcgtacatttaaacgatatatagtttgatgttcgatctggtatgataccaaatataaagaacttttcgaaatccatttgcacgatctacaactatttcatatatgttgtaggagaccgatttttggtaagattgttattctttttctcgctattggatatgacctcataccaataaagttcacgaaaaacttcagaaaccaaaaacattaatctaatgacttgttaattatttgttttgccatcttaaaaattcattggagagaactattaataatttgaatgagttactaatctaacatatttgtttgttttcgtctatcaccagaatagtggcatgttattccaaaaacaaaagtgggcttttccttgatgtacggtttgtattaactatttaacctagtgatttatttttcctcaatgataagtcattttcgtcaaacaaaatacgagaaaaatgattatagtgttccttttttaacttggaaaatctgtctccctgtttaacctatggacctaccaattttcttctaagcttacatataaatatatttgttaacttttgattaactagataatttgatatcatgttataatagatttatgcaaatgttatagtattatagtaccatcagtttagatatctaaaccagtttaatttaattcaaggtttaaagtttagatttgattaatgagtttatgattttaaggtttaagtttacatttgatgatttggatttaaaatttcagatttaaactatttcaatctcataatttaagatttaaatatagaaagaatcaaagtgagctattaacaatgttgctgtgaaaaataagtaaatgaaatgtctcgaaatttagaaatttctgaatcacatcacactactgattgaatattcatttcttttaagattttttcgaaacatgaaatttgtctacacgtcagaataattagataagactttatatgctgtaatcaattctcaatttttttcacaaagtgacaacctaacatctgaatctaacttgaacacgtctttacaacgaatcgacgtcaatttgtaacaaccggaaaagtttatgtagtctataaacactattatcaatgcatatataaagtataaactatagaaaacaagagactacaacaacaaaaacacagtctaacaaggtgatcacaacctgatttgcgtactaacaagagtttgaacaatggctagagataatcagattcatcaatgatctaatgtcttgccttgatgctgctccagagattcaaggagtgataggaatgctcaatggatgtaaaaaagagcttctgtttcgtaaaatctttaattctatgacaataagagctagtatgttatataactctcaaatgagcttgaaaatcaagctatatagttaattaatgtagtggacctttctctacttaaaataaacaaaaacaatcctctttgtaagagtatctaaattaagcacaaaatcaaagatcaccacacataattccatttataacctcttaaacataacaaaattacaatcaaaagccatcgtcttaaattttcccaacttcgttcccaacctctttctgattcaccatcacacaactatataatatatcacacattacacatacaatgtatatatctaagtttttccacataaagccatttacaaatattcaagcttactcagtctcacatttaagcaacctctctctctctgattctctctttctctgagaaaaatctcagtttctcagagctctcaggttcttttattcttcttcttcttcgatttcatcccccaaatctgcatgctctggatcttacgaatgttgctttgtagttttatgatctgagatcaaattttaacaaatccgtcaccggagacgaaaatg

SEQ ID NO: 8517 - DNA, 3000 bp, Unknown
  misc_feature (1)..( 3000): cDNA_ID_3091476_gDNA_ID_1971814_Annot_ID_175878 3000 nt of promoter + ATG
gtttagctatagacgatttacgttcataacattgcgttctctaaactctagtagatcctcttcatcaacaatatttgcgactagatttacttttgattgagattgatagtttcaagtcatatcaaattgcaaaagaccatactgataagagttttacatataaatttcagtcgattacatatagaagaacactatcttattatttccttacgacatcatactacgtacatagggttaagcttattagtactaagatctcacatgggtttaggattttgccatatcctttccccctgccactgctactgttactgtacctgaaatcaaacacagatcaagattttcttctacatgtttcaaactcaaaaacacttgaaatagtcagattttagataaagctcctaagcttgtttatgttaaactatgataagattggaaatctcacatcgaaagaaaagaagatgccaacttaaggaaatactcaagatctttagatccatttcacttaccttaatctaatgtttgggctcagaagtttcccttgctttgctcatagcttcagcttgaatcccttggacagaaaaccatccctgagaatgtaacacaagatgtttaagcatgttgatacggttaaaccctttctacaattcttcatggaaacaaactgcgtaagaaaacactaactagagaagggcataccaccttttagtactctttggcatcatcttctgatctttactgcgctgagcttgagtaggatctcctttacatcccaaaacaaggctactcacgaggatgtctgcggtaaatgaactatcacactctattccggcagttgtaagactctgactttccaaatcaaaccacatgagattcgccgcattgttaatctccagcaaaatcttgctcctgtccttggaacagatcagaggtctaatgaactcaaccgattcaacactctctggtttcggcaccctatacagcttagtccaagatttataatcctcatactctttcaaaacccaaacatcaacatggctatactcgtcgtaacacatcaaacaaacgcagccatctaacacaccaatatccatgttatcttcaatgtaaagctcctgtgggaaactgaggactccaatgtcatcagaggcaagatcatatttgattatcgcgttaaaggcaatgactccctgccttcgaggcaaaatccagtgaagatggttgttaacaaccacaccatagccacgacgaggcaagagatggtaatagtacgaaatccaaagaatctgaaactcgaacataagacacactctcttccacgaattcttcttcaagctgaaaactttgacttcaacagggcaaggaaatttctttttaccttctttaagcttacactgaacaatcctcacaactttaaagtcatcgcccacagaatcataacccaaaccgtaaaacacatactcacgagtgatgtcacgttctgggaaatcaattggctcaattggtaaacggtgaatcttcctagtcgaaggattaaagatcgctagatcaacaggagagttacataaccctatgacaccgttaaatgaaccaaaaacctctgtaaaacctccggcttgtaaaggatgagggatgtcggagacgttctcaggcgagtctagctccaccgtgcgtagaagacgaggtcctcggagtaagatcatgagatgttctcccgtttcgagtctgcgacggagatgagatgagacgaactcgggactgtcgatcaaagagaagcaaggctttgagaggacgcgacactttacgagcgtagttgctctgagacggagaaacatttcgttgatgagatccgtcggacattccgccatttctgttctccggaagaaaattgacgttagagaggaattagggtttcagaggatttgagagatgaattttcgagtccagctctcgagtgttgagacatgagaagtctttagctgtaaatgtttccgggtttttgttggttcgggttgataaaattgatccgaaccgaaattaattcggtttatttctatcgaattctgattcttcggtttaagttcggttcttttggtccaatttggttgtgtctcgatttgatattggattgaggtaagagaccgttaaaagagacttatcaatggcgggagatctggtgcttgacacggcgatctgagactgggttttgatccctctctccgtcgtgtggttcttataggaattctccgagacttcgtttctaagctcatgcgatcttctccgactactttttatctttcacctctcacatcttatttctttgtctacatcaacttcacaaacatcttccctcgaatcacaccattattattaataatttcgttaaacttacaaactagaactaaaaatttttataaattgttgcttgggttccttattttctcttagggtttaatttttttctaattaaaaataatcaaaatcttataggatttgaatgtatttttattcataaaagatgaaaaaacaatccaaacattttatcaagtatttcaaaatgtacgtaaaacattgaactttaaaatcaaacccacatattatcaagccaattcaagtccattaaaaacctcaatctaataacaactccttaatctctctttacgtacatttaagagaaaagtagtactagatctgttacttaactggcatgcatcatcaacattaatcttatgtttgttttgttgttgaatgagatatttcccatccaccaagggtttgttgtatacttgtatgtgcaagagatatgttgactagactatcagaagaattcatacgaaatgtttttgtagatagagtaaagcagatataaatgtgagtgtcaaacaaaacttaacttgtgaaggtatgttattccaaatttcccaattcaacctttacttttgtgtccttacgtctccaaaaaattattaccgtctttggtaacttgataacgtgacgagc

SEQ ID NO: 8518 - DNA, 3000 bp, Unknown
  misc_feature (1)..( 3000): cDNA_ID_2040236_gDNA_ID_1971814_Annot_ID_175884 3000 nt of promoter + ATG
tgtttgatgtcgtctaaggaaacactttttccgactcatagcaatgcatacgattgatcacaatattgtctatatatgaagtcaaaagtaacaaagatgagaaaatttttgaaaccataaaaaatgcgagatctaatcattgatcaacttgaactaattttgtacttgaatttcatatatttaagagacaactggatatttgactttaacaaaaaattttagtcgatgttccatttcagaaaagatatatgaatatgttagcagaatttctgaaagtgagatagtaactccataaatatattctttgttaattaataatataaaggatatgtggaggttttctggaataatggagtattagttaacaagaacaccttcgtcaaaatgttagcaaaaaagtttcggtataggaatatgttagcaaaaaaaagtttaagtgaaatagtatatttttatttcattataagatgcattcctagttcaaagtattacctaaaacatcatttattaaatagatattattaattttagaaatagatatctatcaccacatattggaacactttggttatttgatatgttaaaaataatcaatttttttttgtcatctttaaaaataatcaattagttaattaatatattagacatgtatcgagattttatggaatagtggcgtattagttaataaagtgagcacttttcggaaatatttgacacataaataaagtaatataaccattaatgtgtccacattttatccaaggctttcttatactcccactatattccatttttttttcttttaacatctactccttatattccatattattagatattttagaaattctcacttgttacattttatttgattttctaaaacattatgaataatttatatttgtttactctgttatgatcatttatattctacaatttatttttattgggtagttttttaaaataaatgctaaataatatattttatgttagaaaaataaaattccttatttttaaatagaaaatcttataaaatggaatagaatagtaaatgtttagtttttgtagtttatagttaactagtgtgtgtagttcaaggttctcaaaagcttctcataatgacacatcataccatttttgtgaaccattatctttttcttgtgagtaatattttttgatattttctcttcgtctcattcttatattatatcgagaatctcagtatctttaaaatattgatacatagctacgattccgaactaaaaaaaatgtttaatttcgaattggattggaaccgaaatcacatagccggtcggtttttataaattcgattatattttctttcgtattcggttatctcgggtttagttcggttatattggtccaatttgagttagttgattgtaatttcttcaacggatcgatgaagctcaaagaggaagtagagagaaacttacttatcaatggttggtgctctacatggcgatcagagattgggtttagattcctctcttcttcgtgatggttcttattggaattatccgttacttcgtctctaagctcaagcgatattctccgacaccaaagaaaggtgagtcgtttctctccttattggtcgccacctatatgtgtatagattgtttgtcgaattcatataaaattttcggagtctaaaatacttttgctatttgatcttggtccaagcctgatttttatatcattgcatttgaggaatgtcctgagaggacaagatccttgtcttgtgcaagaagccattgattgaatagaagctatttaaagcgttttgtacaattgcatttgcaaattgtcaagaactcaagtatgaagactggataaaaacctgctcctactttatttgtgtggactcatatatccatatgaaatgttagtcttcttttcctcatattacattttatttaaagtatttctattttgcaggcttgtgagacgctcaagttgtggtccaaggcatcatggagatgtgttgaattacattcttagatgtttctaaatcaatctagttcaccggtcagaagatgccattatagattttgtgggcaaagcatgtaataggtgtgcatgctaatatactccacaaatgtagcaattgtaagaccagacaaactacgatgcagattcaagagaattggttttcagcagagcatatatatgattagaaggttaccaggtcatgtggcaattgtaaaacagtggattaaggtactaggacctacctactgtaagtgaagttttgtttttcaaagtcctttgatttgagtgtgatctatacatgtgaaaactcggatttatctaacccttgtaaactgttgataacacataaggattctttgcatattcttagcattgaccggtttgggaaagctttgttggaagcatggttgtaagagaggtcagattcttctatagagggtggttgcagccagtgtgagtcactagctaatgaactttgcgctcatgaatctaaaagacagcaacaccatgaagaggtcaacgaaagtaccttttgtccagctcaagcaaatgctgataggttatagaagattgagtgcaaaccactatcattgatgttttgtttctaggcttgtagccacgactcgagaagagtgtaccttgccacatttgattggggctgccccggtctgttattgtgtaccaactggcattgatgctcttcgtccatctttcttcttcttgttagtttggttagagcatcgtatttcttaataacaattttgagggatatatattgtcaaaagtttttaggagtttggggcttcaaatcagagatcttatgacaacacaagaaatatcatcttatttatttatatatatatatatatatatatatatatatataacaatctttgtgtgtttctgagtttatttatttatgtgttaatcataaaactgcagagatagcaatttatttacataatgtcaaacataatgtcaaacata

SEQ ID NO: 8519 - DNA, 3000 bp, Unknown; identical to SEQ ID NO: 8516
  misc_feature (1)..( 3000): cDNA_ID_3091451_gDNA_ID_1971814_Annot_ID_175893 3000 nt of promoter + ATG

SEQ ID NO: 8520 - DNA, 3000 bp, Unknown
  misc_feature (1)..( 3000): cDNA_ID_1838731_gDNA_ID_1971814_Annot_ID_175898 3000 nt of promoter + ATG
acaagtacctgacaaatatattaactagtcattaattttacagagaaattgatttgttttatcaaattaaataaatcatatggcagaaattgacagaacagaggaatacaacaggaaaaatattaaggaaaatgacttttttggtaaggaaaaagactttaaagatgtgaaaaggagaggagcaaaaaaaaaatgagttagtgggaagaaaaatggttaatggagcacaactaacactcgtccacaaaatattatgagataaatccaattgattcgaccgattatagtacactccacaatctattactatcagttttactactttctttttgtcccttctttaattaatcgataccttattttctttaacctcatttccaataatttaatggattttttttcctcaaaaattaacatttttaaaaaattttacttgctaataatatttaaccttttattctagaaataacaagaaaatgtataagtgatttgttgtccataaaagtattaaaatttgttagttttttttcctttaaatgttaggttatgattttttttattttaaagtgatgttttaccaaattaccttttgcttttaactaaagaattttaatatcaggccattttaaaagcaacaaaatcagttttttgtgaacttcaattttctactgctaaaaagtcgatttcagaacttaatgtgttcatttcaatctttcgtttcttacatatgtaaatagctagactagcttaataatagaaataacaaatataccattttagtacaaaagtaaaagtggagtcacaatatgcttaccaaaagtggtcatatgaaatctagacatcatctaaaacacggaataaaagagattcgcctacttttgcagcaataacattgttgatgctactcgtatatatatatatatatatataattgttgattatattgatgttatatactataaccgatatattgtagtataatgggattctaggttatgaagataccattaaatgtatgtaagacgaatcacgctaagtattggacacctttgtcccaagttagattttgagcgatttagtgcaataattgaagaaatagacagaataaaaaacgaaaagaccggtggaaggttaaataggtaagatgcaaattccaattgaagagtggcctatcaaaattcaaaaggtggtgaacttttatcttattctaggccatggacaggtctaattaaaagctccataaaaatataaaatagataaaataaaatctaaaatagtaaagaaagaaacatcgctttcattttctatgagttttcgttacatatattttgaatatttttttatctttttagaaataaaaaaatgttccaaaaacacaatctataaccagagatttgccacactcaaaatcccactcggactttgtgcagtaaagtgagttttagatacgagagttaggccaaatctagagggtcttggtcttggtcttgctcaaactagttgatgatattagtttagattttatgtttgacgataatatcattgattttctaaaaagacaatcatttaagccagtattttttgtataacaaatgaatgacgggaacctaattcgagtttggtgttgaaatatctatcaccgggtttggatatgggttcacattttttgattcgttgatttaatagctataattaagtagaactatctcccacctttgcatgttaaggtaatatacacgaaaaagcagggtcgtttacatatattgtgtaaaaacacatagcatgcaatacatataatcaaatagtataagttagaatttactaaggtaaatgttatcgaaagttgtaaagcttaaaatcgcacttattcattctccaacttgggtttgttgactatttctttccaaataatcggagaaactctaaccacatgtttactttttaataattataaggacaaactgaaacaacaaataaagaaaaaggagttcaagcttattctaaatttctaatctacaagataagataatgaaacagaccacttgtctctctgcaatgctatagctctcataatttaacgaggacacttcttcttttaagctttttgtatttattttaattaacatgagaattatttggggatacaaaaaatcgagataatccaatgtttgaacgacacgtttaacagctttgatcatgtcttttaatgagacatagattagatatgtcttgtactagtcatcaaaaaaaaattatcttaaattttattatgttgctcttttttttgttaacgttttttaataattgatattattctatttttaactactattatgtgttactcgatttgataatttgaatttatatgagatctttgaaatgtgttgtacgattaaatatttaaattactccattacattttttatacgttgaaaatttttaaactactctattagattttcatgcataaactatgaaaagcaaatcatccaaaagattatgaaacccaccaaaaaaaatcataatggttatagtattgaacatttatataaagtatcataaataatataaaacctattctaagttatgaaacttatacaaattattttaatggcccccttataaaacctattctaattatatactttttggattttggaagattttgttggacgacatatttatagaagtttatttattatttattactaattatcttattgaactttacagttgtacagagagatttttaacacattttaaagcacactacattttaaagaacagagaatctaaccaatttttttcttttcttttaaagatataaatagtggtaagagtagtatgactgcttcactttctctttctcttttgttcaagtagtttgggagagagaagagaagaagaagacaccctttaagcaaaacagaggattttcattctctgttctgtttgaattattactaatctatcatcttgttgttctcttcgtcgacaatg

SEQ ID NO: 8521 - DNA, 3000 bp, Unknown
  misc_feature (1)..( 3000): cDNA_ID_3091458_gDNA_ID_1971814_Annot_ID_175889 3000 nt of promoter + ATG
tcaccaccatcaaaatttgtatataaaagtgaaaatgtataaatttagcctttgatgtcattgatgaagttatcaccaccatcaacttcattgatgatttttttaccaaaaaaaaaaaaaaatcattgatgatgttttgtttcattagtattggaagaaagtaaaaaagtttgaagcgctttaagatattgtacttatatttacaagtgactttatcatctttggtaaaaaaactaccgatttcgattagatgaatataatacatgtacaagtaaaacgaccgcctgaagtcaagggtcttgtagcatgggtaaatgggtgggaaatgttccgtgaattagtcatatagatgtttaaggatatccgattgagacaatctaagttaccttggcaactacgtctctaaagttaggctctatattgaacatatatgtaattatcaactatctctagttagacgttatagagaacccttcaaaatgggccatataaattttgtggccacatgaaaacagttttaaatggtgatctttagctccattacaaattttttagctaatccatggctctttagcaacggatttgctacagaacaaaaaaaaaaaccatgacatcaagccaaaaaccaaaaacgtggtcatatggcatgggttataagagctacacacgtcaaatcgccatattttcatagagcctaagttaggcctggttaaaaaaacgtacttgttaagcttgtagggttttcaaataatcacaagattgaatatgcactgcaaatcggaccatgcactgaaaatagatatcattatctttcttcttttttttttttttggaccagatgcatttactttatgaaatgaatacttcttttattatttttggaaaatagaactaaacaccatgatgcctatagtggcttctgctggttttgagctagtggtcactggaccccgaaaaattgaagtaaaaccaagttttttatgaatgaattcagagtatggaatcacatacttctgaccatcactttacaagacaatgacgagtaacctcatataaacaataaatatgtataattaattaactatatatagattttggataacacttctatatattgatctttttattgggttattatttgtaaaaatgttttaattttgttattaagtaatagtttttgttagttttgatgatttttatgtcgaataaacctgtaaattaataaaataatacgttgtcgaaaatgtatatatgtttggatcatatttcgcaattttctttttcatttcaacatatcatatgggagacaggaagagacacaaagtgttatactttatttaatattattcttcatagacattaatagatatgcttaacaactttttagtaagcatcgatagtccttataattacgttctaatcaacaacgaaacacacaccaacactgtaaaacattaatagataaacccatacttttggtaccagcaaacttatagtgcaaggaaacaccggatagggctcttatttaggggaattaagtagtagttactgtggtggtggacactggaaaccgataggaaaaaccctattgcaagcaaaaaagatttctctaacggccacatcaataccgaaaaccaacggaatcggcctgaagataaagcagagacaatcggttacttgaacattagtgaggccattgagggcagtgcaacactgtcgtgctctggggtcgccagctgtaacattggctaggccaaggacgttggcacatacgcctagttgcaatgggtttctgggacatgagccaaagttgttggtcggtgtaggcgagcttaagaggtttgcttctgcgaggctgatgaggaggatgatgatgagggaaatggtggttgagctctttgaggccatttttttattttattttgtggatatgaaagtgtggatgctttcgatgatgttgtgtagtatgtatttatagagccaagagatgccttggaatcacaaacacttgtgtatcatttattttttttgcctaacattactcttttttaattaatgaggttttagagatttaggcaagttgttggttctctctcttatgtacaactttacgctcaaaatgtctagtttggcttccaaggagttttttcttttgttttcagatttgttttttctttctttcatatattcaagagttcaacacaaattataaccagtatatacggtttaaatctaaggtcatgaatgtatgcatttttttatgaattgaatggatgtaattttggtttttttaacacttgatatatgaaccaacttgaaattacatatttacagaagtagatatagaccatcaattgatatagatgttacaaggaacacaatacacacaataaacattaataaataatttttcacaagtgcgtcttcaatactaattttatttcccggatttcatgtcttctaaataattaaaatttatcttccacattcagcctccaataaaattctatgtcttcgtaatctaacgaaatgaaaacttctaaaatctccatccccgtctttgtatggaacaataacttgatgtgtcaattgaaattctatgttctacttatagaaaccgatgccatgcatgatctagttttagaaggaaaatctttgattactgagggttctttcattgtctaagaatgaatatacttgaggtttaccgaagcggggatcaaacagaatgcaatcattttgtttgagatttgaatttacgtatgtaagttcttcaattacttttttttccagtaatatttgtaaactccaacgtgattcaaaatctaaaataaagacaatcaacactcccgtacaaactttattttattttttattacattattggaacaaagtatatatttagaaacaaaagaaaatcacggttaagtgtatagtaagtaggttttttagtttattgtggggaaaggaggtggtcatgggcaagtgaagcctggggga

SEQ ID NO: 8522 - DNA, 3000 bp, Unknown
  misc_feature (1)..( 3000): cDNA_ID_3091472_gDNA_ID_1971814_Annot_ID_175879 3000 nt of promoter + ATG
aagcgtcccattcaaactaatagggtcatagaagttgggtaagcgaacagggcatacaacttctttgtgaatccaaaagcctgtctcagacgaatacacatataaaggcatatacatttcacctttattaagaaacatattaccactcttaaccactttgaagctcaaaacaacacccacctcgtcaacacccgtcaccacaccacaaaagaaagtatatgaacctggacaggcagggatttcaacccactgttgtaatactggattacccacataatttttccaagtacccaactttctatgcatcaaaatcaatccattggaaccggaaaaccacatatattcgaatttaccgtctagttccatacattgaatataagaacctaacgactttgggagaccccatgtcccgcatccatggaagtctatgaattcttcttttcggagcagtagtgaccaacttgaagaggtgttttggtgcagagacacaaagagacgtcggaaatacacagattctattgccgatttccatgtttgactcactgatttgaatctggagatgcttctcaatggtaacctcactagtatctccgtcactatcccctctaaaacatctgtgatggtgttgtttggtttttccattggaaattgggttatggagagtgtaacgagagatacaaacatatatatattgaacagagacgtaaaacaaatttatcaaaagtggcttttcaaaaatataatatctatatttatttacttctcataatagttttcactagttttagagataaaatcttgtgaaaattaaaagccaaacttgaattcatgaattgcgacatatatattacaaactaccttagtattaattgttttaactattattgtactaaattaaattattaaattaccctgtagattttctgtcaaatcttatcagtttaagaaaaaaaaattaatatgaaagaatgattagaaacaaaaatgatgtttaaggaaaagatagaagaagaaaatctgaaattgtatgaagaaagagacaatcaaatatgaagtggcacaatatcacaacttgtatatattaaatctaattaaaataatgaaagatttaataggtacatttgtcaatatactaaaactataaaggttttttttgtttgtgatcctatttaattaattcaaagtgtattggatcacgagaatcggatataaccggagctaaaccaaaagtaagtcaagacctctacaaatcatataaattacagactaaaccaaatcatgaagatgcagattccaacaaccagctgatggacatcatcaagcagtggtggaggcagtggcggacccagaattgttttttacctggtcaatgattttttaaaacatataaaattactaaaattactaaaaaaagtgtcactgagtaggctcgaaaccaagttatcaagaatttgaccaactgaactagtatctcttcaaacacctcatatgcattaaaagttatttgtatatttaacctgagtcaactgaaccacctctcttcttaataggtccgccactgggtggagggagtgtataatcatggggtcaattgaccccatggattttagaaaattagtttaggttttgttaatttttacaaattgacccctttcccaaaattttattgacccccatcaaatatatattctaatataatccaacaaaaaatattaaatctacaacaagttaacccaattaattttataaataaaaatttacagctaaagacttctcatgtctcaacactcaagagctggagtcgaaaattcatctctcaaatcctctgaaaccctaattcctctctctgtcaattttcttccggaaaacagaaatggcggaatgtccgacggatctcatcaacgaaatgtttctccgtcttagagcaactacgctcaaaaagtgtcgcgtcctctcaaagccttgcttctctttgatcgacagtcccgagttcgtctcatctcatctccgtcgcagactcgaaacgggagaacatctcatgatcttactccgaggacctcgttttctacgtacggtggagctagactcgcctgagaacgtctccgacatccctcatcctttacaagccggaggttttgcagaggtttttggttcatttaacggtgtcataggaagagagtgattgaacggtctgattcgccacctccaccactgggtttcaacaatcatcttctgccgttggctaatgcgtacgatgatgatgatgaggaagaggggaacgagctgaagaaatcgcaagctcgtcgtaatggagttgcgaaaggagagggaaatggtaacaaagtgaacggagaagctcaagaagaggtcgatgacgaagaagatgatgatgatgatgcttccaaggggagaggaaagcattcacgccatgttgaagttcgtcgtgattgtccttatcttgacactgttaatcgtcaggtaatcatcattgaccaatttcttatgtttggtacttgtaatctaatcgttggtggatctttaagcttctgctaggttcattatgttactggtttgggattatgataggctaagggttccactagctactatgagaaagagaatgagaactggcggaagaaaagctaaagctatggagaagtatttgaaaaaggtcttgaagaaaagtggctaagagacgaaggaaagaagaaggcatagaaagactcttgttcatctagagtctttcaccatctctctatcttttattaaactcagcgttttgtctatttcgagttgtatttaaaggtctttgcctctttagggcaaccttaccaaaaacaatcatcaaaacttataacattaaagttattaattctcttctcatcttgttctccgtcaaaaacggcgcaatagaattagtttactctgtttttactcttgttcttagtatccgttgagtccatatctatcattggtgctttcattttgatgagtgcgatg

SEQ ID NO: 8523 - DNA, 3000 bp, Unknown; identical to SEQ ID NO: 8513
  misc_feature (1)..( 3000): cDNA_ID_3045962_gDNA_ID_1971814_Annot_ID_175876 3000 nt of promoter + ATG

SEQ ID NO: 8524 - DNA, 3000 bp, Unknown; identical to SEQ ID NO: 8520
  misc_feature (1)..( 3000): cDNA_ID_1838731_gDNA_ID_1971814_Annot_ID_58192 3000 nt of promoter + ATG

SEQ ID NO: 8525 - DNA, 3000 bp, Unknown
  misc_feature (1)..( 3000): cDNA_ID_1822994_gDNA_ID_1971814_Annot_ID_58202 3000 nt of promoter + ATG
gtgcaatcttttgtcaaagataattagctaactagtgcagttttaaacaagacttatttatggtatctaattgatttcggttttgtgtggcaaagcaggcaactctaatggaggagcaacgaaaaagattgttgcatcaatgggcctttttggtgtggttgcaagtctgttcttttaattcaactctacaaaattctgtgtaattgttcttctcatcatttttgtttgttttcaaatctgactactcgaacatttatcgaatcaacaaaccttaactttaataattccgcttcgtcaatgttggtattaaaacctggtctgcgtaatttgacagatgtgtatagattattttttaggtttgcattggttaatgtgattatcacgtcttcatacaaatgccccacccgaaatttcatttcaatatatattatggtaagccgtacgcagatgcagatcatttaaacatatttgttactacaagggtttcaatattcttatcaatttttagtaggtctaattaagatgtccagttatatacatttaatttgaattacagtggatttaatgaaacataccaaagtacatacattcaggtcaaaggcagtgagatattttattagtagataactatactagcaaaaacaacatactgaagaagcaagctgaaatatattttggtttgcgatgaagttgtaatttgaccattcacaaatgttcttaagaaaaaacaagaattgtttcataaacaaggaaaaaaaaaaaacgcatcatcattattcattagctaacagcaagaaattgaagaagcaagttgaaatcatcatgtatgcgaaaagcttggtaagaaccatcgagcagagagttcaagtaacgaacaatcgaaatcaaatttgtgcagtggctccatctcccgtgtctcgtaattgaacagaaagagatcttttgtggtcgtgtcatggctatcactgaaatatatagtatttctatggagtccctcaacttcattggcgagcacggtgatgcctagatccaaaagcattgcctcgtcgcccaaagaatcagcaagttcatatttatcaagaaatgtccctgacgaataaaacttgtagacgttgaatgactggattctagaccaatgtcttaacattctttcaaccaagaggacatctccggttactgtgactacaagttttgtctcagcaacgcaccatgaattacttaattgacgactacgaggacttaaccactcagatctatagacatgcataaaacattgaaaggcttttcgaggaatctctccagaaaaatctaggattgtgaaaagatttctgtagctaaatgagtaaagcttgtgatccttgtaaaccatgtcaagagaatctaaaataatttctggaatttgattccacaacttatctccgttcttggcataaaccacacaccaatatccaagcccccacagagctatgtactctttggttttctcgtcaatccaaaacacaggggtacgtacggtattattacctttgaataacttaacgtggttgtgatcgtcgaaagttagaaaatcatcatctatggtttggtcaacctttaccatgccaacttgttgtgattcaatagcgggaagaccgatcttctcgtaggtgaatggattcaaaatgtatagattatactttgaatcttgcatcaggagccaacttccataggttgctagacaaacactctttgcaaattcaacaccaagatcttgcgtttggtaaagttggtctttgtcctcgggattgaaaaaaatcgtgcatgaactgtttttgttgttgtttttgtctttggggaagagcatcagccaagggatctgatttttgggcacggattgtttcgaagcagagtaccaagacgaacacaccgatttggcttgtcgaaaattagcaaagctgaggcgtttgaaaactaagttcaagagatctagaggaagatccgaccaggtattagggttttggttcttctccatgaaaacgacaatatttgagatatatagagagagttctcttatcaacaaataattatttgagtgaggagatatctctaacaaaagattttataaaccgaatagatctcggaatttcatggtttgctttgttaaaatatgggcttttgtgaaattccgaaatattggccccattaattaatcagtatatattttgttcacttggatccaataaggtgcaagacatgaagagagaaaggtaacataggtgaacgattttgttccctaaataaaggttcaattcaacaatgtgattctcacgtcttatacacaaatgctccaccataaatttcatttcattatatacctattttgacaccgaaaagagtttggaataaatatacctattttcttcttaggtctgaaatgtccagtaaaatacatttgaattacaactgatttaatcatttaatgaaacagaccattagttatacatatacacgtcaacggcattgaaattgtattagtattcgcctttcttcatatatgattagaatgaatgaactgtcgaatccatatcaatgaatatttagttttgttataatcctaataaagatatgatctggattatattaatgacacatatctttgaattgtcagggccgtccagcttatattgattttcgacattctgtccttaacaacttcttcgcaaaacattccattttatgtattaatggttttattttaaattggcttccatatatatacatgaacatgccacataaaatattcattctcaaaatgcgaagaacatgggtactggcggaagaaagctgtaagtttttaggtcaactatgtaaaacatatttaataaatagtaatcaacaatctacatgccaagactcctatataagttaatgcagtgtttaagaagtcacatacgaaaaagaaagtgagataataatccaaaaaaaaaatccatatttttgccaacgtttttagacgatcaa

SEQ ID NO: 8526 - DNA, 3000 bp, Unknown
  misc_feature (1)..( 3000): cDNA_ID_1825633_gDNA_ID_1971815_Annot_ID_58206 3000 nt of promoter + ATG
tcgttaaaacttaaaacacttccacttatggtttttttagtcttctctatctcttccttcacaatttgttttatcgttttaccactcttaaaaaagttgttgtttggttaataaatcgggagttcatgtgttacaaagttttttttttttttggcaaccgatatgttacaaagtttgttcatgggaaaaaaaactaaagttttgttcatggacattatgtaaaagtaatcgataaaaaagcgaaatctatgaaaagtaattacaatttcatacgaatcacacactaaatctaccatacttaaagcaataacagcaaaaaacacgtgaaaaaaatcttatccccatgtttttttaacaaaaggaaaagaaaaggaaaacctttctttttttttacattcaaagaaaagtaaaaccttacacgaatggttatttactttttttttttttgtgtcaaataaacctttggtaactttatagtaagtttttttgtaactttttatgagagtttgttgcatagccgaaaattttgacttactcgccggaatatacctaacgaaaatggaaagattcatagttatccacaaacataaaatgcccaaaataaccttgcacgtcattctcatcataagaaaatggtaaaaatatgactatatgaggttaaaaaagcaaaaacagacaaaagaagaagagaatcttatacgaagcaacataaataacatttctggattttgtttttaataaaagaaattaaatcatatttttttcttcattttcacgtcacctgagaaccacttccgtcaccggagttacgagccatagcttcagcaaccgtcgcgagtttctgcaaattaagcttcacaaccgtatcagcaaacatacgagtatcatcctccgagttaccttccggcatatcaacgacgtaagattccaaaaccaccgtccagatccgattctctttctcgaaccgatgcaccgtcgtaacggatttgtaattcgtcagcctatgttcgcctccgatgatactgaatccggtaactctccgttcgtcgtcgagtatatcgagtctttccgttgatgtgttcgccggtaatccactgatgacgatcacgtcgcgcgtgcatccgacgcgcatctcgaagttttgttcgacggagcaggatttgatgaagtgtttgtatgtttgtggtttgtcgaatcgtcgtacgattgaccagacgagttccggaggcgcgtggattcgttgcgcgtggagtgatgaacagcttcctggatcgagttggtatgtgtggaactcggcgattgagttttttagttccgatcgttcttctggtgttaactccgaaggcatggttgtaatttggatcttttttttttttttgtgaagttttttttgttttgttttatttatccaattggtttgagattcaccattgaagacgacgacgagcttttagactctctctctctttatttagcgttgaaatctctctgtgttggattttagagggaagatgaagggtaaacatggaattatattaaatagtaagggtaaagtaagaaatatatatacgtgagagtggaagggtgtataatgcaaaaaatggaatctgtttatatttaaagaaagatgacctggagtttctgttataaactattggatttgttacttattcaagagaataagtcttattttcgtataagtttctttttttttaaagagtgtggtgattttattttattgtttaagaactcatattcgtaggttttatttggtgaaaaaaatgaaatcttagagatgaaaattgtttgtagttttttattttgtcatttgaaattatcaaaaacaatttcatatttttataagttttgtttatatgtttctttagtcgttgaaaacaaatatactcacgtttcattaattcttttagatatcattttggttgggtattatatttagtgacaaatctaatgaatctttgacaaatctacaatttgcaacaataaaattatttttctttaacaataaaataaaaagatttttttataactaaaaataaatatatatgcaaaggagttgtgattattaaaaaaataaattaagtgtcgttagctcaattggtaaagattttaggcgaaccttagaggtcgccagttcgagtgacgcttgagacgaaactaatattacattatgtggtttcgggtctagagggattacggacttcggtccagaacctcctgttattcaaaaataaaattaaaaaaataaaaaagagaaatatattatatttaataaacattaaataaataacattttaagaggagtttttaaaaagatgatataaagatcaacttttttggacttgattcacacttgttcttaaaaaaaagttgtagggagaaaattttgggagagaaacggtggaagaggacatccgagagagaccttattatacagtacaagatttactaggaacaaacaagtggagaggaatcttttagcaaggtggtagggaagagacttcaaagagaaaactcgcagagaaaatgctccgagaacagattgataagaaaaaggcatgaacaagtttgacaaggaagagcccttcataaggatgccattttaattttgaagttaaaagtagtaaaattatttttaatatatttattacgcaaacaccttgttattgagtttataagcacttgttgattactgaaagaatcaaagaattggtaacaaatttacatgatatatacattatgtagggaagacaagaaagatttcgagtttgaactcaacaaatgggtgggggctggagcgcaagctgtgtttagtaaaagtagagaatgattagtttagtcaagcttgcgtttggcttaatcataaagaaaagaatgtgactaactaacgatatccaatccacttggtctataagtatatgtatactaacaattttgtcggaaattgagcttaaacattgtgtgagacttgttgcgggtatg

SEQ ID NO: 8527 - DNA, 3000 bp, Unknown
  misc_feature (1)..( 3000): cDNA_ID_1921415_gDNA_ID_1971815_Annot_ID_58209 3000 nt of promoter + ATG
atagagaagctttatccatcttagacacattaggaaccacagctcttaaagaatagaatctctgattcaacttctctcttctctgtctctctgcctctacatgattcaaaggctcttctcttccattcgccggttttctccctcgtttcctcggtttcttctccggttcaaccacaactctgttactctcagcttctttagccactgaagcttcaagatcagagtgattcgagtcacatggaagaacagaggtaaaagaaagcatcccttcttcattattcgaaaccggtgatctcttcttattactactatcttcttcttgaccattctcaatcccattcttgaaattcaccatttcacaagatttcagaactttagggttagggttttcaacagagcttccattacaaagcttagaaattggttgagaatcagaattagaagttgagtcatttccaccattattcatcaccggagcagctacaagaccagagtcaacaccattaggttcactaatccacaaacctggatcattctctccttgatctggattcaaattaaacgcccaagaaccaaattcaccaccaccattgttaaaattgaaaaaggtgtcaactttatcaacaagatctgaactttgatgaataatctccgacgaaccaagctcaacgacaccattctctgtcgctacacacaccattgtttgtaacccataaatctgaccttgacgagctctctcacaacttgatccagctaaagcattagaaccagataaccaaatcgtgtctgaatttgagaaagcttgaccaggtaaaccagtacccttgacaaagctctgtgtcattgaaactaagaagaaccattcagtatctgtaacttcttcatctccagcttcatctcctcctcctacaccaccggagattaaagagttgagctctctaatcactctcttacgatgctcttgttcagctgcactagctggatttgatttcttctttctagacttctcttcttctcctttgtaataaccatctccccaacctaacaacactgtgttgttgttgttgttgtcttctccggcgaaaccgtgagatgattgccagaacacggcgtaagtccagttctcgtttgctccttcgattaaagcttggagacgttgctggagattatcttcgttgacttgaggaagaggaggaggaggaagtggaggaaaaagagaagaatgatcggagccgccgccgatgaaagcttccattaccgatgcatcgtcgtcggttgaccagagatttgttgtatccgtttttgattggttgagatggtaatcggttacttgaacattcgtcggagacataacagttctctgacgtagttataaaagagaagactttttgtttttccggtgagagacagaggagagaagtaagttctttaagcaaaatatttgtgtttggtttgattgtttcgggaaaaggaatctgtttatattcattttttttttttaactctaaagaaaaagaaatagtacttttattttcaccaaatatgaattattgattgagttatttctgaagttgggttatatacataacttgattgaaaacaatttttttctgaatagtaattgttttacaagaaaattactaatctatgtaagagaatcggatcaaatttgtcaaggagccttttacatcaaagttgataattaagaacaattaaagaatgaaaatgatatttcacttacaataatgatcttgtctccctcacttttggtattggtgtcaatatctgcttttcttgtgattaatcccatcatttaattcttgtaagcaagtagcatcaattaatttaaacaatgagtttgtagaattgcagttgttctttgaggcaggaaaatatgatttaaagggattaagggagtgttaacaccaaagatttggatacaacatttatatacaaaacctataaagcaaatattgtagacttgtagtttaacattttcttataaacatatttttgttggcttcgttattggacacaactttttgcaatgataaagaacaaaaaaaagacatgggtgattttgatatcaaaggtgaaagagacgcaagagcataaaggaaaataaaaggtatagtattaaaacagaattagatttaattacgaaaattatacgaccacacaaaaataatcacattatgtcgtgtgggtctcgtgtttttagtggccagatttcataatatgctttctttttcagtgagagcaaatgcccaaaaatgttggtctctctatgttcatatccgacgaaactatagtgtctactgtacagtgacatttcggaatcgcataaaagcaaacaaaacaaattaagctgggctttactttatattgggcctcacacattttgggtagttaataaaactagcccgcaaatatttcacatttgacattttttagtgtatggtcaacaacaagtatagcgaaacttttagcatataatatgtgtgagacatattatggaaagaaggcaaaaatgaaaaccgttagttagtttgaaaacctggagttataaaaagtcgtattttaatttactaatacatgttaacttcagatattaaaaacaaatcctgtacgtattaaaccatatgataaacataatattaatacgaaaaatgtataacacacgattagacaaattaggaagtaatctttgaattgaggtttaagaaaaggtgaaaatgataagctttcgtccgttttatatcatccatgttgcttcagaaacggaatttacacactacgtgtcgtttctacgtaatgccattttcgtaatttctagagtttattcagggtgttttcgtcagtctagtcagatcaaatgtttccatcaaacgttagtactgtttcctttagatttacagattttgaagaagaaagatttcaaattaaaaaatctttcaaatttcttcaaggaggtgatcaaattgaacaatttgatctaca

SEQ ID NO: 8528 - DNA, 3000 bp, Unknown
  misc_feature (1)..( 3000): cDNA_ID_2177058_gDNA_ID_1971815_Annot_ID_175955 3000 nt of promoter + ATG
agccggtatatgcaacatagttaagatacgcatagtcatagactaaatacttatttgataataagttttaattctctccgtgttttagctctcgggttttgtttggcttttgatgtctgaaaatgtttttttgtcaacttattctcattttgcgagtgacggtttagtgtgtctattaattatctgatttgtccggttttggtcttcgatttgtttggcttttgtttcttgaaggtccgggctaatttagtcgggtcatgtaggtttcgtttattcagttcatttagttttcaagtatttgtaacctgcctttcgtcaacacatccaagtatccaatataatctattagatgaccaaaaaaaacaaaaaaaggaaacttgtaatttacaaagcataaacattatttgttgatgtgaaatctctagttttgagatttacttctactccaatcttgagtctttaatgtcattattttactccaattttgatgttcaatttcttgagaaaaaaaaacgtgtattatgtattattggagaattttttaccgaatatctctttagtatcgtaaaagaaaaatgtttatccttgcatacataacatataatttgctcatacggtttttataagtaatgaagctttttattttcacccccaaagaacaaacatctgatcatctccaattttgacctcaaaagaatacgatgaagtttgaataattatgttaaaaggaaaataaaataaaaggatggtcacggaggaacgaacaagcgaaagcaatgatcattccaatgagtaaaaaatgaccatctactaacgaaagttttccattatattatgtttttgccttttttcaaaataatcacattggtgaactttttgtaagaaaatttatactattaaaattgagtaagaataatgacattaatgactaccaattcataactttactctgttttaaaataataatcacaattggatatggtcaaactaaagttttccatttgccgttacaagaaatgctatataagtttcgtttggttgttgaatatacctcattatgaatttaggacaatcaatgctatttgtttcatctgtaattaattatatctaacaatcaattaatgacaatagaaaagaataatgtgtttacactaattctgtattcactaatctagatttttgcgcaatttgaattttaaagtttagtgtaaggttttttttttttgggtgcacactgaatatagtttagcctaagtaatactagatatatagtagtaaaaggaaataggttttaattaaattaagaagtttggttaaattcaactgttgctttgaaaccacacacacatgtcatcataaaagttgggcaacgagtttgaaagatggaacctctgcaaaataaagtttttctttccctaccttatgcatatataattattttccacaaacatagtgtaccatcaataaaaatacatatatgatctatattttggcataaagttttccattattttcttgtgataatgattatggtaaagatttttagtgcagattaattttttggttattagattatttgttctttaaaatgcagaaacattgttgaaacttagaaccaaatgaaagctgaatattgcttgttttttttttgttttttttttcacaatattgcttgttttagtttgttatgttttcatttaccattcatttagtagaatatattcattagttaataaaaaagcttttaaaagagttttcttatcatgttagttcggtttacttcgcaccgttttgattggtacaaatgggtatagttctataccggacaataaattttgttatatttttgtaaaattattggtctacatttaataaaactaggctaattttgatataatgacatattaagggatttagatttttttttttggtaaggtttagattttttcttgtattgttataggaaattaatcctatatattgattaataaagacaaaaataataattaatccttatctcttttttcctctaacctcagttaacctttatcttagtaagactttttattctctttatctctgtgcataacccaatgacaagaacaacactagtcaccaacttattataactcttcatccattttctctctctcaaagtcaccccccaaatttttttatttttttttttaactttgaatgtgactcaggatagagagagggcgagacagataaagagagcttgaggaaggatttaagcagatctgcaagaaacactctctcaggtaaggtgagaactctaaaatatgaatttactcatttgacttctgaattgtgaaagtttgtttgtttggttttaaatttccaaagcttttcttttgatcaattacatgttcattgcatgtgatgtgagcatgatctcttatctggatataagatcttctccttcttctgcttatggaaagaaaaaaacatcagttttatcgaaagtgcaacttatgatttgatcacaattctttttctctctgggtatatatctctctctcaatttccctaaattctagggatttgcctttctccttcattagttgtcataagcctatgttttagtatttgttaaaggtcattagtctgtgttgttaagttaactaatcactgcatgcacgagttaaacaacactaaactaataatatattcactcttaaatgattcaaaagctttgttagatttcatggcatggtggtccactctttataaataacaaaatcaagttcctcatgaattattcttatctcatcaataatacacacaccttttgaatatttacttttcttgtatctttattctgtctaatttttttgtttattctattcatttcccctttttttattaataaaatctagccagtgtttactttttttccgtagaatcaaaccggcggcgacagtgacggcggcgaaaagcggcggtgttggccgcaaaaacgatgcaaaaccagctatg

SEQ ID NO: 8529 - DNA, 3000 bp, Unknown
  misc_feature (1)..( 3000): cDNA_ID_2177047_gDNA_ID_1971815_Annot_ID_175952 3000 nt of promoter + ATG
tgacaaagtctaaacatatgaaaagatatcaaatcactaaaaaaattctaaacatatgaaaagatattaaatctcttggcatatgaatcgaacgtagatctttaaactctcccatactaatcgattagttataaacactagtttgttcaatcaatactttagagaaatattataatgtagaaaattctcaatgaactatgtgataatttgtatactacttgtctgatttgtagcttggtagttggggataatgatttgtgtgagtagttatgacttcagtccattaaaagctctgtttaaaaatgatattaaaaatcaataaaattacaaagtgggattattcgcacaaattgcgtgttgatatgctattggcaggttgaagaaagcaaatgacattgacatcgttatgattctattacaaaaactttttattttgtctacaacgttactataaaactttcttacggcatgattctattacaaaaatttaaataaccagtattcaataaaaaaaattttttttttttttttcaaaaatttctaagttagttctataataatgtattaaggagacaattattccctaattagcagtattatagaactaactcaataaatttctaagttagttctataatactgctaattagggaataattgtctccttatttatgggtgcgcgtacaggtatgtggtccatatgtacctttataccggcctaccaatcgtatctaatatttgtgttggatttggtaaatttaaatgtattaattacttcatattattaatgtgttacagatcacgatagaaaacccacattttgaatattttcgaccgaccgacctgatcaaatataaataaattatcaatttcctaccgatatatattttgttagtttttaatttgaatgttttaataaaattttgtttcttttgttaaaaggttaactttatataatgttaccctctttctaaaaatatctaagggacatgatattttggaaagtggtaatctttgttgtataattttatttgttttttttatatatataataataatgaagttttaaagtgacagtctaatatttgcaactctgaaatcaacctttcatctttttttttgagattgtcattgtaatatcaaatggactcgaactaaaaaaagtttatgttctttccaaaaatcatttgatgtataaccttatagatagtaaattagcaattgatgataattaattaacaacaatgaacaaacgatctttagagtaacaaaaatagcaatatgataagaagtaaatttaacgtaaaccttaaacagtggttaaattatgaattaatttatccaaatacttattagttatcccgtcgctctagttgatgataagtaaatatatttaaatcttcccactgagcttttagtatttgtatttttttttatcccattaactattttatggtcaaccagcgtcgtcgtgtcgccattttgtgaatcaaactaatttatttaagtagctttggtcaaccgaaactttcctaatgaccttcgttacgtcctctatccgcaaattgcattgcatgggcgtcagtttttttttccttttttcttaataacgcgtcaatttattttatgatgatgattatgtttagttgaaataatcttcagttattaattagatatttcttggtaaatattttttacaaatatgctgtcagaaattcaaagttatgtatttccataccatattggactccatactttatatcttctcagttgagtatccttcaaattcacctgttttggaaattggaaatataatttagttttagaaatgttttaagttaaaacataacagttaacaaagaaaagatatagacaattttaagacttttaaatgtgagggattctcactttttcgttgttttctaatggttccaattcatagttatcgtataatattatttaacgaaacattagtcaaataaataatctatctattcgccgactgtatggctgaaaatattagctggagctagactcgtattgaaaaaattaatccatatatttgttgcctaggagagtgacattttgacctttttaataacataccaaaaaggccgtttatttaatatattatccagatagcagcgttgaatcggattttggttggttttggtttatgtgttttagatttttggttaaagcaaaccactaacttaagtcaggtcaaagtatttcagcaaaactaattctcaaataatcacttttactccgcaaaactgcttgtcaaaatatagttttgacttccaacgagccattttttgctaattcagtttaactagtatacgcaaaaaaaaaaaatgtttagataaattaaaatttcggttaacttttataaaaaagtttcagtctgtctgtttgattcggtttactttaactaaatgccactatcttaaaagatgaagtaaacatttataataattcggtatggtcggtacaatcagtctagtaaaaccgaattgagaaaaccaggtcggttcgaatatatccaaaaaccgaaaacacgtgtgagaaagaagaaatcagggaattaaatctgacagtctttatagttttctttaatatgtcttccccaaaaaatcaaattatgaataaaaaaagtggatcgcaagttgcagtttggttctttacgggcaacgaaggctgttaaataacagccatagcttttcttcgaaacgaacccaaaaaataatatcagagaattttcatcattacacctttttttttcttttgcctttgcctttgccttcacacgtcttcttgtttgtactctccactttttttttctttgtgtcctttcttcttgttcttgctctagttcgtgtctcttctttaactctctgtcactattataaatatcaaactctgacattttcttctgttcaaattctcctcgaaactcccccaaagaaacaaaatctttttctgagatctaagaagatg

SEQ ID NO: 8530 - DNA, 3000 bp, Unknown
  misc_feature (1)..( 3000): cDNA_ID_1825605_gDNA_ID_1971815_Annot_ID_175946 3000 nt of promoter + ATG
ctaggaaaaatcacatgtcggcaaaaacgagaacacgatgaccagtgtggtgggttggtaatttggtatatttggttggtccatgatatcggttgaatctatttagaatttgcaaaaatagttccgatatgactactgatatgaatttacccccggacattaattagtaacgacataatattcaaacgtatatggtactttttgatatataaaattagggctcagtatagtcaacatagaagatccgttattcgtatttcataggctaacttcttcttttcctaccatatgacgtagttattcacgctttaggcctttttcttcatttttgttcttttgtctctctttaatcagtgttaggggtcatggtgaccgttcctaaagtatcgtataattataaggtgcactttttggtatatagaacttattaaccttatacatttccatctcgtgaagtcattcgttttcccaatatttttttattttcttttcctcttgaatatttcagctatcgggtcttacacaaatgggaactaaactttaaactacaactttacatcttaaacaataacatatttccggtaaaaagaagacaataaacaaaattttcttcaaagttttgttatctcttctaatgtcttaaaagttgaaagtggttactctaataaaaagcagttttgtcttactcatactgacgtggaggaacattgttacacccccttcaaaatagtcaagaaaaagtttagaatattgaacgaaaggaaaaataaaagaattagctaggaccgagtttctatgacctagaactaaaactcccgttacatacttatatcaaagaaacgagctagaaaaaacattagagaaatgtaaaatatatctctctctttttggttaaccaaggtttactaatccgatatacaagaatgacatgcaaataaacatagggttaagttgtaaagtagtcagatatttaaacttaattatggaattgggcaaattactatttataattggatttttagtcactaacctttgaccctattacagacaaaatcaaatataccccataccaactctattatttacaaatatgccactaatcttcttcttctccaatgtcgttgaaagcaattgggatttgtgcttttagattcaacatttctctctcctcatactcacattctttgtatttctttatatatatatatatatatatatatatatatatatatatatatatatatatttatttattttttaataacctcttcaatctaataattgaaatgcttatcaatgtaaatttattttctaaattaattcagatacataaaaatctatattttttctctataatttgatatgcattttgttaataattttaaatatattatataaacatttttattagtagtcagtacagttaattatgtgtacagatttttatttatacaacttatttaataagtacaaattgaaatcgtccagccataattggaaaaatagtcattttactattcacaatttgcaaagtagtcacttttaactgtttgattcgtacacttagatctgtacaacattttttagtgtacagatgtaagtgtacgttgtgtatatttatatatatatatatacactaaaaatattgtacaggtctaagtgtacgaatcaacagtgaaaagtgactactgataattgtatactccatacaattatatactctgtacagctaatgcaacgtacaaaataaagtctgtacacataattaagtgtaccgactactgataaaatgtctgtaatatattaaaaatattaacaaaatgcatatcaaattataaagaaaaatacatagatttttatgtatatgaattagtttagaaaataaatttatattgataagtatttcaattattaaattggaggggttattaaaaagaaataaaaaaaaaaagaatatttcacttttatctttcttctctgtcaaaaggatagttcggtaatttcaaaacacatcacttaccccaccccaaacttctatttcacgctcgtctattacacgcccaaagtgagttacatgttttgtcaagtgtaaatagtaacttgcccaactccataattatgttttcaaaagtgactaatttgccaacacacctataaacatatcgttttacaaaacgaaacgacgtcttatgaaattaaaaaatagaaaaataagttttgattaattataggtgatagtattattgaatcattgatgtgtgaagtgtgaacaagtctaactttagagaccaggtaggtccactttctttttgaattttgggaactcttaagacaagcaatgtctttatccgctttcggtgtgtcgagttattttttcttctgaatattaacggcactgactattataatactgtttgtttattctacagaaaaattcatcaacatattttaagctatgattaaatttgcctcacaaagtttcgcaacctttgtgctataaatatcattcaccccacaaccattcaacactctaccaaccttctcttcttctctccgatcttaatcactctcctaatcaatactcactaataacttttttttttttttggtcttgtatagctaataagtcagagaacccttttcctcagtcagactctttgacccgcagcaattagctcttccaccaactgctcttcgttatttctgaattgtaccttaagtttgtttctattttttttcttaggtgttagatatatttttaaaaagagaattttggataattcgtttttttttttgtaaacatacaatctctttcagacaatgatattgtcacaaaaaggatgcaatcaaagtgagttgcaacttattttcaaaaacaaattgaatgtcgaaaaaagtttatatttttagattttccaaatagtcaatagatatttagttaaatattagctttcgacaactctcttgtgtcgcaagctacaagtgtgaattttgcaaatg

SEQ ID NO: 8531 - DNA, 3000 bp, Unknown
  misc_feature (1)..( 3000): cDNA_ID_1825608_gDNA_ID_1971815_Annot_ID_175945 3000 nt of promoter + ATG
tagtttttttgaaaaaacttgaataataatttggtgtagattttgcaaaaaagaaactccataggatttggtttttgttcaataattggtaaagatttgtaaaatctagatatcaacggcaataaagggtttatgtacttgaacagttggtaagtagacactagagcaaagaacagggagaaaatattggcgtgctttgcccaacgatggcctctatatcgagcgagatcacaaaggagccagcccaaaccaaacaaagagagcaaggtgagcaggtcgaatgtatcctccatatccatcttttgcggatgagcgaccaatggaacggtgatgtgattttgtcgaaaggtaggctttggagaatgggagaacaagcctagtacaaacgcgccaaaaatttcatggaccgtgcaaaaagaatctcgttccaagtagcatttgtttccattggaaccatttgaatgccgttgtgatgtacttttgagatgatccgtttcttcttcctttttaaaaaaaatgcattgagcatttgagcatcaaagacgattacttatagtataaatgatttggaacacaagagaggctatgaaaggtttttgtttcatcagcatttcaaaatattggtatcaaaccatataagaatacatgttgttgtgatacattatcgaagtactagactatgcaatgagacttggtttttcgtccttgagccaaaaataataatgactagctttataatttgacaatcacaattagttttgagatactctactggactttgtaatttgtattactacgatgatctttgtgtgtgtatacataataataatatgatcaacctttttggtttaaacatgaatccaagtttcttttttgatatctgtattggtaatattttcctgccacgtgtggaggtctcacaagagccacatggacaagacacgagaaatctgaaatctcaaaaactcaacaacacgagaacagctgttctgttgcttaggaagatctattacctctaaccacaacactacaaagagagtactagttaattagtttaatttactggatttttctaataatttctattgatattcgaatgtaaaactcgatgtaggactacaattgtccatatatgaagttgaaatacataatgtaaaatctgattatagaaaaacaaaaaattgtaggttaactatcagccacatagaagaaaaacaggatctttctttgaagttaaatttataaactaatctccccatttcaatgagctgtatatcaactcacaagtcgtaacccgtgccatcattaatattgttcacgtacattttccttttggcagaagattacggtttgagttatactatttcgtggaattacatattttaaaaaatctttctccaaaactatttattttctcttttgtttatttcgtactaaactatttcatatgatgcagaaacttaaactgatcttaccacgtaaacgtggcaagaattaatttacacaattaataacaaatatataatctatattatatttgacagtaattcgagatctttagcatttaatttagtgtttttagtttggtgttcgaagccatcaattgatttttatttacatggcggttacatatttagggggttaacgtggcttttaattcatagaatgtgattagaacacacaatttataaaaattagttgtccccgtgcaaaaaaaagaaggtatacatgtgttatgtgtcaacgttggtacgactttgaaggatctaaaaggtcaaactttagttgagagttgagacagtgataacttggttttgactttcttacatgcatcgccacaacaatacaatatttctacgaatgcataaaaaacaaattctatgctttaatttttttttttttttcttgaatgattgttaacgataaactgtaagaggataagttaaatctctttttattgttagtaaaaatagaaattcgtgtaaggacttcacatatttgatctctttttaattagcgtgacacaataactaattctcagttctcgatgtacctactaaattccttaatctaggaggacaacgtatatcggtatatgactaagatctagttcttggaactacatgtttaacaatattggtactaattgggggacacatgcatataattatacaaatttgtatatctaaggataaaaattggatctctaattttcaaactaaaagaattatggaacgtatgttagtttaatatccttttcaacagcttttgacttatttaattttttcatcttgtgaacaagagagaaaaaagtactctttaatttattattaacttcaataattgcaagtcatgtgaaacccatcaatctaatcttttctcacttgccaaaagagaatattatttctgtagctattaaaagtaattatgtaaatttatacctatcctattatagaggtaaaaaaatgtaacaccacgagaatttttatttaccagaaatgtagaatggaacctaaaataatgaacaattattaatgctataggatcgattaatcgtaagaaaaaaaaattagaaagaataacattaggcaaattttttaaaacgatcatcaaacgaaaccgtaaaatggtgaaaaaatattttacattttgtcataaaaatgacaaaacatcaaagtacacccttaaaaatccctattttgtaaagtcataggacacgtaattttttaaattactcgaacctacaagagattctcgtagttcaaccaacacaatcacacgtattaacttttttcctctagccagctacatacatagtctacgcatcgcctacgcaaaccatagatccatcactctatatatacagaaatatatacacacacacaaagagctatatatagagaatacacaacacattattctattcttgtatactctaattacacacaaaaaaaaaaggagagagagagagagagagagtaccaatttctctccctcaaa

SEQ ID NO: 8532 - DNA, 3000 bp, Unknown
  misc_feature (1)..( 3000): cDNA_ID_3045678_gDNA_ID_1971815_Annot_ID_175942 3000 nt of promoter + ATG
taaatttatcatatgttggaatatttagtgttttattcaggatgaatcatgtgttggaataacagtaaatatttcttctttttttgaagaacaaggataacagtaaatagttcagaattactttttaccatagaattggttcatctctttcaaatctagtttttgttctgcaaataaatttgatttgaacgcaaggaaagactcacaactcacaaggcttccttttgtagggttaatcactcacaaatctggtttagcattacaaaataaattgtccgttcttattattaaactccggaaataaaagaaataaattcactaatatttctaattagcatcttcacaaaattcactacctacaacatctataaccaatacaacaacaagaaaaaaaaaatctaattgccaaaaaaaagtgtataattatttcttcttcaatttttagattgcgtttgaccagagacttcaccaaaccggcgatgatcatatcctctgtttctaataagttcagcgaacgtaacacaactctctgtctggctatgtcctctcgtgaccttaatctttacatgttctggtaatctcaatgtatacttatcttcttcctccggtttatttctcactatcgagtgtcccgtagaatgcgatctagagaatttctccggcaagttttgttcctttttgatgctactggtctgtcctgaagatggccaagtatcaatctgtgttgttgtctgctgacgatgatgatcgtcttcttcgtcgtcgcttgtttcttgaatcacatctatgatcatctcatcgacagtaggcttggtgttttccggtggcggaggaggatcaagatcccgacgacaaacagggcaagttctgtgagattcgaaccagagatcgatgcattcttggtggaacacgtggtagcatgttgtcaagagacgtagcacgtgatctccgtcgaattcgagaagacaaatggcgcattcgaggccgtatttctcttcccggagatctttaacggaggagtaaggaaaagtgggaaatgagttaatgattcgaagttcaaggccgggatttaccggtggagcttccggttgctggaggggattgtcggatacggtgtctccgccgtggtggagacgccaagcttgcaccattgtgtcgaggaaacacttgcaaaaatagagagtgaagaaaccgatgaagaagaaaacgaggaggattacggtgaggatcaccgtgagaggcggtgtaacgtaatgttgttgcggaggttgcggtgccagaggtgaaggaattattgtcgacattacggtggccggagactgaatatctccgccgtgagacttctcatataccaaaaaaaaacaagaaagcgagagacaagagaaattcacttatttcaaaggttattttaattattagagttcagttttatttggtatagtgtgtggaaaatgtgtgtttggtgtgagagaaagagtgttaggaagttttggttactaaaaataaaaagtgtgttttgggtttggttatgtttgtttggtttgtttgcttaatgctatagcattgaacgagtcgtctgtgacatttgtttaacgttaagccacttcgtccttaaaaatagttaagttttttttctttttctttggttttaatagtatataagtctcgtttctaacaagcaataattaggatttaggttcatgacacatttcggctaatggcttttctttccttatatatacacaattcatcaaggtataaggatgttttgaatatacttgtttggtatgatcggtatacttcataaatcaactgatcatcaaaaactctcgatgaacgaccatattcttcgaaatcaatggtcattgagctatctttgtatttggtatacttttgaatcaacgaacatcggatcaactagttttgcacaagctcattccacaaaggtgtccacacggacctcaattgatgttttgcacgaagagacatgcatatatcggggatgtgaatttgcaaaacaaggacatcagtcctttagagctttggttgcttaatcatttccattttttctatttgaaaattttaatattatgaagaggagacaaaaatatagacccgtcggtaatcacttatctttgttttgacaataatattataagtcaagtactagtttccatcttccacagttagtaaacaaaactgttactgtattttataagatcatctttaccattaatagtgtgaaacaaattaaaagacaaagtcacaactagataacaaccatattatatgcatttgggaaaaccttatcttatcttatcaaaaacagcaaaatatccccaattgaatcagtatagtgaatccagatcttcccaatttcatagttaaagacaagaaaatgaaatgtcattttgtgtgattgtgatattaatcattcacatattaacatcattctcatcccatcgttaatccattacattttattgtatagatttgacacacaaaacaaaacaaaatgcatgcaaagacaattagtaaaacaacttctttttttgatctaacatcatgaataacatttggcatgacaacagaaattttatagtttcgataataatacagtaatactcatagttttatgattctgactgaatcgccaattgtttttcattaaagagaaaaatactatggtaaggaactaaggatccatgtggtaatcgaagagtcgtcgatcacgtgcaatcctccacacgtgttaagtcagctcgtagttgattcttcccccttgacggtcatctcatcggacggttgagatcagccaactttaagtgtatcacacggaaaagggaaatgtagcgcgagaaagtcaaaagatccaacggtcgatatgaaacaaaagtcagataatcgtacggtagaaacgaagctatatatagcaacaattggattattcttatcatcatcactctctgagatcgaagagaaagcaaaatcaaagttgtg

SEQ ID NO: 8533 - DNA, 3000 bp, Unknown
  misc_feature (1)..( 3000): cDNA_ID_3045682_gDNA_ID_1971815_Annot_ID_175937 3000 nt of promoter + ATG
tcttctatgataattcggattaatccaatagaatggttcgtgggttggtgaatttcaccggattatcaacgaggttattaaacatttgcgttgattcactctgcaaattccggaaattagagaaagctgagtctttaatcattgacggaatcagattaggtgttgatcctgatgtcgtcacttacaacacactgatcagtggctattgtcgattcgttggtatagaagaagcttacgctgtgactcgtcgtatgagagacgccggaattagaccagacgtagctacgtataattctttaatcgccggagcagctagacggcttatgttagatcatgtcctctacctgttcgacgaaatgcttgagtggggaatttatcctgatttgtggagttacaatactttgatgtgttgttattttaagctagggaaacacgaagaagcgtttcgggttctttataaggatcttcagctcgctgggctaaatccaggtcctgatacttacaatgttcttcttgatgctttatgcaagtgtggttatatagacaatgctctagagctttttaaagagatgcagagtaggtttaaaccggagcttatgacttataacattcttatcaacgggctttgtaaatccaggagagtcggtactgcgaaatggatgctaacggagctgaagaaatcaggttacactccgaatgctgttacatatactacaatcctgaagctatattttaagaccaggaggattagaagagggcttcagttgttcttagagatgaaaagagaagggtacacttatgatgggtatgcgtacttcgcggttgttagtgctttgattaagacgggtagaacgaaagaggcttatgagtatatgcaagagttagttaggaaaggtaggagacatgacattgtttcgtataacacattgttgaatctgtattttaaagacgggaatttggatgcggtcgatgatttgttaggagagatagagcggagaggaatgaaagcggatgagtatacacacacgattatagttaatggtttgttaaggacaggacagacgagaagagctgaggagcattttgtaagtatgggagagatggggattggattgaatctcgtgacttgtaactgtttggttgatggattgtgtaaagcgggtcatgtggaccgggcgatgagatattttgagtcgatggaagtgaaagatgagtatacttacacctctgttgtgcataatctttgtaaagacatgaggtttgtttgtgcttcaaagctgctattgtcgtgttacaataaaggaattaagattccgacatcggcgagacgagcggttttgtcgggtttacggatgtctggatgttacggtgaagcgaggaaggcgaaggccgaaatgaaactgaccctggttgggaattcctaacgatatccttacattcaaaagttttgaagtaaaactgtaatgtacttatgtatcatgaaatagaataaaagtcttgattctttaacattcaagaggtctctctgaaccggataaaatctgatgaacagaacctaccaattgaactatccggttgtgatcaaaccaaatgaaatctctgtagtttgatcaaacgacaaggactgaagaaagtttagatctctttacctctgaattctgaacaattcctaaaccagagtaagaggtttaggaatgcttgagttatcttgaaaagtggtcattgtactcaaaccgagaagcagatgatgaaccagctgatgatttgcttccgccgttatcagttgaagatgcagcaggactgaccggtgagacttcttccggtttctgctcatatagattctcctttggctatatattaccagaaacaaagtccaatcttagaatctgaacaagagaacggaaacgtaaatgctccaaataacaacccaagacttaccttagtaataagcttcctagcaccaagaccaccagtttgtcctgcccttttaataccaacaggtttctcaaacgtactaggcacaactgtatcagaggctataggcgacgaagtgtcactggtatcttcatatttaggaggtacatcttcctttgacagcataagcagaaaccccatcagtagtagtatctagtgcattggcttcagcaacttccttagcaagaatctgcctatacaaatcagcagctctcgaagtatacttagcttcgattttgccaccatcggtccatccatgttgcttgaagaacacctgagcacggtagttgccaccaaacatcattgccctaagctgctcagggctccatgagtctaaactcgttgatcttatacgaataaacatacaaaacaaaaaggttgtgtgtgttctttctttatgcttattgtttgatgcggaagaatttctattctgccatgattcggaaaaaaaaattctattctgccatccaaataaatcaatttttttttgatttatttttaagtagagaaatagagggattttaccaaataaccttgttactttaggaaaactacatgacccaaccacatgtagacggatagctccactgtaactgggttttcccccaaatcgtcagtttttaatctaagtaatttttttcaaaaatcaaaattgtcgctttcttctccgattaacctaaacggcgatttgttccggcgattctcgaaaattttcgtcgctttctttttccgaccagttcaccgtcaccggtttcatctctgcttcttcaccaaacgatttcttgaatttttttaacctaagtaacattttacaaaatcaaaattgtcgacatccactttgcaattccgtttaaccgccgttgcaattccgccgtgaccggtgctgttccaaaccgtcgtcgttccaaaccgccggcgttccaaattgtaagtgtagattggaacggtttttgatttttgagtgttttcgttgtgttgatttgaacggtttccttgattgttgagtggttttgcaaggtaatcatg

SEQ ID NO: 8534 - DNA, 3000 bp, Unknown
  misc_feature (1)..( 3000): cDNA_ID_1825621_gDNA_ID_1971815_Annot_ID_58211 3000 nt of promoter + ATG
aaataaaccggaggaagaagataagtatacattgagattaccagaacatgtaaagattaaggtcacgagaggacatagccagacagagagttgtgttacgttcgctgaacttattagaaacagaggatatgatcatcgccggtttggtgaagtctctggtcaaacgcaatctaaaaattgaagaagaaataattatacacttttttttggcaattagattttttttttcttgttgttgtattggttatagatgttgtaggtagtgaattttgtgaagatgctaattagaaatattagtgaatttatttcttttatttccggagtttaataataagaacggacaatttattttgtaatgctaaaccagatttgtgagtgattaaccctacaaaaggaagccttgtgagttgtgagtctttccttgcgttcaaatcaaatttatttgcagaacaaaaactagatttgaaagagatgaaccaattctatggtaaaaagtaattctgaactatttactgttatccttgttcttcaaaaaaagaagaaatatttactgttattccaacacatgattcatcctgaataaaacactaaatattccaacatatgataaatttaaattgctaaaaagttaaaaaaaaatgaatgaaaattgattacatacttaatataaactaatctaattttacataataatataaaaaatttagaatagattaaagatttatgcatgagttattttataatagatgacatgaaaagcttaatgtgatagataatagataaacatgaaatgaacaagatcgtccatctggttgaagagaaatacgaagatgaaaaatatttatatttttattcaaaaatgtaacaataagtaggttatagattatattttaagaaattataatctataacctacttattgttacatatttaaaaaatatattactatgttttgctttggttttgcttgttatcttgtaaatatagttctttcaaaattttcaatttccaaaaagatatataattattataaaaaatgttaggtttcaattctatagatatgttaataaaaataaaaactagatttgttagaataaaaataaatgaagagcaatctttggcgttttcgtgttatgcattttctcctgccgttctctaaaagtaaaatgattttcccgccgtttcgcacatcccaataaaactatgagcgaaaatggtttcaacatggcgattatgctctctctggtactttgggcaagcttctttatcctttctacaggtatcgaggccatacaaatgtagtaaggaaacttgacgtaacctcgctaatatgtggtttggtctcgattggtctactgttaagttaccttaattgaatatttttttttgttctggtcgtcgcttccatcttcgtggcaatattgctctgcggccaccgtaatatctacaataattcatttatctctgccaccgcaacctccgccgcaacatttaaacttttagtccaacatgttaaaaattaaattaaatatctttatcactcttgttttacctttttctttacgataattaatcttgtttcacatgtgttatgtttgaacgaattgttttgcatttatatttgagtaaatttggaaaaatgtcctatttttgagttttcatttggaaaataccctctccttttttctttttaaacaattaatttttaatatacaaaattactaagatagtctcattaaaatttaaacaattattatcttaaatatttttaaacaaaattttgtcgaaaaagtaaaaaataaactttactaagtgatagactttttaaaatattttaaaatattattttattaaaatttaacaaataaaataaacaaagtctttatctcagaaatagttgaaaaaatattgaaaaagtcaaaattaattcttatcttgaatatttttaaacaaaattttgtccaagaaaaaagcaaataagttttattaagtactttacaatatttttcgacattattttggttaaaattttaaatatctaaaataaataaatctttatctcaaaaaatagttaaaaacataattaagaattcaaatttattttattttaatttgtttcttctaaatttcgaatttcgttttaatttattaagaaaatagcttttattttaaatccggataaaacggtcatctaacatattaagaattatatttttttattaataatagagaaagatgtatttttcaaatgaaaactcaaaaacaagatagttttcaaaatatccctttatattttgtgtgttttactcggatgaatttacctaacctatctcgattttttgttttgttaatatcagttattgtttagattatagagtattctaatctaatttgaataagccaagtttgaattataaaaaaaaataaaaattgaataacataatgtttctgtttttattcatttatttagttttggttctaataaagaaatctgcatttgcatgttttaagccttttcaataattcttgtcgctttgatttgcaaaataacaagcaagcatgcatggtttgaaattttgctacattctttcaagttttcattctcttggtctattttttttttttcatcctttgttataacacttaaaagactcgaaagaattttatttgttggtgtatatgttaacatttataacttagggcttactttgattaaaacaaaaacttaggggtttattatgaaatataatgaacttggaagttgaagactgttcttcttgtaaaacccctctcagattgctgcttcaaagagaaaacaattttgtttcgaaaagttcacatttttccgatgccgatcacattcttcgccgagatctgcatctgaattatcaaaatttctaccattttctctgtttatcaaatcctatgtcacgaattaatctccaaatcttactccttccaccattcttctatgataattcggattaatccaatagaatg

SEQ ID NO: 8535 - DNA, 3000 bp, Unknown
  misc_feature (1)..( 3000): cDNA_ID_2999841_gDNA_ID_1971815_Annot_ID_58214 3000 nt of promoter + ATG
tttttttgaagaacaaggataacagtaaatagttcagaattactttttaccatagaattggttcatctctttcaaatctagtttttgttctgcaaataaatttgatttgaacgcaaggaaagactcacaactcacaaggcttccttttgtagggttaatcactcacaaatctggtttagcattacaaaataaattgtccgttcttattattaaactccggaaataaaagaaataaattcactaatatttctaattagcatcttcacaaaattcactacctacaacatctataaccaatacaacaacaagaaaaaaaaaatctaattgccaaaaaaaagtgtataattatttcttcttcaatttttagattgcgtttgaccagagacttcaccaaaccggcgatgatcatatcctctgtttctaataagttcagcgaacgtaacacaactctctgtctggctatgtcctctcgtgaccttaatctttacatgttctggtaatctcaatgtatacttatcttcttcctccggtttatttctcactatcgagtgtcccgtagaatgcgatctagagaatttctccggcaagttttgttcctttttgatgctactggtctgtcctgaagatggccaagtatcaatctgtgttgttgtctgctgacgatgatgatcgtcttcttcgtcgtcgcttgtttcttgaatcacatctatgatcatctcatcgacagtaggcttggtgttttccggtggcggaggaggatcaagatcccgacgacaaacagggcaagttctgtgagattcgaaccagagatcgatgcattcttggtggaacacgtggtagcatgttgtcaagagacgtagcacgtgatctccgtcgaattcgagaagacaaatggcgcattcgaggccgtatttctcttcccggagatctttaacggaggagtaaggaaaagtgggaaatgagttaatgattcgaagttcaaggccgggatttaccggtggagcttccggttgctggaggggattgtcggatacggtgtctccgccgtggtggagacgccaagcttgcaccattgtgtcgaggaaacacttgcaaaaatagagagtgaagaaaccgatgaagaagaaaacgaggaggattacggtgaggatcaccgtgagaggcggtgtaacgtaatgttgttgcggaggttgcggtgccagaggtgaaggaattattgtcgacattacggtggccggagactgaatatctccgccgtgagacttctcatataccaaaaaaaaacaagaaagcgagagacaagagaaattcacttatttcaaaggttattttaattattagagttcagttttatttggtatagtgtgtggaaaatgtgtgtttggtgtgagagaaagagtgttaggaagttttggttactaaaaataaaaagtgtgttttgggtttggttatgtttgtttggtttgtttgcttaatgctatagcattgaacgagtcgtctgtgacatttgtttaacgttaagccacttcgtccttaaaaatagttaagttttttttctttttctttggttttaatagtatataagtctcgtttctaacaagcaataattaggatttaggttcatgacacatttcggctaatggcttttctttccttatatatacacaattcatcaaggtataaggatgttttgaatatacttgtttggtatgatcggtatacttcataaatcaactgatcatcaaaaactctcgatgaacgaccatattcttcgaaatcaatggtcattgagctatctttgtatttggtatacttttgaatcaacgaacatcggatcaactagttttgcacaagctcattccacaaaggtgtccacacggacctcaattgatgttttgcacgaagagacatgcatatatcggggatgtgaatttgcaaaacaaggacatcagtcctttagagctttggttgcttaatcatttccattttttctatttgaaaattttaatattatgaagaggagacaaaaatatagacccgtcggtaatcacttatctttgttttgacaataatattataagtcaagtactagtttccatcttccacagttagtaaacaaaactgttactgtattttataagatcatctttaccattaatagtgtgaaacaaattaaaagacaaagtcacaactagataacaaccatattatatgcatttgggaaaaccttatcttatcttatcaaaaacagcaaaatatccccaattgaatcagtatagtgaatccagatcttcccaatttcatagttaaagacaagaaaatgaaatgtcattttgtgtgattgtgatattaatcattcacatattaacatcattctcatcccatcgttaatccattacattttattgtatagatttgacacacaaaacaaaacaaaatgcatgcaaagacaattagtaaaacaacttctttttttgatctaacatcatgaataacatttggcatgacaacagaaattttatagtttcgataataatacagtaatactcatagttttatgattctgactgaatcgccaattgtttttcattaaagagaaaaatactatggtaaggaactaaggatccatgtggtaatcgaagagtcgtcgatcacgtgcaatcctccacacgtgttaagtcagctcgtagttgattcttcccccttgacggtcatctcatcggacggttgagatcagccaactttaagtgtatcacacggaaaagggaaatgtagcgcgagaaagtcaaaagatccaacggtcgatatgaaacaaaagtcagataatcgtacggtagaaacgaagctatatatagcaacaattggattattcttatcatcatcactctctgagatcgaagagaaagcaaaatcaaagttgtgatgaaatctctattgatgagaaccggttcgatgccggttcttcaaaaccggttaatttcaggtggttcatcgcggaag

SEQ ID NO: 8536 - DNA, 3000 bp, Unknown
  misc_feature (1)..( 3000): cDNA_ID_1825612_gDNA_ID_1971815_Annot_ID_58215 3000 nt of promoter + ATG
gtgtaccatctcagtccctggttcaacacaagagagagctataatacagcttgtgacagaaccaatatccaagaagatatgcaagctcttaactaagaaaaattcactagtctaacattagaaataaagtaacagctaactggaggaaccacaggagtaaaaatataaacagaagtgatacagagtcgttgtctaatgtcaaagaaaagacaatgtgaaaccagtttagaggcaatgattatagttacgcttctactacatagaaagttaaggtaagccatattggtgaacttacttctactcattttctttattgcatctaactgttactactcatgagaacatctaactcaaaacctcaataatgctaaagcaagaacagagagtatcgaaatcaattttgtacactatgctaagagagtcaagctgaggactatgtagcacatgaaccatgattactaacagctaaagtagaactaaagaatgaggaatctttaatggaacttactaatcaatctcaaacccaatgtatgatgttcctaagctaatctaactaactagaatccacacttccgtataaagcaatcaaccactatagcaaccgttccagcacaggaatcccaaacctgaataccaccatctccattggcgcaaggctgaagaagaggaccaagttgagacctttcgacagcaacttgaaccggaactccaaatcctttccttggtaatccagtttcacgaaatctctgctgattacctccgtcaccgtaaacatcaatatcatcttcctcatttttcaatacttcctggccaaatccaaacacaccagctaatttcttgaaaaaacccatcctaatccttacaaatcaaactctcccaaaataaatccgttactaaaaatacaaactttctctcccagaagctacaatttgcatactagtttctagaccaatccgtcactaagagaaacaaaaaaaaaaatgatctttcctataagttaatcagacaacagatacttattagggtttatgaaactgaatcctttagacccaagttctacttcataaactgaatccgaatatctccactctctctgcgacgacaatggaggaaagtggatcaaagagagaatcttcttcttcttgcttttgctcatttctctactttccaaatctaacccttcttcttctccattaacgagcggtaaattcttatttaccacaattacatttcactagtgggctacattagtgagagttaagcccattaataaaagcccacctgaccaataattatacttttggtcaattgcttccaagttcattagtttccgtaagtgttttcatttttcaatgcaacactcttatgtgttgcagccttgcagcaccaagtgataatagagattatggatctttcaggtgacttgaatcatatgataaactctaaagtactttaaaagaaaaacattcgttatctgtctcgaaatatttctatgttcaggtactaatttttcacagcatctggttttacgtgtccagtttcttaaggtacgcgcatggcgtaaactgttgataacatttgctttttattgcttgttggtctactaaagtcaatcactttagtcgctacctagacataaaaagtttagtacttttagtcttttacattgattatcatctccaacaaaaccggatacacatcacatattttatcctttggattaaaccgggatacaaaaaaaaatctaatcggtaaattccattttctcgtgaacaagtatgggagaagagtacataaccaattaaaatatacacttttgttcctttacacagatttttgttttggattctaaagttgcatatattaaatatttggttgctacattctattccaactccagtgggtctttatctatgtgatatagtagcattaaaaattagtaacttgagtttgtcaattaatttggaatctatagagagtatatacaacagtattctgaattctgaatgatagatttttcttaaaaagataggcaatagaaggacaaaatagtcaaaataagctgctgtcattttcaaactagtgattgtttttaagatctgaaggatatacttaagaaaaaaaatctgacacatcaaagtacaaaccccatctttattatttttgcatttcccaaacacagtcaaaccaaaatctttagtttacataataatttatttgatatattattctcttattaattcttgtgcatttgtttgcattttagagattttctaaaaagacactgaactaaaataacctcctaatattttattaaacttcaatgtctcattccggtttgatttctcttccaataaccaaacttggttcattcaatgcaacaatggaaattatgtgaaaaaccccaaaaaaattgaaaaccatttattaaaacagaactagtgttaaaggagagaacaccaaaccatttacattagattacaactagaaactataactggactgaacatcatcattattaaagacacaaactctttatttcattcacattttaacaaaaccctaattatattatattttaaaagttaaattcatcaatattaaagaaaacaaaaacaaaacttaatctcctgaaaactgaaaaccataaaccaaagatttgtttcctcaatttcttcttttatttatataattaaaaatcttcaaaaacacaaaaaaaaaataaaaaaattagacactaactagatcgtccctcgtctgatgaaagaactcaagaaagagagagagagagagagagagagagagagagagagagagagagagagagagagagagagagagagagagagagagttgttagctagctcacacgctttcgcttaaaactcaaaaacctgcactttctcgtctattttctcggcattcgtaaaacagaaaagtgggtctccaagaaaattaccctaaattcacaaagattcatacttttctccacctccaatg

SEQ ID NO: 8537 - DNA, 3000 bp, Unknown; identical to SEQ ID NO: 8531
  misc_feature (1)..( 3000): cDNA_ID_1825608_gDNA_ID_1971815_Annot_ID_58217 3000 nt of promoter + ATG

SEQ ID NO: 8538 - DNA, 3000 bp, Unknown; identical to SEQ ID NO: 8530
  misc_feature (1)..( 3000): cDNA_ID_1825605_gDNA_ID_1971815_Annot_ID_58218 3000 nt of promoter + ATG

SEQ ID NO: 8539 - DNA, 3000 bp, Unknown
  misc_feature (1)..( 3000): cDNA_ID_1825601_gDNA_ID_1971815_Annot_ID_58219 3000 nt of promoter + ATG
gctcttcacgttaataacgcagctgcttctgctgttcatcctgaaccttctttttgagtctaataagtgtcttataaaaaagaataataatttatacgctaatttctgtaattttttttatacatgggattcgtttgggttttgattttgttattgttttgttccggttaatctataatctaaccaaatttattttttttacttgtcaatacgagccttttaatttatttgaattcactttatgatctactatttatcattaaaatttttgtgctatacataaatttagttgatccaactctgaaaaccatttgacatgcaaataatggaccaaacaaactctaaattaaaggagttggtctgctgtgaatcttttaaattgaagaacaaactatggtgcaaatgttttgtctcaaaataagaagttgaaagagttgaataatcattcatctcatttcgtaccatctgagatgaataagttgaaaaattcatttaacccattcaaaaaaaaagttagaaaaataaattaactataaaagaaatttgtaatgagttgaataatgtccaactttatttttgtttaattcatatttttcaatcattcatttgcatgtaaccatttgcagacttattttttaaaaactaattatttgtttcgatacccgaaaagatgccaaaaagagtatttgtttatgcattggtaataagttattttttctctacaatagttcaaaattcctatagagatatgtttactataattgtaaatataaaatatctaatccattacttgcatcttaaatcaattaaatctagaaatacaattacttcaattagaacatcaatacaacataaaattctataaaggtatgagacgtaaaccaaaactcggatttactacaatatgttggaaatgtgtatattagttgactttacgatatgttttatttggcaaagtcaacaaaagttgatgattagttagaaaaatcaactgaaattgataaatttattcaccacaagcaaagttggtgttttgtttcaccacttttggtaagttgatgtttgtttgacattttccttcttattattcggaaaatcatgtggttaatgaatcatgcagacttttgtgtttagtgaaaataagaaagtgttttctcggtctccgatgactccaaatgagattaatagctataagaagtggattattgagtttgatgatgagtatgaagtaagtagaaaagtgaaaagcatgatacaatgttcaaaaccatgttgcatgataatatgtagaacaattaagaagtgaatgccattcatgctttgggaagtcaatcctcttgaaccacaacagaggtgttgacgaaggaggccttgttcgagatcaaaaatcacatagtataattttacctttttgtttaattgaataacagaaatgtatgttaactacttttgtttttgtttttgcttttaggtaactgctggacgtagcgacatatagttacagtgcaaggcgtttgatcattaaagaggagaaaaatttctgaatttttattaaaagatatctcacatattatattgaataccatggaaatatttaagggtgaaagaaaagatgaacaccactacacaccactaccatgagttctatatctgtacatgaggatactagagatgaaaataatgaagttgcaaaggaggatactagagatgttaaaaaagaatttgactatgttatgaccccccaacggaactctccaaccctattcaagatttagaaataagtggaaattagtaaatcaaacaacttaaaagacttgtataggatgttgttgaaccaacagttgtggcgcaatatatttatttcataaatttaatcatttatttatattattatttacaaatatgaaaattaacaaacaacttttccgctttaactaaaaacgagtctaaaaaatctttaatgtcttattgagtcttgtggatcgacctcgcatatattaccttttggttaaatgtaccgagtaattttttattttttttgtacagtttattcgcgagtaatctatgaaatatacatgtatgcattattgattggttccttgtccacatatgctccatatttttaatcaattaaccttatggttagcttctaatataattaacaatgtataagatttgcaaatgagtctaacggattaggcttagctcacttactaacaatctgcatcgcataggtttacaaattctgtagtttccgcatacaatacatttacaaaaaaaaaatgttatttttgaattttctatttcaaatttagcgcatatattttcaccatttaaaaaagaattagattcattttaatattcaatttataatgttattgggaaaaaaacaagagattgtatttttggaagaaaacttaaaaatgtggtatttaagataactttctttgcttttataaaaattacaaaaaaaagtgcaagtacaaattccattttcaaacattaattacattttaaaattattttgtgattgtagccaattgtatttttgtgtggctccgtaatttagaaaacttttgaaacaattttgacaaaactttaatctaatttttaaaatcatatgacaaaataaaataatattgtaaatgacccaagaaaacctgaattattcaagagaaaaagaaaacctgaatttacctcttgttcgtgaatttacctcttgttcgtcaatctatcatcttaatttcgagttagttttttatattcttttctcaatcctagttgctatattttttttttaacactagcattttggtcattaaagtccagaaagaaaatatacaaatatcaattgaataaaaaataaaataaaaaaatggtgttttaatttgattttatgctcaaaattaaataaaaaaatgaagcattttccagcgccagagcaaaaaaaacctagcgattgaaaaaggagactcgttttcgttgggatttatcagaatg

SEQ ID NO: 8540 - DNA, 3000 bp, Unknown
  misc_feature (1)..( 3000): cDNA_ID_1825595_gDNA_ID_1971815_Annot_ID_58221 3000 nt of promoter + ATG
aatcaatactttagagaaatattataatgtagaaaattctcaatgaactatgtgataatttgtatactacttgtctgatttgtagcttggtagttggggataatgatttgtgtgagtagttatgacttcagtccattaaaagctctgtttaaaaatgatattaaaaatcaataaaattacaaagtgggattattcgcacaaattgcgtgttgatatgctattggcaggttgaagaaagcaaatgacattgacatcgttatgattctattacaaaaactttttattttgtctacaacgttactataaaactttcttacggcatgattctattacaaaaatttaaataaccagtattcaataaaaaaaattttttttttttttttcaaaaatttctaagttagttctataataatgtattaaggagacaattattccctaattagcagtattatagaactaactcaataaatttctaagttagttctataatactgctaattagggaataattgtctccttatttatgggtgcgcgtacaggtatgtggtccatatgtacctttataccggcctaccaatcgtatctaatatttgtgttggatttggtaaatttaaatgtattaattacttcatattattaatgtgttacagatcacgatagaaaacccacattttgaatattttcgaccgaccgacctgatcaaatataaataaattatcaatttcctaccgatatatattttgttagtttttaatttgaatgttttaataaaattttgtttcttttgttaaaaggttaactttatataatgttaccctctttctaaaaatatctaagggacatgatattttggaaagtggtaatctttgttgtataattttatttgttttttttatatatataataataatgaagttttaaagtgacagtctaatatttgcaactctgaaatcaacctttcatctttttttttgagattgtcattgtaatatcaaatggactcgaactaaaaaaagtttatgttctttccaaaaatcatttgatgtataaccttatagatagtaaattagcaattgatgataattaattaacaacaatgaacaaacgatctttagagtaacaaaaatagcaatatgataagaagtaaatttaacgtaaaccttaaacagtggttaaattatgaattaatttatccaaatacttattagttatcccgtcgctctagttgatgataagtaaatatatttaaatcttcccactgagcttttagtatttgtatttttttttatcccattaactattttatggtcaaccagcgtcgtcgtgtcgccattttgtgaatcaaactaatttatttaagtagctttggtcaaccgaaactttcctaatgaccttcgttacgtcctctatccgcaaattgcattgcatgggcgtcagtttttttttccttttttcttaataacgcgtcaatttattttatgatgatgattatgtttagttgaaataatcttcagttattaattagatatttcttggtaaatattttttacaaatatgctgtcagaaattcaaagttatgtatttccataccatattggactccatactttatatcttctcagttgagtatccttcaaattcacctgttttggaaattggaaatataatttagttttagaaatgttttaagttaaaacataacagttaacaaagaaaagatatagacaattttaagacttttaaatgtgagggattctcactttttcgttgttttctaatggttccaattcatagttatcgtataatattatttaacgaaacattagtcaaataaataatctatctattcgccgactgtatggctgaaaatattagctggagctagactcgtattgaaaaaattaatccatatatttgttgcctaggagagtgacattttgacctttttaataacataccaaaaaggccgtttatttaatatattatccagatagcagcgttgaatcggattttggttggttttggtttatgtgttttagatttttggttaaagcaaaccactaacttaagtcaggtcaaagtatttcagcaaaactaattctcaaataatcacttttactccgcaaaactgcttgtcaaaatatagttttgacttccaacgagccattttttgctaattcagtttaactagtatacgcaaaaaaaaaaaatgtttagataaattaaaatttcggttaacttttataaaaaagtttcagtctgtctgtttgattcggtttactttaactaaatgccactatcttaaaagatgaagtaaacatttataataattcggtatggtcggtacaatcagtctagtaaaaccgaattgagaaaaccaggtcggttcgaatatatccaaaaaccgaaaacacgtgtgagaaagaagaaatcagggaattaaatctgacagtctttatagttttctttaatatgtcttccccaaaaaatcaaattatgaataaaaaaagtggatcgcaagttgcagtttggttctttacgggcaacgaaggctgttaaataacagccatagcttttcttcgaaacgaacccaaaaaataatatcagagaattttcatcattacacctttttttttcttttgcctttgcctttgccttcacacgtcttcttgtttgtactctccactttttttttctttgtgtcctttcttcttgttcttgctctagttcgtgtctcttctttaactctctgtcactattataaatatcaaactctgacattttcttctgttcaaattctcctcgaaactcccccaaagaaacaaaatctttttctgagatctaagaagatgaaaacaagacgtgggaaacgtcctgaggtacacaagattaagattctctctcttttttattcttgtttctttaattctctgattacaaagattctgatgttttctcgtctttgatgtaaaacagaggttttggccatcaattgtgatg

SEQ ID NO: 8541 - DNA, 3000 bp, Unknown; identical to SEQ ID NO: 8528
  misc_feature (1)..( 3000): cDNA_ID_1825591_gDNA_ID_1971815_Annot_ID_58222 3000 nt of promoter + ATG

SEQ ID NO: 8542 - DNA, 426 bp, Unknown
  misc_feature (1)..( 426): cDNA_ID_3045665_gDNA_ID_1971815_Annot_ID_58223 3000 nt of promoter + ATG
tggcattggtggcaaagctttatactttctggctactgcaagctcatcactgaaaagagcttaaaccagagagatctgataagagaaattttagagtctctctgcttcaacaagatctacatcgaccaggttcaatatttttctctactgttagttcgtgttctagctctgtttcaacgagatccgattctgtgttttcgatttcagtgctaaagttacggtctttgaatctttctatgttaggattagtcttttgaatccataaactctagatttcaattgttaaaggctaggttttgattagtttgaattagctagatccttttttaacagatcttgatgtttaagctcaaagttgtgtcgttatactgagaatcaagtttgtgatttgttgggaatggtttcaggagattagaaagaatcatg

SEQ ID NO: 8543 - DNA, 3000 bp, Unknown
  misc_feature (1)..( 3000): cDNA_ID_3045717_gDNA_ID_1971816_Annot_ID_58224 3000 nt of promoter + ATG
catcaacatttgcttcctgtctcatctctcctctttgttcctcggtcagcttcatgccttgcttgatcatccatggaggcaacattttcaggctagaatctccacctgtagatgtgacatcttcatttccttcaccaaggttaacctcaacctaaccatgtaaagatcaaagaaatcaactaagggaaaaatgcatggaaaacttatcttccataataacattgtaatattatatacattgagaactgtaacgaaagatcacctttgtctctcccagaaatggcattggtgttgaaccatatccgcccaaagaccttgaaggatcatcagggttaaaatcaccattttcacgagcagccttagctgcacgagcttcccatgccggaaaaggttcaaaggcagggaacggtaggtcttttactctatttattagttccatcaggggtttcagttcaccctacattttatttccaattgtgtcaacgcacacactacagccacagtcttgttttgttttgcaaatctcaagcattggatatttaagaatgaatctcctaggaaacttaatcatatatcgttctgatttcatcatgaatttggaacgatgcacaagcttcagtgaaggcaaatcaatttgtgtttttctcatactttcattgaaatagccgctaaaacagtaaacacagacctccaaatcctgaagccaaacttttactttctcccgctgccgtctccttgcattgtcacctctatctactacttcttcggaaattagcttgttacattccataacaagttcaccattgcaattttcacaatgaaaagaatcgtcttccatagaaattaatctcagggcatccagtgcattatatctataccagaaatgagaatctatacaggtttagtgaaaataatacaactcaccatgtaaagatttaaaaacataaagaatagtggactttactttcttttgcagttaggacagccatactcctgaacagtatttctgtcttctagttcatctttgaactttttcttgagccggtgcagtttataacgaacaatatcatatatctgtaagagagaagaagtgataaagggtagtttgattaaacaaaaaagaaaccagaaagaaaaaacaaaaagcataacagcaaactgaaagaaaaaaataaatattaggggacatgaagcatacctgtgcataatcaagacagcaatacgagtgcgtgtggaacttaacattgtcctctgctcggccatcagttgtaccacccactgcataactatacatcttcgcacgctttgcagtctattgacaagattgagaataaatcaaacaccagagtaaggaaagaagtgttaccggcttatagacaagaaaacaatcaaacagaaatatacaaccacaagtttgttgagttataggcttagcaaaaaaacaatattgtgatatatatcaatctgaaagaagatagtttctgcacagacctctttcctgtggtaacgcatgacaaatttttgttcttcaaaatgtcttattaattttcgaagctccttggcattccgcttcacctcttttgccaagtcttcttctctaacccattgccgcctagcagacatagaacagaataaatacaagaaatgaaagttagtgaaaacatagccatttattcaacaaacctaataacctcaaaaaatagtctaatccactgaagagatgcatacaaacctcgtaagcgcgtccagcacgataacagcactacctttaacatttttcacagatttctgctgattatcgctttccggagtataattgtcatagaaaatccttactaaaagcctcaccagcctgaaaattaatgcaaatcaacttaggagatgcagaaataattgataaaaacgcgaagttagaacatatatattggatgtctgtgatttttggatagaaatggtatagagaaaagtacttgacaaacggctcgagcacaacggttttccgcaccaccgtgattgatttgtccatggaatataaccagacactttacaatataaccagtcgaatttgtgttggatacaaactctgcaaaatacaatgatgattgattgattgaaagataacagaggcaatggagattgattgacaaacggagcacgaaattagggttttctacgttcagagcgagtatctcagaactcaaagcaacaattagaatgccgataactctaggtcaagtttctacgataacggagaggttaaccaactacctaagatatctagagaatcgatcggaagaggaaaatcgccaatgctaaccggagagctcgagagggagcgagccagagccccggaagaagaaacggagtttttggttttggtactaatgcatataatgtataaactattgaaggtaaatagaacaaattccaaatttggggttattgggccgaatattgatgggcctaacaccgttctcaatttcgtctcccttcaatcgacagagaaacttctatttcctctatcgtcgataaagcaaaaaatcaaatcaagcttcttcttcgatcttcttcttcgatcttcttcctctcgtcaggtttcgtgtggttcgttctaatcgcgttgtattctttctccaaggaaggttcgtatcgattcgattcgattcataatcgctttcgttctataattcgagaaatggaaagtaattgtggtgtttagcttgcgggatcacagatattgaaatcgctcaccgtaattatgaggattctccagatataggctgtttctattaaatcaagctcgaactctactttttgttgattcgagaaatgaaattttattgtggtgtttaaggttgcagaatctagttattggaaaaattgcacagtctataaaccctaattttgaggaatcggcgttgtctaagttatttggtggtcatgatcatcttttgaaaacagtagatattgatggttagagttacgtttattcttcagatg

SEQ ID NO: 8544 - DNA, 3000 bp, Unknown
  misc_feature (1)..( 3000): cDNA_ID_1840079_gDNA_ID_1971816_Annot_ID_58229 3000 nt of promoter + ATG
acgatctaaagttaagttaaatgaaatgaagagatatgatacaaaccagtggagatattctcgttggtgagggttgcttggactcggcacatctggatccaccataacctttattaaacccatcaacaaccgtataagagagaagatcgattatgaatatattaaagcaatcaagaaattaaatcatgagtttgattttttttttttaactcttgaaaagtgataacacacattaagacgaagaagttaaccaaaagttaatagaaaaagaagtaaagacgaagaagcttaaattagaaaaaggtaatagtaacattttccattaatataagggtatctaaaaatactggctttactattcagattcaaaagtcgttaaaataagtgtcaattaagatatttatgcttttctaaaggtatgtatcctagaataaaaaaactaaaataaaaataaaagcgaaacaaaatcaagttaaccgtctcttgaaaacgtaatatatataatcgagaaagattcaaaattgatttaaaataataatcaaaccaataacagttatgcatgcaagaagttagaggaaacgcagcaggtatatagatgaggctacgaaagaaaagaatgatcaaatctagttacgcttaaatttggatatatctaaggtttcttcgtcaatatatggagcttacgaaaacgaaagagtgagctacgaggaactaaatcaatgaagataagaggaatgaaggagagaagatcaccaaggtgtagaaatttctgaagtcgtctcctccaatctccactattggtttgttcagaacttgagaaggccttagatccaagccattagtaacctctctatggccataagtgaccttaagagagaccaacctcgtgaaaggatcaagaacatctccaacaacactgccgaccacaagaggatctctacgacttaaagacatatttatcttggatctcaagtatctcaatcaaatgttttgcttcttaccttatgaacccttacttgctattctttatataacgttttgggaattgcaataattagctatttagctttattctctccaatgaaatcattaccagggtcttttcgtgtatagtttcgagaatctacaactcgttcaacgtacgtatatcacttataattcatgttttttttttctttccttttttctaaatttatagtattcttattccaaaacccaccagtataaaacagaaataatcatattccaaattatacatcatccacttgtttcttgctagccactagtatgtaatttattctgacttatcattgtaacttcatgaactatttaaaataatgtcacaagcatataatatgctgcatatttgcgtacgtcacgcattttgcgtcacatgtcactcatttaaatagttaaggacactacattacaccgattatgtatgatgttaatgcattttagaataactccttcaacctaaaccatcatataaaagtatatatgctccagataaattgacgccataattgttcacatatctggttggtgtgtacatacgtactagactcttttttttcttttcttaatgtagtactaaacttaattaataccatcaaaaatatcaatttaacaaaacaaaccagtaaaacttttaaaacaatggagtaaatcaaataaaacaagtaaattaacaaatagacacaaggtaacagaagtataataacgacagaaaagtgaacaattggccaaaaaattcgttttcaaacgtgatttcaaaattgtctccaaatcttaaatgttgataaagtaatttttttaaaattcattatacctttcaaaaacaagtgtattacctaaaagctcaaccgtgtattcttacactccaaacaaatttagttccccaagtttggaagacaaaaatttctaagaaatttctgacaaaacacatgagaaataaaccgataaagacttctaaaaactattgcagaccagtttcatttgctgaccacaaaaagtcatgagaatacaattagctcagtgattcttgatatttctggtacctaacaaaaagaaaagtgtgtgaggttagatggctatgatttttgctctccaatttattgtccatttccccaatttgtaatatgaaatgcgcaaattactcttcttccgatatgaataagcaaacgaaaacatacgtgggacgttatgttcagaacatttgattaaagtttatatgcgattttcatttatttattatgaattttttgtttggcagcatgtacgatttttcatttaacacacaaatattatagaattttcattggttcaaaggggtagacaaaaaataatttaatattattacaccatttgcagaaaattagaaaatatatttttacccataattaattgatctatggacgtatgcttggcataaaaattcatatttaattagcagaagccaatcgctgcgtttgtatatacgcgtttatgaccgagaaaaaaacccttacgcgtcatgtaaaaaaaaaagaagcgtaaattacgaaaaacagagagataaatccgggcattgagattttggagatagagagagagaaaaatcgaaatctattgtctatctcctcaatttggattggattttctgcatatcatcgctctagctttcgcgggttttggattcgattccttacccttctccaatcggtaagaacaagctccaaagtttgttcctttttttcaattttcgccaattctgtaatctcatcattgtccttgtttgtttgtttgattcaacacacaattcttgttttgatttggatgcagaagtttttggctttgaattggatttgggtttcgttccaaaatcagctctttttgttaatcaggtgagtttttaggtatttgaatctccaattgcttccttgcaatgactaagtattgtgaaatgtttagggtttcatctgtgtgggtcttgttttgaagcaatttgtgtgtgtttgg

SEQ ID NO: 8545 - DNA, 3000 bp, Unknown
  misc_feature (1)..( 3000): cDNA_ID_1823402_gDNA_ID_1971816_Annot_ID_58231 3000 nt of promoter + ATG
aataatttggcattcttttgctccatggaacttgaccttctcttctgtttgttgacttctaaaactccatcggcccttgtggcattgttaatgtatgtatgaatataatctgatacaccaaccaatcattaagatttgggtttgaaatctgtctcttccgtggatgagatatgctacatgtcacaagaactggtcttagctttggtagataagacttgtcttagagcaagtcttgaaatctggaaatctattttgcagtaatcttgtcacaacaaccataacctaatcagtcagtaccctccaagaacattaaagttagatgatccgacaaaacctctcaacaagaccaaactctttccatataaatactctttaacactgacacaaagtttcatcactttctcttgatcactcactgcatcaacaatggccagagagaagattgtggtggctggtggtaccacaaagagctggaaactactcttggggctgagaatatttgcattcatggctactttagctgcagccattgtaatgtcactaaacaaagagacaaagaccttggttgtggccaccattggtactgttcctattaaagccactttaaccgctaagtttcagcacacaccggcttttgtgtaagcgagtaaaaccctatacgaaatcgattcgatacatattgaaagcaaaatgtttttgagttattaacattgattcttggttttacaggttctttgttatagctaatgtaatggtgagcttccacaacttgttgatgattgtggttcagattttcagccggaaactggagtacaaaggtcttcgtctcctctctatcgccattcttgacatggtataaacattggttttcaaatcaatttactggtttgatttcaattgaattagtttgaacgtttggaaaaaaagctaaacggtttcttgataatctaaaaaaacgttggaaaaaaagctaaacgcaacactagtatctgcggctgcaaacgcggcggtgttcgtggcagagctagggaagaacggaaacaagcacgccaagtggaacaaagtctgcgacaggttcaccacttactgtgatcacggcgcaggagcaatcatcgcagcattcgccggagtcattctaatgctcctcgtgtccgccgtctctatttcccgcctcttaatcaattctaaaaacttctccaccaccgccaccacaacctccgtcgtctaaaacatcgtggccaaaaattcagcaacatgtgtgtgaccattttatagatgttgtggcttactttgtgtgtttgtctctcaagtcactagcaaattgtgtaatgcactcctttgttctatcactttcacatttgtattcaagttttcatttctctcttatctttttatataattctaaaatgacaaaaaaaaattcacaaagtatatagtacattgaaacaatgagaaaaatctacaatagatgattagataagaccaattcaagataatttataccttttatttctcaactacttcttctatttatggaaatataattctaatcaattgttagttttttacattaaaatgaattatatcaaccgactaaaaaacaaatcagtattagttctatcgcattgtagttcccatacaacttaatttttgtgttgtaaataatgatcctactgtctctaataaatgtgaatcaataatcataactattgaaatccttttctttttggttagtaaaaatgaagtgtaaatagtataactgtttaatttagttcagatatacaaatcaacaaaactacttaatttgaagattaattcagtttttttttttttttaattttctgtttataaaactactgaattttatttggtataaatggattgaagattttattacaaaacaaaatcacatttggcggcttcttctttttatgttctaaacccttttcttagatcggactccaagaaatctacttgctttaatcgttaacctaataaattcttctctaagttttttttttcttaactcatcaaagaaggaaagaaaaaaaaaaacctctttcacagatatttaaccaaaaggttttagatttatactatacgttacaaataaaattcgagagtcaaattcaatcttgggaaaagcttttgttccgaatcttggccccttcacgaaggtacacttatcatctcactctctatttccagacacaaatctatatgcgttctgggtttttttagggtttcgaaaacggcactgcatttcatcaagtaagggtttgttttttatttaacagatctttgttcttccttaggtcacgggttaaaagtatcgatctttgtgaacttaatctcactgtaaatggatcagcttgcatctctagcagagtctgtggctatggaggtttctcatctttatccttttgcttctttgatttgtgttttttgctttctcctccatttgtaacctctaatttgcatgtttgctagattcaattagcactgttgcagtttctgaatgtggaattgtgtttatttcttgcaggaagattctgagaaacaatcgattaaaggagagagtagtcttgaacctgactctactccttctagtcctaaagtaagttaattgggtttctagcaaagtattggttgggtaaagaggttgatggcttatctatgtgctaaacccgtttgagtctgaaaatccaatcaattctagttttaattaagttcgtggcttttgcttatcagtatcttccttcaaagatctcatctttctgagagtcgttcttattgtatttgttttagattaagcaaaatctatttacttgggtcttaagaatttagcaatctcatctggatcttattagattgtttgttgtgttagctatctgattgtccaagagcagatgaatctgattcatgaatgatatcgttttgttgcgtatttgaagataactgctaggtggaatccatcagaagcttgcaggcctttggttg

SEQ ID NO: 8546 - DNA, 3000 bp, Unknown
  misc_feature (1)..( 3000): cDNA_ID_1823386_gDNA_ID_1971816_Annot_ID_58236 3000 nt of promoter + ATG
ttttccttgtttttgattctttcattaaggtcccacttcccaaccaaatattattttattttgcttatatatggttttgactttgtattcattcatcttttactctaaacagcaatctgcagctaacttgatgattgctggctactgaatcttgagtttgtgtctggagttttgtctcaacaataccaaagaccataaagactttgaggtgatttgagttcagattcttctgaatctccaatgctaagtttctctagagctagaagtcaaggaagaaacacaagacctcttggaggaggttagtcttgaatcacgatatttatatattttaagtataatgagtctctgcaacattttagatgatcaatcattttcttttgattttgataattcagggatggaatacttagaacctaaaaggaagagcaatgtaatgggcaagattatcttggttgtttctcttactgctttatgcatttttatgctcaagcacgcaccgagtttcacatcaccaaccgcggtaactccacgatcctatttgctagaatctttgatatgttactcttgtcttaatggctgggaacatttctcttgcatcatggttcttttagtttatgtttttgtaatatcagtggtttgttggttttctcagttctctcgtagcgaggaaggtgtgactcatgtgttagtcactggtggtgctggatatatcggatcacatgctgcgttgaggctcttaaaagattcataccgtgtaaccattgtggtaaagtttctttctttgatggtatttggcgatccattggagaagtttcaaactgcaatgtttggttttgtaacactaatcattttgtctcacaaacaggacaatctttctcggggaaatcttggtgccgtcaaggttttacaaggattgttcccagaacccgggaggcttcaatttatttatgctgacttaggagatgccaaagctgtaatgcttcatatccctaagattcttttgagcattttttttcctggtatattgtatgaagtatgagttttgttcatttcaggttgataaaatcttctcagagaacgcgtttgatgctgttatgcattttgctgcagtagcatatgttggagagagcactctagatcctctaaagtacaatctccacccactgttctgttcataacacctctgcaagattggagttctttgtggttaatcaatctcatgttgatttttgttctgtaggtattaccacaacattacatcaaacacattagtagttcttgaagctgtggctagacataaagtgaagaagttgatatattcaagcacatgtgccacttatggagaacctgacaagatgcctattgttgaagttactccacaggtactattctaaacagtttcagaaaacactctctttcgtagtatgatcatgtctcctcaaattcggaaattatcgattttcaggtccccattaacccttatggaaaagctaagaagatggctgaagatatgatcctggatttctctaaaaactctgacatggcagtcatgatcctaaggtcaggctccacgtttcttgaagccttaacaagtctctgactctgatttgttcaaccaaacaatgtctgatgatctttattacttccacagatactttaacgtgataggttcagatccagaaggtagactaggagaagctccaaagcccgagctacgtgaacacggacggatttcgggtgcctgtttcgatgcagctcgtggcgtgattccaggccttcaggtaaataaaacacactcatctctcaaaactctctctatgcttcttttttactcaactcttataactgaaaaaatggattcaaacaggtcaaaggaacagactacaaaacaggagatggaacttgtgttcgtgactacatagatgttactgaccttgtagatgctcacgtaaaagctctcgagaaagctaagcctagaaatgtgggaatatacaatgtaggtacaggaaaaggaagatcggtgaaagagtttgtggaagcatgtaagaaagcgacaggagtagatatcaaagtagattttttgcctcgaagacctggagattacgcagaggtttacagtgatccagcaaagattctgagagatcttaattggtctgctcgttacactaatcttcaagaaagtcttgaggttgcttggaagtggcaaaagactcatccccatggatatgcttcttcttaaagacgaccaagaaagaaaaaaaagttttaattttaaactttttacataattgtttttgagagattagcttatagaaaaagaattgatttattacagaattacagttcaataagtattattattatggtaatttgatacagtttacaagagttgtcgatgtaatcagtgactttatatataaaaggatacagaattcaatagacgtaatcataagaatggtgtaaccaaactcaaatcttcatattgtaatgtcattatccacattccacaatgtctttttagtgaaaggataacatctccgaacactatgaccgggaagatttcatcatatcaccaccgattgaaaatcaaacagctgcaacatcaagaacatataaatagtttcaggaccatttagttctcatcacacaagctccaaaatttgacgggttcatttcacatgtaacattttatacataaagtatgagtgtcacacatacatgaataagagagacgtgctagaaactccgaacggcaggtatatatatatggggcaaattctatacaccaccaacctggaggggtatcttatatcattaaagtttacccaatttggcctcttcttttgcaaatgcaagtattttttttttataatcacgtcaaccttcaggtgacattttcaacattaagctaataacctctttctttcttgttatgttataaatagctttatatcagaatatttgtagttgcttgcttgttatcttaagttttcgaaaatg

SEQ ID NO: 8547 - DNA, 3000 bp, Unknown
  misc_feature (1)..( 3000): cDNA_ID_3091180_gDNA_ID_1971816_Annot_ID_58237 3000 nt of promoter + ATG
gcaagcacgcagctctggctcccagcattaggtttatatgcgttaacaaaaaaattgaggaggaggccagagctgaggctccccgtgatacaactagtcaattaacttaaagttttacttactgtcattatgtggtgctgttagatttggatgcattaatttttaattaagtatataaaaaaaattcatagaatattttgtaattattaagactttctattgtctaacactaattagaggttaaatatttaaaacaatatatattggaccctagagtaacaaaaaaaaaagaatttggaaattttgtcacatagtctctacacaaatgcacttagctcacaaaccattggggatgcttttatgtagttccccaaacctagaagcttactcattagcacatcttacatgcttatagagcccgtctctactattacattcttacgtcgaatttattgtttaaacttaagttcaaaactcaaaagcaaactaaattggagaaaatagaacgcagcttgcaagtgtttttgagactacaagcctacaatatatctaaaggagacaaaaactagtaggtaacctaatgactaaaagaattcagcagtctaaaagagtaataaggaggcctcttttagatttggttggttaggttttaggtgggtctctattataattacgctacaagactaaggatattgacgtctatattttcgtctcctttcgtttgaaaaaataaaggaaaagcaaagtcaaccataattaggccgtcgaaggaattctaattaatttcgaccagaacgaaacatgcatataattgaccattttgattatctcacaatatacaaattgataaacttgatgcaaaaatgttcgttgtgttagtaatgatattttttccacactcttgttaatcagtttgatgactattttttctttgtataagagagaatgaaaaacaaagttgcatttgtttaaactttcaattattactcacgtagaaagaatgtatccatattgagaaattattacgtagcaatattctatatacaaagtcttttatatatgacatgtctctggataattatttgtttactatcgattcgttggcctatcacgttagatggttataaagcagtcgctacaactaggcagcaaaactgctttgatcaccatctattgttttttttgtccatagtttgattaaagaatgaggatatggcaacaaatgattgcatattagttgatattacaatcattgcaatcgcacatcctacaaaactaattgaaattaatatccatataaggaagaaactcattagtgtcgacatgcattggaacaacgactttgtttttgtttgactttgattatagtcacggtttctcactaatagtttcattctcaccacccctaacaatttagaaacaaggttggttttgaatgacattctcatgataaaactaatgaaatccgtgtagatgtttggttattccgtcttttatgaaaacggataaacaattcaagaagtcatattaattaatgtaacatcatcataaattcataatgttttgacttagattgtagtcacatctctcaatattgagtcattttattatcaaaacctgctttacgtagtctagtcaacgttattttagtaaaaaatctttcacattcattgtataaaacatttttttttgacatcatgtaaaagatttgaatcgagattattacacgattatgaaactactacaaccactattttgcaaccaaaaaaaaaaacaaaaaatacaaccactatatctacaaactaaggtttaaaaatgtacaaaaatacttgggggtttaaaaataatttagttaaagttgaaggactggtttgtaagtttttcatttccataaaaaggaaagagcttaatagaaggaaggaggagagagtggtgaccaggtctcgtagttgtggtttcgttttgcattgcacgtttcttcttctttcttcgctcctcactttcttcttcttcttccgcttctcctctattttctctctctctctctttttctctttctcccaaaagtctctcttacgttcttgtctctcccttaataacgttgcgcctttctccatttcaaccatcacacaactcttcttcttcctcctctctctcaattcgtgttttcccaaattctcaggtactctctcttatctatgtcttgactcttcctatttacccaattcattaacctgattttgttctgtttctgcattttgccccacttttgaaacgaattcggattctgatcaaaataacaaaattggggattgaaagcgtttctgggtatcttatgatccgtgatttctcagatgggtttttcataaagcagagaaatttcgatcaaagtcgatgactttaacatagactctttctacatttttgttgctctgtttttgttctgttctgtgacaaacatgctctctgcctttttttctctttccaattaacatgtagattaataaataattgaactttgatcttatttttttcataaatgtaattcaaacttttgtctgtctttttccttgtttttgattctttcattaaggtcccacttcccaaccaaatattattttattttgcttatatatggttttgactttgtattcattcatcttttactctaaacagcaatctgcagctaacttgatgattgctggctactgaatcttgagtttgtgtctggagttttgtctcaacaataccaaagaccataaagactttgaggtgatttgagttcagattcttctgaatctccaatgctaagtttctctagagctagaagtcaaggaagaaacacaagacctcttggaggaggttagtcttgaatcacgatatttatatattttaagtataatgagtctctgcaacattttagatgatcaatcattttcttttgattttgataattcagggatggaatacttagaacctaaaaggaagagcaatgtaatg

SEQ ID NO: 8548 - DNA, 3000 bp, Unknown
  misc_feature (1)..( 3000): cDNA_ID_1823368_gDNA_ID_1971816_Annot_ID_58242 3000 nt of promoter + ATG
accaatctacaatgccattctggggagtccttggatctattcgatgaaggcgatcccctcgacgtaccacctttgcttgaagttcccgataaacacaggaatcttcatactatacggcaaccagaaggtctcacggacatgttacgtgatcgagaagaagcagcgaaagaaggaaatcttatagcaattaaaggacgaagagcgagctgcaccgtcggagcgaccagctcgcgagtcaatgaaggcgccaagttgcaagattatccaggtcaacatcgacgagtcggatccatctcggacggttggtatcggaagcgaactaggagagaaaggaagagctgatcgccttcttgaaatcgaggtcgtcatcttttgcttggtctacgaaagatatgacaggaaacgctccggaggtaacctgtcataagctcaacacggatccaaccttcgaaccagttcgcaacaagcgaaggcgcctggggtcagaccgcgccaaagctgtccaagacgaggtcgagcgccaaagcaatcagagttcggaagtactgcagctcgcggcattgatccccatgcagaaatccgacctgagcaatcaaagcaacgaaattcttaaaaatcatcccgatatcgaaaacacgaaccaaagcaatccttacctggttaacaaagttctgacactccgtggtatcagcatcagtagcggctggcccaagatagaacagagaaggcgtcctgggaatgaagtccccatcagcaatgattgttggattcttctcctttgaggcggcagcagcatctcgatcacagtcctcacaatatgacaaaagaatgtccggcatcggagccagaagctgaaaaccattcttgagccaatggcgaggatgcgactctctctagcatagccatttttcgagcgatatcagactttcgttcgtcatagtacctcaacatctcgcggtattccttatgtcttgactcgacacatgacaagaaaccctcggcttcacgtctttccttcgagctcgcctggaaaagaagagtccagggaactcgaaggttattgaagaacggcatcccacgttcaatcgcctcagcattcgagaaagtcggaacatttttgccaacaaaggaagacgatccagcactctccatcttgcaaataggaggaaaagtccggtgaagcaattgttgatcaacaaagaagtatttatagaagcaaatacagaaatcgaattgggaattttcttaaatgcgatctggaaattctctttccttttccgagaaacactaatatttgcattttctccaaaactgggaaaatgggaatttacttgattacgggttgacttccctcaatttccttttccaaaaaaatgacaaagctcataaatggaaaacatagagaaaatactattctgcctcggaaacaggcaagatggaaaatcatcgaaaatagaagttaaaagtaaaacaccgccccgaaagtgggtccacggttaaatatgagttttgaaatcgccccgaaagttgggtccacgatcgatgtatcaaaataaattacaaagacgatctgaatcccctcaatttccttttccaaaaaaatgacaaagctcataaatggaaaacatagagaaaatactattctgcctcggaaacaggcaagatggaaaatcatcgaaaatagaagttaaaagtaaaacaccgccccgaaagtgggtccacggttaaatatgagttttgaaatcgccccgaaagttgggtccacgatcgatgtatcaaaataaattacaaagacgacctattcagatcgtctggctcgcctcttcatcgcttacacgtcgaatatcactaccgcaaacaaggtcgacattcgagccgtgctggtccgccactggagcaacttgagaggtttgcctcgaaaaaccaagctgatctggagacatgttcaggtcttcatccccaagctcgatgacgttcaaagcattgacttcgtcggacgcccttttggttaactccttaaggctgctgagttcggatgccgcaatcttcgcgcctctctgcatcagaatacctactatctcctcagcacctttggcctgattctcagcatccacctttggcccgacaaggtcctcttgctccttgagataagcctttactctatcaagacgagcttgggctttctttgtagtacgggtgaccttagaagctcgatcattccgcagtctgttgcactcccgctccccgtgctccttcgcagcaaccaacgcgacttgaagatcgctgatctctttctgaagagcagcttctcgaccattgagcctgttgacctcgtcgttcaacgagctcatctccgccttgtgtggctccggagatcgcccgctcacttacatgattcccggagaaaatgagcgtccatggaatccccctcgagggtacgtctgtatgtatgaagcctacttcagacaatgtcacctctggtttccaattccgtctctgatcatctcctttctgagtcgccgtcatatggcgttcccccagcttactccggcggcgatctgcaattttgttgccgctctgacctttggcgctgaagaaggttacctggtaaacgttcgttgttttgaggaaatgacgacgttgaaagctatcaggtcgcccggctattgggtggtgaacaaccgcccaaagcataactttcttcccggtcccaaagtcagtaacttcaagaactgggaagaatattacttctacgtcaggtccgacctcgaatcgtatgagcgtccgttctcggggaggaaaaggatgtggacggagtttcctggtagatttcttttaaatagatagggtaaagacatgtcgatccgtactagattctcatagccgtttcttttgttgcagatcggtacaggcctagtccggagtttcccgttgagttcgaaggagttttagaggcaatctaccgagctcgacatcacgaggtcgcgcgtcaacaggata

SEQ ID NO: 8549 - DNA, 3000 bp, Unknown
  misc_feature (1)..( 3000): cDNA_ID_3091174_gDNA_ID_1971816_Annot_ID_175984 3000 nt of promoter + ATG
ccattttaaaaagggtcttcaggaacatcagattgaccgagctgccggtatcgattaggattcgttctacgtcgaagtcctccattaccagtttgatgaccaatgcatcgttatgaggatgctgaatcccgctcgcatcctccgaagtaaagatgatgggttcctggcttaatggctcggcttctggggcaaccctaacgctgcatacttgtcgagctcgcttctttaaagccgagactgaatcctcatcgtcagatagtccggccataatcatggagatccttccgcggggatggtctggagctcgctgcggttgctgtcctctccatctcttcgggggaccggggagttcgttctccgggaccctcgcctcctccacacgatcgtcctcgaggagcagtcggtgatccacgtgttgttcttcatgcgttggtcccgcctgggactgtttggagccgctcttgcgtttatttttcccattcttgggatggtagaccgcctctacttcgccggatttatattttccgaggatattcagaagatgtttacactcttcagtggaatgtcctccgccggctgttgaggtcggtcttccgaatcgactgcggcgacgatcgttcctcgcttgtttgcctttgggtcatagtgttgacgcggttcttgataatctccccgcgccttttccttggcctttggcggttgggatttgctcgccaactttgcgtcttcctcctccaggaaagcatatcgtgaagctctatggagggcgtcatcgagatctcgcggttctcttattgcgaggtcttttctcagcgggatccttggagcagccccttcctaaaagcagccaccgcggcttcgtccgtgatggtaactagacagtatttctttgaaacgacctaggtagtcgttcagtgtctcgccattttcttgagtcatgctccatagatcggaactagaggcccctggctgaataaatacccggtattgtttcaggaaggcagttgacaactgggtgaagttatcaattgagttcgcctctaatctggaaaagcaggttaaagcgtttccggtaagtccctcgacgaagagctggcagcagcctatatcacggagttcgtccgaaaagtgagctttagcgactgttatgaaagaagtcatactgtttaggatcgcttccgccctcatagatcggaatcctaagcttcacttagaggattctcgtgcgtgtaacccgatctgtgaaaggagtcctgggtttcttcgatcattcggtcgatctctggagccgaactgctggctctgtggacctgggatccgatttctcggagtttcagatagatatcatctaactgtccatcgtgatctaaggttgcgggtctcgagacatgacccgacaacgtcgagggaggcataggcggtctgccttcttggttcataggatggagtgaacctgggaacctggggttcaccctattggattgtgcatctgtgaggtcgaagctaagcccacgcggatggatgactcgcggcggggttatttcagagatcggacgttgggagattcctttagccagctcgtcgagtcggcgattagtctccatgaccgattctgagagatctttcgtcacggttgtgaggatggctttgaggtcttccaatgagaaagatagtgggtcgacaggggtctccccgtgtgttggttgattcacggtcgttttggccgctacttcgacggtagatggtggatctcctccgtggaggagacttgattccgttccatcatcgttgactggaggaatgacggggtcgatgacgatttgaaccatgcttgctttgattaaaggagcgtagagaaaatttgtttatattcccctacctggcgcgccaattgttgattctgtaatcaaacaatgaatttgtactaagggatttagacaaattcactcctctcttagctcacaaataatcaaagggagagaacaaagttgcttgaataaaaagctggggtttgctctataattgtaagattgtaaacatacatgatattaacatttcatttgcgttgaagttttcacttatcctacactttttcacatatttcacaaaatcagaatagagtcaagctcaaaagggtcttctttccttgttgattctaccaaatccgttttgccgattataattcaaaaacaagtaaagagcgatatttgatgaaatacaaaaattaaaaataaaactatatttcagtatattcctatattagaggaagatttcaaattaaatagttttgtgattgaacttcctatttgtttagtttttaaagcgctaacttttaaatatgggacgaaaaatataaactttcgaaatatcataaaattcagtttgatcttccgataaaatggcgaaatttcgttgaattggccatttcggacatgatgttaagttttgttaaccagacgatcaaatgattaattttccgttataagtttccgctaattgaaattcacaattaaaatttgaaaaagaaaaggaaaaatgtttcacacgaatacaggccgattcatgacaaacactgtaggcccattaaagcgaagcccattatcagtatatatactgcggcgtcgatataatatcctcattcagaattaagaaaccctagacgacgatatcgagatcgatccaaccaactctgcagctaacatctctaaggtaaaattctcggttcttatctcatcatgttactttgaaaattcatcgactgattgcatagatagaacacgattagcagctgtgttcctctatatctacctctctcgatcggtggtcaatttatctttctgatgtttgattttctaagcaaaattcatcgactgattgcatagatagaagaaccctacaacttctatagcagccgtgttcctctcggttctctgatgtttgactgaattgaatttgattcttttttttttaaggtttgattttccgatgatgagggtgatg

SEQ ID NO: 8550 - DNA, 3000 bp, Unknown
  misc_feature (1)..( 3000): cDNA_ID_3091180_gDNA_ID_1971816_Annot_ID_175982 3000 nt of promoter + ATG
attctcgacaacatgcacaactggtaattaagcattctagccttgttttgtcattgccctactatttgttttaccccaactagttaccctttctcactacttgtagtttttgtttgcctaaaacttgaccccatgttatcttttttcaagcagcttcaattccaaactgtcccctgtagccctggctctgtatgcaagcacgcagctctggctcccagcattaggtttatatgcgttaacaaaaaaattgaggaggaggccagagctgaggctccccgtgatacaactagtcaattaacttaaagttttacttactgtcattatgtggtgctgttagatttggatgcattaatttttaattaagtatataaaaaaaattcatagaatattttgtaattattaagactttctattgtctaacactaattagaggttaaatatttaaaacaatatatattggaccctagagtaacaaaaaaaaaagaatttggaaattttgtcacatagtctctacacaaatgcacttagctcacaaaccattggggatgcttttatgtagttccccaaacctagaagcttactcattagcacatcttacatgcttatagagcccgtctctactattacattcttacgtcgaatttattgtttaaacttaagttcaaaactcaaaagcaaactaaattggagaaaatagaacgcagcttgcaagtgtttttgagactacaagcctacaatatatctaaaggagacaaaaactagtaggtaacctaatgactaaaagaattcagcagtctaaaagagtaataaggaggcctcttttagatttggttggttaggttttaggtgggtctctattataattacgctacaagactaaggatattgacgtctatattttcgtctcctttcgtttgaaaaaataaaggaaaagcaaagtcaaccataattaggccgtcgaaggaattctaattaatttcgaccagaacgaaacatgcatataattgaccattttgattatctcacaatatacaaattgataaacttgatgcaaaaatgttcgttgtgttagtaatgatattttttccacactcttgttaatcagtttgatgactattttttctttgtataagagagaatgaaaaacaaagttgcatttgtttaaactttcaattattactcacgtagaaagaatgtatccatattgagaaattattacgtagcaatattctatatacaaagtcttttatatatgacatgtctctggataattatttgtttactatcgattcgttggcctatcacgttagatggttataaagcagtcgctacaactaggcagcaaaactgctttgatcaccatctattgttttttttgtccatagtttgattaaagaatgaggatatggcaacaaatgattgcatattagttgatattacaatcattgcaatcgcacatcctacaaaactaattgaaattaatatccatataaggaagaaactcattagtgtcgacatgcattggaacaacgactttgtttttgtttgactttgattatagtcacggtttctcactaatagtttcattctcaccacccctaacaatttagaaacaaggttggttttgaatgacattctcatgataaaactaatgaaatccgtgtagatgtttggttattccgtcttttatgaaaacggataaacaattcaagaagtcatattaattaatgtaacatcatcataaattcataatgttttgacttagattgtagtcacatctctcaatattgagtcattttattatcaaaacctgctttacgtagtctagtcaacgttattttagtaaaaaatctttcacattcattgtataaaacatttttttttgacatcatgtaaaagatttgaatcgagattattacacgattatgaaactactacaaccactattttgcaaccaaaaaaaaaaacaaaaaatacaaccactatatctacaaactaaggtttaaaaatgtacaaaaatacttgggggtttaaaaataatttagttaaagttgaaggactggtttgtaagtttttcatttccataaaaaggaaagagcttaatagaaggaaggaggagagagtggtgaccaggtctcgtagttgtggtttcgttttgcattgcacgtttcttcttctttcttcgctcctcactttcttcttcttcttccgcttctcctctattttctctctctctctctttttctctttctcccaaaagtctctcttacgttcttgtctctcccttaataacgttgcgcctttctccatttcaaccatcacacaactcttcttcttcctcctctctctcaattcgtgttttcccaaattctcaggtactctctcttatctatgtcttgactcttcctatttacccaattcattaacctgattttgttctgtttctgcattttgccccacttttgaaacgaattcggattctgatcaaaataacaaaattggggattgaaagcgtttctgggtatcttatgatccgtgatttctcagatgggtttttcataaagcagagaaatttcgatcaaagtcgatgactttaacatagactctttctacatttttgttgctctgtttttgttctgttctgtgacaaacatgctctctgcctttttttctctttccaattaacatgtagattaataaataattgaactttgatcttatttttttcataaatgtaattcaaacttttgtctgtctttttccttgtttttgattctttcattaaggtcccacttcccaaccaaatattattttattttgcttatatatggttttgactttgtattcattcatcttttactctaaacagcaatctgcagctaacttgatgattgctggctactgaatcttgagtttgtgtctggagttttgtctcaacaataccaaagaccataaagactttgaggtgatttgagttcagattcttctgaatctccaatg

SEQ ID NO: 8551 - DNA, 3000 bp, Unknown
  misc_feature (1)..( 3000): cDNA_ID_1014565_gDNA_ID_1971816_Annot_ID_175975 3000 nt of promoter + ATG
gttaaatgaaatgaagagatatgatacaaaccagtggagatattctcgttggtgagggttgcttggactcggcacatctggatccaccataacctttattaaacccatcaacaaccgtataagagagaagatcgattatgaatatattaaagcaatcaagaaattaaatcatgagtttgattttttttttttaactcttgaaaagtgataacacacattaagacgaagaagttaaccaaaagttaatagaaaaagaagtaaagacgaagaagcttaaattagaaaaaggtaatagtaacattttccattaatataagggtatctaaaaatactggctttactattcagattcaaaagtcgttaaaataagtgtcaattaagatatttatgcttttctaaaggtatgtatcctagaataaaaaaactaaaataaaaataaaagcgaaacaaaatcaagttaaccgtctcttgaaaacgtaatatatataatcgagaaagattcaaaattgatttaaaataataatcaaaccaataacagttatgcatgcaagaagttagaggaaacgcagcaggtatatagatgaggctacgaaagaaaagaatgatcaaatctagttacgcttaaatttggatatatctaaggtttcttcgtcaatatatggagcttacgaaaacgaaagagtgagctacgaggaactaaatcaatgaagataagaggaatgaaggagagaagatcaccaaggtgtagaaatttctgaagtcgtctcctccaatctccactattggtttgttcagaacttgagaaggccttagatccaagccattagtaacctctctatggccataagtgaccttaagagagaccaacctcgtgaaaggatcaagaacatctccaacaacactgccgaccacaagaggatctctacgacttaaagacatatttatcttggatctcaagtatctcaatcaaatgttttgcttcttaccttatgaacccttacttgctattctttatataacgttttgggaattgcaataattagctatttagctttattctctccaatgaaatcattaccagggtcttttcgtgtatagtttcgagaatctacaactcgttcaacgtacgtatatcacttataattcatgttttttttttctttccttttttctaaatttatagtattcttattccaaaacccaccagtataaaacagaaataatcatattccaaattatacatcatccacttgtttcttgctagccactagtatgtaatttattctgacttatcattgtaacttcatgaactatttaaaataatgtcacaagcatataatatgctgcatatttgcgtacgtcacgcattttgcgtcacatgtcactcatttaaatagttaaggacactacattacaccgattatgtatgatgttaatgcattttagaataactccttcaacctaaaccatcatataaaagtatatatgctccagataaattgacgccataattgttcacatatctggttggtgtgtacatacgtactagactcttttttttcttttcttaatgtagtactaaacttaattaataccatcaaaaatatcaatttaacaaaacaaaccagtaaaacttttaaaacaatggagtaaatcaaataaaacaagtaaattaacaaatagacacaaggtaacagaagtataataacgacagaaaagtgaacaattggccaaaaaattcgttttcaaacgtgatttcaaaattgtctccaaatcttaaatgttgataaagtaatttttttaaaattcattatacctttcaaaaacaagtgtattacctaaaagctcaaccgtgtattcttacactccaaacaaatttagttccccaagtttggaagacaaaaatttctaagaaatttctgacaaaacacatgagaaataaaccgataaagacttctaaaaactattgcagaccagtttcatttgctgaccacaaaaagtcatgagaatacaattagctcagtgattcttgatatttctggtacctaacaaaaagaaaagtgtgtgaggttagatggctatgatttttgctctccaatttattgtccatttccccaatttgtaatatgaaatgcgcaaattactcttcttccgatatgaataagcaaacgaaaacatacgtgggacgttatgttcagaacatttgattaaagtttatatgcgattttcatttatttattatgaattttttgtttggcagcatgtacgatttttcatttaacacacaaatattatagaattttcattggttcaaaggggtagacaaaaaataatttaatattattacaccatttgcagaaaattagaaaatatatttttacccataattaattgatctatggacgtatgcttggcataaaaattcatatttaattagcagaagccaatcgctgcgtttgtatatacgcgtttatgaccgagaaaaaaacccttacgcgtcatgtaaaaaaaaaagaagcgtaaattacgaaaaacagagagataaatccgggcattgagattttggagatagagagagagaaaaatcgaaatctattgtctatctcctcaatttggattggattttctgcatatcatcgctctagctttcgcgggttttggattcgattccttacccttctccaatcggtaagaacaagctccaaagtttgttcctttttttcaattttcgccaattctgtaatctcatcattgtccttgtttgtttgtttgattcaacacacaattcttgttttgatttggatgcagaagtttttggctttgaattggatttgggtttcgttccaaaatcagctctttttgttaatcaggtgagtttttaggtatttgaatctccaattgcttccttgcaatgactaagtattgtgaaatgtttagggtttcatctgtgtgggtcttgttttgaagcaatttgtgtgtgtttggatgaaagtagcagat

SEQ ID NO: 8552 - DNA, 3000 bp, Unknown
  misc_feature (1)..( 3000): cDNA_ID_3091065_gDNA_ID_1971816_Annot_ID_175972 3000 nt of promoter + ATG
tcatatagtgagcatctctacttgctttctttttgtttcactcttgattctcaaactctttgagtttttacctttttttatttatttttgtgccattttccataagaacttgaaatcaaaatgtcatatatttcttgattttctgatccttgttattcatctttgtctcgctccatatgattctgatgtggatttggtactcaacgaccaatcacttaatttgaaaccactgtgggcagattacatcaacaattcaaggagattgcagaatataacataaagaacttaaagaggaaagttgaaatgtgaagagataatgaagaagaggaaagagagagcttatggaatgcgaccaccacctctgccactgaaagatgggcctgcatcgatctcaccatttgtttgataactcctcattcttctccctaacaaataacaatcattattattgttagttttcatggaagacaataatttactaagtcatacgacttgacatatgtgtagtgtagagtgtaaaatatatatactatgagagtctatggaacactaaccagctcttgggagtgattcttgtttagaagcaagaacaagactgttgcaacgaagaagaagcagaagcaccataaagaacacaaaacccaactgtgaaaaaacctgctttaccattttgctcaatatctatgattctatattggtttttcgtattttttaaagtgttgtgtatatatagagagatagtagacgctgattagagatatggtttattttaataggatttgtttaatgaaagattcgcaatacagagtgacatgataagtaatgagatggacacaaggaatctcacgtgtcctcatcttccaacttgttcttccaatggtgagctcttatcttctataaatctataaaaatatatataatctctttcttaattttgatcttcgaggcttttgatgtagacccgtgaggatagagaaaaaatagttctaagacagagccaaaaggacaccccttttaagtcagtggcacaagattttaagattatttgcaaggttgaccatatacttcattaaacttgagagatcaagtttgtgacatcagtagagtttatacaagaatatgaagaagctgctttcttttcatgcaagaaatattaagtttcatgtcttagatcccgagctgcaaaaaaagagttaaagatgtttgaaattaatgcaatgaagtatccacgagaatctttatagtctcatgcaaatgatgtgaactcaaatctatgttcaaactcactcttgttgttggcggtagtacagagcgaacactctcaacgggtgtgagtatgattcttctgattgacattgcagtaactaacctggttagtgagatcttctgtttcctcttgagacaccatctctatctgcaaaaacatgacacagccaatctttgtgattgaaccaggcttaaaagcatgctcttaaagatattttttgtgatattttgtaccgtcatcattatcagtgagaacttgacctttgggattcaagaaccttcaaagctgcaaaacccaaaaaagaaagaagttgggccactggaagcaaagcccaagcccaatgcgcagcctttgaaagatcctcagcaacggtcatgtccacctgtcaataaagccaaaactgcagtcatcacacagctaagagaacgtacagattcaacgatacctttgaagaaccaatttgagtgtcttggatccggtgatgattgccaagactgacacctgtcattattagggtttaggctacatcaccttgtattcaatataaaaggactttatgatgtaatgtgaaacctaagtcgaaatataagaaagataagttctctatatttcagattacgttcatggtatcagagccatggcaaatcagtccatggagctctattcctatcctgttctaaacatctcaaactgtgttactgttaagcttactgagagaaattacctgctctggaaaactcagtttgagtccttcttgtctggtcagaaccttctcggcttcgtcaatggcgctaccaagagtccagatcctgtctcagctgtcacgaacattgatggtgttgttacagagatcccaaatgctgactacagtgctaggcacagatctgaccaagtggtgaagtcatggatcttaggctctctctctgaagacattctggaagaggtcatcactgaatccactgctcaacaagtctgggaaggtctagccaggtatttcaatcgtgtctctactgctcgcctatttgaactgcaaagaaaacagcagactatgtgtaagcatgatacacctatgatagattacattaagggaataaagaacatttgtgaacaacttgcctctgctggtagtcctgttaaggaacaaatgaaattttttgctgctcttaatggtcttggtcgtgagtatgaacctattaagacatccatagagggtagtatggaatctacacctgctcctactctagatagtatcactcctaggcttacaggctttgctgaccgtctcaagagctatgaagtggtgtctgtcactccccatctagtcttcactgcagatgctcctgatgctggcaactactatcagaccaactacagtggcagagggaatttttctggcaagggaaacagaggcagaggagcatacaacaccaagggacgtggctttcatcagcagaccacaactggctcttccatgtcaggagaaaacagacctgtctgtcagatctgtggaaagctaggccatcctgctctcaaatgttggcacaggttcaacaatagctaccagcatgaagaactgcctagtgccttgacagctatgcacatcacagaagttacagaacacaatggacaagagtggttccctgatacaggagcttcagctcatgtgaccaacagtcatcagcatctgcaacaatcaagaccatacaatggttcagacgctgtgattgtaggaa

SEQ ID NO: 8553 - DNA, 3000 bp, Unknown; identical to SEQ ID NO: 8543
  misc_feature (1)..( 3000): cDNA_ID_3045717_gDNA_ID_1971816_Annot_ID_175965 3000 nt of promoter + ATG

SEQ ID NO: 8554 - DNA, 3000 bp, Unknown
  misc_feature (1)..( 3000): cDNA_ID_1823762_gDNA_ID_1971817_Annot_ID_58257 3000 nt of promoter + ATG
ctctaaccgccgccggcaaagctaaaacgcgttgccccaatcgatccgttacatcactctggtgatgattaaacgagagactatgaataagattgttattgaattgacctgaatgattataactttgagaagcagatcgagttataatcggttcggatctcgccgaaccaaaatcggcggcgtaattcggtagaggcggttgtggttcaggtaacggaggcatcgaaggagagtgatcggagacagttgtaacgcaacagaagggatgcatgtggttctaagatgagaaatcgagaccgttgaatccggtgattgtgacggtggagacggtggtggagaggaggaagaaagtagcgttcatggcagagaggatttggaggatttgagaagagaatttgttgaagaagagaggttgttgaaaaaaattggtcagagaaggaagcgaaaagttcggtagcagaagaaggaagagtcaccggagaggccaaagtttttttttttttcgtttaaaaattttaatttactaatttcgtttttttattaatattggaatgacttgaacgaagaggacagaaaaatcggtgccgttgttgaggtgttgtttgctgacgtggcgagaatcgaatatgggcactaagttttttttttttttttgtaatgaaatatattaaaagtatttaataataatattctcgttaaattaagcaaatcattaatttcagttttagaataaggaaattttgcacgtcactttaaggaatgtaattaattttaagaacaataactagttttctatacatcgtttgttgattgatttaatatgaaacactattcaaatgtgatcttaaggagagattgtaatcatttagatttgatttattttcgaaaatctttaattaaaccattgattcgataatttattagatgagattacatttgattaatgctttatatcttagctgattctcttgattattaaaaatatgcatagtactcgattgaattattttcatatttttcaaaattttcaatgaaaattaaaatattttatctgcttttttcattatggttgttaatgttcgtttcacaagctttaatggtatcaaacttttactcttttgagggtgtggagaagtctcccaatgagagagctatgtttcatcatgatgattttctctcctaatcttcatccgaataatccctaacaccatctcaagcactattagggatctaatgttatttcgttcgagaatgaagacaaaaaagtatgaggtttaaaattcattcgtctctacgcttccccaatatttagaggcagtttaccatctgcgttttaagatcgataatctctagaagggatgattggctcgggtggtgatggggcaagatatggtctctaacacgaggaatgtgtacgtatatgggtatcattgtaaatcgggaaagagtaatagtccagctaatctataacttcgtgaacaaatccttgcggtgcacaatagggactttctagtaatgcgaccttcactatgagactctcacttgaaggagcaagaatcatcttcatgaaaaatattatgccatttagaacatcataagtagagtttctaatacgttaaagagatccacacagtctcactagttgagatttgtgtattcttcctaaaccttaagggataatgcatctactcaaattgtaatttagattcttgaaaccggagcattaactgctcgaatactcgaaagtagtttgtgacaagagtttccaaagttgcaaaagatctcttccatctagagttgggaggggatgacttctatgtgaatccaagatatcatggtattaagaaacacatctacaacatgcatctctccaaatcaaagaaccaatggttgaagtagtatggctttttgttgagaatcttataggactctttgaagaaatggtaagatcatcaattctcaaaaagccaaaacaaagttttctcgaaagcatgggaagatgagttgggaagatgagttctagttaagtcactaagaatgtgaggacgtattcggaggaccaaaaagctcaaagttaaagtgatgtagtaacttagccgtttataaagggaaagacgtactattttaagaggaattttgaagaaagttaccaattttaaaatttaaaagtatgtgagatctgcttttttgaaataaaataatttattaagtctttttatacatagaatatatattctttttaatgaaattctacctaagttttattcacaaacattcactaatatcatttatacaaccgttttggtcatataaatagttgttgagttttgataaattgataaaaaattattttacctaataaaattatacaaaaatattaatttgtttttttgctaactatattatttgaaagaaaattagctacatgattttctcctaaaacattcattttgcgaattatatctaaaaaatttaatcgtctctcaaacttgtcaatacattgatttcaaatcccgaccaacaataaactctccaaactcaaaccagatcgatctatctaacattttaaaaaattccaacctagatcattcacgttcttaaacaacaacaaatcacaactagctatatatcggcttggctcagacaaaaataaaacagtgcagttccaagaatatgttcaaattgcaatatacatttctcataattaaaacatgtttctttaccaaaaaaaaaaaaaaaacaaccgttagacacatacatgtgtacacatgtccctcacgccgctataaatatttcagacctctccctactctctcataacccacccaaaatatcacaagcaccgactaaaacaattcggatctaaacccgacccggtaaaaccaatcccaaattttactccgttgtgaacgcatcaaacccagaaaatttcttcctccgatctcgcattctccacttccataatccccaaaattgtttcgttgatttttccacaagatg

SEQ ID NO: 8555 - DNA, 3000 bp, Unknown; identical to SEQ ID NO: 8312
  misc_feature (1)..( 3000): cDNA_ID_1823758_gDNA_ID_1971817_Annot_ID_176026 3000 nt of promoter + ATG

SEQ ID NO: 8556 - DNA, 3000 bp, Unknown; identical to SEQ ID NO: 8316
  misc_feature (1)..( 3000): cDNA_ID_1823730_gDNA_ID_1971817_Annot_ID_176036 3000 nt of promoter + ATG

SEQ ID NO: 8557 - DNA, 3000 bp, Unknown; identical to SEQ ID NO: 8315
  misc_feature (1)..( 3000): cDNA_ID_3088959_gDNA_ID_1971817_Annot_ID_176032 3000 nt of promoter + ATG

SEQ ID NO: 8558 - DNA, 1089 bp, Unknown
  misc_feature (1)..( 1089): cDNA_ID_2177299_gDNA_ID_1971817_Annot_ID_176048 3000 nt of promoter + ATG
tctttaataactttttcttttgagcaaacactggtttcattgttgtccaatgaagtaaacaaattaacaagtgaaataggtttaaagctatcatcatcatcatctcttgaagaatctgaattaagtttaaaagcttctcttaaacattctctagcaacctcaagaccttcttcgtcaacacctggagcaacctcaactacaataacaacaacaaaatacatagaagaagatttaaaaaccctaaatatctctaaatcaaaacagaaatgaaaatcgagaaacgtgattggtggtgattaccggaatcaagaaaatttaagaaagaacggacgattttccggcagagaggagagtctgttgttagtttcgccattggaggaagagagaaagagagaaggagaagaatctggtttcttcttctctgcgatgaaagtgttcgttgaaggaggcaattgaaaagtctgtctggatacaaggttattatagttctggttgggtatagagttatattaagctgattaacaaacaaataaactatataattttacgtccttgtcctcatctggttccgctaattttagcctgttggacgtcctcgcgtcccagactgaagaagtgatgagtagggctgggaaaaaaacccgaaaccaacaacccgaatcgaaattggcccgaaaagttggatctaaaaccgaatctgaattcgaagatttattctattaggtcttaaattcttctatccgaaaaatcaaacccgaacccaaaactaaaaatacccgaatattttaattgaaaatctaaattttacctaaaacctgaaattttactcaaaaatccggatatttacccgaagttccaaaatagggcccaaaaatctatacccaaactaatccgaacccgattagatgcgaaccgaaatcgaaccgatattttagatttatccacctgggttctaaacttttctacccgaaaaatctgtaaccgatcgggttttaaccgaacccgacccgcttacccgaatgcccatcccactgacgagtgtatatcacagagattaccactggacttgcccttcttctgagagaaatg

SEQ ID NO: 8559 - DNA, 3000 bp, Unknown; identical to SEQ ID NO: 8313
  misc_feature (1)..( 3000): cDNA_ID_3046272_gDNA_ID_1971817_Annot_ID_176038 3000 nt of promoter + ATG

SEQ ID NO: 8560 - DNA, 3000 bp, Unknown; identical to SEQ ID NO: 8554
  misc_feature (1)..( 3000): cDNA_ID_3088971_gDNA_ID_1971817_Annot_ID_176025 3000 nt of promoter + ATG

SEQ ID NO: 8561 - DNA, 3000 bp, Unknown
  misc_feature (1)..( 3000): cDNA_ID_1823758_gDNA_ID_1971817_Annot_ID_58258 3000 nt of promoter + ATG
caaaattggctcgattaagtcctaaataatatctgatagcacaaacaataaaattagggttaaaaatcagaatcacaaacctagctaaaccttcgagttttggttgtaaaaagctcttaatcttctttgatgtaagagcgtaacctacaataatggatttcttcaccggaaaagcttcgattactaacgaacacggcgacgatgtctcttgctctgtcgtctccatttctcgagttccgttcatggtgatctcttcgttgtccgttagcttcatcttgtggaaaaatcaacgaaacaattttggggattatggaagtggagaatgcgagatcggaggaagaaattttctgggtttgatgcgttcacaacggagtaaaatttgggattggttttaccgggtcgggtttagatccgaattgttttagtcggtgcttgtgatattttgggtgggttatgagagagtagggagaggtctgaaatatttatagcggcgtgagggacatgtgtacacatgtatgtgtctaacggttgttttttttttttttttggtaaagaaacatgttttaattatgagaaatgtatattgcaatttgaacatattcttggaactgcactgttttatttttgtctgagccaagccgatatatagctagttgtgatttgttgttgtttaagaacgtgaatgatctaggttggaattttttaaaatgttagatagatcgatctggtttgagtttggagagtttattgttggtcgggatttgaaatcaatgtattgacaagtttgagagacgattaaattttttagatataattcgcaaaatgaatgttttaggagaaaatcatgtagctaattttctttcaaataatatagttagcaaaaaaacaaattaatatttttgtataattttattaggtaaaataattttttatcaatttatcaaaactcaacaactatttatatgaccaaaacggttgtataaatgatattagtgaatgtttgtgaataaaacttaggtagaatttcattaaaaagaatatatattctatgtataaaaagacttaataaattattttatttcaaaaaagcagatctcacatacttttaaattttaaaattggtaactttcttcaaaattcctcttaaaatagtacgtctttccctttataaacggctaagttactacatcactttaactttgagctttttggtcctccgaatacgtcctcacattcttagtgacttaactagaactcatcttcccaactcatcttcccatgctttcgagaaaactttgttttggctttttgagaattgatgatcttaccatttcttcaaagagtcctataagattctcaacaaaaagccatactacttcaaccattggttctttgatttggagagatgcatgttgtagatgtgtttcttaataccatgatatcttggattcacatagaagtcatcccctcccaactctagatggaagagatcttttgcaactttggaaactcttgtcacaaactactttcgagtattcgagcagttaatgctccggtttcaagaatctaaattacaatttgagtagatgcattatcccttaaggtttaggaagaatacacaaatctcaactagtgagactgtgtggatctctttaacgtattagaaactctacttatgatgttctaaatggcataatatttttcatgaagatgattcttgctccttcaagtgagagtctcatagtgaaggtcgcattactagaaagtccctattgtgcaccgcaaggatttgttcacgaagttatagattagctggactattactctttcccgatttacaatgatacccatatacgtacacattcctcgtgttagagaccatatcttgccccatcaccacccgagccaatcatcccttctagagattatcgatcttaaaacgcagatggtaaactgcctctaaatattggggaagcgtagagacgaatgaattttaaacctcatacttttttgtcttcattctcgaacgaaataacattagatccctaatagtgcttgagatggtgttagggattattcggatgaagattaggagagaaaatcatcatgatgaaacatagctctctcattgggagacttctccacaccctcaaaagagtaaaagtttgataccattaaagcttgtgaaacgaacattaacaaccataatgaaaaaagcagataaaatattttaattttcattgaaaattttgaaaaatatgaaaataattcaatcgagtactatgcatatttttaataatcaagagaatcagctaagatataaagcattaatcaaatgtaatctcatctaataaattatcgaatcaatggtttaattaaagattttcgaaaataaatcaaatctaaatgattacaatctctccttaagatcacatttgaatagtgtttcatattaaatcaatcaacaaacgatgtatagaaaactagttattgttcttaaaattaattacattccttaaagtgacgtgcaaaatttccttattctaaaactgaaattaatgatttgcttaatttaacgagaatattattattaaatacttttaatatatttcattacaaaaaaaaaaaaaaaacttagtgcccatattcgattctcgccacgtcagcaaacaacacctcaacaacggcaccgatttttctgtcctcttcgttcaagtcattccaatattaataaaaaaacgaaattagtaaattaaaatttttaaacgaaaaaaaaaaaaactttggcctctccggtgactcttccttcttctgctaccgaacttttcgcttccttctctgaccaatttttttcaacaacctctcttcttcaacaaattctcttctcaaatcctccaaatcctctctgccatgaacgctactttcttcctcctctccaccaccgtctccaccgtcacaatcaccggattcaacggtctcgatttctcatcttagaaccac

SEQ ID NO: 8562 - DNA, 3000 bp, Unknown; identical to SEQ ID NO: 8316
  misc_feature (1)..( 3000): cDNA_ID_1823730_gDNA_ID_1971817_Annot_ID_58266 3000 nt of promoter + ATG

SEQ ID NO: 8563 - DNA, 1089 bp, Unknown; identical to SEQ ID NO: 8558
  misc_feature (1)..( 1089): cDNA_ID_2177299_gDNA_ID_1971817_Annot_ID_58271 3000 nt of promoter + ATG

SEQ ID NO: 8564 - DNA, 3000 bp, Unknown
  misc_feature (1)..( 3000): cDNA_ID_3045734_gDNA_ID_1971818_Annot_ID_176057 3000 nt of promoter + ATG
gaatcgttgaacgaatagaataaggcgacaaatgggctagggaatcaaatccgcatattggccaaggtatgtaacgatctagcttactagttaggatagacgtttgggaatcgaccgtgaaaataggataaaggaatatgcgattgttaggcctagaatggttaccgaacaatatgcatgtcttgaccgagtaaaggattgatctaagtctaagggacaaagacgatgaaaccggtacaagagttggttagaattaaaccaaggttagaaagacttccgctgtgtaataagagagcgattatagaattaagcctcgtaaaggcaattctatgttgaatcgcaaaaaattaagaggttcggccgggaagaggcgcgaacttgagtccaacgtcgccggacgccgagacgtccggaacggggtctcacatcatcgggcttttgccttttgtgtaggaatctgccttcctctgatgtgtttgatcaaattgattgagtcgttgcagagccgagattctcccatgatgaaatcgatgcgtttcagggagaggtgctcggttgcgtttctacagaatttcgggaggcataatgggaacctcatgtttttcttttgcggggcgagaggaggtgtagtgactgatatttctgtcctaccttccagatcaagtcctgcaaagagtaggtctgtgcgctctttcctagcaggtggaggagactcacctcctttcggtgttcagtcccgtttctttcgtttgggagtttgctcctcctcctgctcgtcgggaggaggggtgtcggcattagcgtttgaaccttttttagttttgcccccggctgcgattaattttttaacgccgcgacattcctcgatggaatgtcctctctttttgtggtacttgtaatatttttcgtggtcaagttctggactctcgtcctcggctgcctcttctattgcaaataaggtatgctaccctagtatttggttttcctttttgaagggttttttagttgcaagggaagcgttttgtgctttagattctttgaatcttagggccgaaacggcgagctcctctccggactccggctttggcgaagtggagagctttgtgaagggcatcgtctaaagagaccagttgcctaacggtgagttcctcacggaacctagaggaaaaccacaagccgttgcgaagggcggctatggctacctcctcgtttaggttcgcaatctttgatttgattgctttgaatttttcgacgtaagatcgcaaaaattcgttctgaagttgggtgacacccagaggacggcttcagacgtcctgtttacgatgagtaccgagtactgtttttagaaggcgggggcaagctggtcgaaggtatcaatagagttccctttgagactagcaaaccatttgagtgcgtcacatacgaggttctctgcaaagaaacggcaatgacctgcttcattttctttgtctatcaggtacgctcgtgttatagccagacagaaggctctcagatgagcctttgggtcactcgttccatcgtactccaggaaacggagtctcccggcgtctaagatgtgacaatgggcgatcctatccgtgaatggggtgcgcctggtttcttcgatcactcgatctatgctagatgcattcgtgcccgtcggcgacgttatcgtttgcgatctgacttggtacgctagatctcattgaatcggatgaattaggatccatgatcgttggtcacaattgatgtgttagtttcggtgttggaaggatctatttcggtccccacagacggcgccaaatgtgggttctgaaatccacagtacagatttgtaattgagattatgagaaaggagggctagatcttcacaggaacattgagatttatattgctaagaaccaatggacttgtgtattgattatcacagagcttttacaatgtgaaaggagattacaagtgtaaaagtgtaagtgtgaatgtaaagctgaatttaatgtcttccaagtcgtccttgctttcttatatagatctacgcacgtggtagcttcgtccgggatctgcggagattctcttagatattcggcaggtcaattccaagatatcaggtccattctgcgaatatctccctgttagttcctaggttgttattcgcttatctcccttcatcaggtgaccgggcttatcaggcccaagtaccgatttgcgtacgtgggctcatcagttgcgcaggtcttctacttggtgggcttggtgggttggcctggtatttttgcaggtggattcctggaggaaaatccagctccaatagtgatgaagctgaaagatcaactatggatgtttgaaaaaagatttaataagttttcaatgagtattgatccagagaagatggaaactacactagctatcaaagaggacaaaagatttcgcaatagaatggtttgcaccagaagatcagaaaggagttcacttagaggaaagaagcttggagagcaagttgttgagtgaggaggaaattattccgacttattctccagaggtacctaaaccgcccactaaaccctcttctgaagaagaacacttgattcttgattctattgctgaagaactcctggagctttggattgggtataaagctcaggaggatacaattggaaagttaattcataagatggaagagttaaatagcaccattctggaacttcaagaaatggttaaaggctaccccagttttgaacttgaggattggtcaaaggagcctggttcagaagaagaagactactctgctgatcaaaaagaagcttattttgaagaaaaatcaaatgagtactcatcctaccatatgtcaagaaaggatgcaacgtatgattcagacactgaaaattcaaccactgaagatgaggacttctctgttcctctcctcaacctttttctgactaagctttgtaagagtcaagcttagtgacttaaaacaagctcacttgggggggaagtcccatg

SEQ ID NO: 8565 - DNA, 3000 bp, Unknown
  misc_feature (1)..( 3000): cDNA_ID_1823294_gDNA_ID_1971819_Annot_ID_58272 3000 nt of promoter + ATG
acatctctataatgtgccaggcaattgcctctccttcacgatctgggtccgatgcaagaatcagattttcagctctgaggaataaggtaaacataatgagatagataagcacaataagaaaaaccataggaaagaagtagttcatatcatacaagtttgaacaagccacatatctcaatagctgtacagcactttgacacccggaaagtattctagaattaaggaatatagataatagcaacaatagatttttaaagtagtgattaggcaagaaaccgtacccatttaatgcaaccttaatgctcttaatatgagtccaggcggaagatggaacctcccaaaccatgctaaaatcgtcatctggcctcactgaaccagaccttgtggccaggtccctgatatgaccataacttggcaaaacctcatacatgtcaccaagataaccctgaataatctttgcttttgtcattgactcaacgacaataacagattttccacttggcggataaagcggtttagatgcattttgacctcgatgttctatgctgtttttcatgtgttgaggaaccagcttttgttttggtgccttacttgctttagttgacttcaaatgctgttgttccgacttggaatttgatggagcaggacttttgggctcttccacagggtgattttttgccacctccttctgagaattgtactgttactctgttaggtaaaataagcaagggtaagactattacggtcctaaaactattaaagtcaaataccttagcagatgaagacttccgatttccagaaccagaatgttttggcttgggaacgcttatcggactctcatctagagagaccgcctccaaaactggtaccactgaagaagatttatcttcgactttcttgttcttggggcgccgttttgatttgacagtagtggcttgattaccattgctagcaggtgaggctgccgtggatagttccgccttgatgccactgctaccatctccaataactggttcagtagaagtcaccacttcagcttctgaggaagccaacacattatgcttctttcggttcttgttaaatttcttgaaacctactttattcccaccagccttctcatcaccaccaacaatgttatcctgctcctgttttggtgcattgcttgcttttgttgaggtccaatgctgttgttctgacatggaattcgatggagtagaacttttgggcccctccacattggttttttttaccacctccttctgagaactgtactgttagaagatatgagcaagggtaagacgatgattcaaaaaactttactagtttaatacctcagcagatgaagacttccgatttccggaacccgaatgtctaggcttgggaaagctttgcaaactctcgtctacagagacggtctccaaaaccgataccgttggagaagatttatcttcgaatttcttgctctttggctgccgttttgttttgacagtagaggcttgcttagcattgctagcaggtgaagctgcagttgatagtttcgccttgatgccactgttaacatctccaataactggttcagtagaagccaccacttcagcttttgtggaagccaaaaccctatgcttcttccacttcttattgaatttcttgaaacctattttattcccaccaaacttttcaacaccaccaacaatgctatccttaatctcagtactagcgacttgagaaaaatatctcctcgcaaacggtctgaaactatatccaaaggcccttgaagtggagctgctccaatgtgttgcataactaagagaaccgagaagacttagatgcgaaggaagtgcacaagctaacttaagacaacttgaattttctcttttaaactgaagctgggatacatttctatacactctatcgacccgaactactgaagaggaagaggaagctgggaaattttgaatcgccctgcactgcaactgcaacaacaaagaaacaagtaatcgtcagaatctccatgagttctactgttgaattttcaaacacatctaaataacataaacgaaaaattgaagctcactgaaacaaattcgactccatttcaatacgaaaacgacgagagtataatgatttagccataaaataccaaactttttaaattgagaatctaacatttcagtatctcaccagcgtaagagtcgaaacacaaaccttagccatgagaggatgaagagacagaactgaagtcgaagaagaagacttagcagccgcaagtgagatggttctctgcattgagaatactctgtttgattcagaaactttcaaatcatccgacgagtgaatccgtagcttatcataaatcgagtagaagaagagagatcttgttaatggcggagatgtctggtaaagaaattcttaagggtttactcagtctctggggtttatctgcttagtgccttctaactcgggtcgggtataaatcaggatcaagtagatccgccaaattacccggtcaactcttattagtcaaaatagatttcgggtcgggttttcgtggcccaattaaaacttttgggtcggtttttcgtggcccaattaaaacttccggatcctagcagcagagtaaaggtctctccttcagtccttcttcttcaggtgcgtttagcttctgctccatccgattcaactattttcttctcagaaagttgcgttcttctttgttagtaagtgattgaactaggtattgtgtctcgctctctcgattttcttgctgttagggtcgtgtagtcagattcttaagcgatgtcgcttttttgttaaactcttcaatttacactgtgtatagtttcggtgtttctctttgcgtagatattgattaccttctgggaattacttctctcgtattgaattatatggcccaatttcgaaagcttttgtttttacaatcttctcaggaacacttagctgaatctatacaacacaagtgttacagagtttatatacatg

SEQ ID NO: 8566 - DNA, 3000 bp, Unknown
  misc_feature (1)..( 3000): cDNA_ID_1823290_gDNA_ID_1971819_Annot_ID_58273 3000 nt of promoter + ATG
aaacagactgaactagccattaaaagatgagaactggagaatctcatctggttgtagctcttgcactcatggatgtgtgataattcgtacttctgtgtttcctgtaagatgtataaacatcatcgtactgagttggttcgttgggatcagctgttgccccaagtcccaatctcccagatccactctttttatcggtgcttccatccgcatatgttcctgtctcggggtccacctgtagattgggaggtggaggaatgcaggcacctcctttccgctgtggactatcccgctcataattatcatagtcgtcctgtgattcagatcccatgggaccttcacttgggttgacctcacctatctctttgaagaacttagatactctctcgagtacttcagattgaggcgtatcagaaggtggtatgaccgttgggatatcaagagggctcaatggagagtaaggcacaccactaccaatctgcatctttctgaccatcccagggatcaaaccaggaggaaagagaggataaggaggcggcttctcaccagcaggtggttgggttggtggtggaacagaagcgttaagcggtatggaaccgggaaaggcaccaggaggcatcacatttgggataaattgttgggttgcgaccggattagtcagatgctctaaattcattgtgctagagacattactgtttggtggctgttgcagcattcctgtaagttcataaagataaaaagttgttggtatattgtcaagtctaaaccgaattcttcttatacataggtggagttatagtttctgtctttctcacggaagagcaggagtacctggacgttgtaaggcatgtgctgctataatgggagaatgagaaaaggtatttgcaggtggtccacttttcatctctttctcaagagaggagatggtgtcttgatcaaaaacctccttagaagcccaaaactgcaaaatcttctccaaacgtgactggttttcttccttgttttgtggaaagtggtaaatcctccccagcatggaacccaaaataggtctgaaagcaagagcttcattgtcaaactcgtgcaagtttgtccttcgttgtaaactgtatttaaggaagcaataaacatgagaaaatattagggcagaagaatctaatgttgcaacccaaaattttgaaagcacagactgagactcctaataatatagaatgaacgaaaaactagtctatgccgaagtcctctagaatgatgtaaagagcgatcagggatgaagtttagatacctgtcgaagagaatgtcattagctagataaactatgtgcatctgcctatcagaatcatccattgcaaagaccctgtctctaagtgcctctgctaaagctggtgcaaagggagatctctgcatgaaccaaatcttagcacttttaatagactctttcgtgccattaaggttgcccaagacaccatttagttccattgcaacatcagcagggagtggaccagaaagacctcggaacgcatgagttgactgatcaaaatcaggacgagcatggggcgcaaaaggatgaggctgcggaagatgctgttggagctggtggtggtcatggaatggtgggaaaggaggttggcggattggtggcacagccaatgcaccaggtacattgttcattgaaggactcatcatgggatttggcggatgatgtatcataggcattgaagatgacgggaatggaggatcaaagggtcctccagggggatgcatagagagaaagtgcttatagcggtaataaccatgaccttcacccccaaacagaaacgcataatcaggattatccttctgtctatctcgcatcatagcctcaaactcaggaccgttcttaaccgaatactcaacaagcttatcaatccgtttctgcagctctggatcagctggaggaggaggaggaggagcagaatcatacggtccagggaatggcggaggaaggtgatgtggaggtaagtgaggaaggaaagcctgaggttgctgttgaccaaacatctgtgggtgaggaggatgaggaagatgctgcggttgctgctgctgatgcataggatgctggtaagggaactgctgcatagaaggatgaggaggaatgaaaccagaagcattcattggtgatggatactgaggatgttgcggatgaaatccgaattgtggttgttgttgctgttgaaagttaggaccttgttgctgctgttgctgagcataaggtaacccagaagaagcagcataatcgtgctgtcttcgatccatgtatataaactctgtaacacttgtgttgtatagattcagctaagtgttcctgagaagattgtaaaaacaaaagctttcgaaattgggccatataattcaatacgagagaagtaattcccagaaggtaatcaatatctacgcaaagagaaacaccgaaactatacacagtgtaaattgaagagtttaacaaaaaagcgacatcgcttaagaatctgactacacgaccctaacagcaagaaaatcgagagagcgagacacaatacctagttcaatcacttactaacaaagaagaacgcaactttctgagaagaaaatagttgaatcggatggagcagaagctaaacgcacctgaagaagaaggactgaaggagagacctttactctgctgctaggatccggaagttttaattgggccacgaaaaaccgacccaaaagttttaattgggccacgaaaacccgacccgaaatctattttgactaataagagttgaccgggtaatttggcggatctacttgatcctgatttatacccgacccgagttagaaggcactaagcagataaaccccagagactgagtaaacccttaagaatttctttaccagacatctccgccattaacaagatctctcttcttctactcgatttatgataagctacggattcactcgtcggatgatttgaaagtttctgaatcaaacagagtattctca

SEQ ID NO: 8567 - DNA, 3000 bp, Unknown
  misc_feature (1)..( 3000): cDNA_ID_1823275_gDNA_ID_1971819_Annot_ID_58277 3000 nt of promoter + ATG
gttgaaaaatctagctgcattttttgtggagtttatctgtgtactttagttcctgaatttcaatatcgcttaccattctcagatttatacaaaactcagaaacatgaagatgcacctctttggttattgttcattgacaataggttttattagagtttcaaatcacagttatgttgtaatgtctttactgatgatgatgatattaacgaggttggtaaaccaaattgcagtttaagcctttttggatggaggaaggaacttcaggttcacggagaacacggtctcaagttgctccagaatgggcagtcaaagattgtctagtcctcgtgaatgagatcgctgcggttgaagccgattgttcgaatgctttatctagcttccagaaatggacaatgatcacagagaactgcaacgctttggatgttagcagaaatctaaaccaatgcaggaggaaatgggattctttgatgtctgattacaatcagatcaagaagtgggaatctcagtaccgaggcactggtcgttcctattggtccctgagtagtgacaagaggaagttacttaatctcccgggggatatcgatatcgagctttttgaagccatcaatgcggttgtgatgatccaagatgaaaaagctgggactgaatctgatagtgaccctgaagcgcaagacgttgttgatctctctgctgaattaggtacactatacactatccttttcttgccccattactaaatgaaactaggcctttaaggaatcttaagaacaaatagtgcatagacagacttattcacttcttcaagatacagaatgacgaaaattgtcggtgtagttatagttgaaatatatgtagaacactttgctaccgtgagctacactatgattatattgctctttttgtagtcaccatcttcaggtaaactctgaactgctatatttggagttactcggatcagtccagaatcactgacacactgacactcttcttatgctaaccatttgaatcactctggttttaaattcagcttttgtaggatcaaaaagatcaagacagcgaacaatggtcatgaaggagacaaagaaagaagagccacggactagccgagttcaagtaaacactcgagagaaacctataactacaaaagcaacccatcagaacaaaaccatgggagagaagaagccggtggaagatatgtccacagatgaagaagaagatgaaacaatgaacatagaagaggatgtagaagtgatggaagcgaagctaagttataaaattgacttgatacatgcgatagtcgggagaaatctagcaaaggataatgaaacaaaggatggtgttagtatggacgacaagttgaagtctgtgagacagcaaggagacgagctcatcggttgtctgagtgaaattgttagtacccttaataggcttcatgaagttccacaagaaatcgagtgatttacaatgtgaataaactatcagttgtaaatgcttagccatgaatcgtaataatgttgtagacttgtagactttcaaaagctgtctgtaatctgtcaagtatacatacaaaacagggcaaaagcataaaaatccgactccactggggatcgaacccagaatctctggtttcgtagaccagcgccttatccattgggccatggagtcttttgtgtttaacaattggaaatcgactttgtataataattcgtactgattctatactttcaagctatgcaatatatcccaatgttctttagtatcttaccagcttgtggatttggtgtccccaaagtgtataagatttaacaatgtcataagtaacatagtaagaggttacatagaatttgttcagagaatgttgcaaactgcaaaaaagaagaagataaattatggctttggcacagctctcgcttgattcatggcatccataagatgagccctcaaagcatccggatcacgcaatgatgggcttgaagtcaaaagtacctggaggaagaaactccttggagagcttcctcattgcctccaaagcagccggttctatcattcgtagcttatacccagacaaagttaagtctgaaattccaattcaagatatccgatcttgcggtggtgttctcgcttccgtccagactccaaatatattttctgtctgaatatcaattacgaaataaagggatcgccatccaaaacacacacatttataacgacctatacaagacgagcgtggttttagttttacactttttaattaactgttttatgtttaccaagctcctaatttgacatgaaatatggagccaaaagttttgtagaacaaaaagctgtcgttgataaagggatattatttcagacattgcaggattgagtaacacaccgttctttgctccacaacaaaataaagtatttgattggtgatgattacaatttacaagtttacaacaagaaagcttcaaaataaagcatttctgcactttaaaagatcgctaaatctgatagaggccatttggttatggaaagatatataaacattacaacataaattaacaaaataaggatatctataagaaaatccatgaaactacactatgttttggattgcgtatatattttagactaaataaaaaatagcaactagtaatatttgcgcgataaataatgtggaatgcaatacatttgaatttcttaatcatattttggttacaaaaatctagtacatatataaacacacgtaatcaaggtatataataaaaaatctatgagtaatcataccatggacaagcttacacagtacttggttccacgttgttggcgaaaacgattgtgtgctttgacctttgctgtcattcaccatcagccgtcctttcatacttcttccggcaagtctcctctcatttgattaattcatagagaagccgtccaacaaatacgtcttccgacgtataaatctctcttcttcctctcaaatcccaaaaatttcgattatttttcaccgaaatg

SEQ ID NO: 8568 - DNA, 3000 bp, Unknown; identical to SEQ ID NO: 3907
  misc_feature (1)..( 3000): cDNA_ID_3072104_gDNA_ID_1971819_Annot_ID_176096 3000 nt of promoter + ATG

SEQ ID NO: 8569 - DNA, 3000 bp, Unknown; identical to SEQ ID NO: 3908
  misc_feature (1)..( 3000): cDNA_ID_3045752_gDNA_ID_1971819_Annot_ID_176090 3000 nt of promoter + ATG

SEQ ID NO: 8570 - DNA, 3000 bp, Unknown
  misc_feature (1)..( 3000): cDNA_ID_2177397_gDNA_ID_1971819_Annot_ID_176086 3000 nt of promoter + ATG
tacccacggcttaaaaaagtctttacacagagacttgaggttcaatataaccaattctttagacaaaagattggattgggttatgtttggtggatggtaaatggtacccacggcttcaaactttagtctttagattgagacttgagactgaacattgatccttcttggtaccctcggcttgaaaatatctagacatatggatcatgttcggtttcttgtttcactttttagacaatgatcaagttactcacggcttaaaacagtctttagacagagacatggggttcgaagtaaccaatcctttaaacaaaaaattggattgggttatgtttggtggaaagaagatggtacccacggcttccaacttagtctttagactgagactagagactgaacattgatccttcttggtaccctcggcttgaaaatatctagacatatggatcatgttcggtttcttgtgtcagtttttagacaaaaatcatattacccacggcttaaaaaagtctttacacagagacttgaggttcaaaataaccaattctttagacaaaagattggattggcttatgtttggtggaaggaagatggtacccacggcttcaaactttggtattaagattaagacttgagagtgaacattgatccttcttgttagccacgactttaaaatctctagacatatggatcatgttcggtttcttgtttcagtctttagacaaagatcaagttacccacggcttaagaaagtcttaagacagagacttgaggttcgaagtaaccaatcctttagacaaaagattggattgggttatgtttggtgcacggaaaatggtacccacggcttcaaacttagtctgagacttgagattcgacattgatccttcttggtacacacggcttgaaaatcactagacaaatggatcatgttcagtttcttgtttcaatctttagataaagaaacactcacggcttaaaacattataagtcattagacagagacttataattttaaacaatggaaatttggataataaacttacaagacgatgttaaactaaccggattttggatcccatcattgatcgttagcgattccaaaaattcagcttgtcttcccatcgttaagtagatttataatacaagtttctgttgatccttcttggtaccctcgacttgaaactcactacacatatggatcatgttcggtgtcttgtttcaatctttagacaaaagaatacccacggcttaaaacattatgtctttagacagagactcgaggttcgaaagtaaccaatcttttgtcaaaaagattggatttggttatgtttggtgcaaggaaaatggtacccacggctttaaactttagtctttcgagtgaactgaaacttgagattccaacattgattcttttggtacccacggcttgaatatctttagacatatggatcatgttcggtctcttgtgtcagtctttagacaaagatcaagttacccacggcttaaaatagtcagagacttgaggttcgaagtaaccaatcctttagacaaaagattggattggattggcttatgttttggttgatgaaaaatggtacccacgacttcaaactttagattgagacttgagattagaacattgatccttctttggtacccacagttcaaaaatctctagacatatggatcatgttcggtttcttgtttcagtgtttagacagagttggataataatggacgatgttgggttatgtttggataataaatttacaagaccagattttaaacaatggaaatttggataataaatttacaagacgatgttgaataaccggttttggatcccgtcattgatagttagcgattccacaaattcaacttgtttttacatcgttatgtagatttagaatacaagtttgtgttgaaaaaaaatatatacaagtttcttatttttttagaaaagattcccaaatttttccatacgtttagcatgctaccaaccttgtaagagggttcgtcgttgtgtgagattagtgtaatttgttatgggatcaggatcaaccaatcaagatttcaccaacttgctaatatgtgaaagacagacaaatagagtaacagtgaagactgaagatgatggttgtgatgtgatgaacaagttctaaaatatttaggtccaaaagatcttcccatggagcttggttgtgaaagtgctaactgagatttctccaacatgcacacattgttgcaaaagcttccccctgcattttattatacaaacaaacaaacaaaaatgtcaccataatggatgaatgtttgttcaccatgagtatgcgacttattaacatattacattttagcattactacatccaaatacttcaactatcatcatatattggaaatttggattgatggcttgagtcataaaaacctacaaaaggattggacgatacttttagtaaaatctcttaaaattgtccgcagtgaccaaaatgctaaaaagctagaaggatatacagacttttatcttactttatgtatcagaaaatcaatatttcttaataaatatgataaagtgtttcagtttattttgagtttagaaaaagccaaatgaattggaatcaaaataatgtaggtaaaaaagagaagtggaattaaaataaaatcattctatccaatcaaaacggtaagtagttgtgcgttttagaggcaaaacaccacagcgtttcgaagcacgtggatgtgtcgtgtgatacagcagtagcgcactattgggcattgagaatacataatcataacccctgcaatctaacggtcaaccttttaataacccttgtaggttaaatctctaccgtttattcgaattacttttccaaggtaagaaaaaagcaaacacaaaagggaatatcaaacaacaaaaaagtaagaaagagcggtaagacagagacggagaagaaggagaagaagattgttaagacgaaaccctgttgctgtccgtaca

SEQ ID NO: 8571 - DNA, 3000 bp, Unknown
  misc_feature (1)..( 3000): cDNA_ID_3045756_gDNA_ID_1971819_Annot_ID_176084 3000 nt of promoter + ATG
ttcggttacttagtgatcatgctttacaagaatgtcaacgaatcaaactttagagaattttctaacaagcgtttcaaagcacttcgtgctgtcgctcatgatatttcagatggacatatctcagtgttcaatgatgtggaagatgctatctgctatcgaaactcgtatggtcagaaccatcagatccgtaaagctgttctgagtgctgtcctcggtagcaaaaagaatgaccactgttatttctctagtgttagtcttaatgttgctaaattcctttcttggacagacatggcaggatattatgttgtcgaagaaaatcttgtttatcctgattcccctgttctcaaagctcctgagttagcaactgaagtaagcaattggaaaaaagcagatcaagcaatcaaggaaactgactcgcctgagtattacaggatcttgcatgaggatcctgcgagctgctctatacttagaagagcaaactttccgacgctcattgctgtcgcagagaagttgaagaatagagtgcttggtggcagcaacaaggtagtgaatgcagagatatctgacaaagtagactactattttgatatgcatgtcaagtagtacgcttctggccgagtgtgcgaagccaccgagcgtattgtcgactactttgaggaaaattctgagtcattagcgaagcttttctgtagttagggtctgattctacatggcgtcctgttttttttttgtttttttttttcttgtgcaccacatgtgtttaatcagatattttagtatgttgctttgatttttatttgctgtcttaaacttcattaaaaaagaattcaaggaagagattcaaaaacagaaatacaaagcatgacagttcaaaacagagcacaattgctccgaatatgtaaaacatagttgagactaagtaacagttagcccaaagaatttcttcactacacgtattgtttatgaattctaagatttcttaaacctaaacaaacctttcttgggggaaaaatagtatattcttccatgtctgtccaagaaagaatattggccacatatgaacaaatatcaccaaaagaatctccatccttggtatgattgagaaaacctttcaggacagcttttccgatctcagggttctataccataggtggaccgtaagtaggtcgagtgatcctcatcattgaacactgacacatcttctcctttgatcggaacataaccagctgcatcaaaaagtattctcatatgttgatcagagctgacttcagtgtcattcttgtaaagcatgatcactaagtaaccgaagagggccactgacttttttggttctaccaccttttgtgggacgattaaaccgtttcttgcggcagctgacgggaaacttatcgttcgcaccgtacgacccattgcacgaacagcttgttgcagagcatcagttacttccggcagtaataggtcgctctctggtccctatcggtcaggtattcattctttgcacactcaagactcaactgaaacgccgcataactgcgattcgcctccgttgcagcagacgcatcaccaagaatcatatctacttacatgctcatacagtcatacttcaaataaaaagattgaaatcgaaagagaactacttttgtttgttggctttagaattaaaagatctctataaatttagggtttcagtggagacgttttataaatacggagtagaagttggaacgttgatttgagagacgtggctcttgggctaggtacatgcatggactcgatcgggtccatgctgacttgtctttgcagtttccttctagtgaaaacgtcttgccgtttatacattcggcggggttaatgaaaacggagtgttgtgtcttgtgtgcgtgcgtagttcccaaaatacgacatcgattctactttctactagtttttaaaagcttttgcagtgcacatttgttaatacataaaggtaaagaaaactaaattttcatatatactcataagcatttaattaaattggacatccacaacaatctaatttgttgtcttttatagtgtatagttttctgattttacaaatctatctcatcaaagtcaattcttattgcaagaatctctcttgctttatttctcattaattttctctttatttatttttccttggaagttggaaccaagtaattattagttgttcaagcctctctaaaaaaagataaaaaaaatatgagttgtacaaaggttttttgccaaataatatagttggtgggattaattaccaaaagaaacaaaaaattaatatgggattatgagttaaaaaaaaaatacttgttgaaaattgaaaaaagagaagtccgttcgttcctcatttggagctacagtgaccgtttctagtgctcacagagagagagagagagagagagagagagaggcgctgtggatttgtgggagagtagggacatcagaggattcttcgatcttcagattcttactcgacgaatccttaatcgctcacctgcagttgttcttatcctccgcttattccgtcgagtgccgtggcggccaatttcggcaactctgcgccactgatgattttgatggttagatcttttaatgttcgtcctcctccttactctccgaatccattttctgtgttctttcctttctgtttcgtataaaatcatgtttcattgagctcgattatgattatatcttgtctacggtcattttgacgacgacgacagtgatgatctttgccacgcgcatcgaaaattgaattttgttttccccattttaggaattgagtcatttggatgtggttcaaatgatatttggtggttctgtttttgaatctcgtattctcttggaatatctgtatacaaggtctcactggttaatgtttcttctcttacttctgttcagtgattctaaagagtgagatgttaaagcagactataagatggatttgatacttcatccagtagtagcttaagaaatattgcggtt

SEQ ID NO: 8572 - DNA, 3000 bp, Unknown
  misc_feature (1)..( 3000): cDNA_ID_1662993_gDNA_ID_1971819_Annot_ID_176081 3000 nt of promoter + ATG
tttgatggcaacaacatcgatcctcctctgcgctggtctagctgcggttttaagcagcacatatgcagtgaagaagcctctaaacgacgctgtttttggagctcgcggagagttcatggtggctctcaagtacgtcacgatactcaccatattcctcttctccttcttctctcactctctctcaattcgtttcatcaaccaagttaacatcctcatcaacactccttttcctcctgaggagttggaggacgagatgatgatgaccgcggaggagtacgtggcggagttgctagagagagggtttattttgaatactgtggggaatcggttgttctacgcggctttgccgttgatgctttggatatttggaccggtgcttgtgtttttgtgctcggtcgtgatggttcctctactttacaacctcgatttcttcttcttcggtaaagaaagaagaaaacttgatcaaaagtctagttttggatctgtgtaaaatcgagttctggtcagtagaacaagtgatttgtaattaagtgatatcatcgtcctctttgttaaatcctggactaccgatgaacgcatgaggactttacatggaagttgaaaagttcgaagatcatagtttaggtttcaattctagatcttccgattaagaaaaaaaaatgtaattaaataacgcattataattttcatatattagggtttttcggccgtatgtatttggtgtggtgtaatatatgtcacgttttggtttattgagcgttattattggcatttccatgtgggtgactttataacgtatcagcatatctcacagctctcttggtatgtacgtttctcttttttctttttctttttctgttagtgtttatatgcatgtggcttacgttgggcaagaaacgggacaaaaaatgtgatgttcacatctattccgtgcattagtatctgtcttattaagttttgttgttatgttatgtgttaggaaccagtcgtcacgaggctatttaaatcctccctaagacaatgtagaaatatacctacacggttatttttctgtgtagtatgaaatcaaactgtttagaactcgtttagagatgacaattcagattatgatgttagctaattatatccgaatctagttctgaagcccatgttcgcctagattaaaattgtatcattgtatgttaactaactctatttttcatatatatattttcaattttggtttagattaggtaaacaaaaagctatttcatgctacaaacaaatacaattttagtgatgaaaattttcgtagttaaaactttagtttcgtacgtagctaaatagctaaacgacagttgctaaataacttactcgtgactatccgttgatacacaaatttcatggataatagctactgaccatttaacaacgagatagccagagatatatcatagagatagccaattaaactgttggcaaaagtaccatgggctgtccttaagtgggcctaaatctaataaaattataaactgtggcctgttaggcatgtgatatttttctctttttcttcaagcctttttataaaaataaatgtcaagagatgatgaaggcatttgcacttttgaagaattgaagtaggagctcaaagcgaaggattacgatgatagacatctctgtaatgatttaacaaaactcaaatacaacatcaagtttggaagatcactggactgttttgtgtttgatcatttactcacctgtaattcttttttactaatatataacttataagaaatcataaactataatcttttttttttttgggtttaatgagacttttttctgtcctttttttgaacacctgtgaatcatagactataatcgaacttcatccccttttttttttttttgggaaacttagagaagaacaaaacatttgtgaggctgatgatttgatgagaccgcaacgttggagaactttggagtatattaataatatacattttcaatattatcagtatatgcattttcaactaggccttgctttatacaccggagattataattaatgaaaagatgaattacgttaatgtcattgcttctggtttgagttggcaaactccacgtaccacgtacatataattattattgagtagttgctaattaattatacttttgtcttgttaaaactagtattataaattggttaatgccataaagcaaacgatagaccagacacatctctgataatccagcggtacttatttgtcatgattctgtgatccaatcaattaatcgtatagatttagctatcgcgaatcgtgattccaacctttacataaattctttttaaattagggcaaattgtgttggatcaagcatagtaataacataatacgtacttataaaattgttaacgtgccggtgttgtttggagagaaaaacaaagattcttagctctcaggcaattaaaaaaacgagtatcgaaaaattcagaatagaagttgcttagttaacgagaaattaaatggtgcatcgaatatctaatggtttaatctggatatagtaaaattagtactccacgattagttagcaggcaagtagatgaatgtcattaatttgatgatctgattgaattgctttcgaaaaaggacaataataataatatcgactggttaattggttgtcatattttacccaaaaaggatcaaccattggatttacgccacgtcattaatgtgaaaatacaaaagtggatccgatggatgccgcgtgtcatcgtcggtcacgacatacccacgaagccatttacctcacgtttagtaccatctatctctctctctctcgtcttggcacgctgtttctttttttcctactggttaagaaatttctacggtccatggtcaaaaacacaccttcataaatatacagagagatcgtgagagagcagagaggaaacgtttctcttgttcgttggaatctccgtccctttttgttgatcgacggtggtgaatcttagac

SEQ ID NO: 8573 - DNA, 3000 bp, Unknown
  misc_feature (1)..( 3000): cDNA_ID_1823257_gDNA_ID_1971819_Annot_ID_176077 3000 nt of promoter + ATG
aaatcaggtcttttttttaataataataacaaagtaagtttgttttctgagtagagaagtgtaatctttgtgtgtttcgaactttgttgtcttgtgtgttgtcctaacgagtgcctacttgtgcaccttttgaagaagattaaagctaaaacaaagtttataaactaacgtaagatcgaacaacatacgtcacatttcaacaaaatgcaaaaccttagagaaaacttgataacattcctaattccttcaccgtgggagcaaataactgaaatgtgtatcgagcttgtatttggaagatccatggacaagtaggtattgggcttgtatttggaagggccatgaggacaaatatgtattgggcttttatttggaaggtccatgaggacaaatagatattgggctttcacgttttttatctgtcgcctaacaaaacaaaaaaaaaaagtaaaaccaaaaaaaagaaaggagagaggccgacttggggtataagccagagttcttcttctttttcaagcttcttcttctcatcagtcatcaccggaatctaatttatactcgcaaaactcagcgattcgtttcgtttctgacaagtttccaattctacagcaatggatctcaatctcgatgcacctcactccatgggaacgaccatcatcggcgtcacttacaatggaggtgtcgtcctcggagccgactcacgtaccagcaccggtgagatttccccccttctctacttttctagggttttagttcctcttcgttgggtttgtatttgagttttgttttcgtttcaatcggaacaaagaataatcctaatcgattgttctatttgggtaatttagagaaagctgttaaatttgggatctgttgtaaattactcgcgcaggtatgtacgtagcgaatcgagcttctgataagattacacaactgacagataatgtctacgtctgccgctctggatcggtaataatctctcttagggatttcatttttgtttttgtttgacctgttctgctgtggaaactgtttagcttgctagacttcttattgaatctcttttgcttactgggtttcttactcgaatgtttgttgttcttgatttacttgcaaatgggatattgattacaacaagctctcttcttgttccttttgcaggctgctgattctcaagttgtatctgactatgtccgctacttccttcaccagcatacgtgagtgtcttgattgacgaagctgcatgacttgatacttatgctatcttatatatccggatgatttaataattcgttttcttatgatttgcagaattcagcatggacaacccgcaactgttaaggtttctgccaaccttatcaggatgctcgcatataataacaaggtacaagtttgcttttaagcttgccgtttggtttggttgttttaccagcaatttagactaagagtagtgaggaatgtggatgttgttccattttcttgtagagaaaacatacccatactcgactcaatcacggataacttttgtttggaagtttgaccctgggaaatatgacagtttgcttatgtttttattgctttattatgactaaagctgaaaattttggggcatagagattgatgttacatgtcaaacctaggatgctagtatttatgaatctcttgttgttcgtagtgttactgttatggttgttctctagtctaaagtacgaacactattaatggaaatgtagaaagtctctgttgtaatgctactgtatgtagtgctcaagaagtatctcagttttctatactccaaatcatatccagtttgttattgtatggtgattccttgttttgattacatggattgttaactgaaacattgtatgtctttgttgagcagaacatgctccaaactggtctcatcgttggaggatgggataaatatgagggtgggaagatctacgggatcccactcggtggaactgtagtcgagcaaccgtttgccattggaggtaaaaactatattgttatgagtcttatgatatttaggttttaacaaagatgtattcgattaattggtctttgctatttactaacttgaatggtccctttgcttctgttaacaactaatggaattgtgtgtgtttgtgtaggctctggttcgagctatctctacgggttcttcgaccaggcttggaaagataacatgaccaaagaagaagcagaggtaacgcggttcacatcactgtatctgcatatgcaaaaatctcacaaaccccatttgtataactggtcgttgctattgtatttacgcttgtgtatttatattgcagcaacttgttgtgaaggcggtttcactagccatcgcccgtgatggagccagtggtggtgtcgtacggactgtcatagtaagatctttctctgaccagaagctcgctgaagcgaaacttatgtaacctccttaatggtacttaattggcaaactgtttttgatgtttttgaacagatcaactcagagggagtgacgagaaacttttaccctggagataagttgcagctttggcacgaagaattggagccccaaaactcactcttagacattctgaacgctgctggtcctgaaccaatggccatgtgatctgcaaacaacgatcattatcttactctgttgggcaaacattttagatatttcattacagtttccagtgtctttaagactttaaactctgtttgaggttctgttgtaatgaatgacccgatctttctgttttaaacggatatcgtgtttcttatggctatggttttaattcctctgttctcgaatcgatccagtagaaatgttagccatcttctccgaaattgattttcagttcttttttagtgaccaagagtttatggtgaaaaaacatcgttcaaaatagtaatcacaaccttttatatgcttgacacgtggcgggacaagggacacttgaacttctactcagtcgcaggaactggacggagtaggagagacaaagaagg

SEQ ID NO: 8574 - DNA, 3000 bp, Unknown
  misc_feature (1)..( 3000): cDNA_ID_2999526_gDNA_ID_1971819_Annot_ID_176076 3000 nt of promoter + ATG
acaatacggttcggtctccatctctctctctataaatgctcttcttcccacacatcgcctcctcctcattaagatacatctcgagaagcagagcagagagaaagagattccgagagagagagagaaggagggagagaaggagcttagtggtctcattaccattaccagctccatacgaaccgaaacgacgccgttcgctcaacccttttctctgcaatctctcttcctcccacgagtttctcagcttttctcggatcatctaattaagagaggagatcttgtctcacggtgggattgatttttctcttcacgaagatcgtgttccagggtaaagttttgatttttattcatcttactcattttggttaaagtagcttctgttctcagcgattttctctgtctcgtgtttatgtttattgtagttcaggaaatgttcttactgttctgtttgattatatgattattgcaccaaatctggctagaaaaagtcaatacctttttcccttctttctagaatttgggaacactgtttactagatttttgtctttgttccaaaagtttgttcattcatgtcatttacgggttataactgcaccaccattgctatggaacgcataacctacctagaaaatcttccttgcttttcaaaataaagaaagggagaagatttgattcttttatgaactctgagctgtcctgaagagaacccaatatttgagcttatctgtttacatttaaagaggaagtgacaatagaaacgctggtccatcgtgatttgtcttacttgtttagctcttgtcttgtctttactacatggtgcctttttctggcatttaccatccacaaaatcatgatttgtgtctaaatcttagattttgtctttttttttgtgtgtgtgtatgtacagcaattaactgcagaaaatggtgatgtgggtctttggctatggctctcttgtgtggaacccaggatttcactacgatgagaaagtgttaggtttcatcaagggatataaacgtgtctttgatcttggtaacccttttctgttaagataacagttttggttctttgcgtatttgattgatttatctattcgtcccagctgttgattattgattgattgatttgtgttttgatttgacttggtagcttgcattgatcatagaggtacaccagaacaccctgcaagaacttgcaccctcgagaaagctgaagaagccatatgcgtaagtagctattcttaatatgtgtataggatcttagagtctgttcatgaggcctgcttgttactcacacattattcttttcttactaacattccaatactttcttgacagtggggtactgcattctgtgtccgtggaggaccagaaaaagaacgtctggctatggaggtatgtccttgcatctgaaaactagatcgcttgatgtatcatggtcatgcctttgtgttgatctttctatttgtacacagtacttggaacgtagagagtgtgaatatgatctcaagacaagtgtagacttttacaaggtgagtcaggactcagccgagattattgaataagcctattattccttatgctactaaaaattgacctcaaaagtttcttccttacacaggaagatgatcctctaaagccagctgtaactggagtgatagtgtaagttgtttcctatgacacggatccatcaacagctgttctcacatcgatttttattttcttctacaaatctttgtgttgtgattttgatggatgcatttctttacaatcttcagattcacttctactcctgacaaggtctccaacaagtattatctcggacctgcgccattagaagacatggcaaggtatacacttagcttccagcccaatttcttctgttcctttagtttatgtgccagattcttgtcctcacacttagctgttattttgtatattcaaagacaaatcgcgacagccaatggaccatgtggtaacaacagagattatctcttcctgctcgagaaggcaatgcacgacattggttagtccaagctccatttgaagtctttatatgaatagaacatctgcccaggctttgtagtcaaaggttctgaccttgatggttttaagagagacattgtttttgatgtgttaagccattttttatttcacacagggcatgaggaggactatgttatagagctggcaaacgaggtgaggaaggttctggccgagtcctcgactaagaaggtgacaccggtgaaggaatcaagagcaagccgtgtagctaacaagtcgaagaacaatgtccccacggctcatcagatactacctcatcatccagaagctgttgccactacaatataactcttgtagttttcttcttaattggctttagagatgagtgaaatcaggtcttttttttaataataataacaaagtaagtttgttttctgagtagagaagtgtaatctttgtgtgtttcgaactttgttgtcttgtgtgttgtcctaacgagtgcctacttgtgcaccttttgaagaagattaaagctaaaacaaagtttataaactaacgtaagatcgaacaacatacgtcacatttcaacaaaatgcaaaaccttagagaaaacttgataacattcctaattccttcaccgtgggagcaaataactgaaatgtgtatcgagcttgtatttggaagatccatggacaagtaggtattgggcttgtatttggaagggccatgaggacaaatatgtattgggcttttatttggaaggtccatgaggacaaatagatattgggctttcacgttttttatctgtcgcctaacaaaacaaaaaaaaaaagtaaaaccaaaaaaaagaaaggagagaggccgacttggggtataagccagagttcttcttctttttcaagcttcttcttctcatcagtcatcaccggaatctaatttatactcgcaaaactcagcgattcgtttcgtttctgacaagtttccaattctacagca

SEQ ID NO: 8575 - DNA, 3000 bp, Unknown
  misc_feature (1)..( 3000): cDNA_ID_3092651_gDNA_ID_1971819_Annot_ID_176075 3000 nt of promoter + ATG
aagagcaatataatcatagtgtagctcacggtagcaaagtgttctacatatatttcaactataactacaccgacaattttcgtcattctgtatcttgaagaagtgaataagtctgtctatgcactatttgttcttaagattccttaaaggcctagtttcatttagtaatggggcaagaaaaggatagtgtatagtgtacctaattcagcagagagatcaacaacgtcttgcgcttcagggtcactatcagattcagtcccagctttttcatcttggatcatcacaaccgcattgatggcttcaaaaagctcgatatcgatatcccccgggagattaagtaacttcctcttgtcactactcagggaccaataggaacgaccagtgcctcggtactgagattcccacttcttgatctgattgtaatcagacatcaaagaatcccatttcctcctgcattggtttagatttctgctaacatccaaagcgttgcagttctctgtgatcattgtccatttctggaagctagataaagcattcgaacaatcggcttcaaccgcagcgatctcattcacgaggactagacaatctttgactgcccattctggagcaacttgagaccgtgttctccgtgaacctgaagttccttcctccatccaaaaaggcttaaactgcaatttggtttaccaacctcgttaatatcatcatcatcagtaaagacattacaacataactgtgatttgaaactctaataaaacctattgtcaatgaacaataaccaaagaggtgcatcttcatgtttctgagttttgtataaatctgagaatggtaagcgatattgaaattcaggaactaaagtacacagataaactccacaaaaaatgcagctagatttttcaacattgaagaataataactcggtaccaaacaaatcagatacaaaattcaaacaagaatccagacgaacacgactggagaattccaaactggagaaagaagaaagaagaaagaagacaactttgagcataaaaaattaccagatcgccggaaactgcttctggaaaacgacacgtcgacgccaggcaagtcactttgaagtttgctccaagacgatgaggaaccgagtgaagccgaagcaaattttattgatgttatctgtcaacaggcccaaacgtttttttattgaattcggcccaaacctattttttttgtttaaatggcccaaactataattagatattgattttgaagagaaaaataatttgttgttctttgtcaaattaatagtataaatttttagacaaaaatctttactatgagtcaagcgaacccactttaacatgtagtattttactgaacatttccaaattacaagacctcatcatccaatatagaatacactcactcgcctgatgagtgatccaatcctcaaaaagcatagtaacaattataataatgcatttattccaatttgatatttgaaataaacaaagatatttttgtggagattcatctagtttttgctttctagaaatattttttatggtataattcgagaagaagcgattagtcgtgggaaacatttgatagtttagtcttatttttatgtaccagtgacgtcggtgatggcaatgtatgtatatggctttgtgtaacaaatacattctgacgtttgtgtttttgtgactgtgtctttgtttgcctcaaaattcaaattttaacactttttaaataagccaataaaaaaaaaaaggaaaacacttttttgtctttagctaccaaggtagacaaattatttgaaacttggaatattttaggaatgtgtttggcttcaaaaatagtgagatgaacaaataaattctagattttggatatatgagtttccataagaaacaaaacaaatatttcaatttatgaattagattaaaaatttcttaacatgagataccttgtttagagaacaaagatatttcttttagaaacaagcgtcttcaccggccagtcacgtgacgaatggaaaacggaacagacaaaaaatctgcagaacacaaaaaaaaaaaaaaaacatgcgtggcatgaacaatacggttcggtctccatctctctctctataaatgctcttcttcccacacatcgcctcctcctcattaagatacatctcgagaagcagagcagagagaaagagattccgagagagagagagaaggagggagagaaggagcttagtggtctcattaccattaccagctccatacgaaccgaaacgacgccgttcgctcaacccttttctctgcaatctctcttcctcccacgagtttctcagcttttctcggatcatctaattaagagaggagatcttgtctcacggtgggattgatttttctcttcacgaagatcgtgttccagggtaaagttttgatttttattcatcttactcattttggttaaagtagcttctgttctcagcgattttctctgtctcgtgtttatgtttattgtagttcaggaaatgttcttactgttctgtttgattatatgattattgcaccaaatctggctagaaaaagtcaatacctttttcccttctttctagaatttgggaacactgtttactagatttttgtctttgttccaaaagtttgttcattcatgtcatttacgggttataactgcaccaccattgctatggaacgcataacctacctagaaaatcttccttgcttttcaaaataaagaaagggagaagatttgattcttttatgaactctgagctgtcctgaagagaacccaatatttgagcttatctgtttacatttaaagaggaagtgacaatagaaacgctggtccatcgtgatttgtcttacttgtttagctcttgtcttgtctttactacatggtgcctttttctggcatttaccatccacaaaatcatgatttgtgtctaaatcttagattttgtctttttttttgtgtgtgtgtatgtacagcaattaactgcagaaa

SEQ ID NO: 8576 - DNA, 3000 bp, Unknown
  misc_feature (1)..( 3000): cDNA_ID_1444498_gDNA_ID_1971819_Annot_ID_176073 3000 nt of promoter + ATG
ataataggcttattcaataatctcggctgagtcctgactcaccttgtaaaagtctacacttgtcttgagatcatattcacactctctacgttccaagtactgtgtacaaatagaaagatcaacacaaaggcatgaccatgatacatcaagcgatctagttttcagatgcaaggacatacctccatagccagacgttctttttctggtcctccacggacacagaatgcagtaccccactgtcaagaaagtattggaatgttagtaagaaaagaataatgtgtgagtaacaagcaggcctcatgaacagactctaagatcctatacacatattaagaatagctacttacgcatatggcttcttcagctttctcgagggtgcaagttcttgcagggtgttctggtgtacctctatgatcaatgcaagctaccaagtcaaatcaaaacacaaatcaatcaatcaataatcaacagctgggacgaatagataaatcaatcaaatacgcaaagaaccaaaactgttatcttaacagaaaagggttaccaagatcaaagacacgtttatatcccttgatgaaacctaacactttctcatcgtagtgaaatcctgggttccacacaagagagccatagccaaagacccacatcaccattttctgcagttaattgctgtacatacacacacacaaaaaaaaagacaaaatctaagatttagacacaaatcatgattttgtggatggtaaatgccagaaaaaggcaccatgtagtaaagacaagacaagagctaaacaagtaagacaaatcacgatggaccagcgtttctattgtcacttcctctttaaatgtaaacagataagctcaaatattgggttctcttcaggacagctcagagttcataaaagaatcaaatcttctccctttctttattttgaaaagcaaggaagattttctaggtaggttatgcgttccatagcaatggtggtgcagttataacccgtaaatgacatgaatgaacaaacttttggaacaaagacaaaaatctagtaaacagtgttcccaaattctagaaagaagggaaaaaggtattgactttttctagccagatttggtgcaataatcatataatcaaacagaacagtaagaacatttcctgaactacaataaacataaacacgagacagagaaaatcgctgagaacagaagctactttaaccaaaatgagtaagatgaataaaaatcaaaactttaccctggaacacgatcttcgtgaagagaaaaatcaatcccaccgtgagacaagatctcctctcttaattagatgatccgagaaaagctgagaaactcgtgggaggaagagagattgcagagaaaagggttgagcgaacggcgtcgtttcggttcgtatggagctggtaatggtaatgagaccactaagctccttctctccctccttctctctctctctcggaatctctttctctctgctctgcttctcgagatgtatcttaatgaggaggaggcgatgtgtgggaagaagagcatttatagagagagagatggagaccgaaccgtattgttcatgccacgcatgttttttttttttttttgtgttctgcagattttttgtctgttccgttttccattcgtcacgtgactggccggtgaagacgcttgtttctaaaagaaatatctttgttctctaaacaaggtatctcatgttaagaaatttttaatctaattcataaattgaaatatttgttttgtttcttatggaaactcatatatccaaaatctagaatttatttgttcatctcactatttttgaagccaaacacattcctaaaatattccaagtttcaaataatttgtctaccttggtagctaaagacaaaaaagtgttttcctttttttttttattggcttatttaaaaagtgttaaaatttgaattttgaggcaaacaaagacacagtcacaaaaacacaaacgtcagaatgtatttgttacacaaagccatatacatacattgccatcaccgacgtcactggtacataaaaataagactaaactatcaaatgtttcccacgactaatcgcttcttctcgaattataccataaaaaatatttctagaaagcaaaaactagatgaatctccacaaaaatatctttgtttatttcaaatatcaaattggaataaatgcattattataattgttactatgctttttgaggattggatcactcatcaggcgagtgagtgtattctatattggatgatgaggtcttgtaatttggaaatgttcagtaaaatactacatgttaaagtgggttcgcttgactcatagtaaagatttttgtctaaaaatttatactattaatttgacaaagaacaacaaattatttttctcttcaaaatcaatatctaattatagtttgggccatttaaacaaaaaaaataggtttgggccgaattcaataaaaaaacgtttgggcctgttgacagataacatcaataaaatttgcttcggcttcactcggttcctcatcgtcttggagcaaacttcaaagtgacttgcctggcgtcgacgtgtcgttttccagaagcagtttccggcgatctggtaattttttatgctcaaagttgtcttctttcttctttcttctttctccagtttggaattctccagtcgtgttcgtctggattcttgtttgaattttgtatctgatttgtttggtaccgagttattattcttcaatgttgaaaaatctagctgcattttttgtggagtttatctgtgtactttagttcctgaatttcaatatcgcttaccattctcagatttatacaaaactcagaaacatgaagatgcacctctttggttattgttcattgacaataggttttattagagtttcaaatcacagttatgttgtaatgtctttactgatgatgatgatattaacgaggttggtaaaccaaattgcagtttaagcctttttggatg

SEQ ID NO: 8577 - DNA, 3000 bp, Unknown
  misc_feature (1)..( 3000): cDNA_ID_3092659_gDNA_ID_1971819_Annot_ID_176070 3000 nt of promoter + ATG
atatatatatatatatatatatactggcaacacacaacatttgtgaaaattttcctaaggactagactttatgtaattatcactattcatgggaaaatttgaacatattggtcttggagcctttggtgagtagtagtgagcacgttattaggcattaaattttgcatgtaataaaaaaaaatgtttgcatgtaaaagttacaatatgaaattttatttcttcttttgacaaaatatttgtggaaaatactctctttgaaatgattattagtgggcctattgataaatgggccatgtatgatgttaattaaataattcgtttgggccttaaaacaggtaacaaggggctgtgtggagcgccattgcttccgtgcagatacactcgtccgccgttcttcaccgtgtttctccttgccctcaccatcctcgccgtcgtagtgctcattaccgtctttctttccgtttgcattctcagccgccgtcaaggcaaaggacaagaccaaatccaaaaccacggcgtcggccattttcacggacaagtctacggacaacccgagcaacaacaacacagtgaaaagagctcacaggactccaaggtctacagaaaactagctaatgaaactgtgcagcgagattcaacagcaacatcaggagctatatccgtgggaggtctctctccagatgaagacaaacgaggagatcaacggaagctacatttcgttaggaatgatcaggagaggttcacgcttcaggatatgctccgtgcatcggcggaggttctcggaagcggcggatttggatcttcgtacaaagcggctttatcgagtggtcgtgcggtggttgtgaaacggtttaggtttatgagtaatatcgggagagaagagttttacgatcatatgaagaagatcggacgattgtctcaccctaatctccttccgttgattgcattctattacagaaaagaagagaagcttctcgttaccaattacatttccaatggaagcctcgctaatctcctccatggtaatattatggaactctctaagtgtctgtttatcttcatccaatgaaatgaggaatctgatgagttttgttggattgattttgcagctaaccgaacaccaggtcaagtggttttggattggccgattcgattgaagattgtaagaggagttacgagaggattggcttatctctatagagtgttccctgatttgaatcttcctcatggccatctcaagtcttccaatgtgttgcttgatcctaacttcgagcctctacttacggactacgctcttgtcccggttgttaacagagatcaatcacagcagttcatggtggcttacaaggcacctgagttcactcagcaggataggacttcgagaagatcagatgtgtggagcctgggaatcttgattcttgagattctgacagggaagtttccggcgaattatctcaggcaagggaaaggagctgatgatgagttagctgcttgggttgagtctgtagcgagaaccgagtggactgctgatgtgtttgataaggagatgaaagcagggaaagagcacgaagcacaaatgttgaagctgcttaagatcgggttgagatgttgtgattgggatattgagaagagaattgagcttcatgaggctgttgatcgaatagaagaggttgatagagatgctggtggaggtcaagagagtgttcgatcttcatacgtgactgctagtgatggtgatcatcgttcttcaagagctatgactgaggagttctcactcatgtaatagcttccattgaaaggcctgtatctctctctggtctttccactagtcttattcttcatctaattctcgtttccttgatatttgttgatcaagttcgtgtctttgtttgtaggtaatgagaattactttttattttttattgccagggttatttattcgcattcagtttttttccccctagttttaacagatatgattgatgagtaaagcttcaagcttttgttcttttgttgattttttcacttttcagctatttccccattttgtgaatattaatttcgtgccatactttggtatcatctagacgcaaaagaatgtcttttatgtccatttcgtattcaacttgtccactttctgatgcagtgttgagataagcaagaatataaaattaatggttttcacaagcttgttgctttagatattgggtaacctaaccttgtagatggtatattctttgaggatattttgatttacttttacttgttcttttgagagagacttcaataaagtttaagtttatatcttttttttttctatttatatttccttgtccccatgtgatttcatttatccccttttcttggaatttacaagcttaatcaaccgagaggcatatcatcaataaggattaaacctgtgtggaaattttgttacaatctactctgtattgaaacttgtttcggtatagtttcctcgtatcaaaggttataccaccatctctctggtatcaggtatgttaagttttgtttattacttttctcaacaggccatctgagacagttcatcgtctgtaaaccctgttataattggtctctgtttcagttttttaaagttgtatgttccttcaagttttgttctgggtttctgatgttttgtaactggtcttgatatgtatttctgtatgtttgatcatttcatgtgttcatgaagggatggaccttagtttttttttgatccagaataagaactcaggttttactgtagaactgtatagaacatctcagtcttcacaagtagtacttaactacaacacatatgctcatttctttagaagtctttcgagctggaattagcttgagccgttttggatatgtaatagcatgtactcgtacaataaggctaaggtacatgttcttgatgaagcatgttttctcatgttggtttaggtttctgatcagaagcagcttaaagagcatagtggtgttgcagtttagatg

SEQ ID NO: 8578 - DNA, 3000 bp, Unknown; identical to SEQ ID NO: 8566
  misc_feature (1)..( 3000): cDNA_ID_2177362_gDNA_ID_1971819_Annot_ID_176069 3000 nt of promoter + ATG

SEQ ID NO: 8579 - DNA, 3000 bp, Unknown; identical to SEQ ID NO: 8565
  misc_feature (1)..( 3000): cDNA_ID_1823294_gDNA_ID_1971819_Annot_ID_176068 3000 nt of promoter + ATG

SEQ ID NO: 8580 - DNA, 3000 bp, Unknown; identical to SEQ ID NO: 8574
  misc_feature (1)..( 3000): cDNA_ID_2999526_gDNA_ID_1971819_Annot_ID_58282 3000 nt of promoter + ATG

SEQ ID NO: 8581 - DNA, 3000 bp, Unknown; identical to SEQ ID NO: 8573
  misc_feature (1)..( 3000): cDNA_ID_1823257_gDNA_ID_1971819_Annot_ID_58283 3000 nt of promoter + ATG

SEQ ID NO: 8582 - DNA, 3000 bp, Unknown; identical to SEQ ID NO: 8572
  misc_feature (1)..( 3000): cDNA_ID_1823252_gDNA_ID_1971819_Annot_ID_58286 3000 nt of promoter + ATG

SEQ ID NO: 8583 - DNA, 3000 bp, Unknown; identical to SEQ ID NO: 8570
  misc_feature (1)..( 3000): cDNA_ID_1823245_gDNA_ID_1971819_Annot_ID_58288 3000 nt of promoter + ATG

SEQ ID NO: 8584 - DNA, 3000 bp, Unknown; identical to SEQ ID NO: 3908
  misc_feature (1)..( 3000): cDNA_ID_1823237_gDNA_ID_1971819_Annot_ID_58291 3000 nt of promoter + ATG

SEQ ID NO: 8585 - DNA, 3000 bp, Unknown
  misc_feature (1)..( 3000): cDNA_ID_1823226_gDNA_ID_1971819_Annot_ID_58294 3000 nt of promoter + ATG
taggtatggctgaatttggtagagctctgctttgttcattccgtacagctgaaagaacagaaaagaagagttaatttcagtttcaactcatgtcttactgaaaaacttcttccacgtgtgaataaagaaagaaaaaaaacacctccatcagcattcaaagacgaagcatttcctttgagcatatcagtcgctaaaacataggggctgtatttaggttccaaagaggctacactactgggacttttaagcatttcctcggttgctttagctctgactttgcgaatttcatcttgaatattccatgactgattagaaccggacttccttttcagctgcatttggtaaccaatgtcagaatgaataagggtaaatttgagagagccattgaaaatacatataacggtatgcaacttttctttaggaatagctggaaatagtgtcccacaaattcctcgtggttatctaacataaacaatagaagttaagcagagaattttatctcataaaccaagatgaaacgacttcagactttcaaacaacatttgaccaaaagaaaagtatgcactgctggagaacttaaaattctaaccttggatgaggaaaagtttccagcgctataaggaaggggtgtcccttgcactcttgctgatgatggtgatcgaaaatctaaattattcgcagctggagatccccatggcagacgagctcgcatataagacttggccacgtccacaggcgatccagcaccatcttcagttgcctggagatttaaactaatggctgagatggtgatcatcatttaaagtacaatggaaaaagaatactgtgaagcgaagctatcagaagttgaccaaaatcatgtaagtaaatggtcttcatagtcaaaagaagagcaacaatatggatcttttgcattttaagcggacaaaaaggtatttcccaatcaggacatttcagaattaacgtcaccagatggccacacgcagaattctgaacaacctacttttgcaagagagctttaagttgctgatcacatggattggcatataacaatcaaatcattttacccaaacagaagatgtctccttctataataataatggcttagagcacggagacaagatatcacaaaaaagttgatacctgcaggctgcagcaattagaacagttaagaagcaagtttccagaacttactttatactttgaacttgatcctgatttcttctcctccaaccattttcttgcttccatgacagctgtattggacatttcacccacattcacgtctagaaataaaatagaaaagaagacgttatcacatagactaatccggtctacttgcacagtctaccatcagtaacataccgcttgtcaatccatagtcatcatgactcgtctcaatagcagaggggacgctgggatgatctacaaccctagccttgatgatatctattaacctatcaccctcttccctgaaacaacatacacatgaatgaataagcaggatacaagatcagcttagatttggtaactacacacgtctcagaaagattctttaagctatgaggtgtaaataataagaatagtcgaggaggctgctacttatgatgtccaaaaagccaggcagagaaataccttgcaaatgtttcttgcaagagaagctgctcaattacacgcttagaactgagtcgttgaatgcttggttgctgggcactcagaaggtcctattcacacaagcacaaaaactgaaattatgcttttataaaaaaaactctcagttgaaaacgtgttagcttcacgaactttacttcaaacaattatcataggactacagtggcatagcaatcaccaaaacgaacaaggtggttagtacctcttcagtaaaatcgggattgttcttctcaacatcctcatcaccatcaatatctgcaaacaaagaagaaaacatataaaaatccatacattaaaagaataagacacaacaaagctggttggtattctcaatcccagaactacattatatgaataaaaattagagctttagaattagtatgaagtttatagcttagaagtaacctaactaaatagagtacaacaatgcttaactgctcttaagtcccacatattaaaggaaagagaaaatgggaaagctttaagtcaaacttcacatttcaaacgaaacggtagctttcagattcgaccagacaataaaccaaaaattcaaattaatcctatctaaactgaaataaatggtacaaacctgaagatgaatcctcgtcctcctccgaagatgaggaagagtcggagaagacgacggaagaaatgaattttccggcgccggaagcaattacgctggcgggtttgtaaacgagcctggagatccaactagggttttgctgaggaggatctcgggatctctgaacggggcgctcacacggcgtcctgacaacagcggtgcgtcgtggtcgaacaattttcccaccgactcgaggctgacctgctccggcggcgtaaccggagacggaatccatggtgaaagtgagaggaggagggagaagttcgttgtaggaaataatgaaagtgttgaggaaaaattggtaatttctcgttatttgtcgtcttcttgtttttttttttaattgggggtgaatagttagtttcctaaattacaggcctgcggttaaaatttcttccactaataaaattaggcaaaaacaaaacattgcgattaaaaaaaattaatcgtagtaaaatcatgtattatattcttctcttttcatattttgaacatatcacatgatgtttagatcttataaatgcagtaatttaatagagagattagaatttggaagaaaaaaaagttacatgattaaacgaagtaattaatcaagttgtaagtagttattttaaaaacaatattagaaaaatgttttttggttactcatacagtaatacttaattcgtcaactgtgtcagtgttacaaaaaggctaaaagaatg

SEQ ID NO: 8586 - DNA, 3000 bp, Unknown; identical to SEQ ID NO: 3907
  misc_feature (1)..( 3000): cDNA_ID_1823222_gDNA_ID_1971819_Annot_ID_58295 3000 nt of promoter + ATG

SEQ ID NO: 8587 - DNA, 3000 bp, Unknown
  misc_feature (1)..( 3000): cDNA_ID_1820322_gDNA_ID_1971820_Annot_ID_58297 3000 nt of promoter + ATG
taaagctaaagaatactttttttctcttgaattatataaaagaaaaataattggaaaaatgtctagtaggtttaaaggatttgatatttaaaaaaaaattgaggaccctatttttttcttttttcatttggtttattttagcagttagcaccatcttaagatagagaacttgaagttttattctgctattgaaaaacgaaaataataactaaaagaaattttatcttactactttttcaaaacatatatgttatttggaatttcaatgcaaagagtacaaataaccaaaacataaattctgctctctctttttttttttttgaaaatatctaaataaattcaataatgcacaaatataaacacaaaatactatccgagtgttgtcttgtccaatctatcaactcgtttcttcgctgtcttagaaatccacaatatctttcttcacactttctttcactttcccgggaaaacagccgagaaaataaaagaaacgaagaaaagtttgttcctttgtggggatcaaagaagaatgtactcggcgattcggtcttcgcttcctctagatggcagcttgggagactactctgacggaaccaatcttcccatcgacgcttgtctggtcctaaccactgaccccaagcctcgccttcgttggacctctgagctccatgaaagattcgttgacgccgtcactcagctcggcggacccgacagtaagtgtcccttcttagaaatttatggatcttagaatgaaatgtgtttttttttttaatctgttgttcttcagttagtacgaagaatttgacaacgagttaggtctaatttctttcagatttggaagtcaatcatcctgaaatagaatggatttcttgggtttatgtcacttagaacaatttaggaattactgtggcattctttaggttttttttattggccttgagatttgtttacaagattagtttttttgtgtgtttggtttgatgtcagaagcaacgcctaaaactataatgagaacaatgggagtgaagggtctcactctttaccatctcaaatctcatcttcaggttttgatgctactaccttcaatatcaaattatgcttctttggctacttataacaaacaaagttcattgctttttgactgtgttgttctctggttttttgctcggtagaaattccgcttggggaggcaatcttgtaaagaatcaattgacaactctaaggatggtattcagttatatctttagctaagaatccatttatatctttatggattcagttgtgcatttatatctttgtgaacttatatctctgtagtttcttgtgttgcggagagtcaggacactggttcatcttcaacatcatccttaagattggctgctcaagaacagaacgagtatggtttcaagtgttctctttattccaagtgttatattcactgtctataacactcattgtttttgtcttgagccaggagttaccaggtcactgaagctttgcgtgcccagatggaagtccaaagaagactacacgagcaactagaggttagtttcttcttcgaattcaccaaataccagagagactttggttaatgagagactatatagaaacctccattgaatttccttaaagcttatcagaacgttactacttaggaaatcttttcatgaaagttagaaccatagaaaccgcatatactaatgtttgagccctggttccacatttaataagatccattagtatacgcaggtgcaaaggcgactccagttaaggatcgaggcacaagggaagtacctgcaatcaattctagagaaagcttgcaaggctatagaggagcaagctgttgcatttgctgggttagaggcagctagagaagagctttcagagctagccataaaggcctccatcaccaatgggtgccaaggaacaacaagcaccttcgacacaaccaaaatgatgattccatccttatccgagcttgcagtagcaatagagcacaagaacaactgttcagcagagagctctctgacttccagcactgtaggaagtccggtatcagctgcgttgatgaagaagagacaacgaggagtgtttggaaatggagatagtgtggttgttggtcatgatgctggatgggttatgcctagtagtagcattggatgaagttagcaagagagagagagagagcgagaccagattttagcttatttaattttgctatgttgtatttaactctaaactctgtcatcaaacttgtcttagcgtctatgtatatatttgttgaatctgtagcctctcttttagtttgtgtatttgcttcaactttttctaagcttgccttcttttttcttttttggacaaacctaaatatagaatttatgtaattgtataacataaaaaatactcattaaatactcataacttatctccatgctatagattggatcttgtctacaaattagttggcacacatttgcgtaaatgcacaaatttgattacgtgtgtaaaataaaatgtcaaagaaaaaaaaaaaaatctcaagaggaagagagtgatggggtcggcgataaaatgacggcgtatctgctcactcgtacggtgatttgcaactgaagttttgaaaactaaaaaagaagttttgatttttgaacaaagagagaaaataaaaacggcagaggaagagccgtttacgttgtgcttgcttccccaagatttctcaacttcttcttcttcgtgtgagtttcaattctctaatttactaaaaattaatcaaatcgcaaggagtttctctgtgttaacgattgattcatcgttgagttttctctgtggtaacgattgtgtttatatataatttgattgattgattgattaacttaccaaattagtcttagatttggatatatgcttgtaattgattcaaataacaatttgattctctaaccaatttctcaaactttgagtaatttctgtagattattgtatacttgcaggtataaaatg

SEQ ID NO: 8588 - DNA, 3000 bp, Unknown
  misc_feature (1)..( 3000): cDNA_ID_3045782_gDNA_ID_1971820_Annot_ID_176113 3000 nt of promoter + ATG
gctgatattgaaaccgcccttgattattttcttgagactgaggttgaaaatgtagttctctggaatgtgatgctagtagcttatgggttattagacgatttaagaaattcttttaggattttcagacagatgcagatagaggaaattgttccaaatcaatatacctacccgagtattttgaaaacttgcatacgacttggggatctggagcttggagaacaaatccatagtcaaataataaaaactaactttcagctcaatgcctatgtttgtagtgtgctcatcgatatgtatgcaaaattaggaaagttggatactgcctgggatatacttataaggtttgctggaaaagatgttgtgtcttggacaacaatgattgcaggttacacgcaatacaatttcgacgacaaagctttaacaactttcaggcagatgttggatcgagggattcggtctgatgaagttggattgacaaatgcagttagtgcatgtgctggtcttcaagccttaaaggaaggacagcaaattcatgctcaagcttgtgtatctggtttctcatctgacctgccatttcaaaatgcactggttacactttattctagatgcggaaaaatagaggaatcgtatttagcgtttgaacaaactgaagctggagataatatagcatggaatgctctggtatccggatttcagcagagtggaaacaatgaagaagcacttcgtgtcttcgttcgaatgaacagagaaggaattgacaataataatttcacgtttgggtctgctgtgaaagctgcttctgagacagctaacatgaaacaagggaagcaggttcatgctgtgatcaccaaaaccggatacgattcagaaaccgaagtttgcaatgctttaatctctatgtatgccaagtgtgggagcatttctgatgcagagaagcagttccttgaagtctccacgaaaaatgaagtttcgtggaatgcgataattaatgcttattctaaacatgggtttggttctgaagcactagattcttttgaccagatgatacattctaatgtaaggcctaatcatgtgacgcttgtgggagttctatcagcatgtagccacataggactagtggacaaggggattgcatactttgaatccatgaattcagaatatggattatctcctaaaccggaacactatgtgtgtgtagtggatatgctaactcgagctggtcttttgagccgtgcgaaagagttcattcaggaaatgcctattaagccagatgccttggtctggagaacacttttgagtgcttgtgtagtgcacaagaacatggaaataggagaatttgcagcgcatcatctcctagagttagaacctgaagactcagcaacatatgttcttctgtcaaatctgtatgcggtgtccaagaaatgggatgctagggatcttacaagacaaaagatgaaagaaaagggtgtgaagaaagaaccgggacaaagttggattgaagttaaaaactcaattcactctttctatgttggtgaccagaatcacccgttagcagatgagatacatgaatacttccaagatcttaccaaacgagcatctgaaatcgggtatgtgcaagactgtttcagcctattgaatgaactgcagcacgagcaaaaagatccaataattttcatccacagcgagaaattagcaatttcatttggactccttagcttgcctgcaacagtgcctataaatgtaatgaagaacctacgtgtttgcaacgattgccatgcttggataaagtttgtatctaaggtatcaaatcgagaaatcatagtgagggatgcatataggtttcatcattttgaaggaggtgcttgctcttgtaaagattactggtaagagccaaagcctggtagctcactcgcctcttttgggaaggttaagtctgtgttccaaagttcgagctctggttctcgctcaaagaaggagatcatggaccaaaccttacgggtaagctgaattctcagcaatgatatgatactagacgatatacttgagcaaagagtattatcctgaaggaaagaatagtcacatgactgttcttgaggaaaagttggagttgatgcaggagttgatcatgagcaaaggagaccatcgatgacttaacaaaacgaaccactcctttgtttctactaccattgctaagtaactatcactatctttcataccccatccttttttaggggcttatatatgtgtacatattacatatatacgtgcatctatggctttaaaattgatgaattgtagattaagagaaagtgtctcaaaataaagattctatgttgccaagaaacagagtctctctttatgcatatgaatgattgatgtgcttctgatttcttaatgttttatgtggctgaatttggaaactgctattacataaacaaattttgtcaatagtaatataaaaattaaaaaactaaagctaaagaatactttttttctcttgaattatataaaagaaaaataattggaaaaatgtctagtaggtttaaaggatttgatatttaaaaaaaaattgaggaccctatttttttcttttttcatttggtttattttagcagttagcaccatcttaagatagagaacttgaagttttattctgctattgaaaaacgaaaataataactaaaagaaattttatcttactactttttcaaaacatatatgttatttggaatttcaatgcaaagagtacaaataaccaaaacataaattctgctctctctttttttttttttgaaaatatctaaataaattcaataatgcacaaatataaacacaaaatactatccgagtgttgtcttgtccaatctatcaactcgtttcttcgctgtcttagaaatccacaatatctttcttcacactttctttcactttcccgggaaaacagccgagaaaataaaagaaacgaagaaaagtttgttcctttgtggggatcaaagaagaatg

SEQ ID NO: 8589 - DNA, 3000 bp, Unknown; identical to SEQ ID NO: 8588
  misc_feature (1)..( 3000): cDNA_ID_1820318_gDNA_ID_1971820_Annot_ID_58298 3000 nt of promoter + ATG

SEQ ID NO: 8590 - DNA, 3000 bp, Unknown
  misc_feature (1)..( 3000): cDNA_ID_1820310_gDNA_ID_1971820_Annot_ID_58301 3000 nt of promoter + ATG
tactatcaattttctttataaaaaaaaaaaaaaaaaaaaaaaaaaaaaactagactaatttttatttgtgtactgtatacattattttctaaaacaaatgtctagacattatagtattttataaacacttacacaacaccaaatgtttgtcttaaccccgactaaaaaggacatatgtgttgttaatgctggatcaccggtggttttgttagtgtctacccttatttgtatggaaaaacactgccatagcccataaggtaacttataaggacatcaaagcttttggtgtttgactgcttaaatgttcagtctccagattccagcacatgcatttctcgaatacttgactaatggtgaagctagcattttttaataactttgccttaccaatcatggtggttggcggaattaatcatggtggtaagcgagagactttattttatccaaaaaaaaaatgagagacgtaaaattagaactatttttagttataatagttatattttattattttgtctcaattattctccccgcccctctatgtagacgtgtgaatattagagagattgataacgaactcctcacaacatcatatctcaagttcaccacccaaaagaaaaaacacacacacatcttagagagatgaaagagactaattttggcgagaaaacgcgcgttctggtagttggtgggacgggatcattggggaggaggattgtaagtgcgtgtttggctgagggacacgagacttatgttctccagcggccggagattggagtggacatcgagaaggtgcagctacttctttctttcaaaagactcggcgcacatcttgtggaaggctcattctccgatcaccaaagccttgtctctgccgtaaagcaagtcgacgtggttgtctccgccatgtccggtgtccacttccgcacccacaacatccccgttcagctcaagctcgtcgcagccatcaaagaggccggtaacgtcaaggtaaaaggactcatacatcactaaacacttttctttctagtgtagttgttacctttttcatcagagtttaaagcaatttaaaataccgattatcgtagctggtattccaaaaaagttgctttggcatatatacaacataaattaatagtatatgtgttaaaaaaatatgaaggtacaatgtatctgtctgcatcaatgacatatgcatcttttgaaaatagctgatatattacggctatattttgctaacaatcgcaaatgaattgaatttaactctatagacatatactcatttttaaaaatttaataattttcttggaaaagataaagatccgtttgtaagataattgtgtaacacaaaagtcacctttttggcttaccaataacaaagttttaataagcttgcatgcattattgttcaaagactatctaaaggtttttgaaataataataaatcattttagaaaaaaaaacaaaattatacaaccaatcttgtcggatgtttttttaataatattgactgtcttagcttatgttcggtggtgcttacactaaaaaattaaaatatttcagtgaaactacttacaataagttaaaaaatatttcagcgtttcttaccatcagaatttggaatggatccgtcacgtatgggacatgccatgccaccaggaagtgaaacatttgatcaaaaaatggaaatacgaaatgcaattaaggccgccgggatctcccacacatacctcgtcggtgcttgttttgccgcatacttcggcggaaatttatctcaaatgggaactttgttccctccgaaaaacaaagttgatatttatggggacggaaatgttaaaggttagaagaactcttatggaacgctctctcttcatatttttcttttttctatttgtgtcacttttataatcatgaaaattctaaaaaatctatttttgttcccattggttttattatagtggtgttcgtagatgaagatgacatggcaaaatatacagcgaagacgcttaatgatccccgaacgttgaataaaactgtgtatgttagacctaccgacaacattctcacacaaatggaactagttcagatatgggagaaactaaccgaaaaagagttggagaagacctatgtttcaggaaacgactttcttgctgacattgaaggtaaatctaatcatcatctagtaaccaaattaaacaaacctagcttttggattatagatttctatcacatctcttaaataaagcattggattaatgtaaggttggtttagtattaaaaccgaaatgtaaaagttggtcatgccaagtatttattttctatatatcacatctcataaattaaagtagacgtttttgtcttttagattctagtaaattatgagaaagagttgaatttagaccaagtatttattttctattaaatgtgaaaatgtttattatatacatgcagataaggagatatcacaccaagcgggactaggacacttttatcacatatactacgaaggttgtctcacagatcatgaagttggagacgacgaagaagctactaaactctatccggatgtgaagtacaaacgcatggatgaatatttgaaaattttcgtataatgttacatatatgtgaaacacatcgccatttccttatttttatgttttaccatggccttttgttttgtttgcttgaagatgttttccgaatttattttaaaatttaaatgtttcagttatggatatgtctggttatatatagatatacatataatctcaagggtccgaaaatttccaaaagtaaactcaagggtctgaaaagataatttggaaatttaagtccttttcctagaataccaccgataatataagggctttatacacaaatacacaagagatacttcgagaagagattaaaaaataaataacataaaaaaatggaaattatcttcccgccatgtgtatgtggtaactaacaaaagcttcgattactttatcctctcactctcta

SEQ ID NO: 8591 - DNA, 3000 bp, Unknown
  misc_feature (1)..( 3000): cDNA_ID_1820302_gDNA_ID_1971820_Annot_ID_58303 3000 nt of promoter + ATG
aattgttggggacttaacttatgcaaaccagtatcgtactattggtggtaaaggagttccatgcttctcatgttcgtttcctgatgcacctataagggagacttatcaacctcgctgggatgcttggggaaggtaaaacttactatgtgggttaacaagttaggagttgaagaactctgtgttggtcgagatcagctttggagtaattaattttttatttgtgtgcaggttcatggagccattgacttccaaggtcccaacgatggtcattgaaggcaaccatgagattgagcctcaagcttcagggatcacctttaagtcatattctgaaaggtttgctgttcctgcaagtgagagtggctccaacagcaacttgtactattcttttgatgccggaggagtgcattttgttatgttgggtgcatatgttgattacaataacactggtaaatccatggatacacttgaagtctcttgtgctcctactacaatatatctcatttctatgatgattatgtctttgttttagggctgcaatatgcatggctaaaggaagacttgtctaaagttgatcgcgctgtgacaccatggctggttgcaactatgcatccaccttggtacaacagctactcctcgcattaccaggagtttgaatgcatgaggcaggaaatggaagagcttctttaccaataccgtgttgacatagtttttgcaggacatgtaagttctcaaattatcttggtgaaaaagagttttgatactctttgatcttttttttccttgttttcttttatgcaatgtattgactaaaagtggtgtttattgttaccgaaggtacatgcatacgagagaatgaaccgcatatacaactacacactagacccatgtggaccagtttacataacaataggagatggtggaaacattgagaaagttgatgtggactttgctgatgaccctgggaagtgtcactcttcctacgatcttttttttttcaattctttgaatctttctaattaataccttttcagactacctcattttgattggaaaaatgacttcatcattatttttttattgaaataaaggttgacatggaaaaataaaggttttattttttactgtaaaactccacaatggaactcacacttatatagacaaggttttattagttaagtatatctttgacaaaaaagacctttgtttagttaaaagaacatagttacatacactagctaaataatgtgaaaattttatacatatgaggttgattagttgttgatcttaaataacaaacaaatatcaatagataacggatttttaaaatgtctcgcgccagttatctttatcttataactattgcgttgttaactgtaataataaataacggttatttaaagtatttcgcatattgtgtgctaattcatgatttcaagaggaccaatagttaataattttacaattagggacctctcaaaaattaaaattcaataacataatttttttactttttcaagtaaaaaaaatcattaatatatatttatttattttttttaaaagaaaaacagtaggaaatatccattgtgaagatgaatcacacgaaagacgaaaaacaaatagaaataaatttgtttataattactaggagtaaacgtttgtttcttcttcttaaatgtgtacttatattgaaaatactttctcaatatgcctcactatatcataaatacatttgttcttaatataggtttattatattagtttttgacagtcaagtaaattgttttaaaatattttcataaagaaaaagttgtagaagatatccatatttgaagaagaatcacatgaaaaacgaataaataaatagaaataacattttctataattagtggaggtaattgtttttcttttcttatatgtgtaattatattgaaaacttttcctaataagccccactatatcataaatacattaagatatttttcttaatataggggttttatattaattgtttaccgctgtcaattaaatttatcagagattatttcttttgaaaaaagctgtataaaatattcatatttgaagatgaattacatgagaaaaaagaaataaaaatgtttcttagtgggagtgaatgattgttatcttttaaatgttaagtttatgagaaaaatatttggaaagctttacaactttcaagtggaaaacaatgtaaaatacttttgacccaatataaaatgaaactacaaattacttgcaaattagatgttcaggtacatggaacaaaaagtgaagccgaaaatacttgcaaattagattccccttcaaaattaaagtcaaactttacattaacagcccatgaaccccatgacttaacttaagtaaaattatatcatttgcctaatattatgtctatatttttacagaaacacacaaaaattaactcatcatcttcctctctgaatcttgaccatcagatcgaatttcaggttaagattgtttttttgcataaaagaaaatctcaaaaggctttttttttccctcaacttaaaagatttttagaaagacactattaaattttattttattttccttttcaataaaagttttgtagttggcgggaaaattaagaaaccaatttatcgatattgagaaactaaaaaaaaagtgtaaaaacgtctcttcattgagagagaggcaagtgggagaagaagatgaagaaaccaattcctaaaattagggtttttggtcagcgatcgattgcttcttccttcctgaatctcagctcgattccgtaagcattcaatctattatctctcttaatttctccctaattcgccaataaggttttagattttgagtaactgaattcgtgtgcgattgttttatagtgtcgataatacttcggaaaatccgccggagaaagtggagaatcgcagcaagctgaacaaatcagtgctgtttaagccaaacaactttgaggtaacgattttctttggaatg

SEQ ID NO: 8592 - DNA, 3000 bp, Unknown
  misc_feature (1)..( 3000): cDNA_ID_1839862_gDNA_ID_1971820_Annot_ID_58307 3000 nt of promoter + ATG
aaatagagaatatcaccaagcactcttagttttctctttaaccaatatccgataaatcgaggtttaatacaatgctttctgggatataacagaaacgtacgtttggtcatatccatcaggttgaaacactggatcccatccgaaatcagttggtcctctggctggaactatcttaccctaccacatcaatcacaagggacaaaagaatcaaactttgacaataaacaaacagagaaagaacaaaactaataaaagagtggttacaatgttgaacataccggagttttccccaaaaatgtaagaggttcagcacctggaccacgcgagaaagagaatgcgcacaatgcataagctgatttatcttcataggccatcagtaagttgttcagacctgtacatgagtcagaccaaacattgggtgttaccagtgtaagagataaatgaaacaaatgctgtagtgagagaaacaagtgctattacaaaccttcgtgaccaagcttctctagaaaccactttctgcaaatatagaaagaagattaaaagtgctacaaagaagaactctagagataacaacatagctccaatacagttagtcctaggctaattagatctaatatcgaccagaagtagattccaaaaaaaatatagaggccacttctacaaatcagtccagtaataaattatgaatcagaacatacaataagatgactccatttggctactcactcacaccacttagcaaccgcctagaagaactaagaacaggtattgatccaacccaaccagacaattttccaacacattaccactcaagaaagaggtcaacacaacaaagtggaactggagaaactctatccttcaaatgaagtttgacaagcacagaatcaggagaagaatgaagaaacaaaacttacatgtatggccctgaaaaatccaacataaaacgaaatcaacaaaaacttaaacactgtgtaaccatttgctgtacatggagtaaatgaaaaaaactagaatctaaaagccaatcataccaggaagccctttcaaagcattgaaacagagacatgtatcttccacaagcactggtccatccaccttctcatttacaatcaaaacactctttatatcagtttctactatccttagtcactaacttactattactagtccgtccacattcaaaagaaggaaacaaaaatgcaacagtacataagaagcaagcttacacataaacacaaatatgatgacttttgtaatcaattcaagtaatatatctgcagattagaaaaagctaaaagcttgtgaacctgaagagcagccaaacgagccttctctttggaaatatcctcaggctcaccttggagctcaggcactgcaaggaaatacacaatgagcctagtgaaaatgagaaacaaagtaatgtcaagagagataaatcgaaaagggtacgccgtacgcacaatcgagtttgagagacttgaaaggaatggaatttccgatgatagctttgacttcttcgagcttcttagcatttccagtcacaaacgtcaccggccgtggcaaaaccaccgctgctttcgccgccgccgccgccattgtctgtgtctcagtctcagatagcgaaagcaaagtcattttgttaatttttctttgcaaaaaatgggcttaagtccattttaatttaggcccattgaaacttatactcgttcgtccaaagtaaaattacgagtaaaccgatcattggtttaagtaaacccatttttcattcaattagggtccgcagcgattttgtataatcatgactgctaagcgttagccggacggtaaaagagggtctagcgcctagtaaaaaaattataattatataaaaattaatcgaagactagttttatgattatttaatgttttgaaaatatatttatctattataactaagaaatttatataatacttttttaaaaaattgtaattaaatatataaaaataagattttaggttaaatttataattattatgcaaattacgaacataagttgaacattttagattttatatgcaggaaaatataggcatttttagataaatgtttatatacataaggggaaagaaagtacatgtagtaattaaaaagtacataattagtttgcttgtctcaacttttcacatatccttttctagtaatgagaaaatcacttataacaattttttttctttcacaaaatacataaaactaattagctaatttaatttgttttatattgtcttccatgtagcaaaatgacaatgtcagattgaactacacagtgtcgatgcaagaactctctaatggtgcatgatttaatgaggaaaacaatcagacagtagaacctgtacgacaaccagactctcgtacactaccgcttctggccctaggaccaaaaaatatgcaagattctagttcatgtgttacttttacttgtcctcaatatctacttgagctttcgttctaaactacactatgtttgattgttttctaaaaactatagttttcttaagttttctaaaaagaccattgaaaaataatttcacattagtccatagaaaaatgcgtccatggaatattaaactgctgaccttatacacacttaagagattctctaccgttaagctacgataataatttaataatattcgtaacaaagtatatttatatactaacaaatatcactatttaagtaattaaaaacttatgcaataaattaaaaataacgaaattaaatttaaaaagttggctatttttttttacattattccccttccattttacaacattttgattttgtattgttttttaatttttattttaatcatacaaatgaaaaacaacgccctgaccaaagaagacccagctgtaccgggacaagattgcacatttggttcaactttaacctctccgtctccgagtagagaaataaagaaagagagagagactcatcaaaaacatttccaaaatcaaaatcc

SEQ ID NO: 8593 - DNA, 3000 bp, Unknown
  misc_feature (1)..( 3000): cDNA_ID_1820287_gDNA_ID_1971820_Annot_ID_58308 3000 nt of promoter + ATG
ttaagttataaatttgatctatacagctttactaactattcatgatttgcgacttctcacttagttcaacctatcacttagtgtctgataaacaactttcctgtgaatatttaccttcagttcctatgtgtttggatagttaaggtttgctacagttaaatatttgtatagggtgccttgtcaaaagtgtgcaaaaatgcttaggcagactgttatcacaatggtgtttatttcatatgcttagcatgactcattagtgacgcatacgaatatgatcactatgaaaagatccttttctcttcctgttttagtaaagtaattccgtttttgttgcatataaagctgcaaaatgaccttcctgatttcaacttgatactgttcaggacacagaagttttggaacaaatagaacgcgatgtgatgcgtactcatccagatatgcactttttctctggggattcagcagttgcaaaatctaatcaggttgggtgttggttttgctatagtttaaagcctttgggatgattaaaacatcagtatactgatagtttttcttgtctttttatacatgttttgcatgtctaggatgctttgaagaacattttgactattttcgcaaagttgaatcctggcatcagatatgtacaagggatgaatgagatattggcacctattttctacatcttcaaaaatgacccggataaaggaaatgcagtaagtacttgtccttgctaatgtaccatttttttcttattttatttgtacacatattgttctacctcttttagttctttttgggtaacacaccactagttctcctcgtttgcttaacactggcattttaagttatgcaggcatacgctgaatcagatgcatttttctgttttgttgaattgatgagtgggtttcgagataatttctgtcaacaactagataacagtgttgtgggtatacgttacactataacaagactgtcgttgctcttgaagcatcatgatgaagaactttggcgtcatttagaagtcacaaccaaagtaagatatttcacacaaccttggctgatgagacgtcttgctatattcattagttatgtctctgtagaatattttgccagtatgtattgctactggttcagagctatgtgttgcatgaatgttgtgctgaaaaattcttaatccaccttaactactagattgataacaaccaaaactgtaccatcgctttcaaaatgtttaagttttcaagtttctgtatttctgtttaaatgtttcagcattttgacatttgagacctgtgtcaattttcagataaacccgcaattctatgcattcagatggatcacactcctattgactcaagaattcaatttcgtggaaagccttcacatctgggacacactcttaagcgacccggaaggtcctcaggtagtattcagcttactactattcagcttctgtaagttgtgaacgagatcaatttcaaatgttgcatttttataagtcattaaacgttcaaatacctctgagcaggtgggttttaggacagtaaaacatatacacgtagagatttgtatatgttatagtcctagagattggttttggtttgcatcttactgtaaaaaatttaaattagcagaattgagttaacgggcgcttgttatcttgcgagatatgaaaaagcttacaagtgtaactgaattttattttgcaggaaacactactgcggatatgctgtgcaatgttaattctagttcgaaggcgtttgcttgctggagattttacgtcgaacctcaaacttcttcagaactatcctcctacaaacatcagtcacatgctctatgtggcagacaaattacgcactaaataaaaatcttcaggttaataatatttcactccctactcctttataaaactctgcaactttcgtctgtacattattgtgtaaggtaattttagctgcatgagaaaatctcagatcaaactttgcttcagtgttaaagactatgatgttttttgtgtgtaacagagttattaatagagagagggttttaggatcggtctttcttatatttttgctttgatctattcacgaaagtttcttggtttgatttggtaaattattgattaaaaataaccgtaaagcttaatcaacaagtagttgctgataaatatttgtacaaagtcaaaactgttttttcattttttctttccgtgaaggagaatttacttgcgaagaaacaaagaaatgagatgtggaacaatttcactagtcttattcttgattatgatccttctttatccatactcttatctcttcttcctcttcgcttcttttctggtttgctttcttcttgctgcttattatcttctttttggagaattctaaaactgcgtccaagactcacaaatggatcggtgcgttgctcaatttggtacatgttcattggtcgaattctctgttcgaaaacttgcaatttctcataattttctaatacaatgtgacctctctttgtatttttatttgtatttttttgtattcttctcatcttatattcttatctacgacatagtcaacattataaaactatgtatcaaatattaatttcaaagtaactacaccataatccagttctgttaaacccgtccgttttggtgatataaaacaataattgttttttgtctcgaaccaattcactatataaacatcatatacctcttcaaggggggttaccaaccaaacagcttgacacgaaattgtctcgaaccaatgaacccaaacaaaaattgtcctggaaatccggatttccggtttactcaattgaaacaaaaaccggataaacctcaccctaaaccctaaccctccgaaacaaacagagagacacaaacccactctcagcgtatataaacagaactcaagacagagacgctcttaaaccctttcttcttcaacccataccgttttctttcttcttctattttgtcacttttttcctcgccgacga

SEQ ID NO: 8594 - DNA, 3000 bp, Unknown
  misc_feature (1)..( 3000): cDNA_ID_1820283_gDNA_ID_1971820_Annot_ID_58309 3000 nt of promoter + ATG
aacttatggccattgaaggcaaggtaagcgttgaaattatgtctatatcctgcagagcttctatgttcactgtcaatagcgtatagatatatcttttgatgtcttgtagatcaatgcatttattcactgcttcgttggggctagaagaattgtgaccctgcatgatttggaagtggcaatatgccggaacgagtttgttgattctttcgatgatctggaattgggacctttgctgcagcatccactggttttgctgtattttccatcgatatccagttctactggaccagttaagatcactagtgaggagataatatcatttcttgatagctatctgcacacttatatgacagaagatgttaagctcgatgaatttctgaattttgttgcaagtcaaaagtcagttacaagcaaggaaaagcttggtgtgcgtattcagagcttgcggtatgatattgttcttttttggattatctaaacttggttatgagttaaataattttgatattacagtaaggttggtattaatgttggatctggttgttcttagtatgaactgcattagctgattttatgtgatttaatgcatttttataggatgtatgtatctttcattctagacgcgaagagacaagaaggtgaaacactgaaagtcttactgactgagctgcatcagaagtatcacatcccctcatcaaagaaacaacagcgagataaatctctaactgtctctgagcgagctgactcatttgctttacatcataaggattattgtggcaagcatataagatttgattcttcaagctcagatgaaaatgataatgtttatgaggttagaaatcttaatagttctgaccatatcaatagttgtccatatccatctgttgcggaagagatgaagcgtcttgggggctccaataagaaaaggaagggtgaaagacgtaatcatgaaaaatctgattcctccaaactgcttagaaaatccccctctaaattacaaggacatgcgaaacaagagatacctaaattggctgatgattctgaagctaagaaggttttcagtgtcgatgaggctgattttacactttctgaaggagatttaagattgttcatttcaacttggaaggacacatgtaaagagctaagcatttcaacggtaagttcatgttgagattgtatgactgttttaatctgagagtgaattatcttaagtgaggtgtgagggggcttcatgtttgtttattttctaatactctcttttattattgtagtttgtcgagaaaatgttgtctttttacaacttggggggctctgaaggaagagctcagattaaaagagctaaagcgatgtcatcatttccgtttgttggattactaaatgtcgctgtgagtggtcatactacttttgtttaaagtgttttgcatttttcttgttttcttgctttcattaattcaattgaagaattttgtcaaaaatctctgttaatgcctcctatttacttttgttcatgccattcacattaagtgtacttggaggtcaaatcctcctaatctgacgtcttttttttctttgcaacacttgttttttctctctctgtgaaatagctgttttctggtatctcctaatttggatagaacagatggatgtttggttactactttttttttttaatccatcaaatgtttatgaaaaataactgcacatatattttcaaagtgaaggatgcgagattacgtttgctatatatttacatccatactcattttttgcttcacctttccgtttttactttttttttctttacccatttttttcccctcttattttgctttgtgttgcttttcccagtttgaaaagattttttgtagtttcaccgtgtaacacaggctcactattttctatgatatctccttttaaattctgaagaaatgctgaatttaaaagttagacgattttcactcatacttttacagtgttttaagttgttgctcttgttgtttttctatctctgctcttgaactaagacttagcacccagttgcaaagtcttggagttgagctcagcaaatgtggaaacttccctagttcggctttgctctttgatacatcacaatgtcactgaggcaagctggataaggacaaaaatactacagactgtggatcattcaaaactcgtgccccttgtcacctccagacccccacttattaaattaattaatggaaaccttccaacatctcatgttgcagatgttgctattatgaaaattcctttgttattcctgtttacacctgaaatttaacattgcatttgtagcatctcaatttttttacctggttctgtgtcttgtgcaaaaatcttgttgttcaatgtttgagaagtgtctgcattgtcgttattcgattctctttatttattcctggcaatcagaagaaaataaaaccacaacagtgcaagagtctcttaggtgcagtgggaaatttgtttcaggcaatagcatctcgtgtttcttatttatgatcaattcatttcatttactttgctgattgaaaaatttgcacatgtttgctgtgattgagtagtaactttattttaccccttctattcaggagtttctttatggactttgtttacttcgttttttaatttggtttgtttactataataaagaaatatgatgcattttcaaatgtaggatatagattagaaaattgaaatgtgttacaccttgtttggcgaaagagtgctgttttgtgttgttctgaaaggctatacctttttatttacgttgagcaaaaaaaaagtgaaaatattctctgttaaattgaaagctaacttgccctggaagcatttcatattatgtttaattgtaataataaatatatgaacaaaaagaaatattgatattctctcatttgcttgcatggattgggttctaacttgcttacagatgagcttcctatacccattgtctcttatttttgctttattgtttttcttcct

SEQ ID NO: 8595 - DNA, 3000 bp, Unknown
  misc_feature (1)..( 3000): cDNA_ID_3089956_gDNA_ID_1971820_Annot_ID_58310 3000 nt of promoter + ATG
tgatgatgtttactggaatgattctgctggcgttttagatgagataaaagagatcagttcgcagatcagcagtgttgtggaaccattgcgtagaaaaacattgggcaatatctatccaggtctacatgacttttttgtgaatgggtgtggagtacctgagacgccttcgtttcaagagtaccttaaaattctagggcagtttgcacataatgtgtcaccctcatctgccgccaaggctgtaagtgatttacttaacttatcagtcttgtcctgtttatcttcactctattcacttctttgctaaagtgtttaatttatgtctaggtcttcaaaattttcctgaagtggagtgatgacttgaactctggcaaatcttccgaagatgttattcattttaaagagagactttcagaactggagtacactgtactccctactgaaaatgataagtgggtttccttgcactcctcgtttggtctcgtatgttggtgtgataatgagaagttaaagaagagatttaaaaacaaggataaaattgagtttattagctttggggaaaatgatgacgaagggcaagaagtgcttcaaacaaaagtgtctgggctcatgcacagtttgggcattccaagtatttctgaggtaactaatcttctccttcacaaaaataatttgaaatgcaagccacttagttatacatgcaaagtgcctcttatggacattagaattctgatggacaagagtaggcctttcttgaactgtgttgatgcactaactctaaaaccatccgcagaaccatcatcttgtagcttatatacagggtagaactgatatatgtgtctccgtttctactataacactaccgtttctactataacactagtttccatggcctcgattccaattcactctgtggtgtttatgtaattgtttcaggtggtaaagcgtgaagcgaaatatgaaggtttgcaagataatactgtaacagtgtcacttgttaactgggctctgccttatgcacagcggtatatctttactcttcatcatgagaagtatacccaaacaaaaaagacagtccatagtcaagtcaaacgtctacaagtctttgttgttgataagttatcctataggaatgtcataccgcaatatggcatcagctctaaaaaggagttcaaatgcagttctcttctgcaggtatgtcttctttcgttctgtttcttgcgacaatttaacctaaatattttgggattgtatgggctgtgacattgtgctttgaggctatttgaaactcatctctgtttatatgcaagtagacttttgccatatcctcttgactgggacaatggttttgtaaaaatgtggttttactgatattatatgtttatttatgttgtcttcaggataaagctctgtacacaacaccaagtctggattcccattccttgttcatggaactgtctcgtttgtttttcaacggagtgcctgatctgcatttggcaaatttccttcacttgatcaaaacaatggcagaatctgggttgagcgaggagcaaatggaatccttcattctgaacagtcagaaagttcatcaggttcctgatggtgaagagatctggtccctcaaatctgctgttaaagcgaagaagaaagctggaataagcttgagctggttaccttcaagttctaaaacaagacatggttctagcaagaccaacactgatgattctaaacaagagctggacactagtagcagcaaagaggatgtaacagaggctcttgaagaaaaaataccgattgagatgaccaataccaacttggtttctggatatgataattgtgcaggcacaagttcacgagctagtgagccaaacccgttgcattctatgcatatgattagtggctcaacctcagggaatcaggctgctatgcatctcaatccaaatcttcctcatgaatggaacaattccttcacagctaatttcagcgatagagaccagcttcatacaggcacaccttgggctgcacaagcgcaacagaccggtagaaaaggtgaagaaatcgcttacagatactttgttgcaaaatacggcaatgaggcactggttaaatgggttaacgaccagagcgaaaccggtttaccttacgacctcatgatcgaaaaccgaggtggtaagaaagagtacgtggaggtgaaagcaacggtatcgacacggaaagactatttcaacttgacagtgagggaatggcaatttgcaaatgagaaaggagagagttacataatagctcatgttttgttaggaaacagtaatgcaatcctcacacagcatagaaacccggtcaagttatgccaagaaggtcatctccggttattggttctcatgcccaaccagagaaacgaggtcaacgttacattttaaacctcaatcaaataacacaatgttactatttaatattattaattttgaaattcaattctttcaaacggagatgggtattttaacagaacccaaccaaacgagaatccatgcataaactgacccaataacacaacctgtttattaacctatcaattaaataaagaaaatagttagttattattactccttccatttcaaattagattttgttttagattagttgtcattttatatttataatataaattagaaacaaaattttcagtttaattcctacttttgaaatgtacaggatattaaccaatcaaaatcattgccaataaaaagcatcccaatttcagttgttaactagtaacaataatcaagttcatcgatggagagatgctaactctatataagcagataaagtgggctaacacttctcatcatctctttataaacaagtattgataaacaacaagttctttttttcttccatatacctaaacaaaagaataagatgacaagcgttgtttttgcgtttaaagttttgtgtgtgtctttcttgttcattgttgttgcaagtcgtcctactatccgaccaaaa

SEQ ID NO: 8596 - DNA, 3000 bp, Unknown
  misc_feature (1)..( 3000): cDNA_ID_3089952_gDNA_ID_1971820_Annot_ID_176134 3000 nt of promoter + ATG
tcctaaaacgggtaaggtggtagagttagacctcatgaacagttttcttaatggtcctttgagatatgatagtagcttgtttagactacaacatcttcataatctggatcttggctcgaataatttttcgggtattctaccggattccataggcagcctcaaatatttgagggttttgagtcttggtgattgtaatctctttggaaagattccttcttcacttggaaatcttacttatctcactaatcttgatctttctgttaatgatttcaccggggagctaccggattcgatgggacatttaaacaagctaacagagttgcatcttggatcggccaagctcagtgggaactttcctagtatgctactcaatttgagcgagcttacgttgatcgaccttggttctaaccagttcggaggtatgctcccatctaatatgagtagcctctctaaattggtgtattttgggattgatagaaattcattttccggatctatcccatcgtctctcttcatgctaccttcattgacctctcttgttttgggaagaaacgacttcaacggtcctcttgactttggtaatatctcttcaccatctaatcttggagttttgtcccttctagaaaacaatttcaatgggccaatcccggagtctatatcgaaactagttggtctcttttatcttgacctctctttatggaacacaaagagaggcatggtcgatttcaacactttcttgcatctcaagtcacttacgttccttgacctctcttatattaatacaagaagcatggttgacataagtatattctcacctctcttgtcacttggttatttggatctttccgggattaatttgaagatcagttcaactctaagtcttccctcacccatgggcaccttgattttatcatcttgcaatattcctgagttccccaattttctagaaaaccaaaccactttgtattatttagacatctctgccaataaaattggaggccaagtaccacaatggttgtggagtctaccggagttgcagtatgttaacatttctcaaaattctttcagtggctttgaaggaccagcagatgttattcaaagatgtggagaattacttatgcttgacataagttcaaacacattccaagatccgtttcctttgttaccaaactcgacaacgatctttttaggctctgataatcggttttcgggagagattcctaagactatatgcaaattggtttctcttgatacacttgttttatccaacaacaacttcaacggctccattcctcggtgtttcgagaagtttaatactactctttcggttttgcatcttcggaataacaacttatccggtgagtttccagaggaatctatcagtgatcacttgagatcacttgacgttggtcgcaaccggttatcaggagaacttcccaagtctttgatcaactgcactcgtctcgagtttctgaacgtggaagacaacataatcaatgacaagtttccattctggttgagaatgttgcccaaacttcagatttttgtccttcgttctaacgagtttcatggtccaatatcttctcttggagattctttgagcttccccaagctgcgaatctttgacatttcggaaaaccgcttcaatggagtccttcgatcagatttctttgcgggttggagtgcaatgtcatcagccgtagacatcgtagatattatgccgagtaggtatgctggacgtgactcaggaaactattataactcagtgactatgacggtcaaaggatcgataatagagttggttgggagtgttttcacgatttacaaaaccatcgatgtctccggaaacagattcgaaggacgtattcccgagtcaatcggtttacttaaagaactgattgtgctcaatatgtcaaacaacggttgaatttgactgatctcgaatcattggatctttctaaaaacagattatccggtgaaatcccaccagagctcgggaaactcacgtttctagcacaaatgaacttctcctacaacatgcttgaaggtccaattccacaaggcactcagattcaaagccagaatagttcttcattcgcagagaatctcgggctctgcggtgttcctctccaagaaacttgcgggggagaagaagaagaagaaaaagaagcaacaaagcaagagcaagatgaagaaaaagatcaagtattgagctggatcgcagctgcaataggctacgtacctggtgttgtgtgtggactcaccattggtcacattctcacttcgtataaacgtgactggttcatgaaaagctttcagtattttgcttaataaaagcatgacctcttaggaggatgatgcccccttgttataatgcgtgtactctaatgttttgagttgtataatgagtgtgtgtttttttaacgagggaacaaaagtttaattgattgattcagttggcgtttgataataattgttactccaaatgttcaggagaactaatatcattcctttagctgtatttgttgttttcatttctacgtgaattagaagaaataagacagaagctttgtttaatttcagagaataaaacagaggaggtcatgcagaggaaaagtcttaacgaaaacttggaagtgaagaaatattaaagacaaagatttggagaccaaggaaatatactattaatattagttgattaattaagaaaattttaaagatataacggaagaataaaaaaattgatttcgcaaaggcaaagacttgttccgtgtacgagggttcatcgtcactttcactgtcactctctcaacccactaagagaccttgatttttgcagtgtttgaatgatttaacccacaccacacggctgggataattggtgtttgtggaaaaatcttatcttttaaagtcaagatctaatttactccacagatgtgagacaatacgttgatcaattcgtttcacagaaagaaaaaaaaaatcatagaaaaaaatatg

SEQ ID NO: 8597 - DNA, 3000 bp, Unknown
  misc_feature (1)..( 3000): cDNA_ID_3593857_gDNA_ID_1971820_Annot_ID_176130 3000 nt of promoter + ATG
tgtgtgttatggtgatcattttccgtagcgtggatgtgatttaagagaagcagacaagtgaagatgggacatgagagtttggtcgattttttaatttttatatgaatactaaaattgactttccctaactaaaacaaacttccacgtctcttctactctttttccatgtgatcttcttctttcacacatttggggctatcatttattcaagacactcgcctaagtaccactttaacccttctttgaccacttgacaaaactcaaaaggggtctcaggatgagactagtgcccataaaaataaaaatcggagaaccgtacgtactttggcccgacctgttttgtgtaaaggaaaatcatcgtatttttcttgtctcttgggtagatattttcagatattttgaatcggatcttgggcattaatgcattgaaaactatgtgttttggaagttaggtttggatactacgagtcttttgataggtacttcgtatacgatatataccttaggatgttcggatatcttgatttcctattagatattaatcagataacatataacataaccgatttttttatgaatactagtgttcagtgttcacgtttgcatgtgaataggattttggtagttaggtatggatactccaagttggatacttgctatacgatcttaatatcttgatttcagactagatatgaatcagataacatatacggaacataaaatgcttataatgttcacgtgtacaacgtttacgtcaataacttcaccactcataccttagttacttggaacacgtaaaaaccaacattgaaaagtcaatatcatcacaatatagatagaattatgtagcgttaacatgcattgctatggttgctgttacaacaaattctattaccgttattaatgttagtttaaatgtggaccattgattcagccgttaagtaaaaaaataaaatatcggtgtcttgacaatagcagctgaagacagaactaatgtagccattggccacatgcatgtaggacactcattttttctcaacaccccaacatttattaaactacatcttcctaaaatccaaacgctttaactaatctgtttgtcaaaaccatgtccttgtaggtcgcactcacaattcgtagacatattattttcaataaaacctttctaactccaccaatatatatagacccacatttccctttggctcataaaccaaactcaaagcttctcttatcatcaaacaagatcaagatatcttaactttagccattaattcaaagtttttttttctttctaatactcgaaatggctttcttaaggagttttttcgctaccaagcatatcattcgccggtcttttactacggaatcattatcaacgcctaaagggttctttgctgtgtatgttggagaaaatctgaagaagaagagatatcttgttccggtttgttacttgaacaagccatctttccaagctttgcttaggaaagcagaagaagagttcggttttaatcatccaacgggcggtttgagtttaccatgcgacgaagctttcttcttcactgtcacttctcagattcgttaatcccatacaataattaaagtcttttttacattctcttatttatagaagaaaatacacattgtacatactatacttttatatacatactgatgagaagaataattcaacgaacatcttttgctttcgttttctatatttacttagtccgtaactccatttatcagccacgaaaggcttaaatattattataggctctccactttagtattttcatcaaggctagttatactctctgagtttagccaaatcggaaatacaaacaaacccgctaaagaatatatttcaaaccgctaaaaagtaaaacaacatttgtaatgtctaatgttattcaatcatgagattttttttaaaaaagttttttttaaactttggtgttattatttaaaaatgttactaaaatcatcgttctctgtgtcgaaatctttgtgtgaagtttaatcattaaaaaaaaatctactagagatgaagttttaacgatgaagaaaatgatatgatttatcatatttatagagatttaacataaatattcctataattttgttttatacgaaataaattatacaaagaatcttaccactaacgagtgcctttaaacacttctttgacatgttgtcaaatgttagcttgtgattatagacatgattactctattgcaatttgtaggtaaataattaaacaattaaatttgcctccacatttttccctctctgacaagtataccttggaagattctgcctcttagtcatatgatagatattcttcaaccgttgtttagagaattggtacataactctcttattttaaccatagtgttatccatatgtagcatttgaaatatatgttgtgaaatgatataataacagaaagatgaagaagtccaacaatatgaaaaaagttcgcttcaagtttgggctgatagacgtggtaaatctgttttgtttaacataaaagatagacctagtcacctagcaaagagtttctataggacgtggtcatgttgtaaaacaaaagaaaatgatttaggagaaagtttccatgtaatataggacgtggtcatgttgtattttttttttttgttaatggtaatttcctaattaatatagtcactttactttagtttcacaaaagtttaataattcactaaactatagtaaagctatttagattccggtttaattccatccataccagtaagatcaatatcttgcaaatgcaattcagttatcaaaccggaaagtgaccaactttctgtctggtctaaacttaaccggatctatctgaggccgccgttacttaggtttaccatcagctaaagagcttctcttttctcagcttctctgattcgtctttctcctctgtctctgactcttcgcgaaaaccctaattagctttgtggtcttgttgttttcgccatg

SEQ ID NO: 8598 - DNA, 3000 bp, Unknown
  misc_feature (1)..( 3000): cDNA_ID_1807990_gDNA_ID_1971820_Annot_ID_176129 3000 nt of promoter + ATG
taaaaactctagaatgatagaaaggtgcatctggcttactattattggtgtgcaagtgagagatacctgctttgtgatactcttgacaactagggcaagacttttcttatttgtctttgatgtttcaataccttactattgtatgttttgtgaaggttacgggtctgtcattcctgatgctcatgatgctgaatctcattctttaacaaaatcactggcggaaaaggttgaaaagtttgtggcagagtatgttgaagccatggaaaaggtgaggaatgttatatgaaccttggcgtggtatggctatctgagtttctgtgcctgggtttttaggttcttaataaatcccctgttcatttgatgtaggttaagctcaagcagggactgaaaactgctatgctgatttcaagcgaagggaactattacttgcaggttctattctcattaacaaactagatattagctttgttgcatattaccaactatactgttttcttgtgtccatgtaggcaagccaattttggaaactttacaaggaagataaacctttgtgtgcagttgttataagaactgctgctggtttagtacaccttcttgctcaattgttagaacctttcatgccatccttttcttgtgaggtcagtttgattgtttgtttggtaaattttgtttctatttagttgtagtagaatgccaagcgtgattattgctgttattgcattttgtaggtatttaaacagctaaatttgcctccacaattttctctctccgacgagaggggagaggtattactagcaagtagaccatgggatattctgcctcctagccacaggataggcacccctcaacctttgttcaaggagttggtacgtagctctctgattttatcgatagaaagccagacttgttgtatgttataatgccatgtagcattttatttatattgaaacaatatgatcacaggaaaacgacgaagtggcacggtacagagaaaagtttgctggaagtcagtctgatagacgtgctagggatgaagcagcaaatttggcggatcaacttaataaaacaaaactttcaggttctctattatcattctcaaaatactgttttacattctttaggcttttagtaacttgattatgtactgaactgctgtttattctcccagatgccaagaaacaaaaggcatcatcaaaaggcggaggaaaacccaaacctcaaccagctgctgatcgtgaaataactatggcaagacttgatatccgagttggtaaaattgtgaaggctgagaaacatcccaaggcagatgcattgtatgtagaagaaattgatgttgggggtggtgaaattcgcactgttgtcagtggactggtcaaatatatacctcttgaggaaatgcaggtttgttcaatcaacctagtcatttgtttccttcccgatatcagtatgtaatatacattccaattgatctaatattgtttctggacagaatcgtatggtttgtgttctttgcaacttgaaaccggcgaaaatgagggatattgtgtcacaagcaatggttcttgcagcttccagtagtgatggaagcaaggtagagttcatacgagtctttgacctgtttgtagttctgctaaattcatttcgattgtatataacaaattgtttttgctggaaacatttcaggtggagttagttgagccccctaaaactgctaatattggagagcgagttacatttcccgggtttgaaggcgagccagacgatgtcttaaacccaaagaagaaagtatgggagacgcttttggttgatctaaacacaaaagagaatctagttgcttgctacaaagatgtgcccttcactacatctgcaggtgtatgcaaagtttcatccatcagcaatggcacgatccggtaaaagcttacttgagccataagcaaactaatattctccatttctatctttctctgtaagagaaacgaaattcggagattttcatttgaaaatttgattctaattacaaacatgttcttgtaaacttaaagcttggtacaattgttgttattgattgatgttgtgagaaacattcagctttttaaaattgggcccagacgcaaagcaaccacacaacttacgatttcaaatcttttatggtactagttgaggttttgtgaaggttgatgtttttcttaattttttaatattctagttctcgtgtttaaaaatagtcgcatcattctttttttctggcggttcgtaattgtgttcccttgtaatactgtatagggttgtatacaatcgaacgtttgaagtgatcatgtaattcaatcataaatttaaatctttggttattgaaaacattttaagcattctatttttattgacctttaagagattttggcattttattggcttgagttcactgagcgtttccaagttaccaactacaccaacccttcggattcaaatctgtgttgatgttttgcgattccatatcattactatatcaacgagttgatttttttttttggtcaaccagcaagttgatttttgaaaaactcttactctacaatttgcgactgacgactgtttagaattttgggtacgtaccaataatccaatatgttatattttcgatatagaaatggattgtgattgatataagtcttgggttcgtcgaacaaagttaaacaaagatttgtgtaaataacaaatagataaaaacaagaatgagtgtgactgcatgaaccactaaaacatatacgacgttagagggatgttgggtaggtgaaggtgtttattaattctaacacgtgaggtttcgtaagtaggtataagggagtaaccatttgattaaaaatttgatgtcggttaagttcggttttagtatttggtttagtttggttaagaaaaaaataagaaacgtagtccatatataattcttatatattaaggagctttgctgttcaatgtaacactcaaaagtagtaacaactaagaatg

SEQ ID NO: 8599 - DNA, 3000 bp, Unknown
  misc_feature (1)..( 3000): cDNA_ID_3089956_gDNA_ID_1971820_Annot_ID_176128 3000 nt of promoter + ATG
aaagcttcatactcttccgtctgtgtttgtaccacatggaattgcaagtaggcagaatgatatgatatcgggaatattcttgtcacttgatgatgtttactggaatgattctgctggcgttttagatgagataaaagagatcagttcgcagatcagcagtgttgtggaaccattgcgtagaaaaacattgggcaatatctatccaggtctacatgacttttttgtgaatgggtgtggagtacctgagacgccttcgtttcaagagtaccttaaaattctagggcagtttgcacataatgtgtcaccctcatctgccgccaaggctgtaagtgatttacttaacttatcagtcttgtcctgtttatcttcactctattcacttctttgctaaagtgtttaatttatgtctaggtcttcaaaattttcctgaagtggagtgatgacttgaactctggcaaatcttccgaagatgttattcattttaaagagagactttcagaactggagtacactgtactccctactgaaaatgataagtgggtttccttgcactcctcgtttggtctcgtatgttggtgtgataatgagaagttaaagaagagatttaaaaacaaggataaaattgagtttattagctttggggaaaatgatgacgaagggcaagaagtgcttcaaacaaaagtgtctgggctcatgcacagtttgggcattccaagtatttctgaggtaactaatcttctccttcacaaaaataatttgaaatgcaagccacttagttatacatgcaaagtgcctcttatggacattagaattctgatggacaagagtaggcctttcttgaactgtgttgatgcactaactctaaaaccatccgcagaaccatcatcttgtagcttatatacagggtagaactgatatatgtgtctccgtttctactataacactaccgtttctactataacactagtttccatggcctcgattccaattcactctgtggtgtttatgtaattgtttcaggtggtaaagcgtgaagcgaaatatgaaggtttgcaagataatactgtaacagtgtcacttgttaactgggctctgccttatgcacagcggtatatctttactcttcatcatgagaagtatacccaaacaaaaaagacagtccatagtcaagtcaaacgtctacaagtctttgttgttgataagttatcctataggaatgtcataccgcaatatggcatcagctctaaaaaggagttcaaatgcagttctcttctgcaggtatgtcttctttcgttctgtttcttgcgacaatttaacctaaatattttgggattgtatgggctgtgacattgtgctttgaggctatttgaaactcatctctgtttatatgcaagtagacttttgccatatcctcttgactgggacaatggttttgtaaaaatgtggttttactgatattatatgtttatttatgttgtcttcaggataaagctctgtacacaacaccaagtctggattcccattccttgttcatggaactgtctcgtttgtttttcaacggagtgcctgatctgcatttggcaaatttccttcacttgatcaaaacaatggcagaatctgggttgagcgaggagcaaatggaatccttcattctgaacagtcagaaagttcatcaggttcctgatggtgaagagatctggtccctcaaatctgctgttaaagcgaagaagaaagctggaataagcttgagctggttaccttcaagttctaaaacaagacatggttctagcaagaccaacactgatgattctaaacaagagctggacactagtagcagcaaagaggatgtaacagaggctcttgaagaaaaaataccgattgagatgaccaataccaacttggtttctggatatgataattgtgcaggcacaagttcacgagctagtgagccaaacccgttgcattctatgcatatgattagtggctcaacctcagggaatcaggctgctatgcatctcaatccaaatcttcctcatgaatggaacaattccttcacagctaatttcagcgatagagaccagcttcatacaggcacaccttgggctgcacaagcgcaacagaccggtagaaaaggtgaagaaatcgcttacagatactttgttgcaaaatacggcaatgaggcactggttaaatgggttaacgaccagagcgaaaccggtttaccttacgacctcatgatcgaaaaccgaggtggtaagaaagagtacgtggaggtgaaagcaacggtatcgacacggaaagactatttcaacttgacagtgagggaatggcaatttgcaaatgagaaaggagagagttacataatagctcatgttttgttaggaaacagtaatgcaatcctcacacagcatagaaacccggtcaagttatgccaagaaggtcatctccggttattggttctcatgcccaaccagagaaacgaggtcaacgttacattttaaacctcaatcaaataacacaatgttactatttaatattattaattttgaaattcaattctttcaaacggagatgggtattttaacagaacccaaccaaacgagaatccatgcataaactgacccaataacacaacctgtttattaacctatcaattaaataaagaaaatagttagttattattactccttccatttcaaattagattttgttttagattagttgtcattttatatttataatataaattagaaacaaaattttcagtttaattcctacttttgaaatgtacaggatattaaccaatcaaaatcattgccaataaaaagcatcccaatttcagttgttaactagtaacaataatcaagttcatcgatggagagatgctaactctatataagcagataaagtgggctaacacttctcatcatctctttataaacaagtattgataaacaacaagttctttttttcttccatatacctaaacaaaagaataag

SEQ ID NO: 8600 - DNA, 3000 bp, Unknown; identical to SEQ ID NO: 8594
  misc_feature (1)..( 3000): cDNA_ID_2177531_gDNA_ID_1971820_Annot_ID_176127 3000 nt of promoter + ATG

SEQ ID NO: 8601 - DNA, 3000 bp, Unknown; identical to SEQ ID NO: 8592
  misc_feature (1)..( 3000): cDNA_ID_1839862_gDNA_ID_1971820_Annot_ID_176124 3000 nt of promoter + ATG

SEQ ID NO: 8602 - DNA, 3000 bp, Unknown
  misc_feature (1)..( 3000): cDNA_ID_1397711_gDNA_ID_1971820_Annot_ID_176123 3000 nt of promoter + ATG
ttatccattttccttgttacttctgactaactagccacaaaaatatatagaaaccaggttaattttaaacagaaaacaataacggaacatgaaaaaaggaagaattatcatccagattacataagcacctctacaatgaccgaattctttatcattaactactatatgttttaatatgacctttaggaggtatcacatgaccagtggccctagatcagtcttcttagtcaaatgcatgacaccatttagctgacatgatgttatacgtacaagcttctggatcaaaataataaaataaaataaaaaccatcataacaccatcatgacaccatcaccgaattctactaggctagcagaacgcctaatgacagtcatcattttctattggcagtgcgttttcatcataacacccttagctactggcaacagacatgccagtatgccactatgttaacttcattgctcatttctctccggttaacagaaatgcgactgtgtctaatcgatcaatctagctagctattactttacaagaatggcatccactctaatcagaaatttgatggaatatcccgaaggggtgatcaaaagagactgccgattaagccaattgtgtaactctcttcacaaaccaatcaatacaatgttggagtatcaaatcaccaaaacggacttacagggttcatcagaagctcctctttgaattgcttgtactgagaccttttcttagctaactcagaagaccacagagagcgatccggtgacaaataatccaacaaaagctgtcaaattcaagaaaacagcatgaagcataaactgacagaattagtaatcggagaagaaactgtatcttcttcatcttgcttaaattgcattctttttttttttttttttttgaacaccaattagtaatcggagaagaaactgtatcttcttcatcttgcttaaattgtaccatttccatacactcttaaggatttcatgaaaaccacaagcaagttcaaagaaaattcaacaactcaaaatagatttgcattactaaaagcacagtaacaataatgatccataagctagactgaaactatgcgaatggcgttaccttccaaacaatggatcgaattccagcatcatcaggtagaccttgtgaagctatcttcctcaattccttcaagtctatcaccttcttcgataactgaaaaaatcaagatgtaagtatatcacaaagagaaatcaatcaaaatgcatagagcatgaggttgattttaagcaactaacctcagccacgacctgcgcttttcgagaaacatcttcaacagaagaaactgcgggagtttcaattccagcaccatcgttaccactcccattctgcaaatcgttaatctcagatttggaaggaggacgaacaggaagaggaggagctggtgcggtggaaatcgcggagggagaggaagaaaaaggaggacgctcgacgatcggaggagatggaggggtgatggaagtggcggcaggattgcggaggtggcgatcgtcgatgggaggagaggaggaccagagagaactgttgagccactctgggatacctttcttggccatggattttgattttggaaatgtttttgatgagtctctctctctttctttatttctctactcggagacggagaggttaaagttgaaccaaatgtgcaatcttgtcccggtacagctgggtcttctttggtcagggcgttgtttttcatttgtatgattaaaataaaaattaaaaaacaatacaaaatcaaaatgttgtaaaatggaaggggaataatgtaaaaaaaaatagccaactttttaaatttaatttcgttatttttaatttattgcataagtttttaattacttaaatagtgatatttgttagtatataaatatactttgttacgaatattattaaattattatcgtagcttaacggtagagaatctcttaagtgtgtataaggtcagcagtttaatattccatggacgcatttttctatggactaatgtgaaattatttttcaatggtctttttagaaaacttaagaaaactatagtttttagaaaacaatcaaacatagtgtagtttagaacgaaagctcaagtagatattgaggacaagtaaaagtaacacatgaactagaatcttgcatattttttggtcctagggccagaagcggtagtgtacgagagtctggttgtcgtacaggttctactgtctgattgttttcctcattaaatcatgcaccattagagagttcttgcatcgacactgtgtagttcaatctgacattgtcattttgctacatggaagacaatataaaacaaattaaattagctaattagttttatgtattttgtgaaagaaaaaaaattgttataagtgattttctcattactagaaaaggatatgtgaaaagttgagacaagcaaactaattatgtactttttaattactacatgtactttctttccccttatgtatataaacatttatctaaaaatgcctatattttcctgcatataaaatctaaaatgttcaacttatgttcgtaatttgcataataattataaatttaacctaaaatcttatttttatatatttaattacaattttttaaaaaagtattatataaatttcttagttataatagataaatatattttcaaaacattaaataatcataaaactagtcttcgattaatttttatataattataatttttttactaggcgctagaccctcttttaccgtccggctaacgcttagcagtcatgattatacaaaatcgctgcggaccctaattgaatgaaaaatgggtttacttaaaccaatgatcggtttactcgtaattttactttggacgaacgagtataagtttcaatgggcctaaattaaaatggacttaagcccattttttgcaaagaaaaattaacaaaatgactttgctttcgctatctgagactgagacacagacaatg

SEQ ID NO: 8603 - DNA, 3000 bp, Unknown; identical to SEQ ID NO: 8590
  misc_feature (1)..( 3000): cDNA_ID_3089968_gDNA_ID_1971820_Annot_ID_176117 3000 nt of promoter + ATG

SEQ ID NO: 8604 - DNA, 3000 bp, Unknown
  misc_feature (1)..( 3000): cDNA_ID_3089948_gDNA_ID_1971820_Annot_ID_176145 3000 nt of promoter + ATG
aagagtatatcccttatttattaggtagcttgcaaggcaagcagcattagctttcacctgttttgcataaactttgaagctaggagccataacctgcttcaacgcaacagctagagcaccaatcttgttattgtgaggaccactttgaagcgcagggaataccgcagagttgatttttgcgtcgaaatcgtagacttcaccctcgggttggcccttcttggctggttttggtccctttctataaaagatcataccagcccttggacctctcaagctcttgtgagttgacgttgtcacaacgtcacagtactcgaacgggtctgcggcttcctgagcagcaacgagggcactgttatgagccatatcacagagcaaaaaagctccaaccttgtcggcgacagccctgaatctcgcgtaatcccattccctagggtaagaagtgcctccacagataattaacttaggcctaaaatccatagctttctcctcaagtttgtcgtaatcaatgtaaccagtcttggaatccaccttgtagggaaggttttcaaagtagatcgaggtcgcggagatgttcttcccaccagagctatagtaaccatgcgttatatgaccacctgatggcaaatcaagccccatgatacgatcatgaggctggagcaaggcggtgtaggctgcgaaattcgcaggggaaccagagtaaggctgaacgttaacgccccatttctctggattgcaatggaaggcttcgagagagcgtgagcggcagagactctctatctcatcgatgaactcggtacctccgtagtaacgattaccaggcataccttccgagtatttgttggttaagcaacttccgagagcttccatgacggccacggaagtgaaattctcggctgctatgagttcgattcctcgacattgacgatgtttctccttctcgattaggtcgtagatctccggatcgacgaagtcaagatgcgtgtttccccaagaatagactggttccatctctaagattgttggaaggatagagagacttttggcgggtctttatataatgtgtgtacccacaaaactaaccatttgacttttctgaatttttagaattaagtatgactttttgatgcctttagcaagttattccaagtcaagtctgtcttttaaacagagcaaaagacataaacatttttgtactccaatgtgttcacctaggaaactaatttagtattgccatgacaactaatagtcatgacaattttattcttaattgcaatttgcaagatatatatagcaattgcccttaagatataccttaacgcaaacattattcatttttaagataaccatatgcactaatagataacgtgttgtattcctttttccccatacttcataactctttaatcattctctgcttgttttagttcagacgtttccctcatacagagtggcatgtcttagttacaagacacaatttatactgattttgtatgattgataattctttaactatctttgatacattactctaccattttcgtatgattattgtcttcgttaaaaggttgagtatttaatagaaacggcatatttataatttatgtatgcttagtcagaaccacgtctatgggacttgaatatgctatgttctcatgataagagatttttatattgagcaatcttcctttgatcagaaaatatattaagatccattctcactccatctttatgtgtcaaattaagcttgaaatcaatcaatctaaatctgtctgtttaggattcacgttacgtggctaacaagttttacgtaggatttatttcttttatgagatcttgattttgaaaatttgctgaagcggttacgatatgcagcaaccgatagttatgcttttatagcatctttaccactttttacgtgctcacaaggtaacgtttggtatatttgactgcttcagatctctacggacgattgcttgagtatagcctttggattagtcaccaaaagaaattatgttgttcagtgtggtttaagtttctcattaaagaaaagagttttttttttttttttttgtgcagcaatcgtgattagagacaaagacacaggaaggtccagaggttttggattagtcaccttctccagtgaatctgaagcctaatctttcataacagagatgaatgatcaggtttatatgactccatttgtggtagttgttctgtttatatgatgatggctttggttttgagttttcagatgatggatggtcgtaaaactgaaagtgaaatcttgctgtacagaaacatacaatgtagcatttgaaagtgaattgcatcatttaataccattacacagactttctcttgatgtcattatagtctactctaacctttaaccttccttataagcaagggacggtatcagcatatgtagcaatgcttctcaattagattcttactcaccaaagactagcttagggcagccagttccacgtaaaaaatggggtttgtttgtttctattcaagcttttaaaagaggaatagaaccaagattctaaaacaataaaacatgttccgatatttctaggaagagcggaaaatgatcaatccaaagggattgagtgattaacccccaccgtacggtcgagatattgcgtttgtggttttgaataatcaaaggaatcttcagcaattattaacccacaccacacggctggaagaattggcgtttgtggaaattatatagtttttgtggagaaatacctcatattgctgtcttcaaaggagacgtgtaagacaagctttaatctcctccacaaatgtaattaagagtcactccaatcatatagagtcaggtactcgattttctgtggaagcaactagtcttcacaggagactttttaagtcaagctttaatggtttcccacaaattttatatgagacaatccaatcatcaaatcgtttcacgtacagaaaaacagaaacaaaacaaatcaaacaaaaaat

SEQ ID NO: 8605 - DNA, 3000 bp, Unknown
  misc_feature (1)..( 3000): cDNA_ID_1820244_gDNA_ID_1971820_Annot_ID_176144 3000 nt of promoter + ATG
actcaaatcaacaatgtccggattgaaattatttcctccaagaattaatacttgaagtttagattgtgaagagatattcccaatctcaagagcgctgaagtggtttctttgcaggtcaagttcaaccaacgaagggatcatgaagagagaagagggaatggatccagaaaatgaatttccaccaatataaaaatactccagtttggagaggctactcatgttagatgggagcatacctttcaactggttagaaccaaggtcgatatcggtgagcgagttcaacttgagaagcatatcggttagtcggttaaggttccccattgaatctggtccttcacgggtgaaatcattataggaaagatcaagttgagcgagataagaaagatttccgagtgaagaaggaacctttccatagaaattgcatttaccaagattcaaaaccctcaaatagttgagattgcccatcgaatctggtatcacaccggtgaaatcattaaaagaaagatcaagatgagtgagataagaaagatttccgagtgaagaaggaatctttccaaagagattgcaaccacgaagactcaaaaccttcaaatatttgaggttgccgatggaatccagtagctcaccacccttcaaaccatcattataagaaagacttccgaatgaagtattacaaccaagatacagcttctgaagatgttgtagtctaaacaggctgctattagatctcaaagggccattgagatcactgcccgctagatctaacccaacgacattgcccgtcttaggatcacaagaaacaccatcccaagaacagcaatcagtgttgttcctccacttctcgcttgggacatggaattcgttcttgaacccccaaagagaatccctctggtctggaagacacaagtgtttagcaaaaacaagtattgagtttgaaaggcagaagattaaacacaagctccattttactgttatcatcctcctctctctacaagaatacatcatattttttgtttgatttgttttgtttctgtttttctgtacgtgaaacgatttgatgattggattgtctcatataaaatttgtgggaaaccattaaagcttgacttaaaaagtctcctgtgaagactagttgcttccacagaaaatcgagtacctgactctatatgattggagtgactcttaattacatttgtggaggagattaaagcttgtcttacacgtctcctttgaagacagcaatatgaggtatttctccacaaaaactatataatttccacaaacgccaattcttccagccgtgtggtgtgggttaataattgctgaagattcctttgattattcaaaaccacaaacgcaatatctcgaccgtacggtgggggttaatcactcaatccctttggattgatcattttccgctcttcctagaaatatcggaacatgttttattgttttagaatcttggttctattcctcttttaaaagcttgaatagaaacaaacaaaccccattttttacgtggaactggctgccctaagctagtctttggtgagtaagaatctaattgagaagcattgctacatatgctgataccgtcccttgcttataaggaaggttaaaggttagagtagactataatgacatcaagagaaagtctgtgtaatggtattaaatgatgcaattcactttcaaatgctacattgtatgtttctgtacagcaagatttcactttcagttttacgaccatccatcatctgaaaactcaaaaccaaagccatcatcatataaacagaacaactaccacaaatggagtcatataaacctgatcattcatctctgttatgaaagattaggcttcagattcactggagaaggtgactaatccaaaacctctggaccttcctgtgtctttgtctctaatcacgattgctgcacaaaaaaaaaaaaaaaaaactcttttctttaatgagaaacttaaaccacactgaacaacataatttcttttggtgactaatccaaaggctatactcaagcaatcgtccgtagagatctgaagcagtcaaatataccaaacgttaccttgtgagcacgtaaaaagtggtaaagatgctataaaagcataactatcggttgctgcatatcgtaaccgcttcagcaaattttcaaaatcaagatctcataaaagaaataaatcctacgtaaaacttgttagccacgtaacgtgaatcctaaacagacagatttagattgattgatttcaagcttaatttgacacataaagatggagtgagaatggatcttaatatattttctgatcaaaggaagattgctcaatataaaaatctcttatcatgagaacatagcatattcaagtcccatagacgtggttctgactaagcatacataaattataaatatgccgtttctattaaatactcaaccttttaacgaagacaataatcatacgaaaatggtagagtaatgtatcaaagatagttaaagaattatcaatcatacaaaatcagtataaattgtgtcttgtaactaagacatgccactctgtatgagggaaacgtctgaactaaaacaagcagagaatgattaaagagttatgaagtatggggaaaaaggaatacaacacgttatctattagtgcatatggttatcttaaaaatgaataatgtttgcgttaaggtatatcttaagggcaattgctatatatatcttgcaaattgcaattaagaataaaattgtcatgactattagttgtcatggcaatactaaattagtttcctaggtgaacacattggagtacaaaaatgtttatgtcttttgctctgtttaaaagacagacttgacttggaataacttgctaaaggcatcaaaaagtcatacttaattctaaaaattcagaaaagtcaaatggttagttttgtgggtacacacattatataaagacccgccaaaagtctctctatccttccaacaatcttagagatg

SEQ ID NO: 8606 - DNA, 3000 bp, Unknown
  misc_feature (1)..( 3000): cDNA_ID_1820259_gDNA_ID_1971820_Annot_ID_176137 3000 nt of promoter + ATG
aacaatgtaatattatagattatgaaaaagtactatactatataagattattattttttcagttaaggaataggataaaataataagttgagatgactaacacatttgaattattgccttagcttaaaatcacatactttaccaatggttgttttgttatgtttttttttttttttttctgttatgttaagtgcatatatattttctatggtactagtttccgtgtcaagcccgataactaatctggaggtaagtagaccccatatgagttttccgcaagctcacttcagataaaaaaactcatgcaaaggtcgtccaagagtccaagttgaattgaatccggatcttcatcaaccatccaagatcaccaaatgcgtgtttcctccaaaatatttacatagaaaataattacaactctgtgacttttgaaagatcgccgttggcatctttgcttattcattatcttggaataactttcaacaatcaatccttagtgccttactgcctttggagtatgcaccatccatcaatcgacatatgatctagaacaagttctctcatggacaaattaacaattatctttcatcgagtaacttagctccaattatttcgaagtggtgtcacgtatccgaaaacatatatagtaagcgtcatcttatatatcgatcaaatttatccgttcagacttcaaagtaagttttacgtttatgtatttttcgtgttttaaaattacatgcattttctttaaaaggctttgattggcgcctattgttaggatttggctggctgatttgcttttaattacggtggccagtttttagagttttaattaatagacatgatgataatatgatacaattaaaagaatttcataaatttacagaagaaaaaacagtcagagaataaatgatataaacagtgctcgaaaatattggcagagacaaatgccccactgcagatgttcactgaagtaattatattgccaaatttcaactgttcttttaactcttttatttattcaaccacatttcacgcaagatacaactaataactctcgtttcagtgtaaaatgcatagaccaagccctacttaattataccttagagttatattcaaaccctctaattaggaaaagaaaaaaagaagtaaatcagtattatactatactaatatattaatttggaatatatctacttaagaagacagtacattcagaagtacatcaataaaaatacgttcaaccttttcctctcgtaagtttatagttattattgaaaattatgtttaaaactttcttcttccataaaaaaaaagaaaggatttacgaaaaattcatcaagaattatgattaaaaccaacttttccaactgcatgccacattgccacgtaaaataagagttgaccatcaactgtttttcttggataaatatagctgtaagaagttgtgaattggttcatatatttacaaaaatttaaatctgctgttgaattgaatagaaaatgcattaaatgcgattatcagccaaccaatattctagtccttgaaattatataaaggtgtcactctttttactagaagtagaaacaaatgaaatcattacaaacgtctattgtttaagaaaatttagctaatcttcgaaaatatttgtttaattattgggtaaatctacattagttagctagcttactgaacttgattatccatctactaacaagataacttttattatagctcaaagtgtagttaatgatttgagaatgaaatcacatgttggttcaagtactatttttaattttattttgagaacccatcttccgtcatacgtacgtgtaattgttttgtttgctttctgttttcgtgtatgtttctggcttgtttggccgagttgtcttgcaaactttgttttggaacttgttctatcaatcaggcaacaaatagtcatccgtaattgaaacttgtaaatgtaggggaataattaacttgaacagggtaactagatatattctctatcagtaccgtatattgaacctagaacaatagttttcttacaataatttgacccgtagaaccaacgtgtctggtttgcttttaacttgacatccacgtcattgtttgttccacatttcaatgtcgacatttttgttaattggaggatttttttgttaaagtttgttggagggtcaatggaatcatcctcgttcccaataccataatcagaatctaatattcttaaatagttaccattaaccggattaccggacgacaatcctatcaccgactaacacgacatcttaatcatcgtcatctacatacaacaaaaacaaaagattttaatcaaacgtaaaaatacgatctatttattaatcccaaaatatcaaatccaaaatataagtataagttaatcacaagataaatatacagtatatcaaccattcagaaaactaattaatgtataatttacgtaaattatatattgatagattctattctttttgtattgcacttctattttaaatgcagaaatagacataaaaaaatagtaggtgacaaatattaaaagtatctgaacgatgaattggatcctttggtcatggaccttatcggggaaaaagaaaggctattaattaaaactctttcacctactcgtataattaacaagttaacaccatcaatcttctctatttaacacaagagcctcatcacatttcattcatcacctacaaagcagagagagagagagagagagataaatgtccaagcaaaggttcatataattttatgttattaaatttgctttttttttgttaaagtgttacatacatcgatcgacttgttagttcaaagaatcagtttaactccactgagccatcatgggtcgatctcaagaacagggacagggacagggtccggttcacagcattcggctatctaccgtaggtgcgacccggccgacagagacgggtacgacccacgaaccaaccggtttagacctagccatg

SEQ ID NO: 8607 - DNA, 3000 bp, Unknown
  misc_feature (1)..( 3000): cDNA_ID_1808910_gDNA_ID_1971820_Annot_ID_176136 3000 nt of promoter + ATG
ttcgagatcagtcaaattcaaccgttgtttgacatattgagcacaatcagttctttaagtaaaccgattgactcgggaatacgtccttcgaatctgtttccggagacatcgatggttttgtaaatcgtgaaaacactcccaaccaactctattatcgatcctttgaccgtcatagtcactgagttataatagtttcctgagtcacgtccagcatacctactcggcataatatctacgatgtctacggctgatgacattgcactccaacccgcaaagaaatctgatcgaaggactccattgaagcggttttccgaaatgtcaaagattcgcagcttggggaagctcaaagaatctccaagagaagatattggaccatgaaactcgttagaacgaaggacaaaaatctgaagtttgggcaacattctcaaccagaatggaaacttgtcattgattatgttgtcttccacgttcagaaactcgagacgagtgcagttgatcaaagacttgggaagttctcctgataaccggttgcgaccaacgtcaagtgatctcaagtgatcactgatagattcctctggaaactcaccggataagttgttattccgaagatgcaaaaccgaaagagtagtattaaacttctcgaaacaccgaggaatggagccgttgaagttgttgttggataaaacaagtgtatcaagagaaaccaatttgcatatagtcttaggaatctctcccgaaaaccgattatcagagcctaaaaagatcgttgtcgagtttggtaacaaaggaaacggatcttggaatgtgtttgaacttatgtcaagcataagtaattctccacatctttgaataacatctgctggtccttcaaagccactgaaagaattttgagaaatgttaacatactgcaactccggtagactccacaaccattgtggtacttggcctccaattttattggcagagatgtctaaataatacaaagtggtttggttttctagaaaattggggaactcaggaatattgcaagatgataaaatcaaggtgcccatgggtgagggaagacttagagttgaactgatcttcaaattaatcccggaaagatccaaataaccaagtgacaagagaggtgagaatatacttatgtcaaccatgcttcttgtattaatataagagaggtcaaggaacgtaagtgacttgagatgcaagaaagtgttgaaatcgaccatgcctctctttgtgttccataaagagaggtcaagataaaagagaccaactagtttcgatatagactccgggattggcccattgaaattgttttctagaagggacaaaactccaagattagatggtgaagagatattaccaaagtcaagaggaccgttgaagtcgtttcttcccaaaacaagagaggtcaatgaaggtagcatgaagagagacgatgggatagatccggaaaatgaatttctatcaatcccaaaatacaccaatttagagaggctactcatattagatgggagcatacctccgaactggttagaaccaaggtcgatcaacgtaagctcgctcaaattgagtagcatactaggaaagttcccactgagcttggccgatccaagatgcaactctgttagcttgtttaaatgtcccatcgaatccggtagctccccggtgaaatcattaacagaaagatcaagattagtgagataagtaagatttccaagtgaagaaggaatctttccaaagagattacaatcaccaagactcaaaaccctcaaatatttgaggctgcctatggaatccggtagaatacccgaaaaattattcgagccaagatccagattatgaagatgttgtagtctaaacaagctactatcatatctcaaaggaccattaagaaaactgttcatgaggtctaactctaccaccttacccgttttaggatcacaagagataccatcccaagaacagcaatcggtgttgttcctccacttctctgtcttcttaacaccaacaatcccattggagttgaactcatggacataaaactcgttcttaaactccaaaagagcattcttctggtcttgacgacataagtgcttaacatgagaagccaaaaccagttttgaattagaaagggacaagattaaacacaagctccatattgtcatcttcatctgacctcaacaatgcaataaactttttttctttgattttttttttctcagaaagtgaaatgaatgatgttcaatgtttataagtgatggctctagtaatagacccaaagactgtcttacattttgtggaaaaaagaaaaagcttgacttaacaagtctcttgtaaaaaaaatggcgtcatcttccacaaagatatatgaatttccaaatgaacgctccacaaagtcaattatgtctcctcttgcataaaagtattaaccctaaaaataattcaattacttgcggtgtggggttaccgcagtacaaaaagtagagcgtgtggggttacctcagctgtgtggtgagtgctacgcaattgcgcaaacgctctttaacggggcacgctcgtgactcgtgagagagtcagtcacacaccgtaaaagttaccgataaactctcaaaaagtcttttttggctttgccaaatttctaaaattcaatcaacattttctttcttcttttcgtttacatttttgtattaaaaaaaaaactctaatgggctcgtggaggtagctgaagcccaaaatatgggataagggctataaggattgtcgatcatatcttcttgcgccgtcaaaaagcttccagtcgcaaacgatgacaactttccattaaactaaaatgacataaatacccttcaaaatccacatattactctcaactgtttcatctacctccctccctctctccccattcccaaactacacattacacattaccaattctcatattaaaatccacaaaactcaaatccccaaaataaacaaaccctaaaattcaaaaca

SEQ ID NO: 8608 - DNA, 3000 bp, Unknown
  misc_feature (1)..( 3000): cDNA_ID_3045772_gDNA_ID_1971820_Annot_ID_176135 3000 nt of promoter + ATG
ttggagtggcgaacatgtgagtagatgacacaagacggttatgaaacgtatggaaaagagtgcttgtaaccgtttactttaaaacggttggagttatgtaattttcatatatttcaaaattttggcttacaatgtttatctgttttgtgtagtttggtttggttatgttaattttatttatggtaaaatattatactcaatgtttggtttataacactattttaatcataacactatttttaaccataatttttcacattattcttatactcttctccacaaaatctagaaaatctttattgattaaacaaggtcacaagtcaaatccttaagcaatttgttggaagcaatcatctttaaaagttgattagttacatatattaaggctacctcgttggttaagagtctgatggacggatgaaataattagttgtaacggacggataaaataagtggtggtgaataaaagaaacatgacggttataaaaatagagcatttacaaccgtttattttaatatgattagatttttgttattttcatatattttaaaatatttcctaaaatataataagatcaccattgaaacccttaaaaagtttatcaacaattacctctagtttaaggtgattcatattttcattttgttcaatagtttttgctcatattcattactgtatacctattatcatcagtcaccacattgcctacaaatattaccaatcgtatataattttgaaccgctatactgccatctcctgccgcttttaaccactttctccagagccacttaaaaaagcttttaaccgccgtatttaaacagaattatcactcaataaccattacaaacgttgctgccacacctagaatcccgttctccactcaaaacgtaaaacacaaaacataaaacgcacaaccaaagaaagcttatttagtaatcagggtatttatctaaagtaatgtgcttccgccgattggcataagcacatagaagagtatatacattacatatatacaaagttgctggggtattgatgctatgctttctatattacacacaaacaattaaaagactatacataacaaggctaaagactcgatgtcgtatgttaagaagattcttgttgttgacgacgcattcttgcagcccaagacatcgtgttattatctttctgattgcttcttctccttaaccctgagagctgagtttgccattttgctttccactcactcttctcttccaccacttcctacaatcacaacaatcaccaaaacccaaatcaattataagaagacccatgattgtagcaaataggatcaatgagttcattattctctattccactgctaatttgtcacctaataatcgacacatgggtcaatttattggaccatgttaaagataaggtcaattctgtcgacaccataaaggttcttgaatctaccgagtaaatctagaaattcgaaaaataaaaagaataaaaatagaatttttgaggataatactacacactatttgtccacatatgaaccaaaaatatccaaatcaataacatcaacatcacttgataaatttatcaataacacatacactaaaattattgctaactcttaaattttcttaaccataataaacccaaacaaatggtgctgattttttctctcctaacaaaaacttcggttatcgcaaaaaaattaaatttaataattaattacctgatcgtaacggttctggcgtcgaccggagaaagaaaaagaaaaccccatagacaaatcacggtcatataaaactctccggcgaggatcggagagagtttcgtaagcttcttgaacacgaataaaccgatctgtgtattcttcgacacgatccggaggagaaacatcggggtgatattttcgagctagttgtttataagcttgtttgatttctgggagtgtgactgattcggtgacgccgagaagatcgtagaaggataagtcttccgattgttttactggatcgtcgtgggttaatcgagattggatccgggtggaggagaatcgggttcgggttgggtaagagatagttgttgggattgaagttggttgaagagaggagattggttgttgtttgtagaagaatgggtggtgattggttgagagaattgatgagcttttgtaacatttcattgttttgaattttagggtttgtttattttggggatttgagttttgtggattttaatatgagaattggtaatgtgtaatgtgtagtttgggaatggggagagagggagggaggtagatgaaacagttgagagtaatatgtggattttgaagggtatttatgtcattttagtttaatggaaagttgtcatcgtttgcgactggaagctttttgacggcgcaagaagatatgatcgacaatccttatagcccttatcccatattttgggcttcagctacctccacgagcccattagagttttttttttaatacaaaaatgtaaacgaaaagaagaaagaaaatgttgattgaattttagaaatttggcaaagccaaaaaagactttttgagagtttatcggtaacttttacggtgtgtgactgactctctcacgagtcacgagcgtgccccgttaaagagcgtttgcgcaattgcgtagcactcaccacacagctgaggtaaccccacacgctctactttttgtactgcggtaaccccacaccgcaagtaattgaattatttttagggttaatacttttatgcaagaggagacataattgactttgtggagcgttcatttggaaattcatatatctttgtggaagatgacgccattttttttacaagagacttgttaagtcaagctttttcttttttccacaaaatgtaagacagtctttgggtctattactagagccatcacttataaacattgaacatcattcatttcactttctgagaaaaaaaaaatcaaagaaaaaaagtttattgcattgttgaggtcagatgaagatg

SEQ ID NO: 8609 - DNA, 3000 bp, Unknown; identical to SEQ ID NO: 8598
  misc_feature (1)..( 3000): cDNA_ID_1807990_gDNA_ID_1971820_Annot_ID_58311 3000 nt of promoter + ATG

SEQ ID NO: 8610 - DNA, 3000 bp, Unknown; identical to SEQ ID NO: 8597
  misc_feature (1)..( 3000): cDNA_ID_3593857_gDNA_ID_1971820_Annot_ID_58312 3000 nt of promoter + ATG

SEQ ID NO: 8611 - DNA, 3000 bp, Unknown; identical to SEQ ID NO: 8608
  misc_feature (1)..( 3000): cDNA_ID_1820263_gDNA_ID_1971820_Annot_ID_58316 3000 nt of promoter + ATG

SEQ ID NO: 8612 - DNA, 3000 bp, Unknown; identical to SEQ ID NO: 8607
  misc_feature (1)..( 3000): cDNA_ID_1808910_gDNA_ID_1971820_Annot_ID_58317 3000 nt of promoter + ATG

SEQ ID NO: 8613 - DNA, 3000 bp, Unknown
  misc_feature (1)..( 3000): cDNA_ID_1820259_gDNA_ID_1971820_Annot_ID_58318 3000 nt of promoter + ATG
atattgatgttgatggaaataatcaaattttaaagtggcgacaaaacatattaaaatgtttgagatgattaactactcttttttttgtgtggatagtctatcgaatataaattactagagaccaacaacaatgtaatattatagattatgaaaaagtactatactatataagattattattttttcagttaaggaataggataaaataataagttgagatgactaacacatttgaattattgccttagcttaaaatcacatactttaccaatggttgttttgttatgtttttttttttttttttctgttatgttaagtgcatatatattttctatggtactagtttccgtgtcaagcccgataactaatctggaggtaagtagaccccatatgagttttccgcaagctcacttcagataaaaaaactcatgcaaaggtcgtccaagagtccaagttgaattgaatccggatcttcatcaaccatccaagatcaccaaatgcgtgtttcctccaaaatatttacatagaaaataattacaactctgtgacttttgaaagatcgccgttggcatctttgcttattcattatcttggaataactttcaacaatcaatccttagtgccttactgcctttggagtatgcaccatccatcaatcgacatatgatctagaacaagttctctcatggacaaattaacaattatctttcatcgagtaacttagctccaattatttcgaagtggtgtcacgtatccgaaaacatatatagtaagcgtcatcttatatatcgatcaaatttatccgttcagacttcaaagtaagttttacgtttatgtatttttcgtgttttaaaattacatgcattttctttaaaaggctttgattggcgcctattgttaggatttggctggctgatttgcttttaattacggtggccagtttttagagttttaattaatagacatgatgataatatgatacaattaaaagaatttcataaatttacagaagaaaaaacagtcagagaataaatgatataaacagtgctcgaaaatattggcagagacaaatgccccactgcagatgttcactgaagtaattatattgccaaatttcaactgttcttttaactcttttatttattcaaccacatttcacgcaagatacaactaataactctcgtttcagtgtaaaatgcatagaccaagccctacttaattataccttagagttatattcaaaccctctaattaggaaaagaaaaaaagaagtaaatcagtattatactatactaatatattaatttggaatatatctacttaagaagacagtacattcagaagtacatcaataaaaatacgttcaaccttttcctctcgtaagtttatagttattattgaaaattatgtttaaaactttcttcttccataaaaaaaaagaaaggatttacgaaaaattcatcaagaattatgattaaaaccaacttttccaactgcatgccacattgccacgtaaaataagagttgaccatcaactgtttttcttggataaatatagctgtaagaagttgtgaattggttcatatatttacaaaaatttaaatctgctgttgaattgaatagaaaatgcattaaatgcgattatcagccaaccaatattctagtccttgaaattatataaaggtgtcactctttttactagaagtagaaacaaatgaaatcattacaaacgtctattgtttaagaaaatttagctaatcttcgaaaatatttgtttaattattgggtaaatctacattagttagctagcttactgaacttgattatccatctactaacaagataacttttattatagctcaaagtgtagttaatgatttgagaatgaaatcacatgttggttcaagtactatttttaattttattttgagaacccatcttccgtcatacgtacgtgtaattgttttgtttgctttctgttttcgtgtatgtttctggcttgtttggccgagttgtcttgcaaactttgttttggaacttgttctatcaatcaggcaacaaatagtcatccgtaattgaaacttgtaaatgtaggggaataattaacttgaacagggtaactagatatattctctatcagtaccgtatattgaacctagaacaatagttttcttacaataatttgacccgtagaaccaacgtgtctggtttgcttttaacttgacatccacgtcattgtttgttccacatttcaatgtcgacatttttgttaattggaggatttttttgttaaagtttgttggagggtcaatggaatcatcctcgttcccaataccataatcagaatctaatattcttaaatagttaccattaaccggattaccggacgacaatcctatcaccgactaacacgacatcttaatcatcgtcatctacatacaacaaaaacaaaagattttaatcaaacgtaaaaatacgatctatttattaatcccaaaatatcaaatccaaaatataagtataagttaatcacaagataaatatacagtatatcaaccattcagaaaactaattaatgtataatttacgtaaattatatattgatagattctattctttttgtattgcacttctattttaaatgcagaaatagacataaaaaaatagtaggtgacaaatattaaaagtatctgaacgatgaattggatcctttggtcatggaccttatcggggaaaaagaaaggctattaattaaaactctttcacctactcgtataattaacaagttaacaccatcaatcttctctatttaacacaagagcctcatcacatttcattcatcacctacaaagcagagagagagagagagagagataaatgtccaagcaaaggttcatataattttatgttattaaatttgctttttttttgttaaagtgttacatacatcgatcgacttgttagttcaaagaatcagtttaactccactgagccatcatg

SEQ ID NO: 8614 - DNA, 3000 bp, Unknown
  misc_feature (1)..( 3000): cDNA_ID_1820248_gDNA_ID_1971820_Annot_ID_58322 3000 nt of promoter + ATG
atgacttaataaagacgtttccttatcctttatcaaatctttacatctgtattcaaagttagaatcaacgatctaagaagaagagcttaccatgaacccactagtttctggacggttaaagggaccagaactagatacaatattcacaagaattgcatctacttgactagattaggtgtatcatatcatttgatgctaactcttggggttataggctaacctttaagcttcctccttcacgttatgagccactgacagcatcaggaaggtccttaagaacctaagcaaatgtaataatgttctccattagcttcttactcaccgaagataacctccaggttttcgacaagtaacagtattataattagaacgatgtgagatttttgcttcaaggtcgttgagtgtgagaagatggtttttcgttgttgttaccttgtaaagatgccatgaagcataagcatccgttgctgcgtattgtaactgctgctttgacagaggataaaactcccagttcccaagcctgattctgtttggcttcaggagctgcaaagtaacagtcagattttcaaagcgaaatagatcaatattctcacttttgatacagcagaacagaagagagttgtactgctatttctaggaagactggaaatatgataaatccagttctcactactgttatcaaaacttaaatcaagcttttgaaatcaaccagacaaggtgaataacagatacctctttgcaaacaagtgtctcagttagtgaggcaaggccccattttttatctccaccaattttttggttggctaaatctgaaagatcctcaacatctttgatactaactccatagtcatggaaaagcttcacagagtcaccatcaattccaatacctacctatatatatgtatcagaactacgttaattgagcatccatggcaaacaacaagaacttcgaccacttcaaaaaaaaaaataacaaacctttacaagtgttgaatcttcaataagatgttggagactttgagggataccagaatgaaaaatatgcataacatcacaataattactatctacacatatctggacagtcgcaaccttccccgggagaacacctgaaaataacacaaagtttcacaaaatattattagttaagatcacaaaaacctcacaaaggttcatgaatgtgtcaaaaagcattatcaagcaactatcattacaacacatatgagtagactagtctaagagatattattagtagaacaaagcttgcagcaatgagattctagactacacaaaactgcaatagtaggcatctacactttcctccgaacattcagaaaggaaacaacgaccataaagctctattcgatataaagcaagagcatcatcattctatcatcaagatatataaagagaaattagaaaagacaacatatgatccatagagataaaatacagttcgagatgcatatcacattgcatactttaagaaatgcaatcgaaaaagacaaaacttgcaatcagacacaaaacggaaaacagaagggttaacaaaagcaccttttctaaaacttggtctccactcaatatccaagccaacaaaagctattccagattcatctctcttggtatcaagaactttaataagctgcattgctcgcttatcaacctcagtagcagtcttgctatacaaaatcctaccaccaaacctcattgctggaaaattcctagctgcaacaaagtatacacattattaagttgctccgcccacataattcaaacaacacactattacgaaaaaaatcttaatcctataaattacggcatgaacagattaatacattgtaaagaacttggaattcgaatcaaatggtgagacaactaatgaattgacattttcaaagcaaaaagaagttgaaattggaaaatagaacagaaagatctctgggatttgaagaagtttcatacctcggcaacgggagagaggaaatcgtttataagatgtagaagaagtgatggaacgaggcaattggcgacggatattattggggatttgatttggatcctcctcgtggccatggacggaggttgtagcttgtacggtcggagcagcagaggaagaagaagaagaagaacgggagaaattgtaggaagcttcgatggcgtcgatagcgagaagctcttcctctgtaaaagcgtcgtcgatccaatttgacgatgacatttcttttactgaaacaaaaaaataaaaattaatgctttggacgagtctcgtcggcccctttaaatgtttgtattgtttgtttttaattttaaacgttcccacactgtacaatatagttgtgtgttttaaattgcccgagacacgctttatacaatttttgtatgattttgattattcatcacgtaaccataacctttgcttcacattagaattgtcccatgttagggatattggcataacgatgtatcagatcatgtcgatgagaaaccaaattcaatctttcagaaacttaaacccatcccatacaaacaaccacacttttgttgacaaatggagcaaccaattcctcttattttcattcaacagtagacactctttcattttcaacaaaaaaacactcctttgactaagtagaaactgtcgatggccacacgcgaaaaatgatgatgaattcttataacactcctccacagatgtagtaagtgtcatccaaggatctagcaattaagagtcagatattcaattttctgtggaagcaattatccttcccaggagacttgtcaagtcaagcaacgatcaattcgtttcacagaagaaataaaacaaggatgcattcttgtagtgagaggaggatgatgacagtaatatggagcttgtgtttaatcttctgcctctctaactcaatacttgccattgctaaagacttgtgtcttcccgaccagagggatgctcttttagagttcaaaaacgagttctacgtccaagagttcgatccccat

SEQ ID NO: 8615 - DNA, 3000 bp, Unknown; identical to SEQ ID NO: 8605
  misc_feature (1)..( 3000): cDNA_ID_1820244_gDNA_ID_1971820_Annot_ID_58323 3000 nt of promoter + ATG

SEQ ID NO: 8616 - DNA, 3000 bp, Unknown
  misc_feature (1)..( 3000): cDNA_ID_1821868_gDNA_ID_1971821_Annot_ID_58327 3000 nt of promoter + ATG
aattcatatattataagtcaaagctttgtttatacataaatctatcttatttacacaaatcagcttcgtttgatccaactaacatgtattaagtattaacattagtagaattctctgaacataacttaaaatcaaaacttgtatctactaattatgggaaaatagtctcaaattgaatctgaaaaagaattgcaaatttttaagaaaaataaagaaactaaacatcaaagtgttggtgtgttgtgttaatttgacttcttttttctctgttagcaaaccattgagcagtttttctagcgatcggcagccacaaacgccgtcttctctcctccgtctcattcccaccgttttgtaacgcagacgcagtctctgcggctgaaccgctgcaatctccatgaatcgatatactgagtctaggaaccgcagtgatgtcagacaccgatcttcgtcctggttcgatcataacgcttcttgatttcgaaccagagtctccgttttccgaggaaaacatagttgtcatcgaagttaacttgttctccaacattctcttcgcttccatctcttccttgattcgcaagatacctatctgatcctcttcatctcctctcttcacatgatccaatgaagaaaatctctcgctagaaatcgaattaaccatctcggaattcaaaaacatcaaatctgatgaactcacgttgctccaacgattcttgaaaacaacatccgacacaacgatcctatgattgaacttgtgcataagcttcttctcatctttatcgttcacgtgttcatcaagtaacgttttttctttattacctaatttcagaatcttccggaaactctctccgatgctgaatctcgacgacccactaagttcttctctgtgtattctttcttcttcttcttctctctcgatgtaaagctccaagctcgaatcttctctaatctcagactgattcaagaacctgaaactgtttccgttagtgagaacagaggaatcttcttccattgagactctatctctgcaaagaggacaagttgcgtgttgctcaagccactgatcgatacatccgatgtggaaagcgtgtctacacttaggcaacaatctaagaatctcaacactttcgaatttagacaaacagacagaacaatcaagaccttgttttgatcctttcaaagcagagaatctaaacagaggaagagactcgattgctgttttgtctaaaccagagaatcgatccgatgatgccgttgaccggttaaagaatattccttgtctgagccggcgatcgtgccttcttctgtcgccggaacctgatcggagatcgatgtggcagcacttagcgtagacgaggaggacgaaagtgagtgcgaacatgatggcgagaactccggtgacgacggctaaactcggctcaaaatttgcgacgaggtcaccgtttctgaacggaggaggagtctgggcagaggcataactgtggaggagaggaagaaagaaaaagaagatttgatacatcggagcgttcgagagaaactttgtttcttgatattcttgggtttgaaatagttttattggagatgaaaatgagattatgttagagaaagtgatatttttcggtgtatgctataaactaatacaattacgtcatatacgtgacaacaatttgtatgctattgctttttatctatgctctatttgtcttctactattctctccatttaattaaatacaattttatctttcggtgggctgttattctccgacctcatttttgatgatacttaggactacaatatatatggaacttatttatcattttataaagttacaacttgcgtcacacatttggagtgatatttttgtttagtttttggtctgcgaactattaaaaaaaactacatatataaccaaatctcttttcaattcggttccatatattttttgtcatatggtttaggttatgctatttaacaaaattattttgacgttacttgacttatttatgtctgctcttccttttttatccatacacagtgaatcacatacaaattttgaatacacaatgaatcacaaatatacatatcttgatcgttctctcgagtcattttggtttgattgatgttaaaacaagtatttatataaccgcatgataagctaaagtcgaaattaattactttccaaaacatgtgaacgtccaaccataactaaatctcaataggaggattcgtaccatggttttctaacttcacggtaagtgttttcaagttttcaaccatgaacaaacttgattttttttttttttttttttgtatgaggttatgagaagtcgtttactctccaattatggtttcataatgaatattttcgtttaataaaaactaaaaaggaatgccatggttgtacctagaactactagtttattatttgtgacaaagctactaagtatacttgctagtaataaccatgacaatgttatattataaatgttaatgaatcgtgacagattaactaagaaaaagtcaacgaccagctgcacaaaattccggtgcggcaaaataaagtcaaagttgcattactcatgattggcttcgatgctttactatttgtgaatcagagagaacctcctctacaatcagaaactttgctttctgcgaatggacctgcaacactcaacaatactttgggcctcagtcaaagtgtcaagcccatcaacctcaagtcttctctaccttgcaacggtaacaagattcctcaatttccagcgcatcaacgtacgggattcacagctaatcatttgtcccttcataacaaatttgatcctctttgttcctctgtcgtgatgtgcagctaatgacgtgtgacctagtgtctcaccattttggggttcatatataaactcttctctgtcattgtaaaccttaagctgaaatattcaataaagagatttctcttcatcatcgttttatcaatactttcatggtatcagagctcagtcgaaa

SEQ ID NO: 8617 - DNA, 3000 bp, Unknown; identical to SEQ ID NO: 3356
  misc_feature (1)..( 3000): cDNA_ID_1807786_gDNA_ID_1971821_Annot_ID_176191 3000 nt of promoter + ATG

SEQ ID NO: 8618 - DNA, 3000 bp, Unknown; identical to SEQ ID NO: 3353
  misc_feature (1)..( 3000): cDNA_ID_4262264_gDNA_ID_1971821_Annot_ID_176187 3000 nt of promoter + ATG

SEQ ID NO: 8619 - DNA, 3000 bp, Unknown; identical to SEQ ID NO: 3351
  misc_feature (1)..( 3000): cDNA_ID_2040276_gDNA_ID_1971821_Annot_ID_176186 3000 nt of promoter + ATG

SEQ ID NO: 8620 - DNA, 3000 bp, Unknown; identical to SEQ ID NO: 3350
  misc_feature (1)..( 3000): cDNA_ID_1820542_gDNA_ID_1971821_Annot_ID_176184 3000 nt of promoter + ATG

SEQ ID NO: 8621 - DNA, 3000 bp, Unknown; identical to SEQ ID NO: 3348
  misc_feature (1)..( 3000): cDNA_ID_1820550_gDNA_ID_1971821_Annot_ID_176175 3000 nt of promoter + ATG

SEQ ID NO: 8622 - DNA, 3000 bp, Unknown
  misc_feature (1)..( 3000): cDNA_ID_2991393_gDNA_ID_1971821_Annot_ID_176174 3000 nt of promoter + ATG
tatgaagacatcctcatcatttacaatatatgtctctctcctaactttagacagattgtaactcagtttcaacttgacagaagcttcatcaatcgcaaccttcttcatgatcttgtcaactaacatcgaatagctaatcttctccaaactactcgtcttaaacgatataacatatagtgaatttttaccaatccactcattcacttcagaatagtatcctccaaagtcaaaatgtaccttagtgtggatcttcttcttcatcgctcctgaaaatacaaccagttcaactccaatcaaacattttaatagttataccacatgtactcttatcatacgttgaaatcaatctctcgtcgcactcgtctctactgaacctaattcgttacctttcaattgatttccaatgttaatacatacctattcgttaaactaattggttaatctaaactttgcaaacacaaaccccccaaatctttaatatgaaatctcggaattcaaattcaactcacattcaacctacattcctttgctcatcacctcaaataacgtttcggcaacctctaatcgattactctttactttgcaaaccaatcatcaaactatcaaattgaatcgagctgggaattatatagaattcaaaatcccaatctaaaatcacaatgcaccaatgtcaaaggaaatatgagaagaaactgacctaattcgtggcttttacgccggatttcaagtcggcggcatgaggaaatcgatggtggccgacgaagaagatgaacgtcgaccaaagaagaagaacacgacgacgaagaggagaatctccgaactcgattttctttatttagcttttgaatttctttttcatttttttaatcaactcattaagggtacaactggtatatcacattttcggtggcattcagattaacttatggcagtccagatcagttttttcaaaaaagtggcataagtgataaaagtccccccctgcggtttggtttcttgtccgctccaaaacttgtgagggcattttagtcattacaacatgggaactggatttttaaactggtgaattcgttagcgtttatgtgaataatcatccatcatcaggaaagatccgaagaaaagcgacgccgttttaaaggagatggataaacaaccggcgaccagttggagtatccatacccggccggagataatcgccaagtacgagatcttcgagcgagtcggatccggagcttacgccgacgtttacagagctcgccgtctctccgacggtctaatcgtcgcgctcaaggagattttcgattaccaatctgcgttccgggagattgacgcgctcaccatcctcaatggatctcctaatgtagttgttatgcacgaatacttctggcgtgaggaagagaacgctgtgcttgtgcttgagtttcttaggtcggatctcgctgcggtgatccgagatggtaagaggaagaagaaggtagaaggaggggatggattctcggttggggagattaagagatggatgattcagattttaaccggtgttgatgcttgtcatcggaatttgattgtacatagagatttgaagcctgggaatatgttgatttctgatgatggagttcttaagcttgctgattttggtcaggtgagattatgattgttactgattgtgttagttatttcattgtttgatgcacaaatatgagaaacctctgaatgaaaaatgcttggtttgcttgaaatttggaagagttagtgtaatcaagtggctagaccttatcatttagtgtaatctatgagtttctaaatgtgtgttggcttcttggttcatatacaggctaggatactcatggagcatgatattgtagcttcagatgaaaaccaacaagcttacaaactggaagacaaagatggagaaaccagcgaaccaccagaagttattcctgattatgagaactcacctaggcaagggtctgatggtcaggaacgggaagcgatgagtaaagacgagtacttccgacaggtggaagagctcaaggctaaacaggttgttagagatgatactgataaggactcgaatgtgcatgatggagacatatcttgccttgcaacgtgcactgttagtgaaatggatgatgatctcggtaggaactcgttttcttacgatgctgacgaagcagtggatgatacacagggtttgatgacatcttgtgtgggaacccgatggtttaggccaccagaactgctctatggatctacgatgtatgggttagaggtcgatctatggtcgcttggttgtgtgtttgcagaactcttgtctcttgagcctttgttcccaggaatttcagatattgatcagatcagcagagtgaccaatgtgctgggaaatttaaatgaagaggtctggcctggttgtgttgatcttccagactacaagtcaatctcatttgctaaagtagaatctcctcttggtattgaaggatgccttcccaaccattcaggggatgtgatatcgctgctcaagaagcttatctgttatgatccagctagtagagctactactatggagatgctgaatgacaaatatttaagtgaagagcctcttccagttccagtttcagagctctatgtgcctccgacaatgagtggaccagatgaggattctccgagaaagtggaatgattacagagaaatggattcagattcagattttgatggctttggacccatgaatgtaaagcctaccagtagtggatttacaatagaattcccctgaccttggcatttaaggtacgcagtcaaaagctctggctcgcttaaacacataaatcagtctcttctctctctctctttcttcttcaaagagaatgggtatataccaaaacctgacatgtgtttctttaggtcttgattgatgcaacactctttgttgtttgaagatcttgttacagaataccgcttagaaaattgttaacttttcgttaggacattgtttaggtatca

SEQ ID NO: 8623 - DNA, 3000 bp, Unknown
  misc_feature (1)..( 3000): cDNA_ID_2991393_gDNA_ID_1971821_Annot_ID_176173 3000 nt of promoter + ATG
ccgtagatggttgtatccgcatttctcccttccttgcgggcgaggtgccttgctgcggccatagcatggacacacgggatcttgtctatatcaaaacatttgcatgaacaacttttcattttcaaatccaccagaaaacttaccgagttgagatcaatcacgttgtattcttggttgtaactgttaagctcaaacacagttaatttggctgcaacttgacatctaatgtgcaatatgttctccacagtaggcacaacttgtgctgtgattggacaagaacctgaagcttgcctatgctcgttgaaccattcagaaaacttagaaatcatcacatcaatcattggtaacaagtggtattttctcgcttttttaaacacaccattaatggactccgcagaattactagtgtcaatgttatacttgtctcctttaaaatggcacctcgaccatttctcaaaccctactttcacaagaaagtcagcagctttaggccataaacttgtaaaatgaccaaactctttctcgaactcactctcagtatatgcatgagcacaatccctgaacttgacagcagctccatccttgtcaattgtcacacgatctctcatgttttgacacaaatgccatatacaagctgcatgaagcgcattcgggtacaccgtcttgacagccttctttatgctttgatgcctatcactaataaagaccaatccgggaacatccgaatatacagttttcagcttttctaagaaccaaatccaacttacatccttctcgctatcaatgattccaaacgcaagtggataatgatgatgattaggatcttgtgctgttgcaataaccaacatcccaccatacacagttttaagatgagttgcatccacaactatcactttccgcattgccctaaaaccttcaatgcaagcgcctaatgcaatgaagaggtacttgaactttttctctccttccaactccacataagttactgtccctggatttaccttctctaacatgtaaagataagaaaataacatcgtgtagcttctttccggagtccctcgcacatcactaacatgtagcattttgcctcttaaggcagtggagtatgaacaatgcaccccaagtcttcctcttacaatcgacataatgttttttggagttggggtctctaaatttccgggataatcacaatgtaaaaccgatgctattaatcttggtgtgcctcgctgtatactgttgcttgtagtctcaacactccgagagcatgtatgcatctttctatgcactctaacactccaaaaatgagattttttagttctcgcaactcttagataccaagtacaccctttagaagcttggcggcatcgtagcataagtctcaacgggtctgacttaatagtatagactccaaaaacttctttctttgcagctctgttaaccaattcccacacagcctcccttgaacaaaattcttgaccaatttcaatacccgtaccatcatcccattctataacctgcggagtaacttctacacttcgtggaatatcgtgaatatcatcataatcaatcctatcatcctcatcttgttcctcaacagaattcaccggcctttccatcggcctttcgatagccacgatctccgtacctactacattctcacaatcattcacatcattatcatatccatcatgcaccatctcacatacttcatttaaaacatcatcctctattacatttacaccaactgaacttcgacgctccggtacagaaatttcctctctcctctcaactcctataccatttaattcctccacatgcaaaacaggaatccgactctcttcatcagattctgttaaaaatatgaagacatcctcatcatttacaatatatgtctctctcctaactttagacagattgtaactcagtttcaacttgacagaagcttcatcaatcgcaaccttcttcatgatcttgtcaactaacatcgaatagctaatcttctccaaactactcgtcttaaacgatataacatatagtgaatttttaccaatccactcattcacttcagaatagtatcctccaaagtcaaaatgtaccttagtgtggatcttcttcttcatcgctcctgaaaatacaaccagttcaactccaatcaaacattttaatagttataccacatgtactcttatcatacgttgaaatcaatctctcgtcgcactcgtctctactgaacctaattcgttacctttcaattgatttccaatgttaatacatacctattcgttaaactaattggttaatctaaactttgcaaacacaaaccccccaaatctttaatatgaaatctcggaattcaaattcaactcacattcaacctacattcctttgctcatcacctcaaataacgtttcggcaacctctaatcgattactctttactttgcaaaccaatcatcaaactatcaaattgaatcgagctgggaattatatagaattcaaaatcccaatctaaaatcacaatgcaccaatgtcaaaggaaatatgagaagaaactgacctaattcgtggcttttacgccggatttcaagtcggcggcatgaggaaatcgatggtggccgacgaagaagatgaacgtcgaccaaagaagaagaacacgacgacgaagaggagaatctccgaactcgattttctttatttagcttttgaatttctttttcatttttttaatcaactcattaagggtacaactggtatatcacattttcggtggcattcagattaacttatggcagtccagatcagttttttcaaaaaagtggcataagtgataaaagtccccccctgcggtttggtttcttgtccgctccaaaacttgtgagggcattttagtcattacaacatgggaactggatttttaaactggtgaattcgttagcgtttatgtgaataatcatccatcatcaggaaagatccgaagaaaagcgacgccgttttaaaggag

SEQ ID NO: 8624 - DNA, 3000 bp, Unknown
  misc_feature (1)..( 3000): cDNA_ID_3045794_gDNA_ID_1971821_Annot_ID_176172 3000 nt of promoter + ATG
taacaccgactttccaattgtaaatgttaccattttcatacgagggaggcagagagagaggaacaacacacacacacacacaacacatttttgacaaagtaggcgaattcaggggaagtcgggatgatcaagatgctcaaccatggactctgccaaggagagataaacacataaaactgagatcgatgagagaaacaaagcgcaaaaaaaagttgtgagatcaatgagcaaacgaatttcaaaagtttttgccgccattgatacctaaacaatgtcctaacgaaaagttaacaattttctaagcggtattctgtaacaagatcttcaaacaacaaagagtgttgcatcaatcaagacctaaagaaacacatgtcaggttttggtatatacccattctctttgaagaagaaagagagagagagaagagactgatttatgtgtttaagcgagccagagcttttgactgcgtaccttaaatgccaaggtcaggggaattctattgtaaatccactactggtaggctttacattcatgggtccaaagccatcaaaatctgaatctgaatccatttctctgtaatcattccactttctcggagaatcctcatctggtccactcattgtcggaggcacatagagctctgaaactggaactggaagaggctcttcacttaaatatttgtcattcagcatctccatagtagtagctctactagctggatcataacagataagcttcttgagcagcgatatcacatcccctgaatggttgggaaggcatccttcaataccaagaggagattctactttagcaaatgagattgacttgtagtctggaagatcaacacaaccaggccagacctcttcatttaaatttcccagcacattggtcactctgctgatctgatcaatatctgaaattcctgggaacaaaggctcaagagacaagagttctgcaaacacacaaccaagcgaccatagatcgacctctaacccatacatcgtagatccatagagcagttctggtggcctaaaccatcgggttcccacacaagatgtcatcaaaccctgtgtatcatccactgcttcgtcagcatcgtaagaaaacgagttcctaccgagatcatcatccatttcactaacagtgcacgttgcaaggcaagatatgtctccatcatgcacattcgagtccttatcagtatcatctctaacaacctgtttagccttgagctcttccacctgtcggaagtactcgtctttactcatcgcttcccgttcctgaccatcagacccttgcctaggtgagttctcataatcaggaataacttctggtggttcgctggtttctccatctttgtcttccagtttgtaagcttgttggttttcatctgaagctacaatatcatgctccatgagtatcctagcctgtatatgaaccaagaagccaacacacatttagaaactcatagattacactaaatgataaggtctagccacttgattacactaactcttccaaatttcaagcaaaccaagcatttttcattcagaggtttctcatatttgtgcatcaaacaatgaaataactaacacaatcagtaacaatcataatctcacctgaccaaaatcagcaagcttaagaactccatcatcagaaatcaacatattcccaggcttcaaatctctatgtacaatcaaattccgatgacaagcatcaacaccggttaaaatctgaatcatccatctcttaatctccccaaccgagaatccatcccctccttctaccttcttcttcctcttaccatctcggatcaccgcagcgagatccgacctaagaaactcaagcacaagcacagcgttctcttcctcacgccagaagtattcgtgcataacaactacattaggagatccattgaggatggtgagcgcgtcaatctcccggaacgcagattggtaatcgaaaatctccttgagcgcgacgattagaccgtcggagagacggcgagctctgtaaacgtcggcgtaagctccggatccgactcgctcgaagatctcgtacttggcgattatctccggccgggtatggatactccaactggtcgccggttgtttatccatctcctttaaaacggcgtcgcttttcttcggatctttcctgatgatggatgattattcacataaacgctaacgaattcaccagtttaaaaatccagttcccatgttgtaatgactaaaatgccctcacaagttttggagcggacaagaaaccaaaccgcagggggggacttttatcacttatgccacttttttgaaaaaactgatctggactgccataagttaatctgaatgccaccgaaaatgtgatataccagttgtacccttaatgagttgattaaaaaaatgaaaaagaaattcaaaagctaaataaagaaaatcgagttcggagattctcctcttcgtcgtcgtgttcttcttctttggtcgacgttcatcttcttcgtcggccaccatcgatttcctcatgccgccgacttgaaatccggcgtaaaagccacgaattaggtcagtttcttctcatatttcctttgacattggtgcattgtgattttagattgggattttgaattctatataattcccagctcgattcaatttgatagtttgatgattggtttgcaaagtaaagagtaatcgattagaggttgccgaaacgttatttgaggtgatgagcaaaggaatgtaggttgaatgtgagttgaatttgaattccgagatttcatattaaagatttggggggtttgtgtttgcaaagtttagattaaccaattagtttaacgaataggtatgtattaacattggaaatcaattgaaaggtaacgaattaggttcagtagagacgagtgcgacgagagattgatttcaacgtatgataagagtacatgtggtataactattaaaatgtttgattggagttgaactggttgtattttcaggagcgatg

SEQ ID NO: 8625 - DNA, 3000 bp, Unknown
  misc_feature (1)..( 3000): cDNA_ID_3045806_gDNA_ID_1971821_Annot_ID_176161 3000 nt of promoter + ATG
taccttttatttggttgtattcagggaaaacaagaatttaacaggaactgcacgatatgcaagttgcaatacacatcttggtattggtaaggaatgctgccacttttttctcccctttgtgaagtaaagtttttgctcacatatttcgatttctctttcgcagagcaaggtagacgggatgacctagagtctcttggatatgtgcttctgtacttcttaagaggaaggtgtgttgactttttgacttgaaagaacctagttaacattgtgtttttggcagggtattgtttttccttgtttgagatttacttaaccgttttcttgctttacattttgttcctattttaatgaacctccttttctagccttccatggcagggtcttaaggctgttgacaagaagcaaaagtatgacaaaatttgtgagaagaagatatcaactcctattgaggtctatttccctctactgtgtgagtgaattgttttttgttaatcctcattcaactgaataatatcccatcctttgtaggttctatgcaaaagccaccccgtggagtttgcttcatattttcattattgccacacactgacatttgatcaacgccctgattatggattcttgaagcggctttttcgtgatttattctcacgggaaggtactttgagaaagacatccctccatcatttttataatcctctctgctagcatcagttatctacctagctcacttaaacgttttcttctttgcaggatatgagtttgactatatatatgactggactattataaagtatcagcaatcacagaaaactagaagtcagtctcaggtatagtttatcaataccatttgttatttttttttctccaggtgtatgcatattttgtcttgttcatagagaagatttcctggggagaagttttacttggttttgctattttttagttttggtgctaaatatagatatgcctgtcttcctaacaataaactgtcatgctgcaggccgttcctgggtctagtaatgctcgtgcaataccaatggacacaagcaatcatcgaggtcagctcgagttataaattttaattgtgtcactttctgattaattttgtaatagtatatgatgtgttttttgttttctctcgactttcacactggactcaactggcatagagtgtttggctgatttagtttcccgttgcaactgtttatttcaatatcttgatgctaactctccgtttggcaggaggaactaagatttcacatgaagcccaagtctctgaccgtgtcagaccggctaatgccagtggtccaagcccacagattaataccgctgtagggaggagtctgggttttgatcaagtccacaagaatgtacgtgcttattcatttgcctcttccaaataaatgttgtatcctgcaaccctcccccttgtgttagcatctcatgcctgcatctgtgttgcttcagagttctgcatggttctctgcttaaagcttttacctgttttgcatggtcaattgtcatcaacgagctctatattgtgatatgaactacatatagcataaatgattaaaacacgatactgatcatcacgaaatatgctcttgaccattattttactgaaaacccattgcagatgaacatgccatcatccacttcattatctcctgcgggtacctcaaaaagaaatgtcagacccgaaacctcaaattctgggtttgggagcgggaataaaaccggcggttggacttcaccattcatgtcaccggggaaatgatgcaaaaaaagttggagtatatcattcatctgatctgctgagcaagattatgtgtgcctttgggtctaaactgtgatttctgcagtgaaaagctctagactgaggttgaagatctgaatggagtttttccatgaacagcttactgtttgacaaaaggcatgaagattatgtttgctttccttcaagattctcacaaatgactgacttcaacctttgtataaaatcttgcaaccgggcgtgtaatttggttcttgtgattcattctcccaagttttcttctataaaactttgttcgtatttctgtacgtagttccctgtgttggggcataacctgggtttgctgtgtcatcaacattgtttgcagaaaatcaagagcaaagcatgagcagcttcagcagagatgccttcaaaggcttgagtcaagagttgcttgtggcagggacatgtcaccatcaagctaatgtgcagctgacgagaacgtaaaaggataagctatggctagcttctggaatgctccgagaaacacttccccctttttttttctctgaatttcctattcagtttaatggtattctgtgtttgatttttcttactcgattttgtgcattgaaaaaaattatatcaaaaagcttgacttgatccaaacatgcattttcaattgctattattaaaaaaaaaaaacgtataaaattgtagtctcaatattgaaatacaaacacctagaattgatcgatttggtagagaactagttagtggattaaatttgggttggctgattttcgagccataaactatttcgattctcagctttcacacccggacttttgggcctttaaatttccaccatcaactttcatattcccaaaattacatcatctatttttggattcatgcttaaacatacatttccaattgaaccattcatttaaccgggattaaccacaaatccgcgtttactgtaccgcgattgcgattaacccaactaatacccagacccgttaagaaaacgacgtcgttttcatttcgtttaactcatcaaaaagagaaagaaaacgacgtcgttttcattcttcttctttaactctcaaatcgatttagtcgttcttctttaatctcgacactgtgaaattagggttcttgagagagaaagacaaaaggggatttggggttttcttcttcggttcgaatttttgggtctcgatttgggtttcgaatagggagaa

SEQ ID NO: 8626 - DNA, 3000 bp, Unknown; identical to SEQ ID NO: 8624
  misc_feature (1)..( 3000): cDNA_ID_1839234_gDNA_ID_1971821_Annot_ID_58334 3000 nt of promoter + ATG

SEQ ID NO: 8627 - DNA, 471 bp, Unknown
  misc_feature (1)..( 471): cDNA_ID_1989503_gDNA_ID_1971822_Annot_ID_58335 3000 nt of promoter + ATG
actctttttttaattcaaattttcaaaaagccataagaaaaaaaaaatatgtttaagtaggtgaaatgtgcacgagatttttcgatattttatatatctatattttcttttcaatccgctattttttgaataaaatgatattaaatttatacattattctcgttatttatagaaatcgatacttaaaccgtttcccatataaatattttaccactcatttttaccatttttgagccaaaatttgactatctacatatataattaactcttacaaaaatcaaattacaattgctttgatttaaatgaaaaatattattacccataaaatttagacttggatcccccaccggtagactggtagaggttactaggggagtagggacaaaaaaaatcaaaaatatcttatctataaatggatacacacacacacaaagcaactagcactcaactcaaattctattaagaacaatg

SEQ ID NO: 8628 - DNA, 3000 bp, Unknown
  misc_feature (1)..( 3000): cDNA_ID_3000057_gDNA_ID_1971822_Annot_ID_58341 3000 nt of promoter + ATG
gttagcaatgttattaaacccgacccgcataatgaaccagactactttctgggtcattaggtcatcgggttaactaattaaaattatatatatgaaagttggtcaactctttccatatgagtgacacatcatcacactagtgaatgtcatatgtcattctaaattaatattattaaaaaagaataaaacttagtgataaaaaattaaaagtttcacattgcattgaatcatccattaataatctcacacttaactatcttcatttaaaagaaaaaaatacaaaaaaatcattttaatgtatcaaacactactttcattttatttttcttattatgctatttttttaatagtcattacttgataacgactagaaattttcgtgtattacaacttagttgtttgttacttaacctttttaagtttagtaattttaacttagtcttttttttattacgctttttgtctacatgatatggttttttgtgcattacgataaattggtaacattaataattaataatgacatgcatgttttttaagtaatgatcttttgagacgttagatataccaacaagttaaatatatgatactctcgcgtgggtactcacctactttatttaataaatttaatattaatagagattttacagtttttagagttcttacaaattaaaaataatcatatcctgttgaaccggttgaaccagccgggtgtgggttttaaaatattctctttattttggaataaaatatgggattttagactttattcaatcattttagaaacaatttcagttcgtaaactcatttgatgttttagattgtgatgaagacttcacaatgtcgccttaaaaaatgaatcgaatggtgagtgagacacctgatattagttgtgtgaattcacgatgttttattagtttatttccgtcattggtgatctcctactatatttgttacggtattagacatttaattggatttaaacaatttaatcacttacggtatttacggtattagaattattattgtttgattatatatatatatatatatattttttttttggtgtaaatgattttatattttatcaaacataatctggttttatattttataaacatgatatgattattttaaatttataaaaactctaaaaactctaaaatctctattaatattaaatttattaaataaattttaattagttgacccgtgatccaacctggttgactcgattacccagtgacaaagaaagtagtccggttcattatccaggtcgggtttaaaaacattggtttttaatttttggattttggttttaggttttcgatttttgtagtttgtgatttttgttgtagattttaatttttacagaatcttaaatggaaatttatttagtttttagttctctactttaatttatagttttttattttttgtttaaaaattactaaaacaatgaaaaattgtttaaaaatcttgaatggaaattcgttaaaggtggattgtcaaagtcaatccataactgaaattagcaattttagggtaaattagcaattttctgcgagggtagtagctgtttacccaaaatcttgaatggaaatttgtttcaacgtttttaagttctctattttattatagttttttattttctgtttaaaaattactaaaacaatgataataaatattttcttaataataaaaaattaaaaagatgcagaaaaaaaataatcataggtatattgcatataaacatagattttgtaaataaaaccaatttttacgaaaaactaaaatgaaaaactcatattaatacaataatactaaaataatgatgtagaaaagaaaaaacatagcatatttaaaataataaaaaagaattaaaaaataaatatcacataaatcttctagaaatttggtttccttatgttttagaaaatctactttttattaatcataaatgagtaattattagtttttgatttaatctacgtttttcttaatcataaatgggtaattattagtttttgcaaaatcaaaatccaaaaattgttctaaacactgcaaccatttaaggcctatatcactcagaaaatttctggtgggagaactaatcgtttgtcctttctaaatctcacatattagaatttagaattagtgtgctacataaaaatattagttcagctcggaacaactattttttggtaaaacagagaacttaaacaaatgcattattttatcaacatgcattttgaattgaatataaaatttcataattgtaaagacataaattacataaaattttacatgaaaaaatagatatagaaagaaaatgaaactaactgatgatatgctctctaaattttttaatctcataacaagaattcaaattaattagttcatatttttggttaatataacatttacctgtctaagttggaactttcattttttttctgttttgtttagtcagtattcttaatgtgaaacggaaagttgaatttattcaaacttaaattcaatagcattaattaaaggcgaaagctattatctctacatgtggttcaaactagacatccaatttaattagcttattgacgttgaaatgttttccaaaactactatagtttggcaatttgaaagatgcatcagaactactcagacaggtaaaagtagaacctctagctgtgtgaattgtatgttagtccataaagaacatcttgtaaacttcatacttaagatatatattacaatatatacttgaatggtagataaaaacgattagtctgattgctagcatactcacaactatttggaaatgagtaagatattggcatctagagttactactatggagacaaaagtcgaataaaagagacctcacgtgaaaatgttacgagctagtaactaaagcatttacactaacggtaaaaaaagtatctataaatgtttacacaaggtagtagtcattagcactcaacttaaactcttttagtaaca

SEQ ID NO: 8629 - DNA, 3000 bp, Unknown
  misc_feature (1)..( 3000): cDNA_ID_2050038_gDNA_ID_1971822_Annot_ID_58346 3000 nt of promoter + ATG
acaaaagaaagaagtaggtccattatcaaactccgagtgaatattgatgatgccaccgccaaaacagttcactaatacatcttctgttgcttcactttccttcttttaataccttctctaaaccacccaattttctttcttttttcatattccaagatttggatttgagtttctctttttggaaattcctcttaaatcgaatatataataatgtcacaaaattaggactagatacaaaaaaaaaatcattgtgaaaactaaaaaagcaaagcatatcaaatatatctcttgaagctagttggcataatattctctgagttatcgaatattctatatatgtaaatggccagtttgacaattacctaaaatcatatgatagacataaataattctacaaatttttaaaataaatttaaactaaaagacaataaaattaccattatgttcacatttagtaaatatttcatggacgaatttctccacgtcgattttcgaaatctcataattttccggcgccggaatatacggtggtcgtgataccttaagcaccaaatcccaatccaaccctttaaagaaatcatgtcccttgattccttcaacattaatcctacggctaggatctttctccaacagttttcttaccaagtctcttaacgatgtcgtttctccgaccaaactcggcggttcagttaatatctttaaaaaagtctctttacggttggaccccctaaacggcgtcgctccgtacaacatctcatacaaaaccactcccaacgaccaccaatccacggcgaagtcatggccacttccggtgattacctccggcgcaacatattcctctgttccaacaaacgagttcgacttctctcctgaaaactccgactcggaggatctcgaaaccgagtcgtccggggagattccggagttacataaaccggaaaatgcgaagatagacctttctttcttcgtcgccgtcgaaagtctcggtgacgacgaaaaagaagattgtggagttctaggaggtagattcgtcgaaagatcaaaatcaacaagcatcagatgaccattctcttgaatcatcacattatcaggcttcaaatctctgtacacaattccttgattatgcaaatactcaagtgcaatcacaagctccgccgcgtaaaatctaatgatctcatcggaaaacatttcttccgactgttttttccttaaagagttgagatctcttccaggacagtaatcaatcgcgtaaccgataactttatcggtggatataacaccatgaagacgtggaaacagaggatggtcgaatcgagacaacactccttgttcgaaacttatgcgtttgtactcatctttggccttctttgactcgattgattctcttagtatgacttttaaagcaagccatttgttatcggcttttactaagaacacaactcctttagatccacgtccaagggctgagaaaatctctagatggtcgaagttgagagtcgggatcttgttctccggtggtaagaggtggttgctcatcgctcaagagtttatttttgatttttttttatggttcaatattcttttggttgtctttaaagcagtttttataagagagaaggggttaagcttttctaaaggtaggtccgtatagattttgtttccttgccgggaaagacttgaataaacgttttaaccaaaaaagaaaaatgcaaaagatttacgtagtaagacacggattacttttaccattttactccttctcgaatcaccattactaagcatcaaatattttcagtcatttcaaacatcagtttttgcgtttatatttgagtaaaattgaaaattttccatagagatacacaactatttagcgcaacatacaataacattttccaaatagaagaaaaaagaaaaaatttacttgtttcttaacgttcctactcaatacacaaactaacaaacaagttaaaacgagtaaagattcttggcgaaaacaacaacaaataatgattcaatattttaaaataacacataaacagttggtctaaatttataaataatctctaaaaaatatcataaaaatcacatggtttcattctcatatacaaagacagtaagaagattttctttttttccgaagtggtcttcaatgaatatcgagttagaaaatggatttttttttcctactaattacttacaaaattttgatgaaaaaatagagtagacgaaatttggtagaaaatttcttgcgaaaagatacaagaaattcactaccaatttatgtaacatttggtaggcaattcagaagaatcaaactagattcatgacatatggggagaaatgcaagaaacaaaaacaaccgaggatgagtcttatgctcttagctaaaaacatttatttagattttaggtgtggttgcgacaaccaaaaaaaaaaatacattacaaacgattgacgtgctgagcgagaaattaagaagtcgagtccctaaacccgtaggaaccaaccatatatggtgagaccactgtggaatctgccagacaacacccaagcatattaaccataaccacagtggctgagcaggaaactgtttgactggtaatgactcattaacagaaaaattaacattgcagaaaaaaaagttataataaggtaaatggatcgtcccaagatcattattggataattaaaatcactggccagtggaattaaagcccaaacaagcccatgataactcaaaactagatcaaccagtaatggcccatgatgtcgtacttgaggtgacgtggcaaattctgaattcgcgcaccggtagattcttttctttttccgtataacacctttcaatacttgaggtgacgtggcaaattcacaaccactttttatatgatataccgcttttaccccttaagcctctccgcgtaaaaccgagaacaaaatcttaagcaccgttgttccgattcagagatcatcgtcgtcgtcgttcagaaaccttcaaaa

SEQ ID NO: 8630 - DNA, 3000 bp, Unknown
  misc_feature (1)..( 3000): cDNA_ID_1821774_gDNA_ID_1971822_Annot_ID_58347 3000 nt of promoter + ATG
gtagtcactagcggtttctatatggatctcgttgctctgggaatctatggaaaatttgagtacagagaacacgccttttaagctagataatgtgattgagattatgtacgaaatgagagaatgaagaaaagagacgatggtggtgagagtagctcacaaaagaggaattattagtgatagttttaaattatttctctgtttttgtcgattggattggattgcagagtccactagattgcatgatgcatctcatatgtgaagtgtctctgattaagtgattattttgtgaagttagtgttctcatgtgtgtattttttttctgattaaaaggtaacattatctgtttttgtagtgtttttttcttttttttttcttttgtgatgcattcctgtatgtgtattctgtactcttttgatgataaatacgtggttatctgaatatgttctcagcatgttcaagttccggttccaacaccaaagagtaatgaggtttgcctgaaattagaagctactagtctaaaccctgttgattggaaaattcagaaaggaatgatccgcccatttctgccccgcaagttcccctgcattccaggtattctaatagctttgaagattttagtttctgtatagaagaaagaggttactttgcttagaggtcgttgagtttggaacctttgatatttgttttgaacagctactgatgttgctggagaggtcgttgaggttggatcaggagtaaaaaattttaaggctggtgacaaagttgtagcggttcttagccatctagtaagttttttcagacagacaagtagaaactttaattaccttgaaacatgttaagggaaactgattttgttctttcagggtggaggtggacttgctgagttcgctgttgcaaccgagaagctgactgtcaaaagacctcaagaagtgggagcagctgaagcagcagctttacctgtggcgggtctaaccgctctccaagctcttactaatcctgcggggttgaagctggatggtacaggcaagaaggcgaacatcctggtcacagcagcatctggtggggttggtcactatgcagtccagctggcaaaacttgcaaatgctcacgtaaccgctacatgtggtgcccggaacatagagtttgtcaaatcgttgggagcggatgaggttctcgactacaagactcccgagggagccgccctcaagagtccgtcgggtaaaaaatatgacgctgtggtccattgtgcaaacgggattccattttcggtattcgaaccaaatttgtcggaaaacgggaaggtgatagacatcacaccggggcctaatgcaatgtggacttatgcggttaagaaaataaccatgtcaaagaagcagttagtgccactcttgttgatcccaaaagctgagaatttggagtttatggtgaatctagtgaaagaagggaaagtgaagacagtgattgactcaaagcatcctttgagcaaagcggaggatgcttgggccaaaagtatcgatggtcatgctactgggaagatcattgtcgagccataagagcgttgtagccatctttgactgtctgtgaatgtgataatagatgttaaaagtttgcgtaccgtttacagaatgttttatgttgttttgtttaatatacccgagtatgtcgaaagttacatgaaaagaaaatttggatgaaataaataatacttgttaggtattttagttttaccataccgctgaagttgaaccgaaactgagcatggaatcgaataaaacagacccaacaacatcataaagcccaatagcccattaacgacttcgtcaattcccctatcttaaaaagactttctccagtagaatcttccggtaaataaaacaatagtcgaaggagatttccgtcatttcaaatggtaagaaaaccagaattatttaatatcactctcttaagggaccaccgttgccttccccaccacaaccaaccattttcctccatttttttctttttccttattaatattttaataataatacaaaaatcaataattatcttcttaaatatttaatttaattaattaattatgtatttcgttcttcttcttcttcttcaatttcttctttcttctcccatggcttcctaaacaatctgctattcctctctctcttcttcacctatagtttatctctttttttttgttttggcttctcttaaattcactttctctaaaacataaacgacattgatgtttcttcatcagatcctttaattcttctccaattctcattctccttacatcaatggtgagaatttttttttatagattatgtttttaattcttgtgttcatgtaagatttttttttttttttttttttgtgttttattgttttcttaattccgattggatttgttttttgtttatttttctcaattttatctcaatttcttggacaaattgatctttttttactctacaaataaataaagtttgagactttatagcagaatcttcatatgtagcaattgaagatttttttttcttttctaaaccgatctaaatagattaaatcatcattattgaaaacaaaagattttgtttttattttgattaaatcctttttttttttttttttttttgcagataaactttgtagttggagatttgttgtggatgaagattattgattgcagcttataggaagctgctctttttgttttgaacaatgttgctaacttttcagattcttataattaatcagtcttatgatgagaagttggttcttgattacatactacaatcaagaagtaaacagtttatgcaatcttgtgacggttcttgtgttcaaagagtagatacttgttcttcaaggtggaggttaacagaggacaattgacggggtttttaatcgttgttgtattgctcgaataaacggaatcatggaaaggtttgttcttgttctgttcttgttgttgtttgtatatatattggacatggtgagaaagtg

SEQ ID NO: 8631 - DNA, 3000 bp, Unknown
  misc_feature (1)..( 3000): cDNA_ID_1821770_gDNA_ID_1971822_Annot_ID_58348 3000 nt of promoter + ATG
cagttggtatgtttgcgaaatccttttgtgcctcatcacatttcattagtatcatgtgatcatgtcaaaagtctagctaaaccatggctaatacttcgtggctttgaatagtttaagacattttttctttctgttttgtcatctattggatcgctttgcaaatctttatagactaacatttaaaagaactgcagacatgtgggcagttggagcgatactagctgagctttacgctttaactccgttatttcctggtgaaaggtgaattcatttccctttcaaacgatactagctgagcttaatctgtgtgcacacttaagatagaccatttagtgaaaactgatataatgatttctttatgagtagtgagatagatcaattatacaaaatctgctgtgttcttggcaagccggactggaccacgttccctgaagcgaaaagcatatctcgaattatgagtattagtcacacagaggtaagagttcttaatgaaaagataagaggcttattatattaactgcacttcaatattgactttgttctttgaatatcttgtgacagtttccgcagacacgaattgctgatttacttcccaatgctgctcctgaagctattgatttgatcaatgtgagttcttgtgttcactctttttgcggatatttcttaccattcttaagaatgttgtgatctttcaatatctttatttcgtatatcatctgtttctttttttgaatcaacagcgactttgctcatgggatccattgaaacgaccaactgctgatgaggcactaaatcatccatttttcagtgtaatttgaatattcccttgcttcttttgattttatcacacactcctctctttgtaataatcgaaaatgtaatgatatattcggaacagatggctacgcaggcttcatatcctatccatgaccttgagctgaggcttgataatatgggtgaggctttatttttctttgttaatctgcttcgtatagtatgctttcatgaccataagattaagttcaattatatttgtggtattctgcagcggcgttgcctaatcttgagctaaatctctgggactttaacagagaacctgaagaatgttttcttggcttgacactagctgtgaaaccaagtgctcccaaactaggtaagtatcattccctcgtgtagagttggtcactagatctgacacaaattgacattgacattgagcatggtttcaaatattgtttgcagaaatgctccgcaatgtatctcaggacatgagcgaggtaagctcatacgcaatgaacgtcacttatatagcattgttaaacttttcatgagttgtaataaatctgttgtttacaaaagcagaattttctcttttgccccggggtcaacaatgatcgagaaccatcaggtgatgaaaacttgagcatatgttgataaaactgcagatttctgttatatttctctgtgaaaggttgttgaatatctctctttgaacatttacagttttctggtctctgctctctcctgatgaaaacggcctccacgcgccagttgaatcatctcctttatctttgtctttcaggtgagattacaagttgtctctatggatccattaatgtgtaaacagatttgcctaatgagaaacatttactgtgagcagtccaatgcagcaacacacagttggacctccacagtcgagtggcttcacaatgacatcatcaatgcaaccgaatatgttggaccgcccgtggatggccgtgtctgcgccgtttcaacaaagtcattacctctgatctaataaacccataccctagtaaaaaaagtaaataacacagaggtttgtcagaaagatttgagtttaaagaacaagatagcaaaacaaaacagaggaaaggtgttagaattttcattttttttgtcaccaatttgttcttaatttgtaaaaatttggtttggctgatgcattttcctctcagagcttgagctctatcaatatcgaacaaataatttccttattcttgtctctgtataatatatgataaaaaaagacattgaaatcttgatgtggcattaccataaagaattacgtttcattaatgttggttctgtcgtcttttaatataaaagtctttaacttgtgaatctgtcttatctacaagaaaatttaagactatatttattatgttaattacgatacttattttaatctatatttagtaaagcgaacaagtcctacaaacaaaccaaagatattgaaaaaaagtcactttggagatagaacagaatataaaaaagattctttaaatgatcttttatcaaaacaagattctaacaagtcttagaaatctcaaaacgaagaacaagtaagaagcttgtagccatgggtggtgatactttcaaagatggtaaattttttgatctttttctttgaactgtgtttgcatgtttgatttaacgaaaaataaattatttttaagatgttgtagatgaagaatcttcaagatcatcatcatcatctccttgttcttgttgtttcaggtatattattatttaatctttatcactaatttttgttgagtatgatcataatcataatcaagaaagtgatggtggttttttttttttttttttggtgtagcagtgatgatttagggtttaaggatgatgtttctgaagagaatttcaccaatttctctaatcatgttactgatttgagaaggagagaaaaagcttaccaagagattcttcaaagtcatgatcttttgcttagaaccagcaaacggaaacttagacaagccagaaatgagattttgaggtattttttatatatatttaaattcaattcatttagggaaaagttgtgtttgttctacttggtgatcatacaaactcaattatgtttttgactattattatggttgatatatgcatagctatactcctggatcatggtctgatgtcaagttgagtgattacaatattccaaaaacgacatcgatc

SEQ ID NO: 8632 - DNA, 3000 bp, Unknown
  misc_feature (1)..( 3000): cDNA_ID_1821756_gDNA_ID_1971822_Annot_ID_58353 3000 nt of promoter + ATG
tttgagtgacacgtcatgaatttatgaaatgaaactttgattgttatgagtttatgaaatgaaactttgatttttttttaatattaattgcacattaacaatattcagcaaaataaaaataaaatcatttgccttttcatcttctttcttggctaggaattaatatccatcattgcatcactttttttaatcatctgcattttcacgaccttcttgcatgggttaagcggttgggttaagcatgtcttcattttacaatgagtacttaccatagtgactattttttccttttctattttgagttgatttgatgttaatctggaagaaattggaacctaattgttattatctgccctttttagttcccagcttagctagattaacaaatcaatcaattatcaagtgtctactataagctgtgtaatttccaggggtaaaatacagggatggaagttataccaatcctagataacaaaattgttgttgaacatgataagaattagagtatttagtataacctctttcaaaaaaaattatttttttgaaatctcatcatcatgcaacaaagttgacaactcaaagtcttcctcattctgttgtttatgcgcttcaaatttgatttaatatctttaaaacctcatatagaacgcatgcattttgttatccagctcattacaatggctaccctaatctcataagatcgaagtggtagtgatggcaagcatatgtaaaatgcttgaaaataagacattaaatcgtattcagcccaagtcaaaagagcacccaatgtgagagatgattatgagcaaaacatctaagagaattttcggagagttattatacctcaaattcttgcttatgtttcatatatatatatatacagtaaaacctctataaattaatactcgataaattaataatctctataaattaataaatttttccggtcccgagttgggattagtgtaaaaagttacacaaatcgataaattaataagataataatttttttgagagtcctatataaatatatggtcccatcaatattataaattaataattgcataaatgtacaactatatatatacattatatattagaaatttctttcaaatatattcgtaatattttttttgtttaaatttgtatctattataatttgaaatttagttctaatatgttattatatcaaaagaatttggtgttattttctagacatgatattatttggtatttgtaattgattttcgaaagatattttttataatgaaaaatatcttgtttttttttaaagttactatattaggaaaatctctcaataaattaataaatattaatttattgataaattaaaacctctctaaattaataaaattttgcagtcccaacattattaatttatagaggtttaactgtatatatatattttttttttctttattctttttcttttctcttcttggtttctagcattacacacatatatgatactatatataatttaaatactaatatacatattatatttttttattagtcaaaggtatacttatataaataaactacagtaaaaccaccataaattaataatgttgggaccatatattattttatattaattttaaattatagtttcagttcttagaattttagagaaagatgaattaagatatgattttatctaaataaagttatttttttggatagtataaattttcgtagttttagacttgcaatttttatatttaagaaaaaaactcacttatacaaatgagtatctaaaaataaatagacccaaaattacaaaaactatagataaattcacttatacaaatgatagacgtaaattcaaatttatgaataatgacctcatcatcatttttgtttggacaaaagtaattaaaattatacccaacagtatttaacatataatactatcaaaatgagtataatgcatatttaaaaactgaaaaattacataattgattggccatttttatgaaaattatatttactatgttttcaaaacacaaaagaaaatttgtttgttacaataaaagttggagataagctctatcaaagtttgttttaaaaaaaacatacaatggtatattaacttttatatatgtttgtaaatttatatgataattaatttatattaataatgggactatatatttacataggtattctaaataaattattatcatacccaattttatcaatttttacactagcccgtcttgagactagaatattttaataattattttgtttattaatttcttatttattacatttgaaatattattaatgattttctcatttccactaaaacttataaatcttacatttacagttaattagaaagaaattgtttaatattttatgtcataataacattctaagttttgtaattcttagaaatttttttctttgttccattaatatcctttccttgtaaatttattttcatgaaattgtttcttaatgatatcaaatttatatagatatctctaaaacaaaataacacattatgtatagtactaaatcattttgttagatttctattttctttcttatacttttgttatctttttttcaatcttcttcatttctttgtagtaaaaacatttaaatcacccaattactaatgtataaattataacttaattaaaatctaaaaatcacataaattgaattttgggggattaggtatattaaatacaaaattagctacttaaaataattaatcgtagggtctacaaccatttcaatgctgaatgaggatgaatgcattgaggaaaaaaatctcctatcatatatatgattttcaatttagatattgtattaattttgtaaagattgcaattcaactaccaaacttagaatgctatctaattcatcctttatacacaagtacacaactatataaataagagagaattttgctctaggactaaaatatataaaaaatactcaaacgggtcaattaaaatg

SEQ ID NO: 8633 - DNA, 3000 bp, Unknown; identical to SEQ ID NO: 8632
  misc_feature (1)..( 3000): cDNA_ID_1821756_gDNA_ID_1971822_Annot_ID_176229 3000 nt of promoter + ATG

SEQ ID NO: 8634 - DNA, 3000 bp, Unknown
  misc_feature (1)..( 3000): cDNA_ID_3045814_gDNA_ID_1971822_Annot_ID_176220 3000 nt of promoter + ATG
agattgtgagagaacataatgagctttttttcatctttgagtgcatggtaaaggcgatctccgcttttttatcttctgtaggattttttagtctgatgttagagaatatattctcattgttcttggataatgatttgactaggatcacaatctgtaccatataatgaaagaaagggaacgacctttttctgaaggagaaataagaagttttatgtctcagatgctgcaagggctcgcacacatgcataaaaacggttatttccatcgagacctgaaacctggtatgttttggtactttgtattgtattaattgaaatggttttcgctctttgaatgtcttataaacaagttttgttctgtttctgaagagaatttgctggtgaccaacaatatcctgaaaattgctgactttgggttggctagagaagttgcatctatgcctccttacactgaatatgtgtccacacgttggtaagtgatttctctttgatattgccttcgcattcatgcatgaaagtatgtggtataaggtgatatcgacgtataccttattattggctctgactgcaacaggtatcgagctccagaagttttgctacagtcttcattatacactcctgcagttggtatgtttgcgaaatccttttgtgcctcatcacatttcattagtatcatgtgatcatgtcaaaagtctagctaaaccatggctaatacttcgtggctttgaatagtttaagacattttttctttctgttttgtcatctattggatcgctttgcaaatctttatagactaacatttaaaagaactgcagacatgtgggcagttggagcgatactagctgagctttacgctttaactccgttatttcctggtgaaaggtgaattcatttccctttcaaacgatactagctgagcttaatctgtgtgcacacttaagatagaccatttagtgaaaactgatataatgatttctttatgagtagtgagatagatcaattatacaaaatctgctgtgttcttggcaagccggactggaccacgttccctgaagcgaaaagcatatctcgaattatgagtattagtcacacagaggtaagagttcttaatgaaaagataagaggcttattatattaactgcacttcaatattgactttgttctttgaatatcttgtgacagtttccgcagacacgaattgctgatttacttcccaatgctgctcctgaagctattgatttgatcaatgtgagttcttgtgttcactctttttgcggatatttcttaccattcttaagaatgttgtgatctttcaatatctttatttcgtatatcatctgtttctttttttgaatcaacagcgactttgctcatgggatccattgaaacgaccaactgctgatgaggcactaaatcatccatttttcagtgtaatttgaatattcccttgcttcttttgattttatcacacactcctctctttgtaataatcgaaaatgtaatgatatattcggaacagatggctacgcaggcttcatatcctatccatgaccttgagctgaggcttgataatatgggtgaggctttatttttctttgttaatctgcttcgtatagtatgctttcatgaccataagattaagttcaattatatttgtggtattctgcagcggcgttgcctaatcttgagctaaatctctgggactttaacagagaacctgaagaatgttttcttggcttgacactagctgtgaaaccaagtgctcccaaactaggtaagtatcattccctcgtgtagagttggtcactagatctgacacaaattgacattgacattgagcatggtttcaaatattgtttgcagaaatgctccgcaatgtatctcaggacatgagcgaggtaagctcatacgcaatgaacgtcacttatatagcattgttaaacttttcatgagttgtaataaatctgttgtttacaaaagcagaattttctcttttgccccggggtcaacaatgatcgagaaccatcaggtgatgaaaacttgagcatatgttgataaaactgcagatttctgttatatttctctgtgaaaggttgttgaatatctctctttgaacatttacagttttctggtctctgctctctcctgatgaaaacggcctccacgcgccagttgaatcatctcctttatctttgtctttcaggtgagattacaagttgtctctatggatccattaatgtgtaaacagatttgcctaatgagaaacatttactgtgagcagtccaatgcagcaacacacagttggacctccacagtcgagtggcttcacaatgacatcatcaatgcaaccgaatatgttggaccgcccgtggatggccgtgtctgcgccgtttcaacaaagtcattacctctgatctaataaacccataccctagtaaaaaaagtaaataacacagaggtttgtcagaaagatttgagtttaaagaacaagatagcaaaacaaaacagaggaaaggtgttagaattttcattttttttgtcaccaatttgttcttaatttgtaaaaatttggtttggctgatgcattttcctctcagagcttgagctctatcaatatcgaacaaataatttccttattcttgtctctgtataatatatgataaaaaaagacattgaaatcttgatgtggcattaccataaagaattacgtttcattaatgttggttctgtcgtcttttaatataaaagtctttaacttgtgaatctgtcttatctacaagaaaatttaagactatatttattatgttaattacgatacttattttaatctatatttagtaaagcgaacaagtcctacaaacaaaccaaagatattgaaaaaaagtcactttggagatagaacagaatataaaaaagattctttaaatgatcttttatcaaaacaagattctaacaagtcttagaaatctcaaaacgaagaacaagtaagaagcttgtagcc

SEQ ID NO: 8635 - DNA, 3000 bp, Unknown
  misc_feature (1)..( 3000): cDNA_ID_3089827_gDNA_ID_1971822_Annot_ID_176219 3000 nt of promoter + ATG
aggctactagattacatgataaaacacaatcatgattgtaaatgattttcttcatttctgatgcttacgtagtcactagcggtttctatatggatctcgttgctctgggaatctatggaaaatttgagtacagagaacacgccttttaagctagataatgtgattgagattatgtacgaaatgagagaatgaagaaaagagacgatggtggtgagagtagctcacaaaagaggaattattagtgatagttttaaattatttctctgtttttgtcgattggattggattgcagagtccactagattgcatgatgcatctcatatgtgaagtgtctctgattaagtgattattttgtgaagttagtgttctcatgtgtgtattttttttctgattaaaaggtaacattatctgtttttgtagtgtttttttcttttttttttcttttgtgatgcattcctgtatgtgtattctgtactcttttgatgataaatacgtggttatctgaatatgttctcagcatgttcaagttccggttccaacaccaaagagtaatgaggtttgcctgaaattagaagctactagtctaaaccctgttgattggaaaattcagaaaggaatgatccgcccatttctgccccgcaagttcccctgcattccaggtattctaatagctttgaagattttagtttctgtatagaagaaagaggttactttgcttagaggtcgttgagtttggaacctttgatatttgttttgaacagctactgatgttgctggagaggtcgttgaggttggatcaggagtaaaaaattttaaggctggtgacaaagttgtagcggttcttagccatctagtaagttttttcagacagacaagtagaaactttaattaccttgaaacatgttaagggaaactgattttgttctttcagggtggaggtggacttgctgagttcgctgttgcaaccgagaagctgactgtcaaaagacctcaagaagtgggagcagctgaagcagcagctttacctgtggcgggtctaaccgctctccaagctcttactaatcctgcggggttgaagctggatggtacaggcaagaaggcgaacatcctggtcacagcagcatctggtggggttggtcactatgcagtccagctggcaaaacttgcaaatgctcacgtaaccgctacatgtggtgcccggaacatagagtttgtcaaatcgttgggagcggatgaggttctcgactacaagactcccgagggagccgccctcaagagtccgtcgggtaaaaaatatgacgctgtggtccattgtgcaaacgggattccattttcggtattcgaaccaaatttgtcggaaaacgggaaggtgatagacatcacaccggggcctaatgcaatgtggacttatgcggttaagaaaataaccatgtcaaagaagcagttagtgccactcttgttgatcccaaaagctgagaatttggagtttatggtgaatctagtgaaagaagggaaagtgaagacagtgattgactcaaagcatcctttgagcaaagcggaggatgcttgggccaaaagtatcgatggtcatgctactgggaagatcattgtcgagccataagagcgttgtagccatctttgactgtctgtgaatgtgataatagatgttaaaagtttgcgtaccgtttacagaatgttttatgttgttttgtttaatatacccgagtatgtcgaaagttacatgaaaagaaaatttggatgaaataaataatacttgttaggtattttagttttaccataccgctgaagttgaaccgaaactgagcatggaatcgaataaaacagacccaacaacatcataaagcccaatagcccattaacgacttcgtcaattcccctatcttaaaaagactttctccagtagaatcttccggtaaataaaacaatagtcgaaggagatttccgtcatttcaaatggtaagaaaaccagaattatttaatatcactctcttaagggaccaccgttgccttccccaccacaaccaaccattttcctccatttttttctttttccttattaatattttaataataatacaaaaatcaataattatcttcttaaatatttaatttaattaattaattatgtatttcgttcttcttcttcttcttcaatttcttctttcttctcccatggcttcctaaacaatctgctattcctctctctcttcttcacctatagtttatctctttttttttgttttggcttctcttaaattcactttctctaaaacataaacgacattgatgtttcttcatcagatcctttaattcttctccaattctcattctccttacatcaatggtgagaatttttttttatagattatgtttttaattcttgtgttcatgtaagatttttttttttttttttttttgtgttttattgttttcttaattccgattggatttgttttttgtttatttttctcaattttatctcaatttcttggacaaattgatctttttttactctacaaataaataaagtttgagactttatagcagaatcttcatatgtagcaattgaagatttttttttcttttctaaaccgatctaaatagattaaatcatcattattgaaaacaaaagattttgtttttattttgattaaatcctttttttttttttttttttttgcagataaactttgtagttggagatttgttgtggatgaagattattgattgcagcttataggaagctgctctttttgttttgaacaatgttgctaacttttcagattcttataattaatcagtcttatgatgagaagttggttcttgattacatactacaatcaagaagtaaacagtttatgcaatcttgtgacggttcttgtgttcaaagagtagatacttgttcttcaaggtggaggttaacagaggacaattgacggggtttttaatcgttgttgtattgctcgaataaacggaatc

SEQ ID NO: 8636 - DNA, 3000 bp, Unknown; identical to SEQ ID NO: 8629
  misc_feature (1)..( 3000): cDNA_ID_2050038_gDNA_ID_1971822_Annot_ID_176216 3000 nt of promoter + ATG

SEQ ID NO: 8637 - DNA, 3000 bp, Unknown; identical to SEQ ID NO: 8628
  misc_feature (1)..( 3000): cDNA_ID_3000057_gDNA_ID_1971822_Annot_ID_176210 3000 nt of promoter + ATG

SEQ ID NO: 8638 - DNA, 471 bp, Unknown; identical to SEQ ID NO: 8627
  misc_feature (1)..( 471): cDNA_ID_1989503_gDNA_ID_1971822_Annot_ID_176202 3000 nt of promoter + ATG

SEQ ID NO: 8639 - DNA, 3000 bp, Unknown
  misc_feature (1)..( 3000): cDNA_ID_1821748_gDNA_ID_1971822_Annot_ID_58355 3000 nt of promoter + ATG
attaatcaactcaacaatctcattccttttctcctctaacttcaaccctaaactccaattctcaaaatcacttaaatcatcaggttctctaacaaacgtgcctttatcagattgtaacgcaagtaacatcatctcaaaacgacgataaggtttcaacgacaaaacctgatttgtacggtcacgattcggttctaaagattccttaccacgagaaataatcttagccgttgatttccacacggtggcgccgatatcgtcgataacttgacctaccgattcgagagattccgaagcgacggaggcgccaatttcgagagaatcaggtaatcttgaagctactcgtcggattattgaggtttctttcttcaattcggatccgaattcgaccaaatcgcgacggtaggatccgattacagattcggattttgtcgatagggttttgattagattgccgaaactccatgaagaagaagaagaagaagttgtggattcatgcataggtgaatcggagctatgttgatgatccatgaagaagaagcacaaggaaactaggttttttttaaggaagtttaatttcgtacggaaactataataaataataatgaatcgatgattactggttctgttttaaaagtcagatgtcggtggcatgtgttttgtatgaacaataaaatatattaaacggttcacttaaccgagtaataattggaaatttgtaccaaaccggttgaattattttagaacttttgccttttttttcttttatacttgcgtcgcttatttgccatcgaagaaaacggttggtggagattattctcgttgcaggctggtccaaggctaaagcccgtaaaacatgagttttatgcagcaaatgactataacaaagtttaggagtatcattttacagaaatttattgtggtagattggttaatagctggattctctctacaaagatgatgtgtttgaaccttcattattacattatgaatatatatttttttaaactatatttaatgatggaataaaattgtttttgcttcaggtttactttgggtcggccctgtcattgcctcaacgtctaatgagtctagaagagaagtcgttgtcatcgccgtctcttgtaataaatgcctactttcatatggatttccctccggatcctaatatggacatttatcctagtagtgacaaacatttttcatgtggttatgcatcaggtttgatctatttctatagtttgtcgatcaaattagacgagtttcattacgatcatgggcctgtgatatataaccttccgatcaagaaatccttatgtcgcttcttcagatgtggtttgctactgccactacaagatacagaatcatctttgttgttctctgttgcatcatggaagaaatattcttctctcatcgtacaagatgagcatcgtagaatctcatcgtacaagatgagcatcgttttctacatgtctacgaaagagtgtgctggttcaactcccttaattgagcttatttcatcttaatgtgataatgtcattgttatgggctgttcaagatatgggcctcgtgaattaacagggccacaaaggcggtaaaataagcactatcgcgtgcacaattttaatctttaaattgccgttgactcaacaaatttgacccaaaatttagtcaatgtttactaattcatagaaaaacgttaaacaactcgattaaaacctaataagctcataaaatcctcaaaatttctctcaaactaagaagtctatgtgattttttctcaaaatcgattgataaacacatagaaattaaaatcaaattcgcatattttgatgagagtatgatgaatagatgaataaagaagcttctaattcgaatgaatgaattagatttacagagatcttagattttaatttgagacaaattttatgattttctgagtttattaggttttaatcgagtaagttatttggtatttctttcctgcaccgctacccatatttttttatttgtttcctgtttactttttacttgcctatcacgatatttattcgcatatcttaataatctcctttccttgctcaacaagatattaaatttgtgtccactcatgtttccgtatcgaatgccaatcaacattttctttgaaaatgtttgatacttaaacctttgtgaccaagattgtgtcatggttggttgggaacatgtttttcaatgatccttttgtccactgagtttctccttcatctttgaatcgtaagcattgtaacatggtttcggagggatatctccttggtttaagctgatttgtgatgttaaatctagattgacatacgtttccttggtttgatgttgtatataaaagaagttgagtattatagtttattattatcaatacaaaaaacggcttatcacgatattttgtaaaacacgttcatcttagattcatttcgatatttgtattggtagactgaatggataaaccacgacataagccttggaagctctttaaatttgttgatttttgttgataatttaggtttatttgtgtttgttagttttagatgagctaattatattttgtttcgtattgttgattaaggatgtgaaattggtaatgttggtagatagattggacgattgttggtttcttgttatggaccaaagtttttaagcaaaagtttccttttaacccaactctctcttagagaattaggctaactgttggagtttggttctttcattaagaagaagagaccttatataggccacaatacattgtgtaaaaagaaacctcaaacctaattctaaaagtaaaacttccaaaacccatgattaaaagaaacccataacaccaaaactaattaattaaaacgtcctaaccgtggcctaatcaatctaaccatagtctcgtatcatttttcttgtggtgtagagacgcgagggcattgcaagagaaggcagctagataggcaggacaatcaatgggaggagggaaccatg

SEQ ID NO: 8640 - DNA, 3000 bp, Unknown
  misc_feature (1)..( 3000): cDNA_ID_1024383_gDNA_ID_1971823_Annot_ID_58357 3000 nt of promoter + ATG
ttactttttgcatgcttacataattggctgtggtaacaataacatatactgcatcctacaggtatggatgtatcttgctgtaccagttttactctatgttggtgagaggatctttagatttttccgttccaggctttacacagtcgaaatctgtaaggtaaaatctcacttacagttacattttgaactgaattacatgaaaagacacattgtcaatcatctactattatctctataccaactcaaatgatttggtttcaggttgtaatttatcccggaaacgttgttgtgctacgcatgtctaagcctacatcatttgattacaagagtggacaatatgtatttgttcagtgtccatcagtatcaaaatttgagtggtgagtgttttatagggaaccaaaacaagcctaatagctttccttgcaatcctagaacatatacaaactctgttctttgacaccacaaagactaacttaaagattctcggtcctaaactccatctccaggcatccattttctattacttcttcccctggagatgattatctcagcattcacattcgtcagcgcggtgattggacagaagggattaagaaggcattctcagtggtatgtcatgcccctgaagctggaaaaagcggacttctcagagcagatgtaccaaaccaaagaaggtgcataaaattctttaaaattcaatatattattctcagaatgtgaattttgatactctctcttgtaatatagttttccagagctgttgatagatggaccttatggcgctccagcgcaagaccattggaagtatgatgtggtattactggttggccttggaatcggcgcaacacctttcgttagcattttgagagatctactcaataacattattaagcaacaggaacaagctgtgagtataacaagcttaaaaaccttgttgatgagtaacagaatctcaactaaacttttttggagttatgttatattctcaggaatgcatctcaggtagttgtagtaacagcaacatctcgtcggatcacagtttcagttgcttaaactcagaagctgcgagtcggattccgcaaactcaacggaagacgctgaataccaagaatgcttacttttactgggtaacacgagaacaaggctcgttcgattggttcaaagaaatcatgaacgagattgctgattcagatagaaaggtaaaaacaatacacttattcattttaaattcaaaagattgtatgatttcaagttactcactgacgtatttgtcttgtgaacaactacaagggtgttattgagatgcacaactacttgactagcgtctacgaagaaggagatactcgatccaatcttctcactatgatccaaacgttaaaccatgccaaaaatggcgtcgacattttttcaggaaccaaggtaatgatctttaatgattagttgattactttatcacaaacaacactcttttctgatcttgtataacaacttttggttattttaggtaaggacacattttgggaggccaaaatggaagaaagttttatcaaagattagcaccaaacataggaacgcaagaattggtaacacacagaaacatcagttcactgaaatgatattcgatatcgcggtgtatatttgccttgtctgaagaatgtttttttgtttgttacaggagtgttctattgtggagttccaagtttggggaaggaactttcaacactctgccatgaatttaaccagacgggaattaccaggttcgatttccacaaagaacagttctaactggtaaaaggattaatcccccacgattatggttttttgaatgaatgaatcaatgttcatgttcgttctcgtatcctacttgttgtgttttcttttcgttttgtgtatcacaaataccaacttttaaccatttcatctagagtaggactgttaaaaaatgtaaaaagtcacagttaaagcttgtgaagaaaaaaagagtgtaaaggagtaaaaatgagaaattcaaacaaagggggatgatgggatcattgggatgattggttctgtctgttcaattgttttcaaatttgagcacttattattgggcctgtctttgagctctcttattattatgggccgataactagtttggcccatttggttatcaacttgaaaatgaatgaagaaagctggggaaaagggtctttttaaacccgaactgactcaaaagcctcaaaaatttcactgttccttggttcttgaccggtttagaatcatggtttcggttttgaatcatatttgctttcttggacatgagaaagtaactgggcttcatcattgttttagctcattgggcccatattacgactcgagctaacgctgtcaagttaaatgctttttcactttctagagcattcttttttaaacacttcttttaaccaagagacggttcctacttctctaatatttttattttctagttttttggccagcagcaaaatattattttaatttagtgtcaagataattaaattatcattgtcttttgaatgcagaccgaaagtacatgagtcacataagcaagcggctacgattcaaccacgtgtcacatgaccaccggttcgaccgtttctttgtccagccgcgtgacacctgaaccagaaaagtttaatagccattttaataacagagccgttaattacacgtgacttaaaaagccgttatccttaacagcgttaacatctcggtcctgtgaaaacactttttatatgtccccacgacatttatcttttcctaagcatcgctctagttaaggaagcagcaggtttggatccgaaccaaccaacggatcagatcagaaacaaaatattcaacggctcagatttattctaattttcctccttttattgttggttttttcattcgacttcgagatctttcttctcagaggtgtaacgaaaacgctagaacaataactttgatcgttcttcttcttctcttgaatcggaaacaatg

SEQ ID NO: 8641 - DNA, 3000 bp, Unknown
  misc_feature (1)..( 3000): cDNA_ID_1814302_gDNA_ID_1971823_Annot_ID_58358 3000 nt of promoter + ATG
gaaatcaaaagagagaactcaaggaataaattttagctttacctgatgagctcggcatataagatcaaggtcatgagtttgaaggaactcagctactttgtcagccccaaatgtataagagacacctctgtcattctccccccagccttgaatctctctgtcaggatcagcccacaacaaatcacaaagaatgccctgatcaggaacgtcaataggacgaggaattctcctgatgtcatctaagctcttaatatcaggcgatagtccaccatgcatgcagaggatcttatcatcaatgagagcagaaacaggcagacagttgaagcactcggtgaatgttttccataagcgaacattatatcttcttttgcattcatcgtagaatccatatacacggttgattgaagcacattcgtgattgcctctgagaagaaagaagttgaacttgtatttgaccttataggcaagaagaaggcatatcgtctctatgctctgcttaccacgatcaacataatccccaagaaacaagtagttcgcagctggtggataaccaccatactcaaacaaccgcaagaggtctggaaactgaccatgaacatctcctgctcatcaacatataaacttaaaaccatcaacaaaattacaaatcatacagttatgatagcaacagaagggtttaatatctatcatacaccaaattcagcaactaaacaaaactattagctatcaaatgaagtaataagtcaagcgagataccaacaactgcttatgcaacagagctaagggaccatggttcctcaaagacacaaaagtaagaggtcactactcacaattccgcaagaaacactaacttaaagtggcagagcatttaactaattcacaacatacacatcttcaaccatttcaatgtacacttatatcccaaaaatctaagctttaagcttcccaaacaacaaacttacaaagctaaacccttacatcaaaaaatgtaaaattgatcaaaaacccacaacacaaaaacgaattcaagataaagtaaacagagagaaacatttctctattcagtaacattaccgcaaatcttgataggagcctcgagctcgaggagattaggctgactgagaaaaacctcttttgaagctaaacatagctgacgtatctccgtctcagtaatctgtgcttgcttcaccgtccttccattattcgtcgccaaaagccgtcgtattatatcgtcaagtaaagtctcatccatcgtagcaacaaccctaatttctctctaacgcacagaaattagataccggaaacttctcgtctaacgaatccagagagatccgacgattgttttaaccgccgacgtctctgggttcgtatcgttgacggagaagaagatacagagagcgttaagtagagagagggagagagacccaaatttcgtaaaccctagaaacttttataataaacgcggtaataattatttttcatcatccaaaactcgaagccaaagaaaggagcggagtggtcacgtgacaagttctcagacgcacgtgcgattgttgttgattagtctgcatccagttatgtggtttcatttggttcaatttaggttaggatcggttttggacaaaaacttataataaaaataaagataactaactaattttaattcatattatagttttaatatacttaaatttaaattattatattttgtgaatttagttaaatgggttggttccaaaaactttatatacaaggcaaattactataccggttaggttataaaattaatttgggtggatctcgattcgataatgttgaccctccttaatgtatgtgttgaatgtattatgagaattatgttattttggtttaaattgctcaccaaaatacaatcttaaatgtatttgtgtcatataagtttttttctctcttaattctctcaaatcttttagagataaaaaactttgaatcttgttactatcttttgctaatccgattaacatcgggctttagatttcgttttatgttttagcttttcgtcttcgttcgtatctatctccgacttattgtcggtttatcttccaaactttgtttcggttattagttttaatcacatgtttttatttttggcggaaaaatcacgggtttatgttttttaaaaaaaaatttacgagtttactttttctcaattttatcgcttatatatttaagaaatttggaaaaataatgatttattaaattggtttagatgtgttggttaaacttaaattgacattggtttagagattttaattagtttaattcaattttacaaaacttgatgtgttaattgggtaaaccattgaaaccattaaccattacaacccaactcattttactcatcaaaccaattaactcatcaactcatttgacccattaactcatttgagtcaaaattttcaactcattagggttcatggattgagttgagttgagacattttgatacctctagttttaaacactaaacaaaacaaatacaattcaaattcaaattatttagttgtgatatagattttaaccaaatgaattgtattttattgtttttatattttaaagaataaaaatcaaatataataattatacattaattaatatataaaaattcaaaacattaaatcatatatatttttaatatgctaaacaaattaaatttttttaaaaaaatatataatttcacaacaacagcgagttaagtataattaaagtgtacctaaaacatgcacaaaaatatagtataattttttgtgtcgtaactcgtaaatatagtataatttaaaaccgtatttttagaaaccaaacttatttttatattttcgttctgctttggtaatttcctctggtcgttcctttgattagtacaaaagacaaattttataataaacacaaaattcaaaaactgtatttattcagtcttctccctccttggcttctctcctctcctcccaacaaattcaaaatg

SEQ ID NO: 8642 - DNA, 3000 bp, Unknown
  misc_feature (1)..( 3000): cDNA_ID_3100683_gDNA_ID_1971823_Annot_ID_58359 3000 nt of promoter + ATG
ctcctagtcttgcattggttacaaggtagacataagaaagaataatatcaagaccaacataaccaaccaaaaaaaaaaaacatgtagctctataaaattaagcaagagggataatacaatactaaaacatataaagataatgggactcatgtaagattcattagtcaatgctgattagaatactaaacaaagaagatcgaacaaaagtaaaaaaaaaaaaaaaaacctcttttacttcattctctgtgattctaccatctccatttttaaccctgcaagtttcaaaaagtgaaaaaacaaatcaagaactttagctacatgttgatcaatatgtttaacaagatttgatgataattgataacaatacatgttgaagaagatttgaagacgagaatcgaagctttcgtctgtaatttggtaccaaaactcgtataattcttgaagattgatcttatcaaccattattcttcttctcctacacaatgcgtcgaacaactcgtctgcaaactctttggaattttcattctccaaacctttcaaacacagaacaacaaaatttacaatctctatcgattctccagagtcaaactcaatttcaaaactgtgaaaatcattatgtcgaacctatgcaatgagcaaaatcacttttgaaaagataaccatctttagaaagatgagcgaaattgttttgaacatcgttccaatcaacgattccattttctttgctgcttatgaatttcaaaccatgaatcgctctctctgtacccgatccatcccgattaggtctagttggtcgctgagataaagctcgagggagattaaccgaatcggtaatttcgcctctgtgtggaaccaccggttccggtgcagaccgagacgaataaccgtaaccacgccgtgagatcttctggatctgctgctttgagttcgtccccgccgtcagtctctccgacgacgcgctccatcctaagctaagcgaccttgatcctgaaccggaatccgagcaagaggtgatctctagatcggtacctgaaatatcggtgccggttccggtaacggagtcgatgtttattattacgccgcttgggaattcgattgttacttctaggagctcttcgccggaggaggaggaggaggagggtgagggtgagtatgttgctggtaaggatggaaagctttgggtgaattctccggcggaagctaaatcggagccccaacgatcgttgtgagtcccgccggaaaatgacattgacattttgaatttgttgggaggagaggagagaagccaaggagggagaagactgaataaatacagtttttgaattttgtgtttattataaaatttgtcttttgtactaatcaaaggaacgaccagaggaaattaccaaagcagaacgaaaatataaaaataagtttggtttctaaaaatacggttttaaattatactatatttacgagttacgacacaaaaaattatactatatttttgtgcatgttttaggtacactttaattatacttaactcgctgttgttgtgaaattatatatttttttaaaaaaatttaatttgtttagcatattaaaaatatatatgatttaatgttttgaatttttatatattaattaatgtataattattatatttgatttttattctttaaaatataaaaacaataaaatacaattcatttggttaaaatctatatcacaactaaataatttgaatttgaattgtatttgttttgtttagtgtttaaaactagaggtatcaaaatgtctcaactcaactcaatccatgaaccctaatgagttgaaaattttgactcaaatgagttaatgggtcaaatgagttgatgagttaattggtttgatgagtaaaatgagttgggttgtaatggttaatggtttcaatggtttacccaattaacacatcaagttttgtaaaattgaattaaactaattaaaatctctaaaccaatgtcaatttaagtttaaccaacacatctaaaccaatttaataaatcattatttttccaaatttcttaaatatataagcgataaaattgagaaaaagtaaactcgtaaatttttttttaaaaaacataaacccgtgatttttccgccaaaaataaaaacatgtgattaaaactaataaccgaaacaaagtttggaagataaaccgacaataagtcggagatagatacgaacgaagacgaaaagctaaaacataaaacgaaatctaaagcccgatgttaatcggattagcaaaagatagtaacaagattcaaagttttttatctctaaaagatttgagagaattaagagagaaaaaaacttatatgacacaaatacatttaagattgtattttggtgagcaatttaaaccaaaataacataattctcataatacattcaacacatacattaaggagggtcaacattatcgaatcgagatccacccaaattaattttataacctaaccggtatagtaatttgccttgtatataaagtttttggaaccaacccatttaactaaattcacaaaatataataatttaaatttaagtatattaaaactataatatgaattaaaattagttagttatctttatttttattataagtttttgtccaaaaccgatcctaacctaaattgaaccaaatgaaaccacataactggatgcagactaatcaacaacaatcgcacgtgcgtctgagaacttgtcacgtgaccactccgctcctttctttggcttcgagttttggatgatgaaaaataattattaccgcgtttattataaaagtttctagggtttacgaaatttgggtctctctccctctctctacttaacgctctctgtatcttcttctccgtcaacgatacgaacccagagacgtcggcggttaaaacaatcgtcggatctctctggattcgttagacgagaagtttccggtatctaatttctgtgcgttagagagaaattagggttgttgctacg

SEQ ID NO: 8643 - DNA, 3000 bp, Unknown
  misc_feature (1)..( 3000): cDNA_ID_1814295_gDNA_ID_1971823_Annot_ID_58362 3000 nt of promoter + ATG
aagatttgtcagacttttttttaacaaaaaccagaaaaggggattttaagaagatcaatactcccacttcttgagctccatgccatctggtggagtgctctccactttcttagtcccaacttctttccagtttgtcgacagtaccgtcccattcgactctgcctgtcaaacccaaaaaccacccgagaggaaaatctcattagtcgaagaacaaagcagagttattaaaccaaaattttaaagaccaaagatagatttgctcacaaatgatttgttcattgcccgcctcatgtcttcatctgcactcgagtatatgtcgctgaaaaatttgttcatagctgcatctccatcaagcttctcatccttctcctgcgaaattcaaaagtgataagcagaaagaacaaagtacagcaaagcctctagtgttaaggatgagaagttagcgtttgtggaacctgtttcttcacttcagcttccaacttgtcccagtcttttgctggcttagaagatgggtacactggtctctgcgacagcgctgcatatgcacataaaatcaaatgagaagagagagagaccactttgggttcagtttgtttaaggttttacgattgtggttcagaataaaatagtaaacgtaagctggtatcttctgagacaaacctgatgagacattgggtttgggcaaaacactttgccctttaccatattcaagggaggcccaggtgattatctctgctttcgcaagacggatctcaactttggtcgacaatacttcaaatctgcacttctctggtattatctgaaaaacacccatgaagaaggatttagtaaaagtgtgtgtgaaaacaccgtaattacatatgtcaaataaaatataccttcccgaacaatctcggctggagatgataagcttcctctccagcaacatcaatgacaacactcagctgcaccaaaataaagccaagatagacatctcaaatcaatacagtgttaaattacaaagagagatagtttctgaagttcagataaaagtcatgaattctctgattgaaggatactcacaatctgctcaccaaactcgacagttacgttctccttaggtacttttttggcgaaaattgtcaccaccgcttcttctggtttctggtagaactcgtgcctgttgagcaataaagttatgagtataaaatgattctggaaattaaagaagaatttacatgttagataaccagactacctgaacatcggtttggcaggtgctgcaggaattggaacaggaggagcatcagcttccgttgctagtggtgttgtagagcttgaaggcaaactcggtggcatcggctgaaccaaatctttctcttcttctgaacagagatacaaagactatatcaaaattatagccctaggcgcagacaaatacccaaaatcgtttagtaactaatttcttaagctatggagttgatgtaacatacctgcaatacgaagatcgcattcatctatcatcttcttaaactttggttcattcggtgcaacagaagctcccttttccagggctgctttagcagtactatattcttctagcttcatacaagcagtgctgcgaacacagtagcaaagaatcagaagatagaattataattccaatcaaatttgaacataacatcaaatcattcactacagagagatggtgaaaatatcatacccctttctgagataggcttttgccaacgttggctccaactcaatggctttgttcgcatctacaacagcttctgctcatagaaaccacaaaaagataaaatatcaaatcaaatcatcaaacaacaacaattcaatcaaagtacagtaactacaattacaattactcaaataagttttcttatccgaatcaacaacctcacaaaagaaaccctaaaactaaaactaaaccaaaccaataacaaaaatcaaaactttgttccactatcaacagatcgaattaaagtaacgacaaaagaacaagacccagaaccccaaaagcgtcaacgaagcaatacatctaataaagtttcaatctttaacgatgatattaacggtaaggaagagagttatatttataccagtgaagttatcgattttgatgttggcctgagcacgatcggcgaagaaggcggcgcaattgggatccaagtcaatggctttggagtataagtcaacagcaacatcgaagtcatcatctagaaaagcttctttagctttctctgctaattccttggccattgattcttatcagaggatttgagagaacacaaacaagtcagagagagagagagattatagagaaagagaccgattctattcctctaggctttttttttttttgctgtgtttgggattttttttttcttttaagaacgttttaatacctctactaggtcatataaccaaaaacaaaaaggtaattagattttattttattttctaatttccttttgattttattttttaacataagattgattcttgataagtccagattttttaacaaataaattagttgacaaaagaataatactgaaaaaaggaaagaaaactaatggtaaagatatttatagagaactacaataatttaaaataatcattttctactcattttgtttatatcgtaatcgtttactcatagtttagcaaatacaatgtgatttgtgaatttagactatgatatattttaacaagttataatttatatattgactagattaggacccgtcgtccaatacacagatttaagtattttaagttgataataatctagtaaagttaaaatatcaattatcaaacttttgccaaatatttaccttaaaaaatttatttgcaacctcgaaaaatccatctaaatatgtacagatatatttgtcgtgattactgttacgacgtcgtttaccagttcgttcttccttcttctctcaccccgactcgttcactgactcggtcgatgcttgtaccgcttgattcaagccg

SEQ ID NO: 8644 - DNA, 3000 bp, Unknown
  misc_feature (1)..( 3000): cDNA_ID_1814291_gDNA_ID_1971823_Annot_ID_58363 3000 nt of promoter + ATG
cagagttactctctttttctctttttttccattttttccatgttttaccaatcacactgccgttaaattatgtgtcaaagtaaaatataataagttaaaaataattatatatatattaaatcttaaaaaaaaacttaaaccacaatgaaatgacacattaacaacccaaaaaaaatggttcctgattcctactcttttaatacactttgatttttatacgtgttttcgtagttcattcgaactattctaggtagattaaccaaccatatgtaaatgatctagtcatcctcaaaattagtcaaacgctagtgcaatataaatttatgatcttagaccatctccatcaatctaatactgtgtgggtttctcaacaatattattttaatcaatctataataattaaattatttatttaaattttaaattataaaaaaagaattagaccaataatataaagacacgtgaaaagcagttctataagtttctcaacccaagaacggtcttctgactctttcttctacttttttattattttatatttttttttatctccagatactctatcaaatattactgatgaatatgctctaagggttaaagacccccatttctttaaaaaaaatagaccgcctttacagaagccaaattctatttttcagtacatgaagccaatattgaaattattgttttgacttttagactaggaattacgatgcttgtgccaactacgatattacaaatataattttctggtcaaatggaaaaaaaaattattaaaaaaggagagagagatgatttatcgataaaagtaaaactagagacaaaggtcgttgttattcatcgaccacccacatgtaactaactaaaatgagttcatttgttactatgtcaactaaaaccgttgacactatccaaaaataattttgaatctccttgttatgacttttgcttcaaattaagcaaatcagtggaaacttaacataatgattttcgttgagagaacatcagtctgataaaaaaaaagttctttatattcagttaatctgaaaaaactgaagaaacaaaaattacagcaacaaataaaaatacagaaaaaagatatatacatgaacaaagataagtattagtagtacactaatgttttgtttgagaagaggaaaaaaacagaaattagtctataagacaaaagtcgttgagattgtgttggtcaaagtgaaggcttcaaaatcatggtttaacagtttttgatattgactagaaaaatctttgtggaatgttactggtctttaaggctgccaaaaaattcatttatttcattcacgacattaagtggtccaatgtctgccactatcaacattactgattctagctttcatcaataagaaaattttgaaccatataatattcgcattaattcaaaagcattctaaaaatgtagagacagatggaattctacaattctatttaatacaaaagcttacacttttcatttttagcttattctaagctgtcaagtgcttagcattaattgtattgttattatgaatacgtgttttgagtgcattattgaaaagaaggtggagatctcaaccgtctccaatgagtgatttaggagtatatcttaaataatttgcatttttttggtttttgaaattttaacataaagaatcctataattaggttttaaaatcaaaagcaagaacatttctaatattaatgcctattaaaaggggcacatttcaactgttctgacctctaattcttgtttatgccgacatgatgtttgcagtagccagtaatatcagtatttttcaataaactctagctctttaatacaagatcggtaatctaggaaaagccccaattcttacatggatatttttttttgtcatcgtgacgatataaagatgacctaattggcctgacaaaatttacacaaattttattcttacataaactaaaaaaggtgaccaaataatgacaattttatgtgtaatattagaaaattgttattaaaattttcttagcaaatattgacttcgtttttctcaacgatattatatatatgaaattttatgtataagttattacaatcgcatgttctataatttgaacggataacgaaaagcaaaatttagatttcatttataaaataaaaaagaatgaaaattcgaaattcttgtttagcaaaacttttgaataaatgatgtggacaaagcggattaaaccactctatttctagagcggataacaaattacgcttatcaaatttatttctacgtaaaaatgatctgtagttaagctgtcgcagataattttttttttttttaatccgcattattatggattataacttatcaatggtaaccaaaaagcaactcaagccgcaaacggattcgtgcgtcccaagtgtcacaactattcgaactatatatgaagttatgtgtctgttagaactggatttttactattattattactattattattatcatcgattaaaggatgttttttgatgaaaaaaatatattgttctatttagccaacaaaatgaaaagaattccggtccattattttccatcaaatacaaattttaacagattctgatcttgtaaaattcaaattgatgtctcatttcttttccaaatactgaaattggacttaatgttatgtactctcaggtcccccacaatgatcactctttttcacaaatttggttcaaatccactccaaaagatacaaaaacaattcaaactttagggaagtcaaacaaaactataacaaacaataaggaccattttgaaatttctactttcttcagttctttcatggaactttcgttgtaatctatctacaacgctccacatactcggtgtgtacacctgaaaccaaacctctatatatagaacacaatctcacttcccaacacatcaaaccataacttccaaatctcaacagaaccaaaaacaaaagaaacctatattaaagaagaaacaaaaa

SEQ ID NO: 8645 - DNA, 3000 bp, Unknown
  misc_feature (1)..( 3000): cDNA_ID_2999986_gDNA_ID_1971823_Annot_ID_58364 3000 nt of promoter + ATG
ttttcctcatatttcaactagttaatctgaaaattgtaccagtcaagccatcataagaagagaccaataaattaagagtttgtctttatattaaatcacgctttgtatatttttatttaggattttggttgggtgaatattttgatctttagagataggttgttaatatttagacgttttgacaactaattttcctaacgatgaaactagtctaagttttaatgatttttaatcatgtgttctgtttattcttttaatgcttcacgtggatagattgttttcaatttctctgttagtagcatagtagccaaatgggcttagtgtttttattaattagccatgcgagattagctgtcaaatattctgttacaatgcactaattttcaaatgaagagaaacgagccttcttttctaaagggtcactgcaaaaatgcattaacattctgatgaaaaaaataaaatatagtatcagatggactttgaatccattaaaaaaccaaccctcttaaactaacactaggccaccatcatgtttagaattctatattttgaaactagtacatttacgtgttctttggtttcttgattgggatactatagtcatttttaggtttcgttcaaagttgacaatcgtataaaaataaaaactgaataagaagttttcgtgaaaagtaaattaatttagagagaaagttgtgtctgcgtaaagtatccatacaataatggattaatttttggacatatataaatttgataactaacgctaatgtcgttatgttcttgaatctatttaaaatatataagagttttatgtagaatagtgttagaaaatctcagtaacgtggacggtcttggccatggactatggcggctacaaatggtgggagtaggtctatgggtaaaatataataataccataaccagattgagttaaggattatttcttaagattttaaaattatacctaagaattatatttaattgcatgtgtatataaagtgcaaatgcacacatgactctacctagctagctagctattcgcatatagtaaaaagaaaagaaaaaaaaaagtctatgaattgataaataggtttttgaaatttgaattagattgtatatatgacccaacaaaaaataatgtcatagaacatatgatgaaattcgctatacaaattcttttacccaatgtatagtctagttttgcaccatacgtaaatgtttattctttaacgtaaaacctatatatagatttttgcgtttaatttgaactttataagccatacaatacgtaactacattcgtcaagataagttgtttttgttaattatcaacaaccatgatttaaaatatgaaaaaatggttaagggttagatatattttattttttgttaaagcaagggttagatatataatatattacaaataacttcaacttcattaaaatacgtcacatgccatgatttgtctaccaaatacaattaattaacttaccgactttctcgacgaaattaaaaaaagttatcgaaattatcatctgtgtacacctttaattccacgaggaatctatataggctaataaatagccatcgtacgtaacatcaaacaaaatatatactagctttggaatttttgttagtgtcctggcatggcaagttggataaatacaaaggaaggtaataaaaattaaaatagtaataaaattatcacaaattttaggtatatagatctccatatctataacaaacatataacatgttaagaataaataaaaaagacgaaaccaccaagcaaattctaaagatcgttggtttgaatgacattaggaaggaaatgatagtaaatatactagttctcgagaaaatgtagggatttaagcttagaacatcttaattattcaaaaataataattgaaaaccacataaaattataaatcttgcctaatagttaatattgagactaaaactcaaactttttttttttctttggttttacttttttgattatatagataaatggatgatgattaatagttttgttggagatgattttttgctaccaaatatagacacgagttatggctctattgtctctcacataaaaacgttaaacgttctactaaaggtggcatgaatcctatgcattttggaactgacaatattcagttgtctctaatagataactaagacttataactttaatctccatttttttttccgcgaatcaggatcggttatgactaaagcgttaaacagtctctattaggacaaacctaattttgttttccaataagttatttcagttaaccttgctactatcgcatatcgttacccttcggtaaggtggttgggaagctttgatcattcccatgcggacaaaccagctacagttactctagagcactcaacattccatcgaaaaacaattcaaccattaagaagatctccaaaaatctggctcgaacaaacttttaaaatatttgttaattaattttattattcaatctcagttagtatagttttatgtaaattcaactagtcttcatacttattttctatcttcattaagtaataatacattagttttggtagaattagtttttgtctggctttataagctagttagtttaatttacaatattattttcaaaatcatttgattttatctattcatgtacttatttgtttaaattttattaacatttggagagaatctatttttttcttaattatatagattatttaccataactatatcaatatttccttaagaacacattagattataataataacaataagaaaagacaaggcaatagtatctttatgatgataattgaaatcaaacaggaataaatagaacatgtttggtagcttctttcttcttgttctcttctccacattgctttatcctctcacgaccaacactatatataatccctaacttgggaactcttatcctccaaacatagttaaaccaaattttctaagtgtctcataaaaa

SEQ ID NO: 8646 - DNA, 3000 bp, Unknown
  misc_feature (1)..( 3000): cDNA_ID_2991917_gDNA_ID_1971823_Annot_ID_58366 3000 nt of promoter + ATG
caattccacacattgagaattcttatgcaatagaataattaaataaacagtgacaatttaattttcatgcaaacaaagatatatgaacgtacaagtttctacatcaaaatatatttgttaataagattatacaaaactctgaaaacctaatacatggaaaaaaactcaatggtaagagattaagatactaagtgaaagtcattgcaaacatgaaaaggtgaagcttgcttggatcacgaaccaaaatgtcaaaaaacaaattcttgggtttttcattttcgatccaagtaaacttaaccacccccatgacatggttgtcattggttactattaaatgtttaagtaaaataataaattgacttttatgtcaaaaaaatattgaatagtacaagatctaaaatttaaatactcagtgataatcatggctaagaagaaggtaaagcttgcagtgataatcataaaggttttgattcacgatcgattgaggcaaatctcactttcttccatgccatggctatcactcataattatctctcacttagatttttttttttttgttttttgcagtgtgaaaagaaaatcatgcacttgtgatcttatataggaagaatcaaggataagagataaggatgtgggaatccaaatattagataagtataaatctaacaaaatccaaaaatccacacttactattttcttatgttaataccattttagagttaaaatttgtttgaatgaattttttgaaaacttaatgaatagatataggttattttatttgattctcttatttttatcttcatctttccaaatttgtgattcaatttcactttcacttactaggtttgtaaatttaatttacacttatacaactatcgaaccctaaaagcttttatagtcgtctttgaagaagtacaaactccaactctttcttcatttgaatgtcgctccccatttccgtctttttccatgtatatttctttggatgtgatatattgtcaatttttttttttaaggtttataatttactaaacttaagatatgacagggtgaaaccatatatgttttgaaatcaaagcaaaatatatcttgtgcattgttaggtctcactagggtattgatctatgcccacatagtaaaatcatttgtattttgaaatcaaaacaaaatcacattttggataacacattggtattattatatgagatatatagacaactgttgaacactcttaagaacataattaagattaggggatgtgatttggtactggtacgttataatggattgattagatgcaaaaccatatttgtttgatcttttgtagcttgtaaatcaaaacaaccacgatgcaaataattgtaaacgagtttagtgccaagctaaagataaaatacatatataggaaaactcaagttgaaactcctcctatattggtttcctctttggaactaaattgtatatgttacaaaggtgaaactactaaaataaaaaatgaagttgaattattagttgcacttgtagttatcctctctctcttagcaaagccaatcctgagaggagctagaaagtaggtttatttttagagtaattaaacctactgaaaataaaacatagcaaaaaagtacctttatttattagggccacagtaattcactcgccaaccatgttatgggctaaacgttttcaactttatttgctatattgaaagacacccaatatgtaggaatcctaaaacatcacaatatgtaggaatctttgtaaatcatcacatgttttgaaagttataacaaatgattttttttttttttaaaacatttgagccgccttaaaaatattatcgtatacaataaaataattgtagcaaaatcgaaatctctaatcgacagaagttaacgactgaaatatggatttgatgaatcatttagatgtatacaattgtgtcggtcaagttagtgttaatgcacatctttcaacaacagtaataaatcactcttgccaactgattaaacagaaaaatactccgactattttagagcatgcaaaaaagtgagatttagtctgcgaaaatgtacaagagcgaattgtggacgaacccatacctgcttctatcatgatttcagaggcttctggtttcaaatgctatattgacgggtctttgataaccaccaagatttccactagtctcggttagatatgctttgaaaatgacgagacgatgtcatcttgaactgaatgctactattggcgatgttgtggatgttcgaaaatcaagacgttcacgtaacaaaaaaaataaactcacgttccttagctatgacagttaaataaaaataatatcaaaattaaaatatttcgcactataaaaaaaggtttataaactaattttttttgtcattaacataatttcatttgaagttattgtcgttttgcaaaaaggtttctaaataaatcgatcaacacatgctggtgacatttatgatgagtttcaaatgtatgagttttgaagaagtttcaaactcttataagggtttataatgtgggaattaagttttgttaattcgtacgttcaaatataattggaaatgttgtggtaatataaatatttttccagtattcgtacgttcaaatataattggaaatgttgtggtaatataaatatgtttccagtaggggaaaaaaactacaaaagtttcagaaattttcataatgttttgtgactcccacaaattttaacgtgttcgtcatgtagaaaatctttggtaaaagagtgactagggcagtgtcccaagcaacgatgggtcggcacttggtcactccaatggacatgtgttatacagttgttacctatctgagctctaagtactgagtactaaaaaagctgtcatatgttagccacattttacacaacacaaaatccatttttcttctttcataactatcagaaacaaacacaaattaaatcaaagtttcattagttttaaccccccacaaaaaaac

SEQ ID NO: 8647 - DNA, 3000 bp, Unknown
  misc_feature (1)..( 3000): cDNA_ID_1814276_gDNA_ID_1971823_Annot_ID_176274 3000 nt of promoter + ATG
ctattatcacttagagaaaaagtttcacgagtttgtttagctctcatacatatgtcgcagacactgtccaaaaaatctctactactagacaaaaaatcagtaggaatcaagctaattgctttttatgatgcgtgtcccaaacgtttgtgccatagatcatatgaacctttgacacttgtgctcacaactgctgccaactccatacttttaaacaaaaaacttccattctctcttttaccaactccagtcaccgtcctcgtaatgcggtcctgtatcacaagaaagtgatcagcaagctgcacaacacagtaattctcatcaatcatctgtccaacagagatcaaatctgaagtcaattccttgacatagaaaacggatttcagaaccaaactggaaccaaggcgcactgttccttcactcacagcaactcgcttattcccatcagccaatataatcaaaaccggagagatcttgcgcatatcagtcaacagatgtaactttccagtcatatggtgagctgcacctatatctaggatccaagaagagaaattagaacacgtacccgttagagtctcatgtccttgttcgttgggtttgatgttggcttcatcactttttccagcgttcaagagcttgagtacaccacgccactgctcatctgtaagaccattcaccgcatctcgatctctatcagtgataactcgattagcccgttccacagtggttaagccagttgtgacagcattcacataagaggttggagtgcgattttgtcctccattaaagcctagaccgggtttgcctctgcctcgaccagattgtcctcgcggtctatcgccccaccactctgggtatccaatgatcacaaagcagttctccggcgagtgaccgccacgattgcagtgcttacaaacgttcttgttggggaactttgcagaactaggatcaatctgtggacgagactgagtagcaaaagcagtgacatctagcttttcttccttagagtatctattgctcaacatgtcctcttcttgtctcacaatgttgtagacttcttcgagtccaggaagaggaacacgtgatgttaagctagaccgaattgtatgaaattgagtttcatcaagtccatacagaaattgttgaaccatgtcatcttctctacctttctcctgctcagcttcaagattacacacacatcttccacatttgcaggttcgaagaggacgatagttgttgatattatcccaaatcttgttgagttttccataatatccttcaacagtcataccctcttgtttacaagtagcaagatctgccttcatcttctgattctttggaccactagaaacagagaagcgtttacgagtgtgttcccaaagatctctagccacgtcacggtgggagatattcgtcaagagcgccgggtcaatcgtcatcttcatccaagacactagcaaagcattaatcgttaaccagtcctcgaggtccagagattctgacggcggttgtggaatggagccgtcaagaaaaccaaacttcttccgtgagcgcagtgctgttttgaagccacatgcccattcatcataattagtcgacttcaagatcgggtgggagatcacagctccagagttatcagcgaccgttaagtcatacggcgagatcgttcgccggacttcagttacaagaggaattaccggaggagcagccattactccaaaagaaactcaaactttatcgatttcaaatgaaaaaccccagctttagctctgataccatgacaaaatcaagagacaagagataaagataaggttttgtcttgatagcagcttaagtgtttctcagacacttatacaaagagaaagcgtttcagacctaaagggacaagaagggaaaagaccaaaaggggttacaaacagtacataaagcaacattaagcttaagagcaactaattgatgtgctctaaataagataagtagcaatatcttcaacagagagatctttgcttcgttttgttaatctttttgttgggtttgatttggtctttggttagttgcagagtgggaataagctccgcgtgttttggtgtcaacttgttgtcctagtttttagttttgtttcagttagttcctgcaatttctctttcacgtatttgtaagaagactgagtcttcatctttaggctatttaaagccaaacaactatgataataaaacatcgaagcattcagttttagtctctttgttctctcagatcaacacttttgtatgtttatgtagcaaatatgtcatagagatttgaagattgagaaaacactgcttgatggtagtcttgcaccgcttttgaaaatctgtgattacttggctttgatctcataggtcattcattcattagtctctttttcttcttttgtttcagttttggttcccattattacttggctttgatctcataagttttttttttaaggaaacccatttaaggattctacctttggagaagagaatttataaaaacttgacaaaaactctaaccttcaaaattattaatatttgttattaagaaatttaaaggattccttataaaaaacccaccaatggatttgctttaagatccattaagatacttattggaacctggaaccaaatcaaaactcttttttttttttttggttcggttcggttcagttccagttttatggcaaaacctaagtttaggggtaaattggaaaatattcaaaagttttagccaaatatcaaagtttttactaattatcaaaagacacactcgagaaattcataaatgggctaacttttatcagagagcccactaaacaatcggcccgttagccaagaaaatcgtcaccggcgtcttccattccaacatttctccgtcatcgtctctctctctcttttttttttgtgtgtgcaaaacgtctctctctctgtctcataaaatctcagagaagaaacatcgtcgggtcaggtcgaagaaaggagagaa

SEQ ID NO: 8648 - DNA, 3000 bp, Unknown
  misc_feature (1)..( 3000): cDNA_ID_3089558_gDNA_ID_1971823_Annot_ID_176273 3000 nt of promoter + ATG
gataaagcatctagtataaaaacttgaccccacctgcgatgatcatggtcagtactaaaaatgaagctaccaaaagcttatccattactcattttatgcttctcttccccaaagtttatatactgggtcattatctacagataaaaccatcaatgacgaaaaattctaaactgctgtttgaaaatagttacaaagacaacggaatgatatccaaacagaggccataccacatcaaacaagctatttcacaaccatcaacatcccctaaaccctgactggacaatggggccataaatactcaaaatcgaacagaatgcagtgaaactacggaaatggagaggacttactcagtgcattcatttagagcagtaaggagctttgtaagagtggtactattgatctcaaagatggggctactactgttctcttgaatctccgcaagggctgctacagcattggcaacaaccattggattgttatctgatatcaaatccttcaaggcttcaaggaaacctctgtcctcaactaattcagcatttatgtcgaaaagcttagcgacgcaaatagccgcagtcttcctgacatatgggtcatcatcctaaacacaaaaaatatacacaggatagtgaaaagatggactagtcaagatgaaacaggttcttaagggcaataaagatgtttgatatcagattccaatgaagatgtaacattagaaactcaaacctttaggcacttttgaagaggatcacatagatattctgtgattttatcaacacgaatgcagcccattgtccgcacagccaaagcacgaatcagcggatttggatcctgtgaatcctgcagaatacaaaccaatgattttgtaatgatcagtttatcagttcctttccccttcaggttcagaacagaacaaaggaatgccacgtggttttgtttgagttgcttgagtgttacctttacaaaggtatttactgcaagaatagcaagatctggctggcttttcgcataatttatgagatacaagtaaacaagcttcttcaactccaaattttccgtttgcatacaattgactacatcagtgaaaagtgatgaaacatcctttccaacagtcatcgccgcaataaccttcttaactgcatcttttctcttatcctatgcaacagtaaataaacaacaagggttaacaaaactgtagccaaagcagaaaagaaccattccttcttaaatcattaacataaactcttcatccaaatccactgatccagatcgaacaagttctgattcaccaacctaagcttcactaaagttactacgagattgcacacacatctccacattagccattctcaaaaacctaccaattcctctccaattctaacctatatcccaatcagttactgaaaaatgaacggaatcatcgcacttcccacaaaatcacgaaaccaatttcaattcaaaattcaaaatccagaactacacagatctaccaaaatttgtataaggataactaaattacaaggagagaaggatcatcgaccgagagatcgtgaatgtaataatggcggatcacagatccacatggaatgagacaagagtaagattaagaagaaaaaaaaaaccttatactgggaattaagctcttccttgagctcagggatctctcccttcttcgtcgtggagaagtatttcgaatcgtgaccactcatttctctcctttcttcgacctgacccgacgatgtttcttctctgagattttatgagacagagagagagacgttttgcacacacaaaaaaaaaagagagagagagacgatgacggagaaatgttggaatggaagacgccggtgacgattttcttggctaacgggccgattgtttagtgggctctctgataaaagttagcccatttatgaatttctcgagtgtgtcttttgataattagtaaaaactttgatatttggctaaaacttttgaatattttccaatttacccctaaacttaggttttgccataaaactggaactgaaccgaaccgaaccaaaaaaaaaaaaaagagttttgatttggttccaggttccaataagtatcttaatggatcttaaagcaaatccattggtgggttttttataaggaatcctttaaatttcttaataacaaatattaataattttgaaggttagagtttttgtcaagtttttataaattctcttctccaaaggtagaatccttaaatgggtttccttaaaaaaaaaacttatgagatcaaagccaagtaataatgggaaccaaaactgaaacaaaagaagaaaaagagactaatgaatgaatgacctatgagatcaaagccaagtaatcacagattttcaaaagcggtgcaagactaccatcaagcagtgttttctcaatcttcaaatctctatgacatatttgctacataaacatacaaaagtgttgatctgagagaacaaagagactaaaactgaatgcttcgatgttttattatcatagttgtttggctttaaatagcctaaagatgaagactcagtcttcttacaaatacgtgaaagagaaattgcaggaactaactgaaacaaaactaaaaactaggacaacaagttgacaccaaaacacgcggagcttattcccactctgcaactaaccaaagaccaaatcaaacccaacaaaaagattaacaaaacgaagcaaagatctctctgttgaagatattgctacttatcttatttagagcacatcaattagttgctcttaagcttaatgttgctttatgtactgtttgtaaccccttttggtcttttcccttcttgtccctttaggtctgaaacgctttctctttgtataagtgtctgagaaacacttaagctgctatcaagacaaaaccttatctttatctcttgtctcttgattttgtcatggtatcagagctaaagctggggtttttcatttgaaatcgataaagtttgagtttcttttggagtaatg

SEQ ID NO: 8649 - DNA, 3000 bp, Unknown
  misc_feature (1)..( 3000): cDNA_ID_1814288_gDNA_ID_1971823_Annot_ID_176264 3000 nt of promoter + ATG
acaattgaattttttttagatttaatcggaactagacctatgccactaacgatgtttagttaatgttaactgagtgccgtcttggcattgtttgaaacaaatttggtattcaaatcttcaatgagatagtatcatactactaaaaaattgaaacttaggtcttttttggcattgtttccttatatggttaaacattaaatacttacatttcttcttcttgatatatcgtatggtggaggttatatcacctcatttatgttttgtatttaaggatcggtggtggagatctataacatcattcatgtttggttcgtgtctttgtagggagctgttgggagttctcgacacgatggtgacaaggagaatttaacactttgactgagcaagacttgattgattcattctaataaagaaaattatggttgtggaggaggcaaaatcgagaccgcggatgagttcatatataagtagcaatggtggtcttggtatcgacaagtattatccatataaggctgttactggagcttgcgacggcccctcaagattggtagttacaaacttacaatcatagagattaggtatcatgtctaacaaaaaacaaaagtaattcttgaaaaaataaaaataaattgtaagtagcatataataccaagaatgttatgagtgatagtatgagaaccagcctgtgactgttgtcattgattcaagcgatcggaaatttcactttatttatcaataatatatataacattcatatttttcaaaataactatatcttaatagaagtctcacgattcgatacttcgatcgaccacaaccagacgtagtctcgtgtgattgtgtgactaactttaaaaacaacaataatgaaatcaaaacacgaaaatctaattcttacgtccttgttttttaaattctcttacgtcaattcttacctttgcgaccaaaagaacatgttaaatttaaacctactaatttccgatttaaatttcttaatcttgttactatgaaccaaaaattacacaatcttttcccacggaacaaagattatttattagtatccatatacatacaaatatacaatacactcaagccactcatatttcgtacttgatcaagatattttcccccggtaaaatccaatttagaattgtacaacatatatattggaagttccgttgtgtcataccgtcacactaataatacagcataccaataatagagcgcaaacgtttcacattgaatagttcaccacatatcaacttgagtaaattattatgcttagagttgttgtctttttgtttttttattttttttgaatatctggaaattcaaactcaaagaccttacattttctagaggcgggatccacaccagattaaattcatatcctttgggaaagaaatctcttccaacatgcctcaaacccagtatttctaactgagagatttacctacataattcaacaatcatgtctattatgttttcaatttaggatatctaaaaatattgtgaagataaacgaaacaaaacttgagggaaaaaaaacagtcacgtgagtcatgagttataaagcatggataatgttggagatctaattaatctaattgaatgccacatcaaattaagccaatcagtggagaagatcaataataaaagtgaattggatctgccactacacttttagcatgaatatggctaaaagagattggtattggtaatggtatcgttgtcggagattgtcgtaccaattaaataacatgtaattattggatatatattatattgtgtcggcctagtcatatttgatgtgtaagtgcgagtgatttgagttagatatggggtattttacgaggaaaatattgaacaatttagggtattttaagggttgtagtttgagcatcacaagttaattatatttaggttctgcgtaaatttgactcaaaagattaagttatcaaaagaaacctcgtataatatgatccatattaattttcttttttttatatagaaaagttgaagattatgagtaaattggtaaactcgcgatattccagagttcaaaacgtaattttaatgacaatttggtgaatagtataaattaatatattaagtaaaagataacattctattcgatattggtttaatatgtcaactgttatatgtacatataagatgttactgatatattaagtgaataatatgatattcaccaaaaaaaattgtataatgaatgtgactttgagttgaaagtttgaaaacgaagagactataacatttgaaggaatctatggaatacgggtgtggaaccaatagtggaggccctcttcataaaccgagtttcccgagatccaaattgtgctgatggagcggtttctaacgttcttgtcgataatacttgcaagcttggccgaaggaacagaagagttaccatgacgtctaccattacgctcgcaccacaaagtatgaattgattatatggaatacataccttagaatgaaagtatgtagttttggatgagaatcatcaagtagaagaggagagattaaactccaacttgtattgtatctcagtatctgttgcgaagaattcctttagtgagagatgtgtattgataggtgaaaaggaaaaggtctcttactttcatattacgtgggcctcataacatagaccagagctgatagcatacctctctctatattaaatagatgggccaggcccaaacgtttacccatctgtatttattacaaagtacacgtggctgatggacatgtgacgatacgttttgacctattcaaaatattcaaactaatgaaaaagagtcgttgtcctctgacgcgtctctctctatctccttagattttcaaagttttcaacattcaacaaaatcattattttaattttgcagagacgaatcgaatcgatctcatctccaaaaatcttgtattcaaagtttgattttctgggtttcttctgtattatctcgatatttgaaaaaa

SEQ ID NO: 8650 - DNA, 3000 bp, Unknown
  misc_feature (1)..( 3000): cDNA_ID_3089567_gDNA_ID_1971823_Annot_ID_176263 3000 nt of promoter + ATG
tattttattctagccgttgatacaacaaactaacactagccaaagttttgttttctggatcatagtatttaaaaacgttattgttttgtttttgttggatttacaccaagaatagacactaactagtaaggagtatcgttttttaatctacaaacttttgatgcatgttttgttatggtgtgaagggagttgttgggctttctcgactgtgggagcagtggaaggcttaaacaagatcgtgacgggagagttagtcactttgtctgagcaagatttgatcaattgtaacaaagaaaacaatggttgcggaggaggcaaactcgagactgcctatgagttcatcatgaaaaatggtggtcttggtaccgacaacgattatccttacaaagctgttaacggagtctgtgatggccgcctcaaggtcagtatagttacgatttatatataacaatattaaaagaaagaatcaattttgaacttattttccaaaaatatttgtgtaggaaaacaacaagaatgttatgattgatgggtatgaaaatttgcccgcaaacgacgaatctgctctcatgaaagcggttgctcaccagcctgtgactgccgttatcgattccagtagccgagagtttcagctttatgaatcggtaaaagattaattttttgttaaattttcatgtagaaaccttctctaattggaaaaagatttcatcaaattttttaatattttttttatgtcaaagggagtgtttgatggctcgtgtggaacaaacctaaaccatggagttgttgtggtcgggtatggaactgagaatggtcgtgactactggctcgtgaaaaactctaggggcattacatggggagaagctggctacatgaagatggctcgaaacattgccaatccaagaggcttatgtggcattgcaatgcgagcttcataccctctaaagaactccttttctaccgataaaagctccatcgcctaataaaatgagctaaatgtatgttatgcaaaggatccagtgagccagcaacctattcgattgtgaaatgaaaaataatgtagtcgatgggttttgttttgtaatatattttggatttgtatggagggcaatgtttgaagtttgtataatatttatggatatttcgttaggctctaattatgaatgccttctttttaggaagaaatgccaaaaatgataattgaactacatttttgcccctaataaaaatattacatttgagacggacgagattgattagcgattctaccatatttgcaacacccgatttttatcaaaaaatgttacatgcagaaaggtttaaaatagtaataattatgtttttataaaaagaagtaaaataataccaaaaaaaaagttatgcattttttttcatagaaaaattcataattaagtgtattgaaattaaataattttatgaaaaattgtgttattgaagactacaaaagaattgtaaggatatagaggatacacaacacaatgattttgtctagaacgcgccaaacaaacttttttacttattcttattgataataaatcttttacaaaaatcaattatcttagaaataatttgacctattctacatgaatgatcaactccgactaagaagaaatgtatgcctaattctctcttctgtattttctaccacacatctgtgaaaaccaagagaattacaaacactcacattttaggcttttgctaggctttgaagataacacacgtataccaatattctagaatgcttaggtggctcaatgcaaactccataatatttatactatttccagaaccctaacccttaggatctccgagaatcaataagcgggatcttctttgatcttcaagcttatctctttccttatttgttgagaaaaatattcaccaacttaatcgactttcgtctttgatctccacgctaagtcagcaaagctcttcggctcgtcacatcaaccaattcatctctgccatgtcagcttatgcgtctatgtcagcaactcaaccgtctgatgtgatctgatgcagtttcctgatatacaacaatttcctaaaatacaacaggtctctgatgtccatcaactcgttattgttagaatctacatcttcaaaaattccttgtgaactgtagagtcattcgtcgcgtatgaaatttggcgtaaaaagggagactaataggcagaatgtgagtatgggaggaaaaagatggaggtcgccagtacattacaagtgttcataaggtcacactattgggagtaacgggttttggtgcaacaaagataactatttaaaactgattttttaatattgagcatgtacaaaaaaacacggaaaaagattttgtggtgttctagcggatcacttgacaagtatatatgcaagcttttgcgccataatggttttagatgtactttaaaattctgccatattatgttatatatatgagtgttttttgttccatgatctaaatgatgacatttttttttttttttatctaatgcctatctttaaaatattttctggatccaccactaacctcaattgcattcaaaaacgaccaaattggtgtatcatcttcggaaaacacctaaaatatatagaatatcggttcaaaagaatgacctggacctcttttttactcattcacccaagcgaactttgggcatgtttctatacccaatcgaaaatatatcgaacagccaaaaaaacgaatttttagatacaacatatatttgaaaaagttcttatttacaaatcattggtgaaaaatttagacactactcgacacaaatgcatgagtaggtttacccatttgttcacaccaatggacacgttataaataacaattttaatatatctgagcgctgagtactataaatactgtcatgtgttagccaaaaagaacataacacaaaatcctcttctcttctttaataacttttagaaacacaaataaaagtttaattacttttaagcccaacaaaa

SEQ ID NO: 8651 - DNA, 3000 bp, Unknown; identical to SEQ ID NO: 8646
  misc_feature (1)..( 3000): cDNA_ID_2991917_gDNA_ID_1971823_Annot_ID_176262 3000 nt of promoter + ATG

SEQ ID NO: 8652 - DNA, 3000 bp, Unknown; identical to SEQ ID NO: 8645
  misc_feature (1)..( 3000): cDNA_ID_2999986_gDNA_ID_1971823_Annot_ID_176259 3000 nt of promoter + ATG

SEQ ID NO: 8653 - DNA, 3000 bp, Unknown; identical to SEQ ID NO: 8644
  misc_feature (1)..( 3000): cDNA_ID_1814291_gDNA_ID_1971823_Annot_ID_176257 3000 nt of promoter + ATG

SEQ ID NO: 8654 - DNA, 3000 bp, Unknown; identical to SEQ ID NO: 8642
  misc_feature (1)..( 3000): cDNA_ID_4370953_gDNA_ID_1971823_Annot_ID_176251 3000 nt of promoter + ATG

SEQ ID NO: 8655 - DNA, 3000 bp, Unknown; identical to SEQ ID NO: 8640
  misc_feature (1)..( 3000): cDNA_ID_1024383_gDNA_ID_1971823_Annot_ID_176249 3000 nt of promoter + ATG

SEQ ID NO: 8656 - DNA, 3000 bp, Unknown; identical to SEQ ID NO: 8650
  misc_feature (1)..( 3000): cDNA_ID_3089567_gDNA_ID_1971823_Annot_ID_58367 3000 nt of promoter + ATG

SEQ ID NO: 8657 - DNA, 3000 bp, Unknown; identical to SEQ ID NO: 8649
  misc_feature (1)..( 3000): cDNA_ID_1814288_gDNA_ID_1971823_Annot_ID_58368 3000 nt of promoter + ATG

SEQ ID NO: 8658 - DNA, 3000 bp, Unknown
  misc_feature (1)..( 3000): cDNA_ID_1814284_gDNA_ID_1971823_Annot_ID_58369 3000 nt of promoter + ATG
ttgatctccggtttcggattttatctttacctcttcgtctaaccacacgtagcctctcattttctttggcttataccaaatcttgatatactctttcctttgtttccatagcttcgacgacgcagcaataccgaaaaccacatggtttagatccgttgcttcttgctccgccggaaccgccttaaccgttactgtaaccgcttttttctccggtctttgttggagaattgactcggaggttagatcttcgcaagggtgtgtagtggagacgatcttgagagtgtagatgatgtaagtgacggagatgaagaggatgagccagattattaatcgaccgggtcgggtcatggatatacccgatgagctccgatcccatatgggtttctccgatgagtctttttggtttcctttcattcacagtggaacaataaaatccaaatttgtgaaaaaaaaacgagtttgtttctaactggtttggtctgaaaccaggaaaataaataaaacgacaaaattgaatttttttttctttctcagaaattttttttaagacgaggaaaatcgtgagaaaatggaaaattttatgagttgtttttttattttctatttgtttagtgttttttctctctgggcagagagagtgagagatagcttaatgctcttgtagaaacttaaatacgaaagagaacaaaaaaaaagtgagcttacgattcctaagctttcgtcgtgggtcacacggagcgatctacgtgtcaagttttgctctgattagtgattacgtcattactaaaacgatttcacacctttttttttcttttctttatttgtcaagtgttaattattgacaaaatcggtggaatataacctaatttggaacgtaactgagtttccagaagcattatacaaaatcagattaaaatcacttgctagttacataactagtttatatgaaatgttataaatacaaaaccggaagttacacgagccttttgatggaaagttgtattcgttaatagatcagttaatcctatattcttcttcttagttacctgaatagaatacgatcatttattttagctaccacattcctagtagacctccaaaatccatgattcacgaccaattgcattcttttcatgaattttttgtttcggtaattagatcccaatccatattctatttattcatgatttctaggagactacaaaaaaatctatatatgtctgatttacctctttcgattatatgttgttgaacattttcccaaacttctcgtttcagttttcctcgatttttttcgttgagtctaatatctataacaaagaaagtcgctttcatttctttaatgatacaaatttacgatcttgatatctataatagtttaatcctattcgtctgatatatataaactatttttatttagagtaatatgataggactattaaaatttggaagtcagttaaaatttaaaaccttacagaaattttacaaacttagttcaagaataataagtaaactattgaaattctatttaattaaaaaaactcacttttttacaaatagtaagaccatctccaatgtatagttctatatctatttactactataaaaaagaatatttttagaaatattctatttctaatttatatactaataccttttaattatataatttacaatttgaccccatatattatagatttgtaaacatttccaaaaaatataatattatttaaattaaacactacttatttattaaaaacccattacatcatataactataataaaacattacaaattttattttggatttgaattcctttcaaaactcacatgttcgggcatactttgagagtgaacaaggacggattttacaaaaacgatgtgtccaacgacaagatcaagatcaagaaactcctcttccatctacttcatttggacaatattttgactatcttggcggatccacatgcaatttaccggactattaaatcactagttaattttatgttttagttttcttatgttgtttattttaaattaggtacttgtttcttgttaagtttataaaattattttaaatttaatacttaatattttgttaagtttataaaattatgtgttgtaattattgtttgtaaaataattatatgtattaaataaaaagtttaaatttgagggacttaaagtataaataaaaaagttgaactcaaaaatagagtagagaataaagttgctctatatatagagtcaatctgcagaaatctctatttttgaatcaattatagagtagggttggagaagatttttgcatttttactctaaaatatagtagggttggagatgccctaaatatattttaaaacgtatatctttaattcattacatgtttctctctcttattttattttattccctctcgttattttaagttaatagttatgattgagtttagagatttcatcgattctttatttcttaagatctcaacttacatatagtacttgttagcaattgttttgcatcagctgcattttacgagtagcctattgctagttgttatcctagcatgcatatgtttatataataaaatgaagtcgtagatgaagttttatgagacgatcgcataacaataatttgaaggtcatacctagcatgcataatttgtattctctatgaacttttggtcaaacaaagtttttgaatgaaacaaagttatggtttcggacaaaagtgtttaccatggtttggtttggagaaaagatttgcaagcaacatgaatacagataaattaccgaccaagcaagggcattaaaatgaatagactacaaacagacacattatcataatattaccttgacatagaacaaaaactaaatttccttgacttaagatgatcttacacaaagtatgagttatcaaacttaagaggatctcgaggccatggtccatcgaaacctgatctctctagatgagcccttccctaaacattggaatctatg

SEQ ID NO: 8659 - DNA, 3000 bp, Unknown; identical to SEQ ID NO: 8647
  misc_feature (1)..( 3000): cDNA_ID_1814276_gDNA_ID_1971823_Annot_ID_58373 3000 nt of promoter + ATG

SEQ ID NO: 8660 - DNA, 3000 bp, Unknown
  misc_feature (1)..( 3000): cDNA_ID_3045877_gDNA_ID_1971826_Annot_ID_176289 3000 nt of promoter + ATG
aatgtgttgtcccaaaaaatgtaaataaccagtttcttttttcctaaatcatagtattacaaattatctcgaagacattttgacctccaacactaaaacttaagaataaaagatgtactagtattttgagataaatgacaaatatcttcttgaattaggtcttagcttgaagatgaacaagtgggagagtagacaaaacgtgggatagattacgagaaattcagaggtgaaggaacatagtaagagaaaggtaggttcggccacagcagattcctagaccggctctcatgcagcacgatgctttattttgtatgcctaaccatgtgactgcagtctctccatttaattcagttggccgctacttgtttctttgtttttttttcctaaccatggttagtttgtaacactggttagtggttactcacacacttgttactacttccaaccttttttttcttttttttttgttgtcttcaaaatgtaagaaactttaatacttcttaatatgttgattggttttgtcactttgtagacccctgatttttaactatttcggtaaacttttgtaaaacaatttgggtttaaatctctcatgttttattagttgtacatctcagctaatgacaatagctcaagttaacgtatcatacaaaacagcaaaatagattcgaatttgatttttttcttttttctttcaggtagttatatatataactaatgtattgcaaatatttgaaaaacataaagttcaatgaatctaaatttgataattagattaacaaaatcgacatcacatgtatgaaatcgaattcctgaatattcaaaatattgtgtttttttcataagttcttgcatgcatttgcaaacgaaaaaaatcgatttcatatgttatatatatatatagtcgtagatatgtcgtaagtacatttgggtatgaatatttggataattcatcatgggtactagatttcgctgtcgttccatttgtaaaatatcaggattttttaagaaaaagttttatacaaaactgtattacatgtttgaatgaatgatcatacatatatatatttgttaaaatactactatttaacacattaaaaatgacatcctggaaaaaattatattaaatttgaaatctctacatatttttgtgaaatattttgaaaatcatgccaatatatatatgattatattcattcagtcatggtggatcatcattttgtacaccaaaacacattccccattttcttaaaagaaaacttctatatatatatatatatatatatacaaatactactattagatgtgaatatgtagaaatatttgagtcccatgcgaactttacgtaaatatgttgggaaacgattatatatatataactcacttttcttatagaaatagatagaacacaaatagtgtgtgtaaaactcacacataattaaattccatagtgttttcggttgttgaaaaacatggaaaatgccgaggaggtctcgaatctgatgtatttatttatcaataatttggtaatgtgaaataataaaccaaaaaaaataaaaacaaatctttaatgttgggaaagagatgtgaatgaaggtacggtcaatatatagacaatggtacgtaaagcgaagagtacattgccaccctgtaaactctgtatgctctatgttttcacgctattgattttcgcttttcctctgtctctcaacatttatgtgttccatcggttaattcttgaatctcgattgtatttaattccgacagaatcttaaaaacaaaactatttgatcgtaacaccatttacgtttttcttcttctttctttattaacaacatgtaatataacgaggatttaaaatcaatgttagtgtgtgactcaacaaatatcttggtccatcagttacgtttttttaattactcgatttaattggatcatttaaagtaatcatcaacgtttaacaaaaacacaaaatatggtccatttaatactattgtatatttttggcttcttttctcggtctcttgtaaattctaatataaggaaaacaaacgttggacaataattttgatacggtacaattattccatatggtcgctctttaaaaacacccatttgcagttatcttttttcctgatttgaaatggaaatagacatatataatatatatatatatattccttttggagcaaaagttaggaaataaatatatattcttcagagattttatggcacattgtatatatcttaataatattccatagaatcaatacgggtcatgaatctctcttcacgatggaatatatatgatttattaagatggaatcatggaatcatatcatttctttttcacactaataaggaaattatcatatatatcagaatctctacattacacgatccaatctcaaaagaataatatataatcggcttaaaattcgaaacagtaattaaaaaattttcacatcttctactccgagaaatttgggttacagattagaagagaccttgtcataattactacccagtaattttatttaattaccatcacgtggttaaacaaagatatgtagcatgctaacttatccgcgcattttagctattttccacttaaaacatactactgtttactaacatacgctgagagttacagttcacacatcttttctcttccttcttcttcactgtatattaagaacaataagcaatatcagttttttttttcctctgatcgaagccgcgggaaagttataataatataaagatatttttcgtgagagttgctcgtttatgggagaatcgtgtcagattaatttctatttttgttggtttaattttccatttttaatttaataattttaaggaaatattattagagtgaaaggaaaaaaaaaaagatcttgtgggtcgccattatatatgcaggtctttctccaaccttttgctccttctctctcaagtgtcaagaatcaaacagtggcttaaacccaaaaaaggaac

SEQ ID NO: 8661 - DNA, 3000 bp, Unknown
  misc_feature (1)..( 3000): cDNA_ID_2177855_gDNA_ID_1971826_Annot_ID_176312 3000 nt of promoter + ATG
gcctcgctcaatacgtcaaaccactcctccatttctttgacacccttaaacccaccgagaaggtctgatcattttcatattatcacaatgttcgttttggtctaattattaatagtataaattatactttaatttaccaacgagtttaggatataaattaattaatgggtgtgtgcaggtgatattagtggggcatgattttggaggagcttgtatgtcttatgccatggagatgtacccttctaagatcgctaaggctattttcatatctgctgctatgttggctaatgcccaaagcactctcgatctctttaaccaacaggtttttttttcttcaaacattttaattctattttttttttaatacactaagcagccaaattttgacatttaattgccaatatgatgaaccagcaaaattgaaaaataagtgatagtgtttcttatgtgttagaaaccgtcgttaaaatctaatcgcaaccaattgattcgcagcctgactcaaattatgatctgatggaacaagtccatctatttctgtacgccaacggcaaaaagaaccctccaacagccgttgatttcgacagatcattgcttagagattttttctttaatcagagccctccaaaggtacacaacacattaggctaataaatagctgaaccggtacaattcggtttaactaaacccgacttgttttcgttactataggacgttgcattagcgtcggtatcgatgagaccaatcccgttcgcaccagtggtcgaaaagctccacgtgtcggagaaaaattacggttcaatccgacggttctacatcaaaaccatggaggatgattacgctgtaccggtttctctccaagatgcaatgatcaaatcaaaccctccagaacaagtttttcatctcaaaggctctgaccatgcacctttcttctctcgtcctcagtctttgaaccggatactcgttgagatttctcaattacctcccaagaaatcttcttgatcaatgttaccggttatgtaaactgaaccggacataggatcctgtaaaacataaagttagagataattgtccgatttgtttgcccttttaatttggagagatatgaaccaaaaacatatttcggaatgggtccctttttcatcgtgtgtaacagttttaccaaacagtaatactttgtgaaagttttgattaattaatgcaaaaagattagaaaaaagcgaaactaatttttggattacactagaaaaaggttaaaatcaataaccaaaaaaagaaaaaggttaaagttacaaaacacaccggtttatagagtgaaatgattattgttctgttgaattgacgtgccagcttagcatcaccttactattatcagtcacctatatatcacaattcacaggcttcttgctttctctcattggctcgtcttcttccctttcttctccaatcaccttagcttgctgatcaggtaaactagattggtgtttcgtgttgttttcttctcaacttaggtgtttgatttgagaagtttttctatgtatgttggcatgttgcgttcgtagcattgcatatcaacggataggtttgaataggtagaattaatttgattgatatatgaaagaatgtttgtatatatactctaggtctaggttattgaatattgagaaatttattttgttaggtttagatgaattattcttcgatgagtggttcaaagttcaattggcaagtcttttcaatgattgtagtattttggtgatgataagtaagttgttaatgactctcaagtctgaattcatgttttggttttgtttccttgtaaaaatgtgaacgtttttcttacagaagctttcacaaacaaagtatggttaattgagtgactaatccactaattctcttttgttgttttatatcgtttattaggtaatgttttttttttttgggtgtgtaaaatatgatactgactcaagattttatcatatttctgaatccataagctaaagtacatttgagagaagcaagagagatagaatggggcgtggagttagtgcaggtggaggacaaagttctttgggatatctttttgggagcggagaggctccaaagctagcagccgttaacaaaactccagctgaaactgagtcttctgctcatgctccacctactcaagctgctgctgcaaacgctgttgatagcatcaaacaagttcctgctggtctcaatagcaactctgcaaacaattacatgcgtgcagaaggacaaaacacaggcaatttcatcacggtatgtctttaattctttcgctgaatcgagtcctgtgtgctggttatcggatagcaaaaacatctgtatctttacttttcttagattagttgtctgaaaatgaaagaagatcaaatagactgatgggttttgctttgtgctaacaacgcaataatcgtctaaaacttatggtacagttactaaaacatcttgtttggttgttgttcgcaggaccgaccatcgaccaaggttcactcagctccaggaggtggctcgtctcttgattacctctttggtggtggtagcaactagctactgaggccaacttggtcactctatcttctttatcccacgtcacacttctatcattttgtgaaacctcttgttccctagcaaaaaataaaatctgtataatctctaaatttctacgcatatgtgcttcaattgttgtatgtctttcgaacgataacagtctctgatatcgttagtttttttttaccgatttatttcaccaatcgaatcctatacagattatgcaagaaacagtaatgtctttagaggtcatagacaaaacagagaattaaattaatattccagcttgcaaaatattttagttggcccattcctaatttttaaaaattatttgtcatcattaattttaacgacgagacgtattactctttgcctgactctctttctctctctcccggcgacgacggtttagagtcgccatagatg

SEQ ID NO: 8662 - DNA, 3000 bp, Unknown
  misc_feature (1)..( 3000): cDNA_ID_3019448_gDNA_ID_1971826_Annot_ID_176317 3000 nt of promoter + ATG
taaacatattggatgcaatgaaaaggtctaaataaacaaaatcacaatctatcttcacaacaatttcttagaaattcaaacttcacataagttgtttgaatccttttttaattaaaaggatatattttaatatgagttaactaaaataattagacacttaaaccaaattaaaagtaataaattctttacttaccaatccggtggagacacgtgagcccctatggcaataaacttataaccttcttccgccactgcctatcacaacacctattagctttgatgtgtggtggacagtggacttgtaatgatggtgagtggcctatattcattattctttttagaatcatacaagagtttttgcttaaaatgtttatcgagtcacggctattatattttttctgttactattgtattcattttattcttaaagacaaaattaaaatgactctggccctctctctcttctctctctcaaaattttcagagagagaatcaaaccaaaattttcgacgacggtaaattgatgtcgtcggtgatggttgaattgccgtccggtgtagtatccggctttcgtctgacatatattggcttccacagcagtacatggtcggcccttgtctagcatcatcggctctttcagcggtgatggctagctcacggtgttaatccggcgtagttcggttttcttttccttttggtttatatcacggttacgtttcgaccgttgattgtctttagatcagaattcattgggtatgtgtgttggtgatggcgttggttttcagtccaagcttgcttaattagatctaattccaacctatcctttgagtttaaggtttacggataataattaggcagtttgcgtttttgagatgaagattcaaagctctttcctcagcttattatgattgcctttagctgtatctcttatattcaagcttcgattgggtctaagtaacagaggtggttaatcgaagatcttttttctcttttgagattaatagatccgtattagatccttacttctgttttgtagttgttggaaaaattcagatgaagctaatcttcgagtttcattcgacttagtttcagtttccggcagaatcgatggcttcacggcgaaggatgatagatggaaaactttcgtctcctcaggttacatgtgtattcgatgctaacacgtgtctgagatatattagcttgatccaatcttcttctctaaatgtaatgttgggccagttggacttaaaatagtctctgtaaaccgttttatgttgttgggcttttgctcgttcgttgtatgttatgttcatcttaataaaatcgtcacttgtgaaaaaaataaaatgactctggcctttctagtttctacaattagactctctctactcaataatttataatctggttcaaaaggatcctctgagtgtaaaagcatgattcacgttctaacatgtagatgatttgggaataatacaacaagtgtggatcggaggatgttattagacacgcaagaggatccacacacccactaggacacgtgtttacaagtccgagctctgacatgcttcacgttcccgcgacagttcgttgtcaccgtgtaagaggaggtctctcagatctctgagctggccggggaggaccacgtaccttacccgttagccaattggtaacacttacgattataaaataaattactttgttatgataaaaataatattggttcatgcgatgaagatatatcacgttcgattaaggttacagaggaaattgaattttcaagaattgattctttttttgtttgtcaatatataatttggatatctagatttgccatggaatataaaatcattaatttgagtttggaggaggacgtcgacagaaaaaaaactaactattaataattttgagttcctccattttgagttgtcaagtaaatatgaagtcttattttataacaatcagttgaaactattactaattgaatacttggtcgattatcaatgattttaatttaatttctctcaaaatagacacattatttctattttgaaaagaatagaaccaatcatgaataacaacacactatagaacaagttataaaaatgataaatacgtattggaatgtttacgcattgtaggacctgagacaaagaaccataagcccattcctctgaacttaaaccgaaacagagcaacacgtgtctcctccgacacatgtcaccttctccgtttttaacgctgatgctaacacgtaacttgccagcgaatattataacaatttatttcataataagaaaaaactgaattctgtttttttaaatactagtagtaggagcaaagaaagaagcaataatagtggcaaaaagtaaggagacaaagaaattaaaataaaaaaatacaaagccgtacaaaaaacgtgtcgactcgagggatcatctgattgccacttggcacttttcacacattggctattctcgtcgctttcttttcttctacgtgcccaaaacccaacatttattttattcttactcaactttattttattaattttcctcaacaacataataattaattaattaatagataaacttttttatattatttttttgatataggaaagaatctaatttgattacaattccattttttggtgaatatttttaagagtaaatagaaaataataattacagggatttcgtttttaattgtacatgttaatgatgaagaactaaataaggtattgtcaagtaaatggtagtgaatattccgacttgtgctcaaatttgagttctctttctctgtctcatccatttaaacttttttttcttctgtctcccccatttgtaatcaatagtaacgaaacgtgtctcgtcaatttttgtcaatggactaaagagaaacttttttttcagttcttgtgaaaatattggattattatggatcgtggcataaaaatctgattactgtttcataagcttccagtattcttttttgtta

SEQ ID NO: 8663 - DNA, 3000 bp, Unknown
  misc_feature (1)..( 3000): cDNA_ID_2177864_gDNA_ID_1971826_Annot_ID_176315 3000 nt of promoter + ATG
ggtttcttctggtttggatcttgttcttgtgatatgcatcttaaagagtttcccatttttttttggttttttggtttttcttgtaaggtgtagacacgtttgtaagtgtgtgtttatatatatgaagcatgttcgtgcttgcatgtgtattgttttgattcttgatgggtgaaaatgaagagttgagactctcacgttgtgaagctgtacttaaaatgtaaatctgtttgatcgtgatagttttgacacttctgtttttcttgagactcacgaaaatgcacatatgagaaaattggtttaaagtttggattattctattacaaactaatggaaattgattgcctacaaatggagacataagaaagagggaggaacatgggagggcactttctttgagcattttgctactttgactttcaagcgcaagctatttctttacaacgataaaacatattcatcgtatttttcttgtttatatatagatcttcgtcctttgccgcgactgcgatcgactgcgactaagtgttgttctgatcgggactattgaccaatattttaggttgctaatttttaacgatttctcgcgattggttacataatgactatacaaaacgaataatatagcaatcacaaaataaattaagatacaaaatctttagaataaacaagaaattaaattattatttttttataataagttttagaatagatataacaattatattttttattttaaaatataaattctcataaattaaaatcttcaaaacaataaagcgaccaatcacatcgattgttaaataaataacaaaacaagttgctggttgcttgtcggaatcgttggcaactagtaaacggaacatgaccctagttaaaaaccgaaatttatgtaaattttttgatatagctcttctcaattcagaatcgagttctttagatgtacctaactctcactattagtttacttctaagttggttccttgaatcttaatttgtctcttgtctcttatccaagagatagagaattcattaaaataagttatctttttgagattatttacttttttccaaaaagtgtcattttaaatgttcaatgcgaaattttagacaaaattttgtttcatattttatctattaagaagagagatgaaattatataatgtattaagaaagaatataaaataaattttaaatcatcttttttatgaaaacactgtaaaaatttataaatgcaacggaaggaatatacattattcatctactcaaggtagacgaataaagagaccaacataaaaaaaacatgtgtgaagaaataaatttgtgaccgtcatgaatcatgatcttgtgcaaaatttttacaatatatattagattaaaagataagatatgattgaaaatgatgtatactaaattagtgacatattctttcacaaaaaatttttggaatcccatattgagaaatattattaaaaaaaatgattaatacatttttcaagctttgtaataaaaaaatctaatcacgcttatcaagattctttctatatcgtcgactcttctttgtagtcacacttcaaattacattgtagtctcttattaataatttttgtagccacacttcaaattttttataatgaaaattagtgttgctagtcgttgcttttgatcgttgaaccagaaagtaagatcctctttctttaacccctcttaatctaaaaccattgctttctaacgcaagactcttttactcggataatttgtagttgactatgatggaagcaaacggtctggaaaaaccaaaggtggacgcaacaaaactcgggatggctctgcaaatagcatcaagacagatggaacaagactgagaatagctctgcagaagatgacgaagatgaattcaagcaggtcagaagtcgtaggaataagaaaaatgtgaaacccctaaggttcaagcacattgatgatactctctactacaaacaccaacacaagaacacttataatttggagatttcttagaatgcaaattgagattaattttcgacattacagattcaaaaatctttacttttttaggttgccgtcgctaatttcagtcgccagcaaaaaacaaacgaatatgatttaattattaaagaagtaaaaaaagatatttgattgaaaagtaaataaacaatgaatatcttacaagataacaaaagctacaaaacaaataatcttagtattttaaataaaatatcttacaagatttacttaaatatattgatttttatttactatttaggtatctctaactaaattaaacctagattttctttatcttcaaaatttattatcattaactatatatatattcaagaattaaatatattgaattataatattaacataaatacacctaaaattctagaaacttctttttaatatcaaatctggacaagagctatagttcataagtgtcacatggtccgaaacactccgaaccctagtaatacccacacgaacaacttgtcgagtgcgttaagatattcctttttctgatttacctttttaaccctggttaaaaagttcataggtcggtcaactaaaaaaggcaaccaagtcaaagaaaacaatttttactagttgagttcggaaataagaaaagtgaaaaccaaatcctaccttaaacagaatttaggaaaatattatatatttccttcttccacatcaccgatttataccaaaatcatataatcaaggaacctctctaaaaccctattaaatcttctctctttcgttcttcttcttcttctcctcctccatcctccaaatctcgatttcccaaaaaaaaaacctaatctcgccgtactctcctcggttccatctttctctgcggccaggttttttaattgatccgaattcagatttgttttttttttttgtgatctagggtttcggcgatttgattctgaattgctctgttttgtttttgtttgtttggtaatcagtacgtgtgcagat

SEQ ID NO: 8664 - DNA, 3000 bp, Unknown
  misc_feature (1)..( 3000): cDNA_ID_2177849_gDNA_ID_1971826_Annot_ID_176310 3000 nt of promoter + ATG
aaactttataaaatgaactaaattcttctgaatttcatacggaaaaacaaaataaacttatttttaacacatctcaagtcttaaaaccatacaacaaatcatatcaactaatcaacatttttgaaccttttcgtcatcattgcatcgcatagccttgccgcgtctacattatctctaacattatgaactctaatgatattagcaccttttagtatcccagcagtaacacaagcaacagttgcagcatctctttcacttgcctcaggacgaccacaaatatctcccaaaaatctcttccttgaaggtcctataagtataggtgcatgagacaatcctatactcttcttagccatctcttccctgatttttggtagctccatgacaatatctaaattatgatctattcccttagaaaatccaattcctggatcaatcataatcctccaagctggaatcccagagagttctgcttctcttactctctcataaagctctgtggcaacatctttgcatatttcattatactccaaattctctttgttttgcattgtacatggatctcctctcatgtgcatgatcatataaggaacatcagaatccgcaacaaccttatgcatgttctcgtctaaacttcctccggatacatcattcaaaatgtcagctccatttcttattgcttctaaagcaacctcagagttaaaagtgtccactgatatgagctttcccttcatctctgccataccgcgaacaacttttaaaaccggaatcagtctatctatctcttcttgactagatattcttgaggccatcggccgtgttgactgtgcaccgatatcaataatatctacaccttcagatatcatagaccggacccgagaaaccgcggtatctaccgattgaaacttacctccatcactaaagctatcaggagtaagattaagtatacccatcacataagttttcttagaaaaatcccataaatgatctcctattggtataaccctttgtataataccgtcttttccaagcaatgactcaccacctaaccgctcccacgcttggaaaattccacctgaatgcattgagagtgaatgccaatatgcaactattttatcattatcaatatcttccgttccaagcaaatctaccaaaggtgctaaaacaaatggtctttcccagattctctcatggggaatgataagtttatcagaaattatcttgtgctttccatagaacaatatgtccaagtcaagtggtcttggtccataccttaaaccattttcttcacgacccatctctttctcaattttcttgagaacgttcaagagttcatgaggtttgagctttgtgacacctcttattgcagcgttgagaaatcttggttggtcggtcacatgaacaggttctgtttcgtacaaacaactgtgtctggttacactgatcccatagtctttcatcaatcgtaaagcttctttgaaattattcattctgtttccaacattgcttcccaaagctatcacgacttcttcgaaagttgttgtttccaaagatgtgaaatctgagtcatatacaaaacatgtttcgaaggtgaaatatgattcaatacttaacagaaattagtgtatcaaaacgtaaacgctgtttttttcaacgaaaatgaaacggatgaaaaagatacgaacccattttagaataggttcctccaaaatatcagtattgtctgcttcgatctgaccttaaagtatacaaaactatgagtttagtcttagataacaacgaaacaattattagaaacacaaaaaatgggttctaatattttaagaaccaaggaagtaaacaatacttatgtatgagagaggcaaggtggtagccaattttcacctactttttttctgaacttgttgtgttatccaagtaccttctgtctttcacgctcgtcaaaagtcagcttctcttttgaattagatatgaagatctagaaaagaaaagaaaaaagagaagaaaactttgtttttagagagattttgaaattggtaatgaatctctcataattttgaaattggtagtgaatctctcataattcttttcattatctattctatcttttaccatttaaacatatatttggatagatgatggaaaattgtgtgttagtctccagctatttcattccatttttaaaaaatatcaaaattttcatagatttgttctgactacatcaattttctttcattccactcaaggcactcatggttacattaccaatagaaattaattaaccatacaaaattctaattattataactccagacgatattattttcactatatagcaaaaaatagccgttttaccataacatatatacagtctatattttttgacgaaaaataaataaatatacagtatatatatatatatatatcctcgtgttagaattgtattaagtttttcatcacaccatctttaggcattatttctatgccaatcaaatcatttactcgtaaatcatcatagtaattatgatttcagttaatcgtaagttttttgtagctttgtgatgatgagccaattaacttcacaacaaaatattttccttgaagtagttttttaatagcaaacgatttcacgaaaaactttacataacaaatatttctacctacattaaaagaatgtcatatagacaatactaaattcactagctttaaagaagaaaaatgagccgtaaataaattatagtagacagaatagggacatcttgacgttttagtattttgatcatagaatgcttgccgtttcgttaaagcgctaaacctcctcctcatcctctcccagctagctcctcttgcggtttcagagcttaaaccccaatctccctcaaaactcataaacatattgctctcctttgttcatttctgggtttacgcttctttcgactttatgggtttcggagcttagttttactacaatttcgtttggaaaagagctcttatttgatgttc

SEQ ID NO: 8665 - DNA, 3000 bp, Unknown
  misc_feature (1)..( 3000): cDNA_ID_2177807_gDNA_ID_1971826_Annot_ID_176299 3000 nt of promoter + ATG
aagtttacaaaatcattccatatattatattatttgtgatataactcattttggactagtttttttaagagtttaagccttttatcatttacatgtataaaaataaaatctctccaattatcatctatggttttcaatcgaatgtcagccactttgcataatacgatggaaagctttctgaagtgaagtcatttaaagtaaatactatcattttcacgattacgagctcatgtgtctgctctacatagacacgatcacagttttgttttatataaattaaaaacaagaaagagaaaactataatatatatataggatcagttattaatcccgtttgaaacttggttattattggtaaatataaaatttcaagataaataactaaatatcatcggtttagaattataaaaaagatgtaaatcataaaaaacaatacaactaaaatcagtttttaatatattttcttgtgtgtttttctagaaaataaagtattaagaaacaaaaagaagagtatataggatcaatcattaatcccgtttgaaagttggtaagaaccaacgggcatgagcggatgggatggacgaagaaacaaactggtgtgggatttcaaccttgtttgtatcgagattgtatatgaagatttcattttcttcgtaatcctcataaaaatcatcggcagtgaagtagatggagttacaagtgattccttccatgtccttagcaagcactgtaatacccaaacctagaagaattgactcatcgcctagagaaacaatttcctcccatttgttcaccttggatgaatccatcttgcagattataaattcccatgtttcagccatactgaaatgtaagctcgcgacaattaagacatctccacgtacagtgactatcatgttatagatatagcgattcaatttgagtttcagtggaacttcaggaaattcatcatatccataaggatttgttgcataacctacaaactcacgtacgctaattctgaaagcttcacgcgggaattctccaaaaaaatcgtaaatatagaggttggaatagtcgagataatgaagcttgtgatctttgtatatcatgttcaaacacatgtcggtacatgacgattttggcaactcggggaattttttccacgagttatctccatttttgaaagaaaccatagtttctcgattaatcgttcctataactaggtagtctttggttttgtcatctatccataatatcggatggctaagtccaaaaatatctgattcgaaagccggtagattgatcctctcgcaggttagaagatctttaatatatagatgaaactcttgatctaaagtttgatcttctaactcttcgtaacgaggttgcatcaaaagccaacttctataagtcgccaaaacaatactctttgcaaaatcgtcaccgagatgttgagttttgtagagtttttctttatcttcagggttgaacaagagacaataattcttgtctgttgggaatagaatcatccaagggatctgattgtttggcttagattgttttgaaccaaattgccaagatgaacaaaccgatttagctcgttcgaaatccaaaaatgcaaggcgttcgaaaaccaattgcatgagatctagaggaagcttggaccagcaatgaggatttctttgagagactgaaacagctggagatttcggaggaggagattgggctaaggctaacgttggtgaggccatctttcggattatcttatccgtcaagctttcaagtgtgggagatgatattagctttttctttttttcactctttgagagaaagttcatattaagagattaaaaactaaaggagcctatcctaatccaataataagaagaaaaaaatctggtgtaattgacaataaccatatctttctttctagtaatatatatttacatggaaattattttggatatatgtccatgagagatatgtatattgtagtaccttttgatttgtttatattttcttgctcacataaacaactttccataacacactgaaatcatattagatagatggagaaaaaaatataaatgattgatacatgaaatacaagtaaatacaaatgtatgacccggtagtttggttttaccaaatttaatcatataaccatgaaatacaagtcatatggtctcagtttagacttcgatttactcagactaaaccaaacaataccgggccacacatttgtgatttgttaatcttcgtcacttataaggaatatttttattatatgcaaaactcatatcaaatataatcacataaccataaaatacaagtcatggtctacatgtatcccataaccaaatacgattattacgcatccgatctgtaacaaaatatccaacgtcgcaagctgatatataattttgatgtgaggattgcaatcatataaccatgacttgtgtttcattgtttatccatagccaatttgggagtatctttgcttaagattttaattaagagtttggtataagtctctaggtcaactagaggttttggattaagggattgctattattatttttctaaagaaaattaggaattttgatttttgttatttaaatttctgtaaaattgagggtaaagaattatgagcctacaataaatggtctttccctattatatttgcgatcatgtgatgcatattgatcgaacatttattttagctaaagttaagatgcatgatgaaccactctgtttctattctaccatggtatttaatagtatttccaattagaaaatttctttcaaaatgtctacggtctacttttgatttatggcgaacattttagctaagtttatatgcatgcatgaaccattatgtttctattttagcatggtatttaatacgtacagactgctaatttaagaggaaattatatatttatatgtacacaaagaaacatatcatagtcttccatatctcctcttgacacttttcaataattttctatcatcgatc

SEQ ID NO: 8666 - DNA, 3000 bp, Unknown
  misc_feature (1)..( 3000): cDNA_ID_2177814_gDNA_ID_1971826_Annot_ID_176300 3000 nt of promoter + ATG
tataatgtttaacatccaagatttgttttacataatcgttacggttactaaagtttaatttatgatgttttaaaacaaattgagactaaatttctaaaagaaacatatacgtacatgtgtgtagctgcgtatatatatagaatggtggggctaaaagctaatgatgtgtacattaattggacatttgatgtggctggattggacccaacttgctctttgatagagacctaactaagacaattttgctcttcattcatttctcccgtatacataattgaattaactgtacataatgtttcacaacaagcgatctagctatatatttcaaaataacagagactgatattttaatctggtcttctaagctctaacgtcaaattaaaaaaaaaatccgatcttctaattaattagaagaaatcaattatagaacctctctctttaatttcatttatttaaaactgcttggaaatttaattattcactaaagactcactattctccttaatttatgataatttgtagatcatatgttcagtttttatttatttgccattcgaatgttgagttttaattaaaccaatatgttaatattcgaattaaaaaaacttacctataattcacttatttaaaaacataaaataataataattgcatcaccgtgatacaaagcaacctcacaagtcacaactctcgtgactacaaagatcactcattaaacaaaccttcctgccttctttttttctacttgggcacctcgaccgatcgaagactattcttgggatctgcttcaaaaacgactatatgttctaaatccacttcgtatgatgacgaacatttggtttactactgaagatagagattacgtccttctaattagaagtaattaattattttagtatttggaagctaatggtggagatgtaaccgtatcttagtggatcgagatattgtatataaaatatgtatgctacatcgaataataaactgaaagagagtaaaaagggatatttaatgggaagaaaagaagggtggagatgtaacaaaggcgaagataatggatattcttgggatgttgtcttcaaggccacgagcttagattcttttagttttgctcaatttgttaagtttctacttttccttttgttgcttactacttttgctcatgatctccatatacatatcatacatatatatagtatactatctttagactgatttctctatacactatcttttaacttatgtatcgtttcaaaactcaggacgtacatgtttaaatttggttatataaccacgaccatttcaagtatatatgtcataccataccagatttaatataacttctatgaagaaaatacataaagttggattaaaatgcaagtgacatctttttagcataggttcatttggcatagaagaaatatataactaaaaatgaactttaacttaaatagattttactatattacaattttttctttttacatggtctaatttatttttctaaaattagtataattgttgttttgatgaaacaataataccgtaagcaatagttgctaaaagatgtccaaatatttataaattacaaagtaaatcaaataaggaagaagacacgtggaaaacaccaaataagagaagaaatggaaaaaacagaaagaaattttttaacaagaaaaatcaattagtcctcaaacctgagatatttaaagtaatcaactaaaacaggaacacttgactaacaaagaaatttgaaacgtggtccaactttcacttaattatattgttttctctaaggcttatgcaatatatgccttaagcaaatgccgaatctgttttttttttttttgttattggatattgactgaaaataaggggttttttcacacttgaagatctcaaaagagaaaactattacaacggaaattcattgtaaaagaagtgattaagcaaattgagcaaaggtttttatgtggtttatttcattatatgattgacatcaaattgtatatatatggttgttttatttaacaatatatatggatataacgtacaaactaaatatgtttgattgacgaaaaaaaatatatgtatgtttgattaacaacatagcacatattcaactgatttttgtcctgatcatctacaacttaataagaacacacaacattgaacaaatctttgacaaaatactatttttgggtttgaaattttgaatacttacaattattcttctcgatcttcctctctttccttaaatcctgcgtacaaatccgtcgacgcaatacattacacagttgtcaattggttctcagctctaccaaaaacatctattgccaaaagaaaggtctatttgtacttcactgttacagctgagaacattaaatataataagcaaatttgataaaacaaagggttctcaccttattccaaaagaatagtgtaaaatagggtaatagagaaatgttaataaaaggaaattaaaaatagatattttggttggttcagattttgtttcgtagatctacagggaaatctccgccgtcaatgcaaagcgaaggtgacacttggggaaggaccagtggtccgtacaatgttacttacccatttctcttcacgagacgtcgataatcaaattgtttattttcatatttttaagtccgcagttttattaaaaaatcatggacccgacattagtacgagatataccaatgagaagtcgacacgcaaatcctaaagaaaccactgtggtttttgcaaacaagagaaaccagctttagcttttccctaaaaccactcttacccaaatctctccataaataaagatcccgagactcaaacacaagtctttttataaaggaaagaaagaaaaactttcctaattggttcataccaaagtctgagctcttctttatatctctcttgtagtttcttattgggggtctttgttttgtttggttcttttagagtaagaagtttcttaaaaaaggatcaaaaatg

SEQ ID NO: 8667 - DNA, 3000 bp, Unknown
  misc_feature (1)..( 3000): cDNA_ID_2177841_gDNA_ID_1971826_Annot_ID_176307 3000 nt of promoter + ATG
aaaaagagggcatattttgagatatacatgacaaatagaaaaattattatatattaagtgtacgtaaagtagtggatgcatgaataatgggtagtattaaattgctagatagctagaggagagggtaaaggcaacgctttaaagagtcggagtaatgaagttatacgagcatggaaacctgactaaaccctaatttcttattagctctcttcccttttttggcaatcgtcccatctctcacagtcatagttgatagtccccaaccttttttaaaataaacataatttaatttcggtcacctttttaagatgcagatatagatatcgtctcattatttctagtccacgattaccctattacgtacaactaattaatcttctattttcaactgatcatattctaaatttttcagttacacctctggtctaggatgtttcaagtcaaaatttgaaaatattcacatttgtctcttaatgccaatgatgagatttggtttagttttttttttttttttatgatgcaattttctattgagaaaaatggatacataaataaaacttgaggataatttctcattgtccatagttaaagtttcttagatgcaaattaaagtatcaataaaattttaaaattagatactatatcgatcagagactttgttattgttgattttggaattagactaccgtacagtggtacaaaatatatgtttaaaagcatattaaataaaaatagttagttattcatgttttcttcttgttttttttgtttttgtttttgttgttattaactaaagaaatccatgacttttattaatctatttatgtattagttctaactttgagagcaaacttcaatgtatgtatatattggttctaacattgagaggaaaactctaatcaaataaaattgtaagtaagctaaatatgtgtgtcgaagtaggaaatctaaggaaagtgaagaatgcaaaaaagttagtcactgaaagagacgtgtgattgatcacttgtctccttccaatttccctgtgggggcagtgcatgcacaaaagatggaatccatcctatagctcctcctttcttcactatcttttcaagtttctctttttgaatatattttttttaaattgattttgatttaactcaaagcccacacttcttaatccatcttctctataattagtatgccaacaaatatatatgcttgttctgtctcaaatttcaacaataaagcgtgtatagctcccaaaaagctatgttgatgagttatcactctttttatggattggactaatagtttgtctcatgtcaaaatgattatacataactcagaatccagcagtatagagaacttaacttttatatatatgttaaccctcataacctcaaacagaaaatttgtagtgcagtgtagaaaacatccttaaacataaagtaaatcctttaacaaaaaaaataaatataagtggcaaatcaagagattctgcttttgagtccaatgtatgtatagttggatgttctgaagaagatccattgttttggttgtttctctacagttaaacgatttttatatttaacttattaatgcaattgagtgaaaatttcacgatgaagaaaaaagttgtgaatcatgacaagttttgtcctcagttttgcagtgaaatcattttgcgtgaaaattttatgagagaaacaaaaaaaaaaaaaactgatcaaaagatcaggaaaggaccattcttaatttataacatgtgggcaagtcaaggcttgctggcatcaaacttgaataaatgtaatcatattcacaccatgtattgtttaatatataattttaatatcttaattggtcatctatttttgtctttttgcatcgcatatgtgtcataattaatatctgtacgatgtagaggctagtgaatataaagtgaaaacatagatatatcgatcttaaaccaatggtatcttacaccatatgtatatgcttgtttgaaaatatttattctacgaaagtattaattggattgattgttttcactctcttgagtaattttggataagttaatagttattatttttattacacatgattaaggtgtattgttaattataaatcatatttatacgaagacatggttgaataatgtccaacacagcttattttagcaaaaactaatgtacgaggagtgacatttagggtcttgatatttttgaagcaaaattaaatacgtctgcaagattttgcagagggaggcatgtactatatcatctgcaatagtagcaacatagataaaagtcataaacccctagatccggtccctttaatttaattcatatatatgatttgacataaaattacttttgttaaaaagtttgtttttacattaaattcttctatcttttttctaaatatcagtttaatatacatttgtaatttttcttgcaatccctagccagcttaatgatatcattttttttccttctttatatccagagaaattttatgcggaaacgtagattaatatcatcgaacttgttgatccaatttgttttatcttttaaaacatttacagtgattacaaaatagaatatatagcaagtaaatatccaacgaaaacacataatgtctttaacaaaaaaaaagaacgaaaaaaaaaagaaaacacataatgtcaccattagaaactcgtgtctacaccagaagtcattagtttaagatattcattttttttttttttgataagatgatattaaatgttgttaaaataaacaataaaaatgcaattatggactgcatatacacgtccaacactttgacaatctgtatcgctctctctctctctctatatatatatatgtcatggtctcactatgattgttctataaatacaagcctcctaactcataaaataagcataaccctaactctacaaagttcttctgattctttctctctctctctttctttcaagagcggttttcaatccattcgctaaagaccatg

SEQ ID NO: 8668 - DNA, 3000 bp, Unknown
  misc_feature (1)..( 3000): cDNA_ID_2177702_gDNA_ID_1971833_Annot_ID_176329 3000 nt of promoter + ATG
tgagattagtgatgtgtcagtttatcattgcttcagttatagcaaatagtactaaccatttgttattactgccttctaatctgtcattaaccatttgacatgattgcaaatagtacaccatttgtcattactgccttttaaagagacaacctttgttataccaaaattttaagtcgatttcaaagacccttatatataaaaacttgtccatatatgccaagagacgcgccgccgcttcttttcgtctttcctcgtgaaatattttaggctttgtcggtctcgttaccttaaagtttcgatttttcctttgaatatacgaaacccacgtcgtttaaagcaatacccagatgacaaattgacatttcataactaaagatcggagctttttcgtagttaagtgatcatgagagcgagattggtggtttttccgatcaaagggaagaaatggtgtttcagcagatctgttgaccctttcgctgctcaatcaccgtctggtgttactccgaccactgtacgaggtttatggaagaagatatcatctgaatcgaaacccatcaatgccaacgcagagcttctcgtcgatttcatctctgacaaggtaaaattacattgaaattttgttctctctatagaattcatacccgtgtctctatgtggcgtctgaaacttttttctctttatagaattcatacccgtgtgtttatgtggcgtctagtgagatttattgggtgtataacatttcgaccaatgaataagcttttggttctgtttctgattaaaggtttttgacaacgaacctcatttaggaccactagaaatgagataaaagaatggctttttttaatcagtcttcctccttgatttctccaatactaagtttgaagaaatgttgttgttgttgttgtaatggttagatgaataaagcttgggtgggtcttgagaaagcgcctgatggatcaataaagaacaagattcatgggtttgtaaaatctctacctttttgtattttgagacatttcttgaggctttggtctttgtttgttgataggcttattaatgtcaagttgtggttggaatgtataggtttggattgaagcttctggctcgtgttaagccttctgagattttcttgaagtctatatctaaggaggtcacttctgtacaagtcacttatcctccgaggttctatttactctccttttcttgaaattctgtaaacttgaggataagtatctctcttatgaatgtcttcatgagtatatattctggtgaatttggattggttatcgttttagctaatccatgtcaaatgttttcagtttagatcctagactcgtacgcaggagactacggcacattgccatgaggtaaatcactttgctacccgttgtctcaaatgatgaaactttatatccgatttcacgtgtaatagattcagaatccctgttccttctaacacttatgttttctaattggatttgcagtggaacaatcctgcacaagaagtacctagttggttcagttactttgcttccattgaccagtgcatttatggtatgtatagtatgaagctagccctcaagaaccttagcaactaactcgtttattttcatcgaatctcataaccaccaaacccttttgttctttccaattaggtattgccattaccaaacataccattcttctgggtcttattccgcacatattctcactggcgggctcttcaggtctgtcataacttctcgatacatacttccattatctagaggtttatataaacccgaaatcatctttattgacacttcagggaagtgagaagctgcttaagctcatctcaaacgaggcaaatcctgataaaccagactcaactgatgatgcagatgaaagcaagaacagcaacaccaagccggaacaaaaatctcaatctcccacttgtgtaagctgatctatttgtcatcaaagatactcaaatcaaaagtttttttttttggttcttaattgtctttgtttactcataaacagattttgcttccatcggaagagttatatcagctaattcgtgaagctagcgaggaaggactcgacgaggcgaccataatagagatttgcaaatcctttgatctcaataagaacgatgttcttaaatatcgcaatctagtctaactcttttggcattttaggcttcttttttagaacataattttagctgtttgaagctataacttacgctccaattcttttttttttttgtcttttgattccttgttgctttaaaaacttctttgttacttggaaacagttgagaattttgaacgagtacaaggttactctaaacataaaaataagttttctcagaactattggaaaaaacaagagtcacagaaaaaggaaaaaaagaaatgatacaaaaacaaaaaaaaactcgaatatgggccgaaattaacagctcaatttacacgtgtgagggttgtaggcaatccggtttatggattagtttcggtttagttaaatttttttatctaataattgaaactatataaaaccatttgtaattcagttaagtttgatgcaaattccgttttggtaggggtatatgtttcaatttcgttttagttatccgaatttagaagaagaagaagaaagaaaaaaaatggttaacaaacaaattcggttcagttttggttgatttggttgcggtttttttcgctcaacctagtttgactggcacgtgggattattttgatctgacctctccaacaagacagaaaatatgggcctcgcttaaaaagcccattttacacgtgggagcggcacgtgtggttcttagcttatatcacgtcaccacgagactaaacgcaaattagaacttctttaccctttcgagaaaaaagaaaagaaaaaagaacttgttttcctcttcagcaagacacataaatcgtaatccattttctctcaactttaggaatctcaaatctccgatttggaaatccggcgacaatg

SEQ ID NO: 8669 - DNA, 3000 bp, Unknown
  misc_feature (1)..( 3000): cDNA_ID_2177771_gDNA_ID_1971833_Annot_ID_176340 3000 nt of promoter + ATG
cctcacaaacaacaacattgttaagaataatggcaccaatcaaagaattcatatccaaattctcagatttcaaaaacaacaagaaactcattctctcctccgccgcaatagccttgctattattggcctccatagtcggaatcgccgccacaacaacaaaccaaaacaaaaaccaaaaaatcacaactctatcttcgacatcacacgccattctaaaatctgtttgcagctcaacactatacccggagctctgtttttccgccgtggcagccaccggaggaaaagagctgacgtcacagaaagaagtcatcgaagcgtcacttaacctaactaccaaagccgtgaaacacaactacttcgctgtcaagaagctgatcgcgaagagaaaaggtttgacaccgcgtgaggtcacggcgcttcacgactgtttggagacaatcgacgagacgttagatgagctccacgtggcggtggaggatcttcatcagtatcctaagcaaaaatctctgaggaaacatgccgatgatctcaaaacactaatcagctcagccattactaatcaagggacttgccttgacggtttctcttacgacgacgccgataggaaagttcgtaaggcgttattgaagggtcaggtacgtaaatagttttactcttttaaaagtttagattatagtattatcttcgacatacgacttactcggtaaaataatgtagtgattatagttggtccataattagagcacttaactcttcaaatacgtacccaaaacatttgttttactaggaaatcttttaatatgtaacagctttataatattgaacggtatcaaaacaggtacacgtggagcacatgtgtagcaacgcattagcaatgatcaagaacatgacagaaaccgacatagccaactttgagctaagagataagtcttcaaccttcaccaacaacaacaaccgcaagctcaaggaggttaccggcgacttagacagtgatggatggccaaagtggttatccgttggagacagaaggcttcttcaagggtcaacaattaaagcagacgctacggtggcggatgacggaagcggtgactttacaacggtagccgcggctgtggctgcggcgccagagaagagtaacaagaggtttgtgatacatataaaggcaggagtttatagagagaatgtggaagtgacgaagaagaagacgaatataatgttcttgggagatggccgtggcaaaactattatcactggaagtagaaatgtcgtcgatggaagcaccactttccactccgctactgttggtaaatactgttcttctttgattttatttttaaggaattaagtaaacagtagtatcacgtaatagctaacaacacatactgacatacacatttgtttgtatgtaaaaagaatgtaataatgacgcatgtgtaacgttttgttggtagatgataacgtagacacgatcgtaactcatttccacggttaaatgatagtactgttttctattgactgtagctgccgtcggcgagaggtttctagcgcgtgacatcacattccaaaacaccgccggtccgtcgaagcatcaagcggtggctctccgagtcggatcagatttttccgctttttaccaatgcgacatgtttgcttatcaagacacactttatgtccactcaaatcgtcaattctttgtgaaatgtcacataaccggaaccgtcgatttcatcttcggaaacgcagccgcggttttacaagactgcgatataaatgcacgcagaccaaattccggtcagaaaaacatggttaccgcccaaggacggtctgatccgaatcaaaacacggggattgtgatccagaattgtcgtattggtggcacgtcggatcttttggccgtgaaaggaacgttcccgacgtatcttggtcgtccttggaaggaatattcacggacggtgataatgcaatcggatatatccgacgtgatccgacccgaaggatggcatgagtggagcgggagttttgcgttggacactctaacttatagagagtatttgaatagaggaggaggggcaggaactgcaaatagagtgaagtggaagggctataaggtaattacaagtgatacagaagctcagccatttacggctggtcagtttattggtggtggaggctggttagcgtcgaccggttttcctttctcgttaagtctttgaaattaaaagattgacttattattttaataaacattgtatttctctatctacatgtatcattaaatcgatgttcatatatgattctcaagttgaaccaagtcaatgcataactcgggctggtatagttttaaggcctaaataaccggactttacggggtttattgggttgattacttgattctaattcataaattaagataaaccgggaatcaaacacaatgttggtgttgtgtcacttgtcggcattaaagccctaaagagatagagatagggacgccacatgttagagacgcacatggccattttaatatttgctaagataatgttctttgttttcttttaatttgtagacattttcatgtgtttttttttggttctctccaatgtgtatgcttgaaaaatataccgaggaacccatagaattgtaaagaatgttcgctttctatggacctactacggatgtagacgactttgacatatacataatacataaaaccattttttgtctttaaaccaaattacaatataatcaagttgattaatcaaaataattacaacgttatcatgaatcttcacatgcaagatcctacacacacacttagacgacaagaagtcaccgtggaacaagcgcgtcacgttcatcattcacatttacttaatcccacttaaaaaggcaaacaacaacatgtcttctctaacataaacaacagaacataacaaagcccaaacaatcttagtaataatcccaaaaaccagaaaaaaaggagctttgcttttgtaggaatta

SEQ ID NO: 8670 - DNA, 3000 bp, Unknown
  misc_feature (1)..( 3000): cDNA_ID_3045887_gDNA_ID_1971833_Annot_ID_176344 3000 nt of promoter + ATG
gatgtgcacgatatatatttttctaatactcgaatctcacacgtgacaacgaccttacgtgtatgtacgtgttgaatagaattaagatacgttttataaacttctcttatctcacatattcaacatgtggatgaagatcttcgtattttttattttaatttttatgatacacccataaactgaattattactagctagtagaggctataaatacgaagaagatatctatatatatactatctatcagtgccaaaaaaaagtttttcaatatatgcaaatatacaatcctatttctccggtgaaaaccatggtgaagatttatcctcacctggcgtttccggtggatatggacgtcgtacaagacaagattttgccctacttaacgacggagcaagagaggttcacgatttggatgaaatctttggtgttcaatagcaaaggctgcacagtttttgattccaaaggaaacttaatctatcgagtggataattatgattccaagagttggagtaatgaagtttactttatggatttaaacggcaaaattttgtttactttacgtcaaaaggtaatactaaacatttcatcaatgttttctaagaatttataagttcctataattattattttattttaccttgcaagttcatttttgttgtgtgcatgtatatatatagaaactgggattcttcaaatcttgggaaggatataactcaaccgggaccagatttcgactaagaaagattttcaagattttgccaagagaatcatcttcgtcttacaaagttgtaatgggatcacgcatagttgatggtgatcaacaatcttgttataagattgtaaatcgtggatcagttttcgcaatcaaggatggatcgggaagattaatggcagaagttaaaaacaaactatcggatattagtggtttggatcttggagatgatgttttgacaatgatggtggagccacaactagatcattctttaataatgggtattgttatagcttataaacttaccaaatgtaaattgtgataatcaggtggtaatcttgaaggtaagcatgttttaaagctaattaaacgttggcataaaccccaaatatctggcttgaaattggatattgaaaagattgcaccagaatgcggagaagctcggcatcgttcatcctcataaaagtcaaaacaaccaatcagttctctctttttttatattttggtatggaaacctaattctcttacttaatattcaatccattcttttcctccaacttcttcgtaaatggcggatgaaactataaccctgtttcagcttattgccaaacccgaaccgcgcaccatggaatagtactgatccaacgagtatgtttgaacaagctcaagctgccattcaatcatcgctatcatgaccgtgattactcgttttcccggtcgtgagaagaccctttaagcgtgatttttatacggatgtatgttttactaatactagtaccaattccacaacataaaccaaaagtgttttgaaattagggtcatgtttctgttaacaatatctttaactagctgagttaaccataattgaattactaaaatatttatcaaactgaattaaatagatttggatggtaatttagtcagcagaaagaattggaattggtgaagaagataatagactaatagtaaaggggtcatggaagttatacgaatgcatgaaaagataatagagatatcaatcatacgattttattaaactaaaggaccatgtgatcagattgtaatttgtaatagcagaatgagccatctcatattccatacatggttttaaataggcttgtccatttcggtactgttcatatactgtatgttccaatttttatcccatatttgtgtgtttaaaaaaaataaaaatagctacttgaaattgtttatagaatgagatatatatatgtattattcgtttggttattcagcttttataaaattaatgaaaatcatctaaatatgtaagtttttcagaaatacccgtatcgaaagtgacctttaatttaaccgtcccgacatcaagccttacccaaattagtaagaatttgaataataaattttgctacttaaatttcttgaactcgttccgcgacccaaaattctcgtccctatcttatcgaaaattgtcatgaatgttttttgttatgtgaattacttgctctcgatttatgtgttattttactgtcctgatatcaagatgtacacgcctagttttaagtggcaacaacatataatttcttacgcatgtttcaattttcaaacacaaaaaaaacgtaacctgtgacactttgacattattttttgggtatgcgaatgaattgaaattaatttatagtgttctagagaataaaagaaagtgccctaaaagaaatgatatcaaatttatttgcaaatacaaagaaaaaaaaaaacacaatttttgcaaatataaacaatagcttttacagttaatcttcctgtcaaaacattcttttgtgcagtatcattccgataaactgtcagcattggacaacggatagaacacaaatggaatggaccacaactgaagaccgattctaagcctagcaactaataatttgaagttatcttattatattgtatgaacagttttttcaatattttttgctctattaatcgaatctcacaatcacattagtcacgttacaacgaccagacatgtagtaacaaacaaaaaggaccatacatttttttttgtttaacaaaaacgaccatacatgttatcgctacatgattttctctgttatttttattttgtatctcacattgaacatgtggacgaagaccttcgtatatatatattttctaatgacacaccaaaaactgaattactactactagtagaaagtatatataaatgcgaagaagacatataactatcattcagagccaaacataaaaaaaaatcaatacatatgcaaatatatagcaacaaccgaacg

SEQ ID NO: 8671 - DNA, 3000 bp, Unknown
  misc_feature (1)..( 3000): cDNA_ID_3045887_gDNA_ID_1971833_Annot_ID_176348 3000 nt of promoter + ATG
gtcagattgtacatttgagtcctgctcaaatcgtagctttcagtttttaatgaacatgctattagtttgcaacttagcattgattattttgacaaaaaatcaggtttagtttgtgtcaaaatggtagatgtgattatggcattgcattgacttgtagagttctgaattgtacttggcatttctgcgagtttcttgatcgctaagactctctggtggctctaaagggaaagataggttgaaagttttatctttcctggatgatgtgtttatggttttaatttacatcttctatgatgctatacttctttgaaatattatgtctctatggaaattggtagctgatggatttcgttagtcctgagtgtcagatggtattatttgagtagctttcagtgttttcgaggtagaactctaaaaatgtaagattgtcttcatgtttcagtcatgggacacaacgtcgatatccttaacagcgggatgtgatctattcatgcgctatgtgactcgaacatctgctttagaatttgaggacttcaactctgcgaaatcccgtgtgcttgaacgtgctgagaaatttggggaaatatcttgcaaggtcagtgttctcttcgaacgggaattgtttacataaatagttagtagaagaagagtttgaacagtaactggaaattttgcaggcccgaacgataattgcaatgcttagtcaagatttcatatttgatgggtgtactattctggtccatggtttctccagagttgtgtttgaaatactaaagacatcagcgcaaaacaagaaactctttcgagtgttgtgcacaggtacttttcttaagacttagagatcaattggatatgacatcttccagttatctcattctgattttcctaactgacaatcacatttccgttgcatccgtggaaacaaaatacagagggaaggccagataaaacaggtgtactgctagctaacgagcttgcaaaacttgatattcctgtgaagcttctgatcgattcagccgtggcctatagcatggatgaagtagacatggtgtttgttggagctgatggagtagttgaaagtggcgggataattaacatgatgggaacttaccaaatcgccctagtcgcacagagtatgaataaaccagtctatgtagctgcagagagttacaaggtaacctcccaaaactttaaaagttttaaaaacttgattgcaaaaacatcaatgatccatcatcttctttcttgttttcttgcaagcgaagtttgcacggctctacccgttggatcaaaaggacttagaaccagccttgcgacctattgatttcagtgttcctgttcctcctaaggttgaggtagaaagatctgcaagggactacactcctcctcagtacttgactctactcttcactgatcttggtgttctcactccatctgtagtaagtgacgagcttattcagctttacttgtaagtgaagctgtctaattcctatagctggtctgaaatctctcattttttgtataaaaataaaaacaaaaacaccatatttttggctatacacagacatagtttgtctctgattcttactgctaatgcacattttttttggtagtagcgagatctttgtgacttgtcatctttactcaaaatttatcacccaagtttcaatatatagttactagtatatattatagtatgatcatttctggtttttgatttcttgattagagatatgtattgctatattgttttattattgttagaatcatttgtgtttttttgcaaaagtatatatatccttttaacactttaaaatgtttgcacaaaaaaaaaaatggtatggtatgcgctggatattgaaaagttgcaattattgcagtgtagtgataaatgacctataatgtaacatggaatatcatatgatttgatgttttgaaaatgagagcatgagaaacgtgatagaattaaagatggtaaattcttagtattattttaatgcttggtctaagtaactactccctctgtttcataatataagttgttttggaacaatttttttgttttactatataagttgttttcaagtttctatacaaattatatattattttaatattttatgattatttatgttatgtagtctcttttgtgattagtagaattttttaaaagtaaatatttttaatttgcgtgtttttatttaaaacaatttatattgtaaaacagatggaatattattataggctataggcctatagctaatgtttggatctaactgctaacgttgtaagattcataaaacaccggccacttacaatcccacgttttttttaaaaatattacgttctttcctggaattacccatatacacgttttttttgttatcttcgtgctcaactgtttacaaaagtatactgtattcgggaaggtgaaaaaagataaaattatttcggaacatctaatatactaacacaataaatgaaattaaaaatatatttgtaaagacattaaagatggcaaatatatctgtccacaccacattttaattcttttttatatcattagtctataacatttgattaagtttcacgttttagaaaagtgattatgtataaactaaaaatataaatagattactttacaacaaacttttttttagcattttacatttgttcatttaacaacaactataacatattgaattcgagtttttttttccttttcccaatcattccattgaatgtatgagtttaggtcttagggttattttctgatgaatagcaaaagtagtaattcccgacaagaaattggccaatgtcgaaaaagtcaaattccacattttaattgagacataaaagacacatcactcaatacagtaaaatatctacttttatatattcccaaaaaccattcggcttctgcttccacttcatctctctctctctctcccttctcacatttctctccactcagatttccaattcctaaagatagagaga

SEQ ID NO: 8672 - DNA, 3000 bp, Unknown
  misc_feature (1)..( 3000): cDNA_ID_2177775_gDNA_ID_1971833_Annot_ID_176342 3000 nt of promoter + ATG
ttgaacaccaaagatttcatccaaatcgtgaacctctcttgctccgtcgttaagtagggcaaaatcttgtcttgtacgacgtccatatccaccggaaacgccaggtgaggataaatcttcaccatggttttcaccggagaaataggattgtatatttgcatatattgaaaaacttttttttggcactgatagatagtatatatatagatatcttcttcgtatttatagcctctactagctagtaataattcagtttatgggtgtatcataaaaattaaaataaaaaatacgaagatcttcatccacatgttgaatatgtgagataagagaagtttataaaacgtatcttaattctattcaacacgtacatacacgtaaggtcgttgtcacgtgtgagattcgagtattagaaaaatatatatcgtgcacatcgtcacatacaatatagtatatagtaatagaactattagttgataagcttagaaatggtcgtccatttcggttcattgcatttgcattctcgttgctggtaaatgctgacagtttcttgatatgatagtgcacaaaaagaagttctataggaataaccattgaccccatgttgctaacgatggtgccaagttagggagacaattcatcacgtcctcttcaattggtcacatattttggctgcttgaaggatttccaacgtcccgctatatcatcaattaattaaactatacttgttgcaacctagaagacaatgttgagtcgttgctttcacattttggcctatttggagatactttggaaattaagaaaattacttgaatttttcaggatatataaaaatctcctagcggatgtgagaaaggtacgagacggtgtaaaagagtggacgaatgtgaatatcccaggagataagtaccaaaacgatctataacattcccttacaacgaatcaggcaaatacaacttgaacttggcaccacccatctaacggatggagaaaatgcaaccacgattgcagttttaaagaagcaaataatgctccaatgggtttgggttggatagctcgagacgacttagatgtcttcatgtttgcaagaagttcatctattggacatatcaaagagcgtaaatcctattgaagctaaagatttcagtttccttcacgcattaccaatgtctttgatgtcagggaatccgtttgatcatcattgaaggtggctagcaacagcttgtgatttatgttgaagaaaagacagaaatatgtcaaacttgatgggtgtaataatcgagtagcagacaaactagctaaagctagaaacagattcaagttacgtccatatcatttcaggatcaggtccatacgttataattcataatattagatgttataagttgttgtttaatcatattttgaaaattgtggtgtagatttttctctctaaaatctatctttgcaaataaatttagatatttttattttttcattttcattcacagaaacttagcatttttctttcgtcaacgcttttttgtcaactaaacttagcaattaatattcatttgttcacatacaaaattttaactaaaaaagatcttgcatttttttttaatatgattgaaacatgtgcaaaaaaatatcttgtttttttacggtgttacctgagatggaatagctcaaccagttgaacccgaagttttaaagtttttggagaaatcagatctggtcttgaataccaaaacaatctacatttttatttatgaaataaatatatggattttggtgtggatattctcaaataattgatcgagattcgcaacaccattacgggaaggcgctttcggaagcgttagagatctctaatgttactttggatcagataaatttctatcatcaattctaagtattgtaaccttgttttttattttctttttggccaaggttactctagtttaagtaatgcttttgtaatacttccacttcattttcaatgttatttacaagtttagcagacaacaaaaaaaaacttctcaaataataagaaaagctgtttctgagatcactctacgggccctttatagtctttattaacccatgggcctttatatgatattgtgatgataatcattttacgaatatagagacaggggccacatcttttgatgcattcgtacttctcccaagagtgaagcgtccatgaccactctatatactactactctaattactctactgttatcttcttcacctattccaattctttcttctcttttttgttaaaaggcttacctattccaattctttctgcttactaaattactatccaaatctatttagttcagtttgatatatatccttcaatttattaagccaaccatggtttaactcaacaagtttaagttcttgtttttaaaacacgacatctatttttataaaaaaaaataggacttatattgctactagtattatcatttatcaatataagtccataattctgtatatatgaaatgagaacacgattaaagtgattacaatatacatttatttttcttagagtcaaacatgtgtttaagtttaaagtaaactatcagaaaaatttatgttgttttagaatttgttatttttgtttgtttgtttagccattctaccatcttcttctttttaaacattgtttattatccacaattttgtcattttatagtgatgcatatcagaatctaaagagtagtataaaacaacaagttgaaaatgatagaacaaaaaaataaagaataatgaaaatctaaatgtgtactgctatttcataaaactagtaccctttataatggtctactctgaaaaactggtcaagcctttttccttctatagacatctaaaaagcaaatgccattttcctacaacttctctttcatcactcttctaaaaccaatataacaacaacattagatgcagacaacaactaaaccaaaataatccaacagtggtagaaacaaaacaaaagaaaactccatg

SEQ ID NO: 8673 - DNA, 3000 bp, Unknown
  misc_feature (1)..( 3000): cDNA_ID_2177763_gDNA_ID_1971833_Annot_ID_176339 3000 nt of promoter + ATG
gatactaattaaattaattgatttggaagtgttttttaacttggaagtgaagtgattaattgaattaaatattaatatagtaatatttttcgtgaaagtatagaattttttttttcgagaaattaataacagttcatttaccatactgagaatgaatatggtaatataaatttttcatttcgaaaaatacgaaatatgtttaaatcatttcttagtataatttggtatattgtattgaactgttaaaaaaatgaaggataggatgaacatttttctcaaaaaatcctaggtttgaaattgattccttcatttttgttcttaatttaatagaaaacttgttatagtttttcctgattttaaggttataatttttaaaaatatctattcaacgaaataattcttttaatattttatatttttaattataatttcttttattattatttttaataccaaggtagtaaaacattagtaagttacataataagttaattttgaatgaaagttacaccactcatcctgaagaattagtctgatggtaaaactggatcatctctgattatcaatataataaataaaattgtacagtatgaaagaggaagagaaagatactcatatttatgttttaggtaacattgcattaaatgaacaaaattgtctagtaattgaattttgcaaataaacaaggcgcgatctacggagatatttgcgattataaaattccacgtacatgtttataacaacaacaaaatgcaaaaataatggagaaaatttaataatttcatgataatacggaaataattacgacgatgatttgtcaatgcattcaaccacccataatttttcggcgaaataattgattttctatcaatccaacagaatcacaacgttttaattttctataactctaaaattaagaatcaaagaaggaaccaaaaggatggtattaagtacaatgatggttctattgtattttggctttaaattattttttggtagaataagttattttctaaaattgaaatatctgaagtctgatcgatttcggacttatagctagtcccagaaacattcagtttatatatatggtcagaaaaagaaactagactaaaacaggaaaaaaaaaatgtcgtcgtcgtcgtctctaataattaagttgaatttggcttagctgaatgtttctggcgttgtccaaatgtgggtgcccaacaggcaacgctcacgtggttctttctcaataccccaacatttatatgtataagttatcctcttcttcttaatatacttatgcttcttaatacgcgtgggttagtttatttgtgtcaccaaaatatttttgaaaacgagactagctagggataaaacgtctttgtggatgaataatgaagttaacatatataagaaaccatgggattttaacaaaaaaaaaaaaaaaaaacatggatcccgtgacagtctgcgcgcgcgcgcgcagcatagtagaggccaagagcgaatgttatttgattcacttttgtttggttcttttgtcaacattcactctttatttcgatactcttgcttccgtatcatggatttttttattacgttgacaactagaatatatgttttattttttttgaaaaagatactatatgttttatcgttcaaaaaagatgagtcaagtactacaatttacctatcattttttttttttgttaaaccataactttcaaattgatccaatgtttcaggacacttactttcaaagtttatcaacacctattgcattttattttcttaagatattaaattttctgtaattgtttatctaaagcatggttagtattctgattttttgacaaaaggaaaataacgacaacatcactaatatttcaacgttccttttttttcctccacaaaattcaacgtttcattttacgcgcacagatttttattttttctatgtatattttgtaacgatttttttaaaaaaatatttgtaatagttattagtatatgctaaatattgaatacaattaatttgctaatttcctttgtagttggtcatgacatgatatctattggtttatgctagttttattgttattcaattttaaactcaaataatgcatattattgatgaaaagatatactacaatattaaacaaaagttaacatagttactgaggaaaatggaatacggagaaattaagaaatgatatattatgtgctatattattattagtcgcaatgatatctttataataaaacacctattaaagaatatttgtcgtttccagttacatctaagatatataatatatatttttttcctagcataaattcccggaaacagcatgtgatgaaggaatatatcttgaagtttatagttgttgaccaaaaaaaacattaattctattatttctatagttataaatttagttagagtatgaaaaacaacaccatcttattcatgataaacacaagacgtataaacacgacaaaaattctttaagaagagttttatttcgatatgattcaaaaagtttcaaaagctgttatagttcgatttcggtgtgttatccatataactaaaaagttggacagctttcattgaaatatactactcaaagaataagaaattactagatttattatgttgtctcatcatgtttatgacttatatgagtatcaacgtggatgaaagtggtcgcttcttcctcatcggaaatcaaaataccgcatgttcatacaaatcaagaaaattataatttacaaatattgtaaagagctaattattttataaacataggatatcaaatgtggacctaaaaaagtttgaaaatgcaccactcaaataattaatgcatacagccaagcaagtaaaacattagaaagacaaaaaataaatacttttaaacaatttatattatatagtttttcatctcaaaactcaacaatataaaccctattccaccatcttctattccctcacaaacaacaacattgttaagaata

SEQ ID NO: 8674 - DNA, 3000 bp, Unknown
  misc_feature (1)..( 3000): cDNA_ID_2177714_gDNA_ID_1971833_Annot_ID_176332 3000 nt of promoter + ATG
gaacaatccaatgcaaaccccattatcctaaatctgatggaatatgcatagatggtattttgtattatacagctgggttcgatatgcgggcaagggtttctatggtagtgtgctttgatgtgaggtctgaaaagtttagctttatcaacatacatgtattcatgttgatgaatgactcttgtactctaatcaactacaagggtaaactaggtgcacttcagtttacatgtttgtctccaaaacgtcttaggttctgggttctagtaaatgctgagaaaaatatatggaccaaatgtatctatgcattgcctcctttgtggaacaacttagttcagcatacggagttagccattgttggaatgactgatggaggtgaagttgtgttgtcacagtactgtctaatatacgcattttacatttattacttcaaccttgagagcaagagtctcacaagagttcaaatacaagatgttgaaatgttcaaacgtacgagagtttacacctctctaggctatgttgagaattttaaacttatgtaagtgttcaactattgttttaatacttggtctagtttattctttcagttgataagtgtctatcttacattcttttgttccaaggactgactatgacagaggattcaacacattttctcctcaagggaggctattttaagtcgagtctgccactgaagctagcaaggtaactttcttattagttacaaaggatcaacttaagtacttaacatttacgacttgtaaattatttatgcagcttttcatggctagcagtttcacagacaattccacaactgaatagatgggcagattttatcctttcacagaagcgaccacaacaaacagttctacctccaccacgctaaagatcttcgataggctttgtctccactctgaaaatattcctaggcaaatccaaggattgtaattggaaattgttcatcattttaacttggttaattggataattttattcctttgttggtcatactagtctgcttttcattttcaattctcttgtattttaaattgtttaggaatacttgtcttcgtttcgactttggccacgccaacaagaaacatcttatgtaataacagtcattaagctactttatgtaaaaacaaccttatactttatgtaagacaaaacatatgggcccaaaaaggcccaataataatcatttacattggttcgtaagtcagtttgatttttgtttcctcacctccccgatcgtcggaggatgtagaaggtggcggcggcggctctcacctgcttcatcgcagtttagaaatgactagaggagatcgacgtagctccccgagtttcttctccggctcgaagcggagttggctagggtttcacggtggctcacggtcgccacttctattgattccgagctgatagatgatggtggctcgaggtcaatcgtgcgtatgggtttgcggctccgatcatccctgtgacggaaatcgagcggcggatcccgcagctgaggggtgatgacggctatcgtcggaggtatttcgtgctcgctttctcttttcgggagtttcagcgacggcggttcatgtgatggggttaggtcctgcggtaagatacggttcctccggcttgcgggattggtggctccggtctcgggttgttggcggtggctgtgctcgcaaccgtcgaataagggatagcctcgttgagagaatatcggttttatttccggtttaaatctcatcaacaaaccatctctaaaccgggttgtacttatgaattgaaaacatcacgtagttttattatctcttctatctgaaaacagcacgcatgttatagcattttgaatgattttttataagggattatttagaggcctaaggcgcgtaaagaagagctaaaagcgtaacagaagaatctctctcagtcgcaacagtttccggttactccaagatcgccgtcgtgcacctttcttctctcgctctctggttctgaggttagctcgtaaatctcatcgaccatcacttcttctactactcgttccaattaccatagtacgaagacattgctcgagaatctctcagtcgcaacagagtccgactactccaagatcgccgccgtgaacctttcttctctcgctatctgtttctgaggttagttcctatatctcattgatcatctcttcttatcctactctgattcaattacgatagtaagacgacattgctcgcgaatcttggtcaggttgatgtttcttgtaaccgcaactttgcaaagggttggctatatcgttcctttgatgcttagatgagaaatttgatagcttttctggagaattcccaaaggaaatcagtggaaatgagataatttagggattaaactgagtaattgattgttggagatacacttgtgtttggatattcgatttggattgtaaagatcagtttatccagtagtctaacttttcaattgccttccaccgttcagtttttggtttcaggttcgagaaattaataaacatgtcagttctaattgacacggatttagggattgtgtttcttgatctctacacggattaatgccctagcacctgctataattttcttaagctgtgcaagtaagtgttccttttgcctatacctaagaaacatctctatctttaagggttttaacttacttgttttgtcaggataaagtactaccatcagtgccttatccacactgtaaaggatttcatagcaaaaacgggtgatccaacaggcacaggaacgggtggagactcaatatactagtaagatgacgttttcttaccttctgatgatatgtagactgcttatctattttggtcattctttatactctgtgttgcctagttgtgctgctactgctttatatttccctatgttgaatttccagacttttgggagatgacaatgctaggttttcagcgatgagattcatgccgaattgaaacattcaaatactggcaccgttgccatg

SEQ ID NO: 8675 - DNA, 3000 bp, Unknown
  misc_feature (1)..( 3000): cDNA_ID_3045927_gDNA_ID_1971833_Annot_ID_176335 3000 nt of promoter + ATG
agaaactcggggagctacgtcgatctcctctagtcatttctaaactgcgatgaagcaggtgagagccgccgccgccaccttctacatcctccgacgatcggggaggtgaggaaacaaaaatcaaactgacttacgaaccaatgtaaatgattattattgggcctttttgggcccatatgttttgtcttacataaagtataaggttgtttttacataaagtagcttaatgactgttattacataagatgtttcttgttggcgtggccaaagtcgaaacgaagacaagtattcctaaacaatttaaaatacaagagaattgaaaatgaaaagcagactagtatgaccaacaaaggaataaaattatccaattaaccaagttaaaatgatgaacaatttccaattacaatccttggatttgcctaggaatattttcagagtggagacaaagcctatcgaagatctttagcgtggtggaggtagaactgtttgttgtggtcgcttctgtgaaaggataaaatctgcccatctattcagttgtggaattgtctgtgaaactgctagccatgaaaagctgcataaataatttacaagtcgtaaatgttaagtacttaagttgatcctttgtaactaataagaaagttaccttgctagcttcagtggcagactcgacttaaaatagcctcccttgaggagaaaatgtgttgaatcctctgtcatagtcagtccttggaacaaaagaatgtaagatagacacttatcaactgaaagaataaactagaccaagtattaaaacaatagttgaacacttacataagtttaaaattctcaacatagcctagagaggtgtaaactctcgtacgtttgaacatttcaacatcttgtatttgaactcttgtgagactcttgctctcaaggttgaagtaataaatgtaaaatgcgtatattagacagtactgtgacaacacaacttcacctccatcagtcattccaacaatggctaactccgtatgctgaactaagttgttccacaaaggaggcaatgcatagatacatttggtccatatatttttctcagcatttactagaacccagaacctaagacgttttggagacaaacatgtaaactgaagtgcacctagtttacccttgtagttgattagagtacaagagtcattcatcaacatgaatacatgtatgttgataaagctaaacttttcagacctcacatcaaagcacactaccatagaaacccttgcccgcatatcgaacccagctgtataatacaaaataccatctatgcatattccatcagatttaggataatggggtttgcattggattgttctccataaatggtttccattctccaatgtcaaaacttgatgctcatcacacgtatttgggatatcatcagacttgatgcacaatacctttagctgtttgcggaccggatcatatcctaaataaggtcttgtctcagtattaatactcttcagttccactttgggtaaggatacggactctcccgtgactgggttacaaattaccatagtatctagatttctcttacctcggcgacagatgaatccacaaagaggagaaccaatttcagaaaaagaatctgtggtatgttgaacatgataacgggtgggtacaagagacgtattctcgttacatggaatctgagggtgaggtgaagagaagaagaacaaattgccatcatcatcttggaaggtgaaaagaagcaacggtggacgaatcgaagacatagtcatgaacaactccttgaaatcaggacgacaaagtatggattcccagagtttggatacgcaacgaaacctagctatagactttgcaggaactctcgaaaagatatccatgaggagatcgatcgggatatatctaaaacaggaaacataacccacctggagaggttgcccctcttgcatcatttgcttactgagaggagctaaaccagtatcagactccttgatacctgcaagttacccgtatatgcaatttaatcattcggtaaatagaagtcactaatgaaagtaacaccactatctcagtgtgcacaaaccacatagatcgttgatcttctcggtgagttccttaatttctttctccactttcttgataggtgcagagtaaggcactaacccctgcgaaggattgagattttaacaaggtcagcaaaaaaacatatggagacgcaacatatcaaaccaagtataactatgaacgtttttttttcacttggatgacttattcaaacagtgaggcagagtcacccaaagctagttagtcatataagcacaaaaatgatctaaataggatcataaaatagcaattagctcgaaattactcatgagaaaacatcaaactggttcgcaaagaaacaaaatacagcaaaatttagggttctaaaagggtacacttacataagtcttgacgagagcgatatcatcttcgtcaagcggatcgtctacaatatctctcaccattttttttttttttttcggattttgatcggagatttgagatgtgagaagaagaaatcgaattacaccaacaagagtaccaactttgtccgagttattaaggtctagtaagtaagggccacgttaggtgccttgttggagaggccagagaaaataataccacgtgtgaattgggctatgaaacgcggcccattagcccaatatgcagtgatccgggtcgggtcattagagcgagccgggtctcgttatccatcgcctccctggttgctgcgtcaaagccagacacaagtatcttcgttgaaatttgctttttgtgtggcttatccttgtctgtcaaattcctgcaaaaactctcgcctctctcagacagtaagaggaacatatttccttaatgtattgttccgtataatcttacaagacatcctggttggtgttgcagagaagagtgtttcaaagtttcttcctttttcgttttcctggtctgaatgagctccca

SEQ ID NO: 8676 - DNA, 3000 bp, Unknown
  misc_feature (1)..( 3000): cDNA_ID_1989504_gDNA_ID_1971846_Annot_ID_58398 3000 nt of promoter + ATG
tattcaaaggatagatggagaaaagtacatgaaacctaatattgagccccatctgctcgcatcatgggtgagtgactttcaactttaactaagatagttttacgctaatatataaaccaaggaataaatagcttagtggttatgcttgcatttaacattaagtttccaacttcatgcaatgttttgtttttttaatgtgctagctatgtggatgattttcttagatgtaaaacgataatgctacatgatgtaaaagttttagcatttaagaaatatgaacatgtccctacgtaaaacaacgaggttgttggtgaaaacttcaaagacatagttcttaattcgccaaagaaaggtgtaccaattcctttatgatatttttctacgacgactaactatgttaacaatctttgccggttatattaatccatccgagatttgaatttgaggaatcatgaatttgatataataattagttttgatttctttattatgcaatcttgcttgatttctatgcaccttggtgtggacacatcagaatcaaaatcatttgaaaaaaagaggcataaacatccaggatgaactgtgagagtccatcaaactaagcacaaccaaacagtaggactttttgtttatgtgtctcgtccctaccagtggatcccacatcctctatcgggcctattggcccacccttatccgactgtcggtccactatgtctgggaggttttcgtgactttttaccgatcctacaaatcaccacatgatctttctctatgctttgtcgtcactcgcatagttccgacaagcagttcccggaaggtcaccaatctttagactttcccagctcaaatatgcttaattgtggagatctctaacgatctttaaccgaaaatataattgcactttggtgatgtaggacccttaaggccctaactcttacctcttcttttattcacctaagaccacctccaacggatgggacggtgagagcctctaaaaaacaaaaaacaaaaaacaaaaaacaaaaacaaattaatcttacaattatattctaattttttagcacagattgactactaataaaactacacgtgcatattggtttgtgagaccgttccttaaataaagattttagacgctctctctcatctttctctttacttttaaatatattttttttttagttatgagagcctctgttaagagattcacgttggaggtgctttaaggccctaactcttacctttttctgtattttctgtcactttaaaaatagaaaactaatgaaataaacctgccaatgaaataccggaaaaataaagagaaggataatacaaagtccgaacgtagcacgatgcacgagcatcaactacaggcccggcccagaggccaatccactaaagccaacaattcgggcctcaaaattcaaaggcctttttaagatacaaacttgttaaggccttgtatggtactggtttttaaagttgattttggcttttgattttgcaaaatccactttttcacccattcaagattttataaaaaaataattccctaaattatagagaatccagatttttatagattctagtcatttgttcttaaaatccaaaacccacttttttgggattttcaacaaattctatcgtaaactcttttttttttgtttttgaaaaataataatttagtttaaagtaaataattttaaaacgtttctaaataataattatataaaaatcaaaaactagaaaagttaccatttaagattttgcaaaatctaaaatctccaccaaaatcaaaaacttataatatcaaaaatcaaaaaccaaaagccaaaagccaaaatccaaaatccaaaaacccacaaaaatcaacaaaacattcatggcctaagtgttagtcatattgtataactactaatgtattctgtagggccttttagaaaacaacttgggcttttagaaacaaataaattatatctttaataccaaaattttatttaataaaaaaattaaaacctaaaacctaaaacatgatgatacctcttctgcatatctgtgagtcaatttgcgttttcaacaagtaaaatcatatttttttaggttagttgctagtttttcttttgagtttatttattttttccttttgtctttcacaaattatttcggttatgattttcaatactatataaaaataagcatagtttttaagctttgcgtaggactccatcaacatctgccagggttgaaagaagctccccgacagtcgatctacgatattcgataacatcgatcaacctgtctttcttcaaatcttttgatgattcctccttacttcgccaaaagtacatgaacaatatgtagatctgctctattttgttgcatgcgagaagctttacttcgaaagcctatcaagtaaggctccatcaaagggttagcaaatatattactcccaatagaaaaaagaaatcgatcaaacaaagataaagagaaaatgttccatcaaaaaagaaaaaaaagacgataataatagagaaagaagaacaacatataaaatctgaacatagcaaaaattattctcccaaaaaacggaaaaacctaacaaatattttacaaaacaaaatccggtgaaccggatatcactttctctctttaaaacattggagtcaattaagaaagagaagttcatctacaatagaagttagaccacctccaaaggaaagagagtcttaaactttttaaaaacataaaataataataaaaagagaagaagctaaactcatttagtcacgtcgtaaacataaaacgtgattctaaggttcagacatcgatgtgggaaaccttatattaataagttacttaaaagtcttcgacgactagctaaactcattccctctagtgcttattaatgcaaagaaaacagaggtcattgactttcttcgtttcctcttgagtttctcatctcatgatcgttgttcctttcggaaaacaaaaaacattaca

SEQ ID NO: 8677 - DNA, 3000 bp, Unknown
  misc_feature (1)..( 3000): cDNA_ID_1988781_gDNA_ID_1971851_Annot_ID_58399 3000 nt of promoter + ATG
cacttaaacatatcattttcagtacccatttgtatttttatcctttgtgtgtatactcacgtttatcttaaaaactagcatacgtcatgattattaatagtgtaaaacagcatattgagtagtaaaaccgaagaaaaggaaaaagaaacaacataatgaagaggaaaacaaagctaagatcaatcatgtgtgagtcaaacttggtaagaaccatcgagatctatagagttgaagggacgaacaatcaaatttgtgcagtagctccatcttctgtgtctcgagattgaaaagaaataaatcacttgcgttagtttcataaccaccactaggtctacaactgaaatagatggaatttcttttgaatccctcaacgtcactggcgagcacagtgatgcctagatccaaaagcaatgcctcatcacccaaagaatcaagtttttcatatcctgatgaagaaatcttgaaaacccgaaaggaccatgttctatatgtaggtctccacatttttgcaaccttgagggcttttcctgttaccgtgactacaagttttctatctaacaagcataccaccttggaagttttgttgtccatctcttcagaaaaatctaagatttggaaagtaccagtactgcttaagaagtaaagcttgtgatccttgtaaaccatgtcataaaaatatgaagtttgggggatttgattccacgaggtatctcctttcttggcataaaccacacaataaactccaagtccccacataactatataatctttggattcctcgtcaatccaaaacacaggggaacttagcgaaaagctatagtgaccgtgtgaaaagtgaaaccaatcatatatggttcgttcaatctttaccatgccaagttgtgactccacaggaggaagattgatcctcttgcgagtgaatatattcaaaatgtatagatgatactttgaatcttgcatcaggagccaacttccataagttgccctacaaacactctttgcaaattccacaccaagatcttgcatcttgtaaagtttgtctttttcgtcgggattgaacaacttacaagtactgttatcggtgttgtcttctttggggaagagaatcagcaaagcgatctgacgttcgggcacgcattgtctcgaaacagagtaccgagtggagcatacggatttagctcgttggaaattaactaagctgaggcgtttgaaaactaagttcaagagatctagaggaagctccgaccatgtattagggttatggttcttctccatggcaatacagtattggggagaaaggagaaatctccgaaaggttttgtaaatcaaacgatagaatacaactagggttttatatgattttagttgttcgttttttcatcgttaatatgagcctttttggcctaatcttgatagcccatttatcaacaactgtaacaaaccatttttgtcatttatttacataattgacccaattctttttttttctcaaacttttgcatcatacactgaatgagtgaatggatttaggagaaccataacttttgagtgtcttactggaaagttcataaaagttactcactgaaattcgtagacatcttttattcaacaaatcacaacacagcttgtattcgtagaattattcattagaggttgaacaaaagactgaaagagtaaataacatgatacagttgggccttctgactttggcttttgtatttttcaggtcaatgagttccaaaaaatcaggttaagttggagtaatcccaacaaagctatactcttttccctacattcattaaagaatttttattcgttagattgttaaaaagtgcatatatagttgttccaccattatgcaaatatatataatcaacacaaaatttcattatgcaagttttcattcggtaacttatatcattgtagttctgcaatgttaccaaataccaatccaaaccaatgtttttctataccggtgagggggttttgactttaccttgtagaggactcgagttcttcaacgtctgatctcttcctcttcctctgtgcctgataaatcttatgttctccgacgggtaacgacgacatcgcttgcaaatgagtctgaagcaccatctgagtcaagtcgacttccatttccaaccttctcttctcagcttccaacctcgctgcttcacgagccttgatcatctccatctccgcgagttccgttcgaagcagagaatcagacaagactcgtatcatcgccgacactcctgccgaagttgtagagtcagagctcatgttcgactcggtcccggagctcgagtttgattcagtctctgagtcggatctgtaaggatcatcggagctatctttacccaacaagacattctccggcgatgaggtctggctccggcgaagtcttgccgacttgcccatgaagtgtaaatttgggcagagagagatatagagagagacagtggaacatgggttttgttgttttggttttgattctttcaactttaaaaactgattagactaaagtggttccactttcgattaaaagcaactttttcacgtatacgaaagttgttcattaattccgtaaaaaaaaatcaattttctcttcttaatctattaaattcgctaaaagattattcggaaataattctccatcagatcacattttctcaaacatcatgaaaaagaaaaatcctctgataatctcaaacgattacagtataacataaagcatattaacaatttaataattaaaaaaaaaaaaaaaaaaaaaaaaaaaaaaaaaaaatttaataattaatgctagttttgtttctggctaagcacacgcgcataagagaacacgctttagaattaacaaggagtgtattacacgcgcttggttttcgcgtaaaagccttgtttagcgtattattatttcataagttcgatttcctaattcctaatccgtttcctttttattccgatcaaagcagcgaaaaaagcatcggagatatg

SEQ ID NO: 8678 - DNA, 3000 bp, Unknown
  misc_feature (1)..( 3000): cDNA_ID_3091351_gDNA_ID_1971851_Annot_ID_58404 3000 nt of promoter + ATG
taaaaacattggttagctaaatacaacaagaactaacaaaaacgtttgtcaacggaaacactccaactttattggagacttgacaacgcaaaacaaacagaagcacaacagagtacaaggcaaaacactcaaaacatatgatgtgatgaaatgaaagcataaacatgcaaatagcaaaacacacacactcacacacacaaagcgacgtcgttttctagcatctgcaatcacatgctttccatttcagcactgctctctacattatggcagcaataacagacacttaaaccaggaaaacgagcatctgagcattcgcctccagtaaaattgcggcccaatgaattgcattgtgtattgcaagagaacaacatactacataaacccgctgcgctgtcacacactctacgcccatctacttgtgtccagtccatatatagaaagatgcaacatttcattaacatgtatttattctaaatcttcttttaactaaatttacgtacctgtaggagacatgaggaggatggagagacatacaactactgcaacagcaaatgtgctcactcttaagctccccattgctgatttctcagttcttttttttttaaaacactagatatctctcaattcttctttcttttttccgctttgtgatttatttagcgaaggagtctgaatttatagcactgaagggaaaatgagaggctcaaacatgtaactttattttattttatttatttatgttatttgtatttatttttaaagaaaacatcactatgcaattttatattggaactaggatttaacccgtggtataccacggagcaaatattttatttatatatataataatcttaaattttaaggttttaaatttttagtattaaaattatataattttatattaatattgtaaaaaaaaaattagtgatgatagaataataaataaagatttaacccgcgttatatcaatgcaaacccgtcccactatataactcgtctcataatattttaatatctttttataaggataaatattaataatgttttataaagttaaaatatatcaataataatataccattaatgctaatagatctctttaaaaaagaatattagtgtgtagtacattttagatttggaaagatttaaatgattgttgtgatatatttattttaattctaaattttagtaacaaaattgatttatatttggatttgagaagaaatttgttaaaatattaaatgctaatggcattggatggtaaataaatctcaacttgaggatttatttcataaaagtgctgcaaaaatgtatatgtagatgagtaaatagatcaaataactttcagtcaacatatttacaataaaatgattctccaatattgaaaatcacatctgtcattagcatcaataaaatcgaattttattatatagtatacgtaacgagacacacattgagtctaaaatattgaaaatactcactatcacatatgtcaacgataacactaatttttttttttgtataatatacgtaacgagacctgcattagatctaatttttaatcgattagagcttaaatgacatcgttttggtttgactaagagaatcgttaaaaatgttagaaaatctgttaaagcttaataactgtttgtttgttttttttctttctttttttgtcaatcgaaaattagactattaaatgacaattttccgtttaaaatggcaagtcctagatttgaaaaggtcttttgaaatctttttaagagaattaagggtgaattaaatatattcagaaattaaagggtcgaattgcaaactttcttggttcatacttggtctgcctttgtccctttcttatcttcttcgcgcgcttttgaaaaaaatagaaacccgccactgaacgtcagtcttccacgtgtcctctcctgtgctctgtttccgatcgtcggagacatcaatttgcctgcttgtagggtgattcgtcaaatctattatcaggttttaaatatactcgaattgacttccaaattcttagtctctagtgtaatgattttgagaatcacttaactccaaaaatataatccacgatcccgtgttaattattgaagaatcaatcgtttttaatttctcaccaatagatgttgctcttattacttaaaacaaattgtttagacaaatgtagcaagtgtgatacttagtgggatcttaaagacgatttctcctataacagaggacaaacaggtcggtcaattacaatgtcatccctctttaccctgtctttttttttcttcttaaaacctaaccatttgattgtttctaaaggtatttcaagaatatatgatcaatctagatgaatactataccgacgatgactacacacacaaggaaatatatatatcagctttcttttcacctaaaagtggtcccggtttagaatctaattcctttatctctcattttcttctgcttcacattcccgctagtcaaatgttaataagtgcacacaacgttttctcgaagcattagaatgtcctcctcttaattaatctccttctgattagattctcaatagagtttaaatttgttaatggagagatatattgggaccctcaaggcttctaattataccacgtttggcataattctctatcgtttggggccacatctttcacacttcattaccttatcaccaaaacataaaatcaatcaacttttttttgccttattgattgtgttggatccctccaaaattaaaacttgtgttccccacaaaagcttacccaatttcacttcaatcttaacaaataggaccaccactaccacgtacggtttgcatcatacaaaccacaaactccttcttcattacaattattatatcatctactaaaacctctttctccctctctctttcttgttcttagtgctaaattttctttgttcaggagaaatataatggacctcaagtattcagcatctcattgcaacttatcctcagacatg

SEQ ID NO: 8679 - DNA, 3000 bp, Unknown
  misc_feature (1)..( 3000): cDNA_ID_1823698_gDNA_ID_1971851_Annot_ID_58410 3000 nt of promoter + ATG
gtagggaaacttgagattcaataatggaaccagtaggagtttcgccatcaagatgatcaaacgagtcaactgttgcgcaaacgttccatttagctgcaaggctggttacagattgagctttgtgagttatcttcgttgcacttctcaaacatatgaatactcctgtaaccaaactcaacgaacataactgtatagaccaaaacaaaaaacatttagtgatgagttcaatccgaataaacagagcaaaacaaaacagaaccggtaagaactcttaccgcgagttcgccaacttcatagatattaacagcaacactagctctcgtagtagtaagcaaagccatgaactgagtagcagtaacaagaatcaaagacaaaagaataaatctcctgaatcgatgactaacaatcctcaaattacgacgaatcttttgatgctcgccgagagctgatctaacgtcagtgatctcagaagcgaagcaacgagcgaagtcatcaagacgaagagtttgtagatgacatgtgattttgtagagaatgcagacaatgatgaataaggagttacggtaaagccaagaagagagctggagagtgcaagcgacgacgtggctaagaataggattgatgatgtaaggaatctggttgaagccagagatgtaccaccagattctgtaggttgcttcgagtgttagtgatgggaggacgaagatcattagccgttttagtgatctctgtatcaatcaagaaaacagagcaaaacagttttagtaattatagttaacttctagcagaagtaaacaacatccgaccttagctcagttggtagagcggaagactgtagtctttgacagataatctttaggtcgctggttcgattccggcaggtcggattttttcttttgtttaattaaaaaaaaaaatcacaacagaaaatgtcggccagaaattaaaaaattgttaactgttgactgattatttttaaatacttactgaatatttcaaaaatttcaagcctatttaaaagtattttattattggatttaaattgtttaattaacaaacaaatgaatgttaaaagaagaaaatttcactatctaaaacaaaaaaaattgtcggtcagaaataaaaaattggtaactgttgagtgacgttttttcagatacttattgattatttcaataacttcaagcctttttttaaagaaataataacaaagattgctaatgttgatagtttcaagtcctttttaaaaaataatttatttatcaactgaaattagtaaggagtaattaatatagaccaaaacttttgaaaataaaattagtaaatgattattattgggtttactaaattctggaataaaaaacgagactcagaaattaattaactaatattttgtcagtttgtcgtctttgtcacataaatggtttggtaaagtttctgttttttttttttttttgaattttacgtttgcaatatctctttaacctcaaatcaagaaattttttgataatcaatttgtaattaatagagacgctgacctgaatttcagcttcgtattcgattctaactttgtcgctaacatcccaaagcttatcaaggaacaaaaaccgtcgcatcccaaattttctcgaccaaatcgataagctaacgaacgagattcctgcgaaaatcgataacgaaagctgcacaataacgtcgtacggacgtcggtgatggaaatcgcagtcggagcaaacgagcaagaagtgagagatcaaaggaacgatgacgacgagaaggaagaaaacggaccacgaaagcagagccgtaccgaaatttgactggtcgaaccagagcacgagggacatgaacgtgaatcgtgatgcaggaaactccggttgttgtttgttgatgatcgcgcttggtcttgtcgtctccgggagaagatgctccgacgatccgttcgtcgccatgagaggggtaattttgggaattaggagaattttgagagattcaaaagagggaaaaaggcaaaagtaatgtcgcgttgattggttttgtaagctaaacctgtaatcttgtttaaatactaaagttttgcgtaattttatatgtttaatttaaaaacacacacgtattaacataggactttatataatttgttattttattagttttcagatattatgtggttgcatcttttttggtaggtgtaaagtttttttttttcagtttctgtttaatatctaaaataatgattaaaaaggatgcagtagagtgtcatggtcaaaaactcaaaatggtttaagaaaatacaatgatttaatgagtaatgactgatttattaggtgtttaatgttttaggaatttgtctctgtatgactttgagcttccagctaaatttgtaaccctaaaaatatttaaaaaaccagatcaacagaaaagacagatgatacagtatggttccaaaattttattactatttttgagttttttttttaaataagtcaatttaaacaaataatcaaattgagttgaattcgctaattaattgtcatattttttttttcacattcttaatcatttttttttttgaaactatacacgtcattgaattcacgggattatatatcaatcagtttccaagtcagaaatgttagcaattttcacgggctagaaaatcagttgatagttttaatttcgaactatttcatacaagatggcgccatgttcagggccttttagcacataagctattattctaagcccaataagttaacccgggtcggatcatttgacttaatcggatcctaattttggtaggaaatttctccggccgtgatttgttggacgcgtcgacgtcgatggggatgagaagtagtggagaatccgctcacattgggattcgtcattcttcttctaaaacccgcaaaatttctccatttctaccaaaaatatccaacttttacttttctttcctgtgaaattatctgctcaaatctttggttcctgacggagatg

SEQ ID NO: 8680 - DNA, 3000 bp, Unknown
  misc_feature (1)..( 3000): cDNA_ID_1823694_gDNA_ID_1971851_Annot_ID_58411 3000 nt of promoter + ATG
gaaatagatttgctacctattactggtcttcgagtattgggagttcttgatgtttggaactcatctgcagacaatacagggccagtttaaaagactactaatcataggtaaaaacatctctacaactctggaggatattgataattcctggaaagacaaactcaccaaataagtacaagtcacctcccgtatagtattttactgcgatatccggtgcaggcatattcttcaactcctctgtttagggaaaccaaaaaaaaatgaagcacaacaattcagaatgtaaagatcgttgaagaattttgtgtaatatttcaaagcaataactccattaacaactttagttctaatgtaaatggtacacagaatggtggagaaagaagaaaaaaccattggtaaccaacctccactggccttgagaaatttatcataagtctcatatgcatgactctccacacattccgaaaagtgatctgcataggtgacacaaggttaacgaagtcatgtagaccagaagcaatttattcagctactttctagaagttacgcggaaaggaaacttacatgccattctagggcttaagatatacaagaacactgtcatgaagtagtagaaggttgctatgtgctgagccagaaaacgatcaaaccaccaagaatttccacccaattcctgtgattagaaacatttgttttactattactaactatgtgagtaaagagtatgaaacttgtagagaagtaacattttggttcttacttccattatgagcaagtgatgcatttcattccagctctcagcaaagtgtactttcaaataatctgctctcctccaccaaccaaaggtctcatacatatgtagcacagacataaacgctgcaaggagcatatagaagaaacaaacattatgttctagcctcggaacaacttttcatttggtatccagatccataattagtgataaacacactaaaaaaaacaagattcgattctcaacaaatccaatatctcgatgactgaatcgccttttgttgttaagagttgaactatgcttctaatgagataagaaagagtacatattcctcaaacacaactatttcgtcattgttcttcttctgcacacatctcaagtgatgttcacaatcttactgtcttctgaagaatacaaaacctaatgactagctcttaatgctctgctcaatgtttcttgcaaatattataacgaactgaaactacaattacaaatagatgcacttaccaaaataaggcactctagcaattgtctcaagaacaaagaaccttgcatatgttcggtcacgatacaaagtgtcaagtatcttaataaccgagtcctgcggagaaaacgaaaacaagacaacaatcagaagacatgaaataacttccggtaaaataacacaaccaaaaaatctatatttctagtaagacataacgtttcaggtaaataaaagagttataaaaccttactgtaaggaaaacattcactccttgctcaagcttgatgatccatgtctcaaaagcactagttgaagaagaactcatatttggctcctcaagtggttctgtaccagtagaagtctcggctttaaacgattcctccaccaccactttctcttcatcgtcttgcaaaatcgttgcttggactcgatgattgttcctgaagttttcaaaaaagttccaattttcagcaaactagaaatggacgaaacaaaagtacagcaaaattcaaatccttttcataatcacgtgtgaacaaatcaattaaatattagctgtagctaggcacaccttaatagcagacgacgagaagagagaggaagatgatgaagcaatcggtgagaggagctgtacgaaacggcggctctagagcgtcgaagagtaaccaaaggccgtgaaatcgtcaacgtaccagaggagatgcctgaaatcgccgccatctccgtcaggaaccaaagatttgagcagataatttcacaggaaagaaaagtaaaagttggatatttttggtagaaatggagaaattttgcgggttttagaagaagaatgacgaatcccaatgtgagcggattctccactacttctcatccccatcgacgtcgacgcgtccaacaaatcacggccggagaaatttcctaccaaaattaggatccgattaagtcaaatgatccgacccgggttaacttattgggcttagaataatagcttatgtgctaaaaggccctgaacatggcgccatcttgtatgaaatagttcgaaattaaaactatcaactgattttctagcccgtgaaaattgctaacatttctgacttggaaactgattgatatataatcccgtgaattcaatgacgtgtatagtttcaaaaaaaaaaatgattaagaatgtgaaaaaaaaaatatgacaattaattagcgaattcaactcaatttgattatttgtttaaattgacttatttaaaaaaaaaactcaaaaatagtaataaaattttggaaccatactgtatcatctgtcttttctgttgatctggttttttaaatatttttagggttacaaatttagctggaagctcaaagtcatacagagacaaattcctaaaacattaaacacctaataaatcagtcattactcattaaatcattgtattttcttaaaccattttgagtttttgaccatgacactctactgcatcctttttaatcattattttagatattaaacagaaactgaaaaaaaaaaactttacacctaccaaaaaagatgcaaccacataatatctgaaaactaataaaataacaaattatataaagtcctatgttaatacgtgtgtgtttttaaattaaacatataaaattacgcaaaactttagtatttaaacaagattacaggtttagcttacaaaaccaatcaacgcgacattacttttgcctttttccctcttttgaatctctcaaaattctcctaattcccaaaattacccctctc

SEQ ID NO: 8681 - DNA, 3000 bp, Unknown
  misc_feature (1)..( 3000): cDNA_ID_1823690_gDNA_ID_1971851_Annot_ID_58412 3000 nt of promoter + ATG
ttttgctctgtgtccttgtcaaatctgaatgtgtatgcgtgtcttgtttgtgggaagtacttccaaggaagaagccagaagtctcatgcttatacacatagcttggaagcaggacaccacgtttacatcaatcttctgacagagaaggtttattgtcttcctgatagttacgagatcaatgacccttctttggatgacattcgccatgttttaaacccaaggtatattagatcttgtgactactacttcatagttcttactgcattttgtgtattgatttgtgaacatgtgagcctttgcacgtagttaacaacaacaaaattgctttgactattatctcaatcagtttcttcttgctagttctctgtatcatctaccatctatttatatttttattcttgatagcttgaacatattactcttctttcatgtcttgtcaaattttctttgattttacagttcctttttatgaaggcttcggtgttatccatttacaggtttagtagagcacaagtaaacgagcttgacaagaataggcagtggtctagggctcttgatggctccgactatcttccaggaatggtaatcctttctctttgattacacttgatcttgaaattaatgtctcctaaaggttaagcttgtaaatatgtaggtggggttgaacaacatacaaaagacagagtttgtgaatgttacaatccagtcgttgatgagagttactcctctaaggaatttcttcctcattcctgaaaattatcagcactgcaagtctcctcttgttcaccgttttggggaactaactcgcaagatttggcatgctcgaaactttaaaggacaagtctgactcaatttatgcctctcacttttagtttttgttatgccctcacctgttgaggacctcgctaatttaagtcaccttgcatcaacaggtgagtccacatgaattcttgcaagctgtcatgaaagccagcaagaaacggtttaggattggccaacaatcagatccagtagagtttatgtcgtggctcctcaacactttgcacatggatcttagaacttcaaaggacgccagcagtatcatccacaagtgcttccaggtatgtgtcagtcctttgacatgtcaacctaaatgcagtttgatataattgcttacaaaaagctgcatcttcatgtaaccttctaaccattatagggtgagttggaggttgtgaaagagtttcaaggcaatgaaaacaaagaaatctccaggatgtcttttctgatgctcggtctagatttgccaccgcctcctcttttcaaagatgtcatggagaaaaacattattccgcaggtatatggctatttcaaatcttgaacgtcttgctactctgtgccatttgaaaaatgcatttcagtaaggggaacattttgatcaataagataacgtgaagtgctagaaaacttataattctcaatataataatgtcacatttggttgagatacaataaagggattcttaaatagtgccattgcaaatttactgtcctggagtaaactgtctttttcgaatctagtttatgacttgggaaagtgtagaattctctgagtccttggttgtttggagctcctgtagcctttatggcttgctacctcgtatatgcgtcttagagtgtttagtttgcaaagtgaggttagcagaaactaatttctttgatgtttgggtcaggttgctctatttgatttattgaagaagtttgatggagaaactgtgacagaggtggttcggcctaagctggccagaatgagataccgtgtaatcaaatctcctcgttacttgatgttccatatggttcggttcaagaagaataacttcttcaaagagaagaaccctaccttgggtgagtctatttggaatttttgtgacgttcatgttgtataaggatccctaatgccaattttttcctatgccacagttaacttcccagtgaaggacatggagctgagggattacataccatcattgcctagagcaccagaaggcgagaatgtgtgttcaaagtataatctaatcgctaacattgtacatgatggtaagcctgaggacggatacttcagagtctttgtgcagcgcaagtcacaagaactatggtaagctttctcaatcattaactattattgtgtttcatgttcacaaatgcatgatctagatctgtgcataagaaagacataaattcatttgggggataatgtccattgcaggtacgagatgcaggatcttcatgttgcagagacacttccccagatggtagaactatcggaagcatacatgcagatatatgagcaggaggaggaatagagcactggaaacaaactgactccatctggttttaagagtaaaagtgaccagtttaatcttggattgaggaggaatgagattagaactcaaaaaggggattcttgaacctcttttttaaggatagagagagagcctgttgttgctagtgattcatcataatgaaaaaccttggtaaaaaaacgcatattgtatgagttttgggaagagcttttggtaaaaagtcttcaaattctgcaacttttgaaattttgtagtaaaatacacatttgacttttgagtttccatttccaaaaaatatcttaaaaagaagtgtgtgtttttctaatttatttgtatcttaatacacaacctctcagccgatgaccgtgtcatgcgtctcaaagaagggtatgctatattcaacacgcatcttaaactgttattcgggttgcaccaagtatcttagccaaaatctaaaaagaaccttctattagagtcactatccaaaccttggatcattattttacccaaattagatactatctttaatagtatatagactggtttatgtatacactatcaatctttaaaccctgagtacttcagtagaatgggaagtattagactgttgatgtaggcgtttattttgactggtatcattggattttcttccacagtaatg

SEQ ID NO: 8682 - DNA, 3000 bp, Unknown
  misc_feature (1)..( 3000): cDNA_ID_1823686_gDNA_ID_1971851_Annot_ID_58413 3000 nt of promoter + ATG
ttggtaaatgcagtggacaaaattgagtaaagattcatactttttcatgagaaatcttatgtacttgctaaatattgtgcctttgcctcttaatttgtcttgtgcagatggtgcagtgatgccttcttggtttgacatccctgagcttcctcttactgcggtaacacttcttgttcaatactttctaaatttgtagcttcagattttctaatatagtttggggtcatcagtacttgtttagtagattttaaggtttataatgtacaaagaacaggctgctttagcttattaaggagtttgttctgttctagagatattttaagtcatcaagtaagtaagtttttatgtgttagggatctccgaaagatgaaagcagtttgcttaaagcagttaagaacgttcatgccattatagataaggagattgcaggaggaatcaatccagaaaatgtgtatatctgtggatttagccaaggaggtgatttctcttagcaccctccatagttacccattttcatggatttacaccttccaatttttctttaaactgcaaagctacaatgtgttgatttatttgtattgcgactcctgaataagattttctgcaggtgcattaaccttggcgagtgttcttctttaccctaaaactattggaggaggtgcagtctttagcggatggattccattcaattcttcgatcaccaatcagtttaccgaagatgctaaaaaggttgttcattcgtttttcggtttcttgtaaagggtaaatgttgattttcctgtcactgttttttgggtatctgagtctctaaattttgcatatgcagacaccaatcttgtggtctcatggcattgatgacaagactgtactattcgaagctggtcaagcagctcttccttttcttcaacaagcgggtgtgacttgtgaattcaaggtataacaataagaactcaaatcaaacactcatatatttgctcatataacagagcagtcaatactgatcacatggaaagatcttagaaaccgattcttggaaatgtatatctaaagagagttcgtttatctgcaggcttatccgggtcttggacactcaatcagtaatgaggagctgcagtatctggagtcatggttaaaacaacggatgcagagctcttcttcttcttcataaaatggtttttaaaggcaactttgtactcaaggtaacaacatcctagtacctatcaagattagaagaaaaatgataacatcagctcatctctggtccaagtttctctatcatgaaaaccggttctggttgaaccaatcttgtttggttatgtaaaccgttacttttgttaactacaacattttgcgtactttgcattgatttgaaaaattatatgtcaacactagaattcttttatttagtcaacaaatcaagtgactacataactcgaattgtgttcaaaatgcaaaatctgaccaaaacaaaacctgcatatgttcactcaaatttacagtttttgtcgggtaaatagttaccaatgacaattgtttacaaatttttgtgaaatggtgtttccgtaactataaaaattcaattatttatcgtagaaaagaagacaaagaatcatatcataataagtcaccatatacaaacaacgatctgagattctgaataatgaagttttagcatatatatggtcgacatctaagtttgaaaccatataaatagttaaatattattagatccgaccaaaaaaatccaaatgagtttgcatggtctgttgatagtacagggttattttcgtcaaaacacataatttcccatttgcgcccatattatctctttggattctctccccaagcacccaccgactataagtgattttcaagaattaccctttcaccatctcaaatattacagaatcttgacactatagtgacagctagaaataaagaatctgagtccaaagaaatattcaaatttgatttgatctagcccgctaatatttgtactgtactgtatatttttatagtgctttcaattagtgcaatcattaggaatttgattatatagatcacgtgtaatgtaaattaaaatttgcaattttagacaatatagtaacaagggaaagataaataacaattatacgtgcatgaacttgttatgattattgaaatgctggcattgggccgttggtgatggtcctaccaaagagaagtctattactttgttaatatcaatcgaatctatcaattcttgtgactccaacaacaaaactctaatcatcttcttttgaaacaaaccaaatactaacaaaaatttcgatctttcaatttgaagtccaaggttgtattgtaacaagggtcaaagtttaactttctcgtgacaattatcgaggcaaagatattggatattgatactcttttttgaaatatatacaaagaccatagtccaaaatagtaattcttaaaatatcacatgtgatggtttttttcttcttgcattggtcaaattgaaatcattatatttggattgcagtctgtgcatgaacagttttcagttgtgttatataatacatagtttttattcatactactgtataaaattttcagaataaatttgaagtaaattagtttcaaatcgaaaattaaaacaaaacaaaagtataagggtaatttagcaaattcttgaaacaaacaggaaaaaactgtaaaataaaaaagcgccaagtaggcgattactgttacaaatgaaccaatcaaagaccaaaacctctaactaacttggctacttcaaagattacgcaatcgcctgtttttaggacacagtggcacactcgtaataacgtagtccagagtgatctctttcgtcatttcacatccttcgtctttcttcttctctccaccttcactgccactcacacctacacgcgcgacttctctctcttctgaagcactcaaagagtaaagtttctctgcatttcagcttctctctctcttctctctgtagaaatg

SEQ ID NO: 8683 - DNA, 3000 bp, Unknown
  misc_feature (1)..( 3000): cDNA_ID_1823682_gDNA_ID_1971851_Annot_ID_58414 3000 nt of promoter + ATG
cttggagtaactggactggattagtgtttttagtagctgtgatttgggaatgatttgtaagatggaatcataaggtttatcactggttgaagtagatgatctttgcttaagaagctgttttcagtatcattgaatcgtgttggattataaatttggaatttgaaactttgtatatctagtttagttttgattattagtgattcatttgaagtgaagtgtgattaaaatggtgcagatagcagtacttgaggaacagaagaaggaaattacagaaattgaggaagatgataagattgaggaggatgacaagattgatgaggataataaggttgagcaggaagacaaggttgatgaggacaaaactgtagaggagtcgagcgagaagaaagcggaagtggaagtggaggaaaagcctgacatcaatgatgttccgatggaagatattcaggtaaagcattcaacatgtactattatctgcttcatcaatgtttctgttgataactccattgttcattcatggattcctgacttattacttggagcctagctgcgtttcttttggtaggattttcaaaaactgatactttatcatagcatcatgcgtacttgaatttgtggtttctagactttgttctaatgccagctataatttgcaatcttgcataatttcccttgtcattgtgttgaattgcctccaatttgaataaagaatgctttgtgatcttttgttactacgaaaagtaaatactgaacctctcatctgttcttatatagcaggttgaagaaaaaatagtacaggatgatgaagaaaaagtagtgcgacaagatttgaacgaaagcactgtggatttaggactgaacttaaatgcaaacgatgctgatgcagaaaacgacccgaaagaggacaagccattagaagaatgataaactgggtgcattgttttggttcctcaccctcaactctcaatatcaattaggaagaaagacattacagaaagaacaaagcagtcattagatatggacgcagatccttgatttggtctgtaaccccatggcttattccttttgatgttaatggaaatgactcattgattcagactgatcattcaattcataggagattcttgtctttttgtctgaattttattttgattcaacattcagaacatttaatttgtctgtggagtacttgatgatttactttaaaagcagcatatgaagggaactttttgacctcctttatcatttgaacaaatgtcaaacaggaatacttaaaaaaccttggaaatgataatcgtgatccgatcagaagatcttggaatttaaagaaaatcatatatcttgagactagattttcaaacagaagcaagatgatatccagtttcctttagaaatctcagcttcgtcatcataatcattcgctcgcaacggcaggctcagcttcggttgcataatcgtgtctgtagatcaaagcaagtgtatcagtttggcaagggagaaaacttcaactaatcaaccaaatgcttatttgactaagtcgtgtcttaagatgtacataacatgtaaaagtaagaagaaaatcagatgttctctcgatcttactttattttacgagcaagctggtatatgcctgtccctgccatagcaacattaacactgaagaggttccagtttttctgtaaacaagagtcggaatcaaagaagtcagatcaaccatgaatacaatcactaacatctcatcgcaaacgcaagggagaagatcatgataagagagtcttacaatactaaaaatagattgaattttgaaagggaatgtaaggaaacttaccggattgattaccatgctgtaacgagaccaaataacaccagtgcatgtaaccgctgatgcaagaaatatcagagaatatttgaaagtacattgaaggcagtgcaacacaatgaaactgatcaaggaacaatgacaactatggggaatatgataagcctataaaagtccacaattcaaaacagaggagtaaccttctgcagattaagaagatgatagaataatacataccgatttgttgaggataggaaagtttctctggaggtttggcaaagtctgcaatgttggcaatgctaataccccacttgaacgttggtgcccagaaatgaactgagaaaacacaaaatgagagtcttattgtttgatgttctgagacacgagtgacgtgaattggtaacggaatctatcacttatgaaacccattataaagcaaagagtgattctcctggaccataagcaacaaatcaatccatcctcgagaactaatcgaaagtcaaaattcatcaaaaagtgtttgttttttttttagtagaaacaaatcaggattcaccagaaaaatcgaaaagacgagaaagtggaacttataaaagacaaaactaacaacagattccaaggagatgtagattgctcaattatccataattgaatcgtcaattttacatgaaccaacaaaaaaaaaatgaatcatcgaaatcgatgaggaaagctaatcatcgtggaattgactcactggttttaggtccggcagggtgattccaaatagcttgaagcttcgaagtcgccatcgaaaagtttacccaattcccaaaaatgctctaaatttcaccaaccaataatcgtccctttctgtctctcgcgagattcttctcccttctctctccctgtctggcttaaaacactaacaaaaaagggctgcagctatgtacgatgtcgtttcggacataaaacgacaaccgagggtattttggtacttttcactcttgtcctagtggactttgtagtttctactttgaaagtcgtcgcgaagactttgagagacaaaatcgccattgaaatggcaaagtttcaggcgattttaacatgcgaaggaatacacagacgaagcctatcgatagtgagcacttttcatcttctttatctttctttcttcttcttcacggaactcaagcacgatg

SEQ ID NO: 8684 - DNA, 3000 bp, Unknown
  misc_feature (1)..( 3000): cDNA_ID_2177993_gDNA_ID_1971851_Annot_ID_58415 3000 nt of promoter + ATG
gctaaagcagcctgttctttgtacattataaaccttaaaatctactaaacaagtactgatgaccccaaactatattagaaaatctgaagctacaaatttagaaagtattgaacaagaagtgttaccgcagtaagaggaagctcagggatgtcaaaccaagaaggcatcactgcaccatctgcacaagacaaattaagaggcaaaggcacaatatttagcaagtacataagatttctcatgaaaaagtatgaatctttactcaattttgtccactgcatttaccaatgagggaggatttagatgactaagccataatttgataaatgaatcacacatcaaagcactaaatccaaaagaaagacacactagtatcattcctatagtaaggactagacctaaaagttcgaattatttaggagaatgcaaatttgttcagctcaatcaattcaaaaacgatgatcaaagtcaacgcctagagaagaaagaaacgaacaacaccaaaatcagaaagtaaagggcaatcatacaattgcaagagactggatttggtggagcagaagggaagagccacttagtgtttctaaactcctgggacctgaaaagtgttttgatgggttcgttggcaggtccggaatcacctagcccgtgaagccataagatgaaggttcgagccatggagtctcggttccgtaaagcagaggtagatgatacgtcagatttgtttaggaagaagaatgcgaagaagaagacagagctcaatagtgcgatagtgagaagaacaatcggcttcttcagtctacttgttcgcatgccttcaccattttctctcgagatcgatctctcaaaaaatgttttgttttggagaatgtctaaatgactaaaatgccctcaatgttaaaagattatcaaatttgttggctatgttttatgttctcatgttcacactcaagattgcaaatgtattccaatgcttgcatatacataattcaaatcgatacaatcatactagaaggacacagcaaacaaaaccatacgaggagcttagaattgtcaatcttcttcttcttgtcttcatagacgacatgtaggtattattattaccttcagtggaacatttctttaagacaattaagttggagacaagtagacgacgaacctttcaaccgtctcttgatccatgactctatatacttcagctccttattgctgatcgagtgcccgagaccaggatatgcctgcagataaacaaatcaccttagaagtataaataattgtacattggagttctatcatgcatttgtctcgaaaaagagttttgatttgaatataccttgaattcacaggtaacaccggcttctttgagaaaaggaagagcagcttgaccagcttcaaagagtaccattctgtcatcagtgccatgagaccacaagattggtgtctgcatattgcaaagtctgaagactcagaaacacaaaaacattgatcaacgtttataagaaaacataagtgaggaaccttcttagcctcttcgggaaactgactgatgattgaagaagtgaatggaacccatccacttaggacggcacctcctccaagagtttttgggtaaagcagaacactagccaaggttaatgctcctacaagaaaattcttattaggcgccacaatgcaaggttcttaagacataagtggattcagaccgatataaaaaggtctctctacaaagaatattgaaaagacaaagaattcatgaaaagagaaacaacctccttggcttaatccacagataaacacgttttctggattagttccttctgcaatctcctggtctataatggcatgaacattcttaactgcttcaagcacgctgctttcatcaattggagagccctaacatacataaaagttgcacacttattgtgatttcataaaatctcttgaaaatgcaagagtgctctgctctttacacaatctgctgaacaagtgttgattctagataatgcgtcataaggtttaacaaaccaaaaggtgctaacttggagctaccagcccattaactatttgccaattcatactataagaggcgttagatagatcaagagtgaagtgaagtaataccactttaaaaggaagttcaggaacgtcaaaccaagaacgcatcaccgcaccatctgcacaagaaagtatagaaagacataagcttttttcagacacatatggattaagagacatgacaccaacagataccacagagaaatcaaagataatcaaattgtgtacatttgactaaatgtctttcaaattaacagaatgtgacaaatctccttcacatcacagaggcaaataataacgctaaatcaaaatggcatgaagtggagaccgaaccctgtagcccaaatcaaaccataaaccatgaacaacgaaatcaatgaatgcaaatcgaaaatagaaaaggaagaacgtactgttgcaggtaaccggattgaatggagcagaagggaagagccaactagcgttacttaactccgaggatttgaattgagtttggatgggttcattagcaggtccagaatctcccaacccgtgaagccacaagatgaaagttcgagccatcgtgcttgagttccgtgaagaagaagaaagaaagataaagaagatgaaaagtgctcactatcgataggcttcgtctgtgtattccttcgcatgttaaaatcgcctgaaactttgccatttcaatggcgattttgtctctcaaagtcttcgcgacgactttcaaagtagaaactacaaagtccactaggacaagagtgaaaagtaccaaaataccctcggttgtcgttttatgtccgaaacgacatcgtacatagctgcagcccttttttgttagtgttttaagccagacagggagagagaagggagaagaatctcgcgagagacagaaagggacgattattggttggtgaaatttagagcatttttgggaattgggtaaacttttcg

SEQ ID NO: 8685 - DNA, 3000 bp, Unknown
  misc_feature (1)..( 3000): cDNA_ID_1823676_gDNA_ID_1971851_Annot_ID_58417 3000 nt of promoter + ATG
tcatcatcctgtactattttttcttcaacctgctatataagaacagatgagaggttcagtatttacttttcgtagtaacaaaagatcacaaagcattctttattcaaattggaggcaattcaacacaatgacaagggaaattatgcaagattgcaaattatagctggcattagaacaaagtctagaaaccacaaattcaagtacgcatgatgctatgataaagtatcagtttttgaaaatcctaccaaaagaaacgcagctaggctccaagtaataagtcaggaatccatgaatgaacaatggagttatcaacagaaacattgatgaagcagataatagtacatgttgaatgctttacctgaatatcttccatcggaacatcattgatgtcaggcttttcctccacttccacttccgctttcttctcgctcgactcctctacagttttgtcctcatcaaccttgtcttcctgctcaaccttattatcctcatcaatcttgtcatcctcctcaatcttatcatcttcctcaatttctgtaatttccttcttctgttcctcaagtactgctatctgcaccattttaatcacacttcacttcaaatgaatcactaataatcaaaactaaactagatatacaaagtttcaaattccaaatttataatccaacacgattcaatgatactgaaaacagcttcttaagcaaagatcatctacttcaaccagtgataaaccttatgattccatcttacaaatcattcccaaatcacagctactaaaaacactaatccagtccagttactccaaggaatcaaaatggcaaaacagagacataagcactccttcaacaatgctcaaaactgaccctttttttgtcaatattaatacggtgattaaatccctaatcactgtaacaatcacctaatcaaacttctagcaaaaaccttatagctcaatccaatgcaacaagaacattgaaccaaaaaccaaaaactaaccggaacgtatttgaatctccgccgtggaggatcttctgccaccgttgccaccgtatcctcgctcggagaattactctcacttttaccatcttcattgccgttaccattctgagacaatggtgcccacttatacagcaacaaatgcgatccattactaccgtcagaattcgaaccaccgttaacgacggaagctgcagcagcggcggaaccggaggagctattattattgtctttcttagaggaaggagagacgtgtacccacttcttcttccacttcctcaccggtccggtgaaaaccgttgccggtccgtaccgtgtcgaggacctacctaaccgtgcaccaactccttccataacgacgaatcgtttatcgttgattcactgatcaaaattcaaatttaaaatcccaccaatctgtttaatgaaactttgttttcaaatttcttaaaagtaaaatttgctctttccaccgaaggaagaactcagatctcagtttttgcgaagcgaccaattttattggtttttgcttcaagtagaagactcttgttgagcaagaaggtttgactattgacacgtgtgtgatagttataggctaatctaattatacttaacaataattgcttttgtttgagaaagagaaagactctgtctaaaccagagggtctcggctaatcgttttgacctagtagcgtcatcatagagagtttagtggaaaagactctgatacccctgaagttctctcctatataaacatcgcttcaacctttcagctacatcatctctttcattacgacgcctaggtttagggttttcaacatcaatttttttgaatcagattagtttttttttttttaaattggggctacattgtaccgagagaagggctcgatttcgatacctttactcttgaatttgccaaaaaaacggctgtagctagattgaataagaagctatctggccggtggtcgcgagagggatttagatctctccggtcgattcatctgcttaccgagtttcttacattttctttttgattttcttaacatcttttgattcgttttattgaatgattggatatagtgaatagggaatagcagattttaaaataccattttcgatagttctttctcgtgtattaaacttagggttcctttccaggcgttctgtgctctcttcatgaacagttgtgtcttattggtacctacatatgtattttttttacattgatcgcatttaaccaaaagtataacagtcgataaagatgaaagtgatttagtatggccctgaataacttatgtgatttaattcgaccaaaaaattgttccattgaattgtcataatgaagattgaattgttttggacctaatcaaaggaataaacatttgtcatttggacctaatcaaaagaaatatatttgaattgaaccaactcaaaggaaaatgttagttttgttttgaccgaaactaatcgttaattgtcgctgtcgcatatgaaacagagtacttgcaaatgaattaagaaaacgagaagcctgggaatgagtttgtgatattggtttgaaatagtagatgtgaacaataaccattttcagctccagaaattagactgaatggacctcttgttgtatattagaattcataaaacaagatatgtatattacccccaaaaattagagaagtgtttgttctcgatgaaacgttagatcttgtaaaccaaactaagtatttagatctggtagagtaaaccttctaatacactgcaatcaagtcccaagcaaacaagatttgaatttgaaaacacaaatttaaaagcgttctcatcttgcaaagctgaaaaatgaaaatccatagtaagggaaaacaatttcagtttatgtactacacaattatatagagttcacacaattgaccattccttaggttggttatacccaatctcaaaagccgccataacctttgcgcattggaatgtgttcaatcgtcaaaagaaaaattagccctgggc

SEQ ID NO: 8686 - DNA, 3000 bp, Unknown
  misc_feature (1)..( 3000): cDNA_ID_1378584_gDNA_ID_1971851_Annot_ID_58418 3000 nt of promoter + ATG
ttgttatgcactcacctattgaggacctcgctaatttaagttaccttgcatcaacaggtgagtccacatgagttcttgcaagctgtcatgaaagccagcaagaaacgctttaggattggccaacaatcagatccagtagagtttatgtcgtggctcctcaacactttgcacatggatcttagaacttcaaaggacgctagcagtatcatccacaagtgcttccaggtatgtgtccgtcctttgaaatgtcaacataatgcagtttgatataatttcttacaaaaaagctgtatctcatgtaacctgttaaccattacagggtgagttggaggttgtgaaagagtatcaaggcaatgaaaacaaagaaatctccaggatgccgtttctgatgcttgggctagatttgccaccgcctcctcttttcaaagatgtcatggagaaaaacattattccgcaggtatatggctatttcaaatcttgaaagtcttgctactttgtgccattaaaaaaatgcatttcagaaaaatgataacgtggagtgctagaaaacttatgattctcaatatacagctacataaataatgtcacatttggttgagatacaattaagggattcttaaatagtgccattgccaatttaatgtcctggagtaaactttctttttcgaatctagttcatgacttgcgaaagtgtagaattctctgactcattggttgtttggagctcctgtagcctttatggcttgctacctcgtatatgcgtcttagagtgtttagtttgcaaagtgaggttagtggaatctaatttctttgatttttgggtcaggttgctctattcgatttattgaagaagtttgatggagaaacggtgacagaggtggttcggcctaagctggccagaatgagataccgtgtaatcaaatctcctcgttacttgatgttccatatggttcggttcaagaagaataacttcttcaaagagaagaaccctacattgggtgagtctgtttgaaatttttgtgacgttaatgctgtataaggatcccctaatacctggttaatttgatacaatttctttttctatgccacagttaacttcccagtgaaggacatggagctgagggattacataccatcattgcctagagcaccagaaggggagaatgtgtgttcaaagtataatctaatcgctaacattgtacatgatggtaagcctgaggacgggtacttcagagtctttgtgcagcgcaagtcacaagaactatggtaagctttctcaatcattaactattattgtgtttcatgttcacaaatgcatgatctagatctgtgcataagaaagatataaattcatttgggggataatgtccattgcaggtacgagatgcaggatcttcatgttgcagagacacttccccagatggtagaactatcggaagcatacatgcagatatatgagcagcaggaagaatagagccctggaaagaaactgacttcatttggtttaagagtaaaagtgaccagttttatcttggaatgagattagagatttgtttcacaactcttttggaaaaagatttttggacccctttaaaggatagagagcctgttgtatcatagtgaaaaacctttggtaaaaaaacacatatatgagttttgggaagagcttttggtaaaaactaaaaacgcatattgaaagaaagcgacctcttcaaattctcaaacttttgaaattttgtagtaaaaaacacatgtgagttcccttaatatagaagtggctgtttttcgaatttatttgtaacaatgaaagaggaatagaatctaattcactatctctacttttggcgattctattctattccatcgtccaaaaaaagaattgattctttttttgttttcattaaccaattctggaagattatgagcattgaacataacaaggtaacaatttgcaactttgtagaaaagagttcataatattctcgaatttttaattgtcatttcaagttaatatagaggaggacctttacctttaattaaaatattatatccctttattaattgtggcttctagaatcaaaagttaaaagattcgagaaataaggagaatcattttcgtcttctacttagttttcttcaactcgatttctctgctccatcttcttcctcgtcttctcattctctctcgctctggcacagtagaaactgagctcacgaaagcaggtttcacgtctcttccttatttacctcattcctgaatcatatgtacatagttttgtttagatatgtgtttcgtctcctcaatcctcagatctccacgagaaactagtattggttcctctttgttattctccttagctcgtgtgattactgacaccattagtgaagatttccagtatttccataagtatttcggctgcttaaatttgggttttattcccgattttactcgtatttgtcccatttttcctgtttaattgtatttctctgtgaatcacttatgttcattgctttagattcaataaaattttgagtgaaaaatcctactgagagcgtttacttatggggaatttatcaagttcaagtttgaattgttgtatattgagtgttattaaagagtttcaatgaatcaattggatggttttttgtttgggttgctcaactacctatgagagtacaagcttcaaattgtttagaatgctggtgattttgtttccgtgttttaataaaagcatttattggtgagagagtttggagtacatgttattgatataagtacatgtcattgattgattcagatgagttttctacttatatttgcaaattgattctaaatttactcgactttttttttggcttatcaatgatttttagttgccagagtctttctatcttttttttgtattctgacgttagactaaggtgatgctagatgtactcaagttcaattttaaattttcacaggtagtcagtgtttttgtttcgaactcttccaacatg

SEQ ID NO: 8687 - DNA, 3000 bp, Unknown
  misc_feature (1)..( 3000): cDNA_ID_2178004_gDNA_ID_1971851_Annot_ID_176408 3000 nt of promoter + ATG
agcatgtcgatacacaaccaactaaaacaaagaacccaacggaagattaaaatagcattaaaggaagttaaaagtgaaaaggatcttttcttccctatcagagttctacagcaaggagtcataagtaggttccctagatacacacctgcaagagagttgtgatacagaagtcaattaccatatttggacaatgctgatatataagtatcataatctgttaaatcaaacttcacttacactagtagttcctagttaattaagtcagaccagaagatatcacgactgcttgtacatatggcgcctcagcatctcatttatccccacagctgaaatgctttcacatccaagaagatctcggagcttttcatcacactgaatagccattggatttactgggtcctgaaagaaaattgaaaagcagaataaacaaatcttaattttcttgtttatggccattcactatgctctataacataaagttatgtgaaatcctatactgtaaattatcttatagagtaaaccacaataccagctttagttagcagcaaacaggaaaaaaattcgaagcaataaggagaaaccagaggatttcaagattaaaatcattacctctaaattgttgagttttatgtattcccaaacacggcgaataatctcttcgtctgccatctccgtctcaccagtgccaaagaacttaccaagtggctcagataatgtaacagttgaactaatagcagttgaactaataggctcggtggtctcagtcttagtctccacctcagtttttgccttttttgcttgaccagagtcctctgccaaaagtgactcaaacagtcagtaaccttgaacaaaccaagcacagttggaactcagcaaaaaacgcttgtgtttaaccattacttgatggatcaagcgggagaatatgcttagcaagcaacttattcatcttgaacatgtcagtgcaatcagtctcaaaaaccacacgcaacgcatcatcacagatgatcttccgcttgttactcgggtcttgaaggttattcttccttatataagcccacaattgcctcacaatctaaaaccaaaagccaaacacagcaacacataaataacaaccacaattgcttatacacattataatcataaatgaaagacaatgataacctcagttctaggaagagcaggttcaccaacaactacttcaagttctggagaaaccctacagactttgtttagtcctccaggaccaccctttcttttagttccagccggagcactgcaaaggaaaagttgacaaatttcgttgatgtgccaaatttaggtagatcagaaagaaataatcacactataatagaacgttgtatgaatcaatgtgctaaaaatatcacaggatgataattctaaacatgagcatgtaaaacctaaaaacccgtaaatgaacaaaattgacaaaagatttagacattcctaaaatggaaaatcatgttttccatgaaagtagcaaaagccctaaattactgaaattggaacaaccttgagcaaaattacgtaccaacatttgaaatatgttgcaaaccctacctttcttttggggcttgattaacagatagagaagcattcccgccatgtgagagcatcacagaggattgttgttgtcgcggagactgctgctgatgctggtgctgttgcggcggcatgtaaaccggataaggctgccggaaatttaggtcataagagtgataaggaggctgaagagcgaaatgtgaaggatattgttgtgattgagaagaaacagagaattgcgaaggatggctaagtgtgaaatgccctttcgccatcggaggaacattgacgccggaatgcaaattctgctgctggtgagaagacggcggaggaggagggtgagattgttgtacggatgaagcggaggcgacggaggcagaagggttttggtgagcacggaggaggatattgatctgatctctgatgaaagtcgtcttctccgtgaggtctaaccctaacttagcttcaagctgctgaacaatactgcttaacgatgtgagagagctagggtcggattgtcgaagcaaagtctcgactcctttcgctagatcctggtccgacaccattgtcgagagagaatttcaaagctttttttttcatacacacaaaaaaaaaaactttttaaggagaaaaaaaaaaacaaataccccacaaaagaaaaagaaaaaaagacaacaaattctctatatctttctctctcttatcctcttctctaatcttgtctctttctctctctccttcttcgtctctgtctctttataactatttggaaagacgaatatgcccttcagggttggttagatttatcaaatgatgacaaatgtcggtgttgcccttatgagtcatggtatctatggcttgtaggtagagggtgttgtcgtattttggctaatctatttgcttttttacttcttcgccagctggctttaacttcagaactcatctctttactcgtggaatgtcgaatacgtccttgtagattttcacgcgtttatagtttgcttcgagaagcttgagggtattaatggttattcgataagtatcggatcgtgaatacagatcaattactgaatactgctgacagaagtaatataaatggaacagattgttattgggctataacagtgtggcccaataataaatattcggccttttaaccgagttaatcaatctgggtgagacttgagtcggctcttgaagctttaataggttgtttgtttaacgtctgcgttgtggcggattttgaagtttctcgagaaaattgggaacgagagataagttcgagtagattcgcgactgtcgacgcttctgatttgaagtatttggcgttttttggaagagttcattgcttctttggttgaggattcttcgtgaatcgctgggattttgtgttctaaggtttttgaagcaagctttagcttagggaaaattttgagaatg

SEQ ID NO: 8688 - DNA, 3000 bp, Unknown; identical to SEQ ID NO: 8686
  misc_feature (1)..( 3000): cDNA_ID_3091484_gDNA_ID_1971851_Annot_ID_176407 3000 nt of promoter + ATG

SEQ ID NO: 8689 - DNA, 3000 bp, Unknown
  misc_feature (1)..( 3000): cDNA_ID_3091488_gDNA_ID_1971851_Annot_ID_176406 3000 nt of promoter + ATG
aaagtataacagtcgataaagatgaaagtgatttagtatggccctgaataacttatgtgatttaattcgaccaaaaaattgttccattgaattgtcataatgaagattgaattgttttggacctaatcaaaggaataaacatttgtcatttggacctaatcaaaagaaatatatttgaattgaaccaactcaaaggaaaatgttagttttgttttgaccgaaactaatcgttaattgtcgctgtcgcatatgaaacagagtacttgcaaatgaattaagaaaacgagaagcctgggaatgagtttgtgatattggtttgaaatagtagatgtgaacaataaccattttcagctccagaaattagactgaatggacctcttgttgtatattagaattcataaaacaagatatgtatattacccccaaaaattagagaagtgtttgttctcgatgaaacgttagatcttgtaaaccaaactaagtatttagatctggtagagtaaaccttctaatacactgcaatcaagtcccaagcaaacaagatttgaatttgaaaacacaaatttaaaagcgttctcatcttgcaaagctgaaaaatgaaaatccatagtaagggaaaacaatttcagtttatgtactacacaattatatagagttcacacaattgaccattccttaggttggttatacccaatctcaaaagccgccataacctttgcgcattggaatgtgttcaatcgtcaaaagaaaaattagccctgggcatgtgggtattcgggtcgggtcgggtcgggtcctttcgggttcggatttttcgggttttgaaattttggacccgtatggttatatcaacaatttcgggtcgggttctatccgggttcacttcgggtccggataattcgggtattgcccataagtaaccaaaactatctcgggtttgagtactacttacccaaactttatttaaatatacccaaaaatacataaaagtattcataaaacccgaaaaaaccgcaattataacaagtttttccttaagagaataatataaaacaagaaataaaccttattttgagcttattccataactcatatcattagacaagtcacaaattcaagctattaatgcatatataccatcatatgtatatatatgttcgggtagtaaaaaatacccacgagtatcgcgttcggttcgggtaatacccgatacccttggttatttgaaaacagaacccgatcgggtaattagccggaaccgaagtagaatgggttcgggtatttcgggtcggattcggttcgattcttcgggttcggatattatgcccagacctaaaaaaaatcttaatgtccaaaaggtccatccgcttttgttataatccatgatacagcatcttacttcactaataaaaacactcaagtctcaaattttccaataaattgttttaccgggccacttggtcgtgaaaattccaactgtaaacgcatttgctcataatgtgtttcttctttgtaccaccaatgaagatctaacatgctcggaagagtgctcaatgtttgttaatcatccccaaaatagtcaaacaatccttcatacatataacttgtttagcaatatacattagtaatcatcaataaaaaaaaagaaaaacgaatatagtactatcactatctaacaatgtacagttaaggttaactgtctgaatatggtttcttctctttcgttaagaaacagtctcatgttaaatacatctagtcatagtaaatgattggttggtaaagttcattccctaaatccgtgcgaacttttatgtctctgactctaataagtaccaaaaaccattaaagtaaagtggatttacacgagttttctagttatattattaatccacattaagtaaaaacaggaacaaagaaggatgaccttaaacagaaattactgattcaccaaattttaccgaatcccatgtcgacggaagtgtgcgccgctcttaggtttttaatttcaattttaatattcttttacaatatccaaaattccggcaggtgataagacgggaatacccctcaattggcgaaattcagaaaaggaccaagagagagaagaagacgaaacgatcgtcagagatagagagagagaaaggtcatcacccattctcactcgcagaatatttgttctcatctgattcctccgatctgccatgtctcggcttttctaacgctaagaagtttcacagacgcggcgaaggagagggaggaaggagatagatctctttttccgtcgcgataataataaaaaataaacggtttgtttttcgttctcttgctgttcatgtggatcggatttttgttttcgtgctagattccattagttttttggtttcgggatcgactagtttcgtaatggatctgatttttctattggatctccctagttttgacctgagcaagcgtttgtgaggacttcatgttcttatgacctagattcgttgttttagatgtggaatttggtgtttcactaatcgatttattcgatttctctggtttttggtgatgattgatcaacgtgatgatttgaagatattcattgttcatgtgcattgttgtaaagatgttttcaagtttccagtgtcttgattaatcaatcactgtgttatgggaaaagtttggaatcttaactgctaccattagcgtgttggtttgttaaatcactactttatatacttattatggtatgttgcttgtttctgcaacttaactcttattggttactgttggagccttgagaaacaatcagttaataaagtcaattagcagagataatcttgttctttcttttgcgttatttcatttcatgaataaatcagatgttagtgttgtctttccctcttctgtttggtcttctcagatggtttttgactgttttgtggcttttattttggatctctagtgtctagaggctgttactgaagagttgattcatacggagagaggatagaa

SEQ ID NO: 8690 - DNA, 3000 bp, Unknown; identical to SEQ ID NO: 8684
  misc_feature (1)..( 3000): cDNA_ID_3091492_gDNA_ID_1971851_Annot_ID_176403 3000 nt of promoter + ATG

SEQ ID NO: 8691 - DNA, 3000 bp, Unknown; identical to SEQ ID NO: 8683
  misc_feature (1)..( 3000): cDNA_ID_2177989_gDNA_ID_1971851_Annot_ID_176402 3000 nt of promoter + ATG

SEQ ID NO: 8692 - DNA, 3000 bp, Unknown
  misc_feature (1)..( 3000): cDNA_ID_3045974_gDNA_ID_1971851_Annot_ID_176399 3000 nt of promoter + ATG
acaccggaggcgacatcaagaaatccggcgagctcggaaggatgttcgacatctccgtcgtcgattcagcttcttttcaaggaccaccgccgttaatcgtcggtggtaatagcagcggaggtacgtcaaggcttcaggcgccgccacgtgtctccggttcttcttcaaaccctaacagtggatccgttcgatctggtcccaactctggttcggttaagaaattctcaggtccactctctcagcttcagccaaccggtttaattacctccggttctcttggttcttcgggtccaattttgtccgggtctagaaggtcgggtcaattggatcaccaattgagtaatctagcgtcgagcaagcctaaatacgggtcgtcggtgacgagtcttaacgtagacccggttcgggtcgggtttaaagtaccaaaagcaatggtttgggcggttttgatagtggcggcgatgggattgcttgtgggagcttttcttactgtggcggtgaagaaaccggtggtgattgctgcggttttagcagcagtttgtcctgcaatcgtggttttggtttggaattgcgtttggagaagaaaagggttgttgagttttatcaaaaagtatccagatgctgagcttagaggtgccattgatggacaattcgttaaggttacaggggtaagttaaaacctaattttcagatgttaatatttccagttttagtaagtaactttaattgttctgattaaagtaaattgcttccatatttagcttttgatcattttcaactttggtgaagttagaatgtcattatcatcattggcttttcttatggatgttatactcttggatctctctgttttagtgttaattaacttcatttagttttgcttcattatgtttctgggtgctttatgatgatttttgcttttgtctgtctttgacattttatattatctcaccaaactaaagtttgctgcttgtgtttagtatagattttataagagtctttagtgaaattagaccatttataattcgacaaattggagtcacgggtatttttgtattgtcgattggattacagtcgtcaacagctagcttaatgcgttggacagaccatttatattgtctgaattaacaatgttgatgtagatatggtagtgtggtcactggtgtgtcttttatttgctggaaatgttaaaacttttgttatgtttttgtaggttgtgacatgtggaagcattcctttggaatcttcgttccaaagaacaccaagatgcgtttatgtatccacggagttgtatgaatacaaaggttttggtgggaaatccgcaaacccaaaacatcgatgcttttcttggggatctagacatgcagaggttagtttctttttctcctcttgcaaaaggaccatttgtctcagtgatttggtcaaagttttcagatcttatatgacaagaaaagatggtgaagtttgatgattcttgttgtggttatatttctttggcagaaatatgtgtcggatttttacatctcggatttccaatctggattgcgagcactagtaaaagcaggatatggatcaaaagtttctccttttgtcaaaccggcgacagtggctaatgtaacaacgcagaacaaagatttatctcccagcttcttaaagtggctgtcagatcgcaacctctcagctgatgaccgtgttatgcgtctcaaagaagggtatgttatattcaacacgcatcttaaactgttcttcgggttgcacgaagtatcttagccaaaatctaaaaataacgttattagagtcactatccaaaccttggatccttattttacccaaattacaaccttttaaaccctgatttctttagtagaatgggaagtattaaactgttgatgtaggcgtttactttgactggtaccgttggttattcttccacattaaaagtcacagtaatggaaaaagatgtgatgagacatgtattgtaggaagaaatccagcaactattgtcaacgttaacggcttaaacatctcacatcagtgcatgataagtctgaagttaaagggcttagaagtttgaattaagtctaaagctaatgagacccaaaagtcaccgtttctagtacaaatgatcgtttttagtacacaagaaagctcattggtttcacttttgctgtcaaagagaatccctttgttactgatttaaaatcatatttgattgtgtgtgatgcaacagatacataaaagaaggaagcacagtgagcgtgatggggatggtaagaaggcacgacaacgttctgatgatagttcctccggcagaagcagtctccagtgggtgccggtggtggcactgcctcttcccaacctacgcagatggcttaatcataacctgcgacgataatcaaaacgctgatgtcattcctgtctgaaaccaatatgtatgtaatgcttcttttgcccgatattcaaatataaaaatgcttaaacagttaggctcacgagactgaaggaaggaagagaagagaagagaagagagggaatgagaggacagccaaattggttcaaaaagaaaaccaaataggctttgccttttaccttattagcttttgtttttctttcttaattctgttttttttttttgccccttgtatggggtttatgtttgtgtacatagagccccaaagtgtaaatgctcttttctgttaaaataattattatgtcctatccactattcttatccaccaaggaaaccttaggcatctctgcaataggtgcatgcaatgttgtgctagtaaacaagtaagcatgaaagccgcagagaagctgatgacaacaaagcccatgtagaagcctttgattggtttccatagtggaaacttaaaacttaaagcccaaatgtggaaaataaaagacagcccaaaacttacccatttaatttacggtctctcactctgcttgtgaatagcgaaaacacaaaaccccaaactctctctacgaaggcggatg

SEQ ID NO: 8693 - DNA, 3000 bp, Unknown; identical to SEQ ID NO: 8681
  misc_feature (1)..( 3000): cDNA_ID_1823690_gDNA_ID_1971851_Annot_ID_176398 3000 nt of promoter + ATG

SEQ ID NO: 8694 - DNA, 3000 bp, Unknown; identical to SEQ ID NO: 8680
  misc_feature (1)..( 3000): cDNA_ID_1823694_gDNA_ID_1971851_Annot_ID_176397 3000 nt of promoter + ATG

SEQ ID NO: 8695 - DNA, 3000 bp, Unknown; identical to SEQ ID NO: 8679
  misc_feature (1)..( 3000): cDNA_ID_2177971_gDNA_ID_1971851_Annot_ID_176396 3000 nt of promoter + ATG

SEQ ID NO: 8696 - DNA, 3000 bp, Unknown
  misc_feature (1)..( 3000): cDNA_ID_3091499_gDNA_ID_1971851_Annot_ID_176394 3000 nt of promoter + ATG
cggttattaagatacttgacactttgtatcgtgaccgaacatatgcaaggttctttgttcttgagacaattgctagagtgccttattttggtaagtgcatctatttgtaattgtagtttcagttcgttataatatttgcaagaaacattgagcagagcattaagagctagtcattaggttttgtattcttcagaagacagtaagattgtgaacatcacttgagatgtgtgcagaagaagaacaatgacgaaatagttgtgtttgaggaatatgtactctttcttatctcattagaagcatagttcaactcttaacaacaaaaggcgattcagtcatcgagatattggatttgttgagaatcgaatcttgttttttttagtgtgtttatcactaattatggatctggataccaaatgaaaagttgttccgaggctagaacataatgtttgtttcttctatatgctccttgcagcgtttatgtctgtgctacatatgtatgagacctttggttggtggaggagagcagattatttgaaagtacactttgctgagagctggaatgaaatgcatcacttgctcataatggaagtaagaaccaaaatgttacttctctacaagtttcatactctttactcacatagttagtaatagtaaaacaaatgtttctaatcacaggaattgggtggaaattcttggtggtttgatcgttttctggctcagcacatagcaaccttctactacttcatgacagtgttcttgtatatcttaagccctagaatggcatgtaagtttcctttccgcgtaacttctagaaagtagctgaataaattgcttctggtctacatgacttcgttaaccttgtgtcacctatgcagatcacttttcggaatgtgtggagagtcatgcatatgagacttatgataaatttctcaaggccagtggaggttggttaccaatggttttttcttctttctccaccattctgtgtaccatttacattagaactaaagttgttaatggagttattgctttgaaatattacacaaaattcttcaacgatctttacattctgaattgttgtgcttcatttttttttggtttccctaaacagaggagttgaagaatatgcctgcaccggatatcgcagtaaaatactatacgggaggtgacttgtacttatttggtgagtttgtctttccaggaattatcaatatcctccagagttgtagagatgtttttacctatgattagtagtcttttaaactggccctgtattgtctgcagatgagttccaaacatcaagaactcccaatactcgaagaccagtaataggtagcaaatctatttcatatccgtttagttctttccatctctgattccgtcgaaccacaaaatgctaaaaaaaagtttatgatttatccatggttatgattctgcgctctataaatgactgagattctgtcttatgtttgtatggaggaagcattattcacagtttgtgacttactttgatgttaaaataagaatctatataacgtttttgttgttttgtgattacggttgggcagaaaatctatacgatgtgtttgtgaacataagagatgatgaagcagaacactgcaagacaatgagagcttgtcagactctaggcagtctgcgttctccacactccattttagaagatgatgatactgaagaagaatcagggtgtgttgttcctgaggaggctcattgcgaaggtattgtagactgcctcaagaaatccattacaagttaataaattagaaagtaaactaaaaaagattatttgtatcagctcatgaacaatagatataatcccatatacttgggaataaaggaataatgtgaaattcccatcgttgtgctagtgtgtgagagaatcaaataccctaatgatgtaaatgtactttgatgagcttaagtcgttgtagaccattttatccatactactagcctttgtggttgcattgtcggtttcttcaattcttatttcacaggagtaaaaaaaatgtttaaaagtacaaaatcattgaatgtatcattctctcaaaaagcatattggtattagcgtttagaatctctatatcccacacttttatttttattggttttgttggggagagtgtggcgcaaagacgacgtcgtctatgcgaacatttcacgtgggaaaagccttgattcatgcgccttctttaatttttcttctttttttttttttttttttgtctcttctttgcctttcactttttaaaatgattttccgcgggtttaataacaaaaatgttttcccgccagaaaggttttaccaaaaaaccatgttccggttatagcacaggtaagagaattcatcagtctagtataattagcagtaatcaaattcgaatactttgatcgtcgcttttatttcagagttagcgttacattaatagtacctttattcgattgatgatttgtttaatctttaatagggtttgaactccgatggaggaccttttttgttggtaatattcccttcgtttcacaatataagttgttttaactaaaaatacgtatattaagaatatttatttttaaaatgttcaaccaattataaaaaaaactgtagaatataaataatcataaagtattaaaataatatataatttgcatagaaacttgaaaacaacttatattataaaacaaaaaatttggtataaaacaacttatattatgaaacggagggagtataaacttaagtactaattcgattttgtttctattcgagaccttgaagacttttttatttaattttaaaactaagtcgtacagttacagaaacagcattaaatttttcctcttaagtaaatttattttttctctttctatcagaaattcagaagaactaacattatagttgcccccattgcgtacactgtacatcatttctcggtaaattacacataattataagttgattaaccttttaagttttaaacaatg

SEQ ID NO: 8697 - DNA, 3000 bp, Unknown
  misc_feature (1)..( 3000): cDNA_ID_3245290_gDNA_ID_1971851_Annot_ID_176385 3000 nt of promoter + ATG
ggaagtcaattcgagtatatttaaaacctgataatagatttgacgaatcaccctacaagcaggcaaattgatgtctccgacgatcggaaacagagcacaggagaggacacgtggaagactgacgttcagtggcgggtttctatttttttcaaaagcgcgcgaagaagataagaaagggacaaaggcagaccaagtatgaaccaagaaagtttgcaattcgaccctttaatttctgaatatatttaattcacccttaattctcttaaaaagatttcaaaagaccttttcaaatctaggacttgccattttaaacggaaaattgtcatttaatagtctaattttcgattgacaaaaaaagaaagaaaaaaaacaaacaaacagttattaagctttaacagattttctaacatttttaacgattctcttagtcaaaccaaaacgatgtcatttaagctctaatcgattaaaaattagatctaatgcaggtctcgttacgtatattatacaaaaaaaaaaattagtgttatcgttgacatatgtgatagtgagtattttcaatattttagactcaatgtgtgtctcgttacgtatactatataataaaattcgattttattgatgctaatgacagatgtgattttcaatattggagaatcattttattgtaaatatgttgactgaaagttatttgatctatttactcatctacatatacatttttgcagcacttttatgaaataaatcctcaagttgagatttatttaccatccaatgccattagcatttaatattttaacaaatttcttctcaaatccaaatataaatcaattttgttactaaaatttagaattaaaataaatatatcacaacaatcatttaaatctttccaaatctaaaatgtactacacactaatattcttttttaaagagatctattagcattaatggtatattattattgatatattttaactttataaaacattattaatatttatccttataaaaagatattaaaatattatgagacgagttatatagtgggacgggtttgcattgatataacgcgggttaaatctttatttattattctatcatcactaattttttttttacaatattaatataaaattatataattttaatactaaaaatttaaaaccttaaaatttaagattattatatatataaataaaatatttgctccgtggtataccacgggttaaatcctagttccaatataaaattgcatagtgatgttttctttaaaaataaatacaaataacataaataaataaaataaaataaagttacatgtttgagcctctcattttcccttcagtgctataaattcagactccttcgctaaataaatcacaaagcggaaaaaagaaagaagaattgagagatatctagtgttttaaaaaaaaaagaactgagaaatcagcaatggggagcttaagagtgagcacatttgctgttgcagtagttgtatgtctctccatcctcctcatgtctcctacaggtacgtaaatttagttaaaagaagatttagaataaatacatgttaatgaaatgttgcatctttctatatatggactggacacaagtagatgggcgtagagtgtgtgacagcgcagcgggtttatgtagtatgttgttctcttgcaatacacaatgcaattcattgggccgcaattttactggaggcgaatgctcagatgctcgttttcctggtttaagtgtctgttattgctgccataatgtagagagcagtgctgaaatggaaagcatgtgattgcagatgctagaaaacgacgtcgctttgtgtgtgtgagtgtgtgtgttttgctatttgcatgtttatgctttcatttcatcacatcatatgttttgagtgttttgccttgtactctgttgtgcttctgtttgttttgcgttgtcaagtctccaataaagttggagtgtttccgttgacaaacgtttttgttagttcttgttgtatttagctaaccaatgtttttagatttttttttctctttttctttgtgttaaacactaatgtacatgtttttgttttcataaagtttgatgcatattagttaaaaaggggttacttgtttgaacatacaacaaaagttaaaaaggttactagtaagctaactaaagtcttacaaatgtccactctagaaacaaaacccacaaattcacaaaagacggttagaagcccaactagtagagaccaaaaaggtagtaagccccacaggagtaataagccctgtcaagatgaagggagtgacgaggaaacagatagctaagggtcacttgttcatcgaagattttaatcgtggttgaatcaggttgacccaatgatctggtgatttagaagatagtccaacttaacgctcgaatcaggtttaaaaatattggtttatgtagtattttcttgaatcccatatagtatttttacttttggtaaataaatgtattattgaaatatttaacatgagggtctcgttacatatattatataataaaaatattttattgatgctatcgacatgtgatggtgagtatattacattattttagatcaaatgcaggtctcgttacatatattatataataaaaatattttattgatgctatcgacatacagttagtgagtatatttcaatactatagaccaaataataggtaggtgagtggatgcctggattagtggaaatattttaacaattattattctcttacgcgtggaaagttttaaattactaaaaaaggtaaacttggataatcattttattgtaaagatattgacaatttgacataaagtattttgatctatgtacccattccaatatataaaattgcatagtggttttttcttacaaaaaaaaaagagtaacatctagatgccctttcccttggagtgctataaattcagactccttccctaaataaatcacaaagcgagaaagaaagacgaactgatcagca

SEQ ID NO: 8698 - DNA, 3000 bp, Unknown; identical to SEQ ID NO: 8678
  misc_feature (1)..( 3000): cDNA_ID_3091351_gDNA_ID_1971851_Annot_ID_176383 3000 nt of promoter + ATG

SEQ ID NO: 8699 - DNA, 3000 bp, Unknown; identical to SEQ ID NO: 8677
  misc_feature (1)..( 3000): cDNA_ID_1988781_gDNA_ID_1971851_Annot_ID_176377 3000 nt of promoter + ATG

SEQ ID NO: 8700 - DNA, 3000 bp, Unknown; identical to SEQ ID NO: 8687
  misc_feature (1)..( 3000): cDNA_ID_1823672_gDNA_ID_1971851_Annot_ID_58419 3000 nt of promoter + ATG

SEQ ID NO: 8701 - DNA, 3000 bp, Unknown
  misc_feature (1)..( 3000): cDNA_ID_2178122_gDNA_ID_1971862_Annot_ID_176439 3000 nt of promoter + ATG
aagagttgcggcccttaaccgtttcaactctcgctcaaccgacaaatgcttggccttttacgatgtgcttcggggaaacaagaagttcgaatggacgacccggtgcgaagaagcttttcaggaactcaagaagtatctggcaacaccacccatcctcgcacaacccgtaatcggagaaccactatacttgtatgttgccgtatcggatactgcagtcagcggagtgttagtccgagaagacagagatgaacagaaaccgattttttacgtctcgcaaacattcaccggcgcagaatctcgctacccgcaaatggagaaactcgccttagcagtcataatgtcggctcaaaaactgcgaccctactttcagtcccattccatcatagtaatgggatccatgccgctccgcgctatcttacacagtccaagccaatcaggacgcctagctaaatggacaatcgagctcattgaatatgacatcgagtatcggaacaaaacatgtgcaaaatcccaggttcagccgattttatcgtcgaactgcccactaaggaggctcggaggtctctgcaagtaaccttccgacccgaccataggaacgtctcgggtgctctcaggaaaccaccccgagacgaacctcagaagcacttcgggtaaacgatttagctcgcgcgaaacgagccgtctagctacaggtcgacaagaggcacccgactcggaataaacttcgtaccaaggccaaagcaccttaaacccgaggaaaagactcagacccgaggaaaagactcagacccgacgcaaggatattatccatagggagaagatcccgcgaaaatctacagaagataaagataaatcaccaccgcctctaagataacaatgaatcttcgaagaatatcgcgaggggcggttcaccaaagccctatataaagtgcctcaagggaccaataaaggggacacgcacaaaaacgctctcaacttcaggctatcaaaaacgctctgattttgaaggcaaaacacttattttccatatttctaaacacttgtacgatcgaatcctcattatttcaataatataaccaagaacaccgtccgcggtaatcaacaattctgttgttctttgagaatctcacatagatccgttctttgaaggaacccttagtacaatttctcttgtgcgagttttggctctcacaatttagcgctaaaaggaggggaaattgagatgaaaggataaattttttttattgtttgtcaaggtatttggatgattttttctacttgtatttataacgtagattatttttagtatggttacataatcatttgaattcctaaataattaattagtatgatgattgacaagtattttcattgagatcagacctcttttttttgctttagcttttctcccaaaatgttttttgtaatttttacatgcaaatctaattgattagaaggtatatgtcaatataaactgacaaatacaagctaaaggaaaaacaaaagcgacatgtcttttcccagacacgtttatcaaagcttctcctccgattttcttttatgacgccggtgaagctccgtcttgccggcgtcggaacatctctccttcttctcagatgcaccacacaaatctctcttcttctttcttctggctaactcttcaatcatccctaaaatccaatttttcgatgggattcgaacagatctgtgatagaggaccaaggtggtctccaaagaccttcttccgaacttgctctctcccgatttcactttcgaattcgaagaagaaagatcactcccttcccgtaggtggtttttctcacaaatcagaaccctccttccctgctcttcaaagcctttatagatcctgatcttctcttgaaagatccatgcaccagttgttgcccagcgcttcacttattggattggcttctccgacgatgttggcggcggtgtacgatagagttcctctttctagaggttttctagggtttctccttttgggcgagtctcctttgggcctaactgttatcttcggcccatccctggaattggcagcctactttctccactagtttggcccaggtctgttactcttaaatctccaattagcccattagacttgatatcccgacttagcgccttaattggttatggactctgcttaagctctttgttgattttaatggttttggcgtgtaattttatctctagaacctaggccaattgtaattcctcaagtgcttcatcttctcatcaaagtttaaggctaatggacttggtgtatctaggttttagatatgctattagattagggaataacggcattatgatctcctccctacggagagacggttaccggaatttctttattcctctctccccgaatccgttgaatattgaatccgagtcgtacttgtctaacgtttttaagattgatattcatgaaagcaaggttttgagaagctatggcattatgaaaccggctctgtgtagtggtgcttaccaaatacttttcaactctatacctttaaacccattagatgacagaacccactcaactcctttccttgtcgacgaccatttcctgcttgttctacctgggacaacgagaatctcgactttggaaaccttttcaacgtcaccttgtctattatggaccattaccattacttcgtccaccgctctgtttgtggatgatgcttcgacaactcgtactttaacttgtaccagtctgttctgtagcattggccctaaagttttcatggatcctttgtcgatttatctttgctatctttgtgtagcatttgttttaacatttgcttcttgttgttgctactttgttttaaagcctttttaatttttgctccttgactacatgtaaacttgtttcagttattagatgaatgaaatcaagttgtttgacaaaaaaaaaagtatatgtcctagcaaattttcaacgtgcaaacatgaaaattacatctatatatgtcaaagatg

SEQ ID NO: 8702 - DNA, 3000 bp, Unknown
  misc_feature (1)..( 3000): cDNA_ID_3046005_gDNA_ID_1971862_Annot_ID_176451 3000 nt of promoter + ATG
catatcatgcgtcaagaagcataacaaaagaaaatgataccatgtttcgcaaataccaccttcaccttagcctagttgaagatgacaacacacttctccttctctttccccttagacaatctttattgtaaccatataatcataagctctaacttggttctccataaaccaggacctgaatccatgagtcatgaaagctcctacaaagcttcagctcaagccgagttcattttcccaatcaaacaataaaaatcgttaggattttctctatataaatctgtctcgaaaacatacgcataagtcaggaactaaccattacaaatgctatcccaccgttgaatatgtagccagtagtatcatgaataatcccacgaagtttcatcccgatcagatttcacaatatcccacgttcttctgaagatgatgcatcagaactgatatttaggtttctgcaacttgagatgattctggacaaacttccaagatcaattccggatggagcttaaatctgatggacaagctgtcagctactatgagttccttgaatcaagatctttccatagacatcttaatcgtgatctaattccttctggtccatcgggaaaacgcatcataaaaccagtagtcacacactgttcttgatttatacttaacacagatttggacaacttctgcagttacttgcccagaaagaaacactcataacttctcgaatataaacccgattgaaactctgtcagttgctatggcttcatacaacgtgatctttgcagatatgtcttatttagaaactgattctctctggtttgacgggaaacatccttgtataacctcaacttgaagctaccattctctcttcatcttcttccttatatgcttctagttttacctagcccccttctctgatttactaggatctgcttcatctcacttctccttactgtcacaacgaaatctccatctcttaatgcctttcctttgcagtggtgatgatctcttttcctctgccacgtatcgtccttcgtctccgcttcctctcatcttcctcacggttatccttcatctcttccctttctcttctcctcttcaagcgttccacaatgactaacatactcaacaacaacggtagtggctgacctttaattagggttaagattaagacgacgcggtgacgctcggtttaggaacggttgcatgaatcgctttggtttccttcacttgtgaactctcttctctctcggatatggtaacgaccccactatagaactcatgtgttgatgctttggatttgctttctcaagattcttatttggtttccgttagtggctcagagaaaagggagatagattcacctatatatatgtgcaaccaacaacacacgtaacaaaaccctttaacattagggagttgcttcacttgggtttaaatgggctccatgggttccatgggctttgctttttgacaaaacgaatagggtgggctattgatgttgggtttggagtgttacagaataagtcgttctttatctttttggttttagttaggtgtttcaactctttcttctgctaatcaaggttcagtgttaagatagtgagaaaaaatactcataatgcaagcatataatggaagccataagatcagtgtaaacttttaagtttcatgtttgatcttattgtgatttattatgagtctgctattaacaagctactattttactcctttctctttagtaataaacaatgttgtacttctttagtttgtttggtttgtaaatttacttgttgtatgttgtgtcttcaactcgggttcttcaatgatggacgatgctgttgatatatatatatatatatatatatatatatatatatatatatatataaaggattcttttgaaacaaaaaagtatgcatttgcggatttgcctttagttacttttgtacgtgtttttcaattccagtcacctacctctctataatctttattattctttttttctttttttgggcaaacctctctatagtctatatgatgtataaaaggaataaagaaaactacggtattcatttttcgaaatcggtttttattttatttgatttgatttgtttcatgtgacctttatatatgaaatgaaattataaacaaaaaactatggtattcaagaaaaaaatgtaaaaaggcccagaaaatccaaaatagatgggcccaacattgggttgtaatgcattgacaactactcgtggacaagtacacgtgaataccatttccttccatacgtataaaaccaaattattttcccaaatagtatcctcttattattctattggtcaaatcaaaaataatgaccaatagaattatgtattctactttcatttttcaaatttaatagattttgatctatcaatagagaaaaatgcatggcgatgaaaatacatattccggatccaaccaaacaacatagcttttttattagactataaacaagaaaataaaatagaaagagactagatttagagagagaaataatgatgatagtgaagctgacactttctgcaagtttcataagtattttattcttttctatattttttctgtaaaaattaaaaaattgcaattgctcgaaattttcataatttttcgagttatgatggattcttgtagttgaaggcttgaagcatgacatttggttaaacaaaagcatagcatttttggaccatcatgatctctagattactattgaggataagattgtatcttatgcgataagtttgaatcctagttgtatatgtttaggaatcgacatttaagggtttggtgtttatcttgtgttgattccctcttgtataaatagcaatgttgagttcactaataaagcaagtcagttcgatatctaattctacatggtacagagctaaagatctagcaaaaaaaaaaaaacatctaaattttttcttttttttatcgattgtttcgatctttgtttttcttgcgtgacaagaaaac

SEQ ID NO: 8703 - DNA, 3000 bp, Unknown
  misc_feature (1)..( 3000): cDNA_ID_3045997_gDNA_ID_1971862_Annot_ID_176453 3000 nt of promoter + ATG
ttacagtatatagtgtatacagtaaaaaaaatcaaacttcacgctgtttagctgagaatctcagcaactacttgccgtttcatgcctcttgtctgttttggtcggaaaagtacacatgagaagactcaaagtgacgaagagtgtttctttcttctgttattgcaacattcttttgtgacatcatttgtttgcttcttctgtttcagtttcttgtaatagtaaaataaaatcatgccacgtcgtccccatccaaacgggcttattaagcccattttcgcaaactataaaagtaaaaaacaatcaatgaataaaatatgactttgcctttttagttttttgttcaccactactcagccacattagggttttgaatagccaaatatcgccgtttcagtctcctttgaatccctaggaaattttgttatacctttgatcattattagctcttcgtggtgtttatgtcatctacttttttatacagcaagcaactttctagtttctaacgactatgaattctgaagtcgaacgtccatcgtttttgtcactacctgatgaaatcatcttgagctgtttagcccgcatatcgagatcgtactatccgaaactctccctagtttgcaagaccttccgcactctcctcatatctaatgagctcattgtggcgcgattgcacctcaaaacccatgaaaccttttgtcatgtctgcttaaagtttcctgataaacctaatccgtcaatgttcaccctctggataaaacctggtacaatcttaaccaaccaacttgagaagaacaagaggtctacaagagatactcggttggtacaaataccttcttcatattattataatgtaccgttttacctcgttatggttggttccgaagtatacggactcagccaacgcaatgatccgtcctccaacatgtttgtccgtaataagggggatatttttttgtgtaaagccccaaacatgactgtagctcgagctaaagccagtgcagttgtcttcaatgggaaaatatatgtgatgggaggttgcatggctgatgaatccgtgaattggggtgaagtttttgacataaagactcaaacttgggaagctttacctgaccctggtcctgagttccgtttttcttcaattagaaaaatagatgtgttccaagaaaagctttacgttagaagcaacgagaagaaagactctgtttatgatccaaaagaaggtaaatggaatgttggagtaaaagcacacatgcaaatatgcaatgtatgatagataatgtatggtatcattgtgataaaaagtggtgctggtggtatgacacaagtcctaaagaatggagagtggtcaaaggtttagacatgttgaacaggaatcttggttgtggtacgattgaaattgttcactatggcggaaaactcttaatcttatgggacaaggtagatctttctcatgacaaagatatttggtgtgcggtgattgcgcttgaaaaacgtcatggtagtgatgaagtttggggaaacattgaatgggctgatattgtgctgacggttcctagctcatacgttttcgtgaatagtctagaaactggtttttgatcaaatctaatcatgttttttgatttgattctcaaaggcttttttcttctttattttttagtgtattgttgcttttatacttgtaatatttgcaacatcacgagaaatattgagtcggctaatattgtgctgacggttcctagctcatatgttttcctgaatagtttaccaaataggttttgataaaatttaactatgtttttctgttttgccaatgccttattttttgtttgaattctgtagtgtgtttatggttaaactaaattgttggcaacatcacatccaacttcaaaataacagttttatatcgaaatgtgacttagtggtaggatttgtatatgatgtgaatcagtaagtcagatgtttgatagctttcatattccaattcttcgtcttaattttgtcagtttctttagtcacacaaaaccacataagtttttagttaccagttaatattggagagagactacaaaagataaatgctattgtgtgagttttgaaatctgaagttaaacataccttttttttgtccgttatagcattctctaaagaatagctcttttctgtatttggtatttaaaaagattttgtaccaatttctaataacatatgtatgatgtaaccttgagaaaaagaaaatgatgtaaaatgtgattactagaaaggcctataagatatgagagtttctattcataacaatgtatatcagatgtgaacttatggagtgcaaagaccatctgttcttcgaatgtggctacgccaaagagatttggacaggactgagcaggaagatccttggacacaagttcacaacaacatggagtgccatccacattactcttttagatatatctttgggactaataaacatcttcttgcactacaagaaaacaagcaaacgacgactacgaaaggcgactaacaatgtagtcgtccttttttgcgactaacttacgactgatggacgacgacattacgacaacagacaaattggtcgttccataatcgtattttagcgactacaagctttagtcggtacatagtcatccaaatacgactatttgacgacgacattactggaaaaaataagtagtcatattttgacgactacatgtccgacttcatacattagtcgtaaaaccggcgacgataatacgactatttttcctttgtcgtaaaatagtcgcataagtgtcgtataatacggttggaaaacgtttttcgtgttgctgggtaggtacacctaatttctgagcgtctacaatgtttagtcgtaaaatagtcgtaaaaaatcctctatataatccacgacactcttcattctcattcaccaacaaatcaaaacaacatcaaaagaaaaaaaacgatttcgaaggaaaaaatataagtttagtttatgctata

SEQ ID NO: 8704 - DNA, 3000 bp, Unknown
  misc_feature (1)..( 3000): cDNA_ID_2990473_gDNA_ID_1971867_Annot_ID_58422 3000 nt of promoter + ATG
gtgatagtcttttgatggcaacatccatcccattttttagcttttcctccggtcaaaatcaatcagaaatatttttagtataatttaaggtgaaactttgagaaattgtggaattagtcattatgacaataccgtattaaaagtgaggactagatcattcctatattgttgaccaaaaaaaaaaagatcatttactatatttgaccaacatggataaactcctagattgaataagaccttaaaaatcatagattgagtaaaagtaaaacaaaagttttctagtatcagtcaacttctgatcttatttacgaggtcaattgttatatttgctttataccttgtacacggaaccaaagccaccttctcctaacttgtttccatcagagaagttatttgttgcaaccactatttcacttagtggaccctgacccggcccaattctccaaaccagaacaaagctgctgcaatggactggacctaaacgaataaggaaagatattgggtttgtgttaaagacatgtctttattttggatcattttcagcaattcattctgatacatgcatgattaaagataaaaccatgaatcatactggaccacgtgtgtccaccccacttgtcaacttggtccattatacgtgtatgcataatctatatcacactttgccgatagaaaagatttagacaacaataaatggagtgaaatatttcaatgttctctttaggttaaaaatgtgttctctatttcaatgttcatggtttaatttactgttttttacttgagcaaatttacataactttttgatcagtaaacttagaaatgtatgcttatcgtaaaactgaagatacgtccaaaataattcttggatcggtgaaagaatctgcacaaacaacaaaatgaactagccgttgctaaaatttaattacataattgagaggacagaggatttatttatattaaaaataactaaattcgttgggatgattaattcaactactccacacacaatgttagcaaaagttagctgttggtaattactttacacatgttcgaatagttggtacgtttattattacaactgcttagtgaattactctatgttaaatgattatttttcctaatttcctatatatcctattcaatatctctttcagaacatatttttttaaagtatatttactgactgaatttttttattatggaaaatattgaatcctatacaaatgtttcgtaaagctcaattcatgatctcgtcattgattatcaagtcttttatattttcttttgaacagagcctgaaatattataattttcatctgtcaacaacatcatattttaagaacaaagttttatatgtaaaagaagcagaacaaaacgtacaattttgtattttgtaagaaaaaacaaacgtcaaaataagaagaatctctttcgttttggctggcataaaccacgtggcatttctagagtagcccaccgttgcgttgcgcaataaatcttatctctttatcagatgcctttggtcaaacggtcagatatcaaatcttaatttaaaacttgtcgtaagaatcaaatattaacacaataatgtaactataaagttactactagtacttaattcacttatttaaacctaagctagcacgcgagcagcatgtgattattgcgtacataatgcacttccctaaccgacaaattactaaatcaaaatcttcttcttttttaatgcatcattatttcataacaataatttcaccacaatcaacgtaaatgtttgatcatcaatcagaaaatacgcgttagaatattttataagaaaaattatatggtttatgaaaggaaattttacagctcattttgataaataaagcatataagagaaaatatttcggtggaaaataaaaagtatataaaaaattgtcaaccatatgggagccattcttttctggctgtcatgcagtactattatcattatatccgttggctttgtttttcttttctttttcaagtgtcaacttagtatttattttgcttaaatataataaattaatggtcaccgacgataaaaagaagattaaaactctctaatgaaggataaggtatctataaatccagtggtttaattagtaatatattaaaaagaaaagtatgaagaatgttattcgaatatatgatactaaagtgataaatgattgtcttagcaaatttaaatcatactatttaggttatatgcgctttactatttcttttgattaattaactaactacttttttaaaattaagtaaatagcttcaagtagaagaatgtgagactacatttacattgatcataatcttagtgatttcatgcaaagactaaagctttgaatggttatagcagtccaaacgaacaaaaccgtctacgaaccggattgctttttatttattatttatgaactattgtccgtaataatgagaatccaaaaaaataaaagaaaatcactgcagcctaattgaagactgtcaattaagtctgcagccgtttgttgtccgctttaaaaatactatatactggacagctgacggattagcccacactaatcgcaacatcaattttaaacctaataaagttatatgtaattatacccttaaatttatttattatctttttttttttttgacacaaaatttatttattcttttttctcatatttaggcaaatttataggcgtattgtgcggctttatttctggtaaaataatagtcaaaaagtaataataataaataattaaggagcaacctaagaattttgtagccgttctcttatgtctatatcactctctggctctcttctctttcttctatagcttctagtttctcccacttctcacttcctttttcccgaatcttgataatgtaaattcacaacaaatctgtttaaaaacaaccaatcaaaacccaacattgcttctcaacaaaaaagcaaagcaaaagattttgcgagagaaaaaaaagaaaatg

SEQ ID NO: 8705 - DNA, 3000 bp, Unknown
  misc_feature (1)..( 3000): cDNA_ID_1824499_gDNA_ID_1971867_Annot_ID_58423 3000 nt of promoter + ATG
gtagacagtttcaatggatacatttcagggaaactcgaaaaaagattcttagtcagatctgagacttatgtcttcgtgactcatcataaagtacagattcaatgatgcacgtgacaaattttaacggtttataagaaataccgctttttacaagaaagcaaaatctagatcaaaaacttgtgggtttcgataatttttgtgaagcaaacatgattttctaacactttttttaactaacaccgtttatgaccgttaactttaatgtcaattcccaactagaaaaacttgtgatttaaccgatatttacactttaaacccttccatgatccacgtgaagtgaccttttctctacacacacaagacccccgcggcccaaaagctcactatacacaattctttaccatgtgacattgtgaccactgaccagtgactaccctcaaaatttcaatttattagattcagttcgaatttccaattaaattactatattataaaaaaaaaaatgataatagtgaaaaagatattaaattagatgataatgaactatatcgcgaaggttgtaaagtgaagataatgcgaaagagaaagacaaaaaagagaagacagatcttttgttgccttttttagcaagaagggcccatctaaggcccaaataacacgtggacgcgtcaacattacacttcaacacgtgtcgtctacgagcttttagtctcttttgactcattgccacgtgtatgttaacgaaccagcttatttaacaaccaacgtcctaccgttgtaataccattaacacttctcacatctaattaaggaaaaaaaaaaatctttttcatttcaaaaatatatataccataacttaaaatttaattattgactgcttacaaatactataatacttaaaaactatcttatgtaaaaaaaaacaaaaaaagcttttgccataacaaagttcggaaaaataaatgtggtgtatttaataaatggattctcgagaacttacgtggtccaaattgagaaagaaatagtagtaatttgattacgtgaattaacttcaaaggcacacaggttttatacagtttatgttcaaacataggttacatcaagattccacgccataccaataactcacttgaaagaaataattaagaaaatacaaatatctatgtttgttctagagtttaaagcaagacaaataattgcaaacgtatctttgtcacataatgcaaaacgtttgtgaatttatatattctggcataacgaataacttaattaatttcatctcttataaaatatttcttgtatacaacaaaaagatctttataataaaaatatttgaccgaccttactaaaagtgaaataaacaaaccgccataatttgtaatcgaaccaaaaatcgtttttcgaaatctctgaaaatcgcgtatgactaaatgacaaactcataacgtgttattgattggtctatcattttaaaatgatggtaaattttggtaaataaacccaacatggatggttcttctaaaccacgtctctgtctctaatttatctcaaagtctctaaaagaaaaagagagtctataaatacgaaaaaccctccgcaattttcttctcccctttcttctcttcctcctacattctcgactctctctttttattagggttttcaattttaatcaaaaaaaaaccctcaaatctcatttttggatttggtttcttctgcgatctctgagattcaatttcttctatcaaaggaaacaaaaaacttcatctttccgaagattttttttccttccttctggagctcttttgaatcaggtttgaattaatgaatttcaacgtttttgcttaaactttataaataattcatttctgagaatttttggatctagttcagttttttcttcttctaatttaacattgaatattttctcgttctctgtatttttagttccgttttgtttcctcgtacgttacaatattatattctgctgcaaaaacaaacattttcacagttttgaaaattatcgtcatttggaaattaaaacgcacgcaattttgtccttacacctaaaattccagtttttttttgtttcattctaataaaaatataactgtatagacgagtttttgtttaacttaattcgtaagttttttcacatattagtgttacaaaaattgaagactgatttggcatgtttatttaagttttgtactttattgttaagatatacgtgtgatttgtcaaattttctagtgatgttttagaagtttgtcggtgctctttttaaatatttgacctaccatataaaattttggttaaaagatgttgaaatttccggtacttgtcacgatcacttgtctttctttttttcctttatcaacacatagggtaaaactgaaagtaacatattgaaggttacgacaaatttaaacaggagaatttgtcaacatataaaacttactttcgcttagaaaaatgaaatttcatttgtgtcgactcgttaaagaacagaaaacattatttatttttccactacttttgtgtttaaaaagcatgaaagttttggaaatcttatagaagttaatttatttattaatttccaaataaagcatttaattttttttaaatttacattataagtgactttgttgatttgttgtgtgcaggtgaatttctaattgaatctgaaagtttacgatgaacaatttgatatgatgataaggtacttagtcaagaaacaaaatattcctaaaagtaaaatataatcttatatttttttcttaactgaattgtgttttttttttttactggtaatcagttttgtttgatggagctttcaccaacaagcagtgacaagaaaacaatgaagagatggtttttcatagataaacgagttggatagagtgttattgaagataaagaaagcaaaaaacagaagttcttgcattgaagcattggttttagagtttattgaagcattgtttagagttttgattaatg

SEQ ID NO: 8706 - DNA, 3000 bp, Unknown
  misc_feature (1)..( 3000): cDNA_ID_2993092_gDNA_ID_1971867_Annot_ID_58426 3000 nt of promoter + ATG
tgtgagtaatatagaaaagagtttgattaccactaactagtatgtagatgtcagaaacctcaattagaaatttgtggatgtttcgatgtctctatgccttgttaatcgaacaagatcgaatttgaagaataatgtattaagttatgtataatgtcgttacaatctgaccctcctttacaatttcatttctctccttttatattaatattgtgagattcgtaatcacaaataatgtttttctcgtgtcgccgatcacgtctcgatttaatgttgttcgtttcgaatccttattccgccatcatcgctcttcactttactctgtgattcgtccgttacgaagcgcaaatactaatccccttctagatctttcttgggcagcgataggcattcctaaacccatgggtctttaagcaaatagacctgatatctgttctcggcccataacatgtatccgtctatattgtgggttgggtggataacaagatctgacatttacatagtgtatgagtgatttaaagcaatatgagaagttaaaactagcacttaactttgtgctaaattctttagtttaacttgttaaaaaatttcttaataaaataaattgccgaatttacttaacaatttatttctctccctaaaataaaagtatagcctataatttttttaaatttttttaatgtttttaactatctaattcgcaaaaaaagaaccctataatatcaacatataaaaactaaaaaggattagaaatatcattgaaaccaactttgttaatcaaactagaataagggccaccacattaaggacttaggtaaaagtggtgtaaaatgtaaattgttcattttacaaaaaaaaaaaaagtggtctaaattgctttttgtgatgtgaagttgtgaactaatatgaatttggtctaagtctattgcccaaattatttatccttttagtcctagaatttgttccaaatttgatagtatatagcatcatcatcaaattgatcaattaaaatacgtgacctatagaccatagaaacaaattatttagtaatttttttatggtatatagcaaatggaaattgtttttatggttttcaaaatttttttttctggtcaattttttttttatggttttcaaaaaatggaaattatttagtaatttttttatggttttcaaaaaatgaaaattatttagtaatcaaaatggaaattatttagtaattttttatggttttcaaatttttttttttctttcttcccgacctctctcccctctccttgttcgccctagccgtcaaggccatcttcctcctcgttttggccggtgattggtggcttccatagcaccgtcgccggtcctgttcttagtagtttcagtttgttgtctcttagttattctttgttctgattttagtttctcaaaccctagtttcgtcgtctcctcttcaaatctctcttttttgtggtggttccgatgtgatgactatcatggaggatgggtggcggatcggtgctctttgtagtcggatctattccccggtggagccgtctcgtttcttcgatctagttatggaggtttgtgtttccgatctggttctaatgtctcaactatcggtcttgttcttgttagtttgagaattggacttgatttgttgtatgttccggctggttctgatgtggatctattgagttctgttcttggattttgttggctttgcggtggtgctgtctcgtttggggcgtgtatttagtcggcttttcgtttccatgagttagttctgtttatccctttagtattgcagcaacggcctctttgtatgcggattcttcttccgtttttgagttcgagtgacttctagggtttgtgttttgctgtgtttttcgactggttatggtttgaagcctcaggttcagcttttgggtaggcttgtttgactcctagctctgcctatctctctgtcctcctcttggttttcggtgtcgtggcttggtggaaggttctgttttgtgggttcttcaatcggatgctagcctcctataatggcatctactagctctctgttggaacctcttttggtttcccggctgagttctggacgttgtggtgggtcgatctcttgtccttctctttgcgtggcgtaaccaatctttagtctgtaggtggctttggctgggtctacgaaggtccgtgtgtaaggatgagtggtcctttttagcgtttcccctctcggatctcaaggtcttccttgatccttcgccttctcatgttcattggcgctaaagcggttctgatggttaggttctgtgttctgatcttcttgtttcgtcgtcttcgtttttgttgtggagatggttgtgtgagctcgtattaaatctcttttcaagactcctgtcagttgcctctcctcagcgccaaactgttctatggaagtgttagtcggcggcttgttgggaagagttttcagtgttgtagctttggaggctttagctattaattctgtagctgttatctttgtatcttttcttctaaggcttgttttgtttgttcaccttttttggcctcatgtctctgggggtttctatgtacccgccgactttgtctccgaaaggattttttccttttcggctatatataactcaaacgcatccaatcaatgaaatccgtctaaaaaaaatagcaaatggaaattgttcctaaatctttcacaattttccaagtattttttcttttgaataattttagttattatcctgataatattttttatgtaataattattcgaaacgtgtcacatatatatacaccaagcacaccatttttgattatcatccatcatctcactcactgatatttatacattcaaatatttatttattttcaagttttacgcaaatctctttcactcttaaacctcataaccttagagatcatcagtcatcaatcatcttcttcgttgttatcacttctttagtagctctcaacgagatttctccaaaatcagcg

SEQ ID NO: 8707 - DNA, 3000 bp, Unknown
  misc_feature (1)..( 3000): cDNA_ID_1989201_gDNA_ID_1971867_Annot_ID_58437 3000 nt of promoter + ATG
taatgttgatattcagatggatataggtgttttagatggttgtctttgcttgatgtgtaactatgatcagagttatgttgatgtttggatgatgaaagaatacaatgtgagggattcttggactaaggtttttacggttcagaaaccgaaaagtgtgaagtcgttttcgtatatgagacctttggtttattctaaggataagaaaaaggttcttttggagcttaataatacaaagctagtctggtttgatttagagagtaagaagatgagtactcttaggattaaggattgccctagctcgtatagtgcggaactcgttgtgagtagccttgtcttggggtgtaaaggagatcttaataacattaagtatcgaaaagaacaacaagctaaagaagctagagaagctaaaattatgcagaacactaaaaggaggtgtgatttttttgttcttctctaagtccaatttactttaatatcattttcattcgtttttgtatcgatatgttcagtatctcgtttgtttttattctcagggatgatttcctgtccaaaggattcaagctggtcttataagccaaaaacaagagacaggagctaaagctgcacaaggtaagtgaaaaagttgaccgttcttaatgggtctagtttgctgctgcattcttattgcatttcattcttttctgtctctgctctgttttgtcgcggacgttcatatccggtgtctgttttgtggcggacgagcaattttcatattcgggttgggacaagagtgaaagtcacagtatgtcataggtattgagtgcttagaagttagaacattccctagaaaatgttatggagtcatcatcaggataattactttagcatatgaccatattcaagtgtggttttttcacatcaatctatctgcaaaacaatcattgggtatgattttttcagggaggagaaacgagaaggggaacaaacaataacttcaaccaaaaagctctaatataccaaaggagaataatatacaacttacctacgtatatgtgcttatagaagagaggacaaatgtttttggtttgtaaataactctttttaagtttgatatatataacttactagtactaacgctttgtatacttgcttttttaagtttctgcataatatgagatgttaaataaattaaaatttgtcatatttaacaagagctggttctattacagtaaaacctatataaattaatattaaattaataatttgtataaattaataaattcttccgtctccgagttgggagtaattgatacaaatcactaaatcaatatgataataatttttttaaaaatcttatataaatatatggtctcatcaataatataaattaataattgtataaatttactaatatatattataaatatcatatgtaaaatatgactcttgtaatatttttcttcagtttttattaattttttgtagtgttcaattataatatttaacaaaatgaatttttttttttattgtaattggtttcagaaatactattgattataaaaaaaaattacattttatatcgattttgtgtaaaaatttacgaaatttgtacaattttattaaattttcgataaattaatatctttttaaattaataaatttttttggttctaatattattaatatatagaggttttactgtaatactttgctatcttttcatttatttattaatattattaaatcatcgacatgagctaacgtttttctacaataacttttgagatcactaagtagaaagttgaatctttcatcgacaattttataagtagtcaataagaaactttctacagcttgcttattaccctcgtcgaaatattgtgtttcgtgagcaatcctattattggtcaaactaaactattttgctcaaaattcttcatatggataactacaaaaatccaagttttccatttagattttactaatcggcgctatcgtaagtgtagtcgtcattgcctatttctcgagtttttaatagtctaaatcgtgataccatttcgactaaccaaacaaaacttagtaaaaaatttggtgtgtaacgaatccaaaatatcaagtttacgttttgtcacgattcctttaccaccaagttgccaatgtttggttacatttaccaaagatctaaatagtaaccaagaagtctcactgaatttatagagatttttggctgaatctacttaattgacctagtgctctgctctacttctacaaagacagatgggcctgatatgatcgctggtggactcaggtgtgacgagcccaactccggaaaggagtataaaatagaacgattcgtattattgatgctatcattaagaccaaaataaaaaaaaaaggtgaaaaattagcaagtgataaactataaaacacaacgttttctaaatggtaagaatataaactttttatagaaattaagaaatttaataaaaaatttataggaaataagaaatctacataagaacacagacaactttttggcttttttgtaatgtttttctaggtaataaatttcataatcttccaaaaataattaatcaaaagatttgactaggcgattaacccaaagcttcaaaagaaaaagtaaaaaaaatccttaatttgtttctttatcggattcaacaatttgaaaccataaatgacatattctaattaattcagagatatttttacactaattttatagaaattcattaatctaatcacaaattaataaaataaagaggtgtgaaacgtttaacaatggcatagagagcgagagagagagagaggaaaactgtgttaaacccagacgaaaccttcgatcttcttctcctctctcaatctcttcaccttccttcctccttcttcctcacctctatactccgttacggttaattttccggccatcgaatgttggataaggttttcgcgaaagccgatagagaaagatagagacagagagagagagattctcgtcgctaa

SEQ ID NO: 8708 - DNA, 3000 bp, Unknown
  misc_feature (1)..( 3000): cDNA_ID_1018916_gDNA_ID_1971867_Annot_ID_58439 3000 nt of promoter + ATG
aagtctacttttccgtgacgcctcttcctcttcatcttcatcccctctgtcagaaacatttccttcctcttcatcaccgcctgatgacttcttacgacccctaccaccacctccactggttccaccgctctccttttcattatccacttctccaaacaacgctggaccattattcgcagctttcatcatccacctttgataaccatcagccgtttttctccgattcttcatcttctcttccgcttcttccaatgtaagttgcttatactgtgcaaccttgttgaagttatacctaacacagcacaaaaataatcagaattcggataatacaacaacagaagaagcaacggtaatttgattctccataccaagaaccagcaggaatcgcaacaaactctttgttctgcatcactaagagatagtaagtagcagactgagagccttcaagatgtccctggtactgaaactgtccagtttcatcttccaagatccaaggtttgttctttaacttctcctacaaaaattagaatccacacaaaactcattgtaaaaaccatcaaaatgattggtatgatccaaaacaaacacaaaattacccgttgtgcatctgtaaactgacgaccttgcggtatatctttacgaagagaccatttattctcagaacctttcttgaaattaggaagaccagtcacaaatctaccaatgaagtagttcttatccgtaggtgccgcagcacgaacgttatactcctaaacaatttcacccaaacaacaattttatcaaaattttcttcagaaactcaaaattgtttgaagaaacacacaaaatctaacccgaatcaaacgtgtaacgacggttccacactcgtgacacttagatttattctgcgccatggttctaccacacttcaaacacaacgtcatgtgtctacaagagcttccatataaatcggattgtgatccgcaaccaacacaagacgtattcaattgcaaacagttcgacataatgttctgatcccaaggaaatcgtcttctttctgaaaccgtaaaagaagagagaatttagggcttcacgattttcgaaaatctaattgcgaagctaacagaaggaatccaagataaaatctaacgattgtgttgttggaatctagggttcttattacctttctgagatttgagattgcaattcagagttttgtttgcgaatgattttgagagaatgttaagctttgggatctctaatgaagaggaggttataaatagtgagtccgaagacttacatgttaaaagactgatttacccttttgactgatccaaagaatacaagtgtttttttttgggtctcaacttaataacattcatttaaccatatccaatatttatatttttgatacaaacatgctagttttaatatcttgtgcttagtagcagaaggagaaagtttgtatcctacttatgataggttctacgtgcttcatttggctcccaatattacatatcaattatcccattatgcaacaaaagaccaaagtcaccaaacaaataaccaaattgaagaaactcactttaaaaggattcttgttgttcataaatgcattggcaccaacacaatatcaaataaaaagcattacaatcttcaaaaaggataggattcgttcacaagttttttgtttttctcataggctaaaaagttgcacataaactcacttcagtccaagcctcttcataaatggagagacccatcattcattcattccaccaagaatctagatgaggagcttctcaatggcatccttaaggtgctgaatttgagatttcaactgactagcctcgtttgatgtaacggaacaagcgatcacgggtctggttacatcacatgctcttccaagggcttgtttcgatggcacaaacacatacggcacattctgcaatagttcaaagccagagagagaacaactaattagtaaaagaatcagaatcagaatgttgcttgtgaaacagatttgctgaatacaaataaagatatgtttgtgcagccaaatttaaataggccaaaaaaaaaaaacttgaatgggaactgtcaactaaacattcatgaatcaacagagcataatactcagaagctaaagtaatgatattgtcaatcctaagaccaagaatcacagatttaactcattacacaagctacgttaatacagaacaaacgaacttctcaatgcctaaaaatcctaattgaatctgtctcctacattcataaactaaattacctaagtgattactacgaacatcaacaatcacaatctcaaaactggagtctaatagccaataaagtcttatctttttatcatatgaagaagatacccaagtgaatccagtaaaacttgcaagagccaaagaaactactaattgagattcataagaaagtgaaacgataagaagaaattcaaataccttatcttcagcaagaagaggaagatgaagaagaatctcgagaggctcagtatcagcagccataacaatgaactcagagatcccacggttcaatgtcttggtagcttcattagctcctttctttaactgtttgtaattcgtagcttgttgaacaagatcaagaatcgttatcgataactgagaatcagctaacggatacgccttagggttcactccttctaccgtcatcttcttcttcgtctacgagagttctttgttctaagttctgagttcagggaagaaagaagcggtgaggagaacaaggtagctagggttttagtttgggtttaatagacaaacgaattagggttttataaagggaacacatcaaagcctctctctgactcagaaggtttcagatattttttaaataaaaaaaataaaataatttccactaaattatcggattctcagctcttctctcagaatctcagatcgtgttttgtttgcttcaccagagaagatcgaagacgaagaagacgagaaagagagataattagggtttagaatg

SEQ ID NO: 8709 - DNA, 3000 bp, Unknown
  misc_feature (1)..( 3000): cDNA_ID_3000046_gDNA_ID_1971867_Annot_ID_58440 3000 nt of promoter + ATG
atgttatatgtttggatttctaaacaacaatgacctcctctgaacacacttctttttagtgaaataacccccaaaaacgaaaataaaaattgttagtgagttggttcactatttggtgtggtacacttggacatatgtatagatgacaaccatctgtcattatttctctactttagaagtttaattctctcacgtcacttctttattaactctttattccttctagaattttggaccattactttcaagttcccatgttttgatacacaaacgaaccattcgattcttttcttgcgtttgctagttttattttgatacttttgtttcaggaggactaagagtgaggtttagtatcgaaaacatggttacatgttattatcttgatgatcttattttgttatgatcaaaaaatttaaacctaattgagtgcatgtgcaaaattaaagacgacaaagttaatgaagcatcaaattctgattggcgatacacattagactatatcaaatggtcgaggactatatatcaagcttgcatctggttgcaacttgacttattattggctacggttccattattatgttttagggagagagtgaaccaacgttgattacgttcaggggggaaacgtaagcagacattgagacaactatctgtacgacctaagagtgatcgagtcgtataaagctcaggtgaaacaagactaaaactaaaccgataaccattggatctcattaattcacagtaaaccaaattgtacccaattaaaccggaaatagatagtaccatacggagaacattttctttttttgagagagtagtgagtgtcacaataattgacagatgacgaaaagaaaaccagagcggaatctacgagctgaaacacaagaactcactgttaagactcagtttcaagtaaaagtttctacaaagttcgaatgttttcaacatcgagtgaagtaaaccagatttcactgaaaaccttatcgtgtttctctctacttcacgagttttcttaatacagattctgcgcgctgctcaaatcgaggtagtgcccattcgtgctggattatgtctaaaccatccttctctgcacccagactctgatcaattttgcaaggcaacgataccaaatcaggtatggccacggagcgaacaaaacaacaacacttagcaatcatatattcatatatagtttgattacctttgatgcatcaaatccaaacccacccatttgcatcatacgttgtgtgtcatcaatggctgcatacgaagcaaaagtaaaagattatgaccacagtttagtttttgaggaatgtggagcaaattcgtatgtgacagctaaccattttcatctccgagaatgagactgaacaagcctcttaatccaaacaagttcaagaagtacctgaagagcgaaagaaaaactcataaaaaaaaaaaagagaaagggcaaatatccagaagcaaatatgattagcatactgaaaatctgaagaggaccggataacacaaagtcctttgtgtaatttgagtacttaccaggaacgactactcacatagctaacatcgacagtgctcaagtcaatgccattctgtaacattgatctgaacctctgagtcagtggaaatggtattttggctgcaagataaacaaagaagccttagatgctatggaattataaaaaaattagagtatcatggaaacaattaactggtttctcagatgaaagcagtgaaacagccagttataaaatcaaatacatgattgctgtttatgaagtaaccaagaaaaataattgcaaaacactttgtttaggaaataaacctgcaacaaatccagagaagaagaagttgacccatgcaaaagtgagtgtctgcaaaatggtaagtgatatcagtttcttaaatgaccagtaacgcaaaaacatagatgaaacatttcaaatacaactcacctgaggaataatcatagaaagatttttcttcatcatatccatggccatgttaggatcagaaaacatagcagcttgtggattttgagcttctcccttgggaacatgtagcaaaccattctcctacaacaaacaaaaccacatacttctcacattccatatccatcaatacactcatcagaaactattgaacagattacttcctctagcaaaacaaagagacaatataagaaagacgatcacaaatgaatgctaagtaaaaaggtcaaagatcaacaacaaactcaagctttcaatggaatccacacaatgaatctcttaaaatcagaaaaccagatcaagaccaaatgtcaaatcttagaaaactcattacctcgttgctgaagtagaatctccgagcacggaatgatttcggcgggataaaattagcaccgactttaagattccgagctctaataacaacttgcctatcaaacaaatcaaatcgaaatcgaatcagctaaacaaaaactcatagatacagacttaaaatctacgcatagagaatacaatccagagaaggaggaagaagactcacccttctttaaccatcttagcatcaggagttggagtagaacgcataagcttagagacaaagtatctcaaaataccgattagaaccatcactacggagagaggaatcagaacccaatctctgatcgccgtatcgagaactagatcctccgccattctaaaccctaattatctctctttctcgtcttcttcgtcttcgatcttctctggtgaagcaaacaaaacacgatctgagattctgagagaagagctgagaatccgataatttagtggaaattattttattttttttatttaaaaaatatctgaaaccttctgagtcagagagaggctttgatgtgttccctttataaaaccctaattcgtttgtctattaaacccaaactaaaaccctagctaccttgttctcctcaccgcttctttcttccctgaactcagaacttagaacaaagaactctcgtagacgaagaagaag

SEQ ID NO: 8710 - DNA, 3000 bp, Unknown; identical to SEQ ID NO: 8708
  misc_feature (1)..( 3000): cDNA_ID_1018916_gDNA_ID_1971867_Annot_ID_176505 3000 nt of promoter + ATG

SEQ ID NO: 8711 - DNA, 3000 bp, Unknown; identical to SEQ ID NO: 8707
  misc_feature (1)..( 3000): cDNA_ID_1989201_gDNA_ID_1971867_Annot_ID_176502 3000 nt of promoter + ATG

SEQ ID NO: 8712 - DNA, 3000 bp, Unknown
  misc_feature (1)..( 3000): cDNA_ID_2036841_gDNA_ID_1971867_Annot_ID_176498 3000 nt of promoter + ATG
ctcatcaatctgacattccaaaatatgattccttaaagttaaaacacacaagctctcagataaagtttcaaaaaggaaacatctctaggtaagagaagcaagtacctggagaagaacagatctaatatcagaatgcacaaggaagagttgatccaattcacaatcattgtattcttcttcttcttctgcatgtaacacttgattaactgcaagataatcactcactcactcagagaacaaaaccatctccaaagatgtttgatttttgccaaatttccaaattgaacaagaagagtgtagatagagatatacctgtatctcttctggttatataaggttccatttcactatctagctttcactatgaattttgtaataatctggatctggagagtcgcaaacaaacagacaaacaaaaaacattacaaatcggtatctagatatcgcgtgcttcttcaattgagaaacaaaattatccagatttcgaagaaccaaaatctggtattcaaaaagggatttcgaaattgaaattgaaaacgatgatagagagattgaagagaaaggacctgcttaaacggagaattaggtcaagtatatgttgagttaacaggtatggttaccggtcggcggcgagagtagacgatttcaattgcaccgtcgttagggtttttgtagaagaagacgaagagcgggattttgtatttttcgaatttggggtttcaagtttggagaagatgaaagacagagagaaactacgcgaaattaaatgtttttttttttgtcttactataaaaataatttatataagtgattgggctaaagtttaaagtggcccgccctgtaattaatattatcaatgaagcccaatattatggttgttattacaagcttgatctgttacgtaattatggttcaactatgatttaatctacggtacatttttaaagattatttctataattatgtattaatattatggttatataatatatatatatatatatatataaatgaatgaaattgtgttattttaatagtatttacattttataattacattttcatattatgattagataaaaagaacaagacgttttttcagtagtagtataatattgctctaatattgctgcaatcttcgaatgagtatgtatgtcgccacaatattccgagttggaagtactgttgtggggtgggttttgatcgttgaataaaagacgtatgttacattctttacagactgctctggattggtgaaaatgttgtatacaccgatcaaatggccatgttttgaaacatacttagaagatagtgaagaataagcgtgagttaatttacttttttattttcagtttttcgtaatgccaatattaatatgtataaattggcacgaaatgcatgtatatatcctacactatatttatatatatatatatatatgtaaataatatttctccaacttgactttttgagccttttaatattaatgaagttgttggtaaacaaaaaatagctacattttttaatgatatggtactaatcacacccataatattttaggtctcgtttttctgatgtgggattttcaatgaaaatgatgatatttctagctattcataatttttctatgaaaacctaagcacaaaggtcgtttggtactatcggttatgtgataatgtgaatcaaatatttgcaaatcccataagtatcgggtcaactttcaaaaaataaaattacacagatgattaaacttggtttcagttgatgattgtttctgatcattgacgattttatgccactattatatgtattgtggtgaactggtgatcgatgatattgtggtcatgatcatcgacttgttacttattttttgttagttaacccaacgatttcagatggaaacatatattaacacggtgacataaaaatgattttgttcatcaaggattaactttaccttgatcaacaagacgatgaatcattacttggtttaaagtttaaactaattgaaccatatcaacatctttcattttcacttcttttagaaatactatgtttattaaagagaaattaattataaaattaaatagtaaaacagaaagttagttaagttagacgaatttggattttcacttttgatctcaaatttgtgtcaaactctttttgggacatttctaacgttggaattatacgactgagatatacctctatttaattaaaaatatatatatatccaaactagtctattgtccatcttgtaacccctgatatacagaattatttaataagtccatttgcgattacaaaaacaattatcacatgaaaatgaaatcataactttgtctttgtgtgagagttaagtatattaaattatgtttttaaaataatggttttatataagtcttccccgtgacaaacgggtttgttgaaggggcataagaaatgttcacatggccaacgtgaaagaataaagaacaattgttcctttttcgatatccttagttatgtacatattgggtaaccgaatgttaacacaaatctctatatactatatagacttaacatttggattctgtgccaagaaaacctttatatttgtcaatttttgaaattttaatcatcgtgaaggcccgtacatatatattgatagaattcataaatttgggagtaatgtctaacaaacttataccaccaaattgttagagtaaatattttgattttcgacatgcagttaccaactaagttgttaattagaacaatatatttttagaaattgccacctaatttgaaccatttaagtgttctcaaataatcaaatcatatctataaaaaaattagtcaactaaacccctattaagaaaaatcaacaattaaaaccttctcatttttctcctaatgaatatcctataaatacccactaaacacttatatttctctccaccaatctcaaagcaaattatatacactactacttcttgatcttttgtactatacaaacat

SEQ ID NO: 8713 - DNA, 3000 bp, Unknown; identical to SEQ ID NO: 8706
  misc_feature (1)..( 3000): cDNA_ID_3043224_gDNA_ID_1971867_Annot_ID_176484 3000 nt of promoter + ATG

SEQ ID NO: 8714 - DNA, 3000 bp, Unknown; identical to SEQ ID NO: 8705
  misc_feature (1)..( 3000): cDNA_ID_1824499_gDNA_ID_1971867_Annot_ID_176477 3000 nt of promoter + ATG

SEQ ID NO: 8715 - DNA, 3000 bp, Unknown; identical to SEQ ID NO: 8704
  misc_feature (1)..( 3000): cDNA_ID_2990473_gDNA_ID_1971867_Annot_ID_176470 3000 nt of promoter + ATG

SEQ ID NO: 8716 - DNA, 3000 bp, Unknown; identical to SEQ ID NO: 6812
  misc_feature (1)..( 3000): cDNA_ID_1815595_gDNA_ID_1971867_Annot_ID_176468 3000 nt of promoter + ATG

SEQ ID NO: 8717 - DNA, 1949 bp, Unknown
  misc_feature (1)..( 1949): cDNA_ID_2036894_gDNA_ID_1971867_Annot_ID_176466 3000 nt of promoter + ATG
aagcttatattactttgatccgtcttctcgaagatgggattttagttacacctatttactgccatgtccttatatctcggatagatttagttaccagtatgagcggaagaagaagagaattttcttggctgtgcggaaaggagtgttctttaagatatttacatgtgatggtgagaagccgatagtgcataagttagaagatatcaattgggaggagatcaatagtactacgattgatggattgacaatctttacgggtctttattcctctgaggtgagacttaatctaccatggatgaggaatagtgtttactttcctagacttcgttttaatgtcaagcgttgtgtatcatattcgcttgatgaagagaggtattatccgcggaagcagtggcaagaacaggaggatttatgtcctattgagaatctttggattaggccaccgaagaaagctgtagatttcatgtgaagataaaagtaatggccaagcttggttatggtggaagagtaagatcatctcaattatcttaggactcaactcttggttatggttgaagctttttatttgtttaactgctttgtattctcagattctgtttctttctactctttggatttttttttttttttataaatatctttggatcagaataaagttttcatttttttttcttgaactctgttggaacataacaaaacttctgtatttaattatggaacacgtttcataaacgtatgtataatctgagagccgagatgataaattggctaatacgcaggttatgataatgtatcaaattgagccaaattacccatttttaaaaatcaagatagaaacggtaggggctatatacgtacaatatgctaaactttattttttgtattctgtctttatcaaatgtttccgtgatgggtttgggtgttttggtggttttcaaatgagcaaaggaaggagcttgaactttgttgctttcacataaaatagagttagacgtagtgagaaggaatgggcgaaggcatgggcaatgttgatacacaaatcaaacaagtacgagtggaatgtttagggaaggtgaagaatcaatcacgagatcacgagcttcaactaaagtcgactcactacgagctggacggctggagaacgggctgaatgccttggcaacgaactgattacttggtgacgagctggcgacctagtgacgagctgatgacttgaacaaagaagccaaagaccaacatacgattcaagggcttggacaaccccaagtccccaagtcactttcgtcagaaaatcctcgttcatcaccggaataaatttagttttgtaaattacaaatcgataagaaacctagcaacaacaacgatcctccgatgagacattatccgaatttggttctcgagtacacaaaatgaaagagacggattattaaaaaaaaaacaaaaaaaagagaaagacaaaaaaaattaaaaacataaaattagatctactgattgttattgaattgggcttacccggcccatagaaatatttataagcccgtttgaataactgacgtcgtatgatccaaaaaaaacgaaacaatcgcttccttcttcctcaccttcaagcgccgacttcaatcttttctcttcttctttgtttttttgctcttggttgatctctgtatcgggtacgtttcttatctcgatttcagtcttcatttgtttgttttttcttttcttatgtagctatgagaaccagaaccagaacgatgcaatagatactaaaaagcctttagaaatttttaaccatttttctccatttcacctgttgttgggttctagattaaatcaaactagagtatagtttctaatttctataggcatggttttagattttttgttttttttttggtttgatcactttgagaataatttaaagttgattgttttgtagatttcaagatatg

SEQ ID NO: 8718 - DNA, 3000 bp, Unknown
  misc_feature (1)..( 3000): cDNA_ID_2036810_gDNA_ID_1971867_Annot_ID_176511 3000 nt of promoter + ATG
catagtctctgtatacccattcggctagaaatccgaggaagcagcttctctggaagatccatagtgtttgctattcccaacacaactaatttggagttaggcttggtaggccaatcaagaatgttgtataaaacagactggtttctagttactagaagatcaagttcgtcgatgagaagtatgcaaggcttctcatcctctttaccaatcctttttccttctgcaaacctctcatttagacactgtagagctttcttccaaccgactcgatgaccactcaatgcttcatagattacactgtaaatgttctcaggtgaagccaatttgagaccattgatctccacaaagcaataagggcttacgcttccctcttcaacctcagccttcagattcttcataaccgataacacactaatagtcttcccagtcccgggaacaccatgaatatacatacatcttcctaaacactgatcatccgagattgaaccttttataaacgaagtgatctcttccatttctttgcttctacaaggaagagacttaggacgtgtagccaacaacaaagtagctttcgccttttctaactcactctgcttatgacatctcacatgttcaggaatcagcttcatccccaccttctcaaccccaaagaatctccctttacgagagttcgcacctcctcttgcactagtcaaacctcctcgcttactcttcaaaacttcatcatcaagctccatctcttcatcactatcatcaacctcctcctccttcctaccattccactcttgatcactatcagaatctccatcagccaattcagccaaacgcttaaagctacgccaatgaacatcatactcatactcacacaagaacacatcatcaccatcattactagctttcgaaaactccttaggacacttgacagaacaatgcctaagaatacattccatctctatatcagcaaaatcattcgtcaaataaagctctcgtttcagattatgcggttgacgccccgaaacggtctcttcaggtatcatataccaacgagcacgaatccaatacacaccatcatcaacttctttccataacttgtcgattcgagcagcccatagatcaccggaaagtagcttctccctcatagttctcgctaacttcttcccttccggtggcttaggaaggtcaagtgtttgactttgaccagactttttaacctcacagaattgacagatccaatcaccttcaggaacttccttcaatggcggtttcaagcatttcaaatgaaatccacctaaacaatcatcacactcaatcattatgttagtatctgatttgaaacaaatctgacaatcttcaatttctggatcttcttcttcatctgaattcgaatcttctcttctcttaacgtaaacatcatcaccgatttcgaattcggtttcgtcgaattcgactttattgtaataaactctcttcttcttcttcgtcttcttaatcgtctcagatctaattggtgaaacaggagtgaaggaatctatcttcttcttcttcttcggagtttctgttttcttcgacttcgatggaacgacatcagtggttggttttctgggggcacgttctcgttttcgaattagattcattccttcgattgggtcatttcctggagcatcaattgggtcatttcccagatcgattttacgagaaacatgacgagcagatctacggagaggagtgtgagtttctggggtttgaggagtgtgtgaggttgaagatggagatagatacgatttgcgatagatgttagacggagttttggttggggatttgaaggtttttgctcttggagttgaagccattgatggtgtaagctagggtttttctgggtgaagaatgaagagtgaatgaagaggaagaagaagacgatgatgatgatgaagaaggaggtagagagagaaagttggcgggaaaaggtggcggacacttcttcttcttcgcatcagacaagagtttgcgagaaaagggtttaactttgggccgaatattgggcttattaacccaactcatcactttaggtttatccaaattaatcataacattttgggccgatttgataagaaatcaataatataggtccttttgtgaaagaaaaaaaaaaaaacgaagagcacaaagtgaaatggggaattgttttttgtagagccctaaatagaaaatctccaactgtagtgaaagtgaagaagaagaagaagatggtggagatctgaaaatatgcgatagatctgacgaatgcagatctaaaatggtctaattctataccaatctcctctctcattgtttctactaagttcaagttggtgtactgatcttattttgtggcggtgtatatacagtcatctagaggaagggagaggatgatgatgaaggaagacggtagaggaaggaatccaccgtcgcgacatctttgggttggtaaccttcctcatgggatacttgaacgagaattagccgatcggttcttaagatttggtgaattggaaagcttagcgtttcagcctggacgaagctacgcatttgttaattttaatcacgatgaggatgcgttcgctgcgattgagtcgcttcaaggcttcccactctctggaaacccacttaggatcgagtttgctaaggcggttagtgttgaaaactcctttttttttttttttttttccaatgcttgcttaatttggcttggtttttgagtcttgaggttgattagagatgacatgaactaacttattaggagtgattgaaagttatcagttagtgtgtcttcaatagatgactagttatgtgattacttacacgtaaattagttccagtcagtaccattctagaaattaatgattgttgactacgcaaaggtaacaagtctcttaccttgttctggataagttgttactcggatgatacttaatcattgtctaagtttatagaacttagcaatcagtaccattctagaaatta

SEQ ID NO: 8719 - DNA, 3000 bp, Unknown; identical to SEQ ID NO: 8709
  misc_feature (1)..( 3000): cDNA_ID_3000046_gDNA_ID_1971867_Annot_ID_176506 3000 nt of promoter + ATG

SEQ ID NO: 8720 - DNA, 3000 bp, Unknown
  misc_feature (1)..( 3000): cDNA_ID_2036810_gDNA_ID_1971867_Annot_ID_58444 3000 nt of promoter + ATG
aggaggtagagagagaaagttggcgggaaaaggtggcggacacttcttcttcttcgcatcagacaagagtttgcgagaaaagggtttaactttgggccgaatattgggcttattaacccaactcatcactttaggtttatccaaattaatcataacattttgggccgatttgataagaaatcaataatataggtccttttgtgaaagaaaaaaaaaaaaacgaagagcacaaagtgaaatggggaattgttttttgtagagccctaaatagaaaatctccaactgtagtgaaagtgaagaagaagaagaagatggtggagatctgaaaatatgcgatagatctgacgaatgcagatctaaaatggtctaattctataccaatctcctctctcattgtttctactaagttcaagttggtgtactgatcttattttgtggcggtgtatatacagtcatctagaggaagggagaggatgatgatgaaggaagacggtagaggaaggaatccaccgtcgcgacatctttgggttggtaaccttcctcatgggatacttgaacgagaattagccgatcggttcttaagatttggtgaattggaaagcttagcgtttcagcctggacgaagctacgcatttgttaattttaatcacgatgaggatgcgttcgctgcgattgagtcgcttcaaggcttcccactctctggaaacccacttaggatcgagtttgctaaggcggttagtgttgaaaactcctttttttttttttttttttccaatgcttgcttaatttggcttggtttttgagtcttgaggttgattagagatgacatgaactaacttattaggagtgattgaaagttatcagttagtgtgtcttcaatagatgactagttatgtgattacttacacgtaaattagttccagtcagtaccattctagaaattaatgattgttgactacgcaaaggtaacaagtctcttaccttgttctggataagttgttactcggatgatacttaatcattgtctaagtttatagaacttagcaatcagtaccattctagaaattaatgattgttgactacgcaaaggtaacaagtctcttaccttgttctggataagttgttactcggatgatacttaatcattgtctaagtttatagaacttagcaatgagcaaaacaaacgaagatggtggtatctcatttttgtctcctcttcataggcctcacactttattattacaagaagttttttttcacattaactgtgaaagttctgtagtttctatatatggaaacttagaatcattctttattaaaccatatgcctccacatcaaaagtatccatgtgtaaccgcacaagcattcacctttatcattcacagcacaaacattcacctttatcattcacaacacaagcattcagccattacgttgtgaagcattcagaatgttattgacaaataatacaaacttggtagttgatcccaagttggagttctttgttcatttaaagatgctcttagctcacttgaggtcaagtgtgttccaggaacatcagcatgtgttgaagggaagtggaccagtgttcaactagatcttacaataaagataacagaaaattgtcaataagctttatggctcttagagttaatgtttacctaacaactttggatgattccatatgcttcagcgtcagggtcacattcatgcaaaagtcataaacccaagttaatagaattatgttggcattggtccacatgttgtaagtttgattgcgttgctgcctgacttcagttgcctctcagtacttacgaaggtgtgacttgatcatctatattgtgtctccgagtaacttttcctgccttctattatgtcattataaactgagaagttacagagtatagaactattattcagctagcagttggtgacattttacatattttctccataatatgtgagtaacaacccaccatacgttcgaggcattgttaaagttcattctcatcttcaccatgtttcatattcctctgcaacttgccagtgccaaacagatacatgcttttgaaatggttacctatacatagacattgttaaaagcagaatttgattcgtatgtaccaattccagcttgcaactgcccaataaaattgatcattgttatttttttagattatacaaaaattgacagggccaaatatcttaagcttgatgattgtttgtgtttatgacatgtttactttttgccatgattacatcttggtcatgtcttaaattctccatggctagtgatgatgtgtaaaattgaggagctaaatttgtataatgtttaggattggcctattgtctgatacctcaatatattaatattgtaacttatacattgcagggatattctttagctcaaattaatcaccataggcagctcttccttccttagacttgctgataactagatactcgagttttttcatcggttaatagtttaaagagtttctatctgctttatattgttgatattaatgcatattagcttttactaactgtgaggcagaagcgttttctgttgcacagtgtttgttgcctggtggactttcttacccagctgtgttagatgggcatctcattatctagttatgaattaaaatagcgtatggattttaataatcttgtgatggatttgaaacttgattctatttattatttctcttgataacagtagctactgcatagctatttagtttgttacttgaagtaccatataaatacactgctgaagtttccttctgattagctttcatttagagcctactgaagctgatgctttattttcttgatcatgcagtgaagtaggccgttggttaatacttctatctttgtgatactctttatcgcaggaaaagtcatcaactggatcacgcactgatgatatatatcgccatgatgaacagcggtctgcagcaagagggtcgtcttttgtccaaagggactccaga

SEQ ID NO: 8721 - DNA, 3000 bp, Unknown
  misc_feature (1)..( 3000): cDNA_ID_1989203_gDNA_ID_1971868_Annot_ID_58446 3000 nt of promoter + ATG
acggcggatgaagaaaacgcggcggaggcgagagacggcggttgagagagagtggattcaccaccaagccgtgcaaagcttcgtgctttgcttatcaaacactttaaacgactcacacagttcattaggaacgaatttacttgcaaagacaagacctttgattcacaccaaaaaaaaaaaaaaagacaagacccttgattttgttttgattctcaaatattttgggttttgagctttgcgtaaatattgtcaagcttgggaatttgggcaatacagtaacagaagaatggaataacttggagatcaagtagtttttcttacatatcctccaaaccagaatgattcttccaaattgaatcattctgtagaggtcgacgaaataaagaatataatcataaattaaatcattgattgctatttctttctttattgacttttaaaacaacataagagacaaatttagaagaagagaggaactaataaaaagtgtacacaaaaagcctgtgaaactggttcaggacacacacaagacaaatgcctcaaagacaatatgagcttagagctttcctttaaccagcagagctcaaaggaaagcatccttctcaagcagcttcaccacctccagctggctgttgagcttcgctacatcaattggcgtcttctcgtctaggttttgcagagtgctgcaaccacacacatcaaccaaagcacatataattaaagtcctgaaacagtgtttaatggagttgtttcattataagtactgtgttgtgagacttacactgcagcaccattctccaggagaaggcttacacactctttcctcccgtaaccagcagcataatgcagaggtgtgttcttgtttttgtcaaccgcattaacacttgctccagcatcgataagaacttgagcacatttcaactgttgatagggctcaacagggttaaactcagttcaatccatattcataagcaaaatctttagtatgcaagtaatcgccagttccatctcattgctctttcaccaaatatttgaacttgctataagtaattgtgtcatgaaactcgtagacgtaagtagactggttacttttctaccaattgaatgattataaagattcttaacttcacagctactgaaaaaaagagaaccatctaaatccgaatatttaattgccgtgaattgataagagaattgcatacctcgccgtatccacaagcaaaatgcaatgctgtccttccttcagaatcttcttcatctttgttaccaccagatgccaaggcagctttcaaaccctaatgaatcaacgaataaaaatccaataacgagttcaacaaaacaaaacttggaacatctaattcctcaagcaacacgcaagataaatctcacatggtcaagcatattaacgtaggaagcagtctaacctcaacatcaccaagactggcagtttggtgaacaatagactcttcttcttcaccttcttctgctacctcaggttcagctgaaacagtctggtctggtaagccagcaacaggcatacccattgcttcacccagctttttcagcacttctggatcattccagtacctaaaacagaataaataattcttccttcataaacagaaacaaactctacagtttctctaaaaaacattgaaagaagtttgtatcactcacttcatcatggcagaaggaccaccagcatcaatctcatctagtataggtttcaactctggatcttctttcatccgcgccatacgctcagtaaagtgttctgctgtttcaggattcgagaaagcatccaaaaaaggagacatttgtggatcctgtaggcaaaaaaaataaataaaatcagataagacacagagcttcattcaaagccacacctcgattagatggaaaaagtcatcaattcctaacctgaactaaggcggtaccaagtttctcggccattgtcttaaactcagggttatgcataacctgttgcattgtattgacatactgttgaggatcaaagttagggaaaccaccttcctggccagcgttaggaatagatctctgaagctgctcagccaattggttaaacgcaggatctttagctatttgctcagccatttctctgatgctaggatcctacaaaaaaaaccattatcaattaaaaaaaaactcaaagaagataacttttcaattgtgctaacagcaaaggtaacttacgttgagaatactagccatattagagaaatcaaaagcattgaaattcaagccaggcatagctgatgaagttgaactcccagaagctgattccggcttagaactcttattctcctccgtcgatttgggtttctcatctacagtaaacaaattacaatgaaccaataaccaaatctgactagaaacgattcattatcgcagatcagattgtatactgagaagaaaataatcacctgaaagaagaggatttttctccgaattggaagccattaagtatgactaaaaccctacaaaaaacacaattttgttttcaggaaaaggtgtaaacaagagattcaacgaaaataagcgaagaggaagacaaagaaatcgaatcgacaactacctaagagaatttagtaagaaaaggaagaagaagaagaaattaacccgaaaagacaatgttgtggtggcaaacgctcatgaaacttgaaatacagataatctttcttttttttaatatgacgacaagagaaaaattatttatttatcagctggattttggattgagaagaagatcaactgcgagggacaacagccactgcttctccattgaagtttgaacctaaagctaagaggccttttatttttaatcaaatttattgttattggcccatataaacctgtttacctcaaggcccaagcccatgcgtttgaataataagatcagccacgtaagatttgtgatttaagatcaaattatccgttaatggataaacacgcgtcacttcacggaagcagccgttcatg

SEQ ID NO: 8722 - DNA, 3000 bp, Unknown
  misc_feature (1)..( 3000): cDNA_ID_2999328_gDNA_ID_1971868_Annot_ID_58447 3000 nt of promoter + ATG
tgatacattctctatccaggaccccaacagggtgtattctgggagcatcaatgctgcctgaaacgactgcaacatgagaaagttcatgcttgttcatgattgtttgggcagcgagaagatccatatcaggtgtaacagtccatggcactttacattttcctccactcctcgaacagatgtcattaacaaaaatatcctaagccaaagaaatgcttcaattaatgatcaaagaaatagttatttcagactattcaatttcgtaccttgggtctattatttccttcttttcttgctttgctgaattcctgaatgtctgaaagtgtaagtataccgagaaagatattgtcaggatcaacaatcaaggcgcaggattgtttctctatcagcatacgagttaatgcctcttccaaagaagtgctcatcataactgtcgcaaatcttgttcgcatggcttctgaaacaaaaatactcttcggcagctcctcagattggttgagagaatcatcaaggcaaagagaactttcaacttcacaaaggttattcgttgatgattcatcatcagatgacgtcagagactgtacagcttcttggctctttcttttcctagtttcttttgtttctctagtttcttgtctctttgattgtccagatgtaatccatgaagacatgcctacagctcccagtagaggtaacactatacgataatcctgtgtaagttcaaatagcagtagtactgctgtaagaggaacttgacaaacccccgcaagtgtagcagccattccaacctgttaaacaatgagacaaacaggatcattggcaatgaagctacaaaaaaactagcatccattctcagttaacccgaaaaaatattctgttcaaagtattgataggtaaccaatcaagaaagtctgaaattaagacaattttgaaacattgaccacataagaacagtaccagaccataagcttgtggagatgccacttccaagatagagagattgaaatcagggttctgagccaaagcaagtccaataaactttccataggccattcctgctgccccgccaataaagagagaaggagcatagtatccaccgacaagtccagaagcccgacaccatgcggttgcagctatcttgaccgctaccagctgaagcaaaagatcagctgaaagacccttcacaaatggacgtttctccaacaaaatatccacattctgaaaaccccagtataatacttcagggtataccaaagctatgataccaacacttaatccacccattacaggaaatacagcctttggtatcccagcatccttgttaagactgtcaacagcagatgtcatggatgatgtacatcgagataatgccaacgagaccaagccacacagagcgcccaataaaagatagagtggaagttctgaaaatcagtgaccagctctcataagtttggtttctggttcccttgcgtaaaaagcataagaatggcaatgcatattacctccaggagagcggaagtcatagtcaggaaccttaaacgcaggttcagagccgagaccgatttcggaaaccacagaagcagtaacagcactaagaataaccatagaagttgtgtttggaagtgaagttgatgaatcagttgatgaagaaggccacaaaacggattcaactgcaaagaagcatccagccacagctgcattgaaccctgtaacaacatataacaaagtcctcttaacgaatcaatcaagagttccatacgcaagagagaacaacattagcaaatatcagatgaacaaaccagaggaaatgccagcagctgagccagcggcaagaagtgagaagccagtctgaggacttttattgaacagagaattcacacctttagcgattgacgctccaatttcaacacttggaccttccggccccagcgaatttccagtcccaagcgtcacacatgcggcaacagtcttaaggaaaggacgcaacactgcctttacgcgatcgagactagaatgagaatctccagtagattttccagcagattctcgaagctgattgaggatgctcaccaccaaaccgccgatagtcggaacaaggataacacgcaaccaattggaaccgatcggtgcctctctaagccacgaagctccacgatcaggaatcccatcccaggaaaagtctcgaagcaagtgaacacagttgttgaatagaaccacactaactccagtgagaacaccaaccaaacaagccgacgctatcgcaagctcctgagacggctgctgatcaaatccaacctcatcctgatcagtctcctgcttcgccgccggtaaacgcgggaaaattctaccgccaatagcgacggaaccgaaaaacggtgaaaggacgacattgaactgaaaaggaacgtcggttttgtgaattggagcgaatctccgggaagagacgggagatcggagggcagcacagagtggaagcgtggctgccatgaacggctgcttccgtgaagtgacgcgtgtttatccattaacggataatttgatcttaaatcacaaatcttacgtggctgatcttattattcaaacgcatgggcttgggccttgaggtaaacaggtttatatgggccaataacaataaatttgattaaaaataaaaggcctcttagctttaggttcaaacttcaatggagaagcagtggctgttgtccctcgcagttgatcttcttctcaatccaaaatccagctgataaataaataatttttctcttgtcgtcatattaaaaaaaagaaagattatctgtatttcaagtttcatgagcgtttgccaccacaacattgtcttttcgggttaatttcttcttcttcttccttttcttactaaattctcttaggtagttgtcgattcgatttctttgtcttcctcttcgcttattttcgttgaatctcttgtttacaccttttcctgaaaacaaaattgtgttttttgtagggttttagtcatactta

SEQ ID NO: 8723 - DNA, 3000 bp, Unknown; identical to SEQ ID NO: 8722
  misc_feature (1)..( 3000): cDNA_ID_2109585_gDNA_ID_1971868_Annot_ID_176525 3000 nt of promoter + ATG

SEQ ID NO: 8724 - DNA, 3000 bp, Unknown
  misc_feature (1)..( 3000): cDNA_ID_3043238_gDNA_ID_1971868_Annot_ID_176530 3000 nt of promoter + ATG
ggagaagaagaatctgatccaagttataatagagacacacacatacacatctatacttatataagacatgtccaaattgcagattaaaattaattaaatattaataagtagtgttcatttaattccatgtcatatcggcaaaaaaaggttttggatgaatagaagaaaaacttagttttacaacttttccgaagataaataatgagattgcagtatccataaagacaaacatatttgaatctttatttaaaagtaaaaaaaaattgatcactttttatttttttttgggtaattcaagtttgatgttctacaaacaacatctttatttttaggtaacccaaagtttactcgagtggtccaaatttaaatgttcaacccaagattttaaatttttaatgcatgctttgaactttggaagtttataaagttctgatttacaaattgataaatcatataagtatgtgtagttaaactaatagaatcatcaactgaatttttttaattatgccgttacaaaaatttacagaattaggtacttttgtatgcaaaactatatatatcatcattccattttgttatttttgacaaaactaatactttaatataaaaaataaacatttcctcgtgtgattcaaagactatagattgaaatactttatcatatacaaaaattattatgatttctgatttaagacagaatttatgtctcaacgaataagttatcttgtttaagaaaaatctaaagtactaatacaatctgttacgactaaattatttcttagccgcatgggagatcttgggcaacatgcctcaacatagatacgggttttaatttaaataatgttctcctccaaaatacatttagataagagatttggaaatatcgtaatcgaatacaataaagaattaaattgccgtatattattagaaaaccagacatggaaaaagatgggtaggtgtgggcgctctttttaggttctgtttgacgaactcattatcaaaaggtgtaagtgtaaattactttcttacctaaacctacttctattagactcttttattctgcattcttcaaattttttgggcatcttgaaagattcctttaaaacaaaaaaaagggtaaaagattgagatcagaagatggttttgttgacaggtggtgctgaagtttggattcaatgaatttcgaagttcttgcgatattgtcaagttttcctcttggaataccatatttgttttaatagatatactgtagttgttagtttagatatattatttttcataaccgagtttgtttacatttgtatatgttaggatagaatgatgtagccatgtaggtgggatcttgataagtgataactatcaatttacagaatctttgaaatgaatctacgtgtcctcaaaggtagcataatatatttacattatagtattaacagcaggtaccaccgtccacgtgtgcataaagttttggtgtttctagactctcttgtcatactactaactgaaatattgtaatatggttttcacactaaaaaatcgaatcaacccaatatattatcaaatcaaaccaacgacgataaattttacctaaaactttttttttaaaacgattttcagccgaaatatcacaagattatcggtcttgggctagactctagagagggatagatagatggaacttagaaaataataaatggaaaaagatattaaaagaataataactttgaagttcaaagtacaatcggaatggaatatcagtcttttgcgtgaatgcgtgtgatgtgagtcttgacgtcgtatatggaaccaaaaaggtgaaaaagcaaaccgagttattaaaccactaattaaaactataagacattcttagcacatcggattaaatagaagaaaatcaacaataattgagaacggaagcattaattatgacatgtaataaacgggaaaaacaacgacaattatggactttggaagcatcgattgtactggggtttggagcatcaataatccatattttggatacaacaacaattttgtttgttttttactcaaataaagatgctatatttgttatgttcaaaatctctatacatctttcggtctacggccaaataggcaaatacttgcaccaattacaagcaagtaagtttatatcttgacatataatcaatatatgatatagtccatgcgattccagctaaccacatataactaattcatactttagtggagctagccagatataactttattcatatagtagtgtggttatgaatccaatatataattgatagagaaatggtagtttcgaagtaacgaaggttgacaatttcaaaaagcccatacaatcagtttgagagacttaaaagagttgaataatgtacagcaacaacgagtcaaagtcatgcttgtgtgttacgtgttctatatgtgtccatgattataacgcaatagcaatatcatgtcggtgcgctaacttgttttgactttttggggtcattaaactaaaacatcagtttcaatatacatatacatgacgtcataaacgttccattcaatcgctatgccattttaatataatagaattttgcaacttttttttttcctcaaggtagaattttataactatagattaaaattggataattaaagttctttgttcgtttatttgattagtttttctgtagtatagggtcaaacaaggcaatgttaaaagtcaaccatcttctttatttatatttgttcctagttaattacacttaacactgtttgttaattcattgaaattgttttgtcatgtactaactattgattattcagtcaccgtcccatgacatgataatcccaccaaggtaccaacacgtccaaaacaacgaaataggaaattattatttagaatctaatgggctaaaaataaggcccaaataaaaagcaaaggcccaatatatactgtcacaaaaaccctcaaagaacagtgaagctctcatcacgatcgcaaca

SEQ ID NO: 8725 - DNA, 3000 bp, Unknown; identical to SEQ ID NO: 8721
  misc_feature (1)..( 3000): cDNA_ID_2178077_gDNA_ID_1971868_Annot_ID_176524 3000 nt of promoter + ATG

SEQ ID NO: 8726 - DNA, 3000 bp, Unknown
  misc_feature (1)..( 3000): cDNA_ID_3043234_gDNA_ID_1971868_Annot_ID_58448 3000 nt of promoter + ATG
atgaacggctgcttccgtgaagtgacgcgtgtttatccattaacggataatttgatcttaaatcacaaatcttacgtggctgatcttattattcaaacgcatgggcttgggccttgaggtaaacaggtttatatgggccaataacaataaatttgattaaaaataaaaggcctcttagctttaggttcaaacttcaatggagaagcagtggctgttgtccctcgcagttgatcttcttctcaatccaaaatccagctgataaataaataatttttctcttgtcgtcatattaaaaaaaagaaagattatctgtatttcaagtttcatgagcgtttgccaccacaacattgtcttttcgggttaatttcttcttcttcttccttttcttactaaattctcttaggtagttgtcgattcgatttctttgtcttcctcttcgcttattttcgttgaatctcttgtttacaccttttcctgaaaacaaaattgtgttttttgtagggttttagtcatacttaatggcttccaattcggagaaaaatcctcttctttcaggtgattattttcttctcagtatacaatctgatctgcgataatgaatcgtttctagtcagatttggttattggttcattgtaatttgtttactgtagatgagaaacccaaatcgacggaggagaataagagttctaagccggaatcagcttctgggagttcaacttcatcagctatgcctggcttgaatttcaatgcttttgatttctctaatatggctagtattctcaacgtaagttacctttgctgttagcacaattgaaaagttatcttctttgagtttttttttaattgataatggttttttttgtaggatcctagcatcagagaaatggctgagcaaatagctaaagatcctgcgtttaaccaattggctgagcagcttcagagatctattcctaacgctggccaggaaggtggtttccctaactttgatcctcaacagtatgtcaatacaatgcaacaggttatgcataaccctgagtttaagacaatggccgagaaacttggtaccgccttagttcaggttaggaattgatgactttttccatctaatcgaggtgtggctttgaatgaagctctgtgtcttatctgattttatttattttttttgcctacaggatccacaaatgtctccttttttggatgctttctcgaatcctgaaacagcagaacactttactgagcgtatggcgcggatgaaagaagatccagagttgaaacctatactagatgagattgatgctggtggtccttctgccatgatgaagtgagtgatacaaacttctttcaatgttttttagagaaactgtagagtttgtttctgtttatgaaggaagaattatttattctgttttaggtactggaatgatccagaagtgctgaaaaagctgggtgaagcaatgggtatgcctgttgctggcttaccagaccagactgtttcagctgaacctgaggtagcagaagaaggtgaagaagaagagtctattgttcaccaaactgccagtcttggtgatgttgaggttagactgcttcctacgttaatatgcttgaccatgtgagatttatcttgcgtgttgcttgaggaattagatgttccaagttttgttttgttgaactcgttattggatttttattcgttgattcattagggtttgaaagctgccttggcatctggtggtaacaaagatgaagaagattctgaaggaaggacagcattgcattttgcttgtggatacggcgaggtatgcaattctcttatcaattcacggcaattaaatattcggatttagatggttctctttttttcagtagctgtgaagttaagaatctttataatcattcaattggtagaaaagtaaccagtctacttacgtctacgagtttcatgacacaattacttatagcaagttcaaatatttggtgaaagagcaatgagatggaactggcgattacttgcatactaaagattttgcttatgaatatggattgaactgagtttaaccctgttgagccctatcaacagttgaaatgtgctcaagttcttatcgatgctggagcaagtgttaatgcggttgacaaaaacaagaacacacctctgcattatgctgctggttacgggaggaaagagtgtgtaagccttctcctggagaatggtgctgcagtgtaagtctcacaacacagtacttataatgaaacaactccattaaacactgtttcaggactttaattatatgtgctttggttgatgtgtgtggttgcagcactctgcaaaacctagacgagaagacgccaattgatgtagcgaagctcaacagccagctggaggtggtgaagctgcttgagaaggatgctttcctttgagctctgctggttaaaggaaagctctaagctcatattgtctttgaggcatttgtcttgtgtgtgtcctgaaccagtttcacaggctttttgtgtacactttttattagttcctctcttcttctaaatttgtctcttatgttgttttaaaagtcaataaagaaagaaatagcaatcaatgatttaatttatgattatattctttatttcgtcgacctctacagaatgattcaatttggaagaatcattctggtttggaggatatgtaagaaaaactacttgatctccaagttattccattcttctgttactgtattgcccaaattcccaagcttgacaatatttacgcaaagctcaaaacccaaaatatttgagaatcaaaacaaaatcaagggtcttgtctttttttttttttttggtgtgaatcaaaggtcttgtctttgcaagtaaattcgttcctaatgaactgtgtgagtcgtttaaagtgtttgataagcaaagcacgaagctttgcacggcttggtggtgaatccactctctctcaaccgccgtctctcgcctccgccgcgttttcttcatccgccgtc

SEQ ID NO: 8727 - DNA, 3000 bp, Unknown
  misc_feature (1)..( 3000): cDNA_ID_1989202_gDNA_ID_1971868_Annot_ID_58449 3000 nt of promoter + ATG
ccatgcttagtagagagatcattgattgttttaggtaacagtctttagagtaaagagtcttgttttcacaatgttcaatgcttattctattcatagagcaataatcgtcattgcaaactctgtttgattgattgtgtagggtgcatggcagctttggatgcagagcattacttacaagagattggatctcagcaaggtaagagtgattgaggaaattgttggaaggctcaggtcattgagttattgttgattgatccctgattcagttagacattgatggaccagaatgagacttgatctttatcatagaacaagttaagatacattgatttgtttattccttaatattgcagttggaattgagtacgggtattgttcaaagttgtagctctaatggtaaaactagctacgacaaaagtcctcttaaaatatgagttttagatgatgccttaacatttcatatattcagtgaacatgatttatccaataatgtattatgtattcttataaattagtataatataaaaatgggtttccagaaatctttaagacatttctgatcttgaagccgagtcatttccagagcttctagaggcttttgaaatgatcacagatttttcagaggaaacggctttggtgaagctttaacactttgatgtcaagaaagagagaaatgacggcttggaagggtcttcaaccgatgacgtcgttcactcctacatggttgaaatattcaaaagagttcataaaatccttcccaaaagtagtcccgattattcttctaaccattcttaaaattcgaaacgatgaatgtgattcttaaatgtggatttttctcaaaattatgtagtcaacaagattgaactatgccttaaataaaaaaagctgtttgattaaaaggttgaattaaatctctactttataataaataaataaaagttcctgcattttatctttgttgttttttctttttgtttgacttgatttagaaatattaaacttttctaatcaacgatataggtttaaagagtttttaaagttagttataaagtgtattttcccgaaatgtattgtgaaataggacttctaaaaaaattgaggttcatacatttttaaagtaaagtttgtgcttatagtagaaatttggaataatgatcaaattcctcgataatagtatgtagcattcttgtaatgcttgaaattgcaatgtgttgcgaccactgaaaagtgcaatggatatatttctgttttatcttattttattggaatttcctataagattttaatcagttatatcaaaacaaattataattatagccagtatagatccgacgttggtgtgtcaagccacttaaaagatgatggaaatggatcagatttactgaataactgacacacgaaattcctaaataattgttttctgtagaagaatatgtacaactagaagataatatatgattaattattcagattttatcttaactttttgttgtaaacgtaagtttttatttggaatggtcatactacaaataatcttcaagcattttataaagagtaaatttaaatatcttcgacacaaaaataaaatatatattacaaaggaaaaaggtaaaagaaaaatatattaaaaattaaatttagtactacattaatgtaagtattaaaaaaaaaaaaaaaattggttcaaaatactaaacaattttagatgagaaattcatccaagaaaattctcaagtaaaagtttttgtttttacttaaaagtttaaaaatctcttcataccaaaaaaaaaaaaaaaaaaagtttaaaaatcttccagatatgcaaatgcatatgcaagtgggggccatgaatgtgacagctggatacaggttaaaggacaacacatcatcgaccacatccccgacacgtgtcccatctcacacatggcgttttcctctctctttcaccatttttttaatttcgcgtctccgtttttacatctttttttttggctaaattgttttctttttcttattattcatttctatatattatattgaaaataatttgattattagtagtactgtagtattattatttcatacaaagtatatatatatatatggcaaaaaatagttgtttaatgcttgtttttttcttcacaaaaattcaccttctacttctccttcttaggacataatgggcctattgatttatctttgttaatccctataacattccaacttccaagtgtaatgcttattttccatataagaataacaaagcttaaaaataaaaaaaaattaacggtcacaacacaaacactattttaacttataaaatggaaataggcaattaggcattgatctccgcagaatctattgcactagcttgcactatgtttattcactttaatctcaccctttttgtcttctcgaaaatcagttgataatatccataaatacggtcaaaatacgtagaaaatacgataaggagagtgtaatagtatagggagaaaatgggaataacgtgatatacatatccacagataagcaataggtcaccatcccacggttcacgttatttccgtcggtttttaaaatcaaaaaatttcctctactgataatgttaattaagaaattaaaattatgtcttcaacttttaataaaacaattaatgaaaaactatcattattgtagtttcattagtgacaaatgacaatattaaaaaaaattaagaaaagtaagcaattattagttgaagaactgaagaagcagaagaagaagaagcagaagaagaagaagagaaaattttgacagagataatacacagatagagagaagagacagagacagagagtgatggaaacagctgtatttattatgagacgaaacaagaacctctgggtttctacttaaactcttctctctttcctctctcactttaaaaatccacactttagagcacacaatacaaaaaataagggtttctttatcttttcgtttcttccaaattttgta

SEQ ID NO: 8728 - DNA, 3000 bp, Unknown
  misc_feature (1)..( 3000): cDNA_ID_2113730_gDNA_ID_1971869_Annot_ID_176541 3000 nt of promoter + ATG
caccatcgttttcgctagggtttgatcttgatgctgcatcggatctccaatcggaaatccatcaaaaccctagctccaccggcgaccaattaatcggggacggcgataacgagccagagttgggacttactgtctcagattccgatcgggagcttgaaccagattttacaagcccggttctcaagcggttgcgacgagggattaatcccaacaagtgttctgtgaaagatgatagaagcgtagctgtagaggatcgggatgatgacattgaagagttctcttctcctgaggattttcctacgggtaattacaattttgagcttctgcttcgtcttttcgaatatgggtcttacttaaactgctggaataggaatcgagcattgttagatctcttattaaacgtcaatgagctgattagcctatctttcattcattaggcgtcttggatcgtgaacacattgatagaaagaccatcccttagtttatcatagagaacttaaaactgatggatttaggaagcctgatgcaaaccctcttctatttagatatcaggatcagtttgttgtggctcaaagatgaaaacttgattgcagttgttgacactaataggtagactagagtgggtttggagccttcaggctgagaatttgttatttataaggacattgattaagcttcattccactcaaactggtttcttttggatttctttagtgtaatattttaagtcatccatattgtgttggtttcatcttggtataaaacttgtgttgcttcatgcagacgcaccggcctcaacaagaagtcatttttctagttgcagctcaagggtgccacttcatggttctggggttttatctaatcaaccttctatctctcggggaaaaagaaagcagtcggatgttcaagcatctgctgcctctgggattagttctgttgcatcgttgtttcagatgtcaagtcgtagtcctctacgaaggttccagctactagattcagattctgaagatgaccatccatccaccagcagagatttaagcggagcaactaaaaaacatgattcattctcaaagaatcaaccatctattgcaagtaaaccgaagagaaaggaacctggatctatcccctgtattaaagatctgtggaaagatttttccccggcaagttccaagattcagacaccagctttcgatgatgtttgtcaggactattttatctccatcaagacgactagcacagctcagaaacaaagcagtgctgtggcaagtagtagcaatagcggaaatcataacttgactggctttcagcaaactgagctattccacgatttttcccacccttctcctccatctcatcgtttcttcttgcatagtgatccaaggatccggaatctagctcgacagcggttaccaaacttctttcctctgggaattgtcaatgatagggagagccagcgagaggtgttccttgttgattatatgtaggttactcctaatctatttcttattttgatacttacaatcttctgcttcctgtggattgacacatctttcgaatgccattgtaggaatcaatttggcagcaaagggagttctaaagctggagactctagcagcaaaagctgcagaagagggaaaacaaagtcaaaggtttcaaagagccaagagagcgcacacaattctgaaggctggttaaatcctaaaacgagagctgcagctccaaaggatgctgggaaaaggcgtgtatctgctgacagtggctctgcaggtcattggttcacatccccagaaggaagaaaggtaggtttctgtttccactgttctaaaaatacatagaaaatgactgggatgaatgtgttatacacacacgcattcacatcttttaagcatgagaactatttgttaaagaacacatagacaggaacgtctaaaaatttgttgtctctgaattttcttgctctttgtaggtatatatctctaaaagcggacaggagttttcaggtcaaagtgcttatagatgttacaaaaaggtcagcatccactgaagctggttgataccatctgataatgttatatgcataaaccttctctgtgagctaattcatggaactttattgtccacaggagaacggagtcgggtttaagaagtccagaaagaaacgacaaccaaagaaaaaggcgaagaattgaagaaaggaagccattgtttccttgtaagaactcaggtaggatactgcgaacttaagtctctttcacacatgtattatttgtcttagttaaacattattgtaacccaccaacaacttcattagcaacgtgtgttctttaggaagacttagttatattagcaacgtgtttcaatttcagtcttaaaaaaacatacgatatgtatttgttttggcacaccaccattgactcctttctatctttacctctggtgtgtgaatcttatatatttagacaatgtaagcaaatgcagagaacctgtaaagcccatgcgtctgtgaagaaaaagttgatatagaatcagagattgatgggtttcttgtctaatattttcagctgtttcgcaaaggactcctctggatctggagattacacctgcgacgctggtgtttgtgttctaagaagctccaagacaaccccgaaacttcaaaatggttaaatacatttacgtagctcttgaagcttcgcaatcgtttccttgcgataatttgtatttcttttatcagttgtgtaaaaatgcatattgaaagagatcttggttcacgggttagcacagatttttatatccaatttagtctgaaataaagtttaagaatatgatccatgagatcgatctcacaaagtttgcttattttaccaatggttaaaccgaaagactgaatttgaactaaaaacggttggccaacgaacaaatttacatacagtacacagtagttgaaatcgcagagtcagaatctcgtacagtaagtagttgcagagtcagaatttgcatatg

SEQ ID NO: 8729 - DNA, 3000 bp, Unknown
  misc_feature (1)..( 3000): cDNA_ID_2178224_gDNA_ID_1971869_Annot_ID_176543 3000 nt of promoter + ATG
tcattgacaattcccagaggaaagaagtttggtaaccgctgtcgagctagattccggatccttggatcactatgcaagaagaaacgatgagatggaggagaagggtgggaaaaatcgtggaatagctcagtttgctgaaagccagtcaagttatgatttccgctattgctactacttgccacagcactgctttgtttctgagctgtgctagtcgtcttgatggagataaaatagtcctgacaaacatcatcgaaagctggtgtctgaatcttggaacttgccggggaaaaatctttccacagatctttaatacaggggatagatccaggttcctttctcttcggtttacttgcaatagatggttgattctttgagaatgaatcatgttttttagttgctccgcttaaatctctgctggtggatggatggtcatcttcagaatctgaatctagtagctggaaccttcgtagaggactacgacttgacatctgaaacaacgatgcaacagaactaatcccagaggcagcagatgcttgaacatccgactgctttctttttccccgagagatagaaggttgattagataaaaccccagaaccatgaagtggcacccttgagctgcaactagaaaaatgacttcttgttgaggccggtgcgtctgcatgaagcaacacaagttttataccaagatgaaaccaacacaatatggatgacttaaaatattacactaaagaaatccaaaagaaaccagtttgagtggaatgaagcttaatcaatgtccttataaataacaaattctcagcctgaaggctccaaacccactctagtctacctattagtgtcaacaactgcaatcaagttttcatctttgagccacaacaaactgatcctgatatctaaatagaagagggtttgcatcaggcttcctaaatccatcagttttaagttctctatgataaactaagggatggtctttctatcaatgtgttcacgatccaagacgcctaatgaatgaaagataggctaatcagctcattgacgtttaataagagatctaacaatgctcgattcctattccagcagtttaagtaagacccatattcgaaaagacgaagcagaagctcaaaattgtaattacccgtaggaaaatcctcaggagaagagaactcttcaatgtcatcatcccgatcctctacagctacgcttctatcatctttcacagaacacttgttgggattaatccctcgtcgcaaccgcttgagaaccgggcttgtaaaatctggttcaagctcccgatcggaatctgagacagtaagtcccaactctggctcgttatcgccgtccccgattaattggtcgccggtggagctagggttttgatggatttccgattggagatccgatgcagcatcaagatcaaaccctagcgaaaacgatggtggctcaatcgaatccatgagaatgaatttagggtttggactaggagatgaagagacttcaaagacatggaattggcgccttggtgtgccgaagaagcttgagatttcgtaaaaattccccgcctagcgcacaatccatgattttaaaaaaatttcaagtgattctcaatttctcatgtattaattttcgtcgggatatttaccgccgcagaaaataattattttggaaagaaaaaaaatcagaatgggccgtgaaatttcaaagttggataaagcccataatttaatttggtgaacggtcttcttttttttttttcccggcaaataatttcattgatatcaaactgaaattacaaagtcagtatacagaacattagaaaacaaattattacataagcagatatatgcgccatgtagtgagaaagatgcacaattgggaagtgaatttgacgatgctttccttagagaagccttattcgctaatgaatcattagattcactattttccttctccatttctgatcttcctctaatgcgaaatgtatgcatccatctactctaatgttgttcttaattgtataatcaactaatcttttttttttattcggatttataaattctgatgatgatgacatattgacaacacttttattattcgattacaaatactaatttcaattaattatttacaaaatttcaaaatcatgttaaatattttgtaatgtataaatacattatacatatcgattacaatttttttattattgtttatttctatatctattgcaataatatgttttaagacaaaaattggacatatggaagttcttaattcacgagttattcattacaccgaaaataaatttgattggtgacacgatcacggtattactaatttgacatatgaacacattttatcataattgttcacacttaacgagtgctcgaactcgaattaccaaagacatcattggccttaaaaagtgtaaaataaagatgttttaattacgaatccaatgtcatcttttatttttgtatcttgtttttgttggtcgactttgtcatttatttttgttttatcttcattcattgcttataagttaaggcttgtcctccattttttgtcatttgctctcgtgacagcatctcgattcaccgtttttactttttctctaactttctatttttatttatatcattttacttcttcaactttattttttcatttttttgttagtcattcttggattagtgttttctttcattcttggaccatactaatattcagataatacttcatacattgcaaaaaaacaaaaataaataaaccaaaattcataaggtatcataagaaatcaattataagaaaaaacaaaaatcattggacaagacaacagactgaattatcgttttatccttttaaaatgaaaatcaacacattcatacgagatatggtaaggacaatttagtcatttagacacgtgtcgtgcccgcgtcgcaaaagcctataaagaatccatttaccttttctcactgaatctgaaagaaaaagctcgcagag

SEQ ID NO: 8730 - DNA, 3000 bp, Unknown
  misc_feature (1)..( 3000): cDNA_ID_3043275_gDNA_ID_1971869_Annot_ID_176547 3000 nt of promoter + ATG
cccaaatttaaccatccatttatcaggaaaaaaggaaacataaaataaacaatcaaacataagggaaagattctaagtggcaaactcatttttgtttgttccttctttcttttgaggccaaaagagaccagattcatttttggtttcttcaaaggccaaaccttattttcttattttctcagacaaacccttttgccatattacaaaataaaatttattcgtctgagaattatcttgatcccttttggattcgaggttcaagaacattcatgaacttcgagtaaatcaatcatcttcttgtagtaataatccaggaagatacattatcaacacacataaaacagaatgaaaatcaattgcttgttctgttgtatgtcccacagacgatttaacagacgatcatcatcgagacaaagcatcaaagactgcattgatgcaaagaacaatataactacatttgacaacatctcttttaaaacaggtcccattttctaacctttttcattatatgcattctcaaatcccttaaaagcttttctttctaaaagaagcgaggcgtatttgcacatacctgcagatagcagtaggcgaagatacatatccgaggagatagcaaaactcggtaaagggaacatcagtgctcatatttttacattcagagagctttgcgtcgctaccaagaacttcaaccccgataatcagctcggtgaaggcgggtttggaagggtttacaaagggcagatagaaaccccggaacaagtacttataacattctctctcatacaacatcgatccatcatattctgctcagtggtttgattctgattcttgcgtgtttaggttgttgcggttaagcagctagacaggaatggttaccaagggaacagagagtttcttgtggaagtcatgatgttgagtctcttacatcatcaaaaccttgtcaatttggtcggatattgcgcagacggtgatcaacggattcttgtctatgaatacatgcaaaatggctctttagaggatcatcttctaggtaacatatatctaaacaccatcacaacatactttcacttccacacattctaaagatttaccttttttatacttcagaattggcgcggaacaagaagaagccgttggattgggacacaagaatgaaagttgcggcaggagcagctagagggcttgagtatctacacgaaacagcagatcctcctgttatctacagagacttcaaggcctcaaatatattacttgacgaagaattcaacccaaagctttcggatttcggtttagctaaggttggtccgaccggtggagagactcatgtgtcaacgagagtgatgggaacatacggctattgtgcgcctgagtatgctctcacaggacagctcactgtgaaatccgatgtatacagcttcggagtcgtgttcttggagatgatcacaggaagacgagtcattgacacaacaaaaccaactgaagaacagaacttagtcacttgggtacgcaaaagttcttcaatctgaacaaaaccatttgattggttttcttaatttggttttgctaaaatgcgcaggcgagtccattgttcaaagataggagaaagttcacgttaatggcagatccattgcttgaaggaaagtatccaataaaaggattgtatcaagcgcttgcagtagcagcaatgtgtcttcaagaagaagcagcaacgagaccaatgatgagtgatgtagtcactgcgcttgagtacttagccgtgaccaaaaccgaagaagatggacaaactgtagaaggagaagaagaagaagaagaagacgaaagatccaaactttgagcaaatttttttgtttgttttcgtttgtaattttcaaatgatcggttttaggaaatttgataactttacgaattcaccaatgaaaaaagaagattaaatgagagttttcgtgttccccatcgaacattttaaaggatttgctgagaattttgtatctgggtttcaaaaagtttcagacttgactcatcgctgaacaaaaattacagaattaaaaatcccaactttatcggaaaaatgtcttttttttttggtttatgtatttttttttaaaagtgaaatgattaattaaagaagataaaaggggaaaagggtttaagggtttgtcatagagcaatggctaccagctcagctttgtgataaaacgacaaaattggacaacgataaaccctacttttatctctggaagactcaaaattccttcaagctggggagattagcttcacttactacggccatgggggtttctcttcgtcacttgtctccttcctctttctgggtttcgcgtcgtcctcgtgtttcttcttcaattctttcttttcttgtccctcgccgtcgaatcctttgcaccaggttcacagcttttctcatcttatctgttcccttttctcatttttgttcatcgagaattagatttactcattcattagtcaattgctctgttccgtaaagttggttgttagttttatatagtgatgatgattcacgttttgaggttgttgaagaagcaggttaaaaatgtgtgtttgctcaattgctctgtttcgtaagtttgttgttagttatatagtgatgattcgcgttttaagtttgttgaagaagcaggttaaaaatgtgttttgctgcaatttggtttcagtttctcacttagtctaaattgttcctgtgttaaagttatttaggagtctgcttttgattaagcagaagaatgtattttagttgaggtttggttattattctgagtttgaaggtgtttttctttgtgttgatatcattttttggtggttatgatttgcaggaaagtagcaatcataaagggaaatgcgggatattcgactgctactgattgtggtggttctcatgggtttcatcattcaggtcatcaaaggtcatcctctgttgagtttagtggagagtggaaacttaatttgggatctaagacggcgaga

SEQ ID NO: 8731 - DNA, 3000 bp, Unknown
  misc_feature (1)..( 3000): cDNA_ID_2178264_gDNA_ID_1971869_Annot_ID_176552 3000 nt of promoter + ATG
caaattaaatttctttgattaaaattatgtgaaactaaaattattttataatataccacatgtgaaattcttatattactaccaaccaatgtaaattgtgtcacatggttcactgaatagattcgttaggaaaatgatctagaaaagattattgtttgatgtaatcgatgtcaactttcacaataaatgaataaacgaaacaaaatgttttaaaatactaccgcgtctttttaaattataaatctgatgtagactgtagtgctgtttcatgcaaagatatagatagtttttatgacccaaacaaaataatttttaacagactaaactgactcgcaaagtcgtactaaaatattttgcacagttaacaatacaatattcaattggttagtatcgatcttgaaagttaagataactaccccaaatatcgaaccttcttctatggagcatgcatgtcatttttcttgacttgttgtcaattttataaaaatttagcaatgcttacggtttcaattttgtgatagagaagtaaataaatttattcgttattgcaataataatatcaaattttagtaattgtttttggaatttattcatcattgttcccttagtcatttatggacttaaaaaaaaaattatttccgtatttgaacggttatattggtatatatatactttctttttggtggtatgttctttgttccttgattttgaaaccacagatagataatgatataattgtacatatacaaaatatggataattaattttcaaatataattttattgatggaaactagtacatagttaaaacaaaaacaacaagggaatgcaatgagtacttggtcgaatttagaaactatgaagaaaatggaactaggacagaacaaaactcatgaaagagtcaataatcaagatcaacaaaaacaaaagcaaaagttgaaatcaaacaccactaatcaagttaacgaatagcaaagaatacgagcaaattcatcaaaacaaaaatcggaaaagagcttcttaatggtaaagaagaatccgatttcttcgtcttacttcctttcttttgagctccatcaccggtgagttcaacatcatcgtcaaaaccaaattcactccaatatccatgagttttccaaaaattagatttctccatcttaatctctttctcattagctttaactccatcaccgttgacttcaacatcagcaccaactttaattctcctataccatttagttttccaaaaaacaatcttgaatctcacatgagtcttgagatccagcctgaaaaccgccgatccattaggcaaaacagctcgtaaaaccgtctggttgtttagcggccaaacttgaccccacttcttggccttcttcttgtgtccttgatagaacttaggcactgtgtagttagcgactaagacaagatcagatgaattggtcgtggtcgtgttgatggtggagaaagtaaggtggacatcgtcgtagtagattcctttgtctttattcggattgtcacaacgaaccatgaaatttagagtggtattgtctcgtgagcttaggtttttgctgagggcaggaatgtaaaagttttggattgagcatttgggtttcttggcacggagactaagccataagataagagcgccgagacgagttgtgaagatgaacttgaagaagcaggtacaacattttcgaccaagttcttcttctggatctatttttgtcatggttttggtatttttgcctgaaagctgaagaagatcgttatagtttttatgacccaaagaaaatgatatttaatagaccaactgactggcaaagtcataccaaaatatttagcacagttagcgatacaattggttaaatattgaacttgaaagttaagatatcaaccccgaaatattgtacatcgaacctttttctatggagcatgcatgtcatttttgttgacttcttcgtcaattttataaaaatatatcaatggtttacgatttcagttttctgatagtaaattttaaactttcaaattttaaagttaatagaaagtttaataacacgagatatatttatatcgaaatgagttatatggcggatttttttaaaatagataattaaaaatttaaaatatcattgatcagatactttaatatgggtttaatcttcattattttactttgttaacattaccaatattatacatatcaaaacagattgatataatcaaaattatgtgaaatcaaaattatctccctatataccgcaagttaaatcttagtttttgatatcatgaacaaaattatccgtcatatgtatgtaaaagttgtttggccaattcaatctagaagtttccaggtaaattgaacaacttgtcttataaaatattttaaaaactgttaccacataaactgtaaataaaataaaaatcagtaagaaaatttatgtaagaaaaacaaaaaaaaaactgaaaatttactaaattgataatactacatccatattcgctttattcaagaaagctcaaaaactctgaactgaaaacaaagaactagtatccaaattattctggaacccaccgagtaaatttatgaccagagtttgtttcatatcgaaaataatcgaagcggtggttatttagttaggaaacaaatttgctcaaaaaaaaaaaaaaaaaaaagttaagcaacaaatatgaaactcttgtgtccaaaattagcaattgccttaacacacattcttaaatgtctctccgcgtgaccaccaaattaaaccagaggctcatattaagacatcttcttttccaaccatcttcgtttctttgcattaaacttttggattttgatacttttttacagatttttcacattaaaccttattcgttgatcaatcttcgtctttgtttaaaaggcttggttgattcctagtttttttttctctctcgctgccttgcggttccagtaatcacaaggcggtggggaagaagaaaaagattgataacgatg

SEQ ID NO: 8732 - DNA, 3000 bp, Unknown
  misc_feature (1)..( 3000): cDNA_ID_3043263_gDNA_ID_1971869_Annot_ID_176557 3000 nt of promoter + ATG
ccttttttttttaaatagaaacttttaaggtcgatagggtttttaacatttggattgaggtgacccatgtgactagtttcggttccaaaatcttacatgtggattagtaaatttggttcacttgatgattttatctgtggaacttcgtcacaaattttaagacccgtttagaagctaaacatcattcgctgtctttttaatttgcctcctcagttctcaactactttcagttttttttttttttcttttggataaaagttttgagcttttccttcagttttggcatcattggtgcttagatttatgaaaaatgaagatataaaaggggaatcataagtgtttttttttacattagcagaaaaactgttgattaaaatatttaatctcgggatacactgaaattggagatcttttaattagtttttaagatcaaaaagtgggctaatttgttatatagttaacactggccatcattataatctcgaagagaaataacacgaattgtttcttcttctccaaacacgtgttcttcaaattcgctcatattattctcgattcccacaaacagaaaaagaagatactaaaaattataaaatcccgataatagaatcatgaaattgtttccgtttatgggtgttttaattgcgtctaatcggaatctcttgccgttatcgtctgcttatcaggtaacgaaaaacagatgctgttctttactcttttattgatttgggaatccattttcaaagcgttatacgatgttttagggatttatggtgaaatactgagaccatatagaattgaattttatgtgaaattttggtttaggttttgttggatttgttgcttttattataaaaattgaagactcatttttatgaattttcctttcaaagggtaatcaaagaggcactactgatttcatggatcattgtgattgaagttttgagagttggtgaatcagcaagcttctgttacaggttggtttcagcctctttctctgtttgcatttggtatttctcactgacatttaacaagtagacaaaacattgctaagtttgctaaagtaaatgaatatagaagagtgtgaaaccagcaactagaaatgtttttcatatctacactatttttgctattccttgttattttcatatgtccgtccatttctcttgtttcttccacaagcagtgaacattttccacagttgaaagaagttcctttagctcaaattcttgtttggtggtctttacaagtttagactgcttgtagttgtatctctaagatagaatgactatcatctgttgttcatgggtgcatagtggggtttgcagttccatacgagatgaaacagactttttccctttgattccctggaaagtcttcccttttgaatttaaatagacaattttcatcagatgtaagtggacctatgattagccatctaacctaggaactattggtttcatatgctttcatttcttttagctttttcctcatgtttgcacttgagatgcgaatttgtttgagctagtcattgttacacacatacaaactgcattttctgaaagcacacattttggaactcaatttcttcagaaaagttgtttctgttcgttttcttccctgttctgtattaagtatctagatatatgaatggtcacagtgatgaattctaacatctttgtaatgagtgtccaaggatttcctttaaagttagtgcatgttttgattagtatattatttcttatatcataaaactgtcgatatgtgtactgttgacaagagtaaatctttttggactgtctctaaacagacttgcaggcatgctctctagtcaaattatatagtaagttaattatggtatgagactattgtacgttgactgtgtatatgagaaatgttttaatgtagttattcgtggtgtgcgactaaattttactatgctgctagattttgattcatgatatatgactaaatgttatacataactgttattagcagcgagatgagattcttacatatgtccctttgtaattagatgaaaagtgatagaagctattatatataaagagttggtttcaccctttcggttcatctatcctaccctagccgtcacgcgtgaagatcgaattgtgagtcctctccggcgatcgagaaagttttgattcccgatcgcgcaaaagtatctcatatctcgatgatttcatcaactcctgcatttataaatttcccttcagtttcttgatttgttgccttttgattaggcttttgcataattactttaatacaattcagatcctgtgtagatatgtaacacgactgaggaacaatttttttgttttggttacaaatccttgatttcgtgtaggtgcataatgttttctctatttcgatctgtcttcgtaactatcgccttgattattctgatttctgatcaatgtttctaggtactttagattttgtatccttcacaatttgttctttggatcaattcagtgttgatctcgtgtatatggtacatgcagatagaagtactcttctacatgaatgattgtgatgcattttcttttcattttcaaacccttttgcttagttctgatggttgcctcgtgctttttagcagtatttttggtctttaccttgaatggtactaatgcgtttctgtattagtagttagcagttctgtgctcttctacatgcagatagaagtactcttctacatgaacgattgtgatgcatttttctttcattttcaaacccttttgcttagttctgatggttgcctggtgcttcttagcagtatttttggcctttaccttgaatggtactaatgcgtttctgtattagtagttagcagttctgtgctccttcgggatgtagcctgttacagtcatataaatacgcattcatgttgcataaatatctgtgcttgagtcccttttctgtgctaaccgttgtttttgttgatgcagagccttagcaacagaaagcaaacagaaaatg

SEQ ID NO: 8733 - DNA, 3000 bp, Unknown
  misc_feature (1)..( 3000): cDNA_ID_3043271_gDNA_ID_1971869_Annot_ID_176550 3000 nt of promoter + ATG
aatatgcacaagtaaaacccaaaacaaaaaaaaaaacacttctgagattaagaacatatccaagctaaagaaagaagcagaaatacctcatcatgccttgaggcaatagctctttcaggtgaacgcctactactcctgtgactcctatctgacggtgaagtagacctctcatgtcttcctctagagtatctctcatcatctgttcttgtccttctccttttttcagtatcctctctccctgatcgtcttctcttatccccaacttccctatctctttctccttctccttttctctccctatccctatctcttcctatatctctatccctttccctactgtttctcttctccctttctctaccatcatcttctctctctctacttctcccaatttccttctctcctcgagctcttctcagtctcttcgtacgtggtgaaggagacctagaactaggagccattattggagtcagggtcgttttctctcttctttgcctttggaaagatcacaaattgaaaccagggtcagaaggaaaaggcatgtgagctccagataacacagtaaaccctaattcccaaatgcatagaaactagaaatggagcaaaagccctaaaccaaaaaacgtaagctacagatttcaaatactaaattcagaagttccgggcatagtctagggttgcaagaatcgttaagagaaaaaatcgctgcataacgagaaagaaaaattttacctggtggccggaactgtgactacttcggcggagagaagaggagagagtgaataataataatcgcagagataaaaagaatcagagccaaaacgagaagaatcatttatttggcctcttttgcaaataaatggaaactgaggggttcaatatcaaacaaattgtagacggtatggtaaaacttccattagttgacacgtgtcatatcttgtttggtagaaaggatatgtataattagggcagaagccgcttgtaacgtcgtacccttgtacttccttcgagatttttgtttcttcgtcctagtttgcaacaaagattttataattgatcatcaaacaaatcggtgagcctgtaacaaatcgagtgcaccagctttaccaccaactttgataggatagaagacaaatacaagatcatagatatagttgaggtggatagctaaacgacataaaccatcagaagtgacagtgatcttgttctgattgtaacagagtgcaccaggtttaccaccaactttgatcctctcatgaaggaacttgtggagagaaattttcaacttcgaggaacatatgtcctgaaatcccatctgtagttctccttactaccgatttgtagtcgcaactgttggccttgaagcttatgtggaagacagcattcatagactcgagctttagagacgggtcagtatgagtttctcgggtgatgctttggtttgtcgggtgatggctcatcgaatcccaaatcatgtctccttgtttatttgatgtatctttagtttcatgtatatactagtgtacgccaatattatagacgattaaaaactaattcttgtttacgtatgaacaaaacgatatgtactttgtcattattatattttttgtcaaagattgagaatatttatttttttcgcatcatagacacacaaacaaatgttgtctaatgatctaccagccggcttgtatatctaattcaaatatcggtcatgcatcatgcacttcattagtatcttatgttttgcaaaatactggctagactgtcacatatatcagaatcggtcaccgtcaccttcttcgttattgtcatacggtttcactatgacaaagtccaaattaggtcaaattttaagcgaacatacgtagcctcttacgtcatagattgctgatgaaaaagaggcaaattattataacaaccatcaaagattcggtactaactttacaaattcacacaattcgtatctcacaatctaaaagtgcaatatgtcgtacatgttttgtaagctagacaatagtaaaataattatcctgccggactataaaggttcgagaacgtggaccgactatatttatatatcaattagctatttgtggtgttagcctaatgttgccttcatcacgttttctgtttttttgttgaaggattttcaaatagatgaattgactatcatcaccttgtcacgttataaaccatatatattatcgttaaacacttagtagcagttccccacgaattacatgtctccatcattgacaaatttatatttttgtttgtaagaacactttttccttcctcaacaaattcttgtacttaatacagatatatacttataaatgttacatcaaacgctagataacggagaatataagctaaaatgaaattaatatatcttgtttcagcttctatcgaaattattttcattaatggacaatataaaatttgatccttatctactgtttctgtgaatttgtgattatcatcaggcaaatgtatcattaggcaaatgtttttatctaaattaacacttttattggaaaactaccaaaatacatttaggttcacccatcaaaagtactttatgttgttatgttatatattgtgtgctaactaaaaagattacaatttagcaaatctcaagttgatgtgtacatttataatctccactacaacaagaaggtgatccacttctcttgtatatctttatttgttcttgcacgtacataaagaaatcaaactgttcaactgccatttagaatattaaaaccaacaaaataatattataacaagtaaatacttaaacaataataagaacaaagggccaaaatcgtgccaaacctacaacattcctgacctctgcctcccccactatatagaggtcacatttgagagaattaggcaaataaaaatctaagaaccattttaatagcttctcacatctctctattataatatcaaactactcttcaccagccctcttaattatctaagaaagtctca

SEQ ID NO: 8734 - DNA, 3000 bp, Unknown
  misc_feature (1)..( 3000): cDNA_ID_3043281_gDNA_ID_1971869_Annot_ID_176545 3000 nt of promoter + ATG
aaactatgaacaagaattctctgatgtgtccatgccaaacctctgcatcttagtgtctgagattcttgagctaattcaacatattatctacatgaaactaatcacacttacggtgcagttgttatatgatgaaagtagttgatacttatcatgaagggatcgtgtttttttcactttcaggtacaaagatccgtcaccagagtggtcagtcttcagggaagcaagctttggacatggggagcttcagatggtgaattcaacacatgcgctatggacctggcataggaacgatgatgacgaaccaacaaggtctgatgaagtttggttaaactctcttgtgaactccggatgcttgaagaaaaggcctcaagaactcaggaaaatgctcttggaaccttaattatatccataaagtgagaatttcagtaaaatagtccattaaatatagaaatctacaagcttgtaatgttgttagcaatgggactcttaatcacaccattgaagaagattttcaccaactctatagaaatcatagttccaactttaaaattttgtaaacttgcactttgctttgtgttgtttttcccactatttataatcttaaaaaaaaaaatctagaagctaaagtgacatacgttagattttgtcaatgtagatggttcaacgaatgtgacatacaaaacaatgttgaaaactatttccttttgaacattactcacattaggtacaacaactgtcactatcttaaaatgcaatactaaaaaacattcttcatcacattaatataaagttgagatacatataaaattacaaattaattacaattaggccacaaaaatgatggaccgtaagtggaggattagttgtctgaagaccgttgacgaaaaaaggcggaccttttccacgcgctcaccacacaacactttcataaaatcaattcatcgatccatcgtctctatcagatcaattcatcgattgcgatcgctctttcaattttcttcatcaccggtgaaaataatcgaaacccagcacgagaaaaatgcatgatttttgcttcactatcccgtacgggatgcttctcatcggcggaggatttatcgggtacatgaagaaaggaagtataacatctttcgccggaggtgcaggcactggattattactcattctcgctggttatatcagtctcaaagcttttgagaagaagaagaattccactattgctatggttcttcagacaggtttttttcttgcaaatttctttcctttttagcgatctgggtttatatgtctttaacagatatttatgtttaggaagatttattcgtatgattccgttagatgtccatagggaagactttcaattacaagatgtgaatagcttttagtgacttatcacttgagccaaggaattgtttcattttgttttcaatttgttatggttcaatgtgttggatcatgaacttagcttgagagttgatgataggttatgttataaggttaaggatcttattggaccactaacgatctggatctgaataagtgatttgtgtgatgatgctaaacttgctattcaaagataaaaaaaaattaatattttggttgtgtttggatcttcaattgcagcagtatttgaattggtttgctaattttttccactaatgtaatagtgtctctcttggacaagatgctgttttactgcagatgaacattcaatttgagttgttagatgttgtagttgagtagctgtttttaattagtgttcttgccattgattgacaatagaaccaacctcaaagatataacaagcttgcaaaatcgattttcattatctatggtgactgaaactcatctgaatgtttctttttttttcgatacagtcatcgcagctgctctcacactagtcatgggacagcgttacttgctgactggaaagattatgccggctggtttggttgctgggatcaggtaaaaatccttcaacactggctggctagtatctttgtttgcatcaagatttggtatttttaagtttttacaccattgacttaactctagaaccatatctgtattgcagtgctctcatgacctgtttttacgtatacaagatcgctactggtggcaataaatttccagcaaaagctgaatgatggttctgctacatgcagatgatactatccgttgttgaatttgtcgattagaattctttttggtgtacacaatgcggttgtcataacgccttaatagcttgtattagtcaaagaactgcatatggtcttgtgttttcttgtcatcgtgtttttgtaaccacaaactgttttgagctatactactatatatattgagatatatctgccgtttcgatacacacttgggatctggggatgagcacatcgtaaaacaaaatagaagttgatcctcaaaacttctttgtaaccttgtgtcatcacaacaaaaaatcttcaatgtgtttgttctctccttaaagtatatcttgattcatgcagtaacaaaggcaaaactcttttgcaagagtatagaaaccagactcaagctgtgcgatggtgattcttttggagaagttggatttgtgctctgatgtaaagggaaacttaagctaaaaggtccatcaatggaggtgacacatagttttagaaaatgtgcttttctcatgctagaaatgttatggagacccaaaaatgcttttcggaaaaaattctcatgctagtagctaggctctacttaacgaggtgacagctaaaataagttctttttattccattttcagaatagtgacattcttctcacaaatatagaaaaactacaattaatgctactgcagagtctgattacgttttaagctaatttttccatttttaggacgtggtagattgtgtagattattgctaaacagctcatgagttcaataattcacttattcttcactccatcttcagcaaaaaaaaaaaaagtaagaagaaacactgaaagctctccactacc

SEQ ID NO: 8735 - DNA, 3000 bp, Unknown
  misc_feature (1)..( 3000): cDNA_ID_1715025_gDNA_ID_1971869_Annot_ID_176542 3000 nt of promoter + ATG
attaaatccaataagtgtaacagaatctgctgatcttaaaagattatctcacggaaaaagattaattcaaccaagcactattttactaactacttagacctattgtggcaataaaggggagatacacataacagatggatgtcaagcaataatccttacctttaaccagctgtattgatctgagtaccgatcataatctgtgtatgagccaagcatgatcgcatggacaccagcaacctcaaaggaataataaagatttgaatttgacccactttcctcatacggcatcttccacctcgagttgaaagacacaaattcatcaactataaaaggaatactctctttctcatggtttccctgtgtcaccatccacggccttacacttgccagaggctgaactagttccccaaacgtgtcccacttatgctgcatatagtccgcatacgatagatcccctggaagtagatgcacagcatatttgcattgatcaatatgatctagagtcgacttagtccaaccggtttgtccaagatcccccgccactgcaaaagtaatcgggaactgagctggtggtgttttcaaatggaactcaggtccttctccaccacaacggtaataataaacagtatccgcttccaatggcccaatgacggtatgatgtatcttccctgatctatacattatatagctgtaggaggtgctttctccttgaccaagataagagtatttccctggcgatgttccatattcaacaaatgaaggagacgatttgtcattcgtaacccaagtaactcgcatatgtttatctccagccaatgagatatgcacctgcaggtaagaatctcagtataagaaacaggaccaaatgaatctaaaaacagaacctttgatgttcattatcaagtatcaactgtatcatgcactccatagctacaatttcactcaagcatcaatgttttcttcagaatgaaacaacacaattcatctccattgttataaataatcatttaggaaaaggccatttttacccaaagtagtgattagtgaagattactaatggcgttgatcaaaactacacagtcattagatttatccattagaaaactagtgttgagaagacttcgggacactagcaaatgggattctctggagtaagcataaacccaaaaatcggatctttcggagaaaacaaacagagacccacatgcagttacaagaatagaaagatttcagacaattaaaaacatgattttttcggaacaagaatcatcaaaacagaggagagcttaaggaattctaatttatacctgctcgggtacagaagaggacttttgtttccatggaaactgcaaggtttcacgaggttttggtcggacgtaatcatctgcggccgcagaagtaaagattattgacactgataatgttacgagtagcaaaatcccccatttttccatctctgcgagctttttctttcagattcagtgagaaaaggtaaatggattctttataggcttttgcgacgcgggcacgacacgtgtctaaatgactaaattgtccttaccatatctcgtatgaatgtgttgattttcattttaaaaggataaaacgataattcagtctgttgtcttgtccaatgatttttgttttttcttataattgatttcttatgataccttatgaattttggtttatttatttttgtttttttgcaatgtatgaagtattatctgaatattagtatggtccaagaatgaaagaaaacactaatccaagaatgactaacaaaaaaatgaaaaaataaagttgaagaagtaaaatgatataaataaaaatagaaagttagagaaaaagtaaaaacggtgaatcgagatgctgtcacgagagcaaatgacaaaaaatggaggacaagccttaacttataagcaatgaatgaagataaaacaaaaataaatgacaaagtcgaccaacaaaaacaagatacaaaaataaaagatgacattggattcgtaattaaaacatctttattttacactttttaaggccaatgatgtctttggtaattcgagttcgagcactcgttaagtgtgaacaattatgataaaatgtgttcatatgtcaaattagtaataccgtgatcgtgtcaccaatcaaatttattttcggtgtaatgaataactcgtgaattaagaacttccatatgtccaatttttgtcttaaaacatattattgcaatagatatagaaataaacaataataaaaaaattgtaatcgatatgtataatgtatttatacattacaaaatatttaacatgattttgaaattttgtaaataattaattgaaattagtatttgtaatcgaataataaaagtgttgtcaatatgtcatcatcatcagaatttataaatccgaataaaaaaaaaagattagttgattatacaattaagaacaacattagagtagatggatgcatacatttcgcattagaggaagatcagaaatggagaaggaaaatagtgaatctaatgattcattagcgaataaggcttctctaaggaaagcatcgtcaaattcacttcccaattgtgcatctttctcactacatggcgcatatatctgcttatgtaataatttgttttctaatgttctgtatactgactttgtaatttcagtttgatatcaatgaaattatttgccgggaaaaaaaaaaaagaagaccgttcaccaaattaaattatgggctttatccaactttgaaatttcacggcccattctgattttttttctttccaaaataattattttctgcggcggtaaatatcccgacgaaaattaatacatgagaaattgagaatcacttgaaatttttttaaaatcatggattgtgcgctaggcggggaatttttacgaaatctcaagcttcttcggcacaccaaggcgccaattccatgtctttgaagtctcttcatctcctagtccaaaccctaaattcattctcatg

SEQ ID NO: 8736 - DNA, 3000 bp, Unknown
  misc_feature (1)..( 3000): cDNA_ID_2178419_gDNA_ID_1971870_Annot_ID_176590 3000 nt of promoter + ATG
taatctcctcaaattcatctgggcttttcttatttcaaatcagccaatacttatttttctctcttctttcaattgaggttaaaccctagatcttctcatttttcaattagagatttcctcaattcaattataatgctaaagatttagggtttacaattctagtgctaaagatttagggttaactcgcaggtacgattataccaactttttaaataacgaaagttttaataggcaactaaaattaactaaggtatttttcttccaaattaaatactagaggtattaaacggccaaattaaaaataaatggcggtttttttgggttttttcccaataaaaaaacagagacttctacttgccacaaataaatccaaaaagcaagttttgataatcttaaattttcaaaaccaagctgtggattgatgattcctttgtagagataacaagctgcaggttatatactcaagcttaaaatcgcaattccaagctgaggtagcaccaacgtaacactaaatttcgaacctccacagagaattcaagtgatttttctctgttctcaaaagaaacacgtccaagacacgcaaattctgtcacagtgagtttgacgtttaacgatcgcaaccagtaaagtcaatgtacatactcccaagcttcccacgtttttgaagtttcaattccaaaccgttaatgtttatagaacaaaacgaattcaaagggttaagagggtaggagctaaaattagcaaacactacataaaggcaattgaaatcgaaatcacaaacattaaggtaagaacgtgagaggagtcgagttatgaactcttttcttaaccctttgaatcacccgtagtgtgacggtttctgtgtgattcaaggatcccaggatataacctttataaacttatttcgcatcactcgaaacgcagctctagcgaacatagttattacgatactctcgagacttacttttgagagagagagattgttagagcttttgctgtttgtgtgtaacgatcaaatacttcactatgtctctcaaagacttgaagagttggtttttatagaaatttagattactaggttttgaatttgtttttcaacaaactcaaccgacatcaatcggaagtctaggagtagtggacttgactctcaacgactcctattctcatggtctttgaagaagcgaccagcgagtctctaggaacttgaaacagaacgacttgttttgtcacgttcactatttgacccgacatctccggagctccaccacgaactggacctaaccattaaggcccatttcttattcacacaacttgattatactaaacccaattgggattagtaaaaaatcagcccaacaacttgcgtatcgattttacattgaagccaccaaagacgagttcccaaagcaagaaatcgatggtagtatgttgaaaatatggaccaaacggtatatacatataaccattcaatttcctatgtatctcacggattgcaagttttctgaatatttcaatttgcagcaatactttgagaacagattgaggtatcttgcagtgcagaagtaaaagggacagaatccattgccaagtatactactttaagcaaagaagagtctgttgaagatgacgaagtttctctagccggtatgatacacccatccatgaagtttgttgtactgaaaaaaaagtttatatgttcaatgtttttttgaattttggtaggacgaataatgagcaagagatcttcctctgacaagcttttcttctatgatctacataatcgtggttctaagatccaagttatgactgatgcgaggtgactaattggttttaattagagagatagttgttcttttttgttttttatatatgtagtttaactagagtttttttcccttgtgatgcgtcagtacttaacattagcatgttaagcgtggagatatcgttggtgtcactggatttccaggttcctatattttctgattacgacatattattctgtatctttatctgaacacatcactacaagaaatatgagtttcggtagcaggtcgttgtagcacgaattcacgaactgctactaaagtgccaaaatcgtattgccaagtatttcgtagcactatattaccgctagtatatagtttactttaagcgcgaacataaatcagtattatagcgggtaaaggtgtattttggaggcaaaataattgggcttttcccccaaaacaaaaaagtgtcaatttcatatactaaattcatctcttttacacttaggaaaaaaaaaaaaaaaaaagaggtgaaatttgtgttgactgaatctcgattctcaacacctccattcgatccgtcgctctccgcctccgtctccattcgctccgtctctctccgcctccgtctccattcgctccgtctctctccgcctccgtctctctccgcccccgtctctctccgcgtccgtatctctctgcctccgtctctctccgcctccgtctctctccgcctccgtctctctccgcccccgtctctctctgtttccgtctctcgccgcctctgtctccctccgcctctgtctctctccacctctgtctctctccacctccgtctccctccgcctccgtctctctctctgtctctgtaacaaccctaaaatctctcgaacccaactgatctcatacacctgaaaggtataaaacatccagttaatgtatttgagttcttgagtatttacaagtatttgatttttgaccgttttaaacattgatcacatatcacagccggatcttctgcctgcatcttctgcctgttggcatcagaacacagaggctagttctcacaatgaaattcgtatttgattgatttgtttaagatttgactgatgaattggttgtttgctatttggttttaatgaactgttgctgtgaatgtgaaaatatgaatatatatttttgtttggtgttcttatgggtctgtttttttttttatgggtaagcacaaataatg

SEQ ID NO: 8737 - DNA, 3000 bp, Unknown
  misc_feature (1)..( 3000): cDNA_ID_3043333_gDNA_ID_1971871_Annot_ID_176600 3000 nt of promoter + ATG
agtaggggctaaaactcttaactaacattacaaatataattgggaaaacatataacctatttatttccttagtggattagtcctaaaagatcattaaacctaacccaagtcgttggtgctagttatagtttggtaactactttctgtattcaatctgaagagagtattaaaatgcactgtcgaaaccgaccagtctagtccaataagacttgaccaggagggttttcttccttgtcgggtctaactcatgtaacaaaacttttacaaattctgaacttaaaatgatccttcacatttaaaccaacaataactgaagttactcttaaacatttagcatgacccttcccctttgtgttggtaaaatcgctataaaaaatcttgtgatgtatagaccaaaactactagttagtgaaaaatgacaagaatagaattgcacttgtcatgtgcttaagaatttgccgtttccttaaagaaacttgcagacaaacaaatgacttagctgtaagaattaatctcatacgtacccttaagccccacaaaagggtaacacaaaagtcaatagaactgatcaataaagatgtataaatgcatgggtaaaatagtaaacttaccgactaatttctgtaaataacgcttacccgttaccaccaatcgtggtcctcttctgctcgtacacactctttttatataatctctttctttcacataaagagaaagcggaataaaaagtgttcaagagctcataacatcaagaaaaagtatatacattcttctgtatatctctgagaaatattatgattgttgtctgacattgaactttttaaaaagaaaaaaatcataaacttctctctgttttgccagaatcttatattataaagtatattctattcattacagatctgctcttggatttcggattctcctgcaaacgtaaagacgaaggtgttttatctcttcactgcaaaaaaaactcttgaattttatggttttctatagagctgaaatagtaaacgagtcttgacaaaaaaaaaagttcgttttcttttctaatgtttttgtggtagcggaattttagtctttagcctctatattaaataagttttaatctaggcgattttttttttttttttcagttcacattctcattgtttgtgctttgaatcggtgaaagatgattcaaatggatggtggagataggctgagagtgactttattagatcgtatgtcaacggttgagagtagccggagctgtttaactcttgaagctattctaatggctgataaaaacagaacctcgccgcagattctctcaccaccgccgtcgaggagccaatctaaccggtcacttgttgaagtcatgcaaagagagcaccgacacagtagagataaaaccgcttggaaaagtctccgtgaaaagctccgtcttaaacgtaacggttctgtttggatctcgtctaattctatcccgagtttggatacgcctattcctaaccgggataacgttagccaccaacttggtttcctcctttctaactctggaaatgtaacagaggaagcttcgtcggtggagggaaggattcggttaggagctgtgttggcagaggagagagcattatcggctagagaagaggaaacgccggcggagagggaagtggagccggcgaggatgtcattgatggagttgttggaagagaatgaagggcaaatgagttttgtaagtgtcgacggagaggcggaggaggaggtggcggcagtgacggcggcggagataagttgttgtgtgtgtatggttagaagcaaaggagctgcgtttattccgtgtggtcatacgttttgtaggttgtgttctagagagctttgggttcaaagaggaaactgtcctctctgtaataccacaattttagaagttcttgatcttttttagacttttcagtttaattatcttaatttatcataatcaggttgtttcctttgttgttgtaatgtgtcgttgaatatttgatgagtaatccttttgtagaaaattagtttccctcttagctccatggaatcctagtttgtttatgttatttggagtaaacacataaattagatcaatcaaactattatcattaatcagcaacacacaatgttcgaatggttgaaactgttgaggtgacaaatccgtttgtgaattgcaccgtttttatttaccattcataaattataatttatagcgataaggaccgaacaaaataattttttcatcgcggaccaagtataaactatttttacttaagattaaatttatcattgtccgtttcaaaattagagtgatctaatctgctaaatggtaatgatttaatccggttcgctcgcaacatgcattcaaaacttaagtggttagtacttgttgtatgatttgaatggaaaacttgaccaaacccatctatattgcgtataaaatatgtcaaatcaaattaaaatgaaaaaaaagttggcatagtaaaacaaaaggttgatggttgaaccataaattcttaatttaatttggcttgtcactgatgtgtttgatttgaacaagaacaataagtggtcgggctagaggtgaacaatcctccaactacacttatggttacggcaaacacctaactggtggaaagcgtcactggttaactaactcttacctatcttttcaatttgtactttgctttggttaatttagataaccaccggtgttaaaccaaaccgattagcatccggttggctagcccaaaactaggcccataacgagaagtcatgggcttgctttcattagtcaagttttcatttatcttcttaccatttattttccaagaaaataaaaaacagaaaaaattcgtggaaacgccattaacgagatctagcacaaactcgtagtgtggtgtagaagaagacaaaagcaaggagcttcataataaaaccctagagatatttgtttctccaatttcaaaagacgagacgtgaagaagacgatcgaag

SEQ ID NO: 8738 - DNA, 3000 bp, Unknown
  misc_feature (1)..( 3000): cDNA_ID_2178493_gDNA_ID_1971872_Annot_ID_176613 3000 nt of promoter + ATG
atgcacacaaacctttaatgtctctgtggatctttccctcattatgcagatattcaacagcatgaagcaaatcgcgtgtgatacaagcgattgatgtttcatccaacggattattagattgaagctgcaaaagatatatcagtttaaggattataagttgcatcaaagagaatataagtgcaggacaagatctccaccatgcgtgcatgatcacacacaaagttatacttccaaattccaagagttctgagctacaaagtagtgagttaacatacaagatcagcaacagagccaccggccatatattccatgatgatccacaacttggtctgatgaaggtaagaaccatagtattcggtgatatatgggcaacgacattgtgacaatactgaaatttcctggggtcaacaacaaaaactgagcatgacaatcgccacacaaaaatataaagcacagaaataaacgtcaataagaaataccttctgaatatcttcgatctcatcttctctgccagatatcaagtaaaaaggttagttagaaaattactgagcctgatggtattctcaaccaaaaatcctattcgtatagtggaaagccaaggaaaggttactgtcccttagcctttgagaaccgtgaacaagtaacattcatagaatcataattgtagttactcaacttataagacgataaacgttatacaactcaaaatcttaagaggagaattgcatatatgatgagaaaatactaaaataaaaaatatactcacgattcttccaggtcgattactttaatggcaacttctttattgaggtccttatcaaacctgataagcagcagcagtagttgttcagaatacaggtaagatagacctcttatacaaatgttcagaatagcataattctaatcagatatattatatacgagtataatggacgaacagaaaataaaaaaaagtcaagagtgtgataaatacttacgctttatagacatcaccaaaagagcctcttccaatcaactcaatctggctaaatctggctccagctgcctcttgtaaacccgcaacatcgtccatctccacatacaaggaaaaaccaccttctctcccgctccaaccactatattacgaagataacaacagagtcagaacaaactataatactttttaccactccctccccttttcattacatctaaactctcccctcataaataagtacccagaagaaagcaccaaacttaaactaaatcccttatactcaaagcaaacaaaatcagcaaaaaagttaggtggattggagcaagtgacagctgaccaataaaaatttgcaagtagccgagaatattcgtcactctaggacactgaagagaaacatcttcactgatgtttttctcccgttcgatcaaaatcagacttaaacgaaaataatcataatcaaattctctaaagttcaagggatcgatccaaattacctggtaattcgacagagaagacgaaatgggatactacagatctctctgttgctctttcctttcgtttgctatgtcattttgccagaaagcactctctcgagcaccaaagagatcgacagaaactgtttgggagatgaagtcgaatttatttttcatgttgtttttccttccaagtttcattatggaaaccatttgttacgaagaacaacccaacccaactgttaaaagcactaaaagcccaataagctttgaagctcatttaacggcccatatactaggaagtagaactagaaaccaaccattgtttcggcctttgcagcaattaacatgatctcatattcgactttctttacccacaaattgtttttctttttcctaataaacggtgggtcccgcaaaagaaaaattgtaagtaaagaacagagccggtcaatgcggagctaagactcgtcagggtttcagactgatgcaatccagaccaactctctgttactcctgtcctatttttttaagtttacgtcactcacacttctcactcgccaccctttggtgtattcatcagacgattttgtttcttcttcctggtttgtctctgtgtttctatgcgtagtttatacgcgccacgaggtcaaaaccagacgctgggtcatggttgatgacaaagccactcgagtcttacacacggcacgtgcacacgtgactcctaaatctcttcttcctatatattctctttgtcgtgcccccttaatttgcgtgcgtgtcacacccgtagtaatatgaatcttggtcctaaaccgaatcccaagtttgacgacaactaaataaaagcctttttcttcttaagaaaaaacactttcacatttcatggttttaattgtatcactagagttatatataatactaaaactaaaagactgtgttttttagtggataaaaatgtcgactgactaattatgtcattgtaattgtatctttaatcataacaacaacagtttatccactcgaaaccatatgattatttctctttcagaaaagcaatatgaagtatagaaaatcaatggttgataattggattccattcaaacaaatataaagcgaactaaaatgattttttcaggaagattttcaagtatctttgactttcttggcctaagagataaaaaacttttacatgcaaaaaactttaaccttgtgttcaattggttctctgataattaattatatattacttattgttaactataccaaaccccaagaaattcgtatccttgccacaagattgtaagattttatcaaaaaagtaataagaactaaaatagcatattattgtgtagacaaacagtaaatgttggtttggtaatcatataattagtctaaattagaaaaaaaaattataaacattgaaaataaaagaaatttagaacataaaagagtccatgagaagcttgagcaaggaaggcagcaaagaaaacctagaaggccaaaactagaggagaaacccatataacacacaccgacatattcatatag

SEQ ID NO: 8739 - DNA, 3000 bp, Unknown
  misc_feature (1)..( 3000): cDNA_ID_2178537_gDNA_ID_1971872_Annot_ID_176626 3000 nt of promoter + ATG
tgttggaaaaaaaatgcaggaattattcaaaaatttccgtatttattaaagtatcttgaaaatgttttgatgataaaaatgaaacatttagtttaaataaatttacatgtcctgatatatattaaaattctattttgaaaagtacaaaaccatatcttcatatcttgtcggatagatggtttgtaatccgccgacattgcaacttaaatttaaatagaaattattaaactaaatagaatgttttaacgataaaaatgaaacatctagtttaaaataaatttacgcgtcacgatatatatcaaaactacatttcgaaaaggacaaaaccgtatctctgtatcttgtcagatagatggtttatacttcgacaacatcacgacacaaaaaattaaatgtaagttataatgccaaactagcacaattgacacatttgaactagccatttggaaaattccgttatttgatacgagctataatttatgagaatccgacaaaaacgatttcattaaaaaagaattatagaatatagtttatagtccgaaaacatagcgacacgtaaaattaaatggaagttataacttcaaactaacacaattaacatatttgaatcagccactgaaataattcgttatctaaatgcgaactactccctccgtcccataaagataaattttttaggaaaaatatttgtcccacaaagatagaagttttatatttccaatgcaaatttttaaactgttttcccgttttacccttagataaatatttattattatttttaaagtatattaagaggttaaaattgtctttatacaatatttcttaaagaatgtgaaatttaaaaaaaattcatcttagtgggacggagagagtataatttatgagagtccgaaccgtttttcactaaaaattaaattatagaacaaaaaaagggcacatttctcttttgtatacatacatattactttttgactttgaaggatttttttttccacagattttgaaggatattatgacctaacatttaagcatgtatatgtcccgccacactgtcttttgaaaaagaaagggattgaaagtctagtttgttgggcttcagtcgacgtcaagaaatacactgttaaagcccatcaaatctcaacagtgaccgatctcgtgatagaacaaagttacccagagtcactgaaagcccatcaaatctcaacagtgatcgatctcgtgaccactccacgcgcttgttggcaactgtcaacacgtaattagcgcaacatacaataactttaagattataaagtcgtattcgaatgccaataatattcaagctactcatgtgtatgaaaccaaagatttctcgagactcctgctgtggacctcacttaaaataattgaaagcaacgattctcgtataataataattttcaaattttacgaatttctatgactatgactatattgtcttttcgttaaataaaaaaaaaatcgtctttaactctttacaatttttgttttaaaagattcgagtgaaaatacagttacattaccataaattcgtcaagagagcatctttttaagaaatgtaataaattatggtaagtgtatgtaataaagaagtatgttgatgttgctatcaacattaccatacgtgtctgttactatactagccccaatgactacgcaatagatatgtttttttcgaataaggacaagagctcgtaatcagctacacgcacgtccacatatatacttcaatttcatccattggatctgattatgattacgttttaaccattggatttattaatcatacaggtcttaacataaacgagaagtaggtaataaatactagaagctaccccagtatcttaaaactctgaaaacgtgtcagccaaacggtttctttttaacacttcgtgtaattaattaatgggattgaaaacttacttattaaaaatcgttatagattccagaaataaaggaacagagagacacacacaagataaaaaaaaaagtaacgaaattgagagctgaatgaaaccaaagatttggaatttttctttgtatagtttttccacgaatcggagtatcacacacggtcttggaattttccagcttaatttctaagatttaaaatcgtaatttttatttggaatttcactgtctcttcatgttgtctatataacttttactcggaaacaggagtgtcccgtgttcttgagcacaaacaaagtagcagaacaaagcatatacaaaagcttcattgcctcgagattaaacagcatcaagacaacatccaaaaattacccaggtttcttcattttcttaatatatcgtttttgtttctggatctcctttctaaatctgtagattcaggcgtgtgtagatttagtttttttgttattgtttggatgagtaaagtatgttctacaatgcactagatctaaatctcttcgagattctgatggtgtgttggtgttgtattaaattgattttggggataatctacgacaagggtttcttttaatgttccttaggaaaatggtaatgtaacgtttaaagggttttaagagttgcttaatatagctgttgagatgtctgattgattatgaatcccgatccaagagtttttttatgaatagaagagccatgtcgttcttgattgaattaatcttaatcatactgtttcgtaattcttaaactttgagcttgatgttgcgtgagaatctgggaactttaaatgtgtcggctgggttctctagtttgcttcttctttctgtatttggctctgagaaacttactagagctctaacatttgtgcttgctgataggtttttgtgtttgaaactcgaagattgttgcggattcctgaaagattaaggcttttagctccaagtttccaagagtgctgtgaatcagctcccactctgtctctgcatattgcaagacaccggttttgtttcagaagtttgtttcttcttgtctcatgatcactagttttcagca

SEQ ID NO: 8740 - DNA, 3000 bp, Unknown
  misc_feature (1)..( 3000): cDNA_ID_2178550_gDNA_ID_1971872_Annot_ID_176629 3000 nt of promoter + ATG
actaaataaagatttggctccggttaccagtctctgagacaatacctaaactggattggaccggtttaggtttagctgttcttggcgctgtttctcgaacgaccaactcaaatgtgccatgatactagcaaaaccggtggaccgtggacatgttttcaagaaaaaacttaagagcgatctccataacaaaactaaatgtcagaccaacatgtctccaatgcgatcatatttgacagctaagatgttgggttttgagaatgccattgtcggttttgttgagactatccaggcatggtttcgaagttaaatttgagagaagaattggtgtcaaaaagcaagattacagagttttgtgaatcgtcatttcgtcactgtaagacatcgagtttgaaattgttttacggcagaacaattatttcattcgaagcgtcatttcaataacgccaagtgggtgcgttacaaacgccaccagagtctccaacaaaattgacctatctagtgtgtttatctatccgattggggataaaaaaacgatattcttgattattgaagtcgaataataatcgattctactacttgtaattcgtgtcccctatcttaaatgaaacatttgtttaattcatatttcgtgtataaatctaagacattccacgtttataatcttctgcatgggaagatatattttatattttattccgtgaagaaaacaaacaaagctaaattatcctccgtttatttaaatataaaccgttttcattgcgtggatgcaataatttgctccttttattttatcatcttcaatcgatagaaacatgtatgtatccaactatccatgacaaatacaataagacgacgtctagagctactgatgttgtatagagcttaatacaatctcctaccttgcaaatcatgcaaatccagttactaaaaaaaaagaatttggaaaggaagtttattttattgaaaacctctgaattattcagactgattacacaaatatgaaaatacaatgcagagtaagccacaggtcggcttattttattcataccttaattattcactctacaacaattacaaaaacaaagcaaacgatacctagccaaactgaaccgaaccgaaccggtttacttagttttcaaacgaccagctccaaacatcgtgacgctcaccggcacgtcccatggaaccagcaaaaccagcgtacatgttttgaagaagaacatcattgagtactctcgaaccttggatcaaaggcctcttcggtttcttaacgttttcaggggcgatggtaatggtattcctagagtctttgcttctgaactcgatccaagccttgaacctctctccactgctaagattcacatctttaaacgaccaaacttttctttttccgactaatgtctgaacccaataaccagctttctcagcgacaagagaagtcatcgagttgatgttgattccgacatggttaccactaatgtcattagactcattgttcttaaacgtgtcgaattcgataaatatgaggttgttttctgactttccatcgttggttttgttgaggattccgagatatcctccgccggaagcgccggagttatcagcggctgggacaatgacgaaggcaaggccttgaccagaattaggtttggtgcgaggagtgatggagaaagtgaaagaagttttaaaatcaaaaggagaagaagtgtttgaagatttgaattggattggattgatgtaaagaccctgaccatgagagaatggggtttcgtctcgggtcatggaaagagctccggatcggcttacgccatcagaggaaggaccaagctcagcgtctccaaggaataacaagttgctgccatcgaaggaatcgaagttgaatttgacggcaaaagctgcattagctaagaacagagcaagaaaacagagtttgtgaatctgcattgtgtttcttttgttgttgtttgtgattcaagtgtggagaagattgatgatgaaaatatttggaggttgataatatgtttatataagagttaacataagccatcgagcttgaatattcaaaatctatgattcgaaaaagtggtcaaataaacaatgccaagtggatgcgttggagacgccaccacaaggggcttagcagtgaaatggacccacccagatgtctttcaatgaacaaaatcttatccttttgaaaaaatattataatggattcgagtaataataattggttgattatattatgtgtttcttgtccccttctctacgaaacattgtgaattttaatgtctcgtgtacaaaaaaacacattgacaagcttagttgatatcacgaactcgtttttggatgcaaaaaagttactctgttttatgactttatcatctcaaattattaaataggtatatttttaaataccaaataaataaaatttacattttcttgtgctacgatacgacggcgggaacgatcgcacctttcaatggtatgattagtgggccgggccttttatagcccaaatacctagcccataactcaactcgggggtttaatgtaatttatattgttaataaacttcgtccctctcattgcgtcaccgagattctcaccggacctctgcttattaaatcttcgtctgtaaatccatttaaaggttattattttgtttctgagttacttcgtctcgccctcttgttaagatgctgcaaaaatgaattaaagaatcgttttacacttttgttggtgttgtggttgccttcgttattgcatcgtaggaacgagagattttgtgaattaggttttagggtttcggaattcagggttttaaccatttagggtttatcagaattgttaatttctataatcgtttctctgaaattggatgaaatcattaatcgtatcaatattgaaaaatttgggaattcaataatcactctatagaatagaagctgaaacgatggtgaaaggtttagtatgatgttggtacatacatacaacgaaaac

SEQ ID NO: 8741 - DNA, 3000 bp, Unknown
  misc_feature (1)..( 3000): cDNA_ID_2178556_gDNA_ID_1971872_Annot_ID_176631 3000 nt of promoter + ATG
cttgacatcacattacataacaaaaacaagtctataacaactttaacagtcaatttctagtgatcagaaacatgaaacgttagaaagtgatcgccgaaacgaatgacgatccttcaaagagaacatacacaaataaaaaacataatgcaagtgagccaacaaaacaaaagaccccaatcacacatcagcaaaatcaacgatgatgactcactaaaaccaataaatcaacaaagacctcaaaacccagattgatgatcacacaatcacacaatccccaaaatcaattttaacttcaaattaggtaaatcagtgaatttaagacacagttaaacagaattaccctctagagattaaaatccgatcaaattcaattcaattaggtaaagtaataacctttgttggcgttcgaattctcgagcaagaagcggcaggaggagtagcgatctccactacgttgggctccattgaacgatcccaaactcaaagaactaaaaacggaaaacgagataattttccagaagaagaagaagaaatcgatcaaagaaaccttggcgccgtaatatataccaacacacagtgagattgcgcaaaggcttttctctcttaacacttaaaaccaattcctctttctctctattaatcctaaatcttaataaattaaagacctaaattaaaacagtgatgattaatgaaaattttccaatttgtgcgtttttattcaacaagtcaatacggaaagtctacgcatatggggcccactttttacattgacggttgcgattgaagtttatattggaaattattatttaacggtgatgatgaaggtactactagtactagtgtggtctgctgctgtagacgaaatagaccgagcttaaacaacaaggttaggtgatttcgaccaaggctatgattttagaaccgttcgatgtgagataaacaagttattgggttaatccaacggttgggaactatttttttggttccgttttttttttttatagtaacagaataatcatagcaaatctaatgagaagatataattgagttgttttttaagttataaagaatacactgatattttttctaaagaagtacgatgaatctgactagtatcattgattaaattataaatttattttaaataaaaagaccagtaaatgaatgatcaatcaatgtaaaaaaagatgtaatagtgctattatcaatgatcatcaatgttatagtgctattattatttgtgttttggcccattatcttattcttactttcagctattaatagattaagtttgttaataacaacaaaaaaaaagatgaagtttgtttagatatataaaaagaaaagttgaatacagtaagtaataaaaatgtattaatttaaatttaaaataattaaactggtgtgacatactgacatatgtcgttattgatttttttacaaaatttatctctttttttttgtttgaaaagagatttttttaaaaaaattagaaaagagatttttttaaaacaaaagaaaaaaggagagagagagagagatccatgctggtcttattttgggcctatgtacattatttcttatgttatgggcttttacaaatgggcatcatcagtaaaaataaacaaaagaaacaaacatgataacataacataagttaaaagaagaaaacaaacaaacaaaagaaacagtcgaactttttgatcgaaaaataaacatgagatagtcatcagtcatcacaggctttgtaatctactgtagttgaggataatgaagttgtttgttttattaagtcactaatttctgaaacatatgctctgctaattttcaaattagagaaccaaattaataaaagttgaaagagacagaaagccatctttttggtctttgcaagttagtggatagatttttattcacaaaacgacatgcatttctttgctcattcttcttgggacatattcgtcatttcgtgactgaaaaaatgatgtttatgtaagaaatgccgaggacattaatatttcagaattcagacaatgtacacaaacgcaagtgaatattataaggataatctaagtgaaagagtttaaaatggaacagaatggtttttagttatctacaatctttcctcaatgattaaaaaaaaatgatttcgatataatcttcttctttttcttttttggggaaacaagatatatcttacgaaacaaaaatagtcatgcatcaaataatgttagttctcccataaaatattgtatttgaacttagattagataaatcaacttttattcttctaatgattgtatttggattctattggaaataagcttaatcatcagtaggacactagtcatatttcatatttgggaaaaaggatatagagcactacattcaaatcatatccttttggaatctttgagtaatcatgagtttcgcaaagttaaaattaccccgaatcataggagtatagatttaaaattgatctattataaaaacaaagatcttgttcaaaactttaaatcttgttcacgagtacgtcacaattttgtctgggaggcaacgactttaaattgtcacctatgatttgaggagcacgcctctatttaaatatttcaactagattatttatactaatagtaattccaactacatatgctaaaattcatatattttgatttcagttgttaatcaactatattccaaatttgttatataaaaaaagagttgtaatggattactacaaaaaaagggaagaataacgaatatagtgggaaaaaaggagtgaaatggacacgagaggttggcaacgaaaggcttttctctccataacccaaaaaagattcggttgtcacataatttgcagagattctccactctctctatccttctataaattacatagccatcggatcacaaaacagaacaacaacaacaacaacaaacaagaactcaaacacttcataactaaacatcctttaaagccttttcaaaaactcaatcatg

SEQ ID NO: 8742 - DNA, 3000 bp, Unknown
  misc_feature (1)..( 3000): cDNA_ID_2178541_gDNA_ID_1971872_Annot_ID_176627 3000 nt of promoter + ATG
atattttcatcatcaatcttctccacacttgaatcacaaacaacaacaaaagaaacacaatgcagattcacaaactctgttttcttgctctgttcttagctaatgcagcttttgccgtcaaattcaacttcgattccttcgatggcagcaacttgttattccttggagacgctgagcttggtccttcctctgatggcgtaagccgatccggagctctttccatgacccgagacgaaaccccattctctcatggtcagggtctttacatcaatccaatccaattcaaatcttcaaacacttcttctccttttgattttaaaacttctttcactttctccatcactcctcgcaccaaacctaattctggtcaaggccttgccttcgtcattgtcccagccgctgataactccggcgcttccggcggaggatatctcggaatcctcaacaaaaccaacgatggaaagtcagaaaacaacctcatatttatcgaattcgacacgtttaagaacaatgagtctaatgacattagtggtaaccatgtcggaatcaacatcaactcgatgacttctcttgtcgctgagaaagctggttattgggttcagacattagtcggaaaaagaaaagtttggtcgtttaaagatgtgaatcttagcagtggagagaggttcaaggcttggatcgagttcagaagcaaagactctaggaataccattaccatcgcccctgaaaacgttaagaaaccgaagaggcctttgatccaaggttcgagagtactcaatgatgttcttcttcaaaacatgtacgctggttttgctggttccatgggacgtgccggtgagcgtcacgatgtttggagctggtcgtttgaaaactaagtaaaccggttcggttcggttcagtttggctaggtatcgtttgctttgtttttgtaattgttgtagagtgaataattaaggtatgaataaaataagccgacctgtggcttactctgcattgtattttcatatttgtgtaatcagtctgaataattcagaggttttcaataaaataaacttcctttccaaattctttttttttagtaactggatttgcatgatttgcaaggtaggagattgtattaagctctatacaacatcagtagctctagacgtcgtcttattgtatttgtcatggatagttggatacatacatgtttctatcgattgaagatgataaaataaaaggagcaaattattgcatccacgcaatgaaaacggtttatatttaaataaacggaggataatttagctttgtttgttttcttcacggaataaaatataaaatatatcttcccatgcagaagattataaacgtggaatgtcttagatttatacacgaaatatgaattaaacaaatgtttcatttaagataggggacacgaattacaagtagtagaatcgattattattcgacttcaataatcaagaatatcgtttttttatccccaatcggatagataaacacactagataggtcaattttgttggagactctggtggcgtttgtaacgcacccacttggcgttattgaaatgacgcttcgaatgaaataattgttctgccgtaaaacaatttcaaactcgatgtcttacagtgacgaaatgacgattcacaaaactctgtaatcttgctttttgacaccaattcttctctcaaatttaacttcgaaaccatgcctggatagtctcaacaaaaccgacaatggcattctcaaaacccaacatcttagctgtcaaatatgatcgcattggagacatgttggtctgacatttagttttgttatggagatcgctcttaagttttttcttgaaaacatgtccacggtccaccggttttgctagtatcatggcacatttgagttggtcgttcgagaaacagcgccaagaacagctaaacctaaaccggtccaatccagtttaggtattgtctcagagactggtaaccggagccaaatctttatttagttttaaatatgccttattgttttgcttttgcatttgttaattgggtttataggagactcaagagaggactacatgctttgaactttagtgattcactcctcttaaaaggatctggtctttatttttgtttttgttttcataagaacctcaattatgtacccagaattagttgctgttctgttgggaagaaataaaggagcctaaaacaaaaaaaaatgtttcttaattccagagcaaaagtttgaagatttgaccctcaatgtttgtctaaatttatacatttggcacaaaaaaaggtcattccttttacgttctgttatttgtgaggtcgaagattaaccacgttgcttgcgtgtaaagagagggtgggtgattatcaatattgaaaaaaaaactgaactgagagatatattatataaatatattaaagaacgatttcgacagtgaatcgtttctttcagcagtcgtttttttgtttttattctaaaaggccgagaatttatgaggctgagagagagagccttcttctgcttttttttccgagtttaaaactgtgtttggtgtttgtttgttgtgtggctctgtttcaatctcgtaaagattatttctgggtggcctctctcctttagatacttcttatcttctccctctcactaattttgcggtaaagaagcttcctttcttttttttggctctttacatgatcaaaagatttgcattttttcttgtatatatttttatcttttgagtgttgttgttcttaaatgggtctcctaggttcttgagttttcttctgtttatagcctagggtttgtttcttgagtgggatcacttaaaaaaggggctttacattgtgagagtctaagttcttggcgaatgtgtaacgatctttaagcaatgagctgttgaatccgaaatgattccagttagagttgggaatacagagaagtcattggttacgtgttggtttctggttagcttttggtggatgttaaatg

SEQ ID NO: 8743 - DNA, 3000 bp, Unknown
  misc_feature (1)..( 3000): cDNA_ID_2178530_gDNA_ID_1971872_Annot_ID_176624 3000 nt of promoter + ATG
acagtgtggcgggacatatacatgcttaaatgttaggtcataatatccttcaaaatctgtggaaaaaaaaatccttcaaagtcaaaaagtaatatgtatgtatacaaaagagaaatgtgccctttttttgttctataatttaatttttagtgaaaaacggttcggactctcataaattatactctctccgtcccactaagatgaattttttttaaatttcacattctttaagaaatattgtataaagacaattttaacctcttaatatactttaaaaataataataaatatttatctaagggtaaaacgggaaaacagtttaaaaatttgcattggaaatataaaacttctatctttgtgggacaaatatttttcctaaaaaatttatctttatgggacggagggagtagttcgcatttagataacgaattatttcagtggctgattcaaatatgttaattgtgttagtttgaagttataacttccatttaattttacgtgtcgctatgttttcggactataaactatattctataattcttttttaatgaaatcgtttttgtcggattctcataaattatagctcgtatcaaataacggaattttccaaatggctagttcaaatgtgtcaattgtgctagtttggcattataacttacatttaattttttgtgtcgtgatgttgtcgaagtataaaccatctatctgacaagatacagagatacggttttgtccttttcgaaatgtagttttgatatatatcgtgacgcgtaaatttattttaaactagatgtttcatttttatcgttaaaacattctatttagtttaataatttctatttaaatttaagttgcaatgtcggcggattacaaaccatctatccgacaagatatgaagatatggttttgtacttttcaaaatagaattttaatatatatcaggacatgtaaatttatttaaactaaatgtttcatttttatcatcaaaacattttcaagatactttaataaatacggaaatttttgaataattcctgcattttttttccaacataaaattttcaatataatataactgatatgatctagtatttatttttattttagttcaaatagccgatgctttcaaattcacttgttcgattacatcagtgaaaactttcaaatgtataaatatgaaacgtttgttcaattttcggtgatatatagaggataaatattggtgtgagtgtgagtttcacttgtagagtcaagtaatttaaaaaaaaaatccatgatattcaacattttttattagaagaaaactcagctatacgataatttgacagctttttaattgaacaagcaattaaactagttaaaatatttaaataattcttgtttttagtccgttgcatactttcttgcgtaacgtatataagtgtccacttagaaattgtgtaaccgatagctaaagccgtaattaaatgctagaactcttttgtttttaggtggttagggatacgtggagattagttctatatccaaacatagtaaattactgtaattaacaactctttttgcaattaacacaccaaccaaaaatcgaattttgccctgtaaacccttcaatagagattttcgttaattataactattatattaacgtcaaatattagatttgtttgagaacaaacttattattgtttaattagaagcatttgaaaacaatatggggcaataaatctaatcatgttagtgagttagacaaattttttcagaaccatctcaaattatgtcaaagtaatgggtcaatggttatgctttgtcagcatttatgatcccataacttaagtaaattatctattgaatgcaagaaataaggtttatctagacagataattaatctctctctttttctgccaaaatcttctatattattacatatagtatatgaattcatgcaataaaatgaggattttattaattaactagtcaaattcatataaagtcaacagtcaacttatataaacaagagttgactttgaatatgctaagcttagggacacagattgtttccttattgtcattaaacatcatggacttgcccttcctggttagtcaaaagcaagttatattttgtaactgtaaattttgtaacaataataattagtgtttttttattttttgttaactagtggtttttttgttaattaatacattagcataacgcaaaattaaagtattttttttggaaaaactagaaataatgaaaaaaattaaagaatatgaaaaggtccacaattacatttttaaaaaacgtaacgtatagcaaattttggatagaaacaaaaaaaaagagaaagtgattaactacaagaaaatctatatttccttaatatgattttaggatgaacaagaggatctttttttaaaagctagaagatatagatttgaagaaatagccaaaagaaaaatctctctctattgataggaagaagaaaaacagggtgtctctctttctcaacatagattggatcaccagttttttttttctctctttagatttcatttctttttttttttccagtaatcaaattaaactttgcctcttcagcccaaaaaccctgagatttttgggagaatctgtgtgacactcatttcttctttctaggtaaattcccaattactttttcggttaaagcttaaaaagtcgattttttcttgaaagtcttaaaatcttgttcctgcaaaaaatctctagctgaaaaatattatcattggctttgatttaaaagacatatctttgttgttgattgcgttacacatcttttttttcccctaaattctcgaatgttctaaaatcttctttatttaaatttgtagtttttgtaagacaaatctttttgtgggacatctctttttaagtctctgtcttgatctcagtttcatttcgacaatgtcacagttcttacagtgagttttttcttgttcttattttaaaggaaagaatcaaaaatg

SEQ ID NO: 8744 - DNA, 3000 bp, Unknown
  misc_feature (1)..( 3000): cDNA_ID_2178501_gDNA_ID_1971872_Annot_ID_176614 3000 nt of promoter + ATG
ctgcaaggtgctttgctgcagccttcgcatcttttattcccttgattgagtcaacggcttcttggtttgacatgacctatgagattttaaataatcagcgaccatacaagtaagttgttgaaaatagatattgatagatcaaaaccttccatagtccatcacttgctaggataagaaattctgcatcatcatcaattatctccaccgtaacatatggttctgaactcaaatgcatctttaaactcttatcaccaaatgcccttgccacagccagttgaccatcaactcgaggaacatcccctgaagtggttcaaaacaaatcaaaatcaaacatatgcgacatatatgatcagattatatatgtagaaatgtaattgattagataccaggaaagttagaaacgaatcctcctctgttctcgatttcatccttctccatgttcggctcatgatcaactgagagtggcttcgcaacaccattttggcaaataacagctcgagagtcaccaacattagcaaccaccagcttctggcaattgatcaatatcgcagtcacagcagtagaacctccttttcccaaatcatctgccttgtctagaatcgttgtatccgttatatagtaagctttctttatcgctttctcaggttcttgccagaaattcggcttcacaattaaaaacaaggacaacatcaagttcatattctcaagttaaaaaaaaaaacacttccgggtaaaactcaattacctctttcaagatgttctcaaacaaatgggagcacaagtagtccggaatctcgtggctaagatggccatcgaagatagcaaacagaccaagctcattatcatcaacttccttgaatttggcaaccacataatcttccatctcgtgaaaagctttccctttcaccaaatgaaaaccatgtgtgatctgcttcaacatcttgctcttacctttccctgaatctgcagatgaagcagatgcaccaagcccaactttctcctgctcacagagccgaaatttcaaattacaacagagacagaatcaacagccaatgttgaaacctaatatctagtatcgtatcggggatcaataacctaaattaaatttgtggtatcacaaattccaacaagtatatctagatctgacgttacagcttcacatagatttttcgctacgctctactatcaaatccaatttcgaatcgatctactcgaatttactggccatattctcgaaactatcgaattggaagcgattgttcaagcgacatggagagaagaaagaatcgattaccttgacggattccttcatcttgtggaggatttctctaccggtcatggttggaaaatgaagacactatctatatatgtgtatgaagaagaacgaaattaatgttgaatcgcgagtgtaagagagagagaaggagaagaagagaatgacacgaacgccattgttgcatgtctcagcttccaccgccgctttctttgcggcttcgcgccacctatgacttttccttccttttttttattacaaacggccaaaaatgttgttagatgggccgtttcaaagcccaaactattatgggcttacttctaagattcatatctctaatgttaattataaacaaaatagccactagtttactgaagatctaaaatatgattagcactaatttaatgatgataggttttccttatggtatgggtcctaaagagtaaagagagacactaaaaaaatggccaatgggagacaaaagccttagtgcgagttctttgtctttaaatttttgtttttaatttcttgttatttaaaaaactattagattttaaaatgtttttggttagattaccaacagagaatctttcccacttttgttaattgtctaataataagctcattttgataagtttgtataaataaagttagtgttgcttttgctttaacccaaagcgtatctttgggaaacttgtgtcccctgcgtaaaacatgtgagctacatatagcagagagatttaacgatttaaaatagttgtaagtgctaagataaactaaagattttaataaatatggatgataattaagaagattaattatcgtatttaaactttatattataagatcaatcttttattaatccgtgatccggtcgacagtcgacattaattagacaagatgattacgaactaaggctgggcaaaatattcgttcgatccgcttcgattcggtatttgatttgatttgattcgaaaaatccgaatatctgtaagatttttgagtaaagcaaataggaaaatgtagtattcgtaaaaaccgaatcaaataataaatattattttttaaaaagtcgaatatccgcttcgatccgtatttttttataaatattaaaaaatatagttatatctatatatagatatcataaatagtttatgtattgtagccattttatgtttttatgttaagatgtttgtttgatcatttttttttcatgttatgttttgatcaatggcataaaaaattatcgggttttagtttttggaattagtttgataacattttgttgaccggtgataccaacaacggttatgtttgttatttagaacttattttgaaagcatgttaaataaaaactttgaatatctgatatgattatatagtatacatatttttttaatatttaaatgtattaaagcggatatccgcaaatatcacaaaaaaattcggatattcgaaatttcggatatccagaaattttcgaagcaaagcaaatcacaaaatcaaatattcgtttagaacgaatcgaataacaaatatcacaaattttttgaatattggcttcgcgtccaggcctattacgaacaccatcaattcactttgccacgtgtagtcaaaacctgacctggcttgacttccacaccacttccgttcccaattcgccacgtgtcttcccctctatttaaacaagaatccgaccgcataaatcaaacacaccaaaagaaatg

SEQ ID NO: 8745 - DNA, 3000 bp, Unknown
  misc_feature (1)..( 3000): cDNA_ID_2105435_gDNA_ID_1971872_Annot_ID_176616 3000 nt of promoter + ATG
ataaggtcgcagtggaattgaaggatgtgcaacagcctgtggatacgacggagtatagaggtgtggaggatctacatcagcaaaccggcggagaagttaagtcaccctaagctaatgtgttagggtgtctatcctttctttcattgttgtttcagtgagaggttgcttgtgcctcgtggttcaaattaaaggtttatgaatggaccgtggcttagatcgcattacaatttactcttattactagttgaactaaagcaaaataaacaactactccgattctccgaacaaatttctagatgtttttttctaaaatttatatgcacatacattatctcataattattttacgtcaaaatctcccaaatatttttcatcaaaggataatacaaatatgatgtgattgcatgcaagaactgatacgataagtgggtgtgtaaattgacatatatctacggagttttggtgtggggttgggactgaacacagctggatcgcatagtctgcaaggaatctcacgttggcaaatatttaaagctggtgtcattgaaaattcccgtaaatggagggacaaattctctaggcttacgctctaacagatcagacaccaatcgtgtactattatttactaaaactagtaattcaacttcttcctctaaaaacaatcaaagtatttatatacacagaaaaaaaatcaaacaattgtgaatacataaaaatatgaactatcactagtcccatttgcttttgtttataaacgcctatcgtgaacaaatctacagttctaacaaatttttaatgtaaatatattttagttatttaatccatgattctgtcatatccagtttttggcatctatgacaaataaacataacaaatgctctttggttctgtaggggacaagtggaaccgaaaacgagaggaggcatctctgatatttggtgtagtagtggcttaaggatagctacgtgcgttttgtttccttacgttaagtgacaaatgcgaagctagaaaatttcgccatgaaggaaatatgactgcataaatatattctccacttcagggtttatacgatagcatctctttttttcctctttgtaagttcgggttcgaatctgttttttttattgtagggccaaaacttgaaagtggcccgagcagacggagacgagcattagcttatcatatcctacgttaagttcactctgttttttgttaaatggtgtgttcactttgttctttacatgatctcaaaaggaccacttcttgcccacacaaaaaattacaaaacaaaagcaaaactatatccttaaaactataacgtattctttgaattttagggtgctaagaaaaaattaattataaggaccaccaacaattgaaaatgaaggaaaatcgaaggggagatgtgagaaaaaagggacaacgcttatttattctgttattgtaaataacaaccccaaaagcttaggtcatagactcgagacatgagtacagtttggcatgtgaaaccttttatgtcctgtctctttcactacccactaattctaactatttcatctttcttacactgccctattgtataacaaaaaacatttacaacaaaaaaaaagagaagcaaagaaagtttttcactgttaaaattttattcccagaaagaaacagacttagagataatcacagagttgaaaaggaaaaaaagaaaagagtaacatagaggtgataattgcatcttacagaggaaacgcccatacttgtgattctttctttagctggtccaatctcaaagactctttacttgtttaagtgaccagtaagacttgcgatgaaagggatctgcagtctgcagaggtctcttctcctatcaaagcaaaaacaaaacaaggttaaaagttttttttttttttaaacctttatcgttattattactcttttgagcagctaaactttaaaccttaaacatcaaagctctctatcataagaatatagttccacgtgtcgtttgcattgaccctttatagctaaagagatctcattgtttacttttaatctctgattttgcactcccacaaaatagcatctttataggaaatagtgataaatgccttgcacccgaaagaaagaaaaaaagtgcaaaggcatcaactaaaatgcgttgatatgctatggtccagaacagacgatattcatgctgccaacatcatataccacagacaaggcaattttaaaaccagatacaaatcagtatgtaataataaagacaacgatgtgtttaaacagaacataaccattttacctctcatcctaagctaaccttaaatgcctatactctagatgggtccaacaatagatgaccactagggttgcaggaagaggaatccaatagtctacatcgacaaaggatgtcaccatttattaggacctttgtctgtttctagagatatattataaagttagatgagaagaccatgggtaaattatgatattccagctcttcttccctgtactatatgtctacagttgcactgatcaataaggttcaccttaattacctagaaggacatcaatgttaaaaacaaaagggtccccaatttgaataagaaattcaaattaaaattcaaaacagtaaacccggaagtacaatatacagctccaatcttgtatcaactattaattgcatcagaagaaaccaaaaccacgaaaggcctatgaaatagttacaagaaatttttcacttgtgtaattccaatctattgacctatactctccatttttaatttcttcttttttggggaagcaagcacatcacgtaatcatgtacttattccaccagagaagcatacaaggacacagtggtccatctcccgacttttcttcctctttttaaacacttcaaaaaacattcattccatacccccaaagcccatccttcaacattgcttcctaaccagaaatccaccatcatcttcccacgaatacaacttaaagctttaccagaaaatg

SEQ ID NO: 8746 - DNA, 3000 bp, Unknown
  misc_feature (1)..( 3000): cDNA_ID_2036938_gDNA_ID_1971873_Annot_ID_176644 3000 nt of promoter + ATG
ctatattggacctgacatgttaaccgatctcactttcccattttatgaagacaccatccctatgtgggctgtcccggtaagtaaacttgtttcccaagaaacctttgtcttcattttgcattccatcacaaggaagtatttcgattttcgctgattgattatttgtatgtatggtgtgtgcgtgtagattatttgtatattggttccgatatgcatcttcatagtgtactattactatcgaagagatgtttatgatcttcatcacgccattctcggtgagttaatttctactactgatcaccctcaaatgtatctagtcctatagtacttacaatttcaaatcgaaatccatactatcatatattattgatgatcaacgtgacaagaatatttggaaattgcgtataggtatcggattctcatgtcttgtgactggagtcaccactgattccatcaaagacgcggtcggtaggccacgccctaacttcttttaccgatgttttcccaatggtaaaccggtatgtacatttctatggatccatctcacttatacgttaatttcccggtttatcatgagggaattgtttcttattttgtgcaaatcggaaagaaatgcagaaatttcatccggatactaaggatgttgtgtgtcatggagttaaaaagataatcaaagaaggttacaagagtttccctagtggtcacacttcatgtaagttgttctaaagcattaaaaagacaagtaacaacatctgaattgattccggtttatgttaaccgcttgattacggtatacatgcagggtcattcgctggtttaactttcctagcgtggtacttatcgggtaaaatcaaagtctttgacagaagaggtcacgtggcgaagctatgcctcgtgttcttaccgatactcatatcaattctcatcggaatatcacgcgtagacgactattggcaccattggaccgatgtcttcgccggagctatcatcggaatttttgtcgcttctttctcttacctccacttttttccttacccttacgacgaaaacggtattaaaccaaaacaaacaaaaaattaccatcatgttattgctttcttgataataataacggttgatgacaatattttaacaggatgggctccacatgcgtattttagaatgttggcggagaggagcactggtcgagccacgacgatgactcgaaccggttctcgaggaatgttgggcaacgacgttgagcctggcaactccgcgtcctcgccgcacgatcgccaccgtgaaagcactgattctgacttttgaaaatttcctccacaatgttttaaaaaaaagaagttaattatccgtgtaatttttaattgtatgattgttttcacttactgatatataatatgtatacttttcattaggttgacattgttgttcaccatgtttagaaaagtttgatttggagatgtttgattaacacgtacatgcttcattttggtttatataatggatatataattagtgtgttattaagttgatattgttgttaactatgtttagaaaagtttggtttggttcaaattggtttacttcgattccccaatttcctctcttgggttccggtttcaacttgcatccacattggatccgtagtaattaagaaaagtgattcttcgtcccaatttgtattatttttggggaaattaaaggtactgtattatgttttatttttatagtactctactataatatgagctcaccacatttttgataaaataaaaatatcttatgaagagtcattagtaatgttcaatgtgcatgattgtggcaactggttatgtttaatcaagtttcaatagttacgtctaatttggagaggaaaactttgggaaccgaacaatgtaacgtccggttgaagtaaaccggacacggtaaccgaaaattatccacatgggtttggtttagttttcccaataaggtccagattcatccgccttcttagggatccacttcagcttaacataaagaattttgcctttgcaaaagaattgctcccgacaaattagcaattagactaggtatcccaaaaagcaataacagaggattaaactctctcatcgcaaaagacgttacgcatccaatttgggtaacccgaggctacataaaactgaagcgtcccgtcagacgtaacactgttagcaatgagactagttcctctatttgctgatgcaccttctacgatcaaccgccaatcagagatcagactcaaaatattcaagattagttgttttcatctttcttacatgaactgtgattttgtgaacataattttgtttttcttctttcctcgttacagttttataaaaataatttgtgaattgcagcaagccatcaagctaggattatgttggaactcgtaaagaagttaaaccatgtcaaaggacacaaaataatcatattatacagtactaaacattctacatcaaataaaataaaattatcttaagtacacagctttctaaaacacaaacatcaacattatatattcggatacaaatacatttatactaatttccaaattgtattgttttatcagatgtaacaatactttaaccaattgccgacaaaaacttagatctttttaataattaattaaaaacagaaaaaccaatcttaaaatctcagaaaaactttaatttagatacgcgtaaacagctttatatgtactttttttgttgtcattacgttaataaaatataaatctgatggtaccaaatttataaatataaattacctggcgatgaatcatcatctctgtaaatttctccagctcactttactctgcagagaatctaacgtttcatctttattttatttttatacaaatcacaatttatttttcttattaataataataatagtgattatgttgacgattaataaaggattagtttcgaattatcaatatataaatccgtccaactaacctatcccgtcgttatcgaacca

SEQ ID NO: 8747 - DNA, 3000 bp, Unknown
  misc_feature (1)..( 3000): cDNA_ID_2990010_gDNA_ID_1971873_Annot_ID_176651 3000 nt of promoter + ATG
agagagttaccggagatgaaactcggtaatgttcttcaggagatcggaagatttcttcctggtcatcagtttgcttctgtaagtctgacatcttgtatagttgatgctaaagttgtgattttgaggtcaagttaaagttcaaattttgggtctacattggctttgatctttctctcaaggaagaaaataagaaaatttctgaagtgggttttaggtaagagctgggatggagatggctatgattgatgcagctgctaagagtgtaagagtgccattgtggaaactatttggtggagcttcaagtacgattactacagacataacagttcggttctaactttagctcttcctgctacaatttcctttcaatttttgtgtgtttgcaaacaaattcctaaagtttatagtcattggctcctaaagtgattcaactatgactataacttagattatgtgtgttaacactgcattcatagtttctcaagtatgaaagtatggaatgttaatggcttgaaatttggagcgtatgaagttttgaattgtttgtagaatgttaatggcttgaaaacaccgggaacactaataaattactcaagtatgaaggtttgtgtgatttgtggttctcagattccgatagtttctccggctgaagcttccgtattggcctcaaagtatagaaaacgaggttttgaaaccttgaagctcaaggtgggaaagaatcttaaggctgacatagaagttctccaggctatacgtgcagtccaccctacttgttccttcattttggatgccaatgagggttatcaaacagaggaagctgttaaagttctcgagacgctgcatggtaaacaggtttctgaatcatttttggaattttctcagttaggtattgagcgctagaggttttaaaaaaggataggtgtttggaaaacttctagcctgttcaaactttagtagctggcgtttcttttctcggttaaaacctgaattgttgtgattgttttgcacagaaatgaaggttacaccggttctctttgaacaacctgtccacagagacaattgggagggtctcagtcacgtgactcgaactgcaaagaacagattcggagtctctattgcagcagatgagagttgcagaggcttgactgatctcaaaaaaatcatagaaggtaatatcgtagatgttgtgaacatcaaactcgccaaaaccggaatcctcgagtctcttgaggtaattgaattggctagatcatctggcattgagcttatgatagggggaatggtggagactagattagcaatggggttctctggtcaccttgctgctggccttggatgcttcaggtatactcaaatttgtaaacaccacatttctttctaatgtgaacatcataattctaacaagttaagaaggaatacacagattcatcgacttggacactccgcttcttctggctgatgatccagttcaaggtggctacaaaggtaaaatagtctctgttttcttcatcttgcatttttccttgttaaaaagatgattgaaattcaaaatgaacaagtctaatgcttgtggttttgttgacagcatgtggtgctgtctatgagtttaaagatgaaggcggtcacggaggatatcttcagtggaatgatgttgctcagtgaaattccttttgtctacttaggtcccttttcttttgttcaataggattttaatcgtaagtttaatgttggttttgggttttgtaaaggctaatcttggtcctaaattctcagtatgtgttagttgagagtgtatgtaatctagaatctttgtaacttcagccccagggagtaataagtgtatgaattcattacagtgatctgcttgatatctgtctgaaacacacaacacaggtctaagtcacagagcttataatagatcacaatatgtgattcttgtttcgatctttgattattggggatttcatttgcagagtctgttttgtcaactaattccagacttttattttagtcattatttgtgagtattgatagagagaaagtgaaaatgaaattgcttttcttgtggaagaaataagagcaaaactggtaggtgtagtggtgactggtgaggcgtgaaaatctcaacagatgtacagagatttctggtaaaggtccaattaaacactggactagctatttatttatttttaattacagaaaatattatttggctaattacagaaaataaaatgtcaatttttatggtcatctgagttttgaaaagaatccaaaatagaatacaaagcccaaccaaaagaatttaagccctaaaaaaaaaaatacctataaactaagtcgaaaaaaaactttaaatttttcggaaactaagctatatgcaagaaaaatataaacactagaattataaagcagaactcttaaagccaaaatccaaagatatcgaaatcatatactaagaatagagacaaacaaacttaaacccgaagaaacaccactaaatccaaagacaaaacatggtctttttttgaaaaatttacgaaatagatttaccaatgttttttttttgttttttttttagatgtaccaatgttgttcatggccaacccatcaatgacatatgcctcctcctattacgaggaaagatgatatttcgaatccaagtaaccaagactttataacttggcaagcaaatgcaaaaaatgagcttaatacttggcaagtaaaatgtcaacttgccaacttgtcaagaatatggcttaaatgcgtattcaaaaagcttaaaatgtcaaaccaaagttgacattggtggctagtccggaatggatgaaaccaccctttaaaaaagttttaccaaaaaaaaaaaagaaaaagtaaaatgtcaatataaacagacaaatacaaatgtttattcaaattgtattggtaaaagctaattttgagaatcgttttctaaaaacaaccagcacaatcaacaattttttatataaaaaaatctctaat

SEQ ID NO: 8748 - DNA, 3000 bp, Unknown
  misc_feature (1)..( 3000): cDNA_ID_2036904_gDNA_ID_1971873_Annot_ID_176654 3000 nt of promoter + ATG
atgagatgaaatgtcttatctttatttagtgcaatctgagtattgaaaacaatttccccagtttttttttttttttacgtcaaatattgtgtgcttattttaaagagaagaaaccaacaaagagatattccagaggacacggctttgtatgtatctgactaagaacaagacacacatgaatgatgaaggtgttggtcgggattgatgttaaagatgtaccaatcacatcaatatatacatatataaagaaaattaattttaaaaatcaggctaaaaattaacgatacaatattttataaaaacattttctcatgagtttctttgaaaacacgatatatgttcacttttgatatgcagacatgcagtaaactttaaaaatatgttgagatgcatatgctcattgtctttatcttcttttctctcctttttttttgttaattatatatggtaaagtagacttgtaagtaaaagttcttatacagaaaaaggtcgattttttttttgggtcaaattttaacagatttttggaatgaaaactgacgtatcctcttacgaagtgctaatttaaattggagttgaacaagtctcatattgaattagcaaaaatttagagtcaaccaaacatctagacctaaaaaacttcatgaaatttaatttttccaatattgcaaaaccggttcaatcaagttatattggtagaaacatatagtgaaagatatgtttttctagatctactacatgaacagaaatggcaattctaatggaaaaaacagatggaaccagaaaaatagagtaagaacgaaaacttaaatatagaatgttgaaacaagataagtgtaaggatgcatttaaaaggaagagacgaggcaaataaacattatccttagacgaaaaaaataaaacaaaacaaaagagggaaaaaggatacatgaaaagagattgatcactatattgatggatcacaattcacaaaaagccaacccattgcctattgtacacttgcacgatactcgaaatttccaaataattcggaacaaaaaaaacagctatattcattttttaaaataatcaaccaatcgaatttagtcttaaattgtataattgttttaatcatttaggtttacgatcataattaggtggtcatagatgcctatatcgttgcattaattgaagaagggagaataataatcctaccatctatgatcctataagattgcaataaagctatatatatatatatatattcatatagtatatatgatctaatctcttgttaattactatataaattaggtaaaggttaccgtagaaaattacgtggaacaatgttgaaatgcttacataagttgactagtccgtgttgtttttgttctttatagaattatagtcaagaacggcgaattattaagttgtttctgattataaaataaataggttgttgtgaaatcgggggaaaaagaataatgaatacttgttaaatattggtcccctaataaatgttatttattttggttataagaaaaaaaaggaatgtgttgtggagaagagagcgcgagtggaacttgttgctacccaattgtcgccacacttcccacacgtcccctcttgtatcttttttttacttttcaccacttcctttgtcctctgtttttttcccaccattttctacttcatcaatctattccttttgtttttttggtaaaatatgtaaatatcatctatttaaaaataaaatatgaacgaatagatttataaatatacaaaattgaaattttaagatacttttaatcgaaaagagttcccaaatatttacgtaattaacatttttcaaagtttatttaggtttaaatgtaattttctggtgtaccactaactagactatacataatataaacacgactgtgaaacatgatcatcattagctgttgattatctactaaagaattgtttgttatctctacataagaatatatattgaacacgatttctattatcttttactaatttgaaatagaattgtttctagtaatgacacaaaattaattgactcaatctagtaaaccttggagcacatgcaaactcaattaaacaagtttaaacctttgtatttgcatttattaatcaaagcaaaactgtgaagcaataatttaatcaatggtttaattaagaagctaattagctatttggctcctttagattacgaacgggtgctgctacatctcctctctgtcattagtcattactaaatatttaaaccaagttcgaatctgtcttacattatcttatttcataaaatctcaaagccaaattcatcttttcttttgaaagtgctccctcaaaagctaaacctcaaacatataaaatagcaaattcattttaacaaaagcttaatgaattccacgtaagcaattacataacgtttttgcccctagtcagtagagtccctccttctaactccgagaaccagcgtccatgtctcgcggaccaaatgcgttcgtaggtaagacgcttgcacgtgtcgagatgtaatcggtcacgtgccaacctgggttggttgcatcagcatccgacgtggcgatgtgaatggccacgtgctacaaaacctatgtatagaaacacccacccaatccccaagcacttttattcattttctataaaaaaatttacaaggatcgtataatactactaacagttttttttaaatattttccagataaacattaataaaacgataaaaggcaaaaaataaaaaagaaaagaaagcaaaagcaaaatcaaaatcgatatatcagacaacgcctcgacctttctttctttttttccttctcatcgtctccgttgaacaacaccacacaaacaccagaagaacaccagataattcccatggtgaaccgagctcagatttgaaaattgaaggtcgtagacgaatcataaggaaagagagaagtggtttgagatttcttttttgacggacgaaaacggagataagctttgggggaa

SEQ ID NO: 8749 - DNA, 3000 bp, Unknown
  misc_feature (1)..( 3000): cDNA_ID_2178466_gDNA_ID_1971874_Annot_ID_176671 3000 nt of promoter + ATG
ggccgtctcatgtggtagaccttacttcagtgtgactgtgctgatgaaagagcatgtgcctctattaatgacatatatataaattatacatatggttctcgtaactaattctataacataacacaaatacaattcgaaaatttgtttgtaggtcacgcaattaagaaattaaaacctaataaatgcttagtgggaggaatccccatcagcaagaaaactcaaaatcatcaacaaaaaaaaggagagattattcataaaatttgtttgataaaaacagatatgaataagtagctttagtaatgctataaatctgtaactcctagtcttgtttgtaatgttataattatggtgcaagagaaaatatgttttagatattcaaaatcagattgatgaactattacatttacagtttaccagctcaaacacgttttagatcaaccgctaataaaaactggtcaaaatataacacctaatcacaaaagcatcataagtatgtcataagcgaccaaaatcaacttaataaaaaaacaaagtggtaaaacactagggcctgataacttgtatagctgtcttgtacagtgtaataatcatcatatatattctcttcttaagtctaatgggttattcaacatttatccaccatctatttcagattaattaatagctgccgtcaaaaataaaaaggataataataatgttgtgatataagatattatagaatatatattttaatataataatattttatgttcgtaaaatagaaacttcccatgtgattttcttctctcaccgccggttacggttattgtctttttcttagacttgaaaatattaaatctttttgttatggaattttactacacagcttgtattcatatagttttgggttaatagttaaaacataaaacatatatcgtgattatagtttactcacattttacatgttgttacactgtcgatatctatcaaatatattactgttgtaatttcttttcaaaaatactgttctaatttaatcctgcatccaacaaactttttgaccagagagaaccaatatatatatcagtatgtctataaaaaaatatgataattgtgaaaatgagatccatatttttgattatatatataagtgaaatagatttgatttgatttactttgcaacgtcttgtgacacaagcatgacataatcgaacccatctaacaataacatgcagtatatcgttgagcttctagcaaaatcaacaaaaatctaaaatcttttagtaaaataatattaaaccttttatcattaagaatttttttaaaattaacaataaacccatgacatttgtctaatctgccatagagttgaggtgggacttctaacatgctctattatctcttgtactccgttgatcatcgatgataaatcacaagctaaatgtttgtgaataagtgaaaatttatcttggaaatgaaaaattatccaaatcaaagggttacagtaactggataattcatttaacactttgaatcaacaagatcaaataaaaaaagttggaagacagtgaagcgacaacatagtccattactttgagttaaagtaatattataatttagtaaagttgatctaattacatttttataagtttaatctggtcatcgctggaccaagttgtcatcctccaaattccttaccaatcatacaaattgatttttggccttttcttggaatcatctcttttttttctttgtgtttttcttctcattcattttgtttttctttaatacacacacatgcatgtataaacgcagttttatgactggacatatcgcgtaagatccataagccaatagctttttttaagtaaagtattttcattttatgggtataattataaagatgtaaatttccccaaaataatataaacagcagtctctctcctacttaatcaaatcactagacgcggatttgcttaacaaagtaactttaaaccaaatcgttccacctaaaaggctaaaaccattaggattgattttggtcaaaaaaatcggttactattttttaatttacttagaagactggcaaaaaaaaatgattccaaactactaacatataagataaaatgtatttaacatcaaattaaaattttcacgttaactaatataaaaaaatgatatgaaagaaaacccaactaatctttgattatatgcgttagccttcttcattagccttctttaaatactagattagtacttgataaacttttattgtctatacaatatatcaaaaaaaatgcctctaaattaactacataaattagtaatttctgaaaattaataaaaaaaacacgtaaccataacttccgagtatgtttactttaataattttcacgggattctgaactctaaataaagattgattgataaaaaaatattaaaataaaattcacgggatttacaaattagttatcatttgaatcatttgttatagaatctaaaataaaatagtaaattgatcatatagtaagaaatcaaattttctttttttgtcataaataaatataatttgttctttagttatgcacgctggaaatagatcccactaataaaaattggacttttcaaacaaagaaaataattaaataaaatcttcctttacaaaaacaaaagaggaaaattcaaagaaaggagaactctcttcttcttcttcttcttctcctctcctctttatttacttagttggttcacttcagcacatgatcctcgtctctctttctttctctctctcaatcacaagtttcagttacacagctgaacccaaagtatctcacattctgatctaatcagaacactgttttgtctgtgtaacataaacaaacgatcctgtttttatggaaaatttaatgaaacagtgacgattcttctacacttctttataatgacaaacatttcatagtaccaaaatacacaaataccttttctttattcttctcacccttctctgtttctttatcattc

SEQ ID NO: 8750 - DNA, 3000 bp, Unknown
  misc_feature (1)..( 3000): cDNA_ID_1394861_gDNA_ID_1971875_Annot_ID_176681 3000 nt of promoter + ATG
atgatgcatgcattgttgctaacaagcatgtgcaattaatttatgatttaatacgaataaagaaaagaagctaaggctatacactatagttttagtggccaataaccatatcggaaggtatgacaaagaatataaaaacagttttctgaaaattgtaaattgttatttatggaccagattaaataatacatgtgctaaatactaatgaaggcaacgaatcccacatggaaggattctcgtttccccaactatttctgctctgtgttcccacacataatgccacgcaatatttatacagagtggactgatcaagagattagttaccaaaataaataagaaattctgacttaatcaatcatcaaatttttgtatcaacccctaacaatataccaatattcaatccaaatcagaacaattaaaaatttgtaactaaaaaaatgaaaatgaaactatggttgtaacgaaaaaaatcacacaagaattaatagtcgagtattagatttttaaagataaatcttctttcttgatgacttggtcgtgatcggtcaacaaaagcggttttttaccggtcaacggactcaagatctcttcgtcgacgattggattgtgatgaaggctgagttcaggtaacgccggtaggtttagatcgatgaatccacggtggctcctttcttccgataccgtgctcgacacgcttccactgtgactgattgatttgcttcctcctcctcctccgccgccgaggttgccttcgtagtgacaacgtttgtgaccgcctaaagcttgacccgtcggaaacactttatgacagattgaacactcgtggatctttccggaggcagcaatcggatgtttttctccggcgacgatggagatggtcggagctgttgaatcatcggcggttgttgagattacggttggtggtttgattcggtgacttgctttgtgaccgcctaaagcctgataggaaggaaacgctttttcacagacgttacacttgtacggaaggttctttgattctggcggcggcgttaacgattgcgactgttgatgaaatcgcgtttgcgacggttgatctttagcgagcatgaggagacaaagagcgagatactcttcttccgtaagatcttgattctgggatttgggtcgagatcgaggcggtgaggaagaagacgaagaagggctgtgagaacgctgacgtttggagcgtttgcgtttaagccacggctcaatgaaaacggcgtcgttcatcaaatcttctttcgtttcgattctggtgaaagaagaagttggagtgttcatcgcttcgagggccatgatcagatgaatcttcttctaactgttggatcaaaggatcagaaatttgagagaaaagttgagagtttttaatcgcgaatatggtgagagatagagagaaggaaattagagagtgaagtgcttaagaaatgttttggacttgttgtttttatatggaaaccacgtggcagatgtgtttttaagtcggtcaaatttttatcttctttttttttgtcaatatactctctataagaaacctaacactatagtgtaaacatggaagaaaatttcacaatgtttaaattggattatagtatcaacaaatatgattttattagtattcttattttaaagcattttttgataatatattatctatagcatatttagctttagatatgtgtcagatatatatctgatagaaaattattttagacttatcaaatcatatatattttgttatctaattttgagagatttatggaaataatcacttaaaagtaagtaccaaaccagcaatggtaaaccaaatttgaccaaaaggaataaagagaaatttactgtaaaataccgggttgtttttggtcacggctgacctaataagttttggtcatcaaagagtgagagaccggttcaaagtcaataaccagaaaagtaacaaattggtaaacccgcaaatagattttagcttatattaaacaattaaaaaaagaagcatacctttcccgtggagctgacttatgtgttagctacgcgccacgagtcgtgtgggtcacgccttaaaccaaacgcgtacacgcctaattacgtttttttttggtactaatcttcttgaagatttatcaaattttctagatttttttaaatttattatctcttatcatgaatcatgatcttatcttaattatttattaatcactcttcccatgctaatctatagcaaataaatcgataagattcgtttaataaaacacctggattctacccgaaaaatacgtagggaataaattaacggaaagaaacaaatcggaatttttgttttcagaaaagaaaaaaagaatgttgagctaacttcagtggagttgagtgtaggtgaggtaaaaattgggtgaggcatggcgtaccgtattagtaactaaaacggggcgtgattataggacacgtgggagttccgttaccacttgtaaggcccatgtcacttttgttgttatacccaacaagcaaaaaaagtggacgtaatttatccaaacgcgttggcggagacgtcacgtggcaatttatacacgtgtcacttcgattgcgcagacaacatcttctcaggaaacgcagttttagacgttttctctcattcagattctatactcttcttacctttttgggcttgcaaggttctgtataatatgggctttattagcccaatcatctcgaaatatgtaagtccgtatcagacatctaacggcccatcttcgttgaactcgtgttttacatgattcattttggatcattgaagtttcgaccatttcgctaattcgaattcaaataaaataaaattagtttttctgtttggatatgtagagtagatctaatcgacccttgtacttctgcaatttgaattcaaaatttaaaccactctacttttgaatctctctctcactaaacctagaaagtagaaaaccctagcatttgtgatcttcaacgggaaaa

SEQ ID NO: 8751 - DNA, 3000 bp, Unknown
  misc_feature (1)..( 3000): cDNA_ID_2026192_gDNA_ID_1971875_Annot_ID_176686 3000 nt of promoter + ATG
cttcttgagcagtgatgattgccttgatatgctccaaattgatgacaatcgctctctctctacctaaaacagtagatggatacgacaacagtggatcgagaatcctaagatcacgcgccggtaatcccgttcgccgcatgatggagtgtttcccttcttccttcggctccgattgccctgacgagttaagtaccaaccacgtcctcacgccaacgccttttttccttccaccgccgccgccgccaacaccggcggggtacgtcggtgtcggctgaccagtgtttggcgttgatggattcgtactaaaattgaattcatcgggtctagctcctctcatcgcttatgattgttgtgatcagagagagatcgagcagctgaggaatgttggaagtgaaaattggggaatttatattccggctcgtccaccacaaaggacaaaaacggttaagacaaaccggtttttacttttcccccaaatatcaaaatcaaaccgggtttagattttccaccaaaaaccaaaccggttttagcttcttctttgaatttttgttgtgacggaggggatttgctttaaaagtttagggcttttaaaatcggcgacggcgagcggagaattcccaaggaagagtcgatgaagttgaaatcggtgttcgatgcttcggaaatcaaatcggaatttgaatcagcgggaataaaccctaaattcgcgattcaaatctggaagtatgtaattcagaatcctgattgcgtttgggacgagattccttcattgccttccgctgcatactctcttctccattccaagttcaagactcttacttcgtctcttcactcgctatttcattcctccgatggcaccacctcaaagcttctcatcaagctccaggtactctatactctgttactgtatacaacacattgcttttatggattctgaaaaacttgtaatgtctctgtttcctgacgaactcatattggattcttgcttttggttttgaaattgaagaatggagcttttgtggaagctgtggtaatgagatacgatactcggttggggatgttaggagggaaaccacgtcctggaggtataagatctacgttatgtatttcatctcaggtattgatttttatcacgcaatgttatcttggttttatcgaatgaaagacatgtgatgtgaaagtatttatcaataggttggttgtaagatgggttgcacattctgtgctactggtaccatgggatttaaaagcaatttaacatctggagaaattgtggagcagcttgttcacgcctctcgcattgctgatatacgcaacatcgttttcatggtatatttctgcttctgttattgcattttatctacactatgtgcaccttgccttatggttatttattttatatactctgcattgatgaattttattcaccagttgttgccttggtttgatgattgtgatcagggaatgggagaacctttaaataactacaatgctgttgttgaagctgttcgtgtcatgttaaaccaaccatttcagctgtcgcccaaaagaattaccatatcaactgtaagtactcagaaagctaccttgaaacattcgtaaaacagagaaacttattcactgaattttgtaggaatactttagattatggaatttgataaagggaactgatagataaacttcaatccattaaacctcgcagtatgcagcttccaagacatctttcagctttttttgtctagttggttacttttaaattttggtgttttgggattttcttctgatttccttgtccttccgtaatgcttgtaccgtatattccaggcataaatctaaatcatgcaatgctgcctgtgttgacacttttttttactagttagcaaataaatttccctgtatcctaatgtcatttgcataggtcggaattgttcacgcaattaacaagctacacaatgatctacccggtgtaagtttagcagtatccctccatgcaccagttcaagaaatccgctgccagatcatgccagcagctagagcctttcctttacaaaagcttatggatgcacttcaaactttccaaaagaacaggtagttcatgtactcttgactggttcgttgctgttaaatattaaaaccacaatcccttcagttacattgacgattataacattatgccacattgtcattggatttaacagtcaacaaaagatcttcattgagtacataatgcttgatggagtaaatgatcaagagcagcacgctcatctactaggcgaattgctaaagacatttcaagtggtaaatcttcgatgtcttaatactcttaaaggttctgcaattatctgatgatattttttatggaaactctgtgctcttttcttgaacaggtcataaatttgataccatttaatccaattggatccacaagccaattcgaaacaagcagcatacaaggcgtgtcaagattccagaaaatcctgagggaaacatacaagatccggactacaattcgcaaagaaatgggtcaggatattagcggcgcttgcggtcagctagtggtgaaccaaccagacatcaaaaagactcctggaactgtggaacttagagacatagaagatctgcttctctaactttaggaccagagacatgaaacagacatttggaatggttgtgtagtatctttgaagccactcttcaaaacccttttcttaaacttcacattttgtcctctcatcactttgtggaaaacacttggctcactcttatatgcaagacaaacagagatggtccttggtccttccacactatcacatggaggtttaacttctcttataaaatattcaccaacaagtgatgttatgtcatcgttaaagttggaagtaaatgttaaactttaattttaatgaagtaaatagtagctaattagcttctcttcccgcctataaaactagctcctcactctgtcttctattccataagagtaaaaaaaacagagagatg

SEQ ID NO: 8752 - DNA, 3000 bp, Unknown
  misc_feature (1)..( 3000): cDNA_ID_3043431_gDNA_ID_1971875_Annot_ID_176687 3000 nt of promoter + ATG
tgcttcaaagttataatagaagatgaagatagagcaggaatctccagaagaagaagacctgggttcgcgatcgattctagaacggtgacgtctagggtctgaatctctgctttctcgcctcgtcgacatgtttctctcaccgaagaaattttagggctttgctcttctctcttcccacgcctgcctgcaacattttatctaattttcccgtcagaaattgtcaatttcctcaatattacagtttccgccttatatttcttcaagtatcagaaaaaaccccataagttagaattgtgcacagaaacgatctgcgataccattataaaatccggttctctaatcagtctatatctaaattttgatgtcgaaataagcaagaaggaaactatgcaatttgctcttttattaaatcgaaagaaatgcaaatagtgaaggagacggataaaaaaaggtttgagagtagtaaagatcctcaagaacaaaggatatacataaaagtcttgttagcttaaatagatttgtggcaatgcgacattattctcctctcccaatatgttgttggtcgactcattcaagaaggcgcttgtacttgcaccacccgatggcaccaacgtagaggcatatactgccgatagaacctccaatcacagtccaaatgaatctacttggaccatgtttattatccgtgaacaactctatggttatattcataccaaatacaccagcaactgcgataaaggcgctcatcaccagagtagctgttgttagcatcacacccatctgcagaagatgattctgcttgtcatctagcattatgttgatgtagtcctccgtgtcatccacatattcccttagcttttttcatcataacaacaacaaaaaccacaatgtattagaagaaggatatcatcacgacaaagagtaccaaagcatctggtctatttacttactgttgatagtttgttcagtataccatcgatctgcacgaaatatgcttccaaaagcatttcaagctcttccacatctaatttgttggtcatggcactccgggttgagcttgtgtgagtcccacggctatttctgctaagtgcactttgagtactcataagaagctcgtgagcatcatttgcttgaagataccttccatctctgttagcctctgatgcaaattcgggaggaagcctggagtaaaaaggcagatgttaaacttatatcagaacaatagaaggtactgcaagctcagaaagttgatacatgcctgtcatcctcatctccttgaggaagatcaacctcgaaggtatcactctcattcatagaggaatttgacgaatcctcaagtttctgagctaacttctctgtaagatacatctcagccatatcttcatcatcgtctagcagatgttctagctcatccctcacctagaacatgtaaagagaaaaagtgttattagtataggcaaacgtggttagaatatggtgatgtcataggttcacatctataaggaaacatgataaatccttatcataatatcaaaggagccattttaatgtccgaatcatagcaccttctgaacacgtccagttattgcaaccagcctgcttttaatctgtcgaacccgctccaaattaagggtactgatcttggaagtaagcttgtccagggctggatgagcctctaactccaatcttaaggcctacattagaagaatgaatcaaataccaaacaagagaagaaatatgctttgtctcagagccttaacataagtatttacctcatgttccaaactgcttgatgcagcttcaagacaggcttccagagcaacaaactcaaatggaagaaccttcgatccatcttgattctcaagactttgcttcgcatccttcttggcttcactcccttgatccccagaagattgttccgttccagcttctccttgggcaggatctaccctcgtatgaggctctcccccagagttctgctcctcctttacacaacacatacaaagagagtatatagtcaaccatagctaaactgacaaccataatcttcacatatcatcaccattgcacaaatcaaatagtcaaccatgtctcaacaatacattagctattatatacatattccattgtcaagcgaaaatatttctacttcccaattccaaaacaatgcaattaggcacaaacaaaaggagacaatacaaaagccaactccttgaataaacaaaaagagctccaaatgaacagtgggaaaaccctaaattctccaattacctgaggtttagtggcgtgatggtgacagagaatccgcctctgcaactcatcaataaagggtgagaccgaaggatccttggaattaagcaacaaaacttcttgagcagtgatgattgccttgatatgctccaaattgatgacaatcgctctctctctacctaaaacagtagatggatacgacaacagtggatcgagaatcctaagatcacgcgccggtaatcccgttcgccgcatgatggagtgtttcccttcttccttcggctccgattgccctgacgagttaagtaccaaccacgtcctcacgccaacgccttttttccttccaccgccgccgccgccaacaccggcggggtacgtcggtgtcggctgaccagtgtttggcgttgatggattcgtactaaaattgaattcatcgggtctagctcctctcatcgcttatgattgttgtgatcagagagagatcgagcagctgaggaatgttggaagtgaaaattggggaatttatattccggctcgtccaccacaaaggacaaaaacggttaagacaaaccggtttttacttttcccccaaatatcaaaatcaaaccgggtttagattttccaccaaaaaccaaaccggttttagcttcttctttgaatttttgttgtgacggaggggatttgctttaaaagtttagggcttttaaaatcggcgacggcgagcggagaattcccaaggaagagtcgatg

SEQ ID NO: 8753 - DNA, 3000 bp, Unknown
  misc_feature (1)..( 3000): cDNA_ID_2036973_gDNA_ID_1971875_Annot_ID_176692 3000 nt of promoter + ATG
gtcggtagatttattttagatttttggtgtgtggcagttttgtatagtcggtagatatgggacaatgataaaatattcatttgatatgatagtatgatttttgaaactaaattgattataaaataaataattgtaaaaaacaccgtggacgcaaagaggttaatcgctgccattggatgaataatacgaggtagggtcgagagatgaataccatgcagcctcccttacgcaatctttatctatctctctgttcatcacttggagcatgagctggccccaaagtggagcacgtaagtcatttagttggcatcatcttcactggcttatactattattctatctatcttaaaaataatactaatatttttttaatctactaaaaatgtttatatgctaaataaagaagatgtttcgaaagctttccacacgtattaactttgtgtcgttttgctctggttcccacacgtatggtactatgattgaatctgtgttgttaaatttatgcatggggttgtaattaaatgttgagtgataaattatttaaagagtttgagagataatataataaaaatagaagtcaagtgattaagaagaagaccaatctgtcttacagagaggatcgtgaggagactgtcgagccgcagctgtataggggtctctcattcatattgtaatccaaatttcgattttgttagttagtacaccaatatatgacacatgcgtacaagtgaaatcatcaaattcatcagaaataatataatattcattataaaaataaatcttcttgtttccatacatttctttaatattgactatgtaaatacgttttctagtttatagattattaatactttttttagtatacgtactatatgtatatgcgataaaatcgtaactattaatatacaaatatgttgatgtatgtgtataatatgttattatacaacatgatataaattatttgtaaactatatttttacttagaaatatcgacttgtaacggtgtaagacttttgaattacaatcatgaaacgatccaagttatgttattgacaaagaaatttagtggatttattagaaaagaaaaaccaattaaaagaatttacaatcacatatagtttttgttaataaaaccccattaagttgacaaaaaaataagatccccactaaaagtataactttgtttaaactttaaacccaattaaacaaagctcttactcaatctaattttaatttagtagctatatagttttcctttacccttaactcatacattatacatattttaaatcagataaaatcttggatatactaggcatgacaccattctaattgaactattataataaaaattttggtttttactatggtatattttgtttttcatgatcctaaattctaaaaataacattttttgtgcattctaatttggtttaaatcataaatttttcagttatttattataatgatttgtgaagttatgagcttgggctatacattattattaaagcccactaaatattttggtatatcaccatacgataagaaccttacatacatctacgaaagcccatcaaccctttgaccaacttgagcattatatttttcgcattgaacataggacgattttggttttctatagtcgatattttgttggaaatagaattttataaatcttctgttattggaaaaacacattttgtccaattttattgtaattatgttatttgacatagtgaagtagattagaatacaagtattttgtaacaatttaataaatataattttataagatgtaagagttcggtttacaggggttgattatcaaaccaaactagaaataaaggtagctcggtagctaaaaaacaattggtctgatttcaaagaatgtatgtatctctatattagtagtaaaccgagctaaaatacactaaaccgatcaaaaactaaacgaaataatcctaaaatttacacgtggctaccaattgggcctaaactgggttgtctggcccaactaaagacaccgaattgaccttttttttttaattttaataatttaataggtgaagcgcagtaccgctccgtcgtgttggctctgaactttgagttcaacttcatcctcgccggcgatttggtaattttccgcaattcgtccctctcttcgccggaatttatagttgttcctttggtcttgtgttcgaattctgcgattgactcaaagcgcaattgagaagtgtttgaagttttgggatatttcttcatttctatattgttctggttagggtttggcaatccttttctataaagtgagtatcttcttggtagaatttgattgaatgagttcgtctctactctcagtttcttatatattagttgtaagtttccaagtaatctgcaagagtgaaacctagagttgaaaaacttttcatttctggatcattttcaatagtttattctcatgttatggcatattaagttactccacacgatcatgaacatgttaatactacctatccaatccaaacagtttattatctgtttctaaactcgattttatgatcagacggttatcaagtagaaattatgaacttgtttggaatcacttagaattatggttaagtaagacatggattttatgaacagatgatggtggccgatttaacaatcttagaacagagacctgcttgaatgccatgcttataccttgcgtttttattgtattggggtttgccgtttttcaatatagaaatcgttgtatgctatgttggatattctatgagaaactttagaaggcgaggggtatcgttgttgcttgcatattgcaaataaatgtagactactactagttcacgtcctcattcctattttgtgtttgttgtacaggtctagttttcttctccatatttcaactgagcctatatagagcatatacgtgcagtttccattattatttggtggatcttccattggtttcactgaggctaatactgctggaagatg

SEQ ID NO: 8754 - DNA, 3000 bp, Unknown
  misc_feature (1)..( 3000): cDNA_ID_2036956_gDNA_ID_1971875_Annot_ID_176700 3000 nt of promoter + ATG
gtgaacaccgatggcgtgatattgacaaagcaaagtgtgtaactcctatgaaatacctggtttattatgtatgttattactcgttatgtcttagcattgttaagtatgttaaagttgctgattgaggatatcaagcatgccttaactgtatgttatgtatctcatttgttgctagtattacatgaaataggatgcagttccatgtgattgaccttgatatcggtcatctcctatatgattaatcatttaattttagttcttgctttctgtgatgaaaccccaattacttatattgtgaccaagagagctcagaaacttgtttattttgtttctgcaggagcggagaaagttatcggttgggccagaaaccactatttatcttcttgtcctagcccatcgattaaagagggccgcctgattctcccccgtgaaaggtaatggcatggttgttgattgatctttggggtctatgatttatctttgattttcttatatcttactattgtcttcctcttttgaagcattgagatttcagttaaaaggttaaaggcacaagaagatatttctcgaaagcccacacaaaacttgaaggtttagtttcttcccccctctggtagtctggcaattggctgctgaaaactctgagtaataattatgttaaaaagagatttttgtttttgcagaatattgcgaaggatgagtttgaaaccaattttgtctcagccgtggttgctcctggagaaattggggtaaagtttgacgacattggtgctcttgaacatgtgaaaaagacactaaatgagttagttattcttcccatgagaaggccagagcttttcacccgtggaaatctcttgcgggtattacattctgttatatacatgtcattatgttcttgactatggacttggaattttctcgtctgggttttcttgaatgcgtgtgtctttgttttttccagccatgtaaaggcatattgctttttggtcctccgggtacgggtaaaacgctgcttgccaaggcgcttgcaacagaagctggggcaaacttcattagcataactggctcaacgcttacctcaaaggtacatggaaccttaaaactatgttgtttgcactgtcacgttgatattccactttgtaaacatcttcatataaataaggagaatatctaatgacataagaaaaacttttccaccccggtcatcgacttattattgtcaatgccgattgtaacttagagtaaatctctttccaactttacctctgattggttctgatttaagtcaatttcgtccattgtttggcacagtggtttggagatgcagagaagctcacgaaggctttgttctcttttgcaagcaaactagcccccgtcattatatttgttgatgaggtgagaaattgtttagctttatatcacttttcaatttcggttattgctttttatgaggaatacttttgtgatgcgtaaaatgtgttactcaaggactaactgtaatttattttgttgtcgtataggttgacagtttgttgggtgctcgtggtggtgcttttgagcacgaggcaacacgaagaatgagaaatgagtttatggcagcttgggatggactcagatcaaaagatagccaaaggattctcattctcggtgccaccaaccgaccttttgatcttgatgacgctgtcattcgtaggctaccaagacggtaatttaagctttcaagtaatttctcctttggaatatttgtatcttttcgataattgtattgaggcttgtgtttataggatatatgtggatttaccagatgcggaaaaccggttgaagatattgaagatatttctgacaccagaaaatcttgaaactggtttcgagtttgataaacttgcaaaggaaaccgaaggatattcaggaagcgatctaaaggtttggtcattcggggtttcatttacaagttcgagtatgattcaacacagtagttctgattccttttcttttcttacattgcagaatctatgcatagcagctgcatacagacctgttcaagaattgttacaagaagaaaacaaggtaaggacatgcataaacccacacagttgatttctgttgttacgaaaaataatttttgtactcactccatgcttttgaaacgtcgaattatcaggactcggtaacaaatgcgtcccctgatctacgaccactgagtttggacgacttcattcaatccaaagctaaggtattgatcaatctcttaaaaaacatcatcatcatctctattcatgttttttcccctggtgtttgcattatcgaaattgcgtcattgtaatgtaatttgcaggtaagtccgtcagtggcatacgacgcgacgacaatgaacgaattgagaaaatggaacgagcaatacggtgaaggagggacccgaactaagtctcctttcggcttctaagccacagttttgttacattcatcaatgtctctctttaacaatagaactcgttgatttgttccatgtcgtaacaataaaagtcactatttcaattttaatcatagttacacaagagagacctttaagaaatgaaaaaatagtaaattaacaagtcgtcatttgctcaaaatatttctggtttctcatccaataatcacaattctgtactacatagttatcacaaatcctttgagataatatttctgcatatactattggtcaagacaaagcaaatcctttgtatttgccgaccaaaaaaaaaaaatccttaaactctctccttacgcgctcttttatttaaatttagcggagaactattacaacgttgactcaacgcgccatggatgcgcgtgagattaaaacacaaaaaatatttcttttgacaaaaattgaaattagccgtatctgctaattccatggcggaaaaaggaacggcgacgaaaactaaagagtagaagaaataagagacactctcttactcttactcttcctcttgctcattttcgtaagagacgatg

SEQ ID NO: 8755 - DNA, 3000 bp, Unknown
  misc_feature (1)..( 3000): cDNA_ID_3043420_gDNA_ID_1971875_Annot_ID_176702 3000 nt of promoter + ATG
tcagccttcttagaaggtccaacatattttacacgatctcctgcaaaaagcgtaaacacaaatagaaatgaggaaaagtgaaaaaattgaccacacaaagagaacttagcagtctgacaagtagaagaggaaagagtgaaaggctaagatagaaagacaataccaggaaaattatgactagatagaatacaaaattactaaatcaaacttatttagcaaactgatacattcaagtgtacctagcacttgtaatgatgaagatgccttccagagccttgatattgatgattacctttctttgccggtcgcctggctttatcagaatgctcaacagctgctgcttcgcaagcttcaccatgtagttcttctgctactagctgccacaatttagaggaggtaagcaaatttcagcaatttctgaaactcaatttaattggaagttcaaaaaaggaacaatgcaaagagtcgcatgtagaaccaagaaacagcattcaaacggcaggaatggtgaaaccttctaattcatgcatagtaactctaataacaagttcatacaaataagataaatcaagaatcagaaaacttatatgacagggtcccaagatcacattgtccacggggtatcgcaaaaagaaaaagaaataccatggtattaccaactaaattaggaaaagaacaatcagtacagactaaaatttctgaatctcaattaatgcaatcataccttttcgaactcttcaagttttggcacaattttcttgatagcttcctcagaaacctcgagacaagcttcctcactgtcactcccatctgctttcgcttcagaatcctcttcgctctgagcactagaatcttcctcagcatcagactctgtcgtggattcatctgcttccgcttctgcgttctcaccatcagattcagattcttcattgtagtcatcagcaaaatcctgatccagaattaaaaaatattacataaacaccaaaaagaacgaaagaaaaatggtggcatgttataggcaaattactcataagaatctcacatatggggcaagaacgctgctgtcaagaaccaacaggggaacttgtacatctcgagcaagtgctcgtaccaacctctcccggtaaagctcagtacctgaataaaattcaaatttcttattggtcatctaacatttcctcaatatttttacttgataacagaagagcaacatcaaatcctggtctgccatttttattctatagtcaataacaaacctggaacactctggagcaatattcttccacttgaagaatctaaacgggcaccatatatggaagcggcattcttttgtcttatatgtgaggtaacacattccaccaaaatatctttcgtgtggtcgctgtgaaaagataatgagcagaatccataagcagaaatggagaaagaaacacaacaagcgagaaaaaaaaacatgttgtagattattactggatgtagtaagggaaggtctcccaagaaagctgtattttttcccaaggttggattctccgtaagaactcgtttttgaatctttctcgtctattaacgaaaggtgactccttctttttgcattcactagcaagcttctcattattgagccattctatttggtcttgttctccaagttgagcatgagaatccaaatgcccaacaccgttattacttttctccttcccggtttttccatcatctacaccattctctttgttcaaagagatatgtttatcctcactagcattccttccatcaccctcagaactaaaactacgcaactggctattcttcaaaatacttaaatgatttcccgaggcaatagtaccaccgcggggagaaaatgaaccaagtagagactttcttgtcaaattttcactattggttaatttatttgtgaatccacaatatctggaaaccgtatagtcacgaacgactggcctaactaagtacttggcttgctgcaataccaaaccccatctctggttcctctttaatgcccttgtatacatcacaaagtcccttctcttccaatataactacaaaaaaaaaaacagagatcattgatttagaatcactttcagggtccatttcttgtactatccaacctaaatgcattgcaacatgtaattgcaccattaaaaaaaaaaaaaaacgagatcaatatcaacgcaaaacatactatagtaactcggaaagaaacatagattctatacaatttatttcgactagaggaataacaacacacttcagggaattaattgattaagaacagacatcaattaaaatgaacgattatgacgcataacggaaaatccaatgtaacaacgaatatgaggcatcgatatagaaatgatgatatattcagcttttgtcatccataactattacaaaacacgaaccgtttaacagagatggacaacaaaactggttctattcatcccccaagctctaagaatcaggcttggtgcaaagaggagatgtaattaggaacgagatagggtgaagaagagagagaaaatcccgacagaggagagagagataaagaccgatctaaagtctgtaggttcttcttctgaagctgaagctgggttcgaagttcagcttcgttgatgcagtgttgtcgttttgacgcaaaattgctacttgccttcctatggatatgggcctaactataaaggcccactaaacatataagagtcggtattttcctgacaaaaaagccctaacaagttgtcggatttacaatcgtacccctatttttaagccgcgcttatctcgaacctatacctgtagagaggaaataagcatttgggggaaatcaatcgaaaaccctaggagagataaaaacaaaaatctagacggagatttatggcgacagcgaatcctggccgtggaggtggtagaagaggcggtggagctatggatgacgataagttggtcttcgagactaccgatggaattgagcccatcacgagcttcaatgat

SEQ ID NO: 8756 - DNA, 3000 bp, Unknown
  misc_feature (1)..( 3000): cDNA_ID_2036952_gDNA_ID_1971875_Annot_ID_176701 3000 nt of promoter + ATG
cccaatacgatggatgtagagctcacggttgttggggagatcataattgataacaagagaaacctgttaaataaagattgtcatgtcaattcacctttaccataagagaatggaacataatctgagacctcaataacagagattgaatttattccgcgcattgttatctagacaaaatatagcggataagtaatgacttacttgttgcacatcaatcccacgtgcccatacatctgttgttatcaaaacacgactatcacctgaccgaaactcattcatgatggcgtctctctccttctgaggcatgtctccatgcattgatgagacagtgaagttgtgacttctcattttctcactaagataatccacctataacaaatgcggagttagagttgagtaaaatatagaaaaggaaccataattcaagaaccctaattacaagaaacattgaaaaaggttttaaaagccaatgcaatctaatagatatctgcaggtgagtacaggttgcaagtactctagcgcagtggacttatattgttaatttcttttagaaataaagaaatacatatattcacaagatagtatgaatttttgagcaattacaagattgcaaatcaagttcagatagcagtgctagaagcttaatgttaacaagtttgagatacagttgcatgagaaccacaattacctttcgtttagtattgcagaagataacagcttgagtgatagtaagcgtgtcataaagatcacagagtgtatcaaatttccactcttccttctcaacagcaacaaaaaattgtttgattccctgaaaagattgtacacaaaaagatagccaatgaagaatatgagtgtcaacctactgtaaaagtaaacatgaacgagcatacagaagcataagaagaaacatacttcaagagtcaactcatcacgcttcacaagtatcttcactggttctgtcataaacttggatgtcatctccaaaatctcgtgaggaagagttgcagaaaccaagcaaacctacaaaaaaaacgtattaggattgaactattatagagtggaatttagctgttcataatacagataatagctaccaaatctacacataagacattcaagcaacttaacagtggctaaaaggtttttaacaacttataattctctcaatccacatagagttcaagaagccaatccataaaataagaaagctaatgcaataacatccaaagaaactagaagttagccaacacataatattgagcagtgaaattgcacctgaagatctggtggaagatatctgtaaacatcatagatctggtccttgaaccctctgctcagcatttcatctgattcatcaagaatcagaagtttaatagctctggtacgaagacttctcctctttatcatgtcacagacacgaccaggtgtcccagacacaacatgaacaccatgctccagcttcctgatgtcttctccaacactattcccaccgatgcaagcatgtgcctgaatattggcatgtaatccaatagcttgtatcgtcttctctgtttgtgtagccagctctcttgttggggataatatcaaggcctgaaccctgcagtccgagataccaaatacatgagtacacatataaaaagatcttgcagcctaaaagaaagtattactcaatcactctaaccgaaaagctaataactatcacaaattttcattgtcattttgattgaacattaatgaatcataattcgttcatctattctacaagtcagacaaacaaatcccaccaaatttgtgaaatcgataagaaacaaaacctaatgatttaggttagagaacaatccgagcaaagcaagtaaagttcaaaattgaaatgaagggtttaatccagctaaaggaacagaaaacatactctctagaagaagtatcaacgacttgacaaacggagagagcaatcatagatgtcttcccggtaccggactgagcttgagcaataacatcacgtccttgaagaatcggcataacagccctctgctgaatcgcggaaggcttctcgaatccatattcgtagacaccgcgaagcacatcttccttaatgcccatatcattgaagctcgtgatgggctcaattccatcggtagtctcgaagaccaacttatcgtcatccatagctccaccgcctcttctaccacctccacggccaggattcgctgtcgccataaatctccgtctagatttttgtttttatctctcctagggttttcgattgatttcccccaaatgcttatttcctctctacaggtataggttcgagataagcgcggcttaaaaataggggtacgattgtaaatccgacaacttgttagggcttttttgtcaggaaaataccgactcttatatgtttagtgggcctttatagttaggcccatatccataggaaggcaagtagcaattttgcgtcaaaacgacaacactgcatcaacgaagctgaacttcgaacccagcttcagcttcagaagaagaacctacagactttagatcggtctttatctctctctcctctgtcgggattttctctctcttcttcaccctatctcgttcctaattacatctcctctttgcaccaagcctgattcttagagcttgggggatgaatagaaccagttttgttgtccatctctgttaaacggttcgtgttttgtaatagttatggatgacaaaagctgaatatatcatcatttctatatcgatgcctcatattcgttgttacattggattttccgttatgcgtcataatcgttcattttaattgatgtctgttcttaatcaattaattccctgaagtgtgttgttattcctctagtcgaaataaattgtatagaatctatgtttctttccgagttactatagtatgttttgcgttgatattgatctcgtttttttttttttttaatggtgcaattacatgttgcaatgcatttaggttggatagtacaagaaatg

SEQ ID NO: 8757 - DNA, 3000 bp, Unknown
  misc_feature (1)..( 3000): cDNA_ID_3055352_gDNA_ID_1971875_Annot_ID_176699 3000 nt of promoter + ATG
actattccaggtatcataggattgactgacatgcaacacacttctcaatttattgtctttgcatcccagacccctttcagtatctaatctgagctgcaacgtttgtcatgttttctatggcctcttattctctttctcttatttgctgttgtagaacagcttgtgttatagcagttgcgaaggctcgtgagacgtttgaacctttccttcatcaggtgacatagatatagctacttttttctttttctttcgtggaggatggaaagcaattttactaattagttaaggtgtactgtacgtaaaaaaaaaaatgaaatataacgttatatattgaaatcatactaccattcagttttgagatttgctggaacttatttgtgcataagagttatcgagtaaacatgttctgcttacagaaactatgtttgggaatactttcatctgaaattttgttattcacatgtttctctttccatacagaaagttttttccagttctcattttcgtttgttttgcgttgatatagttaggggcgaggcttctacacattctcaagagattgcttccaatttctgtatatcttcttcaggtaggtactgttttctttggtttgacggtatcatactcatgatccctttccagcaaattttttgatgtatgttctaaatttgaatagaaagaaggtgaatatttaagtgggcatgaggtgtttctcaagcgggttgcttcagcattcaacagttttgtggagtccacagaaaaatcatgtcgtgacaagtaattctatttccaattcctgttcttaccatgtcggtgcctcctacctgtgttctagtgagctttagtgattgatcaccctttggattttatattgtttgcagatgtatggaggatttagcaagtacaactcgctatgttacatggtctcttcacaacaaggtcattgctacagccctatagctctgtttcaatccaattgagttgtgtacataccatcaagtatccgtttctgattgagtagttttcgtttctcaatgttatgtagaaccgagctggtctacgtcaattcttggactcatttggtggaacagagcataatacgacatcaggtaatgccataggatttagtcttccccaagatgcattaggtggcacaacagacaccaagtcaagatcagatgtaaagctaagccatctcgcctcaaacatcgattcaggttccagtattcagacaacagaaatgcggttggctgatcttctagatagcacactttggaaccgcaagcttgctccttcctctgagagaattgtgtacgcattggtccaacagatattccagggcatacgagagtactttctcgcctctgctgagttaaaggtttgctcctacttcagtttttactcagattcttcttgcttttaaaatgacttttcttttaaaaagtttgtatctgtgttttcttttgttctgcagttcaactgttttcttctaatgcccatcgttgataagttacctgctcttctccgggaagagttggaaaacgcatttgaagacgacctcgatagtatcttcgacatcacgaatctccggcaatcacttgatcaaaagaaacggagcacagagatcgagctcagaagggtaaaccaaactgacttctatgatcaatgtctcttttttctatttgccattggaagtatgcaggagaactaacattatgttatgtgtcatgttttggacagataaagaggataaaagagaaattcagagtgatgaatgagaagctaaactctcatgaatttgctcaaaatctaaaggctccttcggtgcagcattgagtgactcaagttcaatattgcttaattatattaggttaagaaacaatcgaagagtgagggaacatcttatgtgtactttgtatgtccaaaaacatactaaagaacgttgtcgtttcaagtgattaaggtttcgctttttggtccaatgtttgcaaatttcagttttgtagaaacgacagtcgtatcatttatttctaaataaattataatcagtaaatctaaaaggaaaaaaaaatgtcgaataaaaaataccatctagaaaattattttaaaaactatatggatgtgaaaaagaaaaaaaaaatgtaacatgtggatagaggatagctattcttggaacttagaaatatgctatttgaatcgaaagtatttatttagttaaatggttctttgattatatttctatgttcttttattagattatttacagcttgaagttttttttatgtttttaatttttatccatcactaatacacatatgacctaccctcctacccattaacctccacctaactacgagcgcattcacattttaaacactctctttctttcaaccatttcctcaaaaatataataaagaagtaaaaaataagcttaacgttttctccacgtgacaagaaccaaatgtttctccacgtgatgattatctcgtgatctaactagagtttccgattaatcttaatagtaaattaaccgaccaatttttagtcatataacttgaatattaagaaggaaactacaacttatttttgaataaacgtaaaactgatcactgagtaaaaaaaaaatcattttctttttacttctaccaagttatttttgattaataaatacgtacgtacactataatcgtaatataaaaaaaataaaaataaataaatagatgatatatacctactaaagactaaagagttaagatacgttgaagtactacaagctaatttcttttttaagaaatagaacaaagagatattatttattttcgtttaagtttattattataataaaaaacaatttgttgtaaaaatagaaaaaaaaaaaaaaaaaaaattgttgtaaacgtatatataaagagaagtattccaaagctttatagacaactcaagtttcttgcaattacctacttacaacaaagcaactcgactcgaacaaacacatccatg

SEQ ID NO: 8758 - DNA, 3000 bp, Unknown
  misc_feature (1)..( 3000): cDNA_ID_2036987_gDNA_ID_1971875_Annot_ID_176688 3000 nt of promoter + ATG
atgtatgttcgtattcatctatatacagtaatgatgtttttacccctggtccaacgtcggagacgccatggagagcttccgaccaccactcgtacggcggaacaccgagccttggaactcctgtggctttgtttacgagttgctggactttttccttaagggagagacgtgagaccaaatctttggcacgtgcttcatacgacaatgagacgttgcagaaaccatacttagccgtcgctggggcacttatgtcacacgcaaagttcttttgagactcgcaaagtgatgaaactagagctatgattagcagagagagacgcacaaatcttctaatactcatctctctgttttttttactcttatggaatagaagacagagtgaggagctagttttataggcgggaagagaagctaattagctactatttacttcattaaaattaaagtttaacatttacttccaactttaacgatgacataacatcacttgttggtgaatattttataagagaagttaaacctccatgtgatagtgtggaaggaccaaggaccatctctgtttgtcttgcatataagagtgagccaagtgttttccacaaagtgatgagaggacaaaatgtgaagtttaagaaaagggttttgaagagtggcttcaaagatactacacaaccattccaaatgtctgtttcatgtctctggtcctaaagttagagaagcagatcttctatgtctctaagttccacagttccaggagtctttttgatgtctggttggttcaccactagctgaccgcaagcgccgctaatatcctgacccatttctttgcgaattgtagtccggatcttgtatgtttccctcaggattttctggaatcttgacacgccttgtatgctgcttgtttcgaattggcttgtggatccaattggattaaatggtatcaaatttatgacctgttcaagaaaagagcacagagtttccataaaaaatatcatcagataattgcagaacctttaagagtattaagacatcgaagatttaccacttgaaatgtctttagcaattcgcctagtagatgagcgtgctgctcttgatcatttactccatcaagcattatgtactcaatgaagatcttttgttgactgttaaatccaatgacaatgtggcataatgttataatcgtcaatgtaactgaagggattgtggttttaatatttaacagcaacgaaccagtcaagagtacatgaactacctgttcttttggaaagtttgaagtgcatccataagcttttgtaaaggaaaggctctagctgctggcatgatctggcagcggatttcttgaactggtgcatggagggatactgctaaacttacaccgggtagatcattgtgtagcttgttaattgcgtgaacaattccgacctatgcaaatgacattaggatacagggaaatttatttgctaactagtaaaaaaaagtgtcaacacaggcagcattgcatgatttagatttatgcctggaatatacggtacaagcattacggaaggacaaggaaatcagaagaaaatcccaaaacaccaaaatttaaaagtaaccaactagacaaaaaaagctgaaagatgtcttggaagctgcatactgcgaggtttaatggattgaagtttatctatcagttccctttatcaaattccataatctaaagtattcctacaaaattcagtgaataagtttctctgttttacgaatgtttcaaggtagctttctgagtacttacagttgatatggtaattcttttgggcgacagctgaaatggttggtttaacatgacacgaacagcttcaacaacagcattgtagttatttaaaggttctcccattccctgatcacaatcatcaaaccaaggcaacaactggtgaataaaattcatcaatgcagagtatataaaataaataaccataaggcaaggtgcacatagtgtagataaaatgcaataacagaagcagaaatataccatgaaaacgatgttgcgtatatcagcaatgcgagaggcgtgaacaagctgctccacaatttctccagatgttaaattgcttttaaatcccatggtaccagtagcacagaatgtgcaacccatcttacaaccaacctattgataaatactttcacatcacatgtctttcattcgataaaaccaagataacattgcgtgataaaaatcaatacctgagatgaaatacataacgtagatcttatacctccaggacgtggtttccctcctaacatccccaaccgagtatcgtatctcattaccacagcttccacaaaagctccattcttcaatttcaaaaccaaaagcaagaatccaatatgagttcgtcaggaaacagagacattacaagtttttcagaatccataaaagcaatgtgttgtatacagtaacagagtatagagtacctggagcttgatgagaagctttgaggtggtgccatcggaggaatgaaatagcgagtgaagagacgaagtaagagtcttgaacttggaatggagaagagagtatgcagcggaaggcaatgaaggaatctcgtcccaaacgcaatcaggattctgaattacatacttccagatttgaatcgcgaatttagggtttattcccgctgattcaaattccgatttgatttccgaagcatcgaacaccgatttcaacttcatcgactcttccttgggaattctccgctcgccgtcgccgattttaaaagccctaaacttttaaagcaaatcccctccgtcacaacaaaaattcaaagaagaagctaaaaccggtttggtttttggtggaaaatctaaacccggtttgattttgatatttgggggaaaagtaaaaaccggtttgtcttaaccgtttttgtcctttgtggtggacgagccggaatataaattccccaattttcacttccaacattcctcagctgctcgatctctctctgatcacaacaatcataagcg

SEQ ID NO: 8759 - DNA, 784 bp, Unknown
  misc_feature (1)..( 784): cDNA_ID_2178622_gDNA_ID_1971876_Annot_ID_176713 3000 nt of promoter + ATG
gatcaaatattttgaaaatgatgaaatcttattaaaaattgaaattgatatacgacctgtccagatacaatgaagttgttaggttacaacatcagcatgtttcaaaaagggtcaagcaggtacatccaatcaatttatataacgtaaatcctgattttcagagcaatattatttgtatcttttataacctccctagttaattagtaataaaatatttaatttagtagtatcacaagatggagctttaaaagttatctttaattcccacttttgaaaatgataacgtccataaatacatttcaaaacgtttttattctcccaataagatatcaaaaagacaatatcaacaacaaaaaagacaagaaaaaaagacaaaaaataatgatagataaaatacaaaagcaaaagaaaacgtatagtattgcttagagaaagaacaaacatattgtgaattaaaaagaaaaaaaaagagggacaaaagtagaaagacgtggcaaaaagcaaactaaatttcgaccaatccacatctaaaatctaaccttcttcatcagatggaaggaagctacttcaccacccgcagattctgccatgtggcttctctctcttctacagctcacttcttctctctctgtctctctctaactacattgaaaccaaaccagagtgcttcaatgtcattgctgtgattctctttaagtccagacataactcccatatcttcttcttctgtctttttttatttctttgaaccggagaagaagaagaagaaggagaaggatatatg

SEQ ID NO: 8760 - DNA, 3000 bp, Unknown
  misc_feature (1)..( 3000): cDNA_ID_2178639_gDNA_ID_1971876_Annot_ID_176719 3000 nt of promoter + ATG
agatcaacaccttctgatgctatgagacattcgcatatcgtttttgctttattaatctacacaagcatactgaatgttatgctttataagcagatagagtagagaagaaatggaccaatcagtctaaatttaacaaaaggaaagaaaacgagatataccgtttcattttgcttgcctgaaaatccaacagcgatgtgaccaagtaacaccatgtagaaacaattaaaatcaataacaactctttgattgtgggattccagtgattttttatttttccgtgtaatggctaaatcatcccatggaagaagatcgacaatctctgtggccaataacctgctaattgcctggctcaaaaagcatggccagtcttgaatttgacatgaagcttcaacactaaggccctgtctgagcagttcgcgtagcgcggcaattgcacctcgcctcctctctgcattttctggcgtgcgtggcaggcccagtagatccaatgtgcaaggtggtgcaagctcctctagtgactcctcaatctataaatatcaattttaaccccttaaaacccaatatgctggtaaattatgcttttggacaatacgtacttatatgtgaagctcctaaacatgatgcgatttacagtaaggcatgatcatgcacttttaataattcaagccagtaacagggctaaaagtaaactcagagaagctttatatatactaatgcaagacagtagaacctgttacctgagttaacaatgcaagtttcccaagagtaactttactcttcagaaaactttgagcacgagcaagagcttcaaatccttgagagaccttgttaacctcgaaagcagccttggcaattgcacactaaatggaaaacaaacatattagagatagaagaagcagaggatagtgaaagtagataactagttcccattcttagttcatttgattttacctcagcaagtgccatagataagaatatatcatgaatatatggctttgaatcaaggttcctgagagcagcccggccaatatccagcacaagtttttcttgtccaacctgaagcatagtagcagaaagatcagtacaaaacatttgcagggataaaacgcaataaaaggtcagaagtagtacctcttgaagaaggcatagagcaccaggcaaccatgcccacggaattctgagaggagatttaggagcaatcttttcttttaggttaccagcatattctgattcaaaaagaagtttatccctaacatccatgagaagatcctacacattaagaacaaagtatcaagaaactgaagccacattccctgtccaactctagtgatactataggtcttaacctggcgagctgcagcagcttccattgtataaccctcttcagcatcagtttttttcaaatttataaccgacttaacgacctcgtctttctcagcttgctcagaaactccgataagctgcaaaatcaatacaattaacagtatcctggaataatgtctaacaaacgaaacgctacattctttacactctattgcagaaatgaactatgatacaatattaaattgccaaatcaatacatccatctcgttctacgcgctagagactacaaattggaggaaaatgtttctatttcaacaaaatttagaaggataaaaacaagttccacttgcacttcaacgaggagctaagtagcaaatcgcgagagatagtagtatctacagagattccgaaaagtaagtcagtcggagcaaaatacctggtaacacgtaaccgggagttcgattgtagaggtagatgcagcgagagaagaagtacgagacggcgcattgtcgacgacatggataccaccaccagcagcattcaacctcctccgtccttctcgctgaaaccgccgcaaagataaaccagaaccgaagaattcaccggattcagaacgaacgacgaggagacctgagatctgaagctccgggcgatctacgacgaagctggtgctgcgattggagattccgcaaagcagacaagaagaagggagaactggaaatgtgtaagctactggcattgcgcaacagctccagaaaacgaacgaaccctagaagaagtagagtgaagctggaatcatggtacaatttgttggatttcttcagaggagaaaaaatcggaaatttggtctcaaggcttttgagttttgacagtgatttttgcctttttctgaaagtttcgtcttgtgacgataataaggtaacccgctggccgaaagagaggctctgctaatctaggactagacgagacgagacgtggtcacgtgatcacgccacgtggataataaagaaacatctggaagattattttatccgtccctggacatgggcctagctctcggcccataactaatgtgcgagagaaactactgcaagctcatcgcatgctaccagtagtctagtactgatcaaaggtttaatttgtgtgtaagaaaaaacttatatataatttaaaatttgtttaaatctgatcaatatgattttttctgaatcaaatacctggaaagtatatgtctggtgtaaacttttaacttgatcagattttgtaatactttcacttaagtttaatatcatgaaaaaagatttaagatattttgtagtcattatatttttggaggatagcaaattgcaacactcaaacacatttggctatatgagaaccacgtttcctttcttgcaaatcagcacctcttttttgtcccgacttaaaaattcagaaaaataaaatgccaatttagtaaaatagagaatatttttcacaataattttgtgtgttgtacaagaaatgaggtatttcattttattttattttacttttttcctctacaagcaaaaacacacaactacacaaggataaaacctcttgccgttgggtttatttagcttctttgcaatatccttaatttcgtctccgtcagtagcagtctccgccgggaatattttttttccggtagctatg

SEQ ID NO: 8761 - DNA, 3000 bp, Unknown
  misc_feature (1)..( 3000): cDNA_ID_2178651_gDNA_ID_1971876_Annot_ID_176722 3000 nt of promoter + ATG
atccgatatattctgaagaagcaagaagatggattgtggaaattctgccaaagcgatattcaaatacagaagtgaaaatcccccagaaaaaaaagctcatcatctaactaaaggttgtagcatcaacagtagaacatgggatcatttagctaacggttgttcttgtttacctaacggtgtaggaaagtctcaggtttgtttctttattccttagtaacccacaggatttgtctttgtagattcttttgatttcaatgtgtttatggataaacaaacttcttgagtattttttttattattattgtaaagcgttactgatcaaatcaaatgttttcttaaaatagttaaaaatattaagggatctcaaaataattgttaattatggagggaaaaaaaagaaacgtcttttaagaagcccatacctgcttcacgtatcacgatggaggcttactcagaccttccactgttgagaatttgaaatttcaatttgtttgattagacacaatgattaagatttttattacataaaaagaaaaaaaaaattggagaagtataaacacatacatagcggtgaaagaagaaacccaacggtcactcaaaagcgcattgaagagtcaagcaagacttggatctgtctctttcgtttctctatctctgtttcggattcctaagagaaatggtggaatcggagctaagctatgaacagattcgtttgaatagggtggaagagaacaagaagagaatgggggagcttaatctcaacaagcttgctcaatctcttcgtgtctcttcttcttcttcttcttcttccaagccctcaccagtaacgtttcctttctcttctcttctcatttcttcttttctttttctgaaattaaccaattttttttatggaaatgtaggcaaagccaagaacgatgcgtattccagtggatttctcggaggtcaggagatcaagccgtgccaaaggtccacctccaagttataaagaggtcttttactaccatttatctttacttgagtttccttaaggatttcttaaggattttgtatgagatatgaaatttgtgggtttgatctttttgtgcaatttttcttagttataatttgcgtgagttgtttctcttttttttgaataaaaacgtgagttgtttctcattactcattatcagagttatctgatccttactcgcagtttgggctagaaccactggagaggaggccaagaaggttgaccaatccacactctctatgaatacattacttctcttacactatttgatgtttgttttcacttttcagtataagttatgtgttttgctttgcaggagctctcgaagaagagatttgctgaatcgggtatatgcttcggacgacgcaagaatgtacgcattcgacagggcagagaagctccagtcaagcttagattcagaatatgcaagctttaccaaaccaatgctccaatcacacgtgaccggaggattttggttggtaagtgaacaacttgaacattcaaagatgtctgaaactcagccatagtagtatgtaaaagtccactgatgtcatatgttttcgtaaccagggtttgccgcttcctttttgcaaggcacatatgccaaaacgtgatgtaataatgactttggttgacgaagaagaggaggaatctcaggcgaaataccttgctcagaagaacggtcttagtggaggctggcgaggtttcgccattgatcaccagttagtcgatggagatgctgtagtgtttcaccttatcgctcgaacaacgttcaaggtaaaggagttttacttagagatcttgaaatacaccctggtagagagactttggcattgatgttgaaacatattgcttgttccaggtgtatatcattagggtaaatgatgatgcaaacaatgattcagatgggaatgaggtaaatgatgatgattcagatgggaatgaagaagatcgagataatgataatgaatcaaacgagaaacagaaggaaactgtttcagaaggtagacagttgagaagcagtggtaagaggaaaagacgaggtaataatgtttcaaatctatttacctcttgactcttgtaataatatctgttcgataagataaaactaaatttgttgattgatgtgtgcaggaagaaagtagagtttgaaggtttaaatgggacttctagttctatggaaggagtgggaagatgaactaaaacttaacataacagctttttgcgagttttttggctgaacagtgaagttgtgcaatgaggggattgtttttgtgtcttgttatggagacaaacatggaacgttacggctaaatattttgattttggtaactacgattatttcatgatattttatgatttggataagggaaagagaaacaaactttaagaaaaaggttgaaagagaagtcccaccaaaccaaaaaataaatcgtaatcacacaaaaaccaaaaaactttataaccgaactaaaccaaactaaaccagataactaaatggccacctacagatttgtgtagtggaatttaagccattaaaaataaacagttttaaaattatgttgataaaccctggcttgatataataagataagggattgaagacataattcgttgagaattgacgcatttaccccttaatttatgatgtgatcaactaactaattagagcccaattaggattgagaaccggtttttgagtaaccggtacaataatagatccggttaaggaagaaagaatagaaagagacggcacttattcctccacacggtaaagcaaaagcccgtaggacgaagacgacgacgacgaaagtctactcaacttttttgcttccttctgattctctctctctccgcaatccaatcacgagaaaccttcacgtcaccatcccttagaaaaaccctaaaatctcatcaaatcccaaaatcagggtcttcgactagagattctctaatcccgcaggggaagggaacaacaaacaaacaag

SEQ ID NO: 8762 - DNA, 3000 bp, Unknown
  misc_feature (1)..( 3000): cDNA_ID_3043463_gDNA_ID_1971876_Annot_ID_176728 3000 nt of promoter + ATG
aaaactttagtttctcttataactatagtgaacacttttggtcaggctatcagattcgcatgtctaggcttgctgttaaatgcagagaggaggggaaagacaagtttacagtgtgcggagactagggagctttgcaagtgactcaggaattgctccagtgaactgattgtcctctaaatgtctgcctcatcccacaaaacaaaacggtaagtccaataatctaaatctcttgcacaacacttagaagtttggttgcaaaaaggcatacagagtttccaatctcgtcattggactcaaatctgggatcggtcctgtgagcttgttcttccccaaccatctgcaaatccggaagttgcagctgagtcttatttaacaaaaagaaaaaatctcagacaaaattttaggatgtgaagtccttacagatctttaagggcagtcatcttgtttatgcttggtggtagagacccagatagtccaagatttgtcaaatttctagcaagagaaccaggttcttggagatttagacttagtaattgacgacagctgcataaaaagcttcactagagtattgagttttgacttacagagaaatcactctggcgattttgtctttggagcaagttaggccagtccacgagttagcacgagggaggcatgggtcgccggaccaatccactggaggcttcatgatgctctctaacagatcttccatagcaattgctgcagaagagaatgtttttgttccagtggcttcagttattacaaaatagacaaaaacatgaagaagaaggaaacatttacagtaccatctttaatattagtggttccaccaagaggaagaatttgaaacacttctccggcgttaatgaaaggtccaaccggcgcatccttggccggagtcaatgtgatctgagtctgacccgataatggccactggccagagtaaaccataaccccattagtgctcacattgagcttccttaaaaaggaaagtccattgactgagacatcaaaagccctccagctcatggggcctggactccgattgtcctgaaaatacaaagctacatagtactttgtggccggaagaggaaaaggtggccattgaagctctagaggcttccctttacttgctgtgaaaccttccacaaaggcttcagcaggtggaatgttccagaagtttgacgggttaattctgcttcgagaagtcaccgtcagatgcttctggtccgaaaacggttgccataaacggttgtatttgtcatctggatagctaggtttccaacatgtaacataccatcaaaagtcaggcaagaaaaagtgcttttcagatcaccaaactatggaatcaaaaagggcacctgatgatctccccatctcctccaaagctgttcctggctatgaggctgagcttgtaggacccgaggtctgtggaattgtacattgtatcttcaagagattggacatctaaagacgatataaaaggagaggaagaaagggtatgtgcattcttggctagacaaacacttagtctgttcccaggaacaccaacaatgatctcgtaataagaactctgacccttggcgtaatcctctgacgtattcacgacgctccattttgtgcctccaatgatctgatcaaacacaggtgggttgtttttaccgtcaaagttaccgtagtagtaagtggttcgaataaggtacttggaggtctttgcgacagggaaattataacagtgttttcgcgatgacttgtcgggaaagtaacgtagtgtggagaggatcggaacgaggtctttttgcttaatggtcgtcgtatttcccacggaaatgaatccttcgtccggtgtgtattctatctcgttgaggtttgttgaagaagatgatccacaatttaagaagaaacctttcacatggaatgaaactcgacgttttagggtagtctataacaattgtaagcatggattcaagagtgtttttggaaattctgtaaatggattatcaagattcgatcgaaaatgtaaaaaaaaaaatcagaaaaataataaataagaatcgcaaaaacgaaatttacctcgaggaggagggagagcgtgagagatggagaagcataataagagaaagaagaacagagacattattgtgacgtattttgttgaagaaacagacaaagaagaagaagaagaagatcagattctttccattgtcgttaatggagatcatacaaagattgaaagtagagaaaatgtctgaaaaatgttaatttcttttttttgcaataaagttaagagttaatttaataagacatacaatatagaataagaaagcgcctgtagctcagtggatagagcgtctgtttcctaagcagaaggtcgtaggttcgacccctacctggcgcgtttttattttggccttatctattatttttcatgtaaccttttctctgtgtttcatactactttcaattatctcgattatcatctttttatacgtgaataatgcaaaaatatttgtattttcataggagagtttacaaccttttctctttgtattttcaaatgtatgaatttaaaaatattttaaatgtacaacctttgtaacaattaaatatataaagtgaaagattattgtgagttctaataagttttaacaatagtaaatggttttttttagaacgactctgtctgcaacagagtgactcggagtgaccaacgcgtcctaaaagcgttgcgtcatgttgaagcaaacccaactttattccgacgctaaccaacagattcacgaaaccctataaatacttagaaatccctaatcctcctctaaatccctaacttcttcccctacactctctcacacaattttctcgagaaattttccaatttcctttcgatttcgcccagaaatttcggtaactttcagattctgttcagaacgaagaaacttgttatttttggctacttctctccgattctgttcttcttgtagtagctgatcgcattcc

SEQ ID NO: 8763 - DNA, 3000 bp, Unknown
  misc_feature (1)..( 3000): cDNA_ID_1450412_gDNA_ID_1971876_Annot_ID_176732 3000 nt of promoter + ATG
tttaacgacggttttttggtctccaatcataattagcttgtattattttgtttttttttctttgaataatttcgtacacaatctaaatgagtgtgattcataagattatagaaatgttggtctaaaacatttgttttcattccgctcggatcagttgtattaaccataaacaactcaaaaatattgcattgtcaatcataatctcgtgaatcgcatataaacttgtaaacgataaaagatatttgaatctattatacattttcaattaaagctattcgatgtaggtgataacaaaggaaaaaaccttatgtagaattacggtcgtcgtattatcataatcgcgtatatttaagaaaaatggttgccgttgcgttatggaagtctccagatccgaccaactagaggaaaaaaactgaaatgtgttgttttccactaattttgtcctttgttgtgtccatacgatctcaaacccttaagaattagatcccccaaaccaaaacagtaacacgagacgaatcacctgatgtcacaaccgagcgtgcgtcccacgctctttggcaaggtttccacgtgtcagttttcctccgtacggtttcggacccatttgttccaccggaaacgacgggtggagagaggttcccgccatcttatggtaatcggaaaatgagctgtattgcataaaaatgagtcccacaaagtgtcacgtcatcacgtgaacacaatgcgccgactccaccagattatttcttcccctctccgcaaattatttccattttcgttgattttctatttctttttttagatcacccaattgacggcaactaccttcttaaccacaatttttttctggcagccatcgacttttgtttcgtatttaaaagtaaaaagatccatttcaaagtacaaataaaaatcttatcattccaacgtataatataacacaacttttaaaaacattatgcatgacaagggtctattacgtaaggcatattattgcaaatgacaaccattttggccagtttagaaaatgtaccagaaaaaacatattagaaattttatttttgttaacttgtgatatagttgtgataaacgttagcctataggtttaaatcagacggagacaattggtaagtgtaaggcaccgccaccgactttgtcctcataggtccatttcatttaccctcgtaatatttcattctaagattgtgacaaatatgcgtcagttttcatttgatcattgatatcatacatgtattcatctaaaatatttactagtcttaaaaatatcatagtttttttttcttatatataatgaaagatgttccaaacctttttgatgtatatatacttaagagttacattcattttatttcttgggcataaagatgtacatatattactatattattcactagtgtaaattacacgatgcaaagttttgatttctgacattgatatgtaatttagtggtttgtaatattattgatgtgtcactagtcgtattcgagtttgaaattatgatttatgcatatttttaaaagaaaagaaataaagcaatgtaaaatacacgactaatatatttcgtagtaactaagattatttcagtcaagatatttccgtataaaatgtattaaactcgaacaaagaagaaactactagatcaatctctaaagaatgctacacaaattgggcaacgtcaatcttaggttatgttactaaaagtggcaaatcccatctagaaagggattatgccttgtaaggaaatactttgtcacgagcaaaatgccatgttcttttctagatctcgatatgtaagcttcaaaagctattgatggctaatttgagatccattattcaatttgtactatacgtaattaagacacccgtaaatgttgtcatgtagaagaaactagaaacgttaaacgcatcaaatcaagaaattaaattgaaggtaatttttaacgccgcctttcaaatattcttcctaggagaggctacaagacgcgtatttctttcgaattctccaaaccattaccattttgatatataataccgacatgccgttgataaagtttgtatgcaaatcgttcattgggtatgagcaaatgccatccattggttcttgtaattaaatggtccaaaaatagtttgttcccactactagttactaatttgtatcactctgcaaaataatcatgatataaacgtatgtgctatttctaattaaaactcaaaagtaatcaatgtacaatgcagagatgaccataaaagaacattaaaacactacttccactaaatctatggggtgccttggcaaggcaattgaataaggagaatgcatcaagatgatatagaaaatgctattcagtttataacattaatgttttggcggaaaattttctatatattagacctttctgtaaaaaaaaaaaaatgatgtagaaaatgctattatgtttcaaaaatttcgcactagtataatacggaacattgtagtttacactgctcattaccatgaaaaccaaggcagtatataccaacattaataaactaaatcgcgatttctagcacccccattaattaattttactattatacattctctttgcttctcgaaataataaacttctctatatcattctacataataaataagaaagaaatcgacaagatctaaatttagatctattcagctttttcgcctgagaagccaaaattgtgaatagaagaaagcagtcgtcatcttcccacgtttggacgaaataaaacataacaataataaaataataaatcaaatatataaatccctaatttgtctttattactccacaattttctatgtgtatatatatacccacctctctcttgtgtatttgtgtatgtttttgttccctattatatcttctagcttctttcttcctcttcttccttaaaaattcatcctccaaaacattctatcatcaacgaaacatttcatattaaattaaataataatcgatg

SEQ ID NO: 8764 - DNA, 3000 bp, Unknown
  misc_feature (1)..( 3000): cDNA_ID_3043469_gDNA_ID_1971876_Annot_ID_176725 3000 nt of promoter + ATG
aatttgacaaatcttggactatctgggtctctaccaccaagcataaacaagatgactgcccttaaagatctgtaaggacttcacatcctaaaattttgtctgagattttttctttttgttaaataagactcagctgcaacttccggatttgcagatggttggggaagaacaagctcacaggaccgatcccagatttgagtccaatgacgagattggaaactctgtatgcctttttgcaaccaaacttctaagtgttgtgcaagagatttagattattggacttaccgttttgttttgtgggatgaggcagacatttagaggacaatcagttcactggagcaattcctgagtcacttgcaaagctccctagtctccgcacactgtaaacttgtctttcccctcctctctgcatttaacagcaagcctagacatgcgaatctgatagcctgaccaaaagtgttcactatagttataagagaaactaaagttttgacctgtaacacgattgcaacatcatcataactagcatcatcattgttgatgttaattgttaatctgcaggtccatcaagaacaacaagcttaaaggtacaattcctagtgtactcctccagagaaagggcctaactatccagtaagaatcataaccatgttggtaccttaaaaagaaacaccatttttcataagcattttgatgtcaaaaaatatccttacttgttgtagggcgtctcctgagaacatgccaagcacaaataataccggccaatttcgggttgctaacagctgattcaagtgctcgttaatgataaatccgattctataaactacgcggtcatctttcatggcctcgaaaattgaagtgcacagatgtcatggagaaagggttcgatcaaggaagcatctgggaacgacacttctacttttgtgagtttcttctagatgaccgtattatatccttccaaatcatggaatttaagtatttatctgtttatgttatcgaaccacctttgaacccgtagagtaacttgaaccaagaggtaaagcacacaaagataattaaatggatcgtgttacagctatcttttctcttgatgtacataagtcagactgaaacagcctaaaaacacaaacaattcctgcagttcgtggtgtctcgaggtctgatacatataaaacagaaattgcctatatggggactattggtgaaagaagaagccattatctgagcaagaatcagtagtttttgtctatacctccgatcagcttgtttgggccaaacatcccaaagaagcacttatctctcttctggttatagttttgtacgtgcaacggatacacttcaataacgaacccaagcttacatgcaaaaatgggccatattcaaggtcaagatggttcattatccaaatcttccatcacttcaatgtccgtccgagatgttatcttctgcacatatcctgcaattagtttaaacttcttaagtcaattgcatgtaaaacactaaatctaaaccaaactgcaaaactcagaaagtgtggctttgtttactttttcacaaataccaatcaagaaaccaactcatagatactctagaatcttaaaactatcataggaaaaacatggaaaaagagccacactcagaaacttacctatcccttggcagggtatgcatttgcatataacctctttaccccttttcttgtaatagctgacagttccagatccttggcaacttctacactttccagtccattcataaaccacttcccggcaatcctaaaaattggtcgggttatattgtgatcagaaaaaacaatcccaaaaaggcattctaaagcaaatactgcatcaaaaagaaaatattgcctaaacacacccaaaactggggtgaagagtaactcggagcaaatctttccgaaaaaggataattcatgtcaaaatttaattcctatcttatatcgacaagagcttgcatctatatttttcatgtttttgacacacatgcttttataaaataagtccattgttgagtttcacatttcagaaacatcattcaccttccagaatctaagcttatcgctccataagaaagaccaattaaacttaatgtcattcgtcaagctacaagatcaactcatatatttgtgcatattgattggttcgaagattaaactatagagcaaatcaaacagccaatcgtcagctaaagcaattaaaatgttcatctaaattaagtgcaagtatgttgagtcttattcaatcatcaaaattagtaaatgaaagttgaagcaaagcaaaaaacctcgactacaggatcacattgcaacctccggtcaatcacatccggcgacacaggggatgtatcaggataagtcataggaagaggaagcgcgtcgccatcatctaccaagtaactctctccacttttcgaccagagcaacctcctcttcctccacttagcaccttcaccattcccaccggcggcgacggaaacatcccgagacctcgccgtgtcagaggttgaatccgcttctcgaggtaatcggattccgtcaccaaggggaatatcagcggcggcgcggcaacggagggagcgagaaggaagacgaggaaggaaaacgagaggtctgtgagaaggcagagagcaattagggtataatcggaacattgagacgagaagtttgcaggtgcggccatgaaattgggtgaagtaatcaacctcgacgaattaaaaaaattcggatatttttgtttttgtgtgtaaatacttaaaaacttggggaaaattacaaatttacaatcttcatgaaactaactgttaggaaaaattgtagcgtcccatatactctgaaggatattttagtccttttctgataaggttattttatttcaaataatttggtttttctttgtttttgtttttggttttatttcttgccgccaaaagagttttaggattggtcaaaagcggagctctgggctcgtaggtgtaacgaaaatg

SEQ ID NO: 8765 - DNA, 3000 bp, Unknown
  misc_feature (1)..( 3000): cDNA_ID_3052858_gDNA_ID_1971876_Annot_ID_176720 3000 nt of promoter + ATG
ttaatttgacttctaacaaaccttgaattcctcaaatgtcagattaggaatatcttttggatcacctccactgtcaacaccatatgtattttctggggataaggcctaataaaagtgaaaacagtagtagctgatttcatcagaaccactatatcaaggaaattcaaatatgtctcagattatctaacaaggtttttgttccaagtgtccaaacgactctttcatgatggctatatcatttagttgattaataaggtcaaaacccaagatcaggttaaaccaacaacgagaaacttctagttatagtaagcaaaacacaatacttgcctgttgagcaattcgccctaaaatattatcaggctgtgaatagacccctttcatctcattaaaaacaacacctgaaatcaaacatcaacaatgagataggatgagtgggtatctgaagtagctgataaactaaaagatatcatcgatactaagaaaagtagaggaaaagagctctaaaatggaatcctaggtaaataaaacctttgtaagatatgtcttccgagggatcattaagttcatagtgccagccctcttgctgaaaggtgtgagcgtcatccacacacttggggaagaagacagcatccaaatatacatcgacaagattgtaaaaatcctaccatagatagtgatagtgatgagttgtgatcagaaatagactcactttagataacaataacagaaagaaagaggttagcccactgaggacaacaaaagaaggacttaatgtttggctcattgtacctttgtattggtggaagcaactgggtagcaggtcctatcaggatatgtgaatgcatttagaaaagtatgcaaacttcccttgagtagttcaacaaatggctcttttaccgggtactttcttgacccacatagaacgctatgttccagtatgtgcggaatgccagtggaatccttcctgcattaacaacgaaactatgatctaaaattgcttccattattagtttttgcaagtctttcacaaggaggtgcctgtgggaccaatatctactgaaagtgcagttgctcatatcgacttttaacaaagcgttaagtaatttgacaagttgtaacctccaaaacttagaccactttacaagtaccaatatattagaagaagaaacgaaatgactaggtctaatcagaaaaaaaaagctttgatgagtagagataaacttgaccatttcaattagttaaattcaaggagtgaagctttaggtaccaatttcaattgcctaatacatactcaggtcaaatttacagagagtaaaaattattatgaagtaaacttacggaggagttctgaaaacaacaccgaagaccttgttctcatcctcatttgacacagacatcacctcgcaaccagttttcttgtgtttgaagagtatcgcctttgatttacactctgagatgaattcttccgacactttttcaaatccaagcttctcagcctcatcttgacctacatctgaatccaaacaaccaaaaataaggaaaatcacgcatcagcagaggttacacatggctccatttgattacaaagtagacacaaagcatgagatgaaaaatgcaccacacggaccacacctatctacaattcacaacctatcctaaagtaagaaccacaatttcacaagtgccacaaatcaacatgtccgaattaagagaacaaatcaattagcaattaaacttcaaacagattgaaaaaaagaagtatatgtgaaaaattccaaccaggataaagtggagcgggttgtgtggcgacggcgcgaacagagaggcgagagaactgcccattgacactgcgaactgcggcggagggaatcctcaaacctcgtcggagcaaaagacgtctaccggcgactgagggagaggaaattcggcgaagattgcgactggggacacggagagctgccgtcgacgatgtgagagacatgtaagagcgagggaactgacgaaagaagcgaaagaatagagaggacgagctgcgcgaagctaaacaagagacggttcggagcatagctaccggaaaaaaaatattcccggcggagactgctactgacggagacgaaattaaggatattgcaaagaagctaaataaacccaacggcaagaggttttatccttgtgtagttgtgtgtttttgcttgtagaggaaaaaagtaaaataaaataaaatgaaatacctcatttcttgtacaacacacaaaattattgtgaaaaatattctctattttactaaattggcattttatttttctgaatttttaagtcgggacaaaaaagaggtgctgatttgcaagaaaggaaacgtggttctcatatagccaaatgtgtttgagtgttgcaatttgctatcctccaaaaatataatgactacaaaatatcttaaatcttttttcatgatattaaacttaagtgaaagtattacaaaatctgatcaagttaaaagtttacaccagacatatactttccaggtatttgattcagaaaaaatcatattgatcagatttaaacaaattttaaattatatataagttttttcttacacacaaattaaacctttgatcagtactagactactggtagcatgcgatgagcttgcagtagtttctctcgcacattagttatgggccgagagctaggcccatgtccagggacggataaaataatcttccagatgtttctttattatccacgtggcgtgatcacgtgaccacgtctcgtctcgtctagtcctagattagcagagcctctctttcggccagcgggttaccttattatcgtcacaagacgaaactttcagaaaaaggcaaaaatcactgtcaaaactcaaaagccttgagaccaaatttccgattttttctcctctgaagaaatccaacaaattgtaccatgattccagcttcactctacttcttctagggttcgttcgttttctggagctgttgcgca

SEQ ID NO: 8766 - DNA, 3000 bp, Unknown
  misc_feature (1)..( 3000): cDNA_ID_3043507_gDNA_ID_1971877_Annot_ID_176758 3000 nt of promoter + ATG
agaatcgtgaaacagatgctgatggatctcttaacgatctgattgagtctctggagagaaagaagaaggttcagatagctcaagtagatgaacacaaggaatatagtaataagatagttgaagcatttcgcaagttattttaagcttgattcatgatctgattcagtttcttttcactattgttgtcgagtcttaacataaaaattcacagataagtaaacttgtatcgctgcacagaacattgatgattaattaagttagtcccgtttggtttacctgtgtagattttctagtcagtttcaagatgactgcattctagtgactcttagactttctccaaagctctcctttggtgttgaatcaaagcatcactctgaatcatctcctcatctttcttgaaaagatcttccatctcgattcaaatgacgaagctgcagaaactaaacaagggaagctttcatcatccataaacatatatacattcacaaggcaatgttcaattcttagagatgaagaaagatggtaccttgacttacagaatgcaagcacaaagccatggtcttcctgtacttgaagcttttgcaccacctctgatttctccatagtgctgctttaatctaaatcaacaacaagctctttacttttcaaattccttgaaaactatgaatcaaaagctcatgccttaagcagaaacctcaatgtaaccaaaaagctcatgcctttttgaagcagaaacctaaatggtaatcaaaaagctcaacaagcactttgctttttagattccttaagatctacaagtcgaaagctcgtgcctttcgaaacagaatctaccaaaatccaatttatattcataagcatgaagggagaagagacgatgacgaaccggcgagcgaaatccgacatatgttttgatgggttcggtcgtggagagaatgagataaacggaccagaccaggaattagatttggggatctcttgcgattggatgcgaagaagaagatggactcggaacttgggtttggaaagttttcaaatttttgaaacccggagctttagagttgcagcaatggggaacgtcatcacaattctctcgccatcttcatcatcttccccataatcacatacgcagaataattcgacttgcaaaaccaagttgaaccgaaccgaaccgaaccaaaccgaagctgaaaatttaattggattaccggtttggttgggttcggaattgatttggtttaagctctgctataatgaggtatgtttataccaacaaaaaaaaggaaatacaacaatatatgaccgttaaaacatgcttaaagtaaaaaacaataaggaaattagaaagaaaaaaggaaattagaaagaagaaaggaaattaggttaacgcgttacaacaaactataatcagaaaattttgcttatataaacacaacaatacactttttgtgacatctccacaattacaattttctcaacaatctctcttccttacgaatcatcatcatctttcactctgtctctgatcagttttgttcaaatatcactcgctcgacaatggaaacagaatctttcaaactcgatgttcatgtacaagctttgtctcaagatcagtcgttagggttcgtaagtacggtactaatcagtcaatacagagaagtagaggaatttctcatcaacgagaaggatgatactgtcacaagtctcggatcttacccggaggattcttctactagtcacgacccactaatctctctgaaactcccaagtttcaaaccaaacgacgtctatcaacgtctccagacccatctccacgatcatgacttgtccgaacaattatcttacaagattgtccaagcccaacaacggcaaaaaagacaaagtttttacttgccacaacaacgacctttattcatgatcgtctctgtcaaattgacacacaaggtttacaacgttgtgtcttgtgattctgctccgttggcaacagatttcgaccaagagagccaacaagaagaagaagaggaatcgaagacttgtgccatctgtttggagaatttgttgagatcggaggattactgcgagatgcctacttgttcccattattttcatgaaccatgtctcactgagtggttgactcgagataataactcatgccctctctgtcgcaaacctgttgacaaactacacagttgactacatgtttactaaattagggttttcacttttatgttttacttgttaacttgtttcacgtttatgttttgtcgaagatgcagattagggtttttcatagtttatgtatctgtttttgttggcaactatgtaatacagtaatgattttatcaatttcatttacaagtttgatactagtatgcgacacatatctcttgcaacacaaatcactgacttaaaccaaatatagtttcaggagtaaactagatctgattcagtctctggagaggaagaagaaggttcagagagctcaaatagatgaccacaagaaatctagttacaagatagttaaagcatttcgcaagttattttaagcctgattcatggtttaacaattttagcttataagtttcgactctccataagtgttctctttggatgtgaattactaatattagatgacatgaaatcccattcaaatataagtactttgctgtttcctaatatgcccttaataacaatattaacaccacaaataagaaaacaaagaaacctcttttttctctaatccaaatgaaagaaactaaaaaagggttctaaagtacctgaaattgtttcacatgaatgatcttcaatccaatccttggaggtaaaatcgcagctgtggccatcaaaagatccctgtttcaggtatagccaaagcgaacgtcgatatcattttcgaattccaacatgaatgttttaatgaaatttgctggaaagagattggctttaaaggattctgtatacaatttgtgacagatttttgtaattttatacaaaagaacaata

SEQ ID NO: 8767 - DNA, 3000 bp, Unknown
  misc_feature (1)..( 3000): cDNA_ID_3043496_gDNA_ID_1971877_Annot_ID_176765 3000 nt of promoter + ATG
gaataaattaatatcaaaaggggatgtagctcagatggtagagcgctcgcttagcatgcgagaggtacggggatcgataccccgcatctccacttttctttttcttattttatatttataccacctcaatgtttcaataattgtatagtttgaactgtttatttgttggaatactaatgttaaaagttttaaaaaaaaatcttgttagtaaaacttgaaataaaaattacgtgttctatattttgttgtactttattagttactttacatcttcgattaattaataattcttttgtaataataaaatgtatttttgtatattatttttttaaccaggcctttcccaaaatctccttcaattttaaaacaaccatattaaataagttgaactttgaaccaaaaacataagagaactaaactcttaattttatttcactagaccaatatcttattaataaaatgtatatttgttacaaaaacaataaaaattaaaaagataattgtcctaactcctaacatcacaagtttcaacatattgaaaaaaaactcaaattcatctcttttaaaataaagctctccctttttttctacaaaagtttatgtcgccacctactaagattatcggtttcaatggctttttcagccggggtttctttgttttagtctctctaattttgatttcttatgagtttgatgttatctgaatcttattttcttccaactatttcagatctaactctataaagtctaaatcctttattcttctggatttgctgtttattttgtctccttcatccttcatctgcagctttagttccgactgttccaaccataaaggcaggttttgtcgatccttcaacgcttcaaatacatatttttcactattaaagatctcgatttccttcctttcttcataagactttggggtaagaagagccttggttttattttctttagatagatctctagtctcagatatgtttttattttttaatttaattcggacttacacttatactttagttttgaaatctttagttatgagtttgagaaatttgggttcagtatcaatgttgttgtttttttatatataattttggatttttcctcctttggatctatctttattcgagagatatcgtttgctcgtcgacttagtttttggaatgattgttttttttgctgacatatgtatttcaccatttgtattccatctctctatcaatgaaactagtgaaaaaataaataaattaactcctcacatcttgttgagtataagagatagtcatttagttggtaaggttccatttccactagaaatattcatggtatcgttataacgttattcaacaacacatattctagatgttagatttgtcttatattaaaatccataaacaaaacaccttatacatgttaccatcggtccttgtacgttcgccgcatatctccgacttctctccgccgtccactggtgactctacgctcactctaaaaatctgtttactatataaaaaaaactaaacaaaagagaggattagattcattggtctaagtctagagtcaagaacaccaccaccacctgtaatcccaacaagtttagttgcctaccgtttatcgttatctaaaacaccttaatgtttccacgtgtcatcatctcacaagaatgtcacaaaaaagcttatattcttctagatgtaacattagcataactatatcccaaaaaagtctaccctttcgtcttgtttattttaacctcaattattacctttttatacatataattatgggactatatatgaactgattaatactattttcgaatcttaaaatgagttaataaagttatcaacatacactcatactcgcttaaactaagatatcttaacatttctaagatctaaagaataatttggtgaaagagaacaccaaaatatatcatcaaattttacttagattatgttacaataaaaaaaaattaaacatgtcaattgtaaaaataacattaccaattattcttatttttcatagaaaaattttatgtaccaaaataatctattttaaaccacaaacaaaatacatattaaattattattccaactcttttttaatggtaagaaattcaaatacttgtagaagacaaccttgttttgtcatgtgttataatatctatatattaattggaaattaatttctgttaattaaataatattttttaaagagctaataaataatattcttacattcaatttattgcattgaattattaacatatggtaaaaagttcttacaaataaatatataattttttcgaaaattgttataaaaaaaactttatataattggccaaagattatattgaccaaatcaatcatcattaaatttctattcttgtacgcgtattttataacaatttaagtaagattagtgtaaacattatacaagattataagttttcataaaaataagatttgtaggcgtactttatttgttgcccaagctgaccaaattacttatctctcttactcaagctgcccaatctgcccgttgctgaccactttcactctctctctctctgaagatgccctttcgtagctctctagctctcacgcacgcaaaaaaaatctccccttttgactaaaactttctccaccaatttgttttcttttgttcttccttctcttctttgtccccaattaaggagctcaaattcacttctactgaactgggttttaccatttgcttttgatctttggtttctgttcgattttggaggaaaaaaggatcaaactttatattaagagagaattgggtttcgttgatcttcatctttctattgatttcattatctgggtttgatcaaagttttgttttttggtacataaatatgtgatcagagagagtgatctactctagggttgattcgcttgactttttttggtttttgaattattggtgtttgtgtgttggctatggtgatttgatttggaattagggttc

SEQ ID NO: 8768 - DNA, 3000 bp, Unknown
  misc_feature (1)..( 3000): cDNA_ID_3043481_gDNA_ID_1971877_Annot_ID_176769 3000 nt of promoter + ATG
cctgatgtactctaaaaaggtagacattggctcagtagcttggcaaagcatatgcttgtagtcatcaacaagcttgagcgtacacttctccacaattgtagtggtatgcagaggtgatggttctgcgttacaaaacaacgattcagatgcaaaaactagaaactgagactcaaggaatcaatttgtcgtctaaacatcagatttcagatccacaaacaacattttgttaacaagactacaaaatttcacatcgaaatttcttcaattcgcagattaaattggtgatttgggagagtttgaaatgcctaaaacccagaatcgaagtcaaattatcaaaactgagtcaaaattgtgagagacaatcaggaatcatcatcataacgcaccgttttggaggtaaggaccgtatttggtggcagagagatgcatcttgatatcgtctaggttctcacactgacatagattgttgtaatcggcggtggtgagaagcccagcacggtggcctctgacgatcgcctccaagtatcccccatggatattgaacgtaagcgcctcgaatccgtacatctttctctcctgattgtaagaaatttcagatctcaaagattatcgccggagatctgatctgaattctgaagaagaagaagaaatcgaagcagagattgtgatcgcgaagaagaagataactttgaaattgactggatttgtttgcaagctttaaaccagtatccctaaaccggtctgctaaatcgaagacacgcacacccggttaaatatttctctgtccaactttaattcattaattttctctttaaagtttaaattttaatttattgaagatctcagttcccatttctcaccaatgaaaaaaataaatgaggaatcgaaaaaaagttaaaaatatgcaaaaaaatatgtttcaattgtgaactttagaacttccaaaatatcatttaaatgttgagattgttatcgactttaaaattaaacaaaagatagtgttatcggacagtacaactctacgtacctatcttttgataatatgatctaaagtatgatatctagagaaatatctttccatgtacaaacgccttgctttggtcgactcgacttctttcatctcttcatatctagcttctcattttaatgtacctgagtgatattacggtaagtttgcaagaagtatcaattaaagagtccataagaggtctaagatagaatcttacgattaaatacatttgcccatataattaggattttagctagtagagatttctaaaaatatgtgtttagaacatcaatataatgcattttcctttcatttttataaaagtattaatcttgaatcattatgttcttggtggcaacctaagttctttcatctctttacatttttgcacagtaaaactctaatgaactatttcaatttgtagaattttctatatcattatattcaataaatttttcttaaatttttccaaattctaaaataaaatatctttgatcgaatatgttacctgaaaagttcaaactacgtttaaataaacgattgagctatgaaacctcttttactatgcccctgaataaactaggggaattaagacaaatagcactaaaaactttattattccaaaaatagcatattcttttgaaacttccaaaaatagcatataaagttttaatcctctataaattaattaaataataaaagtttttttattaccatttgtatcaatcctccaaataaaaatgagagcaaatactaatctaatattaaattgaatcaaaaaacttttaaatagtagaaatatatactctaaattggaaataaaaaaacccaaatataatattacaaactaattttaaaatgaaaaatctcttttaaatggtgaaaatatataccctaaattggaaataggaaacccaaatataataccataaactaatattaaaatgaatcaaaatttcttttaaataattgaaatatattctctaaattggaaatagagaacccaaatataatattttaaatttatttctaatttattttggttgaatagattttatataaaattgtagtattattattgtccataaaacttattttagtgctacttttaggaatttctcaaataattatttaagtgctatttatgtctaaaaaactttttcatgctatttttgtccaaaaaacttaaaagtgtgctatttgtgggagtttctcaataaagtattaccgcttctttcataaaactaatcttcaactaatttattattcatttctacttaaagtaaataaaaaataatgacaaaccatttttagtttttcaacaccatcttaatacaatctacgattttctagaggtccagataaaagaaaaaatgtagataaattcacttttctatgagttgaatcacataatctatattaccggtaatctaacacaattttggtgttctctcaaaacatataaattcgaatttgcttatccaaaaaatatcccaagcattttgtgttttgtgttggatttatttcacatatttttttgctacgaataaaaatatttaaaaaatgtaaatattccatataaataaaagtttgttgtttttcacatattagttttttatttatttattaaagataccatttggatatcaagatatttgttgcatctggattttaaagtatcagaattttattaaagtactggatttctgaaattctgtctttatatttatttattatattatatcgataaaccaaaacaaatcaaagcaaaattgagagacgaaaataattttgcagcgtacattcttcggtttaacacaccggtttaaaggacacaaccgtaattaaacgtgccaacacgagtttgcaaacaaatccaatcaattcgaagctatcttcttcttcgcgttgatctctgtatcgatttcttcttcagatctccggcgacaatcattgagatctgaatatcttacgttaaggagagaaagatg

SEQ ID NO: 8769 - DNA, 3000 bp, Unknown
  misc_feature (1)..( 3000): cDNA_ID_3043477_gDNA_ID_1971877_Annot_ID_176770 3000 nt of promoter + ATG
agtagcttggcaaagcatatgcttgtagtcatcaacaagcttaagagtacacttctccacaatggtggtggtatgcagaggtgacggttctgcattagaaaacatcagattcagatacaacaaactagcaattgtgcagacctcaagcacaacaacagtagtatttatggagatacaaatacagtgactcaaggaaccaatgtatcgtctaaccatcagatttcaaatccacttaataagatgaacaacatttctaataacatgatttccaaatgcctaaaacccagaaacctaaacgcaatgaagcaaaattcaaagtcaaatcatcaaaattcgtattacaacaactgagtcaaaatttgagacaatcagggatcatcataacgcaccgttttggagataagagccgtatttggtggcagagagatgcatcttgatatcgtctaggttctcacactgacatagattattgtaatcggcggtggtgagaagcccagcacggtggcctctaacgatcgcctccaaatatccgccatggatgttgaaggtaagcgcctcgaatccgtacatctttctctccttaacgtaagatattcagatctcaatgattgtcgccggagatctgaagaagaaatcgatacagagatcaacgcgaagaagaagatagcttcgaattgattggatttgtttgcaaactcgtgttggcacgtttaattacggttgtgtcctttaaaccggtgtgttaaaccgaagaatgtacgctgcaaaattattttcgtctctcaattttgctttgatttgttttggtttatcgatataatataataaataaatataaagacagaatttcagaaatccagtactttaataaaattctgatactttaaaatccagatgcaacaaatatcttgatatccaaatggtatctttaataaataaataaaaaactaatatgtgaaaaacaacaaacttttatttatatggaatatttacattttttaaatatttttattcgtagcaaaaaaatatgtgaaataaatccaacacaaaacacaaaatgcttgggatattttttggataagcaaattcgaatttatatgttttgagagaacaccaaaattgtgttagattaccggtaatatagattatgtgattcaactcatagaaaagtgaatttatctacattttttcttttatctggacctctagaaaatcgtagattgtattaagatggtgttgaaaaactaaaaatggtttgtcattattttttatttactttaagtagaaatgaataataaattagttgaagattagttttatgaaagaagcggtaatactttattgagaaactcccacaaatagcacacttttaagttttttggacaaaaatagcatgaaaaagttttttagacataaatagcacttaaataattatttgagaaattcctaaaagtagcactaaaataagttttatggacaataataatactacaattttatataaaatctattcaaccaaaataaattagaaataaatttaaaatattatatttgggttctctatttccaatttagagaatatatttcaattatttaaaagaaattttgattcattttaatattagtttatggtattatatttgggtttcctatttccaatttagggtatatattttcaccatttaaaagagatttttcattttaaaattagtttgtaatattatatttgggtttttttatttccaatttagagtatatatttctactatttaaaagttttttgattcaatttaatattagattagtatttgctctcatttttatttggaggattgatacaaatggtaataaaaaaacttttattatttaattaatttatagaggattaaaactttatatgctatttttggaagtttcaaaagaatatgctatttttggaataataaagtttttagtgctatttgtcttaattcccctagtttattcaggggcatagtaaaagaggtttcatagctcaatcgtttatttaaacgtagtttgaacttttcaggtaacatattcgatcaaagatattttattttagaatttggaaaaatttaagaaaaatttattgaatataatgatatagaaaattctacaaattgaaatagttcattagagttttactgtgcaaaaatgtaaagagatgaaagaacttaggttgccaccaagaacataatgattcaagattaatacttttataaaaatgaaaggaaaatgcattatattgatgttctaaacacatatttttagaaatctctactagctaaaatcctaattatatgggcaaatgtatttaatcgtaagattctatcttagacctcttatggactctttaattgatacttcttgcaaacttaccgtaatatcactcaggtacattaaaatgagaagctagatatgaagagatgaaagaagtcgagtcgaccaaagcaaggcgtttgtacatggaaagatatttctctagatatcatactttagatcatattatcaaaagataggtacgtagagttgtactgtccgataacactatcttttgtttaattttaaagtcgataacaatctcaacatttaaatgatattttggaagttctaaagttcacaattgaaacatatttttttgcatatttttaactttttttcgattcctcatttatttttttcattggtgagaaatgggaactgagatcttcaataaattaaaatttaaactttaaagagaaaattaatgaattaaagttggacagagaaatatttaaccgggtgtgcgtgtcttcgatttagcagaccggtttagggatactggtttaaagcttgcaaacaaatccagtcaatttcaaagttatcttcttcttcgcgatcacaatctctgcttcgatttcttcttcttcttcagaattcagatcagatctccggcgataatctttgagatctgaaatttcttacaatcaggagagaaag

SEQ ID NO: 8770 - DNA, 3000 bp, Unknown
  misc_feature (1)..( 3000): cDNA_ID_2105868_gDNA_ID_1971878_Annot_ID_176773 3000 nt of promoter + ATG
cgagatcctctaaaactgacaaaaatgagtttttattgtaaccctctgcctattccatattgctttgtggaaatgcttcattggatttgattctctcgaataccaacatttaagtgcaattttagtggcagtggacatatatgcgcaagtgtgcacatcttctcggcagtggatgttacagtcacttttcgagagattttcagttacatggccttcctcgatcgatgttttctaatcgttattgtgtcttctcataacaattatttcgtctagtattgctttccacctacaagctggtggtttttactcatctatgatcgatttgcttcttttcaacttaacaagtggtctttttggcatgcatgtacagagttttggaataattcatccatccattcttctttacaatatacacatgaccatgaaaaactacattttctatatcgtctattctggttctggtacaagagttcattatgaaacttctacaattctttcatatttctctatgttatgatcaacaaaaaaatttgaaacgacgacattagcattggcatgcacatgtcaaatagtaaacactgtccgatcccaactattattatatcaacaacaagttttttttttttttttttctcaaaacaacttttgtatttacatttgctaaaaacatcagattatttggtagatagaaatgtgtgattcattctttaccgcaaaaggttttgaaccgtatacgaagaatccgcggccttggccgaagaaggcggtgaatgaggcagcctagcggagaagttacgtagcggaaaacggtcgatattgtcatcctcatctcctttatcaaagttaagcgcatagctcgacggatcgtaatgaaagtcagcagtatggcggcgaatatgcttcccgtgaccgccaacgccacctactccaccgcccattcgatggatcagactcttacatttttcatgtgacttggacaacgtcctagtgagtcttggagatttggtcttcattccaccaccatgtgggctttgtgtagatttctcggtggtgaccggggatgatggtaggtcgtcgggaatgttgtcgtggtggtgatgattggtcgtacgaaaacatccggcgatgcaaaaccttgatttgagtttcttttgtagagacaagttggtcattgtttcgcttcccattttttttttacaaaaccaatgtttgttggttagatcaacaaaggaatgcaaaagagaaggaagacattgaaagaaagatcaaatctgtattagaggaaagaaaaacaaaacagaaaacaagtgatcgacgagatatttggttgattttcatttattattttttcttgaaatgaactgtttaaccaaaacttcggaggagaagttgaaattctttactattttaggaatatttgaatttccaattaaaatgaggttcaattttgtttcacgttaaatattaatgagtcttttgactttgtgagcaaggggggacatatttagggtaggaaaaataatatttatagtaatttattaaattagttaagattataaagttaaaaggataatatgaaaattttggaccaattttgatttgtgaatatagtaacggcatagctaaagcctaaaaacatttaatattaaaagacctcattggattttattttctcgactgtcacatttttgttttggcagaggtcttttatccatgtaactctattcagtatccacaaacagttttggaggatcaatatgggccttagaaatgaattaagatcatacttcactagagaatgtgcactcaaagaatgtgttgcgaggtttcatcgttaaatttgcattaaaggtaaggaacttgaagatcccatagcaaaattccatctctttggtgaagtcgttgtctagttgtcaccgaagctataaaggcatacttggaaatccttcatttgaaccaaattatttgctgccaggctgccagcagtgcctgtcttgtgaaaaatgaggctcaaaataactttttttttatgggtttatagaagaattttttttttttgagaccaaatcttaaaatgttatgaaaatgaaacctatgtattcaatagaaaatagataaaaattaaaaattgagactaaatctaaaaaatttagaaaatgaggcaacaaatatttttgaggtataattttgatactaaaaaccttaaaacttttggtggctcaatacccatgtttcttagaaatatgtcatgggccgggcctgactgccagtcaatggaaggaccatgagggtgtagataatgctatatatttgagattgtaaatatagctgataaactatatttacaacgaaaaatatttaaattctgacttagttaatgtaagtttaggcataatggaaacttttgtttataaatacgataaaataagccgtgggaaaatcgttttcgcactttcgctttaaacttttactcataattggtttgaaatttaaatcaatgaaaaaactaagttaaaactttaaattgcttcaaccttagttggttttttgtaagttcttcttatttttttcttgtttatgttagatatgatttttcatcaataaaagtagacgttaaaaaaaaaaaattacaaatcatttatataaaattgttgcattttcgaaagaatttttttatagtttccatttgatttttgtttctagaagtgtaataagaaaataaatccacttttaagttttgatgaattggataaccggtttgaacgaaacctggttttgatgaaatttttcccgacactgtaacacgataattagatttgttgagttataacattacgtgtcgaattttaattggatgtcctgcgtggccgtcttattagtcacatcaccgcagctaataacactcgacgagcgacctcatcgtctacatcgccgtcgcctgttaccgtccggtgctattctccttcacaatctcacatttttcgtaccggttagaagatg

SEQ ID NO: 8771 - DNA, 3000 bp, Unknown
  misc_feature (1)..( 3000): cDNA_ID_2730189_gDNA_ID_1971889_Annot_ID_58452 3000 nt of promoter + ATG
ttctctgttcattgttgcttttagagcttaattcatgttcctgagattcaaatttgcaacctttttcccacttatgtaagaaaaaatggctttttatatattcttcattcatggctgtgttgattaggaatctctaatctctatgtctactgttagattaattgtttggtattgatactcaaattgcatatatttaggttcttgcattggttttttatagtatcttttctgcaactgagtctttgtatttaccaaaaaaagaaaaaaactcaatctttgtggggaacttaaaggtggcactgagtaatatttgaatctcattgctgcagttttgtcttgaggtttatctggaaaaaagatggaagtttgcggggatctgaaatctgataacttaaagaaccgccccttgactccgcttaggattctgaggggcttgatgatcctgctggtgtttctgtctactgcttttatgtttctgctgtactttgcaccaatagctgctctaggtctacggcttctgagtgtgcaacaatctagaaaagttgtttcgttaatctttggtctctggttagctttgtggccttacctgtttgaaacggttaacgggacaactgtggtgttctctggagacatcattccggttgagaaacgtgttttgcttattgcaaatcacaggacggaggtggattggatgtatctgtggaatattgccttgagaaaaggctgtcttggctacatcaaatacgtgctcaagagcagcttgatgaaattacctatttttggttggggctttcatgttttggaatttatcccggtggagaggaagcgggaggtcgacgaacctgttttgcttcaaatgctttcatcttttaaggatcctcaagaacccttatggcttgctctattccctgaaggaaccgatttcacgtactatatgctccctatctgatttaactgctctagatatattagctaatacattattaatctgaatcttcgaagatatctttcagtttctctttggtaggatatttaacaccatgcgcatctgtcttgcaaatatcttaaaccagtcaccctcatttacaataatttgcctgctattgcatgaatgtttgaaatgctgctcttagtatatcttctttctattactgagaccttccttatttgatatgcagtgaagagaaatgcaagagaagccaaaagtttgcagctgaagttggtcttccagcactatcaaacgtacttctaccaaaaacaaggggttttggcgtttgcttagaagttcttcataactctttggatgcaggtatggttcatgaaattttgttacaaatgttggtgtacatatagtagtatctcaagccacatgttatgcaaacacttatgtgttttgacgacattatgatggcgtgcatatcttctatttttccaatgacccatgtgggacctcatgaccacaattaactgaacaaggcatttccttttattgcaatgcagtatatgatttgactatcgcatataaacctcgctgcccatctttcatggacaatgtattcgggacggatccttcagaagtacatatccacgttcggcgagttctactaaaggagattccagcaaacgaggcagaatcttctgcttggttaatggattcatttaagttgaaggacaaactgctatccgatttcaatgctcaggggaaattccccaatcaaagaccagaagaagaactctctgttctcaagtgcattgcaacatttgcaggggtaatatctttgacagtagtgttcatatatctgaccttgtattcacatagctgtttcaaagtatatgcttgtctaagcggcacatatttaacttttgctacatattacaagttccaaccctcacctggctgttttagagaagattcttgtaaagttaaaaaccattaactttgttgtaaatacaattctttctttgtatacaaagaaataatattacaggcagaaaatatctctgggatgcctttttcattgtaagttctttgatcttcagttagttaaaattgtattccatgttgttctcttgaaagttgaaactcacatagatagtttgtgtagtctttagtcacattttggttatgtcaaattgtttgagtcttgcaagtgccactgttagcacttttcattcaaaactgtcacggagcaaacagaatttggaaggaaaagttgatatgttggaactgtagaactcttgtgtttattgagttagaaacaacaacaggtcactaaaccatcttgtcaaaaggtgttcttacttctgaatcagtcaagtaaaggaagtttccatctgagcaaaactttgtcggtgatcgacaaagcatagtagaacccactttgtcccaaaagaatgttaccttctttttgcaggtgatgaaaaagagagtaagaaggccgttgctcagcaccctttcactgatacattggatcatctttttcaggtagagcatagcatctcctgttttctttatatgcatatctataacttgtccacgtgtcatcttatctctttatatgagtaggtgcagatgagctcaggttagttttgactaaaccaactttcatgaactttctttacttttttggttgggaaagatttgagaggcacaaaacaaaacaatgtctattgatacatttctcttaggacaatacaagctcatgtagaattgtaattctatatctaaccacacaaagacacatgtacaattgtaatcgataactatgagacataatcttctttttattaacgcaagaaaaaaaaaatcatcaaggcaaataaatgttacactgacaaagaaaatgggctaacagagtaggcacagaaaattataattaattgaagttgataaccctaactttaaacctctgagtctccagcacttataaatagagaatcggtgccagagattcatcatcatccacatcacataaacacaaaatccggtttttaataatg

SEQ ID NO: 8772 - DNA, 3000 bp, Unknown
  misc_feature (1)..( 3000): cDNA_ID_4266408_gDNA_ID_1971889_Annot_ID_58457 3000 nt of promoter + ATG
agtaacgctataccacgaatccatgagacaattgttaaaaaactgaagttttaacccttcttaaaacagtatattaataatattttaaaattttataaatattgattcaaatacatccaccatataacccaattccaaaataaaacccgttctgtaatttctttacctgtcccgtgattttttttaaagtagtaatttttaaaatttaagaattatttattatatataagagttttataaattgcatcattctctaatacatttatattttatagtttaattttatatatagtaacattatacataccacataattttttggttttatataaccttttctaaattaggatgatttgatatgtttaatattagtggtcttaaaaaataataaattaaagatttaacccgtattgtgaattaattatattttacctttttattattgttgattcaaaaccccatttctccaaatctgtcttgccaaaaagccatttatttaataatattaattttatttatgatatgactctaattataatctaaatattttagctaataacataggagtgcaccatatttatttaataggagaatgtaccatatgacccgaatgcacttttaccaaaatccaccaaaaagtcttgcaaaaatactatagagataagaaacgatagtcggttttgataggtataagattaacaaatatattaattagcttaaattagttaaagagtacaaattgaaaagttatattacactttattcgaatatattatcaaaacttatataacagagagatttgataaaattgtaattgttgaatactttttttttgtgctaatttttatgtaattaagatttaattgatttcgtatataaaatattaaattgttttacgaacttatttgtttatatttggtaagagataaatatttgaatattcggtatattttgattcagtttagaaaatctttgatgacccgtctttagatccaataagccctataattaagaaatgaatattgtcgttaaatgaattttggtaaccttaataacgtcattaaaagattttgtttttgattaaatttttctaatatcattgtcatgtaattaattacaaaaattaaggttacatttcaaatgtactttccaaaataatataataggatttctttgggtacaaggtgaccaatgatcatctagaatcccgcaaccgtcaaaatcacaagttttagcgtaaacagtttatggattgtttgactttaataattggacaaatgttgtaaacaataatcactactacgtgttttaacgttaggttgggcatttttcaagtaacaatgaaactaatttatttattttggtagggataaaacaaaatttaatgcaatgttcaatatgtattagtattgtttttgatcgagtactaaaattctgtaattcgttcacttaatttaaaggtatagaatcataaaacgataattatttttggtaaacaaaactattagtcaaaagtcaaaactgacatttaatttgaattgaaaccaaggaaataaactaattttatttaaattatgttattaaatctttaaaaatcatctgataattacatgaaggaagcttggtcagccataagaagaataacaacttttttccttttttttttgttttgttaatccgttagtatataaacaacagtattcctagtttctttcaccgactcttctaatctctgcgatcgtacatcagaaacctctatctcatcgccgaggtaaatctttcagacgctgtcccttctcgtaaaaatcgaaactttgaatcaaatctacgtgaaatttttgtatttctctgcatgtttgatcaattctatatgaaaccgcgtttaagggttttagagtttttcatctcattcgttaatttcattgcatgtgtgcaggaaaaaagatcttacaatggctattaacaccatcacgaacgaagaagatgatgcatcaaacaactttggatgcaatatctgtcttgaattggcaagagaaccgatcgtgactctatgtggtcatttgttctgttggccttgtctctacaagtggctccattaccattctaaatcaaatcattgtcctgtttgtaaagctttggttaaggaagatactttggttcctttgtatggaatgggtaagccatcttctgatccgagatcgaaactcaatagtggtgttactgtccctaatcgaccagctgcgactaggactgaaacagctcgacctcgtcttgaacaaagacatcatgggtctagtttctttggtgggcattcaagttttgctgccatgccaactggtttacggttttcaaatttcttgttgtaatggaaagtatcttttgatgaatctgagtctgtttttttgacaatgtttttgaaactattattatacattgtctacgatttttgttattttgacaattaatgtttagagctacttttacattcttataaaaaatttgcatctgcttgtaatatttgattctccaatcttccgctttgtgaaaaatcgtcataagcttgttctcgtgctacatctgcagattgatcaacatgaatgctgattatagtatatgatccttaatatatgattatcgcacagatgaatttaaagcttcacatttaatcgtgtaatttggagtagatggcaaaagaacatggaaattaactaaatgacaatgatgtgatgtaaatttttgttttgaccattttgtttttgttaacatatgtaacgaatctacacagagtatttgtgttttcaagctccttgttaagcccaatgaaggtttttaatgggctctaatgggccgattcaataagttggaaagctcatgaagcgagagggaccgtgcctaatctcatcttcactctgctcgttatcttcttcctttttacctgttcaacgaaactcctgagctcagcttcactttgctcgacgttatcttcttcgttcagcgaca

SEQ ID NO: 8773 - DNA, 3000 bp, Unknown
  misc_feature (1)..( 3000): cDNA_ID_1989222_gDNA_ID_1971889_Annot_ID_58458 3000 nt of promoter + ATG
cactggacgacgtaagtgcgcaatcgctagagttgttcttcaggaaggtactgggaaggttatcatcaactatcgtgatgccaaggtaaatttatttctaatttcattatcttattggcttttacactgttgcttagtcgcttgatgtgtttgcttaggccttgaatttggagtttatacagctgagaattgactactcatatgagattaagatttgaacttgaaattggtattttaacagctaaagctatgaaagcagtccacttacccccgtttgaacatattcttggtttatatgaatatctgatacctgcaagagactgacatcatgcatagtgtgtaatcgattgaagcatttagtagtataaattgtagcagtttgtaggagagaaagtcttgacctttatgaagatattctctgttatgtagggtatactagtcttgtgatcaaactgtatctttatgtacttctttttgatagatgagttatatcagcgcgttacagattaagttgaaactggaagaactctctgaacaaatagtttatatgatgaattctaggctatttagactttagactaggataagtggctgagaaagtgatcaaactgtatcggtattagtcttgtgatcagacgttatctgtatgtagttctttgtgacctgggagctgcatcagcacgttatagattaaggtgaaactggaagaaatttctgaacaaatagttcatatgataaattctaggctgtttagacttaggataagtggctgagaaagtgttaacaaggagagattatgataaaagtttggggggttttgacaagctgttttgttgtgaatgggaaagatttgaatccatacgtatattgctgatgatgatcattgtaaacctttttcaggagtaccttcagggaaatccattgtggcttcagtatgttaaagtaccattggtgactttaggatatgagaatagctacgacatatttgtgaaagcccatggaggcggtctctcaggtcaagctcaagcaattaccttgggagtcgcacgtgcactcctgaaggtaagtgcagaccacagatcgcctttgaagaaggaaggtttgctcactagagatgcgagagtggttgaaagaaagaaggccgggctcaagaaggcgcgtaaagccccacaattctccaagcgttaagagttttacatatcattggatcaactcttcaagtagactcctctgcctccattttttttaaaaacttttcttgtctattatcggtcttttgtttcatgttaatgtttatgtgtagacgaactaatacaatctctgttttgtttgaatggaacgcaaagttgatatgcttttgtaacaaatgcacttatgaattgtgatcagacaaatgcacttctgaatcgtttatcagttagatttcaggtgaaagtgaaaactttgcttctttcaaaaggtgttcatggatagtggataagcagcaatacctgaacacacttgtatcactttgtgtatctatctaattcctttgatattgaagtagtaatgttgattttgatgggctcataccgaacgaatcagaaatcgacaagtgtgagatagtatgtatgtgtgcataaaataggctggtttagctgggaatggtgatgcgaaaatggaatgttaggtatgagagagcttacccactttgactctttccatgcatattcgcttgctcccctctttcctgcttcctctgttttcttttattccatttccatcacttaaaaacaaaacaaaaaacctgaactcttgggttggatttcaaaccaacataaaccaattctctaatacaacttggtttgatacaatattagagctacttgatgtgtgtaatgtttcgatcagtaggaaaaacaaatcacgtgtatcctatcaaacttttgattatacacaagtcaaaagagacattcattgtgtgaatttaatgaatttgaggggtctattatatttattagtcagctttaacgtatcaaatccatgacttttatcaatgttttttcttcttttctttctggatctacttcccaataccatcaccggaccggaccacttgatgatcttcctatttatgaacactactactagtaaactcatgtataaaatacgtactttatacgtgtatttctgaagattagtcacttcaaaaaatcatgagagtaataaatgttaaaaaaaaaaacagtggcgctcctttgccatatcactatcccaagtctgtaacacttcactgccacaaaaacaaaaaacaagtaatccaaaataaaataatgattttccaagtgtccttccttcgattaaaccgaggtcaccaaatctgtgtatgtaacaaaaattgtagtggaacatattgaatcagcagcgttactgtataattattttttgattatatcattacatcaacataaattatgatttcctatcattctgtgaaattactgttttcaattttgtgatttgtacttgaaaactaaacctaataaaagaaaataagttaggaatattttgttttttagttttgaaaagtggggctattttttgataaaatatcatcaactttaacaaaaatagataaaaaggttatagtatatattttttagttacaaaattgagattgagataaaaataaataaaatttaatggtcatcgataatattgagatttgaagtgtcgattggtatttgtatagtgttgtatctctctctctctctctctgtctgtttgtttcagagaaggatttttggcgtctccacgcacgatttaacgcatcgaagctctctgcacgcttcctgaaagagagagagaagagagagatcgcagatcgatttctcttaaatctctcgtgaatcccatttgccttctctctgctagattctctcttcttctcttcacccatttctcgctttctcctttgttctctcatctgggttcttctcaaagcctcttcctttttatgcc

SEQ ID NO: 8774 - DNA, 3000 bp, Unknown; identical to SEQ ID NO: 8771
  misc_feature (1)..( 3000): cDNA_ID_2730189_gDNA_ID_1971889_Annot_ID_176800 3000 nt of promoter + ATG

SEQ ID NO: 8775 - DNA, 3000 bp, Unknown
  misc_feature (1)..( 3000): cDNA_ID_4266404_gDNA_ID_1971889_Annot_ID_58460 3000 nt of promoter + ATG
agtaacaaacgattttcccaaaatggaaattgattattgaatctaagggagactgttcttacacaaggttgtgtcacaagttcattagtagtggctatctcgagcaaagtataatgaaagttagtagtggccactggccttcaattcaattattgctccatcttgagaagtgggattaaaagaaggtaactttttttaacttatttggaaaacagaatgcgtaaacaaaagagatagctactgctctaaatagtgttcatgtatgaaacttctgttttggttccacctttcttcttctacgaatctcaagttatgatcaacagacgactcgcttctttcttcaaaacagtgagtcatatacttgcttcttaacttcttaattagtgtccgcatcaaaaatgtcatgagcctaaccattgatgcaaacatttataataacaatacttatgtgtgtccgattcaacgcccaataatctctaaaatacaaaagaagaagtagtcttaaaattctagaaacagaagtcgcgacgaaaatctcagtatttaaaacaaacgtgcctaaacaaatagagataatcattcagatataatgcaaaaagacaaaagagagttgaattaaatcacgtggaaaacaaggaacacgacaaagcagaacagtctcactattcccgcgttagccactcaatacaatccgccacgtgtcccatcttcacgcgccagtcagcgttgatcttcttcctcacttgccacttccacttcttcatatataaatcccacacagccgcaaattcgaaatcaaccagatataacagaattaacctacacaactgaaactcgagttaagaaccggaaacagaatccaattcaaccaaaccgaatcgaaccgaaccggagtttttatccaatggtgaagcaagcgatgaaggaagaggagaagaagagaaacacggcgatgcagtcaaagtacaaaggagtgaggaagaggaaatggggaaaatgggtatcggagatcagacttccacacagcagagaacgaatttggttaggctcttacgacactcccgagaaggcggcgcgtgctttcgacgccgctcaattttgtctccgcggcggcgatgctaatttcaatttccctaataatccaccgtcgatctccgtagaaaagtcgttgacgcctccggagattcaggaagctgctgctagattcgctaacacattccaagacattgtcaagggagaagaagaatcgggtttagtacccggatccgagatccgaccagagtctccttctacatctgcatctgttgctacatcgacggtggattatgatttttcgtttttggatttgcttccgatgaatttcgggtttgattccttctccgacgacttctctggcttctccggtggtgatcgatttacagagattttacccatcgaagattacggaggagagagtttattagatgaatctttgattctttgggatttttgaattcccaaacataatatttttttagagcgaactgtgagattttccttggagtcatggagaaatctggagattttttgtaacacggagctccaatgacccgggaatttctttcgtttcggatccgaatttgatgtggatcatattcacacctatattttttcatttttttgttgtaaagaaaaatcggataagattctagtaataaatgttaaaagtccatttcattattctgaagaatatccttcgaacacgatgagtttggaagattatattatccggcccaaaatcttatagttgggccttagtcattaaacatttttctcagcccattgttttaaaaattgattttcgtgataaagtagttaacttaagtgaagtacgaaggttcccttggcctaattaaaacacaagggggtttctataaatgaaatatgataaaatatcttccaagcatttcgatagtattgatgacaattacaaagttcaacatcaataagtcaagaaattaggattggaaatcaaggaagagaaacggtcttcaaagaaaatagaattgaatcgagaaaaatatcagtaatcggaaaaaaaaatgaaaaaaaattggggtggataagattcccatcattttcaaattgccacctgattttcggcttaaataagaaaaaccatcactttcaatataaaccactatttcattcgagacaaaataaaaaagaaaaaataaaaaccactagctaaactaatactaataatctaggtgctaataaatactagaaaacaatccacatttcaagtatagatgaattggtctattaatataaaatacggtgaattaaaaaataacacaattaaatttacataaaatttaaaaatatatatcaggtacatcacagaatatatttttacattagagaaagtcttggattcccaataatataaaacaaaatatcagaaaaagacatttgaattcttgatgtgggtcctcacggtcctaccacactccaatgaaatgcttaaaaaaaaagaagaaaaggaatcattacataagaaaagaaaaaataatatctgagcctgctcatatcaataattgtgtatatatagaattatatagatgatgtcgataaaagaaaccaaacaagataaataaatacaaaaataataatggtgatggtgggccgttctataaacttcaatcattaatcatagcacacaaaattccaaacttgagaaatataatcagtgggctaaactctaaagtctctctacctttctccatctccttcttcttcttctatcagattctttctttcctattacctttgccttcttcttcttcctttcctctttctctatcttcctctcaattcttttactgtttattttctttgtaatcaacaacagtttaactcttcttcttcttttctttatcaagaacagtagtttctcaattcttgattatgatactaagcaagagacctcatctaatgatccgtaaattgtctgagatg

SEQ ID NO: 8776 - DNA, 3000 bp, Unknown
  misc_feature (1)..( 3000): cDNA_ID_1394832_gDNA_ID_1971889_Annot_ID_58462 3000 nt of promoter + ATG
agtattagtttagctagtggtttttattttttcttttttattttgtctcgaatgaaatagtggtttatattgaaagtgatggtttttcttatttaagccgaaaatcaggtggcaatttgaaaatgatgggaatcttatccaccccaattttttttcatttttttttccgattactgatatttttctcgattcaattctattttctttgaagaccgtttctcttccttgatttccaatcctaatttcttgacttattgatgttgaactttgtaattgtcatcaatactatcgaaatgcttggaagatattttatcatatttcatttatagaaacccccttgtgttttaattaggccaagggaaccttcgtacttcacttaagttaactactttatcacgaaaatcaatttttaaaacaatgggctgagaaaaatgtttaatgactaaggcccaactataagattttgggccggataatataatcttccaaactcatcgtgttcgaaggatattcttcagaataatgaaatggacttttaacatttattactagaatcttatccgatttttctttacaacaaaaaaatgaaaaaatataggtgtgaatatgatccacatcaaattcggatccgaaacgaaagaaattcccgggtcattggagctccgtgttacaaaaaatctccagatttctccatgactccaaggaaaatctcacagttcgctctaaaaaaatattatgtttgggaattcaaaaatcccaaagaatcaaagattcatctaataaactctctcctccgtaatcttcgatgggtaaaatctctgtaaatcgatcaccaccggagaagccagagaagtcgtcggagaaggaatcaaacccgaaattcatcggaagcaaatccaaaaacgaaaaatcataatccaccgtcgatgtagcaacagatgcagatgtagaaggagactctggtcggatctcggatccgggtactaaacccgattcttcttctcccttgacaatgtcttggaatgtgttagcgaatctagcagcagcttcctgaatctccggaggcgtcaacgacttttctacggagatcgacggtggattattagggaaattgaaattagcatcgccgccgcggagacaaaattgagcggcgtcgaaagcacgcgccgccttctcgggagtgtcgtaagagcctaaccaaattcgttctctgctgtgtggaagtctgatctccgatacccattttccccatttcctcttcctcactcctttgtactttgactgcatcgccgtgtttctcttcttctcctcttccttcatcgcttgcttcaccattggataaaaactccggttcggttcgattcggtttggttgaattggattctgtttccggttcttaactcgagtttcagttgtgtaggttaattctgttatatctggttgatttcgaatttgcggctgtgtgggatttatatatgaagaagtggaagtggcaagtgaggaagaagatcaacgctgactggcgcgtgaagatgggacacgtggcggattgtattgagtggctaacgcgggaatagtgagactgttctgctttgtcgtgttccttgttttccacgtgatttaattcaactctcttttgtctttttgcattatatctgaatgattatctctatttgtttaggcacgtttgttttaaatactgagattttcgtcgcgacttctgtttctagaattttaagactacttcttcttttgtattttagagattattgggcgttgaatcggacacacataagtattgttattataaatgtttgcatcaatggttaggctcatgacatttttgatgcggacactaattaagaagttaagaagcaagtatatgactcactgttttgaagaaagaagcgagtcgtctgttgatcataacttgagattcgtagaagaagaaaggtggaaccaaaacagaagtttcatacatgaacactatttagagcagtagctatctcttttgtttacgcattctgttttccaaataagttaaaaaaagttaccttcttttaatcccacttctcaagatggagcaataattgaattgaaggccagtggccactactaactttcattatactttgctcgagatagccactactaatgaacttgtgacacaaccttgtgtaagaacagtctcccttagattcaataatcaatttccattttgggaaaatcgtttgttactattatttatttgttcagaacccacggaacagattgcccccaaccctccgagttaccaactttataggttttcgctgagcaacaacatcccattagaacggtgaagctcatcatcatgagcatgaaggagaagattcttgttgttgtggtcgccattatcgatcaaaagatcacaaattaagaaaatcgaagaaggaagattgaggaatataagtcgatgagttatttgagtattgatgaggaaaacaaagactatacgaactctctatttataaggtttacggaacctaatccttgccggtttaggattttactcaacgtttggaatatattacatgtttatttcctttttcaattttgattcacctcttatcttgcaaaaaaacaaaacaaaaaagtgacgtttaaagatctctaatccttttctaattaactttgtgtatgatttttagttcttctaatttctatatatttttgttcataatatgaaaatttgatctctgttttaattattttggaactaaatacacatttttaattagattagtaaaagagttataattaaaaaaagttgatctggttggtgtcagcagaacaaggaaaaaagagaggctttttcgttttgatcctcctactcttcttcattagtgaaagctacttataaagtccaaatcttgaagtgcgtgcacggtgcaccacgaatccacgatccagtgagcagcagcaactccatctccggagctctagattcagataagaaca

SEQ ID NO: 8777 - DNA, 3000 bp, Unknown
  misc_feature (1)..( 3000): cDNA_ID_2037321_gDNA_ID_1971889_Annot_ID_58463 3000 nt of promoter + ATG
catggttctaaattcagtacttgtttggagcttgctgatatttgtcgagaagttggtcttcctcctggggtcctcaatgttttgactggtttcggttcggaagctggtgctcctttggcatcacatcctggcgtggacaaggtattggtctttgagaatacagtaaacataagtcccaacaaaattaactctaaaggctatgattaaacattcagtttaacgtctgcgtttcttaaacgcttcaatgctaagttatgatttcgttgcagattgcatttactggaagtttcgccacaggaagtaaggtcatgacagccgctgctcagttggtgaaggtaattccaatttttgaactttctgctgtatattccttctcctccttttgtttcatcaccaatgtcaatgacacattactcatggcattgttgcagcctgtttctatggaacttggtgggaagagccctctcattgtgtttgatgacgttgatcttgataaaggtgaatgtcacaaaaagtagtttagtggatttggagtttttttataataacttcttcttgtgctatattcaagatagtactaatgcttttgttgctttgagacgagtagacatgacttaaatttgcttaatcttaaaattaaactctttgtatgttttgacgccggcaaatgatagctgctgaatgggctcttttcggttgcttctggacaaatggtcaaatctgcagtgcaacttcccgccttcttgttcacgtaagtcccaatcttctacttgctttaaggttttacctgatcttcccaatatgacatgcgaatatttattactggagaagtgaatgttccaagtcatacgggaagatgtttccattaaggtcaatgacaatgacatttatttcagatcaaaccttctggtggatatgccaacagggatacaattgctgactctcttgtctaaatttttttattttatatcttaggaaagcatcgcatctgagttcatagagaagcttgtaaaatggagcaagaacattaaaatttcagaccccatggaagaaggatgcaggcttggtcctgtagttagcaaaggacaggtaaaatcccagtgatcgttttttctgtcttcatattatttgtcaatttcccatcaggttgcaatacaacaaccaggactaaaaaggaaaagagaattgagttctgtagtatagtgattaacttttgtccctctaattctgaaccgtttagcttttagagcatcaatcaaatcacatctagcatatgatatttcatcacgcttatcatgttcttacttggtaggtgtgcttttcttctatgatcatataatctgattgagctgacaaatgtaaatattacagtacgagaagatattgaagtttatctcaacggccaagagtgaaggagcaacgatcttgcatggtggttcccgacctgaggtattacatctccctcccttacctatccttgatgcagtttcttccagactatgatgatgaccttttatatcatatctatatttcacagcatctggaaaagggcttcttcattgaaccaaccatcataactgatgtaaccacttcaatgcaaatatggagagaagaagttttcgggcctgttctttgcgtgaaaacatttgccagtgaggacgaggcaattgagctagcaaatgactctcagtaagttaacgtttctccagaaagtgaaatctgatcaaatcccatccgctgacactggtgtttaaatcaaatttatcatttaagatcttatgtggctgaaaattattcattgattaatgacagttacggactaggagctgcagtgatatctaatgacacagaaagatgtgaccgtataagcgaggttagtaccggtttcttgaaccattcagatttgtttttaatgcctagcaagtgaaataacaataccatcaaataacacaaacaattggtgtctactttgttaggcctttgaagctgggattgtctggattaactgctcgcagccttgctttacccaagccccatggggtggtgtcaaacgcagtgggtttggacgagaacttggagaatggtacatttctttttctatctcgaatcttgtttttaaaagactatatcttgatggcttgtactgaacaaatcttggttatggctggtttcttgcgtgcttcaggggacttgataactacttgagtgtgaagcaagtgactctctacacttcaaacgatccctggggatggtacaaatctcccaactaagtaatgaatacattgtcatggaaatggaaaccaaaccaaatgctgtctgttcaaatctttgtgcttttattatcagtctgtctagttcggtcctgaaactcttttgtaaaacctgttgaatttataatgaataaaagatgctttgctgataattattggttgttctataaaggccagtattgaggcaccattttaggctctggtgcagcagtatcaagaacatgaaccattttatgtcaccttcaagtcacatcaaagttaaaactcacatggcaatcaattccaaatcataacttttttttttactataattgcttgaaataaacattttatgagatctgaagatttgtggattttttttccattttttaaatagtaaaatgtttggcaaccaaatctgaaaaagaggtaaagacgagaggtctcgcgcttatccttaaaggactgtggtgaatggtgagtgtgacttggagggaccccatcaccgcaacaatacagcttcttagatctcgataaccacaactaacctgtcacagtttcgattagatcttctcaaaaacttcacctttttttgtttttccagtttctcagaggagatcttccttcaaagctcaaatccttttgtctgaattgtgatactgctgtccccatttttctgcaagttgggaaatttctgtcaaagttttgtgggtctgttaaaaagatctgagctttgaacatggggagctca

SEQ ID NO: 8778 - DNA, 3000 bp, Unknown
  misc_feature (1)..( 3000): cDNA_ID_1989792_gDNA_ID_1971889_Annot_ID_58466 3000 nt of promoter + ATG
tagctatggcggcggaatctgccggcggtggtttgagattggctccggcggccgaagtacatagcgatttgctaaaaagacgtttcatcgattggtttgttttattttgttttgaaaaaagtctttttaagtgacttcttgggtaatttggtgtagttgtatcacatttgtttaccgctaaataatgttttaaccgttttatggaacgtttctttctttttcagattgtacagagttagttggtttatgggtctaattgggcattctttggaaatggtctcacaagacattgtggagttcaaagaagagttcgacgattctcacaaaccaaacagcagagtcgattgctaaccaggcctttccatctaaaacatattggttataattgatgcattgcggtaggagtatagcgtatccgttgtaattgattatgaaaataataccaaagcgattaaaaagatactttcaccgcaccgttctttctatccgttactttataccacttttaattatttacatatcgttaaccgctttctctatctgcttaaatttttgtaccgttttatgttattaatcaaaccttgaatggatatgtttgtttttgtaatggtgtccaccaaagtttatttgatgagttacaaaaataattatattttaaagttttgagaaaaaaaatcatgtttgtgaactttcaattgattcacctcatgaagattttataagttctatatagattttgtgaatcttcaaaagtacaaatatatgtactctttttccaacataaatgtagtgaaaattttattttatgtgaaagaatgaaaagaaaccaagtgaaagaaattaatagacagtacatgtaattactgaatacgaaagataaaaagagaggagagtagtcattgtcagatagaaagaaagagcagacaaaaggatcgtaaaatcaaagaaaattgggtccctaaaaagattatgaccgtgaagacacaatattacgttttctgacaagacataaacacatcactcatcgcctttagattctcttccgaccctcacaagatcttaacaacaacaacaacaacatcaagatccgatcctccagattctcttctgtgtatttccttaaatctcctcctctttctctttcctatttatttatgtatctcactcaccgcttctgcctctctctctctctctctcttatttatgtaactcctcgtcttccttcttcacattgatttctgcgtcctttgacgttcaaactttaaacgtttcttcatctgttttgttgtttactttcccgagagaaaacaatggctctcagagatttatcttcttctttatcttcttcttcttcaccggagttacatgttcttgccgttgatgatagtttcgtggatcgtaaagttattgagagattgcttaagatctctgcttgtaaaggtaaaaggcaaaactgtttctctttacgttttctgcttttcttttgtttggtttctgattcgtttttttggataaatttggtgggtttctttatatagtgacgactgttgagagtgggactagggctctgcagtatcttggtttagatggagacaatggatcttctggtcttaaggtatatattcattcatttcttagaatctctctgttttctagcaaaatcaaccctagacgttgaaacttgaagtgttcttatgctggtttggctcccaagaaatctaaggtttcacaatgtggatcaaaagtttaacctttagaggatgattttattatttgtttattgatgccgtttatatgaacaattttgcaaattttgataacaggatttgaaagtgaacttgatagtgacggattattcaatgccgggactaacaggatatgaactcctcaagaagatcaaagtaaatttctattttgtgtcatttattagagcaagatttgaataagctcttctcgtgttttccttacaaaaattctgttgtatatttgccaggagtcttcagcactcagagaaatcccagtagtgataatgtcttctgagaacatacaacctcgtatagaacagtaagtcactatagctaaagatacaaaactgaatcaatggatcttaacactgtaatctgatttttttgtctatcctctcttttgttgttgttgttgttgtagatgtatgatagaaggagcagaggagtttttgctaaaaccggtgaaattagctgatgtgaagcgtttaaaagaacttataatgagaggtggtgaagctgaagaaggaaaaaccaaaaaacttagtcctaagagaatcctacaaaacgacattgattcatctccatcatcatcatcaacatcttcatcatcgtcgtctcatgatgtttcctcccttgatgacgacactccatcttccaagaggatcaaattagagtctaggggttaaatgattgagctcaatcttttctcacgttttctcttgatttccttgtgtaatatacattatttttgatatatgcaactatgtaagtctagattctaatgctcaccttattactctgttttttttttttgttaaaacaaaaggagatcaatgtgaatatgatttaaacaattttataaaattaaatactttgcctacagtatatatattgtttcctacttcacaaccagatcaattagattctataatgtaacatataatttaaaagtacacgtaaaaagattttgtatatgatcttccatgtgacatacacgatttcacttgtatgtgtttataattcataaactttcaagcatcagaaaacaaaaaaaaacgaatataatctttgttggaatacattatctattactatattcctagttgtatagcagaggaaacttgtttgcacttacgtggcatcttatgattggttcagtgatgtctgttttagaccgttgagagacttggataccattgcggtcttatcccgaaactccaagaacacataattttttttcttggtggtctctcca

SEQ ID NO: 8779 - DNA, 3000 bp, Unknown
  misc_feature (1)..( 3000): cDNA_ID_1989218_gDNA_ID_1971889_Annot_ID_58469 3000 nt of promoter + ATG
tcgctaatctccagctttctgtcattttcatgttccctcggaggagatgttttcaaggatataagagtgccgacatccttctgagaagagtttggagacactattggggcttctccatctttaacagaagatatggagtcagtagcatcagcacaaccagacatttctaagctctctacaattttacaagacgaaacttcgtgaagacatactccatcattcacatctcctacttctacagaggaagacagaaccccattggccatactgctatctactgtgtggatcatctgagctaaaccttcagtttccctgcgttttgtcagtatagatggaagagtgtagtgacattgatccttgttatctttataagaacaccggttaatactatttatgcgagtcaaagacggtacttttatcccattagccaccactgatccattttgttccactgggatgcaaaaacctacagcttctgtgttctcgtgactgcaagaaacctcaggcattacagaaactgcagcatcacggttattccaacagaggttttcctcatgattctttttaagatgtttctgaccatccgtaagtttcttgagctcatcgtgaagtactctcaactccaacctcagctctcctacaatatcttcagcttctccaagctgagcttcaagttcctcaaccttctgttgctgcttcaaggattgcatctctgtctccttaacctataaacacaaatcggttttttaaaaattagagttgaggaggaaacgcaaagccagccacaaaagaaagatatactccattagggaaagctcatcctcaagcaaacgtgatacagtctctaagatgaaaaagctatatcccccacactgaaaaacctttaacttaaaaatttcacgatgaaatgagaattgagagcataagccatgaaatatgtgtaagcctcactgccaacaatggtacaacgaatctagaacttgctgacactaagctacacttggttacgctcattagttttaggccttaggtttcatgaacaaatatcaatggaggaagagaaaagctatatctgcaaagtatcaatgtaatagtctcaagagtgtcaaaaacaatggcttgtatcaacgttcaatgaagtgaatgtagtgaaaaaacatagcaaaaatgatagtctcgaagcatatcatttgaatgatggaagattttagtcacttcaaatgtcaaagactgaataaacaaaactcagagtcacacacacacacacaacattaacaatgcttaaaaccatgaaagcaaggctgaaaaacttaatttcaaaagccatcttcatatgaagcaagaaaaaagaaatgcctctaagaccccaaaaacataatcaggcagaaaccaaataaaacaaaccaagaacccataaacaaatgaaaataagaacaaagtgatagtaccttggaatcaagcatctgtttaagcctaaccaacgtatgaagtgcttcatttctaaccgtcacaagttcttgctgatacctacgcgccttcttctcagaaaccatcacacgtgccgccgcttccttcgtcgtgttcagtatcgtatcggcgtaggctctcttcaacgccgctaaggtctgtgttaacccaaaacaaaacgaacaaaaaatcatcgcaaaccccgaaaagaaaagcaagacaaaacccacatcgtgaaacccaaaatttaaacaaaattagcgaaatcagcaacaagattctgtccgataagagaaacaaggtctagaagaaacagaacgaaactaaacgaagaaaaatccgaaatcgaaaaaaatgaactcgtgagaggaggagattgagggggtttaaggtaattgtacctctgggtctgccattagagccgataatgcgattgcagagaagcgattgttgattttccgaccaaggtcgcgaactcgccaagaagaaagaaaaagctaaaaaggtttttttttttttttttgtttctttttgtgtttccttgaagcgtctgtctgttaggaacagaaagaagtataaagacctatttacccctaaaaactcgatgttatttctcaaacgccacaccacacgtcacgtcagcttcagcatttcagactgcaaacggcggtacggtttcccgttatctccgtcactcttttcgtaatctctcttttgctttttacatttttcggtgataaatttacaatttcaaaatacactggacttttaatttttacctcatttagacaattagaccactagatttcgtagcttttaccccaaacaaaagactatattgtagctagttctaattattgaattttgtatcaactattccaatacgagacatgatataatgttccatatttggtagatacattcaaagaaaaaaaaaatggtagacagctaaaaaagaagctagctcatgggattaaaccaaaattaagatatccaaatgattttgaagtttcgattgcctagaagatggatggacaattaaaccgacttatagaacattgtctagtttacaacatatattaccaatgtaattgtattctactatttactagtgtacactaatactacttttcttgcaattttaggcgccaattttttttgatcgaaaaatatcgagttaaccaattaaaaccgggaagtaatcattaaaccgggtaatgaccgggtgattactcgagactgttatccacaataagaatccacgtgtcttcttcaagcccctccctcttcttccatttttccgccatttcacctagagagcgagcttttgggtgagaaaatctcttcttctaaactattctactgccaatcttaattcgtgcgtttctgtctagagcttggtggtgactagtaacttagccgttaatcttaaatctctgattcaattcaaatcgaattgcgattttcccgagaaaatctcgtttcacttgctggaggatttttgaatccttatgtgaactctagttacccaaa

SEQ ID NO: 8780 - DNA, 3000 bp, Unknown
  misc_feature (1)..( 3000): cDNA_ID_2995025_gDNA_ID_1971889_Annot_ID_58470 3000 nt of promoter + ATG
agtgtaatgtagcaccctagttaattttcttgcagctaacttgagtgttctggataagcagtaactttagccattgttttgtatataacatcttaagattttaagcaacacttcaaattttttttttggtttataggtgggacgatgtcaatgagttattggaggagatgctttcaaatagagtatcaaatattcatcaagttattgggcaaatgatcaagggagattatgatgatgactcaaattggcagatagtggaatacgtgttggacaaactcaattcagaaggatgtggtttgggaataaggttttacaatgcacttctggatgctttgtggtggctgggccagaaagagcgagctgcaagagtactcaatgaggcaacaaagcgtggacttttccctgagttattccggaaaaacaaacttgtgtggtctgtcgatgtacataggtagcctaagatccctacactggcttcgtttcatgtgtatgaaatggttgagtaccagtcaatctaattcttggttttcaatgttctgcaggatgtcagagggtggcatgtatacagcactatcggtttggctaaatgatataaatgatatgcttttaaagggagatcttcctcaactagctgttgttgtttcagtgtaagtattttgatactgggtacctacctcattgcaagatgccttcaagctttttatcttgccttttgccttttttaattctttctttctaacctctcagacggggacagttggagaaaagctctgctgcaagagaatctcctatcgcgaaagctgctttctccttcttgcaggatcatgtctcgtcctcattttccttcacgggatggaatggaggtcgcattatgtgccagcgatctcagctcaagcagttactgtcaacgaaagagccaacttcagaagaatccgaaaataaaaacctagtggcattagcaaactcgccaatatttgcggctggaacaagagcttcaacaagcagtgacacgaaccacagcggtaaccctacacaacgaagaaccaggacgaaaaaagaactagcagggagcacagcttaagaactagacaacgtagtttctgttgccaagtccagaaatcaaaggcctcttctgccttcctccatatagactggtgggtgaaaactgtgggcgtatttcacaagcactccatatccatgataactatgctatggtttcaagcagtagagtcaacctctgttagacagaagaagctggagaagaagataaatggtgatcttagtttatatgaagaagcgtctatatgaaaatctcaagtaagtagccaactaagtgttttgatggattgttagacccatgattttgcagccatagattttttttcgtttttttttccattcaactatgtttttgattactataaagctaaatgctaatgtaagatcaaagctctagttacaattaaaggatctattaatcaagattcctcagggaagctctagtttttgcttgtgacctcacctgatgaactctctctgtttcgaaatctaacttattacatagcaatgacccaactccacccagaataaagaaaacaatctgttgtgcaagattccttcttcggtctgattaatctttttctctctctcgtcctcagatatgtgtttgttttctgatttaggaaagtcactacaagtttgtcatccaaattggtaataaaataagaaaaagattggagaaagaaaggatcttcctatagtgcttcacacattacaactttaagattccactttgtgtgcgcataaaagtaatggtggctttgctttctaaccgatgctagtgctttgtgtgattttgctgtcttccaaaactatttaccaaattttgtaaatactttttagaatcttttccctacaaatctaaaatagataaataataatagtatgtgatcatattgcttacagtcaaatcacatcctaacattctactaaaagactaaaactatcacctttttgttttttaatgctatatagttgtgatcaagtctggacatacgatcatgctgtttatactacaattaggtccttaacagcgtcttaaaatttactcttagctagaaaacgacaaattcgactacacaatcatttttgttgttgaattagattcctgaaattgtaagtttttgtgttgaaattcaaagttataatttccaaaaaggattcacctgtctcccaagatttttttcttaataatcaactcatagatccacaagatatagtattttagaagaaaaaaaagtacaaggatggagctgtaactaaatagattattagagcagagtacagaatcatttcagaagctgactatttttctaagctcaagttgcatgcgcttaggccttagagacattgcgttgaccagtacattataacctgtagatttttatcataaaaatacatgagggtaacgttaagaaaaataaaagcgtcgatttcatttcatttttctcattctgttatttcatttttttgtatttaactttgagtttgcgaaagtcaataaatatttcttcgttatacgacctacattttttggtcgacatagcgaaatacttttttaacttcttattataggataacatttatttaactcttttttcgtcatcctataagattaattaaactactaacaaaaaacctaataaatctagtcagccaatgaataaaaaaagtctatccaaatgaaaactctgtagagagacaggcaggtaagaaaaaaatacaagaacagacgaataaaaacaaaacacgtgtcatatggtaccgtcaccaacacctacaacatgtaatagtttaaaaaggaaccacgtggcttttggcttataaaagggtccccaaagaagctcagatctaactcacaccactccattgcccattgctctgtgtactttgcttctttaggagaaagaaagcacaaggggcaaaatcggaaagattatc

SEQ ID NO: 8781 - DNA, 3000 bp, Unknown
  misc_feature (1)..( 3000): cDNA_ID_1989217_gDNA_ID_1971889_Annot_ID_58471 3000 nt of promoter + ATG
ttttgtgttgaaattcaaagttataatttccaaaaaggattcacctgtctcccaagatttttttcttaataatcaactcatagatccacaagatatagtattttagaagaaaaaaaagtacaaggatggagctgtaactaaatagattattagagcagagtacagaatcatttcagaagctgactatttttctaagctcaagttgcatgcgcttaggccttagagacattgcgttgaccagtacattataacctgtagatttttatcataaaaatacatgagggtaacgttaagaaaaataaaagcgtcgatttcatttcatttttctcattctgttatttcatttttttgtatttaactttgagtttgcgaaagtcaataaatatttcttcgttatacgacctacattttttggtcgacatagcgaaatacttttttaacttcttattataggataacatttatttaactcttttttcgtcatcctataagattaattaaactactaacaaaaaacctaataaatctagtcagccaatgaataaaaaaagtctatccaaatgaaaactctgtagagagacaggcaggtaagaaaaaaatacaagaacagacgaataaaaacaaaacacgtgtcatatggtaccgtcaccaacacctacaacatgtaatagtttaaaaaggaaccacgtggcttttggcttataaaagggtccccaaagaagctcagatctaactcacaccactccattgcccattgctctgtgtactttgcttctttaggagaaagaaagcacaaggggcaaaatcggaaagattatcatggccgacggtagtactagttcttcggagtccactaccgcctgcgctggaagcggcacaagaagagagattatgctgttcggagtcagggttgtgcttgacccgatgagaaagtgcgtgagtttgaacaatctgtctgactatgaacagacggcggagactccaaagatcgacggcgaagatagagatgaacaagatatgaacaaaaccccggccggttacgcctcggcggatgaagctcttcccatgtcttcttctaacggcaaaatcgagaggaaacgaggtattactcttcgattgaaacttttttttatcattccataaatttgatcactttaaacttagggatttgttagatatggtttgagaaatggactatgaacaactttatgttcatttggatttagaaagatggctaatttattgggtttctttctatttcttaggagttccatggactgaagaagaacacaagctgttcttgcttgggctgcagagagtcggtaaaggagattggaaaggaatatcaagaaactttgtcaagaccagaacctctacacaagttgctagtcatgctcagaaatacttcctcaggcgaagtaatcttaaccgtcgccgccgaagatctagcctttttgacatgactactgatacggtaaatctctaatcctttgtgactctagtaagttaagtggttaggtttagtttttagcttagttgtttaaaagaaactaatagagagcctttgtgaattgttggttagtgaaaacttaagtataacaaaactgattttgcttggttttgttatcaggtcatacccatggaagaagatcaccaagtgcttatacaggagaacacatctcaatcatcttctcctgtaccggaaatcaacaacttctctatacatccggttatgcaagtctttcccgagttcccggtaccaacagggaatcaatcatacggacagcttacttcatcgaatctcatcaatttggttccattaacttttcagtcaagtccagcaccgctttctctcaacctctcactagcttcatctaatcttaatgaaccatctccttcaatgcatccagcattcaacacgattggagtcgcttagagcttatcctaaaggtgaaaatctgcaacacaccctgtttgtttctttgctgtacagataggtcttgactttgttataaaaaaattcgtcaaatttatgtatttggctaaaaaaaatctgttgaaaagaagaataataaacagagtttggagataggacttaagtggggttttagggttcataatcatcctgtgtttttccttccatgtttggaagttgttgtaatactctctaagttcattcgtgtggatctatcaaaacttataaatcatattaacgttatgtttgttttattcatgatctcaatcataaacagagtcgtagtacttgcttatcatgtggctatctaaatcatgttagatgattcatggggttttagggtttttataatatatctgatttccaaggataagatattttatgtttgtagaataatgtcattatctttaatgatgccaataatgtcaaattttattggtcacttccatcatagtggagctttttcttttcccatcagatgcttttaatatattttgtgtgggatgattacatattacccctgttgcgtaagcaataatcttccaatcacagaacatgatccccattcattaatcgaccaatcaaacagcatcatttttatatgatgatgatgtatatgtgtatgtcatgtgtgtgttggcatgtcctctgtttctgtcgtgtatggttgtattcagttttagcgtcaacgacaaacttctcctcacgtctaagcggggaaaaaaaaaaaaaaaacgaatccagtttatctttgtttgttttgtatctctctgtcttttgacattgtctctaaatttatcaatttcaaatctgcgactatcctttgtttttgggtactttatctcatcaaattccagcccaatctagactctctaaacccagaaatagaaacacaaatcacaaaagattgagatagatagatcatgatctctgttctttgttgatctttgaccaaaattcgatctcctatgtatatacaattgctctgttttttcttgttcttgtttctgcttttacaagccaca

SEQ ID NO: 8782 - DNA, 228 bp, Unknown
  misc_feature (1)..( 228): cDNA_ID_1989204_gDNA_ID_1971889_Annot_ID_176839 3000 nt of promoter + ATG
ttcttctggttcctaaaaagtggctgtcaagaagagtgagacatgcatcaaactctctcttctcctgccatggcgtcaaacctccggaaaccctatttcctcaggtacttaactattcttccccaatcgatgatggtcgaaagctgaaacctttttctgcaaatcgattaaccgacaagaaaatccaacccaacccacccactttgttttgtttggatgataaaaatg

SEQ ID NO: 8783 - DNA, 3000 bp, Unknown
  misc_feature (1)..( 3000): cDNA_ID_2028729_gDNA_ID_1971889_Annot_ID_176834 3000 nt of promoter + ATG
ccaccggaagtgaggaagatgcaagtaggaagacctcccggcggagatagaattagggttacgaagagaccaccgaatggagattattcacctagggttatcaatagcaaaactggaggaggagagacgacgatggagaagaagactcatcatccttacaatcttgttgagccaatgcagtatctcttcgttcggattgtgaaggcgcgtggcttaccacctaacgagagcgcgtatgttaaggtacggacgtcgaaccatttcgtcaggtctaaaccggccgttaaccggcccggcgaatcggttgattcaccggagtggaatcaggtttttgctcttggtcataaccggtctgattccgctgtaactggtgcgactcttgagatctctgcttgggatgcttcgtcggagagttttctcggaggagtttgttttgatctctctgaggttccggttcgtgacccgccggatagtccgcttgctcctcagtggtatcggctcgaaggctccggcgcggatcagaactctgggagaatttccggtgacattcagctctctgtttggattggtactcaggtagatgaggcatttccggaggcttggagctctgatgctccgcatgtagctcacacgcgttctaaggtgtatcaatcgccgaaactttggtacttgagagtgacggttcttgaggcacaggatttacacatagctcctaatctcccgccgttgactgcgcctgagattcgtgtgaaagctcaattagggtttcagtcggcgcgtacaagaagaggctcaatgaataaccacagtggttcgtttcattggcatgaggatatgatctttgttgctggagagccgttggaagattgcttggttctgatggtggaagaccggacgactaaagaagcaacacttctaggacatgccatgatcccagtgagctccatcgagcagcgaattgatgagcgttttgtgccgtcgaaatggcacactctggaaggagaaggtggaggtggaggtggaggaggaggacctggaggtggtggtggtggtggaccttattgtggaaggattagccttagactttgtctcgaaggtgggtatcatgtgcttgaagaggcggcgcatgtatgcagcgatttccgtccgacggctaagcagctatggaaaccgccgattggaatacttgagttggggattcttggagctcgtgggttgttgccgatgaaggcgaaaaacggagggaaaggttccactgatgcttattgtgttgctaagtacgggaagaaatgggtcaggactcgaaccataacagacagttttgacccgaggtggcacgagcagtatacgtggcaggtttatgatccttgcaccgtgctaactgttggagtcttcgacaattggaggatgttctctgacgcctccgatgatagacctgacacacggattgggaagatacggatccgggtgtcgacgttagagagcaacaaagtgtacaccaattcatatcctctgttggttttgttacctagcggtatgaaaaaaatgggtgaaattgaagtggcagtccggtttgcatgcccgtctctgctgcctgatgtttgtgcagcttatggacagccgcttctgcctcggatgcactacataaggcctctaggtgtagcacaacaagatgcattaagaggggccgccacgaaaatggtagcagcttggctggctcgagcagaaccaccattgggaccagaggtagttcgatatatgttagatgcagattcgcatgcatggagcatgaggaaaagcaaagcgaattggtacagaattgttggtgttttagcttgggcagtgggtttagctaagtggttggataatatcaggcggtggaggaatccagtgacgacggtgctagtccatattctatatctggttcttgtttggtaccctgatttggtagtcccgactgcattcttgtacgtggtgatgatcggagtttggtactaccggtttagacccaagataccggctggtatggatatccgcttatcacaagctgaaaccgtcgatcctgatgagctagatgaagaattcgacaccataccaagctcaaggcgaccagaagtaatccgagctaggtacgaccgattaaggatcttagcagtgagggttcagaccattctaggagattttgcagcgcaaggagaacggattcaagcgttggttagctggagagatccgagagcgacaaagctgttcatagcaatctgtttggtaatcacaatagttctgtatgcagttcctgcgaaaatggtggcggtggctctagggttttattatcttcggcatccgatgttccgagacacaatgcctacggctagtctcaattttttccggcggttgccaagcttgtccgatcgactcatctaaggagagaaagatgtcaagatagtaaatgttaggtgtttttgagtatccaacagtttcttgggctgaggaggaaatagaataaaaagattcattatgggttaagaattttatcatattattatgattcttcattttattattcagattctgtcggaaactataatcagatggcatgagctttgagacctgtaatattttgaaggaaacgagagagatttcagatttgagaggtgaaaaaggaagcaaaacttgtcagtaaagttttttgaccacagatttgcttttggtatctctgtagttttctctgtaatctaaaatgatttactaattcctcatttaacttattttgtttacgcctaaactattacatgtaaacattgtctgattatataaattctaagtgaaaaaccggagataaagcgctaacgaaaatgattggttgaaatcacaaagacatcatctgacgtggcagtttctctgtctatcagagtttcagatagtgtgccaacggcgaaacaagacacgaaagaatctctaaagaaatcattttcatcgcttcgcttcgatttttcttcaatg

SEQ ID NO: 8784 - DNA, 3000 bp, Unknown
  misc_feature (1)..( 3000): cDNA_ID_1989208_gDNA_ID_1971889_Annot_ID_176833 3000 nt of promoter + ATG
tggtgtcgaattactatttttaaagttagtgattgaatttgggaataaaaagaatatttggatttagctgtaaaaacctttttttgaacttttcgtcttttattactttgttccccttttgagcaaacgtttcggttctgtcctcctcaagtttctctgtactactttgaatatgactgttttgtgactttcatttcctttactattttagagtttagagagagattttgtgggtatgattcgatccgaactaaatttccgtggcctctttaatttagattttagaacggctccttttctttaagatagattttataaacttttaatccaaaagaaatataaaaaatctgaaaaaatctaaaaatgtgaaagcacaacaaagttttaaataatattttgaaaaagatacttttatgccattgtatttgtgcatttatgttctcctttgcaagtgtattctctttaagctaagaaaaatatattgggctttcctatcagttatcttatgagcccatttcaaactttgtttttcaagcccaaatagctgctgtataaaagacatttgctcgttatatgatcctagtagcttcgacaaactcatactacagcttaatctgaaaccccatagaatcttaaactaaccctaaagtattcactcccaaacctcatcatttactataagtgtgcaacatatggaaaacaaacttagtcagagacatactacaatcattgaaattaatgaatttcagattccaaaatgtaaataaaacggacctgtgtcacttgatccatgccaaatcacttgctgtcattttcttgttcttcataacactaaaagttagactgaaacatgactaatctagaaacttattgagtttccttattacttgaaaagttttaaaagagatatggatggtaaacaaaccatcccgccggtatatcactattcaaagcctaaggcatggatgatggattcattcatttcttttctttttttttgaatttaagattcattcatataaaaatattaattatcccataaagtatatatagttttaggctgtagataacagttttatgcaagaaaagtgatgggacttgaataaatcgaatagttggcatgacaacgccacatacacatgcaatctcaaacattctagttgagcccatcatttcatacacaatctcatgttttttccttcatcgacgaaagtccctttttccgaataataatttttcgtattgttagtttctttttaaatcctttttgccagctaaaaagttgcacaagataaaacatggtccatcatttcctctcttttttttttaggtgtgaaaatcaatctcatccatactaatctatttgtaattgatttatctttttttatggaattttatgtcttaataatttataacatattactatatgcataaacataacaaagttcgagtaaaatataaccaagttttaaaacttggggcttatatagctagttttctctaatgtattgatttacaaagactcgctttttttattttttgcatgactttcaacgtttcacactctttttgccaattgcactaattgttggttgaaagtataaccgggaaataaataaaagaccttcttttttacctactgatatcaatttgatgagtgacataaagtgataaaacaaaaatatttatattcatatgcacaaattttatcgtttagacgatgtacatgatgatcaaaaagagtttcggtttcgaacttccaattagttgttgataggatgtgaatgtaaacccgatttatagaaagcaaacgaataagatcacgacatggcgacacacttgtcaattagtttcgaatataaaaatgagaaatatatgagagaaaacaacaagacgatcgcatttgtttgcatttttgttgactttgatcaatggaatcttcatatattagttttgattactatttttttacacaaaacaaagtccgatagtaagctgactcctttacattgataaagtctacacctaataatatctcatatcttagatacaaatttgatagcttttgaaattatcttcaccaaatcttttggtagaaactttcaaatcacacataaactactagggtttttttttgttaagaaaatccaatgccagtttttatcttgaatttgacaacccaaagttatttattttcatacgaaaaattaatgaagacattttccactcgataaatctgtaaatatacatatgtatgtatattggtaagaaaccagtttttaaatattgtatttaagaaaccaaatagcaaaaaaaaaaattgtagattcaggtagtttaggtaatgctatagacatataatataagacaagaagacaataataattactgaattgaaaacaaaacaaaatattttggtgataccaaatcaaatgaaaccaacgtcacactttttgacaatgtcaccgtatccacttctacggtcaacaacttcatcaaactctccccttccacgtaagctacatctctacccttcattttaccacctatcaacagatctaaggctataatttttttaatagttattttaattacttactcttttagttacaacaccagagactaaaacttgttctgtaataataatacaattaattaactgttaatcactgaaaatattttacaattttttataaattataggttagaaaatggctcaaaattacagtttctatgtaattaatttgtttaagtatataggggagatagatcaagtcgctttaacttattttctttttgatataaataaaaaaaattataatcattttgatcaattttacgaaaaggtcgaaactttcttcagctgaacccgtgtttcctcttctctgcaactcaccggttcgccggaaaactctacgccgtcgccggattttgcaccaacgaaaacttctttaaactactttcttcattattcttctgctgagtttcaaaaactcagcc

SEQ ID NO: 8785 - DNA, 3000 bp, Unknown
  misc_feature (1)..( 3000): cDNA_ID_2037281_gDNA_ID_1971889_Annot_ID_176829 3000 nt of promoter + ATG
aaacccaaagaacgcaacagatgccattataataaatgacagcctgaagcaatgagagccataacatgtgttcccttccccggaagcagtcttatcgtagatataaccgatcaatcttacagagaagatataggaaccaatgggactagccacggatatggtattgaagatggttcccatgtgccgaatcccgaacagctcagaggtgattgtaggcatcagagaccactgtgaaccataacaaacgccaactataacagaaccaacatagagatttccttgaaaaccagaggctatgattaggtggcctatgctcatcgttccaagtgttgcagccattagcaatggacgtggccatccctttttgtgtagcaatgcatctgaggcataaccagctccaaatctaccgagaaagttccatatactccacaaggagaccaatgaatttatctcaactgatgagtatcgaagagactcacctatttgtcggatgttgtttatcgttgaaagtccagagcccattccgcaaatcatggcaagaaataacaaccagaagcttagttttttcatagcttgcagaagattcaggttctcactcagtccagcttccactttactgtcaccttcagaactttggttaccggaggttgttgcctttggactgcttatgagaggggaataatcatgtggtactgttttttccatgccgtctcgttgtgctcttctcgcaataagtagaggcaaggcaagcatgacgagtagacatacaagtgtgacaatgttggcccacgatgacaacccaaaagtgttcttcaatatgataatgatcataagataagctgcgatgattagagatacagctgaaagaccatttaaatgctttttatcatcggctacgcttgtctcatagatcctgaccagaggcatgaccaagagtgagagcactgttggtgttactgccagtaagagaatgaagctggccggatctccagcgcacaatgtctcgtacagttgaatcagtatcgctccacttagaccaagaaaaccctgcaaagaaagaattagaggtaagcttggatgcttcactataatcaaaaattccaaagttgaaaccatgaatctcccactattaacatactttggggtttagttgaagtttctcatcttaaaagtggaggttgcatcctcatttgcaaggtttatcagaaaagaacaaatatttactacgcaatatatatcaactagaagatctagatctcgattgatccaaagttcaaagcatcaatctctttccaaatgttaccaaagcctcctcatttagactctaccaggatcatcatcatagccaaatattggtctttaggtcccaaggaaacaaactgagacgtgatccaacaatacagatccattcaatatatcgaaaagcttcatcaaaaactcaccttcataatgccaacggctgtaccaccatagtcagcgaaattctcaacggcactaacaacattagccgtattgaagaacgtttgcgactgagctgctaagaacataaacaggcacatcagcggcaccggaggctttctaataagtccggtaacagaagcccaaatgagaaagtaaccggcgaagcactgaattgccccaacagcaagcaccacccaaggtcctccagcgcctccaattcctcctccccgtccacggagacgattggacgtagcgtatgtgtataaaagcccagagaaaactccggcgtttgctccgatgtccttgaagactgagacggtatcgagggtggattgatcgtacgattgagtcgattttaggacagcggaatagattccgaaggtgtaggaagcgccgcttgcgcattgtatccatatactagctgtcatagccacccatttcgttcttagtatctccatcgccgccaattaccaccaccttcctcgccggaaaaaaagagaaagccagagctttttcccctgctcaaggacgacgaagcgacacgatcacaaaacttttttttctttttttctttattcaaacagattgattttggaaaaactatttaaaccttaatgggctggaaaaattggtatgggctcattagttatagaactcgtagtattgattttgtgagcccaattaactggaatgacacgtggagtcagatggagagcacacgacagccacaagacggcttgtggaagagagaagacggaacgaggttaattaacggattaaactaacggagtcaacgttgactggtcaaggagtattgagaaaactgtacggccggccaaggtcacgccactctctcgaccaatggttttataatcacgaggctgactcagctaatctcccgcaaatcacgagatttttcaatgttactcaattacaaaactattaacaaactcaatactacaaaatcatgtaatgtgattatttagttagtcggatcactaattaatgttttttcatgcattatactatggtcaacgacgttggagaagtaatcttgaatacttgacaacaaccaaaatattgattctttttttcctctcataaaaaaataatgtttaacaattgtaaatgatctaatatattatctccattcttgttagattaatttaatttatctctgttcatattttcacaatctaaatttcttttaaaaataatataaatgaaaacaaattagttagttaccaaagaaacagagacaaaacagatatttaaatatacatcccgccataaatatgatataagctatagttggttttcagctgcaacgtctcagtcacttctaatataataaaactcaaaatctcaaattgattaaacaaactggcttacgcagaagagtgacgactacgaaaatgtatcatgcctttaaaaaccttctctactcctttaatcggttccttcttctttcccttttctcctttcgcttcacgacgacgaaatttttgatttcagtcaccgttattgttgttgcggtgg

SEQ ID NO: 8786 - DNA, 3000 bp, Unknown
  misc_feature (1)..( 3000): cDNA_ID_1989212_gDNA_ID_1971889_Annot_ID_176828 3000 nt of promoter + ATG
ctctgtatggcaaattgctttgttacttggattataagggactcaagttcctcctgaagctgcaatagaaaattgtccgtctttgttttatcatcagcacttttgtataacaatctctgaaaattctcaagacaatcatctatgttgaactgtttggcagttgaagagcggcgagctgtcatttcttctaacactgggtgaaagaacttcttaaatgcattgctgcaacaaaacaaaacaaaacattctgtaactcactcaaagaaagaaggaaggaaagtaaacaagagactagacactataccaaagagaaaaattaagttaatccgagaaactattattacctataagaaacaaggacatcagcaaggaagtttaatctagccatcagtacatcaagatccaaaataagggtttggaattttgcttggcataatccttcttgaatatctctcaaatctttttcaattgcattttgaaaaagtctaagaccatgaattgggctccgtcctacatttggaattgaaagggactttttactccactcccaaaagcgttgaaaacatccgcttgacggatgtgactcaggtgatttcttcaaacttttagacacattaacatactggactcctttcatgatctctgtaggagtcccacaagaagattgactatcgtcaagcagccaagagcttatgaccttcagaaaattttagcttatcaaaaggaaagaagaaaaacatagcatatctcagcaaaggggatatgtatacctgttgcaatgagtcttcatttggggcaacatcttttatacaattctcaacttcaattttctcctcgtgagagagatgagagatcatccatggcaaaaagtcttcaagcaccatcactggaacactacaaatgaattgccacacaagtgatgcttgttctcggaaagaaaacttctctattaacaaaggaaacacctacatgaagcatgactcgttaggcaccactatgaaaagtgatagagtatctgtaactgaaatgttgttttccattaaaaagtattgtagttgtcaaaacagagttgaagtataacaagactatatacctgccgctcttctttaagcatatgttggcatatagatgactggatggtgcctatgcataaaataacttcacgaagtacatcgcttctacttcctatttcttcttcaagaacatgtagccagtggaaaattgaggtaaagagatcatctgtgccagcatgctcaagtgagtaattagaaactatgtttttcactcgtttatctagcgccaaaaatataacctgccagtaagaaaagcatatcaaaagccactgttacttatcatgataaggatttcaatctaagagtcagattcttgacatcaataaaagattcacaaactgaaactagagactgcaacacgaatttagacaaggtcttttaccctagtaacctagtctaaccaagaattcaaaggacaatctttatttctctagttgtaattagcttcaggaagcaagagagttctaaactcgaatttaatttgtgaacataaagaggagtaacagagattaaaacagagcaactcatttagggaaaaaaaaacttataaaggtgataaaatctaacctcatcttcagctgcgctatgatacttatatacaagcttcaagaactcaaacttccgggagagctccaccgccagatccccactaaaggaatcggcttcagcagcgtcagtagcgaaacgccggagctccaccagctgagcacggaaagccttgtggcagtaaacgaagaaaagaaccggagcatcagaaagcttggtatttccaacggtcaccgcataagatgcagaaacggaagcgttttccggcggaagggaatgaagatttccgcctcccatccaccgcaacaacaataacggtgactgaaatcaaaaatttcgtcgtcgtgaagcgaaaggagaaaagggaaagaagaaggaaccgattaaaggagtagagaaggtttttaaaggcatgatacattttcgtagtcgtcactcttctgcgtaagccagtttgtttaatcaatttgagattttgagttttattatattagaagtgactgagacgttgcagctgaaaaccaactatagcttatatcatatttatggcgggatgtatatttaaatatctgttttgtctctgtttctttggtaactaactaatttgttttcatttatattatttttaaaagaaatttagattgtgaaaatatgaacagagataaattaaattaatctaacaagaatggagataatatattagatcatttacaattgttaaacattatttttttatgagaggaaaaaaagaatcaatattttggttgttgtcaagtattcaagattacttctccaacgtcgttgaccatagtataatgcatgaaaaaacattaattagtgatccgactaactaaataatcacattacatgattttgtagtattgagtttgttaatagttttgtaattgagtaacattgaaaaatctcgtgatttgcgggagattagctgagtcagcctcgtgattataaaaccattggtcgagagagtggcgtgaccttggccggccgtacagttttctcaatactccttgaccagtcaacgttgactccgttagtttaatccgttaattaacctcgttccgtcttctctcttccacaagccgtcttgtggctgtcgtgtgctctccatctgactccacgtgtcattccagttaattgggctcacaaaatcaatactacgagttctataactaatgagcccataccaatttttccagcccattaaggtttaaatagtttttccaaaatcaatctgtttgaataaagaaaaaaagaaaaaaaagttttgtgatcgtgtcgcttcgtcgtccttgagcaggggaaaaagctctggctttctctttttttccggcgaggaaggtggtggtaattggcggcgatg

SEQ ID NO: 8787 - DNA, 3000 bp, Unknown
  misc_feature (1)..( 3000): cDNA_ID_3043556_gDNA_ID_1971889_Annot_ID_176827 3000 nt of promoter + ATG
gatggagatactaagaacgaaatgggtggctatgacagctagtatatggatacaatgcgcaagcggcgcttcctacaccttcggaatctattccgctgtcctaaaatcgactcaatcgtacgatcaatccaccctcgataccgtctcagtcttcaaggacatcggagcaaacgccggagttttctctgggcttttatacacatacgctacgtccaatcgtctccgtggacggggaggaggaattggaggcgctggaggaccttgggtggtgcttgctgttggggcaattcagtgcttcgccggttactttctcatttgggcttctgttaccggacttattagaaagcctccggtgccgctgatgtgcctgtttatgttcttagcagctcagtcgcaaacgttcttcaatacggctaatgttgttagtgccgttgagaatttcgctgactatggtggtacagccgttggcattatgaaggtgagtttttgatgaagcttttcgatatattgaatggatctgtattgttggatcacgtctcagtttgtttccttgggacctaaagaccaatatttggctatgatgatgatcctggtagagtctaaatgaggaggctttggtaacatttggaaagagattgatgctttgaactttggatcaatcgagatctagatcttctagttgatatatattgcgtagtaaatatttgttcttttctgataaaccttgcaaatgaggatgcaacctccacttttaagatgagaaacttcaactaaaccccaaagtatgttaatagtgggagattcatggtttcaactttggaatttttgattatagtgaagcatccaagcttacctctaattctttctttgcagggttttcttggtctaagtggagcgatactgattcaactgtacgagacattgtgcgctggagatccggccagcttcattctcttactggcagtaacaccaacagtgctctcactcttggtcatgcctctggtcaggatctatgagacaagcgtagccgatgataaaaagcatttaaatggtctttcagctgtatctctaatcatcgcagcttatcttatgatcattatcatattgaagaacacttttgggttgtcatcgtgggccaacattgtcacacttgtatgtctactcgtcatgcttgccttgcctctacttattgcgagaagagcacaacgagacggcatggaaaaaacagtaccacatgattattcccctctcataagcagtccaaaggcaacaacctccggtaaccaaagttctgaaggtgacagtaaagtggaagctggactgagtgagaacctgaatcttctgcaagctatgaaaaaactaagcttctggttgttatttcttgccatgatttgcggaatgggctctggactttcaacgataaacaacatccgacaaataggtgagtctcttcgatactcatcagttgagataaattcattggtctccttgtggagtatatggaactttctcggtagatttggagctggttatgcctcagatgcattgctacacaaaaagggatggccacgtccattgctaatggctgcaacacttggaacgatgagcataggccacctaatcatagcctctggttttcaaggaaatctctatgttggttctgttatagttggcgtttgttatggttcacagtggtctctgatgcctacaatcacctctgagctgttcgggattcggcacatgggaaccatcttcaataccatatccgtggctagtcccattggttcctatatcttctctgtaagattgatcggttatatctacgataagactgcttccggggaagggaacacatgttatggctctcattgcttcaggctgtcatttattataatggcatctgttgcgttctttgggtttcttgtcgccattgtactattctttcggacaaagacgctatatcgacagatccttgtaaagaggttgcatcatcgatagagttcttgtgaatactatacttttggagaaaaacgaatactgcttctcttgctacatccatggtagcttatgcttccaaaggtacacatcaatttctttacctataagtttgattgtaagttatgtttgtatcaaatgtctgtgtttagagatgggaagaaagaaagctgagatctttgtctctctttctttttgtagtttcttccaaaaatgtgagttttgtgaattgtatagacatctcaaagttcccaataatgttgaaattttttaaaattcatattgttgactactatgcatttaaatagtaataatttgcaggccatcaagtctcgttcattcattattcagattaatccacaaaccaatctccatgcaccaacactcttattcaatgcgttttcaattatacttttgatcatttccacataaattactttgttaatcaatagaaagttatggtttggaataaaaagtagttttgcagtcttaaatgggaagagaacttgaagaagacaagtccttttttcctttgttctaccaacttcaaacctacttttcgaaccccaataagttcctagaaatccaaaacccaaatgtataaagtcaactactttgactatcacatctgaggacaataatcaaaagctagcaaagcatagaaaaagacagaacctttgttcatcgtctctctctctgacacgagaaagttgaaaaattcaagttgaacatgattatattcattaattattatatgagaagggagatttctggggatatggttgttggtagtcatgggaagacagtaaacgccatcgcaattgcatttattctgtctgcagagtcaaacaaactaattttattatttgattttcagtcctatctctcttctcttgtcttgtcctgagatcagatgtataaaaaagagacttcttttcttcttctctcttgattctctcttccactgtcattatcttcaagatttgtctcttgcgagactcgatg

SEQ ID NO: 8788 - DNA, 3000 bp, Unknown; identical to SEQ ID NO: 8781
  misc_feature (1)..( 3000): cDNA_ID_1989217_gDNA_ID_1971889_Annot_ID_176821 3000 nt of promoter + ATG

SEQ ID NO: 8789 - DNA, 3000 bp, Unknown; identical to SEQ ID NO: 8780
  misc_feature (1)..( 3000): cDNA_ID_2995025_gDNA_ID_1971889_Annot_ID_176820 3000 nt of promoter + ATG

SEQ ID NO: 8790 - DNA, 3000 bp, Unknown; identical to SEQ ID NO: 8778
  misc_feature (1)..( 3000): cDNA_ID_1989792_gDNA_ID_1971889_Annot_ID_176816 3000 nt of promoter + ATG

SEQ ID NO: 8791 - DNA, 3000 bp, Unknown
  misc_feature (1)..( 3000): cDNA_ID_2037321_gDNA_ID_1971889_Annot_ID_176813 3000 nt of promoter + ATG
ttgaacacgtctcatggttctaaattcagtacttgtttggagcttgctgatatttgtcgagaagttggtcttcctcctggggtcctcaatgttttgactggtttcggttcggaagctggtgctcctttggcatcacatcctggcgtggacaaggtattggtctttgagaatacagtaaacataagtcccaacaaaattaactctaaaggctatgattaaacattcagtttaacgtctgcgtttcttaaacgcttcaatgctaagttatgatttcgttgcagattgcatttactggaagtttcgccacaggaagtaaggtcatgacagccgctgctcagttggtgaaggtaattccaatttttgaactttctgctgtatattccttctcctccttttgtttcatcaccaatgtcaatgacacattactcatggcattgttgcagcctgtttctatggaacttggtgggaagagccctctcattgtgtttgatgacgttgatcttgataaaggtgaatgtcacaaaaagtagtttagtggatttggagtttttttataataacttcttcttgtgctatattcaagatagtactaatgcttttgttgctttgagacgagtagacatgacttaaatttgcttaatcttaaaattaaactctttgtatgttttgacgccggcaaatgatagctgctgaatgggctcttttcggttgcttctggacaaatggtcaaatctgcagtgcaacttcccgccttcttgttcacgtaagtcccaatcttctacttgctttaaggttttacctgatcttcccaatatgacatgcgaatatttattactggagaagtgaatgttccaagtcatacgggaagatgtttccattaaggtcaatgacaatgacatttatttcagatcaaaccttctggtggatatgccaacagggatacaattgctgactctcttgtctaaatttttttattttatatcttaggaaagcatcgcatctgagttcatagagaagcttgtaaaatggagcaagaacattaaaatttcagaccccatggaagaaggatgcaggcttggtcctgtagttagcaaaggacaggtaaaatcccagtgatcgttttttctgtcttcatattatttgtcaatttcccatcaggttgcaatacaacaaccaggactaaaaaggaaaagagaattgagttctgtagtatagtgattaacttttgtccctctaattctgaaccgtttagcttttagagcatcaatcaaatcacatctagcatatgatatttcatcacgcttatcatgttcttacttggtaggtgtgcttttcttctatgatcatataatctgattgagctgacaaatgtaaatattacagtacgagaagatattgaagtttatctcaacggccaagagtgaaggagcaacgatcttgcatggtggttcccgacctgaggtattacatctccctcccttacctatccttgatgcagtttcttccagactatgatgatgaccttttatatcatatctatatttcacagcatctggaaaagggcttcttcattgaaccaaccatcataactgatgtaaccacttcaatgcaaatatggagagaagaagttttcgggcctgttctttgcgtgaaaacatttgccagtgaggacgaggcaattgagctagcaaatgactctcagtaagttaacgtttctccagaaagtgaaatctgatcaaatcccatccgctgacactggtgtttaaatcaaatttatcatttaagatcttatgtggctgaaaattattcattgattaatgacagttacggactaggagctgcagtgatatctaatgacacagaaagatgtgaccgtataagcgaggttagtaccggtttcttgaaccattcagatttgtttttaatgcctagcaagtgaaataacaataccatcaaataacacaaacaattggtgtctactttgttaggcctttgaagctgggattgtctggattaactgctcgcagccttgctttacccaagccccatggggtggtgtcaaacgcagtgggtttggacgagaacttggagaatggtacatttctttttctatctcgaatcttgtttttaaaagactatatcttgatggcttgtactgaacaaatcttggttatggctggtttcttgcgtgcttcaggggacttgataactacttgagtgtgaagcaagtgactctctacacttcaaacgatccctggggatggtacaaatctcccaactaagtaatgaatacattgtcatggaaatggaaaccaaaccaaatgctgtctgttcaaatctttgtgcttttattatcagtctgtctagttcggtcctgaaactcttttgtaaaacctgttgaatttataatgaataaaagatgctttgctgataattattggttgttctataaaggccagtattgaggcaccattttaggctctggtgcagcagtatcaagaacatgaaccattttatgtcaccttcaagtcacatcaaagttaaaactcacatggcaatcaattccaaatcataacttttttttttactataattgcttgaaataaacattttatgagatctgaagatttgtggattttttttccattttttaaatagtaaaatgtttggcaaccaaatctgaaaaagaggtaaagacgagaggtctcgcgcttatccttaaaggactgtggtgaatggtgagtgtgacttggagggaccccatcaccgcaacaatacagcttcttagatctcgataaccacaactaacctgtcacagtttcgattagatcttctcaaaaacttcacctttttttgtttttccagtttctcagaggagatcttccttcaaagctcaaatccttttgtctgaattgtgatactgctgtccccatttttctgcaagttgggaaatttctgtcaaagttttgtgggtctgttaaaaagatctgagctttgaac

SEQ ID NO: 8792 - DNA, 3000 bp, Unknown; identical to SEQ ID NO: 8776
  misc_feature (1)..( 3000): cDNA_ID_1394832_gDNA_ID_1971889_Annot_ID_176812 3000 nt of promoter + ATG

SEQ ID NO: 8793 - DNA, 3000 bp, Unknown
  misc_feature (1)..( 3000): cDNA_ID_4266404_gDNA_ID_1971889_Annot_ID_176810 3000 nt of promoter + ATG
ggagggttgggggcaatctgttccgtgggttctgaacaaataaataatagtaacaaacgattttcccaaaatggaaattgattattgaatctaagggagactgttcttacacaaggttgtgtcacaagttcattagtagtggctatctcgagcaaagtataatgaaagttagtagtggccactggccttcaattcaattattgctccatcttgagaagtgggattaaaagaaggtaactttttttaacttatttggaaaacagaatgcgtaaacaaaagagatagctactgctctaaatagtgttcatgtatgaaacttctgttttggttccacctttcttcttctacgaatctcaagttatgatcaacagacgactcgcttctttcttcaaaacagtgagtcatatacttgcttcttaacttcttaattagtgtccgcatcaaaaatgtcatgagcctaaccattgatgcaaacatttataataacaatacttatgtgtgtccgattcaacgcccaataatctctaaaatacaaaagaagaagtagtcttaaaattctagaaacagaagtcgcgacgaaaatctcagtatttaaaacaaacgtgcctaaacaaatagagataatcattcagatataatgcaaaaagacaaaagagagttgaattaaatcacgtggaaaacaaggaacacgacaaagcagaacagtctcactattcccgcgttagccactcaatacaatccgccacgtgtcccatcttcacgcgccagtcagcgttgatcttcttcctcacttgccacttccacttcttcatatataaatcccacacagccgcaaattcgaaatcaaccagatataacagaattaacctacacaactgaaactcgagttaagaaccggaaacagaatccaattcaaccaaaccgaatcgaaccgaaccggagtttttatccaatggtgaagcaagcgatgaaggaagaggagaagaagagaaacacggcgatgcagtcaaagtacaaaggagtgaggaagaggaaatggggaaaatgggtatcggagatcagacttccacacagcagagaacgaatttggttaggctcttacgacactcccgagaaggcggcgcgtgctttcgacgccgctcaattttgtctccgcggcggcgatgctaatttcaatttccctaataatccaccgtcgatctccgtagaaaagtcgttgacgcctccggagattcaggaagctgctgctagattcgctaacacattccaagacattgtcaagggagaagaagaatcgggtttagtacccggatccgagatccgaccagagtctccttctacatctgcatctgttgctacatcgacggtggattatgatttttcgtttttggatttgcttccgatgaatttcgggtttgattccttctccgacgacttctctggcttctccggtggtgatcgatttacagagattttacccatcgaagattacggaggagagagtttattagatgaatctttgattctttgggatttttgaattcccaaacataatatttttttagagcgaactgtgagattttccttggagtcatggagaaatctggagattttttgtaacacggagctccaatgacccgggaatttctttcgtttcggatccgaatttgatgtggatcatattcacacctatattttttcatttttttgttgtaaagaaaaatcggataagattctagtaataaatgttaaaagtccatttcattattctgaagaatatccttcgaacacgatgagtttggaagattatattatccggcccaaaatcttatagttgggccttagtcattaaacatttttctcagcccattgttttaaaaattgattttcgtgataaagtagttaacttaagtgaagtacgaaggttcccttggcctaattaaaacacaagggggtttctataaatgaaatatgataaaatatcttccaagcatttcgatagtattgatgacaattacaaagttcaacatcaataagtcaagaaattaggattggaaatcaaggaagagaaacggtcttcaaagaaaatagaattgaatcgagaaaaatatcagtaatcggaaaaaaaaatgaaaaaaaattggggtggataagattcccatcattttcaaattgccacctgattttcggcttaaataagaaaaaccatcactttcaatataaaccactatttcattcgagacaaaataaaaaagaaaaaataaaaaccactagctaaactaatactaataatctaggtgctaataaatactagaaaacaatccacatttcaagtatagatgaattggtctattaatataaaatacggtgaattaaaaaataacacaattaaatttacataaaatttaaaaatatatatcaggtacatcacagaatatatttttacattagagaaagtcttggattcccaataatataaaacaaaatatcagaaaaagacatttgaattcttgatgtgggtcctcacggtcctaccacactccaatgaaatgcttaaaaaaaaagaagaaaaggaatcattacataagaaaagaaaaaataatatctgagcctgctcatatcaataattgtgtatatatagaattatatagatgatgtcgataaaagaaaccaaacaagataaataaatacaaaaataataatggtgatggtgggccgttctataaacttcaatcattaatcatagcacacaaaattccaaacttgagaaatataatcagtgggctaaactctaaagtctctctacctttctccatctccttcttcttcttctatcagattctttctttcctattacctttgccttcttcttcttcctttcctctttctctatcttcctctcaattcttttactgtttattttctttgtaatcaacaacagtttaactcttcttcttcttttctttatcaagaacagtagtttctcaattcttgattatg

SEQ ID NO: 8794 - DNA, 3000 bp, Unknown; identical to SEQ ID NO: 8773
  misc_feature (1)..( 3000): cDNA_ID_2730172_gDNA_ID_1971889_Annot_ID_176807 3000 nt of promoter + ATG

SEQ ID NO: 8795 - DNA, 3000 bp, Unknown; identical to SEQ ID NO: 8772
  misc_feature (1)..( 3000): cDNA_ID_4266408_gDNA_ID_1971889_Annot_ID_176805 3000 nt of promoter + ATG

SEQ ID NO: 8796 - DNA, 3000 bp, Unknown
  misc_feature (1)..( 3000): cDNA_ID_1989215_gDNA_ID_1971889_Annot_ID_58473 3000 nt of promoter + ATG
ttatactacccaaaatgaatatttaccttattcttttgttgatcgctgcgacaagcaccggcggcacaaaatataaaagaaaaaagaaggaaagatgaaggtgagatgaatgaaagagtcgcagcgatagatctgaagagataggagaaagggaatttgagacgttgaaaattccagcgtctacggaatagccgaattacagtcgctgcggcaaagatgaaagagaggaaaaataaaagtgaaagagagatgagagctttttttagatcgcaggtagctgacgtagcgatcaatcaaagaacatggtcattatctaataaaaactatttaattagccattaggaaatttgaaggctagacttgttaaaaatcttttcgtatgggcccatccgtgccttcttcaatgggcttgaagaagtagacaagacatcccattattgattattttccttagcttgatgaatgtttttggagttattacatactacattataaatttcttgttcttacagtcagtatatacacaatctgcactgaagataccttaaaaagctagaacgtacggctttgctgaggtttgtttggatagagttgttaaatccaaattcattttgaagcatttagagaattcacaagaagcccaattatgattcaattagaagcccgcaaaaccatgtaattagaaatttctagcaagtttagattcacagaaatatgttgttataacttataagcatcaatgtagctaattttggaagttgccagccactatccacaactctccttcttcatcatttcaagacatcaatctaagatttactgattaagcttagcgttctttatttccccttgcactaaataaagctcttactgagttattttattttgtatctttgctatccatcttatattcagctcctttgagcaaaaatcgatcgtgatttggattctcccacaaatcctaggggagttaattagccacgtaacaactttgaaagtcaccagtctctccccattcctcatctaaatatcaaaagtcaaacgttcaaatccccttgagtccttgacgttaattttttgttatagaaaaacgaacggaaaaagaaaagtgagattagaagatcatttatagaagagaacaaaacaacgatggttgttatacgctcacaatcaagatccccttgatcaacatgttgctaaacgcagacaaggactcgcggagacaacaatggttgttacgtattcaaaattaagaaacaagctaagaaaaaccttcatattcttaagcatacattaaaggctacataatcaatagtactgacaacgatcataacttcaaaataatgcattaatcacttgagatttaccaatagttggattttgaatctcgagttctaactccaaagctgcattttcattgtttttttaatactcatccatcgtacggcgtttattatgcgatctaccacccatgtgcatgtatttatctcacttaatggttttattattcaattcttgtaattcctttttgtttttcaaaatgagatgatctaccacccttgtgtatgtaattatctaacttaagtatttcatttacgttactcatgataacactcgatgatctaaagtttagttacattttatagaatgctatacttcacttagatatcagatgtgggttcaaaaccataaaaaaatatataaaatcatgacttatattcaacgcattcgcggagacgttgatattgtttcacaaaaataggaaattaacacacgcgtagaaatattcatgtatctatttgtgttcatacaaattaaagatgtttaaaataagatattgttaaaaaaaaagatattgttaaaaaaagaaaagaaaaaagatattgttataataagaaaaatataaatattgtcaatagtagcatgtaatatgagaaattgaatcaaacgtaaaatcgtgatcataaaaaataaaattcaaaagtaaagaaaaacatgcattgtccattttttttaatacttgaatttgtttaataattaatcctcgagttacgtacgttcactagttatttccaatcgacaaacaaattcaacggtttcgaaaattctgaacagaaataaaagatgtagtttcatacaaaataaatgttagttttttattttgtttgtgtgatgatattcagccttccaaaacatatttgttggtgaaagacaagtttttggctgtcggtagtacgaccatttaaattaaggaaaatcaactccaagattcacggatgtataaaatccaccatttgaatactgccacgtggcagtagaccaccagaagacgtgtacaagtgtgtctcctcctctccatgtataaagatgaccgttgccacttgccagtgccacatatgatcgtcggctccggtgattttcgctctctctgcggccacacttgtttgcttggtctctttgtaatactttaacatcacttagtatattgcatgtttcattctttctttctctgattttgttttcgtgagatattaaagagttcataacatataatttcgatgtcagaccgtattaaaaaagttttttttgtggattagattcacgatgcattttaatcagtggagtttaatgaaagaattagattcttaataattttgggtacatatgcaatttcagattttctttgtcataaaaggaaaatttcatttctttttgcttgttttgtgcattgcgatgtttgtctaattcagataagcacatagcgttttcctattttcagctactaaagtacccaaaaaacataaagactttgagattcttctctacatagtgggtgaaaaaaagactacatcataaaaaaaactacacgatatgaagtcatttatatgtgttatataacttcctttgtgtgtggttaggtcatataaagacctgttgcaaaggctaacatctgatcagagcgacgtggtttagaatctccgagtgatttgaggggatatg

SEQ ID NO: 8797 - DNA, 3000 bp, Unknown
  misc_feature (1)..( 3000): cDNA_ID_3043560_gDNA_ID_1971889_Annot_ID_58474 3000 nt of promoter + ATG
gagagcgaaaatcaccggagccgacgatcatatgtggcactggcaagtggcaacggtcatctttatacatggagaggaggagacacacttgtacacgtcttctggtggtctactgccacgtggcagtattcaaatggtggattttatacatccgtgaatcttggagttgattttccttaatttaaatggtcgtactaccgacagccaaaaacttgtctttcaccaacaaatatgttttggaaggctgaatatcatcacacaaacaaaataaaaaactaacatttattttgtatgaaactacatcttttatttctgttcagaattttcgaaaccgttgaatttgtttgtcgattggaaataactagtgaacgtacgtaactcgaggattaattattaaacaaattcaagtattaaaaaaaatggacaatgcatgtttttctttacttttgaattttattttttatgatcacgattttacgtttgattcaatttctcatattacatgctactattgacaatatttatatttttcttattataacaatatcttttttcttttctttttttaacaatatctttttttttaacaatatcttattttaaacatctttaatttgtatgaacacaaatagatacatgaatatttctacgcgtgtgttaatttcctatttttgtgaaacaatatcaacgtctccgcgaatgcgttgaatataagtcatgattttatatatttttttatggttttgaacccacatctgatatctaagtgaagtatagcattctataaaatgtaactaaactttagatcatcgagtgttatcatgagtaacgtaaatgaaatacttaagttagataattacatacacaagggtggtagatcatctcattttgaaaaacaaaaaggaattacaagaattgaataataaaaccattaagtgagataaatacatgcacatgggtggtagatcgcataataaacgccgtacgatggatgagtattaaaaaaacaatgaaaatgcagctttggagttagaactcgagattcaaaatccaactattggtaaatctcaagtgattaatgcattattttgaagttatgatcgttgtcagtactattgattatgtagcctttaatgtatgcttaagaatatgaaggtttttcttagcttgtttcttaattttgaatacgtaacaaccattgttgtctccgcgagtccttgtctgcgtttagcaacatgttgatcaaggggatcttgattgtgagcgtataacaaccatcgttgttttgttctcttctataaatgatcttctaatctcacttttctttttccgttcgtttttctataacaaaaaattaacgtcaaggactcaaggggatttgaacgtttgacttttgatatttagatgaggaatggggagagactggtgactttcaaagttgttacgtggctaattaactcccctaggatttgtgggagaatccaaatcacgatcgatttttgctcaaaggagctgaatataagatggatagcaaagatacaaaataaaataactcagtaagagctttatttagtgcaaggggaaataaagaacgctaagcttaatcagtaaatcttagattgatgtcttgaaatgatgaagaaggagagttgtggatagtggctggcaacttccaaaattagctacattgatgcttataagttataacaacatatttctgtgaatctaaacttgctagaaatttctaattacatggttttgcgggcttctaattgaatcataattgggcttcttgtgaattctctaaatgcttcaaaatgaatttggatttaacaactctatccaaacaaacctcagcaaagccgtacgttctagctttttaaggtatcttcagtgcagattgtgtatatactgactgtaagaacaagaaatttataatgtagtatgtaataactccaaaaacattcatcaagctaaggaaaataatcaataatgggatgtcttgtctacttcttcaagcccattgaagaaggcacggatgggcccatacgaaaagatttttaacaagtctagccttcaaatttcctaatggctaattaaatagtttttattagataatgaccatgttctttgattgatcgctacgtcagctacctgcgatctaaaaaaagctctcatctctctttcacttttatttttcctctctttcatctttgccgcagcgactgtaattcggctattccgtagacgctggaattttcaacgtctcaaattccctttctcctatctcttcagatctatcgctgcgactctttcattcatctcaccttcatctttccttcttttttcttttatattttgtgccgccggtgcttgtcgcagcgatcaacaaaagaataaggtaaatattcattttgggtagtataatatacagtagtgagacatgggcttatgtcacatacactcacatgtgtcacacatacacctatttttgattattttagtcttgtttgtgtccattggaccttgagagaatcataattcattatctgtatcatgaagatttcaattcaagaatttatattcttacaggtccattactcaaaaacaaaaaagtaaagaaaaagagagcgagataaaatgatttcaatgaaaaataatttgaaaaagaaataattaataataaatatattgtactaacatacgcccaaaaattccactatagcgtatctcaagattcaagatctccttcttcttcagctctcgtcatcatcattctctgcttcttttcatttgctcctgttaacaaatttgccaactttcttccattttcgaatccctcttaacgcaaagttaggttttttgttaattcatttcattgcttggatcctaaggaaaaaaaaaacagaaatgaaaaaacccaaattgtcgaaagtggaaaaaatcgacaagattgatctgttctcttcactatggaagcagagatcggttcgtgtaata

SEQ ID NO: 8798 - DNA, 3000 bp, Unknown
  misc_feature (1)..( 3000): cDNA_ID_1989213_gDNA_ID_1971889_Annot_ID_58475 3000 nt of promoter + ATG
gctggaggaccttgggtggtgcttgctgttggggcaattcagtgcttcgccggttactttctcatttgggcttctgttaccggacttattagaaagcctccggtgccgctgatgtgcctgtttatgttcttagcagctcagtcgcaaacgttcttcaatacggctaatgttgttagtgccgttgagaatttcgctgactatggtggtacagccgttggcattatgaaggtgagtttttgatgaagcttttcgatatattgaatggatctgtattgttggatcacgtctcagtttgtttccttgggacctaaagaccaatatttggctatgatgatgatcctggtagagtctaaatgaggaggctttggtaacatttggaaagagattgatgctttgaactttggatcaatcgagatctagatcttctagttgatatatattgcgtagtaaatatttgttcttttctgataaaccttgcaaatgaggatgcaacctccacttttaagatgagaaacttcaactaaaccccaaagtatgttaatagtgggagattcatggtttcaactttggaatttttgattatagtgaagcatccaagcttacctctaattctttctttgcagggttttcttggtctaagtggagcgatactgattcaactgtacgagacattgtgcgctggagatccggccagcttcattctcttactggcagtaacaccaacagtgctctcactcttggtcatgcctctggtcaggatctatgagacaagcgtagccgatgataaaaagcatttaaatggtctttcagctgtatctctaatcatcgcagcttatcttatgatcattatcatattgaagaacacttttgggttgtcatcgtgggccaacattgtcacacttgtatgtctactcgtcatgcttgccttgcctctacttattgcgagaagagcacaacgagacggcatggaaaaaacagtaccacatgattattcccctctcataagcagtccaaaggcaacaacctccggtaaccaaagttctgaaggtgacagtaaagtggaagctggactgagtgagaacctgaatcttctgcaagctatgaaaaaactaagcttctggttgttatttcttgccatgatttgcggaatgggctctggactttcaacgataaacaacatccgacaaataggtgagtctcttcgatactcatcagttgagataaattcattggtctccttgtggagtatatggaactttctcggtagatttggagctggttatgcctcagatgcattgctacacaaaaagggatggccacgtccattgctaatggctgcaacacttggaacgatgagcataggccacctaatcatagcctctggttttcaaggaaatctctatgttggttctgttatagttggcgtttgttatggttcacagtggtctctgatgcctacaatcacctctgagctgttcgggattcggcacatgggaaccatcttcaataccatatccgtggctagtcccattggttcctatatcttctctgtaagattgatcggttatatctacgataagactgcttccggggaagggaacacatgttatggctctcattgcttcaggctgtcatttattataatggcatctgttgcgttctttgggtttcttgtcgccattgtactattctttcggacaaagacgctatatcgacagatccttgtaaagaggttgcatcatcgatagagttcttgtgaatactatacttttggagaaaaacgaatactgcttctcttgctacatccatggtagcttatgcttccaaaggtacacatcaatttctttacctataagtttgattgtaagttatgtttgtatcaaatgtctgtgtttagagatgggaagaaagaaagctgagatctttgtctctctttctttttgtagtttcttccaaaaatgtgagttttgtgaattgtatagacatctcaaagttcccaataatgttgaaattttttaaaattcatattgttgactactatgcatttaaatagtaataatttgcaggccatcaagtctcgttcattcattattcagattaatccacaaaccaatctccatgcaccaacactcttattcaatgcgttttcaattatacttttgatcatttccacataaattactttgttaatcaatagaaagttatggtttggaataaaaagtagttttgcagtcttaaatgggaagagaacttgaagaagacaagtccttttttcctttgttctaccaacttcaaacctacttttcgaaccccaataagttcctagaaatccaaaacccaaatgtataaagtcaactactttgactatcacatctgaggacaataatcaaaagctagcaaagcatagaaaaagacagaacctttgttcatcgtctctctctctgacacgagaaagttgaaaaattcaagttgaacatgattatattcattaattattatatgagaagggagatttctggggatatggttgttggtagtcatgggaagacagtaaacgccatcgcaattgcatttattctgtctgcagagtcaaacaaactaattttattatttgattttcagtcctatctctcttctcttgtcttgtcctgagatcagatgtataaaaaagagacttcttttcttcttctctcttgattctctcttccactgtcattatcttcaagatttgtctcttgcgagactcgatgaagcttcatcaatttcttgtgttccttttcttgttcctctcatgttttgctctttcttcatgggctcttcctctctgttccgattcaagtgagtgatttttttttgttatcctattgatttgatattagttctgctattgtagattgatgcaacattttgttttttgatggtttttcaggagctccctcggaggtgaattcgacattgagcttttgtccttacaaaggaaaaacatgctgcaatacaatg

SEQ ID NO: 8799 - DNA, 3000 bp, Unknown; identical to SEQ ID NO: 8786
  misc_feature (1)..( 3000): cDNA_ID_1989212_gDNA_ID_1971889_Annot_ID_58476 3000 nt of promoter + ATG

SEQ ID NO: 8800 - DNA, 3000 bp, Unknown
  misc_feature (1)..( 3000): cDNA_ID_1989210_gDNA_ID_1971889_Annot_ID_58478 3000 nt of promoter + ATG
catttcagttacagatactctatcacttttcatagtggtgcctaacgagtcatgcttcatgtaggtgtttcctttgttaatagagaagttttctttccgagaacaagcatcacttgtgtggcaattcatttgtagtgttccagtgatggtgcttgaagactttttgccatggatgatctctcatctctctcacgaggagaaaattgaagttgagaattgtataaaagatgttgccccaaatgaagactcattgcaacaggtatacatatcccctttgctgagatatgctatgtttttcttctttccttttgataagctaaaattttctgaaggtcataagctcttggctgcttgacgatagtcaatcttcttgtgggactcctacagagatcatgaaaggagtccagtatgttaatgtgtctaaaagtttgaagaaatcacctgagtcacatccgtcaagcggatgttttcaacgcttttgggagtggagtaaaaagtccctttcaattccaaatgtaggacggagcccaattcatggtcttagactttttcaaaatgcaattgaaaaagatttgagagatattcaagaaggattatgccaagcaaaattccaaacccttattttggatcttgatgtactgatggctagattaaacttccttgctgatgtccttgtttcttataggtaataatagtttctcggattaacttaatttttctctttggtatagtgtctagtctcttgtttactttccttccttctttctttgagtgagttacagaatgttttgttttgttttgttgcagcaatgcatttaagaagttctttcacccagtgttagaagaaatgacagctcgccgctcttcaactgccaaacagttcaacatagatgattgtcttgagaattttcagagattgttatacaaaagtgctgatgataaaacaaagacggacaattttctattgcagcttcaggaggaacttgagtcccttataatccaagtaacaaagcaatttgccatacagagaacagaggtaaactcttatgatacttactcgtttctataacataatggaagtttttcacggattcattttgaagatgttacattgtgtgtatattatattcaattgtctcattgttgtccaggtattcccaatcatcagcaagaattgcaaccatgaaatgcagaagcagctcctatacacaagcattcatgtcttacctcttggattactaaagtgtgtcatactttggttttctgctcatttatcagaagaagaatctcaatccattcttcatttcttaagtttggaagattcttctcccaagaaatcatttccacgcctcttgctacagtggcttcgttttggctattcaggcaaaacctctgttgaaagattttggaaacagttggatgttatgttcaaagtaagatgttcctgccaaaaggagcacactgaagaagcatcaggatcattttccaaccaaacacagctgcaactatgtaaagtatctaaagatgtttatcctagaaagaaagataagtcttcaacctgcttcatgtcaatggatctagctgttggagacatgtatgagacaccttactcaagtcgaatgaatcaacaaatgactttctcaggaaagcttaagcctcctctccatctcccagatttttttggtgagaagaatatggatgatcctatgattatggatgttaaaccaattgacctccttttcttcttccacaaggcaatgaagatggatttggactaccttgtttgtggatcaacaagattggcagccgactttcgtttcctcgcggagtttcagcaacggttccatatgataaagtttttgtatcagatacattctgatgcagaagatgagattgcatttccagcattggaagccaagggacagctaaaaaacattagtcactcgtttagcattgatcatgagctagaaactaaacacttcgacaaagtttcgttcattttgaatgagatgtcagagctgaacatgttggtttctaccatcaataccactgcagctgaccacgaccgaaaaatgaagtatgagcggttatgtctcagtctccgagagatttgcaaatcaatgcacaagctattgtctgagcatatccaacatgaagaaactgagctttggggtctattcaggaactgcttctctattgaagaacaagagaaaatcataggatgcatgctcgggagaataagtggggaaatattgcaggatatgattccttggttaatggaatctttaacctctgatgaacagcttgccgcgatgtccttgtggcgccaagcaacaaggaaaacaatgtttgtcgaatggctaacagaatggtataacggtcatgttttacaagaggaagcaggagaagcaaacaacgatccatttggggattcagatccactagagattgtctggaagtatctctttgaagcatctgctgatggggaaaaagggagcatgcgcagcagccttctcaaactcccgaagacgaattttacaggtattatgaatcagcctcctcctaattacaaggttgaagttggcaaaaaagaggaaaaagatctagaacggtcagaaagtaaaaagatatgcagaggatctaaccaagagggggacaaagaacaaactgacaaaatgtctcagaaggttagccagtttggtccatccaagaaatatgaacaactgttaacaatgagtgaagaagaacttgtggttgtgattaagaaaatatcatgcgactcttccctggatcctcagaagaaagactatatcaagcagaacttgttaatgaggtaagctctactaactctcttttggtgtcctgttccaacatatttagataagcaggaaatctatttagtcttgtattgagactaaactaatgtcaggttcttctttcagtcggtggaatatctcacaacgtacatataatttggaaccatcctctctctcgagcaac

SEQ ID NO: 8801 - DNA, 3000 bp, Unknown; identical to SEQ ID NO: 8784
  misc_feature (1)..( 3000): cDNA_ID_1989208_gDNA_ID_1971889_Annot_ID_58480 3000 nt of promoter + ATG

SEQ ID NO: 8802 - DNA, 3000 bp, Unknown
  misc_feature (1)..( 3000): cDNA_ID_2028729_gDNA_ID_1971889_Annot_ID_58481 3000 nt of promoter + ATG
gaatcatgttcctaccaaaggagcttatttccctgctgtagagaaggctttagagatgattaaccagaaaagttcaccccttaacaaggtagtttagactttagagattgtgttcgtatctattcttaaaacaagtttataggtttcgttttaactgatgtttttggctcgtggaattaggttgttcttgctcgtaacagcaggataattacggataccgacattgatcccattgcttggctagcacagttacaggtgtgtttttatctctggatattatatagtagtcagttttcaatgtttagatttatatctcactaatttttttgtgtgacagcgtgaagggcatgatgcatatcagttctgtcttcaaccacctggtgcaccagcttttatcggaaacacggtaggtctttttatatgtagtctgtgataataagttctgttgataaagatatgtgcacatttgttatttatttctaagaaatatgtttgtgacatacatctttgtgaaacagcctgagagactattccaaaggactcaattaggtgtctgcagtgaagctttggctgcaactaggcctagagctgcttctagtgctcgtgatatggagatagagcgtgacttactaaccaggtcaatttttacttcaagtgctttgaacaattacagaatccagttctccattatcattttactgaatttttgctaaactgttgcagtccgaaagacgacctcgagttctctatcgtacgagagaatataagagaaaagttaaacgtaagttcaatcttgatgctctgcagcttcaatgcttcatttcttggataatagtttggtatattttttcttattatgctttcttctgctttgcagggtatatgtgacagagttgttgtcaagcctcaaaaaactgtgaggaagcttgcaagagtgcaacatctatattctcaattggcagggagacttacgaaggaagatgatgaggtgagataatagtattggaatagtttttacatttccaagctcttcatttcttcgaattagctttaaccctttttctttctatctgtctatagtataaaatattggctgctctgcatccaactccagctgtttgtgggcttccagcagaagaagcaaggcttttgattaaggagataggtaaaatatctaccttggttcaactatcttctagtaactatagatgtagagattaagaattatgctgactcaaacattttgcttcttctagaatcattcgatagaggaatgtatgcgggacctattggattttttggtggcgaggagagtgaatttgcagtcgggatcagatcagctctagtcgaaaaggtgagcttatttgatctctttctccctttaaaaaacacactttaacactaattgttatagcaaaatcgatcattacggtttttgctacaacttgtaaaaaaatgctgaactgtattttgatttacagggtcttggggcattgatctatgcggggacagggatagtagctggaagtgacccatcttcagagtggaatgagcttgatcttaagatatctcaggtacgagcttttgtccagaaaatgtttagtgacatcatggttctctgttaccaaaatcctaatttttattctctcttttgttgttgtttttgcagttcaccaagtcaattgaatatgaagcaacaacatctctacaggcgattaattgaagaaagagtaacatttgtatttgattgttttgtttgtatgggggataaggggttctcacaataagaaagcaatgttgtctctcttgtaaattaaaaaagaaatgctttaatttgttaatgggccgagccttttcgggttgtaactagggcaggcctatcatgaatgttcataggcctagctgttatgattgttaatgagcttctatagtgtttttcttcaaagacagatatattcaatatggatctaaaactgaactgaatttaactgacatgacaatcgaatcaaattgaatttattttttcaattttcatttagcaagaagtgacccatcttcagagtgaagtaatctatgcttattatctcgattaagcaaaaatccgtagaatgcttgggcctttcaacgatgatgtagccgtgtaggacaggtttacggaatctgcttttatgcaaatggtaaatattaatattcctttataagttagcgtttcagatcatcttctttcgttagattaagaaactactttgttattatataactataaataccatccaacaaccttactcgccatatcttttcatgtgtggtggtttataggaacattgaaaagtaccatattataaaatgaagaatcaacacgtcaacaaaaacacaaataaaatgagatagtacaattaaaaaaatggagcgcatgtaaaaagtgaagaatcaaacgaaggcttggcgatagagaatggaatcagatttcccattatccccactctaacaccatatattcctttccctttttaccctccacctcaattaggtttattaatcatatttaacactctaattaaccaacccatttcatctcttttattttactaatcacaatgctttggcctcattacgttttacctagatttactttgtcacaaactacacaaatatgaacctaattatctacactcgtgtcagaaacagttttagctaatatttagtaagttttaattaaaactaatgaaatgaataaatagtgtatagtacataggatttgtttttagtttattaatggaaattaagatttcattagtactaaaaacatgtaaataaaataaagctttaaagaggaatatattcaaataaaaaaagcaagacctcgaaaaaaaaactttctattatctctcttccgcgattaccgtaatctctgtcacaaacaacaaaaccttctctctctcactatcttaatgagagaagaagacattctcgagaaatgagaagactaccactacgatg

SEQ ID NO: 8803 - DNA, 3000 bp, Unknown
  misc_feature (1)..( 3000): cDNA_ID_1989206_gDNA_ID_1971889_Annot_ID_58483 3000 nt of promoter + ATG
gttggatagagctctcaactacaggattatgtaccttcctcaagctacgtttaaccttttcaagttcaatctgaggatcttcgacagcgggtggctctatcgactggcttgaaactttccggaaactgcgtttgggtttctcaaactcaaaagatgtctgtactgaggaactttcaaagtttgaagcaggaactttacggacactcttcttgggtttagcagactcagcctcgactaaaagcctgttctgaggttttctgcttatcgttttcttcggttgaggaactggtttccagaagcatgaggctgaccagttctctaaccagatcaagtttgagtttggattggatgtatcatatgcgtgtacaggtagcacttttggtgatgaagcgagaagctgtaaacaaaattatccatcaagatctttaaataaaattagagactccatagtataaaagagatattggatacagtgaacatcattataataaataactctaccaacaagcgtaccttctgagcaaaagcattggctgttagtttcttgattccaaggtaagcatctgtaggatttgcaagcttgttcccctgataaaaaaagccagttctaacaattatttccccaccaacccaaactagaatatcttcctcgactaagtttgtatttaagtgtaagtttgaacttacaaagaaatgaaagtatcattacctgaagtagctgcaatctgcatttcctataaacttgaactccaatgtcggacttcctgatctctcttcctcgagcaaatgcttgcaacctgacaattcccatgacagagaaaagagttgcaacagcttgtctcctaacaaggtgaccacggataagcgcttgtagccttattatgcctttgagtgcccaaaaagcacgccgagccttcacacaaagagctcatgttaggatatacaaaaagacaacacaccagaagcagcaatcaagagagagagagagacaagcctaataaaatcgaaacagctggaattattaccaagtaacctctaaacgcagcctgcacagacgttgctgcaatctctcgttggattctctctgcatcagataatgaatgatcttgaacaggtgcaacattctgagaatctgttgattttccttcaggaagctcaatttcatcatctgagatctcttcaggtcctacattttgagtctctaacataccaccacttctatcaacggtattggtctctgcaacttcaaaagatggaagatctgataccacatctgattcttccacctttgaagtaaccagtacctcttttccactcacaactctctgcgcattattataactataattagaacaaaaaaaaaaaaaaaaaaagacaatcataagcaaattggtagcctaaaaccatcactgttttctcaattatgatccaaattctccacatacagtatttaatcatcacatacataatatagaattctcttacaaaagcgttacctctttgtctttggaaccactagatttagaagtttttttcccaagcaatacattcttcaaccattttgtagacttccccataatgtatagaactaaaacaaacctgcattgcccaagaaacaacacaagccaatattagtatgtgaatatggcaactactagtctaccacaatagtcaaaatgaagaagtcttttaattcattaattagttatggcaaaaaaggagagtaacacattatcttgttctaatcaactctaataataagcttataaagataaacctaatgataactaaatgtaagaatcaagaaagaacaaaaaaaaaaaacaatgattaccatataaatttatgaagtgaaattaccagatctggaactcagactgaaaaagaagaaccctaaatgactcaaaatccactttccaaaatgaaaaacaacaacaaacaaacaaaaaacaccgacagagtcaaacaacaaatcccaaacagagagatccttctaaaacccaacactactcgaacaatgtcttaaaataaagtcggtttaaagttggagtaaccgtcggatctccgttctaaatccaagtccgattcagaccaaacaaaaacaataacaaagaaggagataatataccgtaaattagaaatttagagttgtgttagttcaatgcttccatagcgtctctctctctcttcctcggagctttgatgctctctaaagaactgtttttctctttggtggtggtttcagagactttcagtgaccagacggaaagagaaaataaatattttgcgcaaaataatatttctaattttaaccaaaaagtaagcgagcatctccataactccaatcttacgcagttgatttctagccgttggatcttctctgaaatttagtatttttgtcaaacatttttagtttaactaaaattaatttttacagaaaaattcagaactcgaaagagggaaaattaaagaagagttaagagagcaatctataaagaaaaaaagctgaaaatcattaaatgcgataattaaaatagaagaaaaagggtaatttagtctaaaaatttggttatgtcatcagtagtctagattttaaaatacaacagtaacagatatttaattgaaattgctcagattttgttatagtcgtcgagattacttcgaaaacaagtgtaagaataccgcgacgttctaatgaagcattcgaagtaaatttacaatcatacccttgcactgtcgttgaatacgaaagaccaacttttgcaccagaggcacgtgggaaatttattaaccagtgcctagtggttcccgctccagtgaagtagtctcgttaaccgttatgggcctaagcccaatccataaaattattaaaaaaaaaaaaaatgatcatggaagaaaaaagcttgtgattgtgagacatttcatcgaacacttggtgatcaatatttgaaaacgaagagcacagccaaaattcgataaaccctaaggaacagtgagatg

SEQ ID NO: 8804 - DNA, 3000 bp, Unknown
  misc_feature (1)..( 3000): cDNA_ID_3043560_gDNA_ID_1971889_Annot_ID_176826 3000 nt of promoter + ATG
aaaatcagagaaagaaagaatgaaacatgcaatatactaagtgatgttaaagtattacaaagagaccaagcaaacaagtgtggccgcagagagagcgaaaatcaccggagccgacgatcatatgtggcactggcaagtggcaacggtcatctttatacatggagaggaggagacacacttgtacacgtcttctggtggtctactgccacgtggcagtattcaaatggtggattttatacatccgtgaatcttggagttgattttccttaatttaaatggtcgtactaccgacagccaaaaacttgtctttcaccaacaaatatgttttggaaggctgaatatcatcacacaaacaaaataaaaaactaacatttattttgtatgaaactacatcttttatttctgttcagaattttcgaaaccgttgaatttgtttgtcgattggaaataactagtgaacgtacgtaactcgaggattaattattaaacaaattcaagtattaaaaaaaatggacaatgcatgtttttctttacttttgaattttattttttatgatcacgattttacgtttgattcaatttctcatattacatgctactattgacaatatttatatttttcttattataacaatatcttttttcttttctttttttaacaatatctttttttttaacaatatcttattttaaacatctttaatttgtatgaacacaaatagatacatgaatatttctacgcgtgtgttaatttcctatttttgtgaaacaatatcaacgtctccgcgaatgcgttgaatataagtcatgattttatatatttttttatggttttgaacccacatctgatatctaagtgaagtatagcattctataaaatgtaactaaactttagatcatcgagtgttatcatgagtaacgtaaatgaaatacttaagttagataattacatacacaagggtggtagatcatctcattttgaaaaacaaaaaggaattacaagaattgaataataaaaccattaagtgagataaatacatgcacatgggtggtagatcgcataataaacgccgtacgatggatgagtattaaaaaaacaatgaaaatgcagctttggagttagaactcgagattcaaaatccaactattggtaaatctcaagtgattaatgcattattttgaagttatgatcgttgtcagtactattgattatgtagcctttaatgtatgcttaagaatatgaaggtttttcttagcttgtttcttaattttgaatacgtaacaaccattgttgtctccgcgagtccttgtctgcgtttagcaacatgttgatcaaggggatcttgattgtgagcgtataacaaccatcgttgttttgttctcttctataaatgatcttctaatctcacttttctttttccgttcgtttttctataacaaaaaattaacgtcaaggactcaaggggatttgaacgtttgacttttgatatttagatgaggaatggggagagactggtgactttcaaagttgttacgtggctaattaactcccctaggatttgtgggagaatccaaatcacgatcgatttttgctcaaaggagctgaatataagatggatagcaaagatacaaaataaaataactcagtaagagctttatttagtgcaaggggaaataaagaacgctaagcttaatcagtaaatcttagattgatgtcttgaaatgatgaagaaggagagttgtggatagtggctggcaacttccaaaattagctacattgatgcttataagttataacaacatatttctgtgaatctaaacttgctagaaatttctaattacatggttttgcgggcttctaattgaatcataattgggcttcttgtgaattctctaaatgcttcaaaatgaatttggatttaacaactctatccaaacaaacctcagcaaagccgtacgttctagctttttaaggtatcttcagtgcagattgtgtatatactgactgtaagaacaagaaatttataatgtagtatgtaataactccaaaaacattcatcaagctaaggaaaataatcaataatgggatgtcttgtctacttcttcaagcccattgaagaaggcacggatgggcccatacgaaaagatttttaacaagtctagccttcaaatttcctaatggctaattaaatagtttttattagataatgaccatgttctttgattgatcgctacgtcagctacctgcgatctaaaaaaagctctcatctctctttcacttttatttttcctctctttcatctttgccgcagcgactgtaattcggctattccgtagacgctggaattttcaacgtctcaaattccctttctcctatctcttcagatctatcgctgcgactctttcattcatctcaccttcatctttccttcttttttcttttatattttgtgccgccggtgcttgtcgcagcgatcaacaaaagaataaggtaaatattcattttgggtagtataatatacagtagtgagacatgggcttatgtcacatacactcacatgtgtcacacatacacctatttttgattattttagtcttgtttgtgtccattggaccttgagagaatcataattcattatctgtatcatgaagatttcaattcaagaatttatattcttacaggtccattactcaaaaacaaaaaagtaaagaaaaagagagcgagataaaatgatttcaatgaaaaataatttgaaaaagaaataattaataataaatatattgtactaacatacgcccaaaaattccactatagcgtatctcaagattcaagatctccttcttcttcagctctcgtcatcatcattctctgcttcttttcatttgctcctgttaacaaatttgccaactttcttccattttcgaatccctcttaacgcaaagttaggttttttgttaattcatttcattgcttggatcctaaggaaaaaaaaaacagaa

SEQ ID NO: 8805 - DNA, 3000 bp, Unknown
  misc_feature (1)..( 3000): cDNA_ID_1989205_gDNA_ID_1971889_Annot_ID_58484 3000 nt of promoter + ATG
atatcatatgcgacaaaaagtaatacgtatgagtttacaaagcaaatttgcttctttttttttaataacttctggttgcaaggtgatatgaaaaccccaagtccgttctggctaaatctaattattaaaatatgattttgtttgtaaaactataacgaatatcattcttctgcagaaatcaattttctttatttttctaacaatataatatcctgtattcatgattaatttcttttaataaaataaaagaaaattgatctctgcagtcaataatttacatagcaatcttgggagatggtcttgttacacagaaaattgattttcaaaaccaatgatttacataacaatcttgttgcagggaaataataagatttgggatcccatgagatttcctctgaatttatctgatattggtgtgctcgtctgtattctctacttccacacttcattctttatcgagatagaagaaatcttaaaattaacaacagaatacaatgtttacatgtggaatacaaaaacaaaagtatgtaaaacctataagagtgttataatgtttagaatccttgtgttagtgcaaacacacgtccctctaaaggtggaggcaatgcagaaaccgcatcttcgatttcctgtgaaaactcgcaaagattaattaccactacaaggtaagagagtaactgatttcctactgcttcataaccaggttggataaagaagacacaccttcactgtataccgagccgaaaagtggattagcaggattgctttgttttcaaacttttcagcatgatttactatctgcagtttaaggatatatgaaatcttctatgaccatcaagagacagaaagtaacaagaggtgtcaaagaaaggaggatcctgacctcagatatatggatatgtccataatctctcgcatgctctaccgataccgaatcatcaagaaatgtgctctgcacaagaggaaatagagacagcttcccttttaatacaaagccatgaaacttggaccgggaagaactatatcattataaatcacgcacattgtccaaattcatatcagtagcagatattcacctccatgacgagaacctttgccttgagagcatcagcattagtttcatcaactacaaaatccgacgttgtatctcccgtaaaagcaacttcaggagttattatgctgtctgtaatctacaatccacaatccaaacttattaaacaggcttatatactttggaaagaccattgcaaaactattgactttgtgatagacaaacataagaaaaaattgacaagcaatattaagcaaatcaaagacaaacctcaacacctgaaaccttcaagttcttaatttcatttccagataggccaatatattccttcttgagtttatatttagttgaatacactacataaccctgcaaaatatcaaacgaaagcatgaattcaacgaagacacataacgctaagatatcgaaaatctcatgcgagtttactaaaataaacctggctttggatgacatggaatgtcttaaaggctttgactttgagatctttccttataataaactcctcccctgcatgaagaagtgtccaaggtttaacaaaaaagccaaatcttggctgcaatgaatgctagaggttgagttaccacctatgtccaagccaacaagattgtgctttagctctgaagaatctaactttctgtgaacttcgaataaactctcaacagtttctttaatggatgcgggtactataatcgttggaggcttcattttgtacaagcctctagtagcaacatacattggtaatccaccctaacataacaatacgaatagtttagctcacaatttgagaatgtaacacccaaacagtaacagagcaataggctaatataacataacaatttagctgacaattagagaatgtaacaccaacacagcaacagagcaatatgctaatgataataaacacatggtggctctcaacaagggtttatcaaaacagtaacagagcaataagctaatgataataaacacatggtggcagtctcaacaaaggcttatcaaaattgttcttaaaacaaaaagtcaaaagaaggatctttgcaaaatataatccgaaatttcaagtctttttatagaagattcaagatacttacgatatgatccatgtgagagtgagagatgaagaggaagtcttgagaaattgcgcgatgtgggcaacgaccaatgtcgaaagctatccgaagagatggaaatatgatgcacgtctcgtgcccaccaatcgacaatccctcgatcgggtaaccttcaatttgcattgctttcttcttctccatctcactgttccttagggtttatcgaattttggctgtgctcttcgttttcaaatattgatcaccaagtgttcgatgaaatgtctcacaatcacaagcttttttcttccatgatcattttttttttttttaataattttatggattgggcttaggcccataacggttaacgagactacttcactggagcgggaaccactaggcactggttaataaatttcccacgtgcctctggtgcaaaagttggtctttcgtattcaacgacagtgcaagggtatgattgtaaatttacttcgaatgcttcattagaacgtcgcggtattcttacacttgttttcgaagtaatctcgacgactataacaaaatctgagcaatttcaattaaatatctgttactgttgtattttaaaatctagactactgatgacataaccaaatttttagactaaattaccctttttcttctattttaattatcgcatttaatgattttcagctttttttctttatagattgctctcttaactcttctttaattttccctctttcgagttctgaatttttctgtaaaaattaattttagttaaactaaaaatgtttgacaaaaatactaaatttcagagaagatccaacggctagaaatcaactgcgtaagattggagtt

SEQ ID NO: 8806 - DNA, 228 bp, Unknown; identical to SEQ ID NO: 8782
  misc_feature (1)..( 228): cDNA_ID_1989204_gDNA_ID_1971889_Annot_ID_58485 3000 nt of promoter + ATG

SEQ ID NO: 8807 - DNA, 3000 bp, Unknown
  misc_feature (1)..( 3000): cDNA_ID_3043625_gDNA_ID_1971893_Annot_ID_176859 3000 nt of promoter + ATG
ccggagactgagattattattacgaagacgcagatggtgaatctcaagtgtgctgcttgtgggtttatctctgaggtcgacatgagggataagttgactaatttcattctcaagaacccacctgagcagaagaaggtgtcaaaggataagaaagcaatgaggaaagctgagaaggagaggcttaaagaaggcgagctagctgatgaggagcagagaaagctgaaagctaagaagaaagcattgtctaacggcaaggattctaagacgtctaagaaccattcttctgatgaggatataagcccgaagcatgatgagaatgctctagaggtggatgaggatgaagatgatgatgatggtgtcgagtggcaaactgatacttcccgagaagctgctgagaaaagaatgatggaacagttgagtgctaaaactgccgaaatggtgatgctctctgcaatggaagtagaagagaaaaaggcgcccaaaagcaaatctaacgggaacgttgtgaaaactgagaatcctcctccgcaagagaagaatctcgtgcaggatatgaaagagtatctgaagaaagggtcaccaataagcgcgctcaaaagtttcatctcgtctctctctgaacctcctcaagacatcatggacgcactcttcaatgctctctttgatggtgtgggaaagggattcgccaaagaagtgactaagaagaagaattacttagcggctgctgcaacaatgcaagaggatggatcacagatgcatctgctcaattcgattgggacattctgtggaaagaatggaaacgaagaagctttgaaagaggtggctctggttcttaaagcattgtacgaccaagacatcattgaggaagaggtagtgttggattggtacgaaaagggtctcaccggagctgacaaaagctcgccggtttggaagaatgttaagccttttgtggagtggcttcagagcgctgagtctgagtccgaagaggaggattgagtcacttttttcttccctcctaacttttctttgcggcatttcttataatacttcgtcagttttcagaattcttaaatctttttgctgtgttcttataaagaaacatcatctattaaagttgtcttcgtttggatttggttttgacgactttgggaaatatttatgtttaagaaggtttcattggtcattgacttttatatattatatcgtaaccatgatgtgatagtgggccttagatcaacaaacatgcgaaaaacagaagcagaggcccgtttcaacggagcataataaattgcattctctgtcttttgtttttaggttttttttttaactgatagatgtgccgtcgaaaataatattgatatttaaaaattcacaacaaacattcttaactgacccacccatctatctgctattcccacgcgccaaggaaaataataataatagcgaaattgatttttacatttatttattgatagataatttgtgtattgttaagattaacagattttaagggattaaagtggaaaaggtaaaccgaagacaacttgccatttactgatttacaacaatccaaatttaaaaacaaatggtcccagtttttagggttgtcacttaaatttatcgaaatatttacactttaattgggtaaaacataatggacagaaaaacaaatattgtgacaaacaaaaaaacatgttttcaccaagaaaaacaaaaacaaaaaagatgtaaagcttttcttacatctgtacaaaataaaagcagacgaaattgtactttattttccttattaaattgtcggtatgttttatatgttgtgaaaagtagaatggataaccaaataaaaattactgacatcttaataaagttggttcaaccggtttaaaatgtatttttttagtgttaacaacttaaagcttttttcgattatcgaattgcaacaaacaaatatattaacagaaaaaaggaatcatgtatctatttcaatatcctgttttttttcttccatttggatatttagatctttttctgaatttatcttgttcttaaattaaaacagaaaaaaagattaaaagtaagacagcttgctaatggcaaccgcaacaaacaagataattttgaaacggatccacttggattttctttgattttgtagaaaaattgacaaattgcttttgtataaaaacaaaaaatgtaccgtaaaaacacacacataaaaaataaaaagtgataatgacaaacaaataaagtggtatttttcttttatctactaatgtgattataaaaaaatcgacattgaaaatttcaacacatctttttcgccaaaacctgaaaatggtcttattataacataaattagtttttttgtctttctattatatattcaataactcatcccaacttgaacaaacctatttcaaatttttttgtcttgaataatgataagttccgtagtgttcttttctgttgtgacaaaaaatactagctaacgagggataagcacaaaaacatgattaatgtttctctaatcattctaaaaatctacaggaatattcccttttcagttttttctttcttaaatgcatttcttagttcttcataattcagtgagttttaataacaataataaaaaaaagagcatcattaattgaacctaaaaataatgagaagaaaaaccaaaaagatagagagtaagatgcacgcgctaaagatcgaacggttaatagaatcaggttagtgaagagagatattaaaagtttgttgtcgtgtggcaaaaactataatttccttctcacaaacaaaaaaaataaaatcaaacacaaaatcccgtagcatcgtaacagtaattcgctattatctcctcaccctccgctttcgcttcccttctctgcccgtttcaattccttctaagacatcacggtctctctctataaaaacagtacctacctcttcttcttcttcttcattcgctgacttcgtttacactgaaaacaaatacct

SEQ ID NO: 8808 - DNA, 3000 bp, Unknown
  misc_feature (1)..( 3000): cDNA_ID_2039641_gDNA_ID_1971893_Annot_ID_176867 3000 nt of promoter + ATG
atatggagctttattatttaaatctttgataccttcttctgtaattatgaaacacagataattatgtaaattagcaggcaatggagtaaatatggtgacattatgagtcactgatctgcctaatggagtttgatgatacaacaatgaaggaaggtcatgtgcacttgtgtgacgtgagaatatcctccggcttgtttggtctttaaaaggaaaggacaccacaataacaattatcaattagaaaacaaaaaatactccttttattcttagtcaccaaacaaataaaatcagctccttttttcataccacacaatgggaacaaaagcaatgataaaagaagcccatcaccttcctttgcttttaaattattcataatttatgaaagaaacaaaaaaaattattatttttatttttgcttctcttccggtaagtcaaaggagataatattaagagtttagatattaatctcttaaattctgtgttcattttaagattttgtagcaaaagtttattattactaatcatgtggttgtactgcatgtttaaccaacatgaaagaatatgtattcattttttcggaatgcgaaataagagaatcaatctcagttcagttcaagttcgaatctttgaacgacatgcggtttatataaaaggaactatagtatataaatatatatttatatatatgcctcctttaatagattttcttatattccttctttgttttgtaatttatggagaatatttactatgtattcttcatgaagcaattttacaaatattcgaattttaatttttccttttttgaacgtctgatgatcgatcattcgcgtgcacaagaatctcatcagggcatgatagattcgaaattttgatttgctcagttacgatatatctttgattattcttcctacggcggtttaaacctaaaaacaagttttcatgttttattcacctagattggtttcaagtgtattttctaaccactatttttttcaagaaaacgggaaacaaacagaaactatttctggtgcaaaatatagtctgaaaatagtagaatgcaatccatatcaatcttgaaagatatatttttttaaagtgtacttgagaagaatgtaagaaataagagattaaaaaaggtacggagaagataacgagaaaagcaataaaatgcataacttttgtagtcataacgaaaaaaaggagaaagaagataatgaaaatagtggaagatcggtgtcttcgtgatgaattaaagtagaattgtgtgtacgtaacttttgtaatcatactttctttttcttcatcaactataagacgtaacaatgatatctataatgcatgcatatagttttaaaattatctaggttcttgaccaaggcttagttagctcggtaagtttctaagaacttcgatttaccaataaatcaagccaaactatatatgatctttcgcgatgccaattgatattctgacaggatcatacaatattgttgcttttcttgtatttatttatttgcgtatcaccgcaccgattcatatttattatagtatatagattggaaaaacaatatagagggactctttattaaagtaaaaccaagagaggaaataaaactgaataagaaaataaacaaacatgcttgtctttgtcgaacacacagatttttattacacaagtggttccgaactaattaagattcctaattttaaaataataaagagatttaaaaatgttatcttttgtgtttggtaggccattaaagctccaattatttgtcactaagtcagggaaggagactaagcataaagacgccactgcataaaccttatggtcccctcaaaataaacctaaagttgtaaaagaaagaaaataaaaacataacgttgataaaataaaatttgaagaaagaaaatcctacatctttgtaccacctatatgaacctaacttatagggaaaaagacattgattcttttgcagacccatcagcgtgcatgtccaaaaagatgtgaaaatggtttcgaaaattatggattggtcatgatcagttagacgataattcgggctatgattatgaatatatatttatatttaaaaggatgaatcttttcaactttagatattctaattatagtataaatcatgatcattttatcatttacgacatgtttaaatcgccgtaacatacatagaaacatatgaaacgattttacatatatgacaattcaatttatatatatactacaaaacgtacggttctatatacactacatttatgataaacttcgaacttgtctatagtttaagaaaatctgttgctgctgtcaaaagcactaaatctttgatcaaccaataaatcaaaagtttcccacgataccaaaatttaaagaaacgggggaaaagtatatttgttctgttaaaactatttattatttgaaccctaaaacataagactctttccaattctggaatgcaaataaattatacaccaccggaataatcgactgaacttggtacgtgtcgacatcggaaggtatttcagctcttggtagatgacatcacgtcgtgcgtacctcagaaattaaagcgcacgataaggtcaccttctcggctttgccaaagatgcatctctctcttgcgttttgtttgtcgttaaacgtttcgttcctttaaattgattgtgattatttcttaataaacttgattactattattaattctttaacttaaatattactctaatggtgatgccgtgatggtcacaaataaatgaaatagaaaaagaccaaaacaaaaaaaaaaaatccttttttcctctcttttacatgatgggaactcttgacctttaagttttttttttttgtgacaggaagtgttcaaaggaacgaaatacacttcttcttccatttgatgtctgtggtccgaatgaaaaatatctctgtattaaccagaaacgtgtttcataagcatctttaactcttcagctctcaaattcttc

SEQ ID NO: 8809 - DNA, 3000 bp, Unknown
  misc_feature (1)..( 3000): cDNA_ID_2039866_gDNA_ID_1971893_Annot_ID_176870 3000 nt of promoter + ATG
cacaatgtctattgctcataaaattttgagagactcgaatacaaagacgggtaaaaagtctgggaaaaataaaatctgaaaattgtatcactggtcaccaggaattgacttgataatgtcagaatcacctgaaacaagtcgaaagacaaaatcattagtagatctatcaatgaagaaccagcagcaatatataagcaagtagctagctcttttaccaggatcaacaatgctcagacaagaaacacggaagtactttccgcaagctgttcccaaatcaacgttatctgaaagccattaacaaggagagaagaaaaacacagttaagccaaagtggtagatacaagaggaataaccgatgaatgagcgttgaaacatgaaactatgttcaatagaataaacattcatctactttctttgatgaaatcatcaagataatgtattaaaacgctccttcgagtattatcatcgagcaagatcaagttttgtctaagagtcaaaatctaacaatgcgaaatcatagaccaacagagcaatctttggtattatgaaccatgtcaatatttgcaataaccacatacagagacaccaacagcagttcaaaccgatcgtgaacttgcgaaagatcaagacttcacgtcaatatacattacagtttcttcgacttgagatcatacttccatcatcagtttaatggtctatagaagcagattttaacactttcatctacttaagattatacattctcagttattatacacaatgaaaaccttcacaaaaacaagagaacaatgaatctttaaaaactggacgagctaaagaagaaaggaacttacttccattgtaatggtggacaccaactttagcgagcattgcgtagtactcaatctctgatcttctcaacggtgggcaattggtggagattagaatcagtttccctgtgaacataagcaaaaaccagaatcaataacaaactacaaaaagctaaaacatttaggtatgcagaccaagtgttcgacgcaattacctttggagccacggagggatttgagaacagacttgtaaccaagagtgtatttaccactcttcataacaagagccaacctactgttgataccctcatgagacttcttctgcaattaagcaataaacccagaaacatattagtacattgagatcgtaaacgatatctagatgatgaggaaaagggataaaactttgatgggagagaataaggcgcaccgttttcttttccgtcaccattttcgccggcgatggagtgtaatcaaaatgtcttggatctgtgcggtggaggagaagaggagcacgatgaccaaaccgaaaaagcgccgcttcgtcacctttttatagtccgtgtcaattttctagggtttttgctcttcaatttattggaaatttcaattatgcccttaatgtttctatagttttgtaatttgtcaattaaaaaagtaattactcgatttattcgtttcagtgaattgacagtgattaaattagcataaaccacttgtacattcaacattttgtcgacatgaaacgtatttgaattactttttaatttacaaaatatgcagaaataaattggataattggtaaacatatattttttatatttttttttatacttttattagattattcaatgtttcaagtttcaacaagttttgtttgtggatgaaaaaaaattcaaattacttttctattttctttctatcggattcaacgtataagttgaattctatagaaatggaacgaactgatcaatctcagttatgactagtgtgacaaaagacaaagtttaacaatatttatttaattaagataaattgctaattttaagtgttagattttggtagacaaatattaatagataaattataattaattatcttggaaattaagaaacaagtaatcaaaagtggtttaatttttattatgatttgaagaattaatagaataagtcgaaagatgtaaaaatatttatatacacagagcaaacttcacattgaagatctctctcttttttccccctctatgttaatatcattccccttgtcggcacgtaacaacaacgaccgagacaacacaaacaaacaaatcccccacgtgtcgtaaactgagaccaggtggtcgtcatgtacaatatttctataaaatatatggtaacatcaagaattattccatagagccctaacctaatttgcttccttttgaagctccttcatcgagaggcaccttcgttataagcttcaacttcactcgctatatgtatacccatcatgtctctcttacaccatctaatatctcatacacaccattataatgtgtaatggattgtgcttgttttgttgggttaccaataaattcaaacacatgtacatgttattgacaaaaagagaaaacacataaggtttgagtctttaatttcacagaagagaaaacacacagtgtatatacaatgtacaaatcacactagctagaacaagctatatataaaaattagaggcagactaggaaatatatatgtgtttgatgtatttactatatatattatccatacgcatacgcacccacgtatatatgagcctttaggcaagtgccaagaaacctataatgttaaatatgaacattgaataaaatacatcttttttttgggttaaagttttaagtaacaacacttggttatataataagagtaaactacatttttacaaatattatataaaatgagtataaatgtaagggatgtacctagccatatggcagattcgtctaaattaagatcaaaaattctatccgctcaccatttgtaactctctctctctctctctctctctctctctctctctctcttaacacaaacctaaaaactctcctttcgtcgactcatttacttaaatatacaattttgcattcgatcaatttctctcgtgccaactaataatagattgtgttttgattattttgcagtgaccatcggat

SEQ ID NO: 8810 - DNA, 3000 bp, Unknown
  misc_feature (1)..( 3000): cDNA_ID_2037390_gDNA_ID_1971893_Annot_ID_176873 3000 nt of promoter + ATG
tgtacgtatgagtatgttagcttggttggttagaactctcgtctataaagatttttttatttattaaatagtttatcgttttgtaccgatgaataaagtttataaaaattattttgattggttgttcgacatcaagtaccaagtaatgtaacatttgcatgtaaaatatcaaaacatatactacatcataagtttgccatcgcaaacgctgacaaaaagtagtttcttattttatttttaaatttttgttaagggacaaaaagaagttttaatttaaagtattttatagaggtaaaataatgtgaagtggtctttatgactaaatttaaacgcagcaaccaaaattcttagaaatgttatgttttgttcggatctaaaccaactttattcacatgtttttagtatttgttaactcatgattctatagaataatctataactatattttataaataaagttctgaaggcacagttgatggacgcggccacacgtagaatttgccttttagataaaggtcatcatgcataatgcgttatctcagtgaatagattcgttcggtgcactgaacaattggtttggtacagattaattcttcagatatcgtgaactacaggaacaccagtgtggccaaaagcactatataacgttcacgtacgtcaaaataattaaccgatgaagtttggtatgttaataacttaatataatgagatatattatagtctattttccgggtgctttcccctttataatctgaaaacagaaaaaatattacacatatattttagagtttaagcaaattttctcactttggctgacttcattcacacaaattggtctttttttttttactaacactaatggttctaatttttttcgtgaacacacaatgcatccaaaacatggcgccttccattattttcaaaattttaaccattattattgacgggcacataacacgaatttgttgagttgcgttagaccaaagaatcctacgtaccataggactatggcattaaagtagctagtttggaggattctggtgggtgaaaaaaagtaaataagtgaataagaattggttcatagtggaaagaacaacctatatgactcatgcgtagtggaaagatagagaacaacttatatgactcatgcgtagaccatgatcgtacgatgaatagattccattggttatgattataagtaagcaaaattccaaaacggaaaaagaaaatgtggaccgaacatgcccagtgaccacatcacatccgttcaattccatattcttccatataaaaagataaggaaaaagagacccaaaaagaaaagaacaaccttatatgcataatcaaactttcatttgcatttctttttcatcttcgttttccttcgaaatcaattatatagtatagtgccttctttctccatcaaaccattcttgttttgtttggcaacgctgacatctccacttaaaatattcgttttggatcaaagctcatatatgttcttgtgttgatgatattttggatatcgatttgtttgttaatttttgagcattttattaagtatatactagttattaaatattaaaaagtacacgaaattttctgatcatctaacattgttggtatgctacaatcgcacattttaatatatgttgcgatcaaagtttgaaaagttgaatagaaatttcttaaagaaacgatgtgataattcttgtggtcaggcactcacttttttacctccagaggttaagatgattttatgaaggattaaaataaaatctcaaagacaaatgcagtttttccccttgatcttatacgaatgatccatataaaatctctaaaagtatttcttgattcagtcagcaatgtgtccgagatcaccaaacaaaatagtcacaagatagtacttatcttcacctgcctaatattcttcatattatgaccgtgacatattacgacaaagctatcattccctcttgttgtattcatttttttctaagttaaacaaagaatatgtacaatcggataaaaacaattgatttactggcatgttctactataccaggtaagtatacgctaaaaaaaaagaaaaagaacaaaaaaaaactattttcagtatattaactaaaaccaaatcgaaaaaaactatgcactttttatagaattctgaactagaccatgattatgcaccaacaaataattacaaacaaaacaacacatagggaagaaaaaaaagatatacaacaatttattggctttacaaaaagaaaaaagaaaccagaattttattaataattatttatgttttttcacataagcattcacttggaaacttgttatttatatcgtagtctaatgaggaaataagaaggttatatcataaatcataataattaaattatatagtcaaattacatgcagtaacaaaatctcaagcatgagtgataatttcaactatagtttggctaaaaacataattacaaattcagtatcctataattccctatgtctcggattataaaattttctagataaaagcacacagtttaagaaaccataaatgttttatgttatttttataatagaaaaaagattgtagaaatgattataacattctaataaacataaattatgtatgtatatttgcgaaaatctgactaaataagaaaaagtctaaaatatctaatataatgggacataattaggagtatcatttttgaaatctaatggtaatttctaaagtcaatataaaaaaaaaatagagtaatattttattttttctacatacagtaaagtaacagctttcaattattgcatataaattatattcaaaatttagggccaaagtttggaattatacttactttctttctaattttaagtataagttatggatatatatgaccaaaaaagttaatatatatctagagagagagctgaatgcaacttagttccctatcacacacttcaataacccacaaagataaaaaaaaaaaaatg

SEQ ID NO: 8811 - DNA, 3000 bp, Unknown
  misc_feature (1)..( 3000): cDNA_ID_1388793_gDNA_ID_1971893_Annot_ID_176878 3000 nt of promoter + ATG
atgtctgccgaaccgaaccaaaccgagaaccgaactccaattataattttgccgatcggtttagccttcccttcatagtcggtaatcggaaccgaaaaaatcggtttgttcggttcggtttgttcggtttaatccgaaatcccaggcctaatgagctctatcaaactcatatcttcctcaacttaagagtccgagtgattacgctaccgttttgtaagtgggccgttattgggctttgagatttaatgtgatttgagttcaactagatttaggatttgcgtttactcgatctctacgtttctctaataatatccacagccatgaacggagaaaagtcaccaccgattacgatgacgtttctaaatgataatggtttctcacattgttttttttttcgatttgtgttacatattttcattatcccaaaccaccttttgtattcgattgtatctttgttgcatgtttcaagagctcatctcgataatggtgtctttgttgcagattgtatcagtcaccaaacgacgcagcgcccaaagctgatagaagacaagtgattggtgtgaaagagtgtggtgaaacttatgttctggcagagtataagcctatatatgttcatcagctcgtccttgtccttgcaactgctatacagctgggattgtgtatgacattgaaggatgttgaatatgaaggaagattagatggaatctttgtgatgttttgaatcttgtttgtagcttcatataaaattatgattatgtaaagtcttatgtgtaatcaaatgtttaactttttcctttattcaacaaaggatttgtatcgataatattttactagttacagaagctgaagaagaaagtattgtaacaagttagggtgtctgaaaccataaaggttgtgtcttgctagttaatttatatataacaaaggctgaaacatgaactttttaagatgattccactctcgtttgcagcattaggagacatagttgataagaagcttgatgaggattatgtaaaggaagaagttgaaatgatgatacaagtatctctgctatccacacaagcagcaccgggagaacgaccaacgatgtcggaagttgaaatttttagaaactcctgcttgtgctacataaactggttttgcaacatcatctccataatatattctaacagtttgcttttgaggattgattcaggatcatcatctatatctgttgtcttcttagtttttactctgtctcgggttatccaaacagcagacttgtgtgagtacacaaacacagaacaacagaaccaaaatctctaaacaagaccggctctctaacaagagacataaccaccaagtagactcttgtctcccttgcactgcattaattagtaatcaccaaaagtctattcctgttttgcttcttctcttataatcatcaaacacacaaaaaccaaaaacgttgtagtagaccatcagctactggaatcagaagcaacgatagagtttgagggtaaccaaaatgtgtttgggagtaagcagagattaaatatctccatcatgtcactatgttgatgggaagaattcgattgattaaaaaaggaatctctgtacaaaagcccatccaaagaaaaggaaattaagatcaagacaaatatctgcttatgtcaaagtcattaaccgactccaacggctatattgaacaaacggttatcattattgatgaagacctaattaacactttgcttataaataaagactcatacacgcagcctcttctaattcttcgttgagagaaaaaatcaaaactctctgattcacattcacgcatcttcttcttcttctttaattttcttcttgagagaatctctttatacagagactctgtgtgaattccgatgatccaattagtagtcattgatcagaagtgaaaagcggatgatgatgatgatctcctctgcaacatgatgatccgtaagagttgatttcacttttttccgatgagtcgcagatggagcaacgacggatgttaacggcggctagaccacgtttgtcctcgacgatccgtacgattacgtctcacgtggcgttctcagcaagccgtctcttgaaaccttatgttgcatatcggcttggattggaggtatgagtttcgctagcacgattgctttgggagataggacgcgaatcagaggaaaacagagaacgaatccaccggtggagataaagaaatcgccagtgattagggtttcacaacctcgaggtataccacttggagagatactagtggtttgtgctgaatagaggaatagtactataaactttcaaaataacctaaaaaaaaattactcatatacaaacaaactacaaaagtttagggaaaatggatcattttgaatgcatactactagtaggttacagatactgaatcactgatccaacacataaggcttagttagagcagaaaatgtttttaccataataggcccaaatcttatatgtgcccgataagagatccaaagaaacccaattatcactgatccaacacattcaatattttactaatctcaaataattatcgttgttttggccttttcttacatttctactacattataatccctataaaaaagacatttaattttgatgctttttttcttgacatgtgatcaccgacagagagagtaactacaagtctaccattatccagctgcaatcacgcaaacgcaccgcctttttctctctttgccaactcgtttatttccaatcataaaatgccacgttaacacactcttgcagttaattgacggaaatacccctcttcacatactacaattacgatattaatgtgttaaaaattaacggtgtgggctaatctcacgcgctttcatcatcttcttcctagattcgctcctccactgtcttaaatttcactatcttcttcttcattttccttccttctcacttcaaatccataatcgctctacttctctctctctctctagattcgaaaaa

SEQ ID NO: 8812 - DNA, 3000 bp, Unknown
  misc_feature (1)..( 3000): cDNA_ID_3043609_gDNA_ID_1971893_Annot_ID_176874 3000 nt of promoter + ATG
tgacccaaaattgtatatcgtttaatgcaataaacgtaattaagctctcgtatacttcaaatgcccaaatatcatttcaagtcagcctaaaactataccaaattttgaagttcgaccctaaacgtatatatttaaaaactcaatttcaatttttcacatcgtagaaagtttgtgtagctagagaaacatgttaatatatatagtttcgaattcatcggatatatatttaagtgtagttggtcctacatcccaatatcccatgatgtttttttggtagttcggtttctcaagttggttggtacttggttcggtttctcaacttggcccatgatatgaagcatataatatgcatacatacatctacattttcttttttaaagtgttacattcacaaatttacaaatcgaaacttgttataatatgcatacatatgcaaaacataatgtgttaccgacttcaatcgtgggtacgtatttttgagattgatgataacgtataatacatatctaaacagattataacagctgtttaggacattcagtttaatacccaaaaaaaaaaaaaagaaacaacgacaaaatagttgacgaatatacatttaaaaaaaaaaaattatagtaagatagtgtgtggctggccgtgaaccaacatggagaacaaatagctcgtagccaccaaagcactatctagcgcgtagcgaacacgtagtcaatggctaattgtaccaaagacgaacctagccacattatagtccacgttcaaacgaggcccaccagtttctataaaagtcaacttcaccccccaaaaaaaacgctcctaacttttgaccttttcgcttttcttgatttggagccagtggcattgtcgtaaaatcatttgatctaaccgctttgatgttcttgcttagtttccattacttctgtcattatcacctttatatttttttctcctaaaaaagccaaatattcgtaatcacgatctttatctcttataatttaatgtttattccaatttaaaacattaaatttataaaagctcagatctatatttctttttcccctcacttttgttaaataattttttttatctcttgtttatctttcttgaatttttttccagtttgaagcaaaatctattttctctgtaaattttgtacttttctcacaaaatactagggttttcgttttgtattttgatgagagagtgattcagtgaaccgggacatgattcaggtttactgattttactgttttaaaactttagaaaagaatagtgaacatgaacaatctggtgttctaaaatctaaaaaggggaggcttttaactaatatctctcgtgtactttttctctaattcttaaatcgttctctcttttctgtttctactttttaagatcccttttcgctttaataaattaaaataaatcacgtaaaaggtctaatttggaggaaaaaggctaaaaagcgagatcgaattcttcttcttctttttccaggtaagtgggtgtttcaccttccaactatcaatggctatgcataacaccaattaatttattttgaaacctctcatttatagaatacacgtgcatataatgtttaatcatcttcttcttttttggtgaaaatagtataatactagttgattcctttttcaattgtgtttttgtctatgtgtatagatatcagattaatcacccaattttataactggcaattatacaataatgaatagaactaggaaaatgttgaagaggtatcgtctggtgtaggagtttacgattacagcgtctcttcgatcggtagaatattaattaactcactatcaatcatgcatacttgtctacattacaaagtcaacacatgtggtgctcactttggctccagcaaaaactgattacaatatttgtgttttaaagtatataaaaattagtcagaaaagagaatcgtattattttttatagctttttgtgatcgaaattggcttatgtgacagaaaaacgccggttaattccttagaaaaacttaggttgaaaatgaattgcggctagtttttataataatcatgtcattgtccatcaacttgcacaagttaaagcttttgtctaaaaaatgggtgatttaaaatgttggtttaatgcattctaatgaacaagtcaatatgctggtattgacagaacatctacatagagtttggacaagagatcaagtcccaattagaaccaccaaaaaagaacatatgaattaggttttatataatagccttttaggtattctttccaaatttctgttcagttaggtttgttttctaagttttcttaagtccttttctaaagtttatgtccaacccaaaacgatgataaaaaaatccagaaatcaaatgttaattaataaggttctcttcgtctactcttagctaaaattaaattattttataaaaaaaaaaacgaaaggatatgattaacgttagttcttcctcgtttattgagggataactgttgcatttttaaaaaatctcactatgtgccacgtggctattctggtcaactatctctccttatagcaaaaaagtaaacgagatcattgaattgagattgttttcagtattgcacacaaagtttgccacagaaaccattgacttaatttgtttaaactttaatgtcgatcaacgccaattaaaaattgcatcttttctagttagacttttttcaatgttcttaatgtacttggtctcttagtaatccagattcatcaaattgtatatgaccaccactctcttatcattaaattaaaacaaaactatcctaaactttcgttataaataagcttcatcaatgttgctccaaaattcacacttaaaagtcatctttcaacccaattatctctatcctttctcctggttcgataccattactccatccacacaatttatataatctcaaaaacttgcaaagtaaagtactaatctaagtagtctcctgttctgtttgcagagttacatagct

SEQ ID NO: 8813 - DNA, 3000 bp, Unknown
  misc_feature (1)..( 3000): cDNA_ID_3043598_gDNA_ID_1971893_Annot_ID_176881 3000 nt of promoter + ATG
aaagagtatatcctacctattttactaccaaaacaagtttagttccaaaattaacacaattaatccaaaaaataccataaactaggtttaacagtttagcaaatattagataaattttaacaacttttaataacactaccatgacatttgttaaaaaaaagcatcgaaatttgaacaatacttgtgacagtttaagacagattattaaataaattaatcaaacacgagaaaaaacagagtgagagtgaaagaaagaaacgaacttgagcaatgcggaaccattcataggagtcgaatgaagcagcggtcaagatgacttgaggaaagctggtagcagctttaaccgttccgttaaaccggattcctggaccggcgtaggctacgccgtgtaaagcttctgaccaccattcgtacgccggaactccaagacgcggtatccctggagctgtattcaccagctgcgagatcttctcgtctatggttagcctcgagacgagatcacgcgctcgcttgccaattgggaggtcagtgcggcagaactggtagagtttcgtggttggatttgaagggtcacaggagtgcggcggaggagctgattcaacgccgtggacgatgaagagaaggagaagaagaagcagttgtttagccatggcttcgaaatgcggaaaagagatgagaaagtgatgagtgtaagagagtgacagagtctctgttcttcttattcgttccccaattatgtctgtaataaattgacttaaataaccttcttgattcaacagggtaacctaaaaatttattatattgttgtttttcaataactctttttttttgcaattaatggacatcttaaattttttattcaatagttgaataagtataatgaagttgttaaattttggtgttgtgaagtttttgtgtctttttctgatttgctattttcattattattttcagatttttatctaatcctatatccttgagatcaattagtttatagaaaatgttttaaaaacagttatatcaaaactcatcattttttaactatataaatagagatttggttcctttaatttggacacatagaaaatcgtattagattgcatattatctcaaataaaataaacaaaaagtatttgatttttatctatttctgtttaatttaatttgctaataaactatttaattcttaatcatttaatttaataaaaatcaggatagactgttgaattttattaaataaaataattgtagaatagaaaaaaatagtatatatatatatatgtttaattattagatggaaaagataacaaaaataatgtgaaaaagaaggaaaaaaaatgttgaattatattataccattataaatggtcttacgggccaaagcccaataatattttttccaaatagcttttaaggtctttgcgttaagtcatttagcatatatttttttcccagtgtacagcccaataagtctttcaaaacgttttggtatcaaaacatgtaatagcgtttttatatatcaagaattgtttaagaaatgtactgaaccgtccaaccaaccatataagtgataatggatagcaatattattataaccttatcaggtcaggccatatgtcacaatcaacctaattgtgatctataaaagttcacctggtcacgtatctaggtttgactggataaaaattgtcggtttcaaacaattaatacaacaatattactagtagataatttgtttctgtctcagctaaatgtttggtggaaggagctttgtagagaaattcatttgaagtaaaaaaatctaacacaaattcaacatgttcagaataataattcacagctgggtaaattttaatttacaattattgagtttttttttttttttgtttatgtcaaactcaaaactagtgccacgtggaggaagctaagcctataaacgattatgaccgacagttgtcactctagaagtagcggtccttgtgacggcataagctggtcataaccgcttagtggtgatgatttgacgaaattgcccattaagcgactgtgagatgtcggtagactacgatggccacgttccacagagagtgacactaacaaccaaaacctattttattactattttttcttttgtcattagtattttattactaattgtttgaatatttcctcgtggtctattattattaaacactctagtcctcttattgttcattaaaattgtctgacgcttgtctcttcctttcgttttctactagaaaattcagctattttcttaatgttttatatctcgtaaactcttaagttgtaacagtgtttcaatataatttgaacacatattgaagtttagtccaaaattcttcttctccagaatatatccaaatcgagtcacaatggaaaacaaattctcctttgtaggtaaatagaaacaaacaataattgtggcattaaagtgttttaaaacgagatcccaataatttacatcagtaagatttcaaaagtgtgtaattagaataaacaataaacctccacaatttggaagatattttgtttccatatttgtcgcgtataatttattatattgtcaattctcgagaatttttaacgttttgttttgaccaggtaacgactgttccggtaaatatgtaggtccaaaaacttcccgcggacttaactcgttttgaaatccgctgtttggttttctttttttattaccggctctaaccggtcctacccaaaaccttgtcatgtcctctcattcctccaccgtttataagtaggcccttaactccaattcccaccgtttcttcgctaaccacacaaagcttgttcttctccttccttctccaatttcgtaagctcaaagatttcgatttcgattttgattattgccaaaggtacaaacttttgaacacaggtttgtttattttgtttcactctgttcgattttatggggttttatttatattttgttcttgatcgattttaccaggtttaaag

SEQ ID NO: 8814 - DNA, 3000 bp, Unknown
  misc_feature (1)..( 3000): cDNA_ID_2037366_gDNA_ID_1971893_Annot_ID_176880 3000 nt of promoter + ATG
tattccaaacatagcaaacatagttggtcaagttctctacctgaaaatgcgctattgtggacttgacaagccttgtattgaactgaaagtcataaaagttctttcctttctctacttgcaagcattcctgacaacaaaaaatacaagaaatcataagaaagatgcacaccaaaactcaagatttcaaatcatccatcatcataagctataaaaactttgattggctaagacgaaccttatcaagctcttctctggatcgaaacagactctcaaagtttttatagtgcagcaatctattctcacggtatctatccctcgtgtaattcaagctctcccatggaatcccttgaatatcttttccattcctagcttctaacgctgatgtttcattgttcgtcttactctcactctaaaacaacaacataacaagtttgctattaatttcatcacatccattaaatttcaagcctttcctaaacttgaagcagagtaaagtatcataccagctcgaaatcaaaatcggagtccatgaaatcggaatcagactcactggtgacatcaacctctccaaagggctcatcatcatcgaaatcagcgtgaaattcatcaacaaggtattcaagatcagagttgtcgaaaatatccatctttaaacctggtaaaatcgatcaagaacaaaatataaataaaaccccataaaatcgaacagagtgaaacaaaataaacaaacctgtgttcaaaagtttgtacctttggcaataatcaaaatcgaaatcgaaatctttgagcttacgaaattggagaaggaaggagaagaacaagctttgtgtggttagcgaagaaacggtgggaattggagttaagggcctacttataaacggtggaggaatgagaggacatgacaaggttttgggtaggaccggttagagccggtaataaaaaaagaaaaccaaacagcggatttcaaaacgagttaagtccgcgggaagtttttggacctacatatttaccggaacagtcgttacctggtcaaaacaaaacgttaaaaattctcgagaattgacaatataataaattatacgcgacaaatatggaaacaaaatatcttccaaattgtggaggtttattgtttattctaattacacacttttgaaatcttactgatgtaaattattgggatctcgttttaaaacactttaatgccacaattattgtttgtttctatttacctacaaaggagaatttgttttccattgtgactcgatttggatatattctggagaagaagaattttggactaaacttcaatatgtgttcaaattatattgaaacactgttacaacttaagagtttacgagatataaaacattaagaaaatagctgaattttctagtagaaaacgaaaggaagagacaagcgtcagacaattttaatgaacaataagaggactagagtgtttaataataatagaccacgaggaaatattcaaacaattagtaataaaatactaatgacaaaagaaaaaatagtaataaaataggttttggttgttagtgtcactctctgtggaacgtggccatcgtagtctaccgacatctcacagtcgcttaatgggcaatttcgtcaaatcatcaccactaagcggttatgaccagcttatgccgtcacaaggaccgctacttctagagtgacaactgtcggtcataatcgtttataggcttagcttcctccacgtggcactagttttgagtttgacataaacaaaaaaaaaaaaaaactcaataattgtaaattaaaatttacccagctgtgaattattattctgaacatgttgaatttgtgttagatttttttacttcaaatgaatttctctacaaagctccttccaccaaacatttagctgagacagaaacaaattatctactagtaatattgttgtattaattgtttgaaaccgacaatttttatccagtcaaacctagatacgtgaccaggtgaacttttatagatcacaattaggttgattgtgacatatggcctgacctgataaggttataataatattgctatccattatcacttatatggttggttggacggttcagtacatttcttaaacaattcttgatatataaaaacgctattacatgttttgataccaaaacgttttgaaagacttattgggctgtacactgggaaaaaaatatatgctaaatgacttaacgcaaagaccttaaaagctatttggaaaaaatattattgggctttggcccgtaagaccatttataatggtataatataattcaacattttttttccttctttttcacattatttttgttatcttttccatctaataattaaacatatatatatatatactatttttttctattctacaattattttatttaataaaattcaacagtctatcctgatttttattaaattaaatgattaagaattaaatagtttattagcaaattaaattaaacagaaatagataaaaatcaaatactttttgtttattttatttgagataatatgcaatctaatacgattttctatgtgtccaaattaaaggaaccaaatctctatttatatagttaaaaaatgatgagttttgatataactgtttttaaaacattttctataaactaattgatctcaaggatataggattagataaaaatctgaaaataataatgaaaatagcaaatcagaaaaagacacaaaaacttcacaacaccaaaatttaacaacttcattatacttattcaactattgaataaaaaatttaagatgtccattaattgcaaaaaaaaagagttattgaaaaacaacaatataataaatttttaggttaccctgttgaatcaagaaggttatttaagtcaatttattacagacataattggggaacgaataagaagaacagagactctgtcactctcttacactcatcactttctcatctcttttccgcatttcgaagccatg

SEQ ID NO: 8815 - DNA, 3000 bp, Unknown
  misc_feature (1)..( 3000): cDNA_ID_3043613_gDNA_ID_1971893_Annot_ID_176872 3000 nt of promoter + ATG
aatacaagtatataattttaaacactaaacaatataaataatatcaacaaaacatatacaactcgcagtttactatacatttaaaatcaaataaaataatatcatatatttataatcaactttacaataaaagtttttagtttaactaaaatataagcctacctgctgtataatgcaagttaaaattataaataagcagattaccatcacgatggatgtaccttctcacatacacacctatcaaaaacttaaaacctttcaaaacctcttggtatattcaaattaggattcttcattcatggaatcattattccaagggttttgggatgtcttatgaaatgattttggcaaaagaggatgtaaatttttttgaataaaaagtagtcagcaaaacatatgttttattgggattttttagataattaaatcagagaatagggctgggcatatgagtaacacattcgagttcgggtagaacccgttcgggtttgggattaatgggtatatgatttactacctaatagaataattctaaatattcggttcgggtcggtccagttgggtttgagtcagtttggataaaaagtttcaggccctaaaaatactcaaaaaaatagaaacgggtattttgtatgtagatagtgcgtctccaaacaaaaaaaacttttaaatttattaagttttaataaatttaattatatttgaatatattttactaaattttgacaaatataacaaataattttgacaaacataacaaacataacaaaatatacaatttaatttatacaaaatattaatagcacgggttatgatctagtttattaactatataattgaaactattgtttttactcaagattgattgatgccctgaggaagtcaacaaaactctttatattcaatcatgtgaattattcctatagacaacaaaagcgtcgatatctcatatattttctaaccaataaaactgctatataaaaatgctactaggccgaccaaattcgctgtgcatagacagaccctgtacgacaaaacaatcaataatgtatactgtttcattcaagtggcaaataagtacacaaaaaatcaaatacatatgtttaaagtacctttgaaaaactggctgtgagaatggatacttgtgatcgatctttatccttttgatcagcttaatcagttgtgatcttacactgtgaattttgatggataagactatgtatataacagagttatttgtatatatgtaggtggggatatcgtttgcaagaataatgttgagttcgataagaccaagcattgaggccttagggaggttatcaaaaacagatatcttcggtgacataaatcagtatccaatggcaaataagactgcaggattattgactcttcgaatcagttctcctttgctatgctttgctaatgccaattttataagagacaggtcattaatcaatatttatcttcttcttttttttttttttttgttcaaacatcattagttactcttgtgaaactcttatcagtttgacaaaaaaaataaatattttttcttctttcagaatattgaattcagttcaagaaatagaaggagaggagaatgaacaagaagttctaaaagaaaatggtcttcaagtagtaattctcgacatgtcttgtaagcacatcccacattctatcatgatatactaatttatagaaaatgttttattgtatatatagtagaggtactgaatcttacatgtaacaaaatattggtgaaggcgtgatgggcgtagatacatcaggagtatttgcacttgaagaactacatcaagagctagcttctaatgacatccgggtacatctttatttctcaatcaaatgttattcattcactatagttacatatgtgggttcattggattttcaaattaccaatatttgttttatgtttgtgggctgcagttagtcatcgctagtcccagatggagggtacttcacaaattgaagcgagcaaaattggacgagaaaataaagacagaaaatatatatatgacagtaggagaagccgtagatatttatgtaagagcaagatctacgtcccacgagttgtgttgatatatatatgtaagaaacagtacaactcaaacatataacctagtgataattttattgttttctcatatagcctatagtttttatttaatgtacacctgactaaaaagtacaaatttcaatgcataaggctacaaaatattcttcttcttttttttctttttttctttttattttcttttacatcttttggtttggcttacaatttttttttacatcttttggtttggtttacattcctaagtgtttttttaagaaaaataaataaaataatacaaggatatatatagcagtgaattggaatcagaacttacattggtgtcttggtgagtgaataatcatatgaatcttccactttgaacatcatcacgaacaattcacaatgtttaagcaaaaacaccttgagatagtgtttaacggtcggaaaatatagccgttgaaggaaagtcaaatatttgaccattaagtagatattgccgaagcctctccatatgctgagagagtagccattgcgaggtaaagaggactagttgacttttatgttttgtttttacaattaattattgacaaaataaacgatatatgctggttaatctgaacgttattaattgatcccaatactcctatatgaattttctgtggcaaaaaataacatcatattcttaattcgttcaaagaacaaaacccttttaatctctcttaatctcttccatacatttctaaccaaatctctcttatacctaacctctccttctttcatggttctcttttctctcgtccgtacatctctcatatatatataggcacttttgcctccaatgatcagattttcgcattccctaaaccaaaataaagaagagtctttgagtttgttggttgcattgatcggatataagagacatg

SEQ ID NO: 8816 - DNA, 3000 bp, Unknown
  misc_feature (1)..( 3000): cDNA_ID_2024857_gDNA_ID_1971893_Annot_ID_176869 3000 nt of promoter + ATG
atcgtgcatgtgtttatttacatatattttcatagatgttatgtatcgttgaagaagacagagaacaaaccaagtcttatagagaaaacggtgggagcaacccggtgaatgaaggaaagaagaagctatgtataagtagaatcggttggttttcttattttacaattaatgaagaaattgtttttcaacttttaatttctaaaaaaccatataatgataagttttatttgatgggcctcacactgagtcattgcatgtaccgatgtcactgaaacacgacgtgtttcgttttggagtgccacatatagtacgaacttgatcgactagagagcagagcatggccatgtcggaataacaaataatatactattgtaatagcaaatggtgaaaatttatcaaaaaatccttcaaaatgtttaacaagtggaaattttatatgttaaatcgactggaaagctaatataacacttgattttgtggtgttttctaatgatttttttttgtttattttgtaacaaattgacaacaaaaattaaagattgtttgcggactgtttctttattttttaagttccggggctatttacaaagtatttcggaactttctctatttaccgaaaacatccgatacctttactatttactaaataaccccgaactctgttgttatttatagaaaagcgcagcagcgattttttctatttacataagaaatcctgaaactcttactatttttgaaatgttctgcaacttttatatactaaaatcttcagtaatatgtaaaaacgtgtcaaccctcagttgcacctctaatactgaataacaaagcagtgggggaaaaaatcaaaattactacgtagtacaaaaaatacagatccactattcggtggcttccaccaacaattttttttttgataaaaagaatatatggcttgtccgttttgtcttttaatcaaatgatatggacagtacatgtatatgcaaaacatggttacactttaattaagatgaaaaagcctaaggagaagattctagaagagcatggaacgttctagaagaagaaatggacataccttgtttgaccggaaaagagacatagtcgatcagagggagagaacatgaggagggcaagatcgatgtcacaaagtgttgacaattcataagccttttttattaaaccttttttacgttttgagaacgtaatttgtcggttcgtgctcttctctatacgctttaactccaatttaacccgacccatatccgatggtcactgcaaaataatcaaaacacaatctattattagttggcacgagagaaattgatcgaatgcaaaattgtatatttaagtaaatgagtcgacgaaaggagagtttttaggtttgtgttaagagagagagagagagagagagagagagagagagagagagttacaaatggtgagcggatagaatttttgatcttaatttagacgaatctgccatatggctaggtacatcccttacatttatactcattttatataatatttgtaaaaatgtagtttactcttattatataaccaagtgttgttacttaaaactttaacccaaaaaaaagatgtattttattcaatgttcatatttaacattataggtttcttggcacttgcctaaaggctcatatatacgtgggtgcgtatgcgtatggataatatatatagtaaatacatcaaacacatatatatttcctagtctgcctctaatttttatatatagcttgttctagctagtgtgatttgtacattgtatatacactgtgtgttttctcttctgtgaaattaaagactcaaaccttatgtgttttctctttttgtcaataacatgtacatgtgtttgaatttattggtaacccaacaaaacaagcacaatccattacacattataatggtgtgtatgagatattagatggtgtaagagagacatgatgggtatacatatagcgagtgaagttgaagcttataacgaaggtgcctctcgatgaaggagcttcaaaaggaagcaaattaggttagggctctatggaataattcttgatgttaccatatattttatagaaatattgtacatgacgaccacctggtctcagtttacgacacgtgggggatttgtttgtttgtgttgtctcggtcgttgttgttacgtgccgacaaggggaatgatattaacatagagggggaaaaaagagagagatcttcaatgtgaagtttgctctgtgtatataaatatttttacatctttcgacttattctattaattcttcaaatcataataaaaattaaaccacttttgattacttgtttcttaatttccaagataattaattataatttatctattaatatttgtctaccaaaatctaacacttaaaattagcaatttatcttaattaaataaatattgttaaactttgtcttttgtcacactagtcataactgagattgatcagttcgttccatttctatagaattcaacttatacgttgaatccgatagaaagaaaatagaaaagtaatttgaattttttttcatccacaaacaaaacttgttgaaacttgaaacattgaataatctaataaaagtataaaaaaaaatataaaaaatatatgtttaccaattatccaatttatttctgcatattttgtaaattaaaaagtaattcaaatacgtttcatgtcgacaaaatgttgaatgtacaagtggtttatgctaatttaatcactgtcaattcactgaaacgaataaatcgagtaattacttttttaattgacaaattacaaaactatagaaacattaagggcataattgaaatttccaataaattgaagagcaaaaaccctagaaaattgacacggactataaaaaggtgacgaagcggcgctttttcggtttggtcatcgtgctcctcttctcctccaccgcacagatccaagacattttgattacactccatcgccggcgaaaatg

SEQ ID NO: 8817 - DNA, 3000 bp, Unknown
  misc_feature (1)..( 3000): cDNA_ID_1989254_gDNA_ID_1971898_Annot_ID_58487 3000 nt of promoter + ATG
ttagaatacggataaagtttaaacttcacagtgaaattcagttgagataataaagtcaacccgttatatttactcatgttcttcaaatcgactaacctttgtaccaaaaggactttcagggtggtcgatgtcaagcagcctccttccctatacaaggagaacacaaaaaaaaagtcaaaactaagtttctgatctccgaaagcaacatcgaagtacactatactctttgtcaagacgaatcatctacagtagatatcaaacaatatcaatatcaatttctcttctcatctcatactctccgtcgacgatcggcgcattactttatttactctgtttttcttatgtttttacgttgtttagtttaagagataagtcccgagcttatcactcacctttgtgggagaattgttcaatttcgatttgacttggcacgtgtgagacactcgcacatgcgaatctaaggttcagtaactggatgaaatttactgaactctaggaattttttaaaatcataactataggaagaaacaaaaaatgtggtcttaactacaagaattatcacattttttaacgataaattatacaagcaaagaaaaatctatcttgatatttttttagaaataagtatataaagaaccaataaaatccaactgctattttgtttaagtttctaattaatattcacaagctttgttgggcaatattgaagattaaaccaaaaaaataaaacgattttgtccataatcattctcgaccgaccactgtcaccattctaaaatatcattgttttgtatgcaaattgcataaatcaaatggctctttcacgtttaaaataattgtatttcggagaaagtgcatatcaagacattgcaatctgacaaagaaaaaaaagcgtgtagacttatctatctccctaggttaacaatccaatgcatgcgtgtccacctttaaatctccctacacaagcaaaattcagtaaaaagcttgtacgttgattacatatccaacgaaccatatccactttcaatttgttaatcatataaatttgaccctaaaatctatctcattctctcatcaatcttcttcctttaaatccctaaatcttcacgttacttttctatctacattttcactttcaatggctttgattatcacctgctccgctctacccacgatccgagcatcttccggatccggatcccttaacccggatcaaaaccgtaagaaatctgctgcttggtgggctcctctcttcggtttaccctccgatccagattacctcaacatcgaaagctcatgctccaccgtgaatccggataaaaccgatatttccgggtcgggtcaaaagtttcgtcgcggttgttttacggaggagaaagctaagcagttgaggaggaaaaccgcagaagcttccacgttccatgacgtaatgtatcactccgccattgcttctcgacttgcgtctgatatcaccggccgagtcgaggattgaaacggattcgggtcagatctggagacgaatcaattaatgaataattaatcttttttttcttaattcagtgttcttgtaggatgcagaccatcttctatcggtgctcctttttcatttgaaccgttggcttgtgtttggtctttgtgtgttgtaaactctagttccctttctgtttcttctgtaatcaaccgttggatttccacttgttatttttagacatgtgttccctagttagctcttttatcttatctcaaatttaagacattgtgttctctaaatctacatcagaacttgactttggtctgaaaatgtctaaatataacattttctcaacggttatctacttcagaacttgaattcggacagcttttctacttcacaacttgaattcggtcttgttttacaaattccacatagacgaactataatattttgtgacatttctcactgaaaagccaacactaattaaaaccactccagatcttattcttaacgatgatcgtgaatttggttgtgtcgaatcttttaatatagtcgtctcgttgtttcaatgtagtggtgatacatctttcctctctattaagatctttttataatgttcaatgaagaaccacaaaatgtaaagtgtctgtgatctattattcattcttgtaagtttttctctccacaattcacattttctagaatcaaacctcaaattagatgttaaaacattaaacctccaaactggttctctgcctccggtagtcaccagtatcagatgcgctcctccggtgacggcaatgcctttccgattttcctttagtaaaagccctgggccaatttgggatttggccaattattgaatataacattataaactttaaaaaacaaaacattaaaccaccaaacgaaattttaatttatttatttaagaatcatactttgttttactttattttcaaaatcatgctgacaaaaaaaaaacgtacagtaaaatacactactgatttacgatttttttttctaaataaattatttacaaatggtattgtgaattgttttgtcaattacgaaaatatagggtcgcttattgcaacatatgaaacgtataggaactaaattaaaaaatacaaataaaggtcttctccttcccgtctagatgtagaaatccctaaaacttgctactgttttgcatacggggcttgtacaaataaaaaccacccaattcctacgctttcctctacaaattgtccccttttttttttaacttttatactttcaattcatctttggttctgtagaattcccaggaatcagcattccactgtaagctactggtttctctaattaactgtagatcgatcgaacttttatagattcgggattgtttctcccaatatttctgtagaaattactacaaaaaaaattagattttcagctactctgagtctaccttgaatcgtttgaaatcgaaaaccctttcctttaatttcaaagagtcgcttaattagggtttaggatagatg

SEQ ID NO: 8818 - DNA, 3000 bp, Unknown
  misc_feature (1)..( 3000): cDNA_ID_1989250_gDNA_ID_1971898_Annot_ID_58492 3000 nt of promoter + ATG
tggggtggaattgcaaccactgcttgtaagatatagttggctttaaacacttttttttgttaaagaacagactattaatattgtcttctaaaattattaattatatatatatttttaaattattaattattaacatttgtatttaaaatcattttgatgaattagggtgcgatgtcacaggaatttctgagaacatggaagatgatttggtttccataaactcaataactgcatttgtatttagccttttgcttgacgaaccacaaaatggtaacccgtaatgattaattatatatacgtcacatccatagtttatagtatgcatcaaatttctctatcaaatttgttaatcctattggcttgatagtcatgataggaataggaggtatcggcttgggtgcagcagtagctctctactgtgcgactatttatatctctggtaaaaaaatcagaaacctaagttttattgtagggatcaacggctggcttcctgcttggaggtaggctcttgaaaccctaatgtcatttattagctattactatttcagtatttcttaaggaaacttaaattgcaaacctttaaaacatggaaacctaactaaatcttgcagaaacttacttcacaatctctcatatgattatggggtcccaagtcttgctccatcagtatcaatcttacttacacatggaacttgtatgtgtatacattatctactttacgatttagatatcaattgcgagatgatgctgattcttgtcttttattttgtgtgtcacagctgatgatatagttcccttcccattcggacgcaaaagttcggacattcttcgcagggctggatttcaagtcacgttcataccaaaccaagggtctaaacatgaattagcttcactttgttttccgttaattaccaatagattttattgttctgaatctatatttggggtattccttgtgcaggtatcatcttccaatcgttccccaagtaatcaatgaggttcgcttatggatcacatcaaaactccaaccctaaagtcaatgctcgacactgcatagagaaaggaattggggagcaaaactatcatataatatatattttaaaatatttttgtcttattatctctttttctagttcataatcaattatataggcgatgtctctttgttaggagtctgaaaaatgtatatatttcttcggttaatgttataataaataaaagatttacttagatcttaacagattttttttttgtgaaaagtttttttttattaatatttattatacatttgaacttgaattatggcacagcgatgacattaacacaaaccattagattacaaattttcatgatatttaatgttttgaaagattaacagtatataacttgcttaatcaaactgaaaatacttttcttaaaagaaatagattcttgaagaaagtaaatctcatgagaagtttagatacattttacactcacaaaaaaatagaaattgatctaagtttcccaattggtctattcataaaaatgcaatcttcctaagctaagataataaaaaatatcgacaataatcctataattgaatatcgacgacggtttgtgattttccataggtctctcgaatgatcaaatggtctcttcctagctccttctttcgaacatttttggcttgaacaaagcttataacgcttgaaaacatcctaatcccgcataaggatctaaaacatgtacataatttaagacacgatagtaaagaatcaaagatggattccaacacgacaaatgactaaaaacaaatactacacaagggaaaaagataccaaaaaaaaaacacaaaatctgaagaatataaattgcctaaaagtaattaaaaaaaactaattaattttagatggaaagttgaaaccatacattatctaatttaaaacatttcttactcctaaatcatcaaaataaaataaaatagcaggagtatttaataaaagattttaccaattatagtttacaattattggtttagttagttgtagttgatgattttttatgtaaaaaagtaactttagtgatatttttttaagtatgtgtacagaaaccttaaatgtaataaatggagtataaaataacatatattgttttcatagaaaatcaaatcataaatcacaaaatcaaaataaaattaaaaagctgatgagaccttaatgtgatttaagttctgtcatgtgtcaaacatatagttattaattttaaataaatttaggttagtatttattaaaaacaaaatccagtgacttggtgggtttattatgtttatacgtgtattaattaaggttttcgacaaacaaaaacaaatactataaaatgacaaattctgattttgttttaatagatttttatatcatcttttgttaacattatctgaattagttaaggtgctatttaatttagggaaaagtttaaaattagataagaaatattatattgtaccaactacatttaaacaaaactaattaatcatccaaagatacaagttataaaacctttaataacaattttgatgaagtgtcaattatcctatagaggggggggggggggggggggggggttcccccttcgagtatgatctatagattattagattatgttacacccaaatctgttttctgttgttgtggttgcgcttttcattttgtaagccaattagacaattactaaatcaacaaaatattagtaattttaaaaaatagattatgcctccattaattaaattgtatttcacccaattagtatatgatttttgccatccacccaactttttaaggatgagattttgtcaacttttaatactaagatattttatgtcataaggctcctttggtgctttaacaaaaaagaaagaaaggaaacactcatttctattataaatacacaataccttcccttgctttctcttatatctttcatctctagtgcaagttaaaaactagttcttctcaccaaagc

SEQ ID NO: 8819 - DNA, 3000 bp, Unknown
  misc_feature (1)..( 3000): cDNA_ID_1989242_gDNA_ID_1971898_Annot_ID_58505 3000 nt of promoter + ATG
ccttgattacatctttgtacatcatctccattgttcttttctgccaatctaatatagcttggactgatccactctcaggaatcccttcaggccacattggaacaacaacatagaccttaaacttctctcctgctttgattttgctaacaatcttcaaagatagctccttcggaatcagatgcagagcattgatttcctctggtttgattccatccgcgctccaagcaaaagagcttccaaggaagtactggttttcgatatagatgaagtctttagctcgtctaatcgcgtgaatgtaagcatcttgaatactcctatcaattatattatcttttccactcacaagacctgcttccgctgcagcttcaggggagtcaggaaatccagcagctgctccaccatcaatggatctaaacaactgaacattccacacgtcatgatcctctgagaacagaacgggagaaggcgggatgataatatctccgagttctctcattttaaccaaaatatctttaccgccttgtctactccatctctgctcaaaattatacaagacatcccaagcaataggtccttcaagacgacaatgaatatcatgccatggctctctaggaccacctttggttatcgcagcgccagtgaaattcggttgatggaagtcatcgtgatgggcagtgtccaacgttctaaacaaggagtgaaacggagtgtcatatcttccatcacaaagatcaagaccaccaacaaaactcactattcttctggatcttgatcctccactcggcatttcactgtctacaacaacaatcttttggtgatgagtgaacatagttgagatttgcaagttttggacaatgcttccaccatcatcagggttacgaggacacaaaatacagttcacgtcggttcctctgaaaaaattctcagtttcctcatcatgagtagccataagtccatcttttttcagcaaatcaactgatgttctgtcatcccaaacaagcaaaataaccttaacaccttcactagctttcttcttgagtagctcaccaacagtcacatctcctccttgttttggcctcctcgagtccctcactaaagaaatctcagtgtaaacagaccaaccagtaatgtaaatcaagtgtttagcattagtaattgcatcgaaaatatcctcccaacatcgatgtggctcgtagtttttccctcccgcaagagggattttcgggacaaagtttccagggatatgagcatcttgatacaaagaaactttgcagcctctcctctgagagaagaatgtgtaaggaactcctggaaacttagcacttttgataccacgattccagtttttatccttttcaacaccgaaatattggagtttcacatggatctttgatcctccagcaattgggtttttctcattatctaagatatcaacccatctatcaacttcttctccatgcaaaatatcttccacaggaatataacctcttccgatcaacgtcgcgccaatcggattagcatccttaacagtgaaaataacatgtttagccatgtgaccacagtaaatatgaaaagactcaaaccactttgggttttttggctcctttgttattttcctcgttcttccaactcttgctttctcaagatcgattgtagcgtaaagctgagtttctcctttgccaacaccgattgtttcttctacatttgctagtatctggaaagattaaaaacagaacattaaagacagattgaaggaaaccttttgttgttgtatctctaaacaacttataaatgagagagagacaaaagacaataccgatcctaagaaacctgatctacctccttcagcatggagatgatcaacttcgtagattgtcgcgtgcaatcttccatgtaacaaacactcttccattttttcttcccgcctgtaacatcataacaatattagtaaaactcatacattagattaccaaaatacgtaaattcacattttacagatcctgtaaacaatatttttcgtttaaaaatgtaaagtaaatttatgtgcagggagagacgaatctacaagctaaagtcattaaccgtaatcagtgtccgaggaaacagaagaaactctaaatctcaagtaactgatctccatcaaaacaaaatcgaatcacagaaacagtttgagaggcaagcaaaacactgagaaattacatactgcaatcatataacgaatgtttaaactttaaccaaagtatttatgagtttcataaacattttatacacccacttgcttcacaacaagaataccagaaaccagacgatatgtgatctccaagataaacgttttaaaaaggaaaaagatctgcagagaagaggaagaagagagaaaacgaaactacctgcaaaatttctcagagattgagagagaagcttgtttggaagaattcaggtttgatccgagaaggaagctactttgtgtgtgtagctgctgaatgtttttgtgatattaatagaagatgaagcaaaaaaaaacaaaaaactggctttgagtttaagactattgctacgtgtccaaatgaccgagattactgattaacgatgatactaaaatcgctctcaaaaattccttaatgattgtaaatcggtcacagaaaaaaataactaaaaatagattaatgttggcaagcattttaattattgcagacaacatacacatgagaattacatttccaggtatatcaatggtttttttttttttaatttccaacctggttttgataggaatctgtttggtaccaaacagatttaccgaacataactgcctaatgtaattaaaaaaagagagagagcgagggagagagagaaagtaaaagctcttactttggccacaagatagtccggatctctctctcagcttcacaattttccccaagtttatcggtccaatctaatcctcaaacctcaaccaaaaagctaacgagcaaacgcgcgtgatactcttttccagaaatg

SEQ ID NO: 8820 - DNA, 3000 bp, Unknown
  misc_feature (1)..( 3000): cDNA_ID_1989241_gDNA_ID_1971898_Annot_ID_58506 3000 nt of promoter + ATG
ttttgatatgtaactgtaaaaatctttgcagggcatcaattgagtgatatattttgttttttcaggtcttacataaagtcagaagcagttttgaagatcatgaaatacattgacttaccatttccacagcttgcgttcttcttgcagtttgctcctctgtaagttctcgcttaaggtttaaatagcagaaggaaacgccgcgatgtgattgatcttaataagcatttttcttttgacatgttgcaggtttgtgagagactttttgtatgaaaatgttgcaaacaatcgatatgcaatgtttggtcgatctgattcatgtgagctctaagaatacatatgtgatcctactttgccacaaaaaaaaaaactagatatgtaatcctacagattaatataagcttttatacagatgtatagtttacaacagccattaaacaatagatacatatgtactacttttcgaatcatgtactcgtcaaatgtataacctttccgacgttgatatttgtgttatatatatggaaaaaaacttgggattgtgtgaaattgtcttttttcagagaatgtctcactggtctgctggctacaagctgctaattgaaatctctgaatggcatgctctgtatggtatgttctctaagaagcttagtgtatcccgcaatgaatctgcagaaatttcaaggaaaatttcaattatttacaggtaagggatgaaacttttcacaacactgagggttttgtttatgtgttgatggagaattcggctacttttgaacaatggttcattaaatctctttcgttaacttaccccgcaagaaggatagctagagatgtaaatctgaagatgtgttgataacacttgtgttttgatttcttgtgtttcatgtcataaccaggaggaatgtattttgggttcacgtatccgtactgcggacggagaagaaggacgaacccgaggaagaaaccagctaggaatcctccaaaatgagcagaattgtccacacgtggtaagaatccgacgcttagattcagtacaatgatcaggattaatgtcataagtgcggtgcactacaaaaaagtttgagatcagctttcaataatgcaccatattgaaaatgaataatctttttaccttattttcatagattgtccagtttgtgatgagctctgagagcattgcaccgagtaatccgaacaaagcaccagatgctccgactgatacccgttctccttgggaatctgttaagcaagacaccaggcttcctccaagcccggagatcacatacaaagctccgattctcactgtaacaccaaactcttaaatcagatcacagaaaattcaggagacggaaaatagaggggtttaaagggtcttactgaatccaaattcttgttcaaggcgcattccgatacacatgaggctgatcatgttagccatcaagtgaaggaaaccaccatgaagccatatgcaagagatgagacgccatctctcaccttcctccacaagtctcctttcgagagctccgagttttctcagcctgaatcaacaacaaagatgcattctgtaagtattgaaccagtttttaatagattccttgttctaaccggagagaaaaaaaccattatggaatcaagaaatccttccttacgtgggaatagaaggaccgagtagcatattctccttaatcggttgaaacgaaagccttccaaggacatcaaataagagacactcatctgatcttgcagggcaatcgttcacatacatggtggtagcgaatgtgacgaagttggctgctaaaatgagaggcacaagccacgcaacccatggcacgggaatgggcgggcgaaaatgtggtcgcgctggtggtggtggtccgttttcgatatctggtggaatcggcggtctcttccccatttctggaaaagagtatcacgcgcgtttgctcgttagctttttggttgaggtttgaggattagattggaccgataaacttggggaaaattgtgaagctgagagagagatccggactatcttgtggccaaagtaagagcttttactttctctctctccctcgctctctctctttttttaattacattaggcagttatgttcggtaaatctgtttggtaccaaacagattcctatcaaaaccaggttggaaattaaaaaaaaaaaaaccattgatatacctggaaatgtaattctcatgtgtatgttgtctgcaataattaaaatgcttgccaacattaatctatttttagttatttttttctgtgaccgatttacaatcattaaggaatttttgagagcgattttagtatcatcgttaatcagtaatctcggtcatttggacacgtagcaatagtcttaaactcaaagccagttttttgtttttttttgcttcatcttctattaatatcacaaaaacattcagcagctacacacacaaagtagcttccttctcggatcaaacctgaattcttccaaacaagcttctctctcaatctctgagaaattttgcaggtagtttcgttttctctcttcttcctcttctctgcagatctttttcctttttaaaacgtttatcttggagatcacatatcgtctggtttctggtattcttgttgtgaagcaagtgggtgtataaaatgtttatgaaactcataaatactttggttaaagtttaaacattcgttatatgattgcagtatgtaatttctcagtgttttgcttgcctctcaaactgtttctgtgattcgattttgttttgatggagatcagttacttgagatttagagtttcttctgtttcctcggacactgattacggttaatgactttagcttgtagattcgtctctccctgcacataaatttactttacatttttaaacgaaaaatattgtttacaggatctgtaaaatgtgaatttacgtattttggtaatctaatgtatgagttttactaatattgttatgatgttacaggcgggaagaaaaa

SEQ ID NO: 8821 - DNA, 3000 bp, Unknown
  misc_feature (1)..( 3000): cDNA_ID_1989239_gDNA_ID_1971898_Annot_ID_58509 3000 nt of promoter + ATG
gttattcagcatagttaattttcgcaaaagaaagaagccaaaattaattaaaagaagcagcaaatgttgtgtcccttttatgttttctatgcgaatggctcaatggagtaaattgctaattcacgtcatgaacacaaaaatgttgatatattaaacaagaagtccatttttgtacctcatatcaaaattttatttgtaaattttgtattaataattgtggatttgctatactatactatgaaatatttttctttatagacaagttatgttatacattaaattatttatttattaataagtacagtattttagtgtattgtcagagttcagtttctttaaagaaaacacaatattttttttttttgtcgtcaagaaaacacaatatttatgttaaacaaaaatgcatgatatttcaatagtttgtggaaaattatagaaaatatttcattttccttcttttagtttggtattaagaaggaaaaaaccaaaaacatttttttgataatgtatacataaattaaaattaaaataatgagaaaacaaaacaaggtccaaaataccttgtgaagaaaatggcgacggcgtttgccaacacgacttcaagctccaacctttacctccatcgctgccgtaaaaaccatcctcttccatctccgtcgttcttttcaccgttccggtcgtctccacttccttctcagacccttttcctcgtccccactccaaaacctgtacgacgcatcgcggtcgctcctctcggccctccaacgccgcctagtcccgacccacctccgcctaaaaacacgactgagctcacaagttcgtctttcccttcttacccttaaaacttcaatgtttcaactctgagttctgattttgtttactgccaattctatttttcaatctttcctaattcgatgaaattgcattacggaattcgaattaggagaatgaaggtggtttaactgctattgattcgtagataaagatgttaatcttagtcctcaagatcgattactgttcattgctaaagttttgatctttgtgacaatttatagacttttactcttgttaagcattaaggatttataaatctcctccttttacaacttgtgaatgtcttccaaaagttccaccattttcttttccctacaggtttagtcattggttgcaatacgagagcaatcttcttaacaatttggattcatagttgttgtttggtatcacattttgtgtaggtcttgtgggagtagcgtcgatgattcaagaccgtgtaaagatctttctttcagtactaatttggatctctctcttcttttgggcttcggctttacaaggaagaggcagcaaaggtaatggtaaagggaagaagggttcacgcttcaaatagtattagttagattggtgtggtgatgatgatgatgattgatgaaaactcctctacacgtttgtgtatatatacagaggaaatattcttccaagtaaagcaaatttcttgtcagactacagttttatactagaaactagattgttctcttcttacgatatctctagcttagagctatagagattactctactgtgatgaaactaaagtagtttgcatttaagtcaaaatgccaaatcaatatcattgtttattgaaagctgtttcagattgtaaatgactagatgtgtttggtgtgtgcttgattcagccaaacggtaaaccgcaccgtttctttgatttgaatgtttgttgtataaaatgggcctttagatatgttatataacttgtttgggcttcaacatactcttttattgggcctctctatataatataatatttccaaagttgtatttaattattatttgatttatatttaaaacagtggttgtttattcatgatatgaaaaaagaaataactggatttaggtaaaccttattcaatactgggacaatgaattaaccagctcatgattagttggacctgttttggttaaaggctggtagtaagtttagaaacagaaatttatgataagagcctaacattttgttctgaccacactgagtaatttaacaatctatctaaattaagattttatgctatgtttaatttatatttgttctgattatagcaaataaatttccatatctagagatcttcttcatacacaataaaaaaaactagtatttgaacttttgtatgtattaaaaattgcaagattttgtaagtacagattcaccaaggtgaggtgtgtgattaggaaactttgattagttgtcatgtgtcatcaacaggccatgaaaaggaaatctttgaaattcaaaaaacaataccttttgatgaaattattactatataaatactatatgtgactatgtgtggatatgcacaatcattcccactaatagtttaataaagtgtataatttttttcaaattaaaacagctaaacacacacaaccacattcaaaaaggggttaagcattgaagaatattctaagaaaatttgtttctcttcttacagaagtaaaagcgactctctctctcattaagcatcaaaggagtttcgtttttcttgctttgctgttacattcttcaggaaaaaggcgttacctttactctctctgcatcaacgaggaagcgtgtagagctaaaggagctgaatttgagagatttttttgttttgtttctgggtttgttcaaagatgcaaatttttagttgtttctgctgtggaaaaggatttgatcggtatgtatggagttttaatcttgattttcaacttgatttgctggtttatgggttttatctagtttctccattgttttgttcttcagaaatttgttcttgctttgatccgttttgctattcttctttattagggttttgagatttatatcatttctcgagcctattcatgttcaaaatttatttcttggtgtaaagtttggaactttcgaacaataatctactgtttgataagcttaagttgcagatttgataaacccaagaagaaagta

SEQ ID NO: 8822 - DNA, 595 bp, Unknown
  misc_feature (1)..( 595): cDNA_ID_1989226_gDNA_ID_1971898_Annot_ID_176940 3000 nt of
ttcgcgtcaatttagctgcgctttctcgatcttttgtacttcggaagctgcaacgttgtagaatcggcggatccaagtcggtaattactcagcttctggtaagtgttcactgaccgatcgatgtgattttgaattttttgtaaccagaagatatatttctggcttcagtcttcaaatttatccaacgcaattttctagttctaatgcttgttttgtggctctggaattgaaaatcctttgtaatctgagaaagttctggagtgttcttcagatttagtttaaaatagttgcgattaattcctaaatgcaggtcgtaagactagtttagatctgaattctaaacagttatagttcatctagtatcagatttttgttaaattagagtttgatgtactggaattagaagggatcattgcatgctaatctttgatatgtgttgtagactgattgaatgattttatctgtcttaggttgtgatgttaatgtgagctgcccaattttgtgatggtggattgaagcggttgaatttttctacttcagattgcttttgtgtttgatatgttactcataatgagattatagccttgaaattatg

SEQ ID NO: 8823 - DNA, 3000 bp, Unknown
  misc_feature (1)..( 3000): cDNA_ID_1989227_gDNA_ID_1971898_Annot_ID_176939 3000 nt of promoter + ATG
gatgttgaatatctaagagaaaatatacatcacaaaagcaacgagaaaagaagacaatatacaccaacgagaaaacaataaactaacataacatggaaaatcaagaaggaaacaagacataccagaagccgccatgtttttatgagaagaacttgaaaatagtcttttttctatactcagccgatttttgttctatattttgagaggagttttggaaaagcagtgatggtgaaaatatgtgacgaacaatgtgtatttatacacccaaaaaagcaaacacatgatatatttttctgtttcactaaatcaaaatgtcaaaaatattggttggtcactcattaatgaaggaaacctaattaattagatgtttcattatcaatatgtgcaaccagacctaggttttaatgtttaatttctttctaattctatatgaaatgataacaaggaaattgaacttatgatatctacagtgtactacagctggaaagtggaaaccaataatatatttcatattatttgttttagttttgtttaatcaattgataaaaccaactatacatatttggaaaatgttaatatgtatgaatctctgaactagtagagattttcgttttttacacgttgactattaatgatggatcttaaaaaacaataatatatatacttcattttctaaattactatttcgtagggcatgcacctacacacgtatatatgaatttttactaaatcgttttattttagttggtatacacattttggcaaaactgtaatagttatgtaacccgcaaatattatagatataaattgaggaaacaaaaaagaattaaaaaactatgagtcgtttcaaatgactaagtgagtcataggaaaacttagtcgcatcaaatttctaattggggcatgagtgtgatcaaagaatacatacacataaaagcaaattactaacaactatgaatcccataactagtatagaattaaattaaggaaacgacaaagaaaaagaatcttgactatgagtacaacaacttcaaatatttataggtaagaataaggaatttcagatgactaagtgagtcacgggtgctttccaaacaaaaagaaatttccatcctcattgtggaacacgtaaactttaatatttccttcttttttgttttaagtcccacaactaccttaaacctgaatatcaatttggttagcacttggtattcttccgtcgcacgttttggtggtttctaagaaaagtataataaaattccggtttgttatagaacaaaaaaagaaggtcatatagagttgatcttttcgtttcaaataccattgacagaaaagcttggaggaacaatttgcgaatataatgttgagtttggtgtttctcgaagctgaacaaacccaagcaacaatatgcacaaggctagaaggtggagagtattatttcaaaaggtcaaaatgttcgttggtctcattatcaaattagtgtagtaattaacgttccatctttggcttcctagattactcttatgtttgaaaaaactgacttgacaaaagctaaatgcttgttttctttttcctgtattgaaaagaggttaccatgtacaacttgataacaccaacagaaaaaaagtgaagaatcaagaaggaaaaacaataaaaagtcattgcaaaaaaaaaaaatcgattaatcttcaaccatatatacctaacagattacaaatcccttctaatatgtaatagagatcagagaaatgttttgatgtgtaattaaattaagtaaaatatcacaaagaaagacaaatgtcattacttgcacgaccttgtggtacaacaattaccaaattcgatgtggtatacattttattttacttgttaatttccgcttagtgttttggttcaacaagttatttaatttcaatttcttagtcttatgatatatatatatgtatatttttttttggtgtaaaatcaccagccccaaaacaaaatctagcagtactagcttaggaattcaaatactaaacatggaaagacaaatgaagaagaagaagatctaacgagaggaatctgagtctctagtcttatgatattatattattatttgttaacattgaccaaaatggcagaatagatgagttaacgttctaataaaaataaaaatatgatcatatgaatccgtgagctagtcccaaaaagagatatggaccaatcacatttaacatgttatcattctactgtgactaaatcagttttaaatttaaataagaaacaaatgtttttaattgaaaataagaaaaattaaatgattttttaatctatgtgggaaaattttaaacatcaaataaattgaaagagaggaagtaatatattttttagaaatttgaacttaattaatataagtttccgttttaatataaaaaaaaacaattgatactccaacaatgtgtaagcaaccaattattttaaaatcaaataatttttaaaatgtgcatagaatctttttttatatataaaaaggcgtaacagctggaaggaggagattggttagtgatgaaaaatgaaaagtttctaattacaaaagacgaagatttgcaaaagcttttaattgtttatgtcccaaagctacttgatttggtgaacctctgttctttgatcatttcaagtctgattttcgttcatccccgacatgaataccattctatattcaaatatcttaagcaaaattcgaagattcccagaaattctgggttttcgaagtagtggagtgctatggatgttgcacacaaggtgttcgacgaaatttcccaatgctatttttttatatatcattcttgtgtcacgtgactctcacgttataaaagccttgtgtcacgtgactcacacgttataaaacccagcttcttcttcgatgcaattctgttattttcgttgcttctttttttcccgcttcacaaatttctctctgaagcaagaaagcttaaagaatcttgagaatcgtctaca

SEQ ID NO: 8824 - DNA, 3000 bp, Unknown
  misc_feature (1)..( 3000): cDNA_ID_1989229_gDNA_ID_1971898_Annot_ID_176937 3000 nt of promoter + ATG
gtgacgaataatgtgtatttatacacccaaaaaagcacacacatgatgtgagagagagaatattccatttatttttccatttcactaaatcaaaatgtcaaaactattggttggtcactaattaatgaaggaaacctgatttattagatgtttcattatcattatgtgcaaccacacctaggttttaatattttctttctaattctatatgaaatgataacaaggaaattgaacttatgatatctacagtatactgtatactacagctgattaccaataatatatttcatattatttgttttagttttcatataattaattgctaaacaactatacatatttggagatttaattacgtataaatctcataactagtagagattttcgtattttacacgttgactatcaatgatggatcttaagaaccaatatacttcattttctaaaatactatttcgtaaggaatgcacctacacatgtatatatgaatttttactaaatagttttactttagtcggtatacagattttggcaaaactataatagttatgtaacccgcaaatattatagatttaaattgaggaaacaaaaacggattaaaaaactatatgagtcgtttcaaatgactaagtgagtcataggaaacttattagtcgcttcaaatttctaatctgtgtaatcaaagaatacatacacataaaagcaacttactaacaactatgaatcccataactagtatagagttaaattaaggaaacgacgaagaaaaagaatcttgactatgagtacaacgtaacaacttcaaatatttataggaaagaataaagtaatttcagatgactaagtgagtcacgagtgctttacgaacaaaaagaaagttacatccacattgtggaacacgtaaactttaatatttcattttttttcaagtcgtcccacaactataccttcaaatctctagacgtgagatatcaaagctaccttaaaacctgattatgaatttggttatagtacttggtattcttccttttcacattttggtggtttctaagaaaaataaatttcggtttgttatagaacaaaaatagaaggtcatgtagagttattttcatatattcatatctactattgacagaaaagcttgaggaataacttgcgaatataatgttgagtttggtgtttctcgaagctgaacaaacccaagcaacaatatgcacaaggctagagactggagagtattatttcaaaaggtcaaaatgtttgttggtctcattatcaaattggtgtaataattaacgttccatctttgggttcctaagttactcatatgtttgaaaaactggcttgacaaaaccgaaatacttatttttttctttttgctatcttgaaaaggggttaccatgtacaacttgataacaccgacaagaaaagtgaagaatcaacaagataaaacaataaaaatgaattgcaagaaaaatagattaattaataaccatatacctaatagattataaatcccttctaatctgtaatagagatcagagaaaaattgctgtgtaattaaattaagtaaaatatcacagagaaaaacaaatgtcatcataacgtgcgtacatttgatgtggtatacatttcattttacttgttaacttccgcttagtgttttggttcaacaagcaatttagtttcacttgcatagtcttttgatattattagttaaattgatcaaaatggcaaatagatgagttctatgttcaaaataaaaatatgatcatatgaatccgtgagctagtcccaaaaacagatatggaccaaccacatttaacatgttatatttctactgtgactaaagtcagttttaattctatgacataactacgtaacacattgatactatatatccgctcattcactctacaatgactctcatctcaatcgagtcaatcgccacaatttgtttgccaactaattacaaactcactagatatataacattcgaagtcaaaagataaaaaaaaatgtcgcttatatgatcttacgcatttgacaagaatgtcgctatatatcttgtatacatatctagcttcatgggcacgtttctatgtccttcactccccacttgtctttagttgataagaaattaatgttatacaacatcaaatgaattgaaagaaagcaagtagtatattttttcggaaacttgaaattaatttactctatcctttttgaaatgtaaggatgtttcaactaaaagcacaaaaattataaagtataattttttttttccaaaaacatcattactatttaattaagattcaaccaattatatataaaaaatattgcataataaaattgttgcaaagtactccttatgtcagttaatttgttgcaacaatatgcaaactttaaaattatttgatactccaacaatttgcaatcaaccaattattttaaaatcaaataattttaaaattttgcatagaaactaaccaaaaaaaaaaggtaacagctggaaggttgagattggttacaaagacgaattatttattatattaagccccaaagctacttgatttgtcgaacaacctctggtctctctgatcatttcaagtctgaattttgttcatccccaacatgaataccattatatatccaagtctcttaagcaaaacccgaagattcagacaaatcctgggttttcttttgtttatctattcctgaaaattcacaactaaatcgaaacagtgtagtgtagtgtactacagatgttgcacacaaggtgttcgacgaaattccccaatactaaaaattgttttttctttttctttaaaccaaagccttatgtcacgtgacactcacgttataaaagccagatttttcttcgatacaattatgttattttctcgttgctcttttttcccgcttcacaatttctctctgaagcaagaaaagccctcgagagacacaagaaagcttaaagaatcttgagaatcgtcttca

SEQ ID NO: 8825 - DNA, 3000 bp, Unknown
  misc_feature (1)..( 3000): cDNA_ID_3043669_gDNA_ID_1971898_Annot_ID_176931 3000 nt of promoter + ATG
cttctataaacactagtcttgtttttcttctacactatgaactttatccaaagactcttgaagaacttgcattgcgactttataatgatccaaagataccgctccttcttcaactacctgaagagagtttttatacaactggtcaaaccattgaacccggtccgtaccatcgacaaaaccagtcaagccgttatcagcgaagtggaggcgtttgtagtcttttctccaccgaggtagaatataccgtaaagggatttcttcaacgccgttgaaattgagaacacatagagcatgtctgcataagtatccgtagaagttgaagcagctacaaatgcaacgtacttcgccaactgatctgttgtacagaacttcgaaatcgcggatttctcttctgctggattcgcctcggacccgttctttcacaaggaagatcacgaaaggtccatcgacatggacctgcgttgtgctgaaacatgagtacatttcttctacctctatttggaatttcttgaacatgtctctcgtgtagattctcgagagctgtgtctcgaaagaacactttgttttaagctccgcggtgttcaaggtttgagactctatgtcgctgagagtttcttccctgtgcttcttctgaagagctagctcgtacttatcgagaaactctttcaatggtgtttgcttgtgaacatacctctcgaaaaatggtttcagggtttctccaggatgagcagcggcgattcctgcaaaaaaagtgtctttgagataaaccggagcccatttagctctctcttcatacaaggaacggagccattcattctcgataaccccaaaattgtgaaccatgaacccccaagctgcttcaaactcaacaacttttaaggtttcgtaaactgctttcgtaaatgccttcctcacggcatcataattatgcagcccccctaatttctctggaattttcctcattatatgtgtcagactgaatctctgatgagatcttgggaacacttgagagatggcagcctctaaaggcttgcatctgtctgtgacaatagtttgaggagaacgcttcatgacactgagccatactttaagcaaccaatggtaagactccattgtctctccagcaagaaaaccacaactaagcaatgtagttttcccatggtgattcactccggtaaatgtcaccagtggaatctcgaattttcctgatatataagaactgtcgatgaagatgacatcgccaaagtaactgcaggaaactttagagaaagcatctgcccagaatacattccgtagttgaccttcatcattcacatccatcaagtaaaaaaagtttggatttgtcaattgcatacggcaaaagtagttgtaaatggctgcagaatctcctctcttaaggttcagcaaatcaggtgacccagtagaattctgaaacttcttgttaagagtcgagtttgggttcacattgctcccattatccaccacacaagctcggtacagcttaatcgtcttagcgtctgagactggactagatacacacttcctcttccttttaaccgatttatataacttacaaccgagtaaatggttatgatcaagtgtaacttcaactacccgccacctcttagaatcaacctgtctcattcttatcatagcaggacaaccagttcgagtttcctttctaacacgattcacatcgttaatcctcttaaaaccttgactactacaacaaagcaccgcaccatacttctctttactacgccgcttaaaccacgaattcttcactcttacacgaaacccaacttcactagcataacagttataatagttataagcatcatcatacgactcaaactccattccaaccgcaggtgcatcgaattcttttctctcatcaacaagtaaaccactctgttcatcaaaccctcccattgtttcttcttcactctttctttcttcgttttgacaaaatccaacatcaatctcatgctcactactacaaactagagcttcttctcctatccgtaaagtatctgacattggatcatctctttcacgaacctcgtcgttctctaaatatgcagatgcttggacctgtaataacaaaaagctataaactttgattctagcaaaccctatttactcaattgaggcatcaaacttgtgaaggagctgaacaaaaatgataatcaacccaatgaaatcaaatgtaacatcatcacaacccttgtgcgaatcgattcataatcttcacaaaatccagaattgaaaagaggagttttagagttaaacacatacatcttcatcaacggactcacttctctccattggaggtttggttcctcttccttcttcaattcgcgggtaaattttgatgaaagcacttgactttattcgattgaaggagaacactcgtgaaattgatcggtccgggatagatccggacgggtcttacacggaaagatccgacccgagagtgatcttgcgcgggtattgacctttgaaagcggttaggtagtttaacttcttcttctgacggtgaggtggtcttttggggctcgactggtgactctagcattttcaccaacatagagacaccttaggcttagggttttcacacacaggttcaaagcacgtgctgcaaacgtcgtcgttcgcacttaaacatatcatttttgtttttccttcacttaagacacttaaacgacaattacactgaaacggagggaatgctatgaaatgaaatccaaaattgcattacatagattccctgaaatgaaatctatgagtctatgacattagtaaaacgcacaaacttgtgaatgtgatatttatgagcttataaaacagcatatataaaaaaaaaatatatcaatttctagattttacccacaatcttaatttatgtcatcattaaccactaatttttcaatattttctctctctttcgaggcgcatatataaatacaggaaatacgcttttttacttaccaatcaaaa

SEQ ID NO: 8826 - DNA, 3000 bp, Unknown
  misc_feature (1)..( 3000): cDNA_ID_2038996_gDNA_ID_1971898_Annot_ID_176930 3000 nt of promoter + ATG
tgtgggatgcctacaaggctatgtgatattctactattattagttatttaggctgttacaaggctttgtgattacctctgtccttttttgttgtatttggaagtcagaaaaatgctcggagggcagcaactactttctctggcctgtatacaaagttcaaaattcagagagtcttataagaatcaaagcagaccagaacagtatgtgtattctcataccagtcttcttgaggcaaatgcccagcaccttcgatgagtcgaagcttaacattttgggggttctgtttctcaaattcctctgctatagactgaggcagatatttatcagctattccccaagccagaagcgtaggtttatcccagctgtgaaggatcaaaacctcagcaaagtaaaagacctatctgtagccgtgtgaatttgtaaaaagttgaaatgcacttacctgcctgatgaaaacccatttgcaatttgactcaatgtgtctccaaagttgatcttcttcgcagtctcgagcaaggctaattcatcagaatctcaggatgagaagtctcttagataatagattaaaccatcataagaatcaagagtaaggtgtgtatcatgctccattcattgaatttggtttagagacgtaccaaagccaggccctccgcttgacaaatatggtagacgatacacatcagctttctcattcttcaggacgtagctatcaaaacagatatagagtaagacaattgtcagtagaagcctctatcaacatcaccaaacacatgcattttgaggctgagctaggagaatagccagtatataatgtctcatctctataatgaagatgatggttaatttgatacatacgggctacctccttcaatgaaccgctcggccaagatagcattttggcaggtgaattcaccaaacaggggaatcctgcatcagaaaaaaaatgaggaaagccaagagatacaaatagattggtgctttcacagagtattgcaagcatttagagtggtcaaaatggcaaaagagttgaacctcagctgcttaaataatccgggaactggggatgaaacggtcagcggactattaaggatcgcgagtttctcaaccttgcttggatttttcaaagcccaagttaaaccatatgaacctacaagaaatcccttgggagaccacaacaaatgcagaaataagatatatattcagtcttgatgaattattaacatattatacacaaatgggataagaacacacatccgaacctgaacaacaagaaagaaaggagatttgacctctagcacttcaagcagtttatcaaacgcctcatggtactctttttctgagaagatttaaaacttattagaacaaagaaccatgtacactgattttgcagttcacaaactattaaatgtaccatcaacgaacctgtgtaattaaaaccgtatccaggctgcggtttgtcactgaatccgaatcctatccagtcaggtgcaaagcaatgaaatccagcatctgacaactattacattgttgggaacacacaaaagatccactcaagcttcatatacatacacatgattcattggaaatcataagagtctttcattagaaacaattgtttcccatatagacacatgattcaagattcagtgtagcacctcagacatgacagttctgtagctaaaagactgagtaggagctccatgaacaaatacaatggttcctcgacgactctcctttgatcctaccggaaaataggaaaatgcttaatcagtgatcaaaaactcttcttgaatccaaaaaacaaacacaaaacttaagtctttaccagtctctctcacaaaccatctaagcttcccagatttgatagttgagccatactctttacctttatcttcagtcctctaaacccacaacataacaatcaacaaaaatataacactatgataaaaaatggaatttgaaatcaatagaagcaaatatgaaccatgcatcttttcaatttcaatcacagttcaaaattgaactgagtaaatatgtgaaatttacgtagagcatttggccgacattgccgtcttccgccggagactctggtaactgaattgcactccggctagacgggttgtctgtaacgaaaccaaatgggttaaaagatggatcctcatcacgatcgtttttactaccaccgctgtttccattctccgacgtggcgtttatgacagagaagcggattttcgacggcgtggcagtgattctagaggcggtggattttgtggcgacggtggaggagaatgagtggagcagaggaagaggagagagcaaagacatttttgattggtaagtaaaaaagcgtatttcctgtatttatatatgcgcctcgaaagagagagaaaatattgaaaaattagtggttaatgatgacataaattaagattgtgggtaaaatctagaaattgatatattttttttttatatatgctgttttataagctcataaatatcacattcacaagtttgtgcgttttactaatgtcatagactcatagatttcatttcagggaatctatgtaatgcaattttggatttcatttcatagcattccctccgtttcagtgtaattgtcgtttaagtgtcttaagtgaaggaaaaacaaaaatgatatgtttaagtgcgaacgacgacgtttgcagcacgtgctttgaacctgtgtgtgaaaaccctaagcctaaggtgtctctatgttggtgaaaatgctagagtcaccagtcgagccccaaaagaccacctcaccgtcagaagaagaagttaaactacctaaccgctttcaaaggtcaatacccgcgcaagatcactctcgggtcggatctttccgtgtaagacccgtccggatctatcccggaccgatcaatttcacgagtgttctccttcaatcgaataaagtcaagtgctttcatcaaaatttacccgcgaattgaagaaggaagaggaaccaaacctccaatg

SEQ ID NO: 8827 - DNA, 3000 bp, Unknown; identical to SEQ ID NO: 8821
  misc_feature (1)..( 3000): cDNA_ID_1989239_gDNA_ID_1971898_Annot_ID_176928 3000 nt of promoter + ATG

SEQ ID NO: 8828 - DNA, 3000 bp, Unknown; identical to SEQ ID NO: 8819
  misc_feature (1)..( 3000): cDNA_ID_1989242_gDNA_ID_1971898_Annot_ID_176921 3000 nt of promoter + ATG

SEQ ID NO: 8829 - DNA, 3000 bp, Unknown
  misc_feature (1)..( 3000): cDNA_ID_3043677_gDNA_ID_1971898_Annot_ID_176917 3000 nt of promoter + ATG
cttcagtattttgttttaaaatcctggctccaatcatattaagcttaggttggtttgttgtaattagctaaagaaaagtaatgacaatatcgagttaataaacaaaataaaaatagggtggcataattctagtgaaaaaattgcagtataacgtttttttccacttgatgcattgaatcacaatcggagccgaagtgtttgtgaaattatctaaacgaggtaatgtcacactattatgatgggagtcccgtcaaatgacctcattatctattgggccatatgaaaaggttttcttatttcatacgatacagtatcgatcgtttccttatatacaagagaagacattagtcttacgacttaacctaattccaacatatggactaagttaatcgaggcccatatggcccaatattatcttcagtgggcccaccctgcttttagaagaaagaaacgaaaatgctcgtcgtttcaccctctatcaatcacgccggaaagcagttcgccggtgagtagagtaccggagttaaaaagttactatctttgtagataaacactaatttgttttcaaaattcgaaaatgttttgaagttccgaaataaaaacaaaaaaattccagtcgtaagaaaagttgtgactggttagtagtactcttgggcaatgccagattgccagctaagggagggagcaacggctcgaacatataccacaatctctctaaaaagcacatttgcagtcatctttcactcatttgcattcgtccaaaacaccgcaaaaaaaaaatattcactcatcggcaacaaagagagaaaagatgcctcctcggtctgtcccacaagccaagatgcaaaggtatttcgaaatcatgttcttcttcttcttcttctctggtttgaactctctctttcgttacttttccaaaaatcggtgttttttttctaatttcttagcatcctctgatttagtctctctgtttactgtgtgtttctctaactttactctttttgtttagttttttcaaaatgatatagtattccagtttctcttcactcatttttgcaatcatgttcgttttctacttttttctacatgttcatgtttgtttctgatacagctttattcttcctctgatttcgttagttcttccaaaaacctgcttttttctagattcttagcatcctctgatttagtagtcttctccgtttgttttcaggatccagaacgtctacttgcactacatgttctcttaatcaacgccattgtcatttcgttggtgttcacggcaatagctgccggtagggatgacaacgaaacaatttccgagtccaactccaacaactcaacaaccgctgctcctcctcctcacagaaacatgcccgaccggatatcggtttgttcctcttcgggatacttttcgtagtatatctcatggtgaaatcctaccaactttctcttgatgacatctggtttcctttcaagaagttcttagatgaaatttcattgtggcttggagttgtgtcccttgttgttctcctgctccttaccactacagtgtttacaatctacattgcagtcccttcagtcatattggcgatagtgggaaggttcatttttgggagaccctgctttctagaattcggctacatcaccttcctacagatatcaaaatggatttgttatctctggcttctaatcgttttgggatgtgcaaagcttagaaggaatttgtttacagggacttcagaggaatccagaatgttactaacagatagggttactaaatcggggaatgcaaaggattcttccctcgtgaagtggaacaagaggattgccgctgcgagagctcgcgcaaccgctgaatctgacagagtggccaaagagaaagccgatattgaagccgatgaggacgctgccgagacagccgaagtcgagctcggcttgatggtggctccggtcaatgcccaataaggcccactttagttttccctcgttctcttttttatgtcgcttgagttttaaataaggcccagtttagccaaaccataagacccaatctagttttttttccttcgtaatatcgttttgtgggcttgttttcttttttagttttggataaatggacttgagcttgtttcttcttgcattacatttatttacacatctgtttagtttagttatgcaaattccacctttgtttcatttgaaaataatcatagaaaattaaaacaatgttaccttaaagtgagattatagttgatctgaaaatgaatataaaggaatctggtttgttcgcttcggtgtccttttaagaatgaaattaaaaaagtcttatttactttacaaacttgagattatagattgccaaaccttctcaagtcttaccaccatattatagtttgaaatggatatcgtgatcatcaagcagaatcactaaatctccaaattcatttttttttttttgtattcaaccacacgtacgtacctatgagccactcttgaagaaaattgggtagggggttataatgtaaaaaaacagattttttgttataattaattggtaaaacatttttgggaaaaaagctaaaaaaactctcaactaattttaattttgaactttaatatccaattgttttagattggaaaataaaaatctaaagtaataaatcgatatatgaaaaaatataatttttttttgagtagttgaataaaacatgcgggttaacagacgttaattttgctaacaaaaactttaaaccgaggttaatggttaaccaaacgtggttaatttggctttgcgaaagactaaaatgtcctcgttcgttttccccaaaatcgattcgttttcaccaaatttcatttgggatcgcgaaagagaaatcccaatttctctctattctgatttcactctatcgttttgtctcctttgatagagtgagaggtgatgattgttagcgtttgatcgggtgaatctatgtttgagtctgttcgtaatctatcgaaaag

SEQ ID NO: 8830 - DNA, 3000 bp, Unknown
  misc_feature (1)..( 3000): cDNA_ID_3043681_gDNA_ID_1971898_Annot_ID_176916 3000 nt of promoter + ATG
atcaaaatgttatatgttgctacatcaggcttgcagtcattagctattatccatcctatactctcagcaggatcaaccttataaccgtgcctatacttagcatcaatgatattattaaggaaccaaacactaacccttaaacccctttctttcacttcactcaaaagtcgatcactcgccacaaaatccccttccttgcagaacccgttaatcattgtaccaaaagtttccaaagtaggcataaatcccttcaacttcaactccttgaaaactaaatacgcattttcgatatcgcccagcttgcagtatccaccaatgattgtgttgtagaacacaatattcggaatacaacctttaccccatcgaccttcaatcagctttctacctacttctacctttccttcattacacatacccttgaccaatatacaagtactgtaattatcaacactatcacctctatcacacatttcgtcatacaccttccgtgcatctccaagtctcctacttttcaccaataaactcaacaacgagttacaagcaataacatcaggcacagaatcatataactcaacaacataatcataaatctccactgctttacttaaacttccagattcagcataagcgtgaagaacatgactcaatgcttcatgtgtaagcttcacattttcgtttctgagattacccaacacatcttcaatctcattgaagatcctatacctcgctaagagcttcagaaacgaagaacaagcgaacccattagaaaagaactcatctttcttctcactcgatagccaatcaaaaagcttaacgccgatttcaacatcctggattcgatcgaatacgaaaggtgaaatgtcgacaaagcggacttcttcatcagcgaagcaatcgtcgagaatttgagaccagttttgttgggttttgaggatggatacagtgtcgctgactagtttcttgatacggggagtaatcggaagatgagatcggaaggaattagatgcatgaggattggagagaggtttgatgcgagagagaagggttttagacattacagacgacggtgagtggtttcgtcgtcaacggcgtttgattcagaagtagagaggaatcagttaggggtggggaagaagagagagaaccggaataaaccaaaccaaaccaaaccgaaatcgaaccaactctgtttatgaaacactctcattacgttttcttttgaattataccgaatcgacttttaaagaaaagctaactaaatagcaccaaatggagttataaattgttttgttctataagttgataagaccgatggttggttattagttatcatcaattgattacgctgaatatctgaattttgtctgtgtatcatcaatcaattgattgcttggtcaggatctatcgtcgtagagccggtgagtcggagagtcgagttttctgggaggtttgtggcgggtttggtgagtcgacggtgaggtgcatcgtcggaaattggtttcttccgatggtggttttcaatccttcttctatgcctcaaagtcgtggaccttgaaaccaccggatctagtgcgaatggttctctgccactgggaatcaacaagttccgagcttccgttctattttctggtgacattttccgatctcttttttgtatctgtttccaagtttgtatggcccaaggcccagtccattgagatttaaaaaaaaaaaaaaaaaaaaaaactttttggatctattgaagatacatggcccggttaacattggttatcctgatctttgtttgatgttctaattaatcatgtatataagtaactacatatgtataagcttagagaaccaactctgtttatgaaccactctcaatttatggattcttcgcccattccacacacttgccttgcctaattctttttttaattaaatattaccatatttgaattccaatacataaactattatattaaaatatttttactaacgtaataggtcaattttttattttattttttgtgcaccacgtaataggtcaattaaactgtgaatcaccatgaccgtcaaataatcatatctattttactttgattacgtaaaatatctgaattttatttcttcacatcgtgtgtaaattctttttggatcagcaagattgttttgtcttttgtccatatgtgccacgtggaccaacgcgtctgtcaccgttagtcactgaatcttttgagccttacaaatcaaattatatgttgttatatagtccaataatttttttcataatttgaaaacttctcttaaaggatttgttttcactagtatctacaagtattgaaatttaagtgaacaaaacttcagtattttgttttaaaatcctggctccaatcatattaagcttaggttggtttgttgtaattagctaaagaaaagtaatgacaatatcgagttaataaacaaaataaaaatagggtggcataattctagtgaaaaaattgcagtataacgtttttttccacttgatgcattgaatcacaatcggagccgaagtgtttgtgaaattatctaaacgaggtaatgtcacactattatgatgggagtcccgtcaaatgacctcattatctattgggccatatgaaaaggttttcttatttcatacgatacagtatcgatcgtttccttatatacaagagaagacattagtcttacgacttaacctaattccaacatatggactaagttaatcgaggcccatatggcccaatattatcttcagtgggcccaccctgcttttagaagaaagaaacgaaaatgctcgtcgtttcaccctctatcaatcacgccggaaagcagttcgccggtgagtagagtaccggagttaaaaagttactatctttgtagataaacactaatttgttttcaaaattcgaaaatgttttgaagttccgaaataaaaacaaaaaaattccagtcgtaagaaaagttgtgactggttagtagtactcttgggca

SEQ ID NO: 8831 - DNA, 3000 bp, Unknown; identical to SEQ ID NO: 8826
  misc_feature (1)..( 3000): cDNA_ID_1989237_gDNA_ID_1971898_Annot_ID_58511 3000 nt of promoter + ATG

SEQ ID NO: 8832 - DNA, 3000 bp, Unknown; identical to SEQ ID NO: 8825
  misc_feature (1)..( 3000): cDNA_ID_1989236_gDNA_ID_1971898_Annot_ID_58512 3000 nt of promoter + ATG

SEQ ID NO: 8833 - DNA, 3000 bp, Unknown
  misc_feature (1)..( 3000): cDNA_ID_1989235_gDNA_ID_1971898_Annot_ID_58513 3000 nt of promoter + ATG
gtgacggccgagtttaggactttagggttttgttcttaaaagaaagaaaaagtaagttactcttagggaaaattaaagaatcccaaaaccacaagtaatctcaggagtctctttgttaaaaaccgaaataattaacgattacatatataacaagaacagagtaaaagaacttccaagagaactccctcggtctaacaccatagaaaactcctcctaatccctttggaagaaggaaataatttcttaaatactctacataaatttgaaacaattagagaaatattcccaaaaccacaagtaatctcaacagtttccgaccaaaaaaaaagacatcgtgccgttttacaattcttaacaacttctcgtttgtatcagaaaatacaagactagccatgtgttggtaacttggtatagataaagatactttaaagatataaagattgacgcatccccaacatcaacaatttttccacttgatagttgatagtttaaatatggcccaaattgaacatcagcaaagtaattaatgaaatctcagtcctcggaaaaatcaagtttaggtgtcaatctttttaccatttaatagaacactatagacataaaaatcaaataagacattaggtgtttggtagtagatattgaaatatctttttagttcttaattgggtcgttatttcaaatatatactacacagacagactatccaagtctcaccattttcatcaatatttacgaggaaatactcaaattaacaccattaagagagacactatatattttacataaagacctggcgctataatgaatcatcatcattgcatttatgacttaatcatattcaacgtatacaatatatatatttgatttactccatagtaactttttcctgatcagataactataacctagctgtttaacaaagaaaaaataaaaaataaaggaacgatttgtattaaaaggtttaaaataatacaaataagtcttacaaccacattgtattctcgacaaaatcatgaatggcaaatacgcgaataatatctctaggttgttttcttgtctttagcctagtactttcgatttcaactcttctatagcttttttgcttcacgttataataatgaacacacaatggcatattataaaaaggataacacatactaaatatctcaccagcaggagtgatacctgagaaagttctgaaatcacctccagggtattcaagcaagccaaaagtaatgttggaccattcttgcttctcagcattctccataatccacatacttatattgttttcgttgctacttatgcatcctaacttcccttggtggttaaaaagacctcgctcagtacacttgggactccacaatgtttcaggagtgcggacatgataaaatctttccgactttacgtcgaaactcatcatgaaaagttcaccataattctcattatcttttcttctaactgctacgtagtaaatagttccgtcaatgcatacccccgcccggctgactgaaatgagttcgtaatcaatattgcctcggatttttctccattgaggacaatctctacccaatgtgaaaacatgaaaagtttgcgtcaactcttgcgagtcattaaccatggccaacactttgtattcattcatgacatggtcgtatccaaagtaacagtgtttgtgtctctttggtgagagtaccattgattcgatcttgggtaaaggaagacattgcctcgtggtagggttgtatatggtaaccaaatcatatactgatgaagaacaacatataaagcctcgaacgtattgatacctgaacgcattatagtggtttcgtccaggcattattgatactttgggttttgtgctttgagagaatgtagacgacacggtgaagaaagttccaggatcacattggtggaagatgaagaccggaagcttatgaggcggctgtctcaaagaccgagccatgatcgactcaacgaagtctctacgtttgcttataatgaatgaccatggctttgagacacatcggaacctcatcaaagattttgtcgggagttttttgagtatctccacaattaggtcaaggggtagatgaacatcttttaattttgataaaagtagttgaaactcttccaatcttttttcttcctcttttaatgatctctgcttgttcaaatatctgataactttaggaacggagaaaaagaaaagaaagacagagaaggcttgcgttcttttattgacactaaacatgtagccggtgcgtggtctacgaaaacttaaactgacactcaaaagaataatcagaaaactgatctgtgaaatattggacaaagataaaagcgtgaagaatgagagtggaggagatgggaagatatcgtaacggcgaagaaaaggattgaatatattgtgttcgataaatagggttttggttaccaaagaagaaaacaattagggtttaatgtgctattattgctaaaccaattctcctaccaaacaaaaagacattgtgccgttttacactaaagacttcgaagtccgaaccacgtcttgttttgtattagaaaaatacaaatacaaatacaaaccatgctgatatatatgaatatatgataaattatttcataaataaattatcaacatggttagcgaaaattatatattcagaaatttacagaaataaaaattcacagtttaaagagatatttttttttttgaaatattttgttacttattatatttgatattttttttttttgaaattatgtttacgtttcttcattcaatgatattttcgtttaaattttttttggatacaattattttacaaaaattgtgtctattaattttcaaaagaagatttatgcttggattaaaataaaataaaatttagagagagtacaactaaagcggaacaactaaacgaagcaataaaaggcgcgaatcgaaggggaaccggagagaccaaaaccctaatttcgccgacgagaaaaaccatg

SEQ ID NO: 8834 - DNA, 3000 bp, Unknown; identical to SEQ ID NO: 8833
  misc_feature (1)..( 3000): cDNA_ID_1989234_gDNA_ID_1971898_Annot_ID_58514 3000 nt of promoter + ATG

SEQ ID NO: 8835 - DNA, 3000 bp, Unknown
  misc_feature (1)..( 3000): cDNA_ID_1989232_gDNA_ID_1971898_Annot_ID_58516 3000 nt of promoter + ATG
ctctctctaaattttattttattttaatccaagcataaatcttcttttgaaaattaatagacacaatttttgtaaaataattgtatccaaaaaaaatttaaacgaaaatatcattgaatgaagaaacgtaaacataatttcaaaaaaaaaaaatatcaaatataataagtaacaaaatatttcaaaaaaaaaaatatctctttaaactgtgaatttttatttctgtaaatttctgaatatataattttcgctaaccatgttgataatttatttatgaaataatttatcatatattcatatatatcagcatggtttgtatttgtatttgtatttttctaatacaaaacaagacgtggttcggacttcgaagtctttagtgtaaaacggcacaatgtctttttgtttggtaggagaattggtttagcaataatagcacattaaaccctaattgttttcttctttggtaaccaaaaccctatttatcgaacacaatatattcaatccttttcttcgccgttacgatatcttcccatctcctccactctcattcttcacgcttttatctttgtccaatatttcacagatcagttttctgattattcttttgagtgtcagtttaagttttcgtagaccacgcaccggctacatgtttagtgtcaataaaagaacgcaagccttctctgtctttcttttctttttctccgttcctaaagttatcagatatttgaacaagcagagatcattaaaagaggaagaaaaaagattggaagagtttcaactacttttatcaaaattaaaagatgttcatctaccccttgacctaattgtggagatactcaaaaaactcccgacaaaatctttgatgaggttccgatgtgtctcaaagccatggtcattcattataagcaaacgtagagacttcgttgagtcgatcatggctcggtctttgagacagccgcctcataagcttccggtcttcatcttccaccaatgtgatcctggaactttcttcaccgtgtcgtctacattctctcaaagcacaaaacccaaagtatcaataatgcctggacgaaaccactataatgcgttcaggtatcaatacgttcgaggctttatatgttgttcttcatcagtatatgatttggttaccatatacaaccctaccacgaggcaatgtcttcctttacccaagatcgaatcaatggtactctcaccaaagagacacaaacactgttactttggatacgaccatgtcatgaatgaatacaaagtgttggccatggttaatgactcgcaagagttgacgcaaacttttcatgttttcacattgggtagagattgtcctcaatggagaaaaatccgaggcaatattgattacgaactcatttcagtcagccgggcgggggtatgcattgacggaactatttactacgtagcagttagaagaaaagataatgagaattatggtgaacttttcatgatgagtttcgacgtaaagtcggaaagattttatcatgtccgcactcctgaaacattgtggagtcccaagtgtactgagcgaggtctttttaaccaccaagggaagttaggatgcataagtagcaacgaaaacaatataagtatgtggattatggagaatgctgagaagcaagaatggtccaacattacttttggcttgcttgaataccctggaggtgatttcagaactttctcaggtatcactcctgctggtgagatatttagtatgtgttatcctttttataatatgccattgtgtgttcattattataacgtgaagcaaaaaagctatagaagagttgaaatcgaaagtactaggctaaagacaagaaaacaacctagagatattattcgcgtatttgccattcatgattttgtcgagaatacaatgtggttgtaagacttatttgtattattttaaaccttttaatacaaatcgttcctttattttttattttttctttgttaaacagctaggttatagttatctgatcaggaaaaagttactatggagtaaatcaaatatatatattgtatacgttgaatatgattaagtcataaatgcaatgatgatgattcattatagcgccaggtctttatgtaaaatatatagtgtctctcttaatggtgttaatttgagtatttcctcgtaaatattgatgaaaatggtgagacttggatagtctgtctgtgtagtatatatttgaaataacgacccaattaagaactaaaaagatatttcaatatctactaccaaacacctaatgtcttatttgatttttatgtctatagtgttctattaaatggtaaaaagattgacacctaaacttgatttttccgaggactgagatttcattaattactttgctgatgttcaatttgggccatatttaaactatcaactatcaagtggaaaaattgttgatgttggggatgcgtcaatctttatatctttaaagtatctttatctataccaagttaccaacacatggctagtcttgtattttctgatacaaacgagaagttgttaagaattgtaaaacggcacgatgtctttttttttggtcggaaactgttgagattacttgtggttttgggaatatttctctaattgtttcaaatttatgtagagtatttaagaaattatttccttcttccaaagggattaggaggagttttctatggtgttagaccgagggagttctcttggaagttcttttactctgttcttgttatatatgtaatcgttaattatttcggtttttaacaaagagactcctgagattacttgtggttttgggattctttaattttccctaagagtaacttactttttctttcttttaagaacaaaaccctaaagtcctaaactcggccgtcacgatatctacatctttcacaattcttgtgagtttccagttatgtttcctagattaccgtcacgttttatttgtttacaaaagaaggagaaaaacagaggtc

SEQ ID NO: 8836 - DNA, 3000 bp, Unknown
  misc_feature (1)..( 3000): cDNA_ID_1989231_gDNA_ID_1971898_Annot_ID_58517 3000 nt of promoter + ATG
cggatgaaccagaaaatggtaatgcagaatgacctaatatcgacctatgcataattattagagaatataacaaaaattaaaaaagtgctcttttatatatatttataagtgctcactaaaacttttttatatatatagtcataaaaggagtgggaggttttggcatgggtgcagcagtagctctccactttgcaacaagttgtgctcttaaccattatactataaatccccgagttgttgttggaatcagcgggtggctttctaaggcgaagtatactcaaataatttctttaaactaagtaaggttacgtttcacatcccattgaatgatgaaagactaattactcaacattgcaggagcctaaaacgaagtatagaatttgcttcatatgaggctccacctcgtgctgcatcgcagtcaatcttacttacacatggacaaagtaattcatgtatctattttcctctttagacagagggaatgctaattaaatctttatatatgataatatgtttcgcaggagatcatgttcctcacctatgtggctgtggagaagaagctgcttttatacttagagaggctggatttagagacgtcaggttcttaccatttgcaaggtatagaaacatcaaatattttactttttagccctgctagctctatatagcatttttggtttgacatttttttgtctaataagtttattgggttatgaatatgtgacataggtttggaccgatcgctcatgagatcaatcgcaacgtaatggtcaaaagctggttagaagagaagctcccgctcgatgttgtgcttgcaaaagaatgtctaccataaagactttcatctatctagctagtgactagtagtttactatcgtcgtttgtttaatttgtcctgaataaattagcgtgactcatgttatgacttatgactaagttattggttttttcagactttacggtagtttgttttttccccgttggtgctatcaagttgtcgcaaccttttttaacaattaaataattattaattaactatgttgcaatcttcttataagtatacatgagtaatatatatttgaattaagccaagatataacgtaaattgataaacctatacgtatttggtaatgaaagtatgtgattagatgatagatatacatccatacaatttagtttttgaaagtgtcaatttcctttctctatacaaactacttcaatcattcaccatatgttaattaatataaactcgaactagccattatcatttatcaagttgcattagaaacagataagacattaggtatatggttgcagattaattttttctgtttctttcaattaattttattgttttccttcctaattcttcagttttttcggttggcgattattaactggtaacctttttcgaaatagcaacaagaagaaagagatggtaataattgaagtattatttttttcaaacgtaatgagtaatttagtaacccaaagatgttgttaattagaacaccaaattgataatgtgaccaacgaacatcttgaccttctgatatatcactctccaccttctagccttgtgcatgttgttgcttgggtagcttctagaaacaccatattcaacatcatatttgcaagttattcctccaagcttctgtctataagatttggaaggaaaataactctatatgacgttcttttgttttattctaacaaacccgaattttattatatatattttttagaaaccaccaaaattgataatcaggttttaagatagcttcgacatctcacgtctagagatttgaaggtatagtttgtgtgacttaaaaaaaaaattgaaatattaaagtttacgtgctccacaatgagaatgtaatattaaagtttacgtgttgggattgaaaattctttttgtttggaacgcactcgtgactcacttagtcatctggaattacttatttcctataaatatttgaagttgttgtactcatagtcaagattattttcctgtgtggtttccttaatttaactctatactagttatgggattcatagttgttacttgttagtaatttgcatttatgtgtacgtattctttaagtttggaccacacttatgccccaattagaaatttgaagcgactaagattttctaaatacctaattttattttattttattttacagctcctaaataccttaattagttatacttttgctttaagtttggaccactaatgactgaattcgtcatttgaaacgactcatcccatatcaaatatcttgccaaaatgtgtaccaactaaagtaaaactatttagtaaaaaaattcatagatgcatgccctgtagagtgtagtatttataaaatgaattatggtattggtttttaagatttaacattagtctacgtgtaaaattctaaaacctctactaattatgagatttatagatatcgtaaattttccaaatatgtatatagctgtataccaattaatcaaagtaagactaagacaaataatatgaaatacataattggttccagctaaagtacacagaagatatcaatgtcataggttcaatttcgatgatacttattacttatgatttcgatgatatcataagttcaatttccttttatatcttttcatagaactagaaagaagaaaaaattagtccctaggtgtggttccaaaaattgataatgaaacatctgattatgtttccttcattaattagtgaccaaccaatatatttgacattttgatttagtgagatagaaaaaaagaaatggaatattctctctcccatcaggtttgtgctttttgggtgtataaatacacatcgttcctcacatatttccaccatcactggcttccgaaactcctctcaaaaatatagaaaagaaaatcctttaacaaaaaacagatatagaaaaatctgctaagtaaaaaaataaaaataaaagaactagtcaagttttttctcatcaaaacatg

SEQ ID NO: 8837 - DNA, 3000 bp, Unknown; identical to SEQ ID NO: 8824
  misc_feature (1)..( 3000): cDNA_ID_1989229_gDNA_ID_1971898_Annot_ID_58519 3000 nt of promoter + ATG
